United States Patent Application Publication US 2014/0057251 A1 - sequence listing, part 147

SEQ ID NO: 288558 - DNA, 810 bp, Cannabis indica
ttaggttgcagcgcaagttgcaatatgagtttctatgtagaattctgtaaaaatgcaaaacaaaaaaaaaaaaactattttgaagtgtaaaaataaaaaagccactaatttttaaaaaatatcactaactactcacaaaacggcacatctaaaaattataaaataccactcatacctaataacaatccacatatatatagggacatgattttgttccgcgatgtacttttacggaatgtattccgtgatgtacgccaaccgttagatgggggagtaatttgatctgaggactggggttgatctaggagtaattagggttaaaaatggtaacttaccttgagacctatctaatgtacccagaaacccatttattgtaccacgaaatatatttcgtgaaagtacatcacgggacaaaatcatgttcctatatatatactagttaactaaaccgcgctttcacacggtcttttattcttgtagtgatcttatgaaataatgtaatttttttaaaaaaatgttacaattgtaaagattatattaaaaacttgaaatgtatttaaatatgaattattgttaatgactttgttttcttcatagcactatatcatgtgtgcaactaatttgacatgttaagaaacacaaaaaataatagagagaaagagtaagaaagcttaataatactcattaagatttgtttttatatatatagggtatttctattataggtcctaatgtattgcacttatactataggaaaactattttcaccaatcataacctaaaagagagaaggtgtacatagcttttgtt

SEQ ID NO: 288559 - DNA, 750 bp, Cannabis indica
aaaagtaataggaaaataatatccaaataacaacaaaaaataatatacaagtaaccaccaaaaaaaaaaaaagaacaaattaacaagagtacaacataaaaataacatcaaaagaattgtattttttgttaaataaaaatacataaaaatacataaaaataatttaaaattaccgtacaactatatttttgttaatctttttttgttgtttttgtgtatttgtgaaataatcccaaaagaattacacatatggtgatgacattattatcgctatgtattgtagacaatgtataagaacaggtattgtagacactttctgctacgacaaagcattgtttcgattcagccatacatgatacaacattgtagcaatagccatggaaaaaaaaaatttacttgaatggagataggcatcttcgggaagtccacttcagcagcgacccaagcttacactacaaaatactgctacctttagtaacaattttttaggcataacataatttttttcgtgactaaatgtgacttttagtcgtaaaaaaatgttacttgtgattaaaacatagtacaatatttagatacaagttgttactaatttagttttagtcacaataactattgtgattaaaaatatatttagtcccaacgaattataatttttgtaactaacatctttagccacggatcttttagtcacaacatgagcataattatttataattagtcataattttttcactttttaatcacaaa

SEQ ID NO: 288560 - DNA, 601 bp, Cannabis indica
ccgatcagtccaaacaaacttctggttctttcgggtcagctccgttaagggtacaacaatctttgaaaatccctcaacgaaccgacgataataaccagccaaacccagaaaacttctgacctctgtagctgacttcggtactggccaatcccgaacagcttcaattattgtcggatccactatgatcccatctttatccactatgtgccccagaaatgagacacgggataaccaaaactcacacttcttgaatttagcatacagcttattgtcccgtaatcattgtgaaactgatctgagatgcaactcatgttctttatctgtttcagattacaccaagatgtcatcgataaacacgatcacacatctaatcaggtaatcttggaacgtccgattcatataatctatatcaagtatactacgtagctttggcccatctttcaccctgatggtgattcttacatttcggacattcaagatatgacttgaaagaggattcgtgaccttgacggtcacctcaatttccccgatactttctattactccctgatacttcgaaagcctcagccttccgtttgtaatcagggttgccactgtcggt

SEQ ID NO: 288561 - DNA, 613 bp, Cannabis indica
aaataaacaaaagacgaaacataaatcatggatcaactaagccctctagcggacacttttctaagaaatcactttctgaatactctcttaagacaatgggctatttgcaaaaattaaaataaaaagtatacccaaagcaaaagcgtgcttacaagagaaaggaatatgattaaacagccatttcaaaaaaattgacattcaacatctcaagcattaatttataattataaaaaactacaatatcaaggacatcaatggaacagttcgcttcttgaaagagctatggaagcctatttttattgataggagccaaaagaacggtaccaaaactccatgttatccgagaaactttgcaaaactccctgagaaacctcttactctaaaaaatcacaaaatcaatccatggccttcataacacttaatctgagtacttataagctaatctaacaaggacccgtagccagccaaccattgaaaatataagtatttgagaacttcacttaaaaacattacatctcagccactaaagacttgacaacttagcaaccatcatccaaattagtttttcttgtgcatttttggggaattaccccatatactatttttttaattt

SEQ ID NO: 288562 - DNA, 163 bp, Cannabis indica
aaaaaaaatgcgagctgtacggacggtatgctgtgcatacacgtccgcgcgcgcatgaggagtgctcggccgagaaatcagggtatccgcgcgcgcagggcttattcagacagcaagctcggtcgttgctttctgaattcgtgctgtccgcgcgcgtgggtga

SEQ ID NO: 288563 - DNA, 819 bp, Cannabis indica
gaaaagattcagatttgaaactcattggttgaaagatactgaatgccgtgacattgttactcaagcgtggttgtctccagatgttcctttggatcaccaagacagtattcttgatatttttgggaggtgtgctgatcgattaggggcttggaacaaaaccaagttcggctcaatcccaaagttggtgcgtgaaactcagaaacagttggatgatcttctcagtgtagatgccccgttggttcgaatggatgaagttaaacgccttgagattaagttgaatgatttgttatccagggaggagtgttattggaggttgagatctagggcggattggcttgctatgggtgatcggaatacaaagtattttcataataaagctacgggaaggaagaagaagaatgcgattgtggaaatcatgacggaagatggtaggaagttcactacggaagaggatattgtgggtgagattgaacattactttggtaccattttttcttcgacatctccatcgccacaacaagtggaaaatggtattgccaatatcggtgctacaatttctcaagaagagtgtgataagcttgaatcgcctttcacttatgaggatgtggtgtgtgcggttaaggctattggggctactaaggctcctgggccggatgggtttcatgctattttctttcagaaatattgggatattgttggtccacggggttttcagcggtgtgccttgcgattttgaatggtcaccaatcggtcagaaagtttaataagtcgaatgtggtgttgattccaaaagtctctaagccgtcgctggtcaaggag

SEQ ID NO: 288564 - DNA, 568 bp, Cannabis indica
caacacgtttcctcccatgcggcattaaatgcgaaatgactgctcaggggaagcctgacacctcgtggagatgctttgatgttacttaggcttccgggagcatagggggctccgtatgccttctccgggaggcacgtcccggatgctgccttctttcataaagacttagcaaataattcaagtattaagatgttttgatccacgtgtccctgtccggttggtccacgtatattgggcaaaatcaggggcaacaaccatatcatagtgcaacaggagcattgatgtatcttgctaattgtacaagacctgatatagctttctctgtcaatttattagcaagatttaattttgctccaacatatagacattggaaagggattaagcacatactctgctatctccaggttactattgataaaggattattctattctaataattgtgggtcacaacttattggctacgcagatgcaggatatttatctgatccacataaagccagatctcaaactggccatttgttcacttgcggtgacactgctatatcctggcggtcaacaaagcaaac

SEQ ID NO: 288565 - DNA, 505 bp, Cannabis indica
ttttcggctggttgcatgggattctagggctgggattttcattgattttcagctagcttcaacctaagtttgtgatctcttgattgtggtatgtgattcctagcttcttcctttattttcttgaataaaaatggtgaaaatatgagttatgcatggattatttggatgttgttgctgctgtgttttgttgtaagattctgtgatttaagcttgttaatttgaagttatttaggttgttagtaatgcatgttaattgctttgcttcaagttgggaatttttaactcaaaaatatggttttcaaagagaaatgaattgaatctgttgctgtgattgttgatgtttttaattgtttccagaggctatattatgcttgtttaagaagattcaagttggtttgaatgcatgttaggtgattttactcaagtttgagtttagaactcaaagcttgagccttaatggcaatttttgctatggtgcaatctgggtggttttgttgccttagaa

SEQ ID NO: 288566 - DNA, 789 bp, Cannabis indica
tattttcatgctttgtattttctgctggtttttgctaacgacgctgtttttgttctgtgcagacatgtctcgacagattatcgacgctttaaggaagaggaagagcggaagctctagcgcctcccctccggccaagaaatctaaggtgggagaggggtcttcagagaagagaccttctggagaggttattgaccttttcgaggagctgactactgcgaatccttccactcccaaatctgccaagtctaaggagtctgggccaccaacaactgggtccgaactggtcaggagagtccctgagcgggtgcaggcaccaacttcacccgtgcctgtgctgcctgaggccaagaagggcaaggaggtgctggctcactacatgaaccggcgggttcctgaggtcggtgagcaattggctggtgctgatgactcatctctggatgtgttggtgggcggagtcttgaaggagctgactagggttagtcttttcttttcgatacttcccttttagctcttcatacttagctccatatgctgactttttcctttatgcaggcgggttagaagttagcttacacctactcccgggctaaatctgctacttccaagagtgcggctctgtccgacaccttgaaagcggaggcggacttggccaagaaggaagctgaggaggccaaggcggagactgcagctgttcgtcatgagttggggtgaggccaaacaagaagctatttgcccccgagaagaagatcaccgtgctgaaaaaaggacctcgaggtctgctgatcgctt

SEQ ID NO: 288567 - DNA, 547 bp, Cannabis indica
atacatttaatacaaaccaattcatactctaaattaaataaactagatacataaacataaatatgacatttaaaataagttttatatatgtatggtaaaccaaaccccataaagaagtctaaaaatacaacaatgccaaaaaaaagtgcacaaatttaaaagtatcatattgaagaaataaagttttaaaatcttaattttcaaaaagataaaattggtatttaatattttgtttaaaaagatattattaataaatagaaagtacattcctattaggcactagtggtacctaatagagttgggcatccaattcaattcaactttttttccctcatccgattcaatctaatcagtaattaaatttgaaaaattatcatccgatccaaactaattagatcttaaaatccaatctaatccagtccaattactaattagatttgatcggtttttaaatagatatccaattacatacatatcaacttaaaaatatgaaaaaaaaaataacgtaaaaactaataagtatcaccttctatttaagtttaatact

SEQ ID NO: 288568 - DNA, 582 bp, Cannabis indica
tttattgtaaaaaaaaacttaattataaattaaaaaaaaaatgtttgcaatattatgagagcagggaataaaatcccaaacttgaaatccaaattgttttaaaattgaaacaattaattcaaaagtaaataaataaatgagcttcttctttatctttgacgaactccatccataatccagctttcagatccaactcgctaagacagcatccgagtttaagaagcttgagctataagaagaaaaataaacaaggttagtagtccagaattaataatccaaatggataataattcactaaaacacatcagtttataaagaaataccttgtttctttgcaagaagcttaggacattggggtttccaatggcctttctcattgcagtagaaacattttccttttggtgtatcaccagaagctgcagcctttttgttcttagctgctttcacagcttgagctcgcttcttggcatttttccacttcttcttattcttggatttggaagtagaggcaacgtgtgcctcaggattattcgtcctattaccatttccagaattctgaggtttactccctctcttcttggg

SEQ ID NO: 288569 - DNA, 513 bp, Cannabis indica
tttagaaagttcatatttaggttgttaataaacatacctgtgagtagatctaagatcctggtaaaataatttccaacaatttgctccctttctctttcgaggacttttatctttggaaccgactggtctaccacatttcaaacgtgctttagaatcattagttatgtccttttgggacttcaattcgaattggagcattttcagccggaatatgtgattttgtaattttctttgggtcagtgaacgcatctggtaattgatttgtaatattttgcaaatgaattattctttgaacttcaagttcacattgatttgtacgaggatcaaatttagataatgattatgcattccatataatttctttttccagctgtttcttttctcctccccttaaagctgggaaacttgtcttatcaaatgacaagggaaattttattttgaatgcttcaaaaaataccttttaacaaaatttagactcataataatttatacaatttaatgctattgttttca

SEQ ID NO: 288570 - DNA, 1109 bp, Cannabis indica
tttttagacagatgttatcttcaattatcaacaattcagagatttgattttttaattttcttttttatcttacacacaacaattacgttgtgtttccttaagtatcatgaacatcaatttttagtttattttttaattaacttaagatcatatttaaattatcaagctttcttaaatactaatatattgcatctggtatttttttttaattgttaaaattattaattatattatttagatatacataataataagagattatttcacaaaaacatgaaaacaacaaaaaaattacaaaaatacggtgtcacggaattttaaacttttttacgatttttttgattttatttacagaaaatacggtctttttatgttgtaatcttgttaattttttgttgatttttttattatatgtatgtaattttttgttgttattttgatattatttttatgtaattttcttgttgattttatatgttgttttcgtgttattttttggaaaaccgtaaaaatgtaaaaaaatattctttgaacgtaaaaatgtaaatattttacaaaaaatagtgccttatataattattcctaataataatctcacctaataactaacaatatatatttttttaatttttaattgtatcattttttaaataaagtaaaaagtacttagcataaattttaatatacgtgccttgtacgtaattttttaatagtatgtatatatagaaagagaaatgctaaagggcaccagtggtgcctagcaccctcctatgtgtcaatatcgttattggtccaactaagtatcgggtcccatataattttatataataacttttagggagtatcgctagccatcgtaacgcgacatgtcgagaaggtgctaacaatgctcatatagaaataacaattacacaaacaatctaccaagtattctaatttctaattttctgtgcaatgcaattatgtgtttcgaaaatggtacccctctttgagtgtcatcatgtttgattgttggcatattaaagatgggctataaagggtggaatttaagaatattttatttaaggaaatatatttatatttaaagaaataaatttctatttaaggaa

SEQ ID NO: 288571 - DNA, 630 bp, Cannabis indica
gaacttgccggggttcacttctctcccctccctttacttcttcccagacggcccctcctctaaagatttcttctagtgctcctccagacactattgacttagtggatgatgaggtgctcccgggagaaggtcaagaaaagcaatggggcttttctgaggaagttgaagaaggtgaaggaggacaccgggctcttcctgaggaagttgaagaagagcaagaaattgctctgattcgcaaacgcaaagaaaaattggttgcccaggaggagcccaaacggccatggagagctgatactccggcccacggtcttgatggcggggtctctcccatggaggaacacactgcccctcccaatattgtgctgacactagttcctggagatgaggtgagacaggagctccgaatagctaaacacaactacgccatggatgaatactcccgggggtatgctgaggtggaagcccttaggagggtcttgcgagttgagatgcaaagcactctcaacaacccagaataccagaatccgtgggaccttaatttggatcccctgtcggactggttcggtcgcttcctcgggcccaccttagctccctttgctacggagatgactggcgagtttgcgtcccagc

SEQ ID NO: 288572 - DNA, 537 bp, Cannabis indica
tatattttatgttatatggtatataagttttattgtatagtatatcattttattttagataatgcatgtttagtttttattttagtatacataaaggtgatatataattttgttaatatgatatatataattttttttaataatattatattattttgttttattttttattgtaggtatatacgttttattgtatggtatatgatttttgttgtctataatatattatttatatttaatatgatatttagtttctattttattgtatataaattttttggtatgtattcatattttaatggtgatatatataattttgttagcatgatatatatattttttgagtattaatttagtattgttataatttctttgtggtatataattttattactacggtatattaattttctgtactacgatatatctaatactgctgtatatatttaaatgatctaatatatttatttatttttgttacaatataataatatgcaatactaaaaaaaattatgtaacttaattttgttattatat

SEQ ID NO: 288573 - DNA, 502 bp, Cannabis indica
aaattagaacctcaacaagaatcgccaaactaggacccaagtacaagactatgacaaggaccaggacccggacccagacatagaaccgaacacagacctaggctcagacccaaactgagactggaactcgagccgggaaacggtcgtgtacccagctctgaattgagacccaaacctagacctaaatctttgacctgatcccaaacacagacttggacctagatagagattcggatctgaacgtggactcggaccaagacctagactgggatcgaaatgctagacctagatctggaccgggatcctgacccagacccaaacttggacccgcactcgggaccccaacttggacctggactcgaacttagacccagatcggggtcctgacctggacacaaacccgaacacagactcagacacgaactcaaacccacacctagaatcagacccaaagctagacccggacgcggacccaaactcgaacccaaaaaaggataagaac

SEQ ID NO: 288574 - DNA, 735 bp, Cannabis indica
caagaacctaattaaccatggcttcgtcttgtccgaatttgggggcatggacgaagtcatgaagatccttcaggatttgactgctgaaaggcggacgtaccaggaggatgctgagcgccgggaggcccttgccaaggccaagttcgaggaagaggccaggcggagggaggcacaagcggaggcgatgatccgggatgaggcccttcggagggataggctggaggccaagcaccaggaggagctgagggcggagggcgaggctactgccaaggccaaacgtgagcttcgggaggctagggaagccttggatgaaatggctgccaaggtgaagtccctagaggaagttcaccaggcagacttggagtctagggccaacttggccgtggagctgaaggagctcaaggacttcaaagaccaagccttgaagaaggctaagaaagatgagctcctttctcccgtctcctgcagccggtgcgtcaagcgtttcgacgatggcgtctacatggcctggtctacaaatggccagaacatcaagctcgacttctaccccaaacccgcggagatgattgctaaattccgggagaagaagaagaaactcgatgccatgctggaggcgcgcattggtcctcgccttcctcctcgcattgactagccgttgtgaatttgacccagatttttcttattatttattttttttttatttacagccaattctcttatatttaagacaatttt

SEQ ID NO: 288575 - DNA, 536 bp, Cannabis indica
caataaaaggatcaagaaagtgttaatagaaaacgagagctcagtaaatatcctttacaaggaaatgctgagaaacatggagctcgaaaaagccaaattgaggccttgtatggtgaatctttgcggattcactggggacagcatcgccagtctaggcataattgagctcgcattgaccttgggcgaggcatccctatccgccactgttacgcaagatttcctagtttttgacttgccatcggcttacaacatattgttgggtcatctagcattgatcaaactaaggacagtcagttcgattgaacacctatctttgaagttccaaacaccagagggtgtgggagtggtgcaaggcgaccagatgatggctcgtgattgctatcgcatagagttctagcaaggaaagtcggtcaccaattaatgacgatcttggaagaagaaaatgaaaaaaaaagcaaagatcttgaccccaagtcagaagaagaactataagcaatgagatgatagtatctaccagaatccacaagtgtgtatca

SEQ ID NO: 288576 - DNA, 733 bp, Cannabis indica
ctatcttcattctctttctcttctttttctttttcttttatctacttttagattttatgactactatttattgatttatatagaaaaacttgtcctacatttttttttcataaaacataggacaaaaaaaaactttttcccttaattaattattatacttatagactcttgtccatgaatgattttgcttagcaaaaatacccctcaaattatagttcttgtaaatttttattccttctatttaaaaaattcacggtttacagataataaatattttatggtatttcattaattaattattttttattttaaaaaataagtaataattattttaaaactaaaagttgatacagactgactttttaattccttaaaaataataataaaataaatacaaaccaaataattatatcaaactttatttaaataattaaaactttctttttgggtaaaataaaacacttataatatcaacattaaaattgaaatataaatctataaacaaataatattatacttgaaataaaaattaagaacttaaataaatctcaacaaaaagtatgaagaaataaagggagtgagcaacgctggctgaagaaaaagaaattcagtgctggttggataatcaataaaaaaacaatttttgtttaattaattaaaaactaaagagaaactgaaaattttgttaagtaaaattagaaaaaaaaaattcaaaatgattcctaaacatgct

SEQ ID NO: 288577 - DNA, 359 bp, Cannabis indica
caatgatccgggagaaggcccttcggagagacaggctggaggccaggcaccaagaagagctgaggacggagggtgaagccactgctaaggccagacgggagcttcgggatgccagggaagccttggaggaaatggctgccaaggtgaggtccttagaggaaactcaccaggcaaacttggaatccagggccaccctggctgcggagctgaaggagctcagagacttcaaggaccaagcctcaaagaaggcaaaaagagatgagcttctttctcctgtctcctgcagtcggtgcgccacgcgttttgatgatggcgtcttcatggcctggtcttcaaatgaccagaacatcaagcttacc

SEQ ID NO: 288578 - DNA, 574 bp, Cannabis indica
acgaggaatggacgactccagttcgcgagtcaggtgaggaagaggaggaggcggaagggagtgggacagattcggtcgacgattcccagctgaacgagcccttcgcgtgtgaggatttaatctcgagagtttccaaatcagacttcaccacctttgtgaggttaaatttgctgcgactcgcgtttcagcgacctaagccatctcagagagcgcatcttccatttactaaccctgcgatcattcccacagaggatgtggtagtctcaatacccattcttcggtgtggggtatcggtcccctttcaccccttcatcgcagctattctcaggcgatatgatgtatcgccctttcagctaactccaaacagctaccgcactgccctagccttctatgcgatgtacatggagtatgtccatagggctccctcagtagaagagttcagctatttctacgacataaaaagcgtaggtcttcataatggcttctactgctttagcaaatgggcgacttctgaaatcaacggagttgaaggaatggtgtcgaacatgggggattggaaatcgaagtggtttta

SEQ ID NO: 288579 - DNA, 590 bp, Cannabis indica
tgtaagtaacataaatagtaagtaatttattagttatttaaaaattaattgcaattcaataataatttaatgactaaaactaatgtaaccatagtaataattgaaacttcttttatattttaactagggaactaagtcgcgcttcgcgcgggttcgatctcacttttataattcttttaattattttaatgaatttttttacattttatttaaaatataatttaaaataaataatattcattagtattagcttactacaaattaggcaataataaaataatagagttgtaaaatgtaaatacatgctgcttttgaggtccaagaaactactcaaaagatgagcatattgaattgtatgatttttttttattattatagattaaaaaaaaaaggtaaaatacatagttaaaaaaaaaaacaaatactgatttttatatttattgagaaagtataacaaaaaaaaatctatagcatctgtaaaattttcctatatatttattaataattattgatgattgatattaatatatatgggtacactcttaatgggtattacccattcatagtaatattatgaaaaattgagtttt

SEQ ID NO: 288580 - DNA, 586 bp, Cannabis indica
ctcccagcccaatctatgttggtccatgggtccaatcgatgagatgattcaaatttttgagagaaagcaaggagagtgggatttcaattccccaagcggatcccttgcgaaatcaatatgagttgagctgtggacgctttcagtttctctggtcacttacgtcgtttcagtgcgttgtagtccttctaacgtatcttgtgattggaagaaactagtaacaggaaaggaacctaaacctgtaattagagtgaaagcaatgaaacaagtgagtgaactacgggtgtaggacacgaacgatagggggttcggggggatgtgccccctgaaacgtgtgctaggggggatcggggggaagttccccccgtccccgattcctcttattggagaactagtctagtagaaagtcacacagtatgtagtgaagttagttgtggggtaccggagtcactactctcccaacgaactcaccgaatccagttcgacctagggttgtacggagtgacactcaacccttcgacctagtgttgtacggagtgtcacacagtatgtagtgaagttagatgtggggtaccggagtcactactct

SEQ ID NO: 288581 - DNA, 520 bp, Cannabis indica
aagcttattttaattatttcattaaatattcctatttaagttataaattagttatttttaactgatttttcttatcaaacttaaatttgaatattttttgaatttaaaattaagttgaggaattctaggaattggttattgaagattcttgagatattttttaagttaattttaaacttaaaatggaatattttcaaaattaggtggttacaacttaattttgatatttaattgaatttaaatttgaaaatatttaagtttttttttagattctttctataacaacttaaattagatatttttcaaatttttgaaaagatacttagttaaattgagatattttctagatagttatttctagactagttattatttctaatattaaaataggaaaatatcatagattgtgaaattaattgttttataattaattttggtacaattcaagttaagaatatttttcctagtattaaactagaattaataattaagccttctctatacttaattatttatttct

SEQ ID NO: 288582 - DNA, 648 bp, Cannabis indica
ctcttggttacgcatgttgttcagactagatggatgccaggcgaaataccaggagttagggcaactcggtcgggtcaaatgaaggttagggagctcagtttcccctaaatgctcggggccgaggtagaggtgccaggggtagggcacatggtcagggtgatgctaacccgccacaggcttcccaagctactcaggaagcccagaactgggaaaacaggtttgcagaaatgcaaactaaaatcaacgaacaagaagaagtgattagacagttaagacagcagggtgctcctgcagtgcctgctccagaaattccagtgccacctgcccctactgtccaggccgaaccagtggttgtaatgaatcggatggagcctctgtatgaaaggttccgtaagcaggcacctctggtttttctgggaggtccagatgttatgaaagccgagtagtggctaactgtgatcaccaagatattgaatttcatgggcgtcaccggaaatgatagggtggtctgtgccacttttcaatttcaagaagatgctttagtttggtgggacatggtgtccatgatacatgacgttactactatgacctgagagaaattccaggagctgtttaatgccaagtactataatgaggctgtcagaagtg

SEQ ID NO: 288583 - DNA, 569 bp, Cannabis indica
cattatgattatgttccatatcccccaaattacataaacttacaatttgaaaagtttgatgggataaatgggtcccccaaagaacatctggcgtactttgtctcggcatgtggtgaatctgctcagtcagatccattactcataagacaattcgtacaatcgcttaaaggggtggcattcacttggtatacacaattaccaccaggatcgataatcacatgggatgacatgcaaagagccttcattgctcagttttgtaagctcaataagaaaagtcactcttagtgacttagctgaaactaagcaaagaccagatgaatctgtcaatgaatttattgctagatggagaagtgttcgacttcaatgtccagaaaaatttgtctgagctatctgcagttcaattgtgtagacaaaatctcattcccgagatagcagtttacttatgctccacagaacctgaaactttcaatgagctcgttccaaagcaagtaatgttgagtgcaataactcgtcaaacgacatgtcatatgaaatatgaatcaatggctaccttgtaatatgacaaaggc

SEQ ID NO: 288584 - DNA, 714 bp, Cannabis indica
tcttattttgtcaactccattgttaatgatgtaaaaagaatcatatattatagattgcaagtggttaaaaatagatgtttgagggggtatgagagaaaatttgtagagagtttattttgattggggggttgccccttgcttgtatttgtacagatttgttcagttgttgattaatgaagctttccttcttgatcaaaaaaaaaatatctacatcgtaaatatttaaaatatttcacaaagactcaagaaatttaaataaatttataatacaaaaagtagagtttaattacacaatttattttatatgcatataaaataaactaaaaaatacgagtgcaaatgcaatagacattttgaactttattttcagtatattaaattattttaaatcttttaaaattttgttgaatgtcctaaatatgtactctgtcattaaaaaaaataactatttggattccaaaaacataataaatacatcagtacacttttctaaaaaagtgcaccatagaatttctcaaaagtctatatttcttttgtgggtaaatggcggcaaaaacccccaaaattttcattttggtttcacttaccccaaacccaaatttgggcggtaaaacccccaaaactcgtgttctgttagcaatttacacttctgtcccttttaggtgttaattgtcatgttggactggacacagtgtacacgtgtcacaattttat

SEQ ID NO: 288585 - DNA, 824 bp, Cannabis indica
tggggatgaggattttggtggctggtttgaagatttctgtaacactcatctggctgagaagattgataagctggcaatgattctttggagtgtttgggggcccgtaatgatttactttggaataataaggctacttctgtggaaaaagttatttcatctgcaattacgtaccttgaactttagaagtttgctcaaaataaaaatggaggagtttcatcttcttctagtcagccttgtgctggtgttgagcattggattaaaccgtctttgggagagttgaaggttaattgtgatgctgctcctttttcaagagagaggagtcatgagttggggtggattgctagagatcattctggtttgtgctttgctgctgctgccgtcaaacttcgaggtgaaattgaccttgttgttgctgaggcgttgtcaatgaaggaggctttgagttaggttaaatcatgctgggaagaaggaagtgcttctgaagattttcgtcctacaacggtgattatggagtcggactgtctcttgttggttaatgctatcaataacaagagccaaattctttctcctcttggtcttattatttcggattgtattaatcttatacagtcctttactatttttcatatttcagttcagtttgttaaacgatctgggaaccaagcggctaactagttattaaactaactaactattttgtcaaagtattttctcttttttctctatcaaaagaaattccagcaatattgaataaaaccataatgaaatgatgatacaactataaatcaacttgaaaaaacttggaacttaactccaattaacat

SEQ ID NO: 288586 - DNA, 583 bp, Cannabis indica
atatatatataaaacatggaagtataatgtagaaatgtacctttagcaaggaacccagttgcaccagttacaaaaaagctttttcctctgagaaaacttacaattccaataccatcatgcatttccaatgaagagtttgattgtgatcctccatatgggaccaattccttgactgcaatgccattctctgcctgagttttcccattgggagacaaaaccaagctcccattttccacaaccacagcagctccatgatcagtgctcattgcagaagaggcagctgctgcagctgctcttggactcaaaacagaagagaatgatccaatagtctttatgacattcccaccaccttggcaacgcaccaagctgaaattgttcctccttgagaggctgcagccgcgcttttcggggactcttgcaagaacaacaggagaaatggaagaagaagagttgaggaacaaagctcccatgatcataaaactaagtgggagtgaagtaggaaaaaaaagtttatgaagaaagaaaaggaaaaaaaaaagaaaagaaaaaaaattatttaatttttatttataattttttttaa

SEQ ID NO: 288587 - DNA, 1029 bp, Cannabis indica
tttgatttgaagtctacccctaacaaggcaggtcggggtacttctatatctctcaggcaggcttcaagtggttgactggcacggatgccaaggccatcacaaaatagggcattttgctgatgagtacttcatggtgaaggatccgagcattacccggactcagtttcagtagattccgacatatcaccgccctcccctcactcttgctcttagggatagagctcagaaacttgcccagttgccgggggaagacaggaatattatccaattgacctccgatgataatctggtgaagtacgggctctatcccgaggacttttctcctaagtccgtggcggggaagaagaggaagtctgatgctggccggcctgaacgagctcataaggagaatgagctgattcaacttaagcgcgaggctaagttgaaaggaggtgtcaaggccaagcaatatgctcaggagcctttgaatcctgaagatgaggccgaggacgagcaggtgaccccactgaagaggaagaagaaactcctggccacgcccaggcctgttgaacatgcaattcgcataagggagcccttttcacctgttcgaccatctcccccctttgccggcaaagggaaggctgtcatgtctgagataaaatcaagtgcaggtgatgatggacttctgagtctctatgcgggcggtcaccttgcattttactttgttcttgagcttcttgattttcatgtcttgtgttttctgatggctgttttctaaccatactgtttttgttctgtgcagacatgtctcggctgatgatcgatgctctgaggaagataatgggcggaagctctagcgcctctcctccagccaagaagtccaagggcggtgaggggtcctctttgacgaaaaagagaccttgtggagaggtcattgatctttgtgaggagctgactgctgcaaacccctctacccaaaagtctgccaagtccaaggagtctgaaccaccaacggctgggcctgaactggtcaggagtaatcctgagcgg

SEQ ID NO: 288588 - DNA, 772 bp, Cannabis indica
atgaagatgtgtatatgtctatacctcaagggtatagacctaagggggagttaccaccaaatgcaatctgcaagttgcaaaaatcattgtatggactgaagcaagcttcaagacaatggtttgccaagttctcaagtgccttaactgatgaaggatttcatcattcagcaactgatcactccttgttcatcaaacatttcaatggaaatttcatatttctattggtttatgttgatgatgtgattcttgctagcaacaatctagtggaacttgaagctctcaaagcaaggttacacacaagatttcagctaaaagacttaggaaatttgaggtatttcctaggacttgaagttgctagatctgagaaagggatctttgtttcacaaagaccttatgcacttcaattgttggaagatctaggctatctaggttccaaaccagtgagtacaccaatggaagcaaatctcaaacttgggcttgatgagaaagagaagttggccgatccaacattatatagaagaatagtgggaaagctacaatatttgaccatcacaaggcctgatatttcctactcagtaaacaagctaagccagttcttatgcacacctagagtcactcatctacatgcagcacaaagagttcttcaatatgttaaagggactcctggacaaggaattttctttgctgctgattctgaagtgaagttacatgcctacaccgattcagattgggcagcatgtccagatacaaggaggtcaacaactggcttttg

SEQ ID NO: 288589 - DNA, 685 bp, Cannabis indica
taccggaaggctcaggagaaagcctactctaaggctcaagcagcgtccgggaggccacttcgcgtggggagcccggtcgagaggagaagccaggcgatcgctgggaagccccttcatatcggggactcggcggagagaagggctcccaggccaaagccttcggctcaggagccgaacactggggctccgggcgccagcacttccggctctagtggtaagtctcctttagcagttcattacgtcccttttgttggcgaatatgccagtcttaggcctgtagggttcgatgagcgtctttataggtttaggatgccctcgacccggtggggagaccatatgaaggagttttatttttccaacttaggagatttcctaggtcggtcccagatgggttctggtcctccggagcccgtccccttagacccttcagcttatatttcatccagctggttccggccttcagacagctatctcggagacgatgctgccagcattaagattcggaactttgctagggccgaattagagagtcagggtaggactagcttgtttgctatatttgagtgtttgttgtttcccatggatgttctaacacttgccttctttcttttgttgtagcaggcgtttccatggatgccattttggccgaacttgccggggttcacactcctgaagctccccctcc

SEQ ID NO: 288590 - DNA, 668 bp, Cannabis indica
taaagtttattctttaaaaattacttaaggggcatttattgtatgtattaaccaaaattcatctggaaatacattgtataatgcaaagccctcatttcaattttttttttttgaaattcaaaggttctcgactaaacctctttgccgaaagtggagtcgaaccgttataactccctgaccaaacctttttgacgagagaggggttataacaccttgatcaaacctttttgacaaagaagagatcaaacaactataattttttatttaaaacctatccgacgggaaaggaaaataaaaagttataactcgcgtataaaactgaatactaacagttctcgctagctaggaaagtacaaaacgaggcatcgtgatgccttgacaaaagtacttaaacctagaaaatggatagataatataactattcatacgagcaaattaaaactatacaaagtgataaaatccttaaactaaatttaagtttgcttaaagcagattataactgctatagtgaggcagaattggcaactgctcaaaaatcaaaagtttggtagattactaactacctaaacaggaagattacgagcaatgaaaaacccaagagaactgaacatttgatcaaaatatagttgtttacattgtgaataaaacgcaagcaaacacaattgtat

SEQ ID NO: 288591 - DNA, 511 bp, Cannabis indica
ttgagatactgtgatacacccagccatttgcgacatgcgttaatattcaaatgagcgtactctttggttgataggtagtctcagaacggtgggggtctcccagtaacttcagggttatgctcgaaaacgcacatcccttgagtcactgggaaactcccagccgtttctggaggtataccacttggccgaggatgcgtgaattattttgcccaagatagttttatccctcctcgcatattgatgggatggtcagtattcgcaaggaggctgaccattctgtcgagtgcgactttataatctaatgcgggtgagatcacttactttgcttttcacacatccatcacgctgaaaagatcttctatctttcagatgagcgatttatcggatagccaacagctcggctcgggaggccatgcatttgacggtgagactgaccaggagaaggacagttttctccccacggacatttccgaagaggaggtccgctccaatagaattaggtccgatgtct

SEQ ID NO: 288592 - DNA, 583 bp, Cannabis indica
gggagcttaaataccaatgacccacattaattggaatcgtgacacgtggcaatgagaatgcctaaggtcatcccatccaacggttaaccataggcacgcctacacggaaaccgaagagtttcgtgacgtggcaccataggtaggataaaatgtaataattacagccgtcagtttttttaaaccctcgatgggacaaccaaaggtcaccacctcgtgacatctcttcccctgtctctcgattatagtttccctcatgaccgcatctgtcagtcgcgaaactagggcatgtgttatagtgagatttttctcacctagaaactcgagaccagactcctgtttgaaggacacgtgtactcaatttccccaaggaaagatgagatgtcaatgagagactcctcgagttcaaacctcgcctgaactagactcagcgagatgatggggatatgaccaagtctaatcgcattcgtatgactcgcattatgtaggaccaaggaacggatttaacccgcatatatcaagatatatgcgagtaaccccacgatcctcctgcgaaaacatagagatcgattctctatgttgcggg

SEQ ID NO: 288593 - DNA, 691 bp, Cannabis indica
aagacctttttgtagcaaattcaaagattgaactagggccaagtgtaaagagtttcttttttaagcacaaatataaagaattcagttcagtatatcaaatttgttttgattttgatttaattttttgtttgagagaaatttattaaaatgaattactataggatgatattgatggaggcatattccaaagcgaaatgccatggtccaagaaaattcaaatgcccattgcccctttatgggtacattaatcaaattttaagaaaaaataataaagaatataacaatatattattaattaattgaagaataaaaatataaatacaaattattagatgtaaaatgagatttccctctacttaaaagatgtttgaagattagttagcaactacttcttctctcgatacaatgattatcgagtaaataaatatattacttttattattatagtaattttgaatcaatagttttattctatcaccttaagacttaccaaaaagacaaagaataagaagataaagagagctttttaatgagtctctatttgttggtgtattttgaaacctacttttataggattttgtctggggtagaatactaagtgtgaacacaataaaattatggctaattagtaatttttttccttgaattttgacatgtagtaaatcgtgccccctgaacttttttgggccgt

SEQ ID NO: 288594 - DNA, 674 bp, Cannabis indica
agtaaaaagaaacaaaggtacctgcaatggcgattggggttgtgggttgtgttagaatatatttgaccaggatctagatttactaacaagtatgtttttaacatcctaatatggatttctaatatgatgaaaataaacacataaaagatatgagaaaccttacagtggttgtagcattaaatgactcctcccactcagatctctaacccttgtatcctttctatagcagggtatcaccaagatctgtgcccgattctccttgttgttgattggattcttcacagtcttacacactatgattgaggaccaacttgttatgtgtgggcatgcactcaatcactaatggctgaatatattttgtgaagataggctttggtattttcgaaatcaagaggaagaagaagaaggaataggtttcatgagaaagctagattttaagctttggagggattagttgaatgatgagaccttagctatccttttatactaattacaatatggttagggttgatttatttagaataaaaaattaacaaaaaatggagcataaaaccccttagtggccggccataatgtgggccccacaatggtttgggtttcatcatttttctcaattattttatctatttttccctaaataccacttttgcgacttcaaccctataaattccaaa

SEQ ID NO: 288595 - DNA, 178 bp, Cannabis indica
actcattcactaaaggcattcaaaaataaagaaaaaagaagagggaagtggtttcggctatagagaataggagactccagtatggtctcagctagtatggggaccatgggtctatatatacgagcttccaataagcatatcaagaatttatatcttaaattcactgtgtaatgaccgc

SEQ ID NO: 288596 - DNA, 566 bp, Cannabis indica
ggagaaacttaaaagacccactatggagcaatggtaccatcttcagcaatggagaacatcacatcgtcaatgccactcccgccagaaatagaagtatgagcatcgacacccataccagggacagaggtatgagcatcgacgcccacaccagacacagagatatgagcgtcaacatccatctcattctcttgctcaagagccaaatattcttcatgaagtgcaatagcaccatcgacatcccatccacgatggagccctttcttatactgtatcatcaactcccccttgtcttgatggcagtcttgagcgaaatatcatcaacctcctggtacaatgcgacatacttagcctcctcctccttgagtttggcacgcacacgctccaactcagtgttcaacgaggaataatccagtttgagcttgtcatatgatgatttggtagtctctccttccagtttcaagttctccacttccttgctaagtctagactgctccttgttcaaagccctgttcttatgatcaagagaaattgtgtcacgccttaagtagaggactgcttgaatagcc

SEQ ID NO: 288597 - DNA, 507 bp, Cannabis indica
attgcaataattaaacccaagcaatgttaacattaataaatgaacgacagttactaagtccatcaacgtgtgcgtcttccgcatctgcgagttgaccgttcatgttctgttgttgagctcgcagggtcattagtacgtttggaatgcctgcacccttaggtaattgcctcttgtagacatcgcatgttgagctgatagaacctagacatgcgagtctatatcggtttatcaaggctattggatcgtagggaccaaatcgcatcataattgatctctatgctttcggagaaatatagagaggatactcgcatatgtcctgacacatgcgagttggatccgtcctgtataatgtaagttaaagttatgcgattcgacttaggtcgtactcgcagtatctcgctggttttatcctgggcgaggctaaaacatcgaggagtctctcatagacaattcagctttcattggaaatctgaatacacgtgtcctttaaataggagtctggtctcg

SEQ ID NO: 288598 - DNA, 241 bp, Cannabis indica
tgtcatgtccctcttgctgacatctttcttcatgggcccgagcttcttatatggggccatcaacaaagtttccatgtaaacactttctatgtcttcagtgaagatagtgaatgggatgttctagtagaaggagcctttgacttgccaggcttttgctcaccttccgctcgttgaatggcttctttaagcttgatgaagccttcggcacggtcaagaaaatcactcattgagtctaccagcc

SEQ ID NO: 288599 - DNA, 499 bp, Cannabis indica
aattagctgaaataaaaaaaaaaaaaaagataagaaaaatctgggttgtattcagaacggcctagtcaattcgaggaggaaggcgaggaccaatgcgcgcctccagcatggcgtcaagcttcttcttcttctctcggaatttagcaatcatctccgcgggttttgggtagaagtcgagcttgatactctggccatttgttgaccaagccatataaacgccatcgtcgacgcgcttaatgcatcggctacaagagacgggagaaaggagctcatctttcttagccttcttcaaggcttggtctttaaagtccttaagctccttcagctccacggccaagtttgccctggacttcaagtcctccaggtgcaattcctctaaggacttcaccttggcagccatttcgtctaaggcctccctagtctcccggagctcacgcctggccttggcaacagcctcgccctccgccctcagtgcttcccggtgcttggcttccagcct

SEQ ID NO: 288600 - DNA, 644 bp, Cannabis indica
tagtatttctgcatcagtattgtctttctaacatcttttctgtggttagttgcatctgacttcgctaaatcttttttagtgccatgtcagctttctggtgtttgttagattgtgccagctgtacttagctggttggttagttagtcagtttttattatcttcaggatatatattctgttgtgtctgttgttctaactaactctcttcggttagaatcatcttcttgattcttgctctgctagggcacaatatatctttgtttttgttttgttgtttgtagagagagattccagagatcttcctgaggttgaagatggagttcgaatctgcttgatctgaagggagttcagattactgtgctgaaggtggttcagctgtgtgtatgctaagtgttcttgtgtacagagatctaaatgagtttagatctcaaagcttgaggttgttcaagtgttaggtaactttgtataaaagtcaatttagattacattgtttgatttgaagaatcagaactggaatttgtaattgaattgattttatagtggaagttactgtactcggttcaagggaacccaagcactactcggttggaatgcgtttccaatgcagaggaagcttgtaaattctgtgttctttgattttaaatt

SEQ ID NO: 288601 - DNA, 504 bp, Cannabis indica
gtaaactcttctgtctctcaacttttttctctttgttaattgtttatttaaatattggaagatacttggaatttgaaatattctttttttttttttttaagaataggtttattccggttgtagttacatatcgtaaattacacttgtttttacatatattttttgaaataaagattgtaacttttattaaagcaaatcaactatcaaaatagcttccaaacgagaagggacagaccctctactggaaatacgatcaagacatgaaccagaagaatgagctaaccagttagccgcttggttctcagatcgtttaacaaactggagtgaaatatgaaaagtagtaaatgaccgtataagattaatacaatccgaaataataagaccaagaggagaaagaatttggctcttgctattgatagcattaaccaacaagagacaatccgactccataatcaccgctgtaggcgaaaaatcctcaacagcactgccttcttcccagcatgc

SEQ ID NO: 288602 - DNA, 585 bp, Cannabis indica
tcgccaaaattaatcatgtcacccctaacctcaggttcctcatgaaaatcgcacaaaatcgcacaaagtcgcataaaatcgcaaaaacacgtaaaaacccagaaaaacacagactgttcggaacaaactctacctccatttcaaggacacaaaagccacaaattacaactaacaacgttcagatccatacaatacaacaaaaaacaacactatttactaagaaaaatacttacccattgctttgttgagtgtggtggactttgagggtgagaatcttcaaggtggcagtcggccaagacgtggaggtggcaggcggcggcagtcggcggcaacggagagagcaatgagaaagagagacaaagtgaaagagagagagtgcgagaagagagagagtgagagaagagagagagagagagagatcaaacgagagggaaagagagagaaaggaggggctgatttttttgggtttgaggagagggcattttggggttaccattaaaagattggcatagttaccaaattcttaggatgatggtataatttaacaccattacacatttttaagcataaaatgtcaaatttccc

SEQ ID NO: 288603 - DNA, 442 bp, Cannabis indica
aaagtttcgacttcgcctccaacgcctcttttcttcttgtaaacccatttacatccgattggactatagtcatcaggtgtgtctacatattcccagactttgttctttttcatggaatccatctctgaatccatgtcggctgaccaccattttcgttgcggacttgccattgcctatttataggttaatgggtcgtcatcaataccgtcaccaacgaccatattgatttcaccatccaatccataacgggctggttttggaaaaccctctcactacgacgaggagcggtgatcttctaaagaggaactttggtagtagttttctcagttggttcgactgagggagtgggattgtcctcttcttgagtggaagaggacggaacattggaaggagttatatctgaaagcaattcctctaaaacaactttacttttcggtttgtt

SEQ ID NO: 288604 - DNA, 787 bp, Cannabis indica
gaacatcacatcgtcaatgccactcccgccagaaacagaagtatgagcgtcgacacccatactagggacagaggtatgagcatcagcgccctcatcaaacacagagatatgagcgtcaacatccatttcattctcttgctcaagagccaaatattcttcatgaagtgcaatagcaccatcgacgtcccatccacgatggagccctttcttatactgtacatcaactccccccttgtcttgatggcagtcttgagtgaaatatcatcaacctcctggtacaatgcgacatacttagcctcctcctccttgagtttggcacgcacacgctccaactcagtattcaacgaggaataatcctgttttagcttgtcatatgatgatttggtagtctctccttccagtttcaagttctccacttcctttctaagtctagaatgctccttgttcaaagctctgttcttttgatcaagcgaaattgtgtcacgccttaagtagaggactgcttgaatagcctacaaaaacaagttgaattaccacgagtaacacacaaaaataactacatatgcgtacatacaaattctttccaaacttacttggtaaatcgtagaaacaccgtaattcgctcgccccgcaactccgatgcccctcaaacgctcttcatctctcggatggagaagagcctcaacatgaccttcgatagaagcagggtcagagtaggccgaaatgttggaagagatggacaggttgatcatactctcctcaatagacaactcgttgtcacccctca

SEQ ID NO: 288605 - DNA, 558 bp, Cannabis indica
ttcaacatgttatgaaaaaatctcgagttagcatcaccctcttcggcccacttgcatttagctttcaaccatgcacttctttcttcagcaaaagctaaatttgtcatttcttttttggtctttcttctttcctccattaaagcttgattctcgccaacactaccaatttgtccaattcgaccagccttctctccaaagcattttttatcatctgattgttaccgaaagtcgacttactccacaacttgatgttttcttgcctttctcgaattcaacatgttatgaaaaaatctcgagttagcatcaccctctttggcccacttgcatttagctttcaaccatgcacttctttcttcagcaaaagctaaattttgccattcctttttttgtctttcttctttcctccattaaagcttgattcccgccaacactaccaatttgtccaattcgaccagccttctctccaaagcattttttatcatctgattgttactgaaagtcgacttactccacaacttgatgatttctttaaccatcttcaatttacacatgagcttg

SEQ ID NO: 288606 - DNA, 906 bp, Cannabis indica
ggtattttggaacgcggcgtttggctcagtagaaatcacaacttagtatgttagtattttggggacgggtttagacattgggaatgtcgggaatggccgggaatttagaatgtcccaaaaatacccctttagtatgatttatgtgattttatggtggaggggcaaaatggtctttttgtccccattagtgctttgtcttttgtgagtttattatttgaaaaataaaggattattttattattgcatggctgaaaaggatttaatgaaatggtattatatgacatttgtttcactcattttccaacacttagtcaaaattaagaaattttcaaaaaaaaaaaaacaaaacacacacaagctctctcttttcctctcttgttcggtccgaacgacttggggaggcagctagggctggagtttcttgtcaaattcaagttgttcttagcaagatcatagtaatttttaattgaggtaactcttggctttaattcttacttgttttcttgaagaaaaggtgtgaaaatgtgaaatgcatgttggttttctatgtgattcttgctgctgtaatttgaggttaatttctgagtttaaagcttgttagattgaagttaatttaggttgttttgaagcatgatagttagattgagctaagctttgttgtttttatgtaaaaagtatgaattttggaaggaaagtgttgtgtttatgttctgtgttgttgctgttgttcttgttagtttgcagaggttagattatgcttagttatgttgaattatgttggtttgcatgctggttttggtggtttgctcaagcttgagtttggaactcaaagcttgagctccaatggtgaattttgcatgtgggatttctgggtaggtttgatgctctagaattgttatttgggac

SEQ ID NO: 288607 - DNA, 552 bp, Cannabis indica
gtccttttctaaggaaaagaggcctactggggaggtcattgatcttttcgaggagctgactgctgcaaacccctctaccccaaagctgctaagtccaaggagtctggaccaccgaaggttgggtctgaactggtcaggagtgatcctgaacgggtgcgggcacctactccaccgttgccagtgcttccggaggccaagaagggcaaggggatgctggcccattacatgaaccggcttgttcctgaggtcaatgagcaactggctggtgctgacagtgactcttctttggaattgctggtgggcggagtcttgaaggagtacactgttaggctatttttagcatacgttttgggtcacttttttatagttgttttccttctttattattatatttggaatagaattacgcttgttttctttggtttcaggtttcacacttggaatgtataaattgatcaaatttcggaaaacaacaatctataaaatagagaaaattctacaagaaaataaagctgaaacttcaagcttaaatttgactatgttctaataaga

SEQ ID NO: 288608 - DNA, 508 bp, Cannabis indica
aaagtaattttcttaaatttttttatagaattaatttattttaaatttttacatatataagtatgcatctttgagcatttaaagcaactcttaactaacttattgctaattcctagcaatttaagtgaatacaaaatattactaatttaaaatattaaattaaattgtattaaataggtatatgttaatgcacaattcttttgccattgtaattcaattttctgagattatttatgtatgtgttgtttttatttattttttaactcgacgtaatatgttgatgcctaattattttttatattaaaatgaaattgttatcgtcttgtttattcgttgttattaagttgtttagccaagagaaaaatagcatatgtttttttttttttttttggttttacggtaactaagttagtactaacgtttttaaggttttttagtaagttttttaagtttttttaaaacgttttaacgttttaagttttgttttttttaactttttttttttcct

SEQ ID NO: 288609 - DNA, 1066 bp, Cannabis indica
gcatggccccagccatcagatgcgtttggctccaggccccgaagccgccgtagttgtggttgggcgtcatttgcgttgcgaggtggccgatggtaggtccctgatgttgaaggcttgattccagcaacctccacaatgttctccaactggtggggacaggtcagagtggagtaaagctcagccacctcccatccggtcgcccgggacttatacccctcctggacaacgggtcccagggagacctcctcaagggtagccatgcgcttaccacttttctttgatgactttgagccagaagcagacatttttctattctgtaaaaagagtaagattcaagcagttaggccccataccaaaccctaaattaagaaaaagggaatgggggtcccctaaccgctggaaagaggccccctccggacacgtgtcacacaggaaaccctggaaggattccctggacaagagtcgggtgcaataaattcacagaagacggctttacgcgttaaagaaaacagaaaggaaaaagtctgtcctatgccctaagcaaccactatacgaagaacgtatggccttctacaaagaaaataataacaacagaggcgtgacaatagcaatcctatcactagagcagtaaactcaaaccgactatatgaaggatttaaacacttgcatgcccagaaacttcgaatgcaaacccagaaaagaacaaacagataagtaatagcatgccattcaataaagcaaagggtgcaaagaacttacgatgaagtgttgaaactgggggtcctgctgagagtcgagtaaagacaagaaggactggtagcaacgagcgaagaagaactgggaaaatcgcaaagtgtttaaaggccttgttctaggtctgagaattttctctctaggaaattcgagcaaagttggcaagaaatgggaagtaaccgaaatgaagaaaaggtggtggcttttataggcaaaaatgcatgaggaacagccgccatcaccgaccaatcaaacggtgagggaagcgcacgattaaaatgctcaaagatcaacagaccagattgatttacaa

SEQ ID NO: 288610 - DNA, 519 bp, Cannabis indica
tcaaatccataaaagctgcaggagcatggtcagccaaagacataaccaaaattcataatgtccatacctagtgcggaaagctgtctttgggatatcctcctctcggattctcaactaatgatagcccgatcgtagatcaatctttgaaaagaggatcttcccctgaagttgattaaaggatcgtcgatcctaggtaaaggatatttattcttgactgttagtttattcgattcccggtaatcaatgcacatccgcaaagatccatccttcttcttaacaaacaatactggagctccctagggtgacacactgggtcgagaaaaccctatgtcaagaaacccctggattcgaattttcaattctttaagttctgctggagccattctgtagggagccttggaaaccgaatctgctttaggtgtcaagtcaataacaaaatcaatttctctctgaggtggtaaacccggaagtttcgtcgggaaaaacatctagtaaaatcccgaaccaccttgatgtctt

SEQ ID NO: 288611 - DNA, 618 bp, Cannabis indica
taactgaaattggacctagatccagaatcgtaaccggaccaggacccggactccaaatcaaacctagacccgaattgggagtctgacccagatcccaacccaaaccgtgactcgggacccgaaccaaaacctgaactcagacaaaaacatggaaccagactagggacacgataccagggtcgggacatagaaccgcaccccaatctcgatcccgaacccaaactcagaaatgggacctgggacctaaacgagaaccagaccaagacccgtgacagtgatctagatgtatactcgggattcgggtaatggggccttgaaaagactagtagtcagtgtctagatctgagactcagactaggaccagaacccagacgaagaactgaaaccgaacccagacctagacctgggacccaaaattagaacctgaacaagaatcatcgaaccaggaccctaaacaagactacgatagtgacaaggactcagactcagacctagaaccgaacacagacctagcctcagacccaaatttagattggaactcgggccatgacacggtcgggtacccaaactgacactgagacccgcacctggacctaaatctgggacccgatcccaaac

SEQ ID NO: 288612 - DNA, 504 bp, Cannabis indica
aaaaataattaaaattttgtttctggaattatttttattggatagtatggaaaaaattaagcaggttacttttttacagaactcaatttcgatttaatttgaattagttatgattttttgaagattcaaaaaaaagataagggattgtgcacacacacgcgcgcgcggattcagacaaatttcttgtctgaatccttcatccgcgcgtggaaggtggtgtctgaaacctcccctacgcgcgcgcaagaccctgcaagttcccctgttctgccgagctttctcggctgtcaccagggatcacgcgcgcggacagtatgcttggcatactgtccgtacagctcccaaatttttcgtttttcttcgttttttcatgctttttcatggaattaacttccgattttttgtgtagttttgtatttatagatttactattcctaattcaactctaattatcataatgaattaatttaatattttttttttaatttaattgaagatattagt

SEQ ID NO: 288613 - DNA, 783 bp, Cannabis indica
ttttttttaatttgaacaaaaacaaataaaaactactaaagcacatactaaaatagactctaaaaatgcataaaaataaacctaatataaacttttatgacccaactccttccattgctaaatctgcttccactcacaaaggtggagatagtagctggaagaggccaaaattcgttgtatttttggagtatggaaagttagaacatgatcttcgtgggaaagagagatggtcatgaggaggaaagacatagatgggatctggtggaagaaaaaaagaagaaaaggagaaaaaggaaaaatgaaaagattaatttttttaattttaatatgatttattttatttttttttcattttaaatattatttatatatttttaaaataatctaattatgtggatcaagaaaattatgccacacgtatattatatacatatagacaatttcaacgtggcagttatcaaccaaaatttgatgaaggtggtaaattactaacataatatgagtttagaagattttaccgtacaaaaaattaattttgaaaattagttgcaaatatagtgtcagttttaaggagttttgtcggaacttagtttacaaatatttaatttttttatttatataagaagaaatcaaatacattaagctaatattaagcgggttattataccgattcttctttattttatataaaaaaatttcgaagtcgtgttatcgtgttcaaataataacataccacaaagtataagtagcaccgacgtattgatgataatggtcgttaaatgt

SEQ ID NO: 288614 - DNA, 1000 bp, Cannabis indica
tagtgaaagaattcactaaccttggtaaatcgagtcgtgaaagagcgtttcctccacttcaggtggtgttaattctaaaaatggtttcaacctttgaccattgactttgaatacattaccagatttagaattttcaatttcaacagctccgtaaaacagtacgaacagaaaatggaccagtccatttagaacgtaacttaccgggatcaaaaggaatgtcccaatcaggaggtcgaaataacttttgtggtctagggagtgattgtgattctctaggaattttcatagatcgatctgctaactttttcggaacattggtgtttctttttgcagtacacagatcttttaaaaaatttgagtacgcaggtatttgcttaatgacatctaagaaagggatatttatatttacttgcttgaatacctctaagatgtcaccatactgactacctcttttgattgggatcaatctctgtgggaatggagcttttggaatgaacgacaaagtttgactcattttttcaaccgagtctttggaatgtgagctttcaggctgactcttttcattttcttttaacgagtcagtgttcattttagcatcaggttgagatatgtaatcaggtttttcaataatttttccagacctaaggatagaaattgaattagcttcttcaataggtctagatgtacttacctcgtactgactcttcagattaggaatgggttgactgggaagtgttcccttttccctttcagctacaacagtagcaagttgaccaatttgtgtctcaagccttaacatggattgagaacttgtgtgtaaatcttgttgggtggtttgcatgaactgttgtagggtatcctctaaagatggttttctttgttgttgaggatatggcatattatgttgggcatgactctgattgggtgagttgtattggtgcccttggttcattggaggctggttctgtctccaagaaaaatttggatgatttctccaatt

SEQ ID NO: 288615 - DNA, 344 bp, Cannabis indica
ggttttgatctgggttcgggtttgtgtttaggtcctggtcttggtcctagtcctagttcggttttagttccatttgcgattcttagttcgagtttgggtttgagttcgagtcggagttcgagtcctggtctaagtttgggttcgggtcctgattttagtttaggtccaaatcaggctctgagtgtgagttcgcgtcctgggtcttggtctaggttgggtccgagtattggaaattattttaccaggatcttagatctactcacaagtgtgttgatggtcccagtattggaaattattttacaaggatcttagatctactcacaagtatgttgattagcacccta

SEQ ID NO: 288616 - DNA, 541 bp, Cannabis indica
aaattgaatgaactttacaataccataaacacgatgagcatgcaaatcatagttcctctcactttcaaacttacggtttgcatataaattccagtcacgttcattgtcacgataataaaatcgagggcagccagaaagagatgaagggacattaccagaagaaggttcttccataggctgcttgcctttggcagcagcagaggcctttgctgcagaagcagattttgatcgaggaggctctggctcgagttctgtgtcctcactgtccttctcagaatgaagagacactgatttgtctgaagaaacttccattggatcctcttcttctgaactggaacttgaagaggccgagggtggattagtcttgagtttcttcttggctggagggactgtcttatcacgagattgagaggctcgaagttccttctcagcagaggcttgctgggctcgagttcgagtagaagggcctgttggagtggagccaggaattgatgcagcaggaggaggaactgccaatggaggaggagattccttcaaagat

SEQ ID NO: 288617 - DNA, 786 bp, Cannabis indica
gcctttttcctatattgaaattacaaattaaattagtataaaacaacttaaaaaaaaccgaaaaacaactattgaaaaactaaaataccttggcataggaatcggcaaaaacagtagaaaactgtgtctgcattgaagccatctgagcaccaaaagaaacaaactgtgcagacacaaactctttcaactcaaccaaatcagatgaaatcttctgttgggaagtatgcaacgaatcgatcttgacctccaacccatgaaatttctcagaaaaggcatcaagcttgacagaaatgtcactctgagcaacagttggctcttcgggaacaggaagactcttgtaagagttgtagtcggtgtcgaacttgaaactgctcagtttcaaagctttgaactcaccagccgtgggcctcatatttgaaagttgcagctgatcaaaaaacaccaaaattaaaatttcaattatgaagattaataataatgaaaaacaacacaaaaacaactactgaaaaaccaaattacaacaaacagatataccttatctttggaaacatcaaagatagtagtcttcaaaactttgaaagtaggttgactattgcatgtccactgagtgatccttggaatacgagagctttccttttggcagtacttacctttcatgtacttacaacactcgtagaaccaaacttgaagaacatgaggacaaccaatcaaagtgtaaaaaacactcggcctctttcccgaactccttgccttcctaaccccctcaacccaactatcaagcttacc

SEQ ID NO: 288618 - DNA, 458 bp, Cannabis indica
caccattcaccacgcttctcgtctgtctaggattgacagtaggtggaacccttaaactccctgggtcctgcaatgtcggatccagcgtctgtgaatttgttgggtcagataggcctctacgagtttgcaccatcatgttgaatgtcgaaaagagcgatctacgatccttctctcaatgaaagcattaaaatgttggcttcgcttttagccaacgacaatgagtcttttttataagcgataaacgatattgtcgtaatgaatatatataataaagcaataataagacaggaattttatagaggttcagccccgagcagttcggtaatagcctaatcctcgttatttgtattgactaaagaacaaggaagaagattccttttcttatagctcttacaacagtatctctgaatatataattcttagataatagtatagttttagcttagctgcgatcgact

SEQ ID NO: 288619 - DNA, 811 bp, Cannabis indica
atgctttacttatctgcttgtttttctgggttttgtacttgaagtttgtgggaatgcaaacttttagattcttcacgtaacaggtctaggttcaccacttctggtgataggattgctcttgccacgcatttgttaatattttttgcagaagaccatacgttcttcgtatgttggtcgtttagggcataggatagattgctttctttcgactttctgccctttctttttctctagtgcgcaatgccgtcttctgtgaatttattgcacccgactcttgtccagggaatccttctagcgtttcctatttgacaagtgtccagaggggtcctctttccagcggttaggggacccccattccctttttattggtttagggtttggtatggggcctaactgctggaatcttaattatttttacagaatcgaaacatgtctgcctctggttcaaagtcatccaagaagagtggtaagcgtctggctaccctcgaagatgtctcgctggatcccgttgcccaggaggggtacaagtctcgggccaccggatgggacgtggcagagcttcactctactctgacttgtccccatcagttggagaacatcgtggaggtagcttgaatcaatccttccacatccgggacataccaccggccacctcgtgacgcagagacgcccaatcacaactacggcggcttcggagcttggagccagacgcacttgatggccggggccatgcttcctctccaagactaatttgttaattttttagtttttgtcggccttgcgccataccaacttattcctcaagcatacc

SEQ ID NO: 288620 - DNA, 710 bp, Cannabis indica
cgacatggaacttgactcatctgtcattgcattcaaccataacttagattgaggacttctcatggcttcttgataagtaactggttcagaagcgtctcccacaacataatcatgttcttgcaaatagacaaggtagtcatcatgaatagcaggtttgcgagctctctcagatcttctcaatacaacttcaccaccctcaatatcaggattttcatcttgcatatgattctgaggttcatcatgagcttctgttggaatttgttcaatcacaggatcaatagtaggagcggaagcggaagcaacaggtacagggacataaatacgttcttccctgaacacaatttctcttgacccttgacttgaaccaaattcatcttcaaaatagacagctctatctgattctatcaccctggtggtgtgagaaggacaatagaatctagaacccctcgaaccaatagtgtagcctacaaaatagccactgatagtcttcggatcaagcttcttagattgtgggttatagggccttacttcagctttacatccccaaacatgaaaatgacgcaagctcggtttcttgcctgaccacaattcgtatggtgtctttgggacggacttgctaggcacttgattcaagatataagcagcagtccttaatgcctcaccccataaaaattctggcaagctagaatgaatcaacatacaacgtacca

SEQ ID NO: 288621 - DNA, 594 bp, Cannabis indica
catgcagaattttacaacccgatttttatgttgggttgaaaaaatatgtagtataaaccgactaaaccgaccgatgtacagccctaggaagcaccgtgaaagatttttgtatgacaaaattatgtattttaacttggctgtataattagaggaaaaagaaaacttggttgtataaaaacttttgaatcttatattcttttgtgtcctagaaatcaatagaagaatatacaaaaactagatactttgatttttgtgtattaattattttggagctttttaatctacaaacttagtgtactaattttactgggatgtaacttttctttatattggtttgggatattggcggctaaaccacttgaactttacgttttgtaacacttaaccacaaaaaccaaaattttggcggctaaactacctaaaccctagttccgtttgctctgcacacctccgtccaaaaatcacagttaagtgccacggtggactgtccatgtgtatacacttgtacacgtggaaaatttttagtagtccacgtaatattagttttaaaaaataactataaatatttaaaaaataaaaaaatcagaaaaaaaa

SEQ ID NO: 288622 - DNA, 516 bp, Cannabis indica
caatcttgctgatggccgatcgtccgtgcccatcaaccacttaaagcctggttgagagaaatacaagtaccccgacctgccttgcttgggggtggacttcaaatcaaataaccaggcaacttcgtgaggagaaggcataccccatttctgggaagcgtagaggacgaagagggccgacagatatttgatgcccttaggagtgaactgggtcgggcagaggttgaagaagtccgccacattcttgaagtattgatgcaaaggcatcaatgccccttgctgaccatgggcacccgaccaggcgcacatcccctttttcagggtttgtggcacgattgttgtgggcgagaatgtagcaaaccagttcgcccaggtatccgtcctggttgagagtccaaaggcgcgcctcagtaaccctggacggagggcttacccacctggcacccaagacacctttccttctatgaggtgttgggttttatgccctaaataaaactctttacaatctgattagttatc

SEQ ID NO: 288623 - DNA, 645 bp, Cannabis indica
tagtgatctcttgttgtggtatgtgtttcctaatttcttttctttattttcttggaaaaatatgttgaaaatggttaatgcatgcatgattgttggatgttgttgctgctgtgaattggttgttattttctgagattttagcttgttagattaaggttagttgagttgtttttgaagcatgaatcttaggttgagcaaagctatgtttttctatgcaaaatatgtgatttttgaaagaaatggttatgttttgttgctgtgatgttgtggaagtttgttagtgtttccagaggttattttaagcttgtttatgtaagtttagatggatttgattgcctgctagctaagtttgctcaagtttgagtttagaactcaaagcttgagctctaatggtgattttcgaatttgtgcaatctgggtggttttgatgccttagaaatgttctaggggttatatggaataggtctggaatgtttgagatgatttggagtcgaattgtgcaagttatgattttttatgtttgctgcctgcgaggaaccggaattccggttgggcatccggaattccggatgggggtcctgaattttccagaaccggaattccggttgggcaaccggtcttccggttggggaattttcagaaccc

SEQ ID NO: 288624 - DNA, 703 bp, Cannabis indica
gatgattcctcaacagaaacatagtaaaaaggagcaagcaagacgcaaaaaagaggaatttaacgcatcatacagtaaactcaggtgaactcattcccagaagttcgacatccaacccagaaatcataaaacatgctatataaacgaacagtaagcaagtacaaggtatacgaagaacttacatgaagtttgaaggctgggggttggtgttgattgccggtagaatgaagactgacaacgacgaaggaatagaagcaagtgatctatggtgtttgaagtttcttttctctctgggaaaactctaagaaaatttggtaaaatgctgaaagtaaccaaatgaagtaataaggctggcttttataggccagaacaggtgtgagatagctttgatcgaccgtcatcgtacagtcagaatggcaatcgattcaaattttacagatccaacggttggaataagcgctcatcaaggtggtagaaaatgttttaagtattcgactgacacccatttaatgcgacgtatcaataaatggacagaaaacgaatcgttgtctgcaaaaagcaaataactgcagtaatgattgtcataaatacatccccatgcgcccaaggcacgtgccaggaagctaataaggcaaccggaggcatctaagcaagccttgttacttttttaccaataaggcttgggggtaaatgttgcccctga

SEQ ID NO: 288625 - DNA, 631 bp, Cannabis indica
agacttgcacatgcggcttgttcaagtgcatgaagtttccttgtcctcatgcatgtgctgcctctcagcagcgaagtattagcatgtacgcactatgcttgccatattacacaacagaatattggaggacatatgaaggtacaatcatgctagtaggtgacgaggatgactgggaattgcctgatgacataaagaacatgacagttggagtgcctgttgagaagcaaccagtagggcgacccaagaagcaaaaggttggaagaattaagaacaaccgaactgcttgtaaaggtgaaaggattatcaaaccacgaaattgtggcaagtgcggtgccaaggggcacaacagaagcacttgcacctaccgaggttaaaaatgaatttttagtttatttgtattttgatgtcttggactattatgtattgttattgaattcatgttggactactttaaacattagaatttgtgatattttatgtttacataattattataatttgttgcatgaaagaaaggcctaaaattgttatgaactaataaaagaacataaacatgccaataaaagaaactagttacattgttatcttaataaataccaattaaaaaaacataattgttcatgctaaattc

SEQ ID NO: 288626 - DNA, 148 bp, Cannabis indica
gtcatgccaccttttcgttctttccttgtaaatcttagcgttctcataagcttcgtttcgaaattcctccaactcatccagctgtaatagtcttttctgcccagcagcctttaaatccatgttcagagttttcattgcccaataagct

SEQ ID NO: 288627 - DNA, 530 bp, Cannabis indica
tcttcgtggaactgacaaaacttcgtcatgtcccttttgttggtatctttcttcatcggccgggcttcttgtacgagattaacgactgagttgccatatatacactttctatatcttcagtcagaatagtgaatgcagtgtatttggcatgattctctcggggagtctgtccagatttattagtgaactttcctttcttcctgtttccttgcttgtggttgttgcttgaacgcttgccacttgagcatgaattattggaacagttgaggagttgggcagatgtcccagtggaaggagccttggacttgcccggcttctgttcaccttatgctcgttgaatggcttcttcgagcttgatgaagccttcggctcggtcaaggaaatcactcattgagtctactggcccgttcttccttatatctatccaaagttcaccgaggacttcagttcccccagtatcgcggataactttccatcctcggttacccgcaaaactttggtcgcatccgtcatgaatctgttgatgtatg

SEQ ID NO: 288628 - DNA, 590 bp, Cannabis indica
actattacaaaatgagaaataatcaaatgaagaaactgaaatgaaaaacaataaaacatctcgaaaaacaaaaacagaaaaaaaaacaaacaaaataaaacagaaattaagactaaacaaacaaaaatgaaaaactcataaaaagaacaaataaattaaactaaaaaaatagaagccctaaaaaaccaaacaaaactaaaagaaatgttaaaatgaaaaacctaaaatagtaaaatcgataaacacaaaacacactaatgtcaaatacgaaaaaaatttcaaaaaggggggaaacgaaaaagaaaccgaaaacaaacctgagatcgaagaccagctccatcttaatcattttttgagcattatcttgatgaattttttcctgggcagcaacctttgattttttttaggaggagctcgctcacgtttcgacagttgagaagcaaaatcggagtcatcgtcttattcctattagctacagatttcaaccccattttagaacttttctttggcaaagggggaggagaagagttcagctatggaggttttattttttaaaaaaaaaaactgaaaagaaattgaaaataataaaa

SEQ ID NO: 288629 - DNA, 508 bp, Cannabis indica
aatcccacaaacaaaatctaagcaatatcgggaatactatgtgtgtgacatttttatattaaaaacaaatatacctacggttttatgatttaaataataatttccagaattaaagtaaaaataaaatgctttcaagtatttagtacacatggaagacataatgaatgaagtcaattgatttattacggccgtataaaaatgtcacatcaccatcttgaaataataagtacatggtttaaatggtgaaattaaaaatgtgatatgacatccactcatttcagtagtcaataatttattaaaatttgacatcataatcgttgttggtaccactatcatagttaattaacttagttttgttaattttgttgggtaatactatcatagggactactatcgtattaaatctgacctaattgatttgtccaaattttaataagaaaaatgtcatattagtatattagagcccaacaaatattaaatctccttaagtaatataggtaggtttcgt

SEQ ID NO: 288630 - DNA, 715 bp, Cannabis indica
gttgttgagattagtggaatttttgtatattttgtgctctttcttgtggtaggttgtatatgttggatatgtttcaatggtgtttgtgtgtttttacagcgttatcgatgaaatgtcgataggatatcgatatatgtagttttctgtttgtgtgtttgagcattgttgtcgacaggttgtcgatatcatgtcgacaatttgtcgatggtttcaccttgtttgatgttatgtagttttgccatgtaatgtcgacaatttgtcgactgtatgtcgataggttgtcgataataagttgtactgattcttatggtagttaattgtgattatgtcgacaatttgttgactatatgtcgataggttgtcgataataagttgtagttgatcttatggtagttaattgttagaatgtcgataatttgtcgactgtatgtcgatagtttgtcgataagaagttgtagttgattcgcatggtagttaattgttataatgtcgacaatttgtcgactatatgtcgataggttgtcgataataagttgtagttgatcttatggtagtttaatcgttagaatgtcgataatttgtcgactgtatgtcgatagtttgtcgataagaagttgtagttgattcgtatggtagttaattgttataatctcgacaatttgtcgactgtatgtcgataagttgtcgatgttggtcgacatttctaacttttttg

SEQ ID NO: 288631 - DNA, 586 bp, Cannabis indica
gcaaaaagttacaaaaagaacgtacaaagttgtatcatgataagaacatcttgcgaaaagatttctccactggtcagaaagttcttttatacaactctcgccttcatctgtttcccggtaagttacgttctaaatggactggtccatttactgttcgtactgtttttcctcacggagctgttgaaattgaaaattctaaaactggtaacatattcaaagtcaatggacaacggttgaaaccatttttagaattaacaccacctgaagtggaggaaacactccttcacgatccaatttaccaaggttagtgaattctttcactactggtcctatctttaattgctttctttattttcagtattttagtttattttctgtcatttgttttttagaaaattaacatctatcactgtgcatattctctgtttttttttttcggttctcatctcatgttcttatcatatacatatttagacattgaggacactgtctcattttagttgggggtactgagtatattcttgcgttaagttcgataaatttcttacctttttgaaaattttgagtcaaattctgctgctaatta

SEQ ID NO: 288632 - DNA, 472 bp, Cannabis indica
gatggtaaaggatctcacaatcgtaatccttaaccaactctaaccaacgcctatgtttcatattcaaatctttctgagtaaagaaatatttgagacttttatggtcagtatcaatttcacatctctctctataaagataatgtcgccaaatctttaaagcaaacactactgcggcaagttctaggtcatgagtcgggtatcgttgttcataatctttcaactgacgggaggcataggcaataacctgatcggcctgcatcagaacacaccctagaccctctctagatgcatcacaataaaccacaaacttctctctttcaaaaggcagagctaacactggagttgtaattaacctctgcttcagctcctgaaaacttgattcacacttatccgtccatacaaaacgttgattcttttggtaagctcggttaagggtgttgaaattttaaagaactcttctacgaaccgacga

SEQ ID NO: 288633 - DNA, 681 bp, Cannabis indica
aatatagtccacccctaagtatatagagattatgatccacccctaaaggttatagagatcatgattctctaagtgttatagagattatgtggagttgaatataatccagagttcattagatataaaagatcgttgaactgcatattattcttaactttttctccacccctatcagatcaaaagatctttttattaaacaaattcttaataattgttttagaattaacaattattcataaacatagaaataatttctagtgtttatgtagtaataactctgtaaagagtttaaataactatagaatttgtatcaataataaaaacacatacacatacaaacataataaatataataattggtaattgatatataagataaagtaatgaagctcaactcatagattgcaatttatttgtaaaaaaaaacttaattataaaatcataaaaaaattgtttgcaacattatgagaaaagaacagggaataaaatcccaaacttgaaatccaaattgttctaaaactgaaacaattaattcaaaaataaataaataaatgagcttcatctttatcttggacgaactccacccctttgtccagctttcaaatccaactcgctaagatagcacctgagttcaagcagcttgggctgtaagaagaaaaacaaataaacaaggttagtagt

SEQ ID NO: 288634 - DNA, 587 bp, Cannabis indica
cgcgcgtctcatactctcctgatatctggttcacgaccagttgggagtcgctgtagacctctactctttgggcccccacagcctttgctaatctcagccctgctatcaaggcttcatactcggcctcgttgtttgaagccgagaagtcgaaccgtagggctgcctggagtcgaagtccactcggggatatcattgcaacccccgctccagatccattttcgttggaggctccgtccacaaatactttccatgttgggaccgacggtgccggtgctttcgcggttgcctccgcttcattacattcggtgatgaaatctgccaacgcttgtccctttatggagatacgggtatgtagtgtaagtcgaattgacttaactccattgacccatttgaggagccttctggatgcttctggcttctgcaggtactttccggagtgggtgattggtcaacaccttgattgggtgagacttggtaataaggcctcaactttcttgaggcccttaggaggcaaaaaaccagtttttcaatgacggggtaccacgtctccgcccctatcatgcgcttgctgacgtagtacacgggat

SEQ ID NO: 288635 - DNA, 839 bp, Cannabis indica
gtgatgagtatacgattaagctcttaattagaaagaaaatcaacgtctaattgctaaacaaaagttagaggccctttaatttagttcattcattttatttgattcttttattaattaataatcaatagagatataactaatagttgtggacatgttaaaggtttttcacttgatttttgtgatcatttaaagcaaaaactccagaaaagatggattcttcttgttggctacttttttatactatatagtataaatatatatatgtccgtacctaatgggtgtgcattttattttttattttcaacttttattattattattattatttcttcaaataatggtgggcctgggccctcgtccaaaagaagatcccctaatctttaaccatatggtagttgtttctttctttttgttccaaagaaaaagatatagttaatgttttgtgtgaattatccccttaatttaacttcatactgtgaaaatctgaatgtcatgttaactatatatcgaactctaactattaaaggtcaattagtcaggcatgaatatatataacccaaatcatgtataattttccaacatatattctacactactttagtttttgatacataacgcaattacaatctagagcgttaattatgatagcactatttgtatagatattaatcaattagcctaagctatttttatttcaatttttctttctgttggtacataataaattaatagaatacaaaatgtagaaggtacactaaaatatattcctttccaaaaaaaaaaaaaaataatatatactccatttttttttacatgtattatatatacagtagaacctt

SEQ ID NO: 288636 - DNA, 724 bp, Cannabis indica
agttgtggaccagcatccacttctcaataccatgatgtggacacttcctgatgagatccttgaacctctcccaagcctcatggagagattcattatccagctgacagaaattattaatttctcctcgcagcttagcagactttgctggaggaaagaacttagacagaaacttcgttgccaaatcagtccatgttgctatagaattcggtggcaaggagatcaaccaactcttggctcgctctctcagcgagaatggaaaaagtctcaagcaaatggcatcatcactaactccattgactttgaaagtctaacataactccatgaagtttgacaagtgcagattggggtcttcagaggggagtccaccaaactggactgaagactgcaccatttgcagtatggcaggctttatttcaaagttgttagcatcaacggcgggtggtcttatacaagactggacccccgtaagagttggaagaatgtagtccctcagactacgaccatttgcttgatcttcaacgccacctccattattaccgttgttgcctccattgttaccgccattagcattctcagccatgatttcttctgtttcttctgtttctcttacaagttttctcaatttcaggatcaaccggaaaaatgacaccctgtccttgacgtcgcatacacctttaattcctgaaatagacagataaaatattgaaagaaacaggttagcaat

SEQ ID NO: 288637 - DNA, 677 bp, Cannabis indica
gtggtgacgtcgtgaatctgagacaccatgtcctaccagacaagagcgtcttcctgaaactggaaagtggcacatacaactctatcattcctggtgacacccataaagttcagaattttggtgttcaccgttagccactgttcggccttcattacatcaggacctcctagaaagaccggaggtgcttgcttccggaaccgttcatacaaaggttccattctgttggccgccacaactatttcgacctgagcagcaggggcgggtgccactggaactactagcacaggcactgcaggagcaccctgctgcctcaatctctgaatctctaagtctcgttcctcaattctggcttgcatttcagcaaacctaacctcccaattctaggctccctgatcggcttgggcagcctgggcagcctgtggcgggttttcatcaccccgaccacgagccgtgcccctgggacctctacctcggcccctagctatcgggggaaactgagctccctgaccttgattcgaccttaccgaattgtcctggctcctggtagtccgcctggcgtccatctagtcggaaccgcctgcgaaaccatgagttggcatatcaggtcgtgttcaaggagaacttactaatgctgcttaatttggaaattataaacgaaacatgcgcctattctacta

SEQ ID NO: 288638 - DNA, 648 bp, Cannabis indica
accataaacaggagtaggaacagtgggggttccaccaacactcggagtcacccggggctcctgaaggaatttcactgcaccctcggctctcagagccttttcaaccatctccgcatacgtagttgcctcagtggtagtaataaccaaatcatgtctaatctttgcactcaaacccgccaagtatttttctttcttactgaagtcggttggcacaattcccgctgccaacttggccaaacggtcaaactttgtcgtatactctgtaaccgacattccctcagtttgaactagttcagtgaactctttccgctttgcactgcggactgcttcattgtaatacttggagttaaacaactccttgaattcttcccaggtcatcagcgtgacgtctcgagtgagggttatcaactcccaccacacgagagcgtcttcctgaaactgaaaagtggcgcaggttacccggtcatttccaaccactcccataaaattgagaatacgatcaatcaccgaaagccactgctcggccttcatcacatcaggacctcccagaaacactggaggtgcctgtttccggaatctttcgtacaacggctccatacggttgccagcaacaggttgttctgctggcaccgcaggaactgcaacggc

SEQ ID NO: 288639 - DNA, 628 bp, Cannabis indica
atatcactggttgatcttagatcgaaagatcttaatcctgatatggttaggtgcgatatcaagagtgttatttatattcttagaattgttcgttaaagcctaccaattagttcgggtaacacatacatcttgggaacataatagtacaattaagcgggagcgctaatcatagatacagaatatatagcttctatctggatatagaagtgaaatgatgatttccttggagcttggcttaatagagataaatgaaagacctcttatttcagtaattatattagtttactgaaatattatttataggaagctcagtgttttaaggataaaattcattgacgggtagaacgataaatttgtccctactcagtgtaaataatctatagagaatctttgattatttggattagaacgatggataattcatagtgtatctatatcgtggaacatatagagtgttctatataattaagagtgcaattctaattatatagtggcacaaggaggaattaataagttagaaaatttgcttggtaaattctggatctacttattggaagcttggttatataggctcatggtccccacaatagatgagataatactgtttgtaagactcagttaattggtt

SEQ ID NO: 288640 - DNA, 555 bp, Cannabis indica
caggtctgctcgcctaccgctgggcccacgagcagaactcgtaactggggattgggcggctgaccattagtagtctgggaagtattcatcgttgggtcctcttccatttcgtcccaggggaatgacgttcagcgattgctgacctacagtttggtaggctcttcgtatcagcacggtggcttgccgactacgatcttcgatctctacatgcccttaatgcctccatctctttatctctccattcagcgtacatatgcctttgttcgtcaaatgtgagatttactgcagcacgcagttcgtcctgatcatgatgcagagtgttgatatgaccctgcatgagtccgagcgcgtcacggggattttgtaattcagtggcatctccgatggtcgtctgggcgttggttccaagcggaacagttgtattatgaatgccctggttgggtgcagaactgttattcccagtcttttgcaatccaggcacaattcaagtaataggaactgtttcaccattccccacgcttcccgtctgtccgggattaacagtaggcggaaccc

SEQ ID NO: 288641 - DNA, 840 bp, Cannabis indica
gttcaatttgaaagtttcctttctggtcctgatctgctactgcgaaacccgattctgatgctgcaaatcaggaatttttttaagaaagttttgtacagctgggaaatcatttttgtggctgtctctagggttgctatgttctataaataggacctagagagcagccaaacgattttatcttctagtctcatattttcatatctttctttgtgagaagagtgtttcatttgtaaaaacctagagtgttcaactaggttttggttttcttattatgatctcatactattcttagaataggttgaagagaagctttgaacaagcgtgagtcttcgggagaagacttttccaagtctcattcgggaggaagtgagcatatatcttcgggagaagatttgtttaagccttacttcgggaggaagtaagcacacatcaatagctgaagggagttcactacttggtgtgtttcagagatcagattagcaaggtggattacaaagggttgcgacaaatcactagagggagtctaaatttgtttaagtcaattgcttttgtaatctttgatactttactaattgatttcattctctgggcgtggccccgtggactagtagtgtttgaaagaacactgataccacgtacaaatctcttgtgtcaagtgatttaattttctgcaattattttttatattctgtctgttctgttttgtcgctgcaaaactggtttctacagtaacagaattacattctgcttctgctgacgtatacagttttatattttgatatatattattgacatttgcaaaaactcaatttttcaattggtatcagagcgggacactaa

SEQ ID NO: 288642 - DNA, 702 bp, Cannabis indica
tgcatgagtaattgatcaatggaatttatctcctcttggtgtccactcctaggtgcaaggttagctacaatgaatttgtggagaattttggcctctaaagtaagttggtgtctttttggtttcataataagagggccatcaccacaaagatttctagaacactcatcaaagttaaagatgtcattatttttaagagagagtttgggttcaagcaatatgccactattgggtgctcctaacatttcattgagagattctacatttagttcaaaagccattcctctaagggttcctttaactcctaaaggttctaagcaaggtttaatgcaagcataaaaaccttgtactagtctaggatatattggagtattgatttgaatgaaagatgtccaacctagagtatcaaaatgatgactaaaatctacataatcaaggctagggagatcacaaattttacctttgagaatcttcctagaagagaagtcattgacaaatttgtgatgatcctcatcattgaagaataatgtgggctcttgccttgcttttgcccttatctccctttgttgaattgcactagccattctcttgtttgctcttgaggagggattagatgaagaagccatgaagaacacacttttttgtttgattgttggaagatgaaagttagggtttgaaagtgagattttgagagaaaagaaacaa

SEQ ID NO: 288643 - DNA, 528 bp, Cannabis indica
agcattctggtcgacttgggttacgtcagcgtctttctaaacggtgatttgagtatgggttctaggctacacgatcgttgtagtattctgctcgtatgttccccttcttctatttaggtcgttccttaggtcatgggctgttcccaacctatcgaacacagaagagcctggttgccttagcgattgattcgcttggttgacagatgggataacgccattattctggttggaaccgtcatgtatggctcctcctgatgaattcccggacaaggtctgctcgcctacctcttggcccacgagcggaactcgtaaccggggattgggcggctgaccattagctgtctgggaagtattcatcgttgggtcatctttcgatttctccctaggggaactgacgttcggcatgtgctgacctacagtttggtacggtctcgttcgtatgacgtcacggtacttgccgactacgatcgttcgatctctagggtgttgctatgactctgcatgagtccgagcacgtcacggagattt

SEQ ID NO: 288644 - DNA, 622 bp, Cannabis indica
ttactttaaccaatgtcctgaaaaaggacataacatttatccaaggtgcaagtaaactacattgtagattatcctatcagttaaaccttatgtactgataaatcatagaaataaatttaatcacacaatcttgattattttccactgtgttaacaacacaataaacaagaatataagtgtgataaggatttggatgaatttataaataaaataaataaataaatgattacatgaaccaaataacacattaaacaaataattaaacaagtaatgaaattaattttgtttctttattgataattgaatataaaatattatattgaaatagagttttatttagggcacaaagcctaacagtaagtacaagtgtcagtgatatatgatgagtatcgagcgcatgtacgagctcacctgattaggtgatgggattttcctggcgacgtactgggcgtcagtgatatatgatgagtaccgagcgtaggaattttttcaagctggtcatattaaaaaaaagtcgtcaaaaattaagctcatggtcctatttttatcattttagaaatacaaggtctattttgtcatttaataaaacataaggtccaattggtaactttagcaaaataca

SEQ ID NO: 288645 - DNA, 608 bp, Cannabis indica
tggcttatgaattctgtttctgaacctatgcttggacacattatcaattgtcaatcttctcacgagatctggagtacttttgctcaaatatttgcttcaagatcaagggccagaataatgcaagtctgtggcctcttacaagcaaccaagaaaggttcatcatccattgatgactatttcttgaagatgaaaagctatggtgatgcacttgctgcggctggacaacaactctctgacgatgatctcattctgtacattcttggaggattgggacaagaatatgaagctgttatagtcaacattactgctcgtgaaaatcctctcagccttcaagaagtacaattcatgttacatagtcatgaactgcgtattcagcaacaaacaacagactcattagctaatgtccaagctaatatagccaatttctccagtaatcacaattcaagaggtggctatactggccgcggcaacagaggacacaatcgaggaggtcgtggttactcaggaaacagaggaggtcgtggaaatcgccctatgtgtcagctgtgtggaagagctggacatacgcccaaaaaatgctatcaccggttcgatatcaccttcactgg

SEQ ID NO: 288646 - DNA, 764 bp, Cannabis indica
ttaggtctggtcgggggcagaccggggatatgctgggcatctccggaggagcaactggagccaatactcctgtcgcaccccctggtgttccctgcggcaaagctccagttgcctgacctgggttgagatgaggcaaccgattcttgatccactcgtagaggtgtcccaatcggattaagttttcgatctcatctttgagatttttgcattcattggtgctgtgcccaatgtcgttatgatactcgcatctcttgttggggtccctccgggaactatccttgtatagaggaggtggtgtccggtagtgtgtattttgcctagtagcaaagtacacacgttcttgggagtccgtcaactccgtgtactgggtatattggggagtgtaccccctttttcgtcatttttcctccgtccaggtttggaggatcttttactcctctagccctgggatggaccggccaggctggcagttggagcggagtgcgagggggcttgtccatttatccccgagggattcccaaaatgggacgacgcgggggccaaggcctggccctggctgtatccgggagtagcggagaattgtatgccgctcattggtggagctgcggtcgggagagtacccgacggctgggctccgggcatataccctgttatcccggtgggataatatcctccataggccactatttgggcctcttcaagattgatgtatttttggactctcttctggaagtcctgaaggtttgcagctccttcctgttgta

SEQ ID NO: 288647 - DNA, 506 bp, Cannabis indica
aatagtcattcaattggctgatcgatctaatgtctatcctcgtggagtagtggaggatgttctcgttaaggtaaaaaattaagttttcccagctgattttatgttctagacatggaagatgactctattccatgcacaatactggtattgtttgatagaccatttatgagtacaacgagtatgaaattggatgtcaagtgaggaacattaacgatgaaatttgatggtgatcaaataaatttcaatgtatttaaatttgataatccaacatcagcaccagaggtattgtcaaagtcgagctaacaacattgaacaaagcgaacttacgagaatttttcttgcccttttctttttattttgcattaattttatttgactgagccttaagaacaatgcttatattaagtgcaaggggagatcaattgttgtgtctatctagtttttttttcttagttgttttttttatcttttttttagtttatattaatttttcttactttaatttt

SEQ ID NO: 288648 - DNA, 926 bp, Cannabis indica
gcataatgtcgctaacatatcgctaacaatgtcgcgaatgttcattttcaataaatttaaataaaatacagaacagtaaagaaacatacccgactgttgaataacagtgcaatgtcggttgccttgacatcttgtttccgctggccctccggtgttttccagctcaacattctggggaacttggtcccgttgcagtgggcatacttcttccccaacttctcaattgcttcgtatgcccagtactgaaaggcaggtacatagccactaacagtgtactttgcctcctgagcaatcttcttccccttcttcttgtcaacattatccttgtaatgttgcatattctttcctaatgtctccatcagcttacgaaaagcgcgctcgccccacggatacttaaagaagaattcgagatcgttaacaaacttcaacatctcaggccaaacttggacattgccctcctttgatactaatacaccttcaatgaaagcgatcagtccaagcttgtaggcatcatctttatcttcgcacctctcaagttggagcataagggagtccaactgaacagaactcttcccttcaaaataagtccgaactagatggtcgttggacttggcgtgtatttcctcgtctgtaggggcactacccataggtaagccagtaatgagtccaaactctatccgtccgaatctcatgtcatttctccctacatgaaaccaaacctcatcctccttttctgtgtccactttcatttttcgtaagaggaggctgtggaccaacgcgccggagaaagtcaactctccagcttcccaaaagtgtccgaaaggactagccttcactgtctcaaccaaatccatctcagtaaacttggccttgatatatctgaacctatctgtaccccgataggtaagacgtcccgtgaaatgaga

SEQ ID NO: 288649 - DNA, 681 bp, Cannabis indica
aaaagtgatgctgcaacggggaagaagccccttaagtgttggctttgccaaggcccacatagggcggctgcttgcccccaccagtccaagctgagtgccataaaggcatccattgctcaagaggagcaaggatgcggggaagatgatgaggatgaagactgcgcgcacatgagcgctgttcgattaatggctgctcttaagaagcatggcgtcggagggaagaaagcccttgggaaggggttgatgtttgtggaggccactttaaacggtaagcaggccaagagtgtactgattgacaccggcgcaacacacaacttcatctcagaaattgaagctaagagagtgggcctaaaactggagaaagatgcgggtcgcatgaaggcagtcaattccaaggccatggccacaactggagtggccagaaaggtgaatgttaagattgacggatgggagggacaacttgacctcgtagcggttcgcatggatgacttcgatgtggtgttgggaatggagtttctagcagagaagggggccattccaattccagcaacagggaatctcctgattatgggtgagaatccttcaatggtacccgccaaagtgagacagcccccagaagtcaagctactatcagccctacactgaaaaggggcctgaagagaagaggccaacatttgtcat

SEQ ID NO: 288650 - DNA, 77 bp, Cannabis indica
aaatttatctttactcggtgtaaatcatctatagaggatctttgattattgagattagaacgatggttaaatgttta

SEQ ID NO: 288651 - DNA, 624 bp, Cannabis indica
ggtggggatggtgatggcagggatccccctgatccttctagggtaccgtcgtcctgcgaatcaggttttcatattttttcaaatctaacattgttctgaatataaatagtgaatgtatgatttactaataaaattatttttccctcgaatatatatagttccacctccggtcagaaagggtcgtggggttgcagcaaacgctaacctcgaaaaaaaaggagagaagctggtaagcccttaccggtggaggtagatcttgaaactggcaaagttgttggcactgaagcaagcaattatgttcgatttcttggccaacaagtaagcatgttgtgcccgggtggtcatctaaatttttctgatgtaccccaacaatataaggatcaagtgctcaatcgaataagagtgagtgatttttaattattaatggttgtaataattttatgtcctcatttataaattaacataattttaaattattttattacacagtactattttgatatcgatgggaatccccaccgagacctacttatggggactttatattcggtgatggcggagcggtatagtgagcgaaagacactcagacacaagcattttaaacaacattacaaaaaaccagaa

SEQ ID NO: 288652 - DNA, 517 bp, Cannabis indica
gaatcataactgaaattggacctagatccagaaccgtaaccggaccaggacccaaactccaaatcaaacctagacccgaattgggagccggacccggatccccacccaaacctggactcaagacccgaacttgaacctgaactcagacccaaacatggaaccagactagggacacaggaccagggtcgaaacctagaaccgcacccaagtctcaatcccgaaccaaaactaagaaatgggacctgaaccagaacaagacctagactcgtgacagtgatctagatcttgactcgggattcaggtaacgatacctggaacagaccagtagtttgtgtctagttctgggactcagactacgaccagaacctagacatagacttgggacccaaaattagaacttgaacaacaatcgccgaaccaagaccctagaataagactagaactgtgaatagtacccggacaaagacctaaaaccaaacacaaacctagcctcagacccaaactgagactggaactc

SEQ ID NO: 288653 - DNA, 651 bp, Cannabis indica
attttttggaaggctaatccccaggccaacttcgactacttgggcgacgccaaggacatgtacctcgagtactgcgcggcccaagttgcctatggtgggaaagaggtggctgcttcaacttccggccaagcttctgaccaggctgctgatgcttctcctactcaaacaacagatcctcctgctccagtcggctcagaagaaccaaatccagagcctgggactccagccgtttgaacattgatctttttatctctcctgtttatatatatatatatattatatatggccgtaaggcctttaagacatcatgaccggccaagcggtctttaaacttggaattaattttcattttttggacaacgggctgaccgggcagcttttaatcccggtattttatgctcttgttatccttaatgaatttcattctctgtttataattgcagtgcaattgtgattgttttatgtttaccagatgctttgtacaggtataggtgccccctaagtgaccgagcagacgtatgactcttggtcacttgtcttttgcaaatatattgcttttttgttcggtgttttgggttcgactgaaccttttgtacgcactctaggtaaattatatcatgcttatttttttgactcaatagaattggaaat

SEQ ID NO: 288654 - DNA, 672 bp, Cannabis indica
taagcagtttgaaaagatattggaagaggctccattatcaatcttggttctggccaccattttattggctatctagacttccacgacctgcgagtcgttgtgtggaaatctaattttggcagcgtcttcatcgttgaaagttatggtaggccctcctgctcgtggaactttgggcttcctttcttccacggtcaggataacttcctcttgttcgtgctgcgctgttcggccatacctctcccgagctttgcccgaatctctagcgatattcaggcctccaacgatgacttgcagatgtcaatttaccggtggaggtagtaaatcttggttattgtcgtttctctgaccctgatcggtcttgacatacttctgcaggtgtgggttgtttttccttatcaagaattcaatttctcgcttcaggttgttgcattcattagtgtcgtagccatagtctccgtggaaccgacaaaactttgtcatgtctctcttgctgacatctttcttcatgggcccgggcttgttatatggggccagcaactgagttgccatgtaaacactttctacgtcttcagtcaagatagtgaatgcagtgtactttgctttattctcccgggagcttgttcggatttgccagcgaacttccttcttccttcccttgcctgtgtttgttgt

SEQ ID NO: 288655 - DNA, 778 bp, Cannabis indica
tgtggtaagtgttttgtaatttccccttattgttttcttttttttttggagattctttcttatacttgtattgttttttagcttgctgctgaagccggccgtctctccaagaacataatcaaccatggcttcgtcctgtctgattttggggacatggacgaagtcaggaagattcttcaggatcttactgctgagaggcggctttaccaagaggctgctgagcgccgggaggccgctgccaaagctaatgaggaagaggctaagcggagggaagcccaggcggaggcgatgatccgggaggaggccctgcggagagacaggctggaggccaggcaccaagaggagctgagggcggaaggcgaggccactgcaaaggccaggcgggagcttcgggaggccagggaagccttggacgagatggctgccaaggtgagatccttagaggaaactcaccaggcaaacttagaatccagggccactctggccgcggagctgaaggagctcagggacttcaaggaacaagcctcaaagaaggcaaaaagggctgagcttctttctcccgtttcctgcagccggtgcactaagcgctttgacgatggcgtcttcatggcttggtctaccaatgaccagaatatcaagcttaccttctaccccaaacctgaggagatgatcgccaaatttcgggagaagaagaaaaagcttgatgccatggtggaggcacgcatcggacctcgtctccctccgcgcattgattaggccgctcgagattaacccagta

SEQ ID NO: 288656 - DNA, 732 bp, Cannabis indica
attataagaataatctcttaattatatcctttatttagaaataccctttgattccaattacaatgacattaaataattaaaataaatttggaaaatttggggtaaatttggaattgcagctgaactcagtccatttaattaaccgagctgcctacataccttctttgtgaaggatcaagccacttgtagttcagaatgcggtattttaaaatgcggtattttaaaatttggatataaggattccagtagatgaccactttcaggaatcctgtgctattttgagaatttggaaaaattcctaggtgtatgaccttttatggaattttgagagttgtgttttataccattttgcggtatcggggactgcacttagtcttagcaactaagttgcctacgtatccttttataggaatcaagtcaaacgtagttccgaattttaattttttatgaggtgaatgacctcattttctttggaatgccatttaatttgttatggctttgaattttagtgcactttttaatttttaggtaaaattaccatttttgagatttttgtgaggttaatgacctctttaaaatttggtgaggtgaatgacctctttaatattccaagattaattttagtgagctcatttggaattttgtgccattttgtatggctttagaattttaccactttttggtgataaaatttgggctttgaaatctttttattatcttttataaataaaa

SEQ ID NO: 288657 - DNA, 569 bp, Cannabis indica
gaataaaatcaacttaattattaattctaatttaatatttaagaaaaatattctaatttaagttggtctaaaattaattttcaacttaaatatattttttttacttaattaaatattagaaaatataaattagttactagaaattttaatctagaatattttattaaactaagtatatttatctaaattaattttaaaataatctaatgaaaaattaatttcatttattttaaaattaattattttgctaatttaatttttattagattaaactagtataattagcctaatacaattatttaaataaggcaaatgagccttcacaattggggtagttcatgtgagggagggttgggttcagtatgtcgtacccactactaatggcctcctaactctcacacaaggcccaaaggagaggaatttaacctttcattaaataattgttattcattgaataagcccaatactaaggcctaaataaaacaatcatatgtgacattttattttagcaacttagtccatttaaatatctagaaataagtgggtttcatatatgcatctaagcccaa

SEQ ID NO: 288658 - DNA, 632 bp, Cannabis indica
aaagtcagaactcaagaagttaaaaaaatttcctgagttagggcaaaaaagttcatgaagcttagaacaagcaagatgaaagtcagacgttatacagttcagaaacaagcattatggctataaacccgcatgaagacatgataaagaagaatcgcagaggtttctaagcctaggatttcctaagcatttttctacagcacagtagaagttgcatttaaatgtaaacatgcaaagataagcataaaggaaatcagaaacttactcaagattcaagtgtctaggttcaagcaacgtctatccaaccagcaattgtacaaaggcacttcggcgactttgaagccaaggaattttcttttcgctctgaagcttgcttagcaaagaagggtgatgaaatgagtttatgtgccaatgctgtggatatttataggcaagtcatgaaaagaggtaattgtctcaaagaaacctcagacgcctcatcttcccgccttaaaaacgaatatggaaaatcaaaagtaatcgagtgcaaccgtcaaccatggagagagaaaatcggatttcaaaatattaattgtcagagcatttattagccgaaaatcaaaggacgcccagtcagcttcacatcgagtctcgaa

SEQ ID NO: 288659 - DNA, 691 bp, Cannabis indica
aatgcaacagtgaacaagaacagtaaaaccagttgcagaaaaccagtaacaagaacttgaatatggcaataatggacaatcaattttaacagtaagagatttagagaagagagatcaaacacaatagatttacgaggttcgaacaagtgatctgttgatcatttgcctactcctcggccagaacagccccaaaggctttgagtctttattaatgctagattgagagagaattacaagttgttttacaaagtgttcatgacacacatacactcaagaagccatgcttcaataacaactcatctcacacaaaatttctctctataaaacactgaactagctctctctaagttcccaaaaacaccacacccttcaatgttgcagcagatggctatttatagccttatcctacaaggttcgatcctaactgtcataacagacagttaggtaaaaccgttatgtttagttgtgtaggatttagacttaggtgatgtgtcattcttctattagtgaccaacacaacaattatccaccttggtcattaatagaaagaaagatttgatgatgcttagggactgaactggtcttgaatcctcactcagcaattgaggatgtttagcaaatctaggcaaagcctaaacttggctaaactaacatattttgtcatcatgtcagcagggttctccttggttcc

SEQ ID NO: 288660 - DNA, 736 bp, Cannabis indica
agctcattcggagaatgagttgattcaactagagcatgaggctaagttaaagggagtgcaagggccaagcagtatgctcaggagcccttgaatcctgaagatgaggctgaggaaaagcaggtgactccactaaagaggaagaagaaactttcgtccccgcccaggcctgttgaacatgccatttgcataagggagcccatttcacctgctcggccgtcccctcccgtgttcggtaaagggaaagctgttatgtctgaaataagatcgatgtaaggtgatgatgaactttcgagtcttgtttgggcagttaccttgcatactactttgtcttgttttggggcttcttgacttttatgccttatgtttctgatgtctgtgttttctaaccatgttgtttttcgttctgtacagatatgtctcggcagatgcttgacgctctgaagaagagaatgggtggaagctctagcgcgtctcctccgaccaagaagtctaaaggcggtgaggggtcctcttctaaggaaaagaggcctgctggggaggtcattgatctttccaaggatctaactgctgcaaacccctctaccccaaaagctgctaagtctaaggagtctcggggaggaagcttggacaggtctgcaccactgaaggttggctctgagctagtcaggagttaacttgaacgggtgcgagcacctactccacctttgtcggtgcttccagaggccaagaagggcaa

SEQ ID NO: 288661 - DNA, 584 bp, Cannabis indica
tgggggttccaccaacactcggagtcacccggggctcctgaagaaattttactgcaccctcggctctcaaagccttctcaaccatatctgcatacgtggttgcttcagtagtggtaataaccagatcatgccggatctttgcactcaaacccgctaaatatttttctttcttactgaagtccgtgggcacaattcctgctgccaacttagccaaccgatcaaacttcgttgtgtactcagtgactgacattccctcagtctgaactagatcagtgaactctttccgctttgcactgcggaccgcttcattgtaatacttggagttaaataactccctaaattcttcccaggtcatcagcgtgacgtcccgagtgagggttatcaattcccaccacacgagggcatcttcctgaaactggaaagtggcgcaggtcacccgatcatttccaaccactcccataaagttgagaatacgctcaatcatcgaaagccattgctcggccttcatcacatcagggcctcccagaaacactggaggtgcctgttttcgaaatctttcgtacaacggttccatacggttgcca

SEQ ID NO: 288662 - DNA, 604 bp, Cannabis indica
atacttatccaacagaaagaccatgtggtgtaaaaaaagcaaaggaaaaacaattaggtaatgatcaattcaacaaactaatggaacaaaataaagaactcattaaagttattgaaaagagtaacaaggatagaaatgaacgtcacagaagaaaggctgacgaaaaaattttattcacggatttgaattctatatccgatccagagtttcataagtacattcaaagtgaaaaaagacgaatttacaaagaaagggcacaaacatccgaagttggagaacaaggagaaggatctcaatatgagggatctcaatatcagggatatccaaatcagggatctcaatatcagggatcacaatatgaggggtcacaatatcgagcatctcaagattcgggacatggcgttgaagatgaagatcaacgatctcaagatcaaggtgaaagagctgaaaatgactcacaagtttatagtccgtattatgactatcttggcggatcaagaaataatcttccacattattaaattgttgtatctcattttgtctttgaaggttcgtatctgtgttattacttttccgtttaatgtttggtgtgttgtattttaat

SEQ ID NO: 288663 - DNA, 514 bp, Cannabis indica
agaaccgtttgtttttgttggatcggttcagggatctcgaatcccggtgatttcagccttatcagctaaagaattgttatgtgatgggtgcctagggtttcagggcgtagtggtagataccactcggtcagatactgttcggccagaagacatcaaggtggttcgagaatttctagatgtttttcttgaagaacttctgggtttacaacctcagcgggaaattgatttcataattgacttggcacctggagcagaaccggtttccaaggctccttacagaatggctccagcaaaacttaaagaattaaaaattcaacttcaggggttgcttgacatagggtttacccgacccactgtgtcaccctggggagctccggtactatttgttaagaagaaagatggatctttgcggatgtgcattgactactgggaattgaataagctaacaatcaagaataaatatcctttacctatgatagacgatctttttgatcaacttcacgggaagagtgtc

SEQ ID NO: 288664 - DNA, 668 bp, Cannabis indica
atttttgagtttcatagtttttaaaaatttctaggatatcaaaaatcgtatttttgtcatacttttacttgggtgttttcttggacgttctatataccattttgaagcttgcaacgagctctacaacatgatgtatgttttagagcaaaaatataagttttattttagtgaatttataccgtggggtttggtagaaaaccatagattgtcttatgttaatattaagtagtgttttgggataaacagttattggtttaccgttgttgtgacatagggccaagattatcggggatatttctccacttgagttggccaaaatatatgaacctggattaaaggtaagaaaagtatattgtactgcatagtacgttgtatgtaatataattagtatcgttatgaattgattaatattgagatatagttaatattgttatataatgaaaatactaattggttgaatattgataatgtgatgttattatgcatgtgatatatgggctctcctgattaggtgatgtaattttcctggtgacatacttggcgtaagtacgggggtcagtgatatatgatgagtaccgagcgtaggtacgagctcacctgattaggtgatgcgattttcctggcaacgtactgggcgtaagtacgggcgtcaatgacatatgatgagt

SEQ ID NO: 288665 - DNA, 736 bp, Cannabis indica
attttactttatgcgaacgataatctgaacttactgttagtcgcaatgactgtacatagttccctatgagttttttctcagatgatggtgtcagccttgttgtgcatttttgtgcctcctttctattattgtatgtccactcttgcatttgtgccctcaagcactccattaatgttgtcactggtgtttcccttgctgctaaatttgctgagttcagtgcctcagctatgtttgatgtcatggtagagtacctataatttggacagtttctgtcatagttctacttttgaaaaaaaactcaaacgcaacgcaaaaacaacgcaaatacaacgctataaataggtgaacatatcattaattttatccttcttattagttttcacctgttgttttctgaatgataccttgaccatttttcatggccaattttctccaggtacggtcttatgcgcttatccaagttgtctagctccctcatatgaattcaaactccatttctgtgtaagcttttgcagctgcaaagaatggcactctgaaatgctttgcatttttcttgaattttgttttgaggttcgacaagaggtggaagatgcagtagccatgtgttatttcagggaacactttcctagttgctttgatgatgctttcatgtctgtctgatattaggcattgacattctcgaaccccgaatgcttctcttattttttttaagaaccactcccacgatttatcgttc

SEQ ID NO: 288666 - DNA, 594 bp, Cannabis indica
agttattcttgacacaagaggacaacattcaaaagattattgagaagttttcaatgaaagattcaaagaaaacttctcagccaataactagccagtacactttaacaaaggaacaatgtcctaagactgaagcagagaaggaagcaatgagtaaagtgccttactcaagtgctgttgggactattatgtacttgatggtttgtacaaggccaaatctggcctttgccatgagtaccttgagcaaatacatagcaaacccaggaaagattcattggcttgctatgaaatgggttttcaggtacctagtagggacacctaaggttggactcatctacaagcaacaaaagttcagcaccaacatagaaggatacagcgatgccgactatgtcgggacagagacaaccaaaagtctacttcatcttacatgtttctactaggaggaaactgtgtgagttggaaagcccaactccaacctgtggttgcactttcaacaacagaatcggagtacatatcaaccacagaagctattaaagaagccatatggatgaaaggacttttgatagagatcaagttacttaaagaggttcctagagt

SEQ ID NO: 288667 - DNA, 545 bp, Cannabis indica
atttggattccttgtgaaaaattaagcaattttcatttttacggaacttaattccgatgaaaaacgaaaaagttatgttttttggaaaaatcgaatttcgggtgtccatggatgctcaatcgcacgcgcagacccttcggtcaaggaggatccgcgcgcgcatgggacactgcatccgcccgtgcatctcgcccagggaaccctgcaacccgccgaggtttctcggcagatggggctgcattccttcccgtccgcgcgcgtaaagggcattttttccccaaaaattcaattttttcatgggattgtttcccaaaatttattttttcaattttaaatatttctaaattgaaatatttccaattttaaaatattttcaatttggaatttttccaattttaaatatttccattttggaatatttcattttttttttaaaatatttcctattatggtcagatttaaaaaatttgtttaacttctttaatatttattttattattttaattataagatttagatattttgatatttaacatatttaaatt

SEQ ID NO: 288668 - DNA, 787 bp, Cannabis indica
aggtgccccccaagtgaccgagcagacgtatgactcttggtcacttgtcttttacaaatatattgcttatctgttcggtgttttgggtttgaccaaaccttttgtacgcattgtatggtaaattataaacatgctgattttttcgactcaattgaattttgaaatactatctttattcatttattgatcgaaaagtgtatttgttaccgtagtaacttacattagagctatttgatctaatctgatcttttagcttaacatgaaataaaacaaattgcagacataacaaactgtactttaaagtggtcacccaacctgagtactttgtttcttttatcaaaacctttgggcatagtccgtctagaaggccattcacttaaatgcaaatgttcattcagtacttaaagtggtcacccgacctggtactttattggtagtattttcttaaatgttctccattccagtaccggggtactagaatgagttgcatgttttaattatacttacctaatttgtatgctccggagtcgagaacttcaaccacttgatatggtccttcccagttaggtcctagtacacctgccgtactgtctttggtgtttaggaatacccttctcaggaccatatcttccatgaataatttctgagctttcacttgtttgttgaaataccgagctactttttgttgatgggccatcaactttaagtttgtagttgctcgtctttcttcgatttcatcaagtgattctgcaaggaatatgtaattggtaccttgatcgtacgccaa

SEQ ID NO: 288669 - DNA, 862 bp, Cannabis indica
acatcagaaagagaggctgacacaataactggcagctttttatcttcacccaaaaactcatacctcaagtgactaggaagcaccttcaattcaagttctggaggtttttcagtagatggcatcagctcttttggaactgctcccaattcctcataataccttctgttcaagggcccataggagtcaagccatttcacataacccatgacatcttgtccctcttgctccgtcaattcatcttcagttaagctcagttcgagaggatcatctagcagctttttctcactcacaattgtatcaatcaaatcaatgaagaaacagttatcacttgcctttgggtatgtcatagcctttagcacattaaagaccacttcttctccttggactctcagctttaattcacccttctgaacatcgatcaaggcttggccagttgccaagaatggtctcccaagaatgattgggacattgctatcttcttccatatccagaacaataaagtcagctggaaagatgaacttgtcaactttaactaacacatcctcaatgactcctctaggatgagctagtgatcgatccgccaattggagagttactgtggttggctttgcttctcccaactgcaatcttttaaacactgacagaggcatcaagttaatgctggctcccaagtcacatagtgcatttattccttcaattctcccaatagtacaaggaatagtgaaactccctggatctctgagtttgggagggagtttcttctgtagaatggcgctgcactcttcagttagggccactgtctcataatcctccatctttctcttctttgacagaatctccttcatgaacttcacataacttg

SEQ ID NO: 288670 - DNA, 152 bp, Cannabis indica
taaagattcagcttcaggggttgcttgacatagggtttattcgacctagtgtgtcaccctggggagctccggttttattcgtcaagaagaaagatggaactatgaggatgtgcatcgattatcgggagttaaacaagctaacagtgaagaat

SEQ ID NO: 288671 - DNA, 688 bp, Cannabis indica
ccaagcagttagtcttatttataaaaaaaaacaggaaggtgttaaggagatacaaggaaatatgtcaggaattatgataatgatatgtaggctttgaatatagccttatcacgaggagtagcttcttccatctagcctgacataaaagcagtatacctattttagtaaacaagttatattatattatattatattatatataactaacatattactaagatagagtaagttcataacatctctctgcagccattaagaatagcagggtgctacaaaactaggctgttgagattttacaacctctttctacaggccgttgcaaagtcaacactaccacaaaatcaggctataaagagaaataaagtggtcacacgtaggcttggtacatgaaagtcgaaaaaaaaaatgaaaagaaaaaaaaactttctttaaatatcatcaaaagtgagagggtccggcgccaccaaaaggatctgataaaggaacttcaaatgtattactgaaaaggataacacgatcattaggattaggaactgtcaatgagactggatttttgtccatctaagtaatgacgaaaccagacttgaacctcatgttttaggtagctctatatccctacttaaattgggtaacaaaagaaaataccatatccctctcgtgctcacgagaatgcaccttagctcagctt

SEQ ID NO: 288672 - DNA, 696 bp, Cannabis indica
gtctacactgatagacaacatattaactctgtatgtccaatcgttactactcggtcaaaatcataagatcccatagtacataattcataattatgtctttctattccttctatgagatctcctaagctgatctactgacttaacttagtaacaagttaagtattcatttctgatagatattcaattagagcacttcttatttccactcacttacttgtctcaataccttgtaaatttctgcttattaacacatcacttcctcttaataatttctggaacgactaccgattttgcatcctaatatgaatctttctagcgtactttgtcctcactcatacacttcccggggtgactccccgaaggatttcccatcttgagattaccccaacttaaatatgcttaactccaaagtaaactcatggtgggttatcagaaagtagatgcttctttgtcgttcttaattgtatttcttgctttcattctttcattaataaaattcaattgctatcactcccttcataaacctcttgcaattcctcatcggtttttgttcacttaaactcgaggaattcccatcttattgtcaacttaaatcttgttcatctccacttattttaacttgtatcaatttcccttgaattgacagaacttttaattaattttttttttccaatcatttacgattaaccaccatta

SEQ ID NO: 288673 - DNA, 599 bp, Cannabis indica
taattggttttaattaatcaatcataattctcaatttagactatgtctatttgtgaatttatcacttattaatggcgaaacagtaaatagagagtttatagggaatatttattaattaagaaactttaattagtttaattaataaatataataaatgacaatattatttaataattaattatagttattaaatagttagaatttacatttatatggttgaatgggaaaattggcagtttttgagaaaatgggaaacatgaatgataaaataggaaagttgcaaaagtgaaaggcttgtttccacaatgctatggccggccactatagttgccttttatcattttatttttcattttttaatgtcaagtaattcaaccttaaccctgtgtggtattctataaatagaaggtaaaggcttcaggaaacaaacacaacacaattgctttattttcatttcacagaaaattccctgagccgccactctctctctttctttcttctctgtttcgtaattcccctaagtgatagagtagtgcccacacacatcaactaatacctcaatcatagtgaggaagactgtgcagaatttagagtcaaca

SEQ ID NO: 288674 - DNA, 875 bp, Cannabis indica
ccacttttgggtttgggactaggttcaaatctgggtgtgggttggggccttgtcaaggttcgggtttagggctgggtcctaaatccagacaccgactacaggttttgtccaagccctgggtccagatccggatcccaatctcgggtcccagtcaggttccatatctggtgccgggtcacgagctgggtcttaggttcaagttcgggtcttggttgggtactaggtctcgttcctagttctgtttcccaagtccctatcctgattctgggtccaggtcccggttattgtgtgggtttgtgtgccggtttaggttcgggttcgaatcctactctcgctttttgtttaggtctctgtcttggttttgatctgggttcgggtttgggtttaggtccttgtctttgtcctagtcgtagtcctagttcggttctagtcccatttgcaattttgagttcgagtttgggtttgagttcgggtcgcagtttgagtcatggtctgagtttgggttcgggttaagatttcagtctagttccagatcaggcttcgggtgtgggtacgtgtcatgggtcttggtctatgttggctacgagtccacagttccaatcccaatctgagtctggattcagctctaggtctaagtcctatgttctgatcttggtctgggttcgagtttgggtccgggtctgggtctatctttgggtaggattctaggtgtgggtgtttgtgttcgggtcctagtctgtgtccgaggttttgtccaggtctggacccccatctgagtatggtctaggtccaagttcgggtcccgagtaggggtccaagttcgggtctgagtcaagatctctgtccaaatctaggtccagcatttcgatcccagt

SEQ ID NO: 288675 - DNA, 602 bp, Cannabis indica
acatgttaataaatctagatcttgttaaaataagttccaacaagtgcgagcagctcgggtggtgctggtggtgtggagtagtcaacttggcgccttgtgcttccttagatgcactaggtgcatcgagtcctttggaccctgtcctttcgactttagatgcacgtggtggagcacctaggaccctttgggcgaacttggtgtatgtgccttctttgtgaatcatcaatatcttgagcaaaaattcatgcacctttactttggattttttgaaggataacaaacttaattagcctattattattcattgtgctctatcaatatcttcatataataaaatttgtttgatttacctattaatgaatacttctattttcctatacaaaaagaaagagtataggaattgttattccatccttccaaactaacgaaacattacaaaagaatactaccctccttttggaaaaatgctaaaggacatttatagtgcttaacacttttataaggtattattttattattgttgcaattcaactatcagatttcatttattttaatttaataaaaattatagagaactactaatcaattataaaacgtcatct

SEQ ID NO: 288676 - DNA, 594 bp, Cannabis indica
tttcaccacctacccgaaccttcttcttgtttctctgtcagacactattcatcttctctttcagtttcaaaatggtgagaaccaagaatctagggcactctaaaaaattagaagaaaccgttccaactccttctagtgctcccccctccgtcgtcgtccgtccctacgttaccgttttccctttcccttccgtcgtcgtttggttcgaaacgaaaccgtccggtagggaagttacttactacgtccgttcccccttaccccgacggtcggtaagtaacttcctaacgaaccgggcaaccaaggaaccgaaaacccgtaaaacccgtcccccaaaacccgaacgaacgttaaggttcgtccgtccgaaactaaacggttaacggggtaacccggtacccttacgtccgaccctaccggtacggttaccctttccctttcctttcgtaagtaaccttcccgtaacgggaaaaggtaacttcccttccccttcccctaccttaggttttgggttttcccgtttccccttccccttccgtcgtcgtcgactactaactaaggtcggtcggtcggacccaaccctaccctaacccaaac

SEQ ID NO: 288677 - DNA, 766 bp, Cannabis indica
tttttcttggatttcttttcagggggatgatacgtggtgtcagcagaggattttcttttgggttgaacacgttcactggttggggtaggaatagagaccttagatggaggacgaggagggcctataggtttcgagggagactggtgactcgacgaagaacgagtgacacgtttggacacaggtggggaaggagatgaaagagaaggacgaacctttttagagataggaggagccttaccttgaaatgtacgaggtttctgactgaccggaggtgagggaggagacggagttgactctgaactcgggaaaggtgcagaaccaccagcctccgactggtaaaggacaatgtcacgacagggattaggcaatgcagacgcgacagtaggaggcactggaggatcatcagtcgactccatggatggaacaaccatagcaacaggggttactgcaatgggtgtgatattctccatgatagagagaaaagaatttggatgaagcagagcttagggtttcagagaggaaagtgaagaagtgagactgatcactttccgtaggccttaagtataggcaccctgacacaactgaccaggcaaaaaaaaatgatgatgattttttttttaaaaatttgatttttgccaaataaaccgtacgcgcccaaattgaatatttactaccacatcatacggcacactaaacgaaacaaaccaacgtcatcaggcaataagtgtatcaaagaaaccagaattgtgacaaatataccccaata

SEQ ID NO: 288678 - DNA, 615 bp, Cannabis indica
accagtttttttgcgatattttgcgatatttagcgatgtatttacaatgatagaataaatctgaggtcagggatgaagtttagtgatgatttgcgatatttagcgatatttcgcgatgtttcgcaatgtttagcgatgatattcgcgatgtatttcgcgatatagtgacgtttttgcgacatctagcgatattttgcgacatcgtcaaaaatcagaaaaaaaaaatgtagaaaacaagcgttgttgtgaattaaagacatttagagatgtttcatgatttcgcaatgtttcgcgacatttagcgatgttttgcgacatcgtcaaaaaacagaaaaaaaaatgcagaaaacaagcgaatgtgtttcgccggaagtggtgcgatggtcgtgggttgtcgggtgtttctcgtgggtggtccggtagggttttgttgggaatgggtttggagagttagagaaagagagagaaacgagagagttagagggagagtgggggtttgaaatgaggagggtattgttgagattaaaaatgtttggagggtattatttttaggggagctctatttgcaccccttaaacttataaatacaccccattattaaaaaaaatataaact

SEQ ID NO: 288679 - DNA, 544 bp, Cannabis indica
tacagtctgataggctctttgtattagcacagttgcttgccgactacgatctttgatttttgcatggcgagcccttaatgcctccatctctttgtctctccactcagcgaacatacgcctctgttcgtcaaacgcgaggtttactgcggcacgtaattcctcctaatcgtgatgcagggtattgttgtgaccctgcatgagtccaagcgcagcgcggaggttttgtaattcagtcgcgtcttcgatggtcgtctaggcgttgatgcctggtggaacagtcatgttatgaacgtcctggctgtgtgcggaaccgttgttttcggtctcttgcacaccaggcgcagtttcagtaacaggagttgtcccaccattcaccacggttcccgtctgtccaggattgacagcgggtggaaccctcaaactccctgggtcctgcaacgtcggatccagcgtctgtgagtttgctgggtcggatagggttctacgagtttgcaccatcgtgtcgaaagagcgatctgtgattcttctctcaatgaaagcacca

SEQ ID NO: 288680 - DNA, 517 bp, Cannabis indica
tcagagaatactctcttcataaaagttttagaaaatcgaattccctttctaatgacactaaaatctttaaaatcagagttacaacgtaatagatatagatattttactgaaaccgttttttagaaatcctgaagcaaatggatttcagactacatcaataaaacaataattttgacttagaataatcaataattggtgaatggttccttcataaaacttttagaaaatcaaattatcttttcaacggtaccaagatcgctagaattaaatcattattcatagagatatttgggttttactgagacagcttatatagaaaatatgaaaaaaaaaatgatttacaacaaacagcataggaatactaatttttgacatagataaatctcgattcagtaaaacctttcttcataagaattatgggaaattcaataagctttctataggcaccaagattgcaagaatcggattagtatttaaagagatataacagttttactaagacatgtttcattctgaa

SEQ ID NO: 288681 - DNA, 571 bp, Cannabis indica
aaggccaaccaaggtcagaaaaaccagggtctgttgcctccaccgatagatggacacttgcaagtcattattggaggcccacacatcgctggagatacgggcaaagctcgagagagatatgcccgaacaactcagtacgagcaagaagaagttatcctagacgtggaagagaggaagcccaaagttccacgagcaggagagccaaccataactttcaacgatgaagatgctgtccaccagatcagattcccgcacaatgacccgctggtcgtggaagtccagatagcaaacaaaatggtggctagaaccatgatcgataatggagcttcttcaaacattttgttcaagactgcttacgagaagatggggctccagctcaaggatctaactccatgcctccagcctgtctatggtttctccggtcaaggagttgcacctctaggacaaatccggctacccctcacagttggacaagctccgacgagcataaatatcatggcacagttcctgatattggatattccttcagcctttaacgtaatgctaggccgacaagccttgtatgacttaa

SEQ ID NO: 288682 - DNA, 639 bp, Cannabis indica
aaaataatttccaacagtagctatccactatactctctcttgcccctcttctatactgaagttattttattctatcttttatagccaatcacttgtttttccaagagccaagatagccatacacaccatcataattactacaagctttaaacaccaacatcctctcttaaacatcactatcattctcccatacgtatatatatgtccttcatcatatcgacatcatcatcaccactatttttacattcaagttttagtgctcaactagatctcattggaagctaattaaggtatagcattctatgatttgggttgtagattcaaggttaaagtttcgtatatatatatatatatattgataaattctaattaataagtatgaaatttaggtttttcgtaagataattatttctcaaggatcactcccattgcaatcaaggctaggactccacattcgaggtaaggaaattaagtagaaaaacataagttttctgtatgtaataacattcataggaagagtgggaatagtaaaagagaagttaactaaggtcttctgcctgactctttattgtttgttatttaatgtactgtataatatatatttaaataatatgtttataagattcatgttatttatgt

SEQ ID NO: 288683 - DNA, 772 bp, Cannabis indica
ctcttgagattgaacctaaccatgtcagaattaagatcatttgatctaggatcaactaggtgatattgaattgaatatatacctcttgataactattaatgtatccacaaaacttcttgtaggttgtatccttttggttaataaaaaacttacaccgtagtcttccaaatcgttccaccacacacaaagaatagtgtgggctattaggatgaagtgtataatttgttcttgttaagttctcaacacataagcaagaacattttgagagagaaaaatagtttccttttctccctgccaattacgaaaagcttcttttgatttctcaaatcaagcttctatttatagtagttaaatctcaattaattatatcttatttaattatttaaataaatatctaacaaaattcgattactgatatttcagatgagaaaatatctcaaccaacttgaaatatctttaaatacttttcaaattcaaatatttatctaattgaattaattaaataattaattaacctaaaaagataaaaagaatagggacatcctactataaggtaggcacgtctaaattaagacttggatgatgtcttttgtcctcacaatttttatctcaaaaaatattgtcttgaaaatttttgtcttagcaacttttatcttttacctatttaattaatttgaaaaattatttaatttattacaaatataaataatttctatttttttacaattaaaaaaatagactttttttgaacaacattatacaacccttaaat

SEQ ID NO: 288684 - DNA, 552 bp, Cannabis indica
aaaccgcggttaggtttcttacttatcgtttgctttatcgggcaacgatagtgacatattcagctcgtggttaacgagtggtaaaaggggtactttataaagtaccaagattgtgtaatgtgaatgtgtaatgtgtaaaggaatactttatgatattgtataatgagtaaacatattggtatgagattaaattgataatcattttcagttaacgttttggttacttttcttgctgagtctctgtgactcacgggtgctttatggtgcaggtaaaggaaaggcaaaagttgagcaaccatgagtttgtggtcgcagcagcaatgtacataccagccgcagtgacacggcccagtaaacaggatgctctattttgattgtattttggaagtataaagtttatgttgtaaaatactttgaaaccagtttgtgaatattttgaaaacaggggaaccccgtagtccatattacttatcttttgttaaacagtttaaaagttgaattttaattatcaaaatttaattacccacacttttagtataattacatattata

SEQ ID NO: 288685 - DNA, 834 bp, Cannabis indica
atgggacttaaactttgaaacataatcatgattgtattccactgttttgacaatactgtaattatgaataactatatgttctggatttaatagaatttatacattaaacatataatcatgaaataaatcatgtgaaccatgcaatataaatgatttatgaccttttactaattattaaatctgattatattgaaatgagtttatttagggtacaaaacctaaccgtagataaagttacgtacgtggaaacactattctgatttttaatgtttcataacagctgcattaccattgcataaatattttgctaatagttatttctctacatattactattaaggtacaagtaattatcgattagtgacaaaaaaaattctgtcaaatagtttcttacatatacacattcacattttacatttttagttgcaattaagttgcacgttagttggcttgcaatagatataactattgcattacagtttcaacagcaacccacgatccatgcttcctggaattgaaacctttgtctaatgcaaccttcggtcgaccacccagcaacctttgtctgatgcaacctttggtcaaccacccgtcaaccttcgtctgattgtgtaagtgatagtgtaataggtattttggtaattaaaagcacataaaatgtataaatattgtctacaccttatataagtatttttataaataaagtgtgaatttgtattttcatgtaataattctaaaatcttattccaatacttaatggcgtttactaaattttaaatggaatcagaataatcaatgagagaaatgaatgggtttaaaataaaaaataatcgg

SEQ ID NO: 288686 - DNA, 810 bp, Cannabis indica
gaaggtcgttatggctgagataaagtcgatgtcaggtgatgatggacttctgactttctgggcggacagtcactctgcgctttgcttctttttcagcttcttggcttccatactttgtattttttgttggtttttgctaaccatgctgtttttgctttgtgcagacatgtctcggcagatgatggacgccttaaggaagaggatgagcggaggctctagtgcttcccctccgaccaagaagtccaaggtcggagaggggtcttcagagaagaggccttctagagaggtcattgacctttctgaggatctggctgctgcaaatccttctactccccaatctgccaagtctaaggagtctgggccaccaacatctgggtccgaactggtcaggaggattcctgaacgggagcaagcaccatctctacccgtgcccgtgctgcctgaggtcaagaagggcagggaggtgatggctcatcacatgaaccggctggttcctgaggtcggtgagcagctggctggtgcggaccactcatctctggatgtgttggtgggcggagtcttgcaggagcttaccagggttagtcttttcttttcgacacttcccttttagcttttcatacttagcttcatatgctgaccttttcctttgtgcaggccggtttgaagctgggttatgcttactcccgggctaaatctgctgcttccaagagtacggctctgtccaacaccttgagggcggaggcggacttggccaagaaggaagctgaggaggccagggcagagactgcagttgttcgccatgagttgggt

SEQ ID NO: 288687 - DNA, 902 bp, Cannabis indica
tggtggaaattctttggtcattgcaactcccgccgaaagttaaaatttttgcttggaaagctgtccatgatgctcttcctgttgcaattttgctggtcaaaaggaaagtgattactgactctacatgctcggtctgtaaacaagcttgggaatcggttggacatgccctttttcattgccggtatgctcgagctgtttggcgtaactcgagtctgagttttgactggcgtcttgctgctacaatgcagaaaggtgattatatttttcacctttcatcaatactttcaaaggctgaaatggagcaacttttctgtactctttggaccatatggaatgagcgcaaccgtgttgttcatggtcaaaaagcacggccagcatctggtttagcttcctttgctgcaacttaccttttgaattatcgaaatgctcaacagaggcacggtacagctgcaacacctgctgcaactgcacatcagcagccacaccagaccacagctacagcagcatcgcctcctagctcgaatcctcggccctctttgcaggctgttcctgcagctcagctttggcgaccaccagatttcaacctttttaagttgaatgttgatgctgcagtgattccaacagaggtgtaattggagtgggtgctattctacgagattcgaatggtgttgttgttgctgctctttccaaaaagctgattggaaacttccgctctcatgaaatgaaagctactgctctctttcatagcttaaattgggcaattcaacaacaactacccttgtctattgctgaatctgatgctttaatggtggttaatgcccttcgagctcccttcaattcaaactcatcttttagtgatttgattatagatatctcatgtctcttatcctttctccctaatg

SEQ ID NO: 288688 - DNA, 772 bp, Cannabis indica
  modified_base (173)..(173): a, c, t, g, unknown or other
cgttaatttttggtcattgctaattttcttttttacttgaaattactcaaatcataaatgaatatatactaaaataatttgtgttgacgtttcatatagtaatagaggaagaaattatatcatattatttggtaatggaaactttacaaaatcataatgaaaaaaaaaaattntgggacatgtttaactttttatattttcttatatgtagtttatcatacaactaatgagaatgtaaaaatcaaatctatgtttaggatcttattttttaagttagtatttagagtaacctaaaactcttttaacacttaaatttaagattcctttaatattaaatcttatcatctaatgcccaccaaataccccttaaaatctaagttttttttttaagctcatgtctaattacaatttgactgagttgtacatgaacaatcatttttcaaaagctaattaagatttttgtcaaccgaatttcaacacatgtaccaaaatcaaatcatacttttcaaatttttcagaacgttaaaaatttagaaagttctatttgcacactacgaaataataagtacatgtacatcctaatatttacaaaaaattaaacttaaaataatttttaaaaataactcttaatgatttttttaaaaaaaaatttccacattattttgtgctaatttcaatacttatttttctattaatttttttaaatcatctataactttttttttctaataaaattttatataattttttattttaatttttttattataat

SEQ ID NO: 288689 - DNA, 536 bp, Cannabis indica
attgatcagatgttagacaagttggcaggacaagagtactattgtttccttgatgggtactcagggtatcaccaaatagctatagcaccggaggatcaagagaaaacaacattcacatgtccatatggtacttttgcttttcgacgaatgccatttgggctgtgtaatgctccagcaacatttcagaggtgtatgatggctatattttcagatttaatagaaaagtgcatcgaggtgttcatggatgatttttcagtgtttggctcatcgtttgaccaatgtctgagcaacttggaattggttttagcaagatgtgaagactctaatttggtgctgaactgggaaaagtgccatttcatggttacagaaggaatagtgctgggacataaaatctcaaaagaaggtattgaggttgacagagccaaagtatctacaattgagaacttgcctcctccagtttcagttaagggagttcgaagctttttgggtcatgccgggttttatagaagatttatcaaagatttctccaaagttgc

SEQ ID NO: 288690 - DNA, 558 bp, Cannabis indica
cacagattgaaattcatggcaggtcatcattgttctaaaagaccattagaatatgttcatgctgatttatggggatctcacaaggttggaactcactcaggtaaacactattttttgtctattgtagatgatttcagtaggcatgtatgggtttatttacttaaaactaaaaatgaatgtctagagaaattcagagaatggaaaattgaagtggaaaatcagtatgaaaggaaattgaaagtgcttaggacagataatggtttagagttcattaatattgaatttggcttgttgtgttctgaatttggaattgttagacataggactgttaagcacacacctcagcaaaatggtgttgctgagaggatgaatagaactttgttgaacaaggttaggtgcttgttgattagttctggtttaggtaaaatctattggggagaggctttgatcactgcatgttatttgattaataggagccccagtagagtgattgatttaaaaactccctatgaaaaattgcatggcactacacctaaactgaatcacttaaaaatattt

SEQ ID NO: 288691 - DNA, 521 bp, Cannabis indica
gcagcagccaagtcatagtcaaaccagcagcccacccattcatgaaagcactttatctcaaccaaattccaagtgtacttttgtggcaacacttaataactcatctgttactgtatctaattgctataagtgtaacacaaatgtacaaaacaattttaccttgtggcataataggcttggtcacccctctgaaaaagtggtccaaactgtactcaaatcttgtaacatttccaatgttaataaagattctgaattttctatttgctcagcttgttgtcttggtaaaattcataaatttccatttccaaaagcatctcaaactgttatttctgaaccacttcagcttgtggtttcagatctttggggaccatcatttgttccatcctttaatgggtacaaatattatatccattttgttgatgcttactctaggttcacctggctgtatcttcttaagaacaagtcagatgctctcaaaaccttccaacacttcaaagctgaagctgagttacaacttggca

SEQ ID NO: 288692 - DNA, 526 bp, Cannabis indica
tttcataactgaaattggacctagatccagaaccgtaacctgaccaggacccgaactcaaaatcagacctagacccgaatttggagccggacccaaatcccaacccaaaccaagactcgggacccaaactcgaacctgaactcagacccaaacatggaaccagattagggacacagaaccagggtcaggacctattatcgcacccaagtctcgatcccgaacccaaactcagaaatgggacctgggacctgaaccaaaaccagactgagacccgtgacagtgatccagatcttaactcgggattcaggtaacggggcgtggaatagactagtagtcagtatctagatcagggactcagactaggaccagaacccagacgaagaaccaaacccgaacctagacctagagctgggaacccaacattagaacctgaacaagaatacgccaaaccaggatcctagaacaagactaggaccgagacgcgacgaaccggacacagacctagaaccgaacacagacctagcct

SEQ ID NO: 288693 - DNA, 893 bp, Cannabis indica
atcgaacttaacgcaagaatatactcagtacccccaactaaaatgagacagtgtcctcaatgtctaaatatgtatatgataagaacatgagatgagaaccgaaaaaacagagaatatgcacagtgatagatgttgattttctaaaaaaaacaaatgacagaaaataaactaaaatactgaaaaataaagaaagcaattaaagataggaccagtagtgaaagaattcactaaccttggtaaatcgagtcgtgaaagagcgtttcctccacttcaggtggtgttaattctaaaaatggtttcaacctttgaccattgactttgaatacattaccagatttagaattttcaatttcaacagctccgtaaaacagtacgaacagaaaatggaccagtccatttagaacgtaacttaccgggatcaaaaggaatgtcccaatcaggaggtcgaaataacttttgtggtctagggagtgattgtgattctctaggaattttcacagatcgatctgctaactttttcggaacattggtgtttctttttgcagtacacagatcttttaaaaaatttgagtaggcaggtatttgcttaatgacatctaagaaagggatatttatatttacttgcttgaatacctctaagatgtcaccatactgactacctcttttgattgggatcaatctctgtgggaatggagcttttggaatgaacgacaaagtttgactcattttttcaaccgagtctttggaatgtgagctttcaggctgactcttttcattttcttttaacgagtcagtgttcattttagcatcaggttgagatatgtaatcaggtttttcaataatttttccagacctaaggatagaaattgaattagcttcttcaataggtctag

SEQ ID NO: 288694 - DNA, 586 bp, Cannabis indica
catgccgcggcatctgggtgcagaacccagaaaaccagtaagctcaactcgaattttcagcctaaaactcaatcttttccatcccaaaactcaaccaaacattcaattaaccaaatattgatgctaacaattaacaaggaaataaaactcacgtttcaaacatcaatttccatcaataaacccaagatttcagaatgcatgacacacaaactcatgctttaaacttgcaatattcaaactcaagaactttgagctaaaacccaatactcacacctaatttccagcagcaactaaccacaaacagcaaatgaataatcaatttcaagcttgacaagcattcaagaattactctctaagctcaattcaacaaaaatcaagaaattaacaagattaagcatccaattcattaagcatgcaaaaatcaagatcaacaacctcaaacatgcttctaccatattatttcagcaaggaaacacaatctaaaaccataaaaactacctcaatcacttgcacaattaagcctcaagcctccaacacctttctttcaacaacaagcttcaaatcaaactagttcttcacaaattta

SEQ ID NO: 288695 - DNA, 856 bp, Cannabis indica
aaatgaaatcccccatagatagagaagtcatccatgaatatctccaaaatactttcagccatatccgagaaaatagccatcatacacctttggaaagttgcgggagcattgcacaatccaaatggcatcctcctaaaggcaaaggtaccatatggacaagtgaaggtggttttctcttgatcttccggtgctatagaaatctgattgtaacccgaatatccgtcaagaaagcaataaaaatcttttcccgccaaacgatccaacatttggtcaataaatgatccttccgagtagcattgtttagcttccggtagtccatacacaccctccaaccggtcacggttcgagtaggaatcaactcattgtttgcattagccaccaccgtgactcctcctttcttgggcacacattgaacaggactaacccatgagctatccgaaattgggtacacaataccataatctagccacttgatcacttcttttcgcaccacttctttcatgacgggattcaatcttcgctgatgctcaacagaattgctacaaccagcttctaaaagtatcttgtgcgtgcaaatcgttggactaataccccttatgtccgccatagtccacccgattgctttcttatgctttttcaacacctctagcaaagcaccttcatcttcaactaccaagtttgatgctataataactggtagcgtgtcattctcccccaaataggcatacttcagatggcttggcaagggtttcaactccaacttcggtggttcttggatggagggttttggaggcttaaaattactttccttcaactccaaagattcaaagggcttcttgaagttaggaataggttg

SEQ ID NO: 288696 - DNA, 61 bp, Cannabis indica
actcctgagattgagcctaagcatatcaggattaagatcttttgatctaagatcaactagt

SEQ ID NO: 288697 - DNA, 709 bp, Cannabis indica
tacatcttggtggttcccggatgcagtgaataaggtgtggtgtgagcttcatctaggatctatttcttaagctcatcaacattaggaacacaaactcgagctttaaacaacagcattccattattcaagactgaaaaaagtctttaggccgaccagctattacttcatctcgaatcttgactagcttgggatcttccaattgtgcttttctaattctcttcaacagatcagattgaagtgtcaagttgtgtaactttccaaccacaaactcaatccctgcactaaccatttcagaagctaattgaggggctatcataacagtagtggagatctgcccgggacctcttctactcaatgcatcagccacaacattggcgttcccgggatgatacaaaatctcgcaatcgtagtccttaaccagttccagccacctcctctgcctcatgttcagatctttctgggtgaaaaattacttgaggctcttatggtcaatataaatctaaaaattttcaccataaagataatgtctccatatctttagagcaaaaaccacagcagcaagctttaggccatgagttgggtagtgttgctcataatcctttagttgatgagaggcataagctatgactctatcaccttgcatcagaacatatcccagaccctgtctggatgcatcacaataaacaatgaatttctcttgatctgatgg

SEQ ID NO: 288698 - DNA, 529 bp, Cannabis indica
taatattgtactaatagacattaatttttatggattactttttcatttgtaattatgtcgatgttgttggttttaagcattgtaattgacttgacaatactatagctctatgtattttgacgtaaatttgctccattctttgaatcatgttatgtatttggtggtcgagtcttctgaaatttttataatcttagactgttgttggttattgccaattttaataagaaattcactattctctcaaaaaaaaaaaaaaaaaacttaaatcaatcagtaaggtatatttttactcaaaaaataattataataagtgaatttaatatattttttttgtggcttctactaaaaaaaaaattactggcaaaaatattagtaattttcttttcataaaaaaaagtttaatttaattttaaagatgacatcacctaaggaaaaaatagaaaggggaaattctacaataaacccgttaaaataagtatactgatgcaacctctaactgtttcagtatctataataattttttagtcta

SEQ ID NO: 288699 - DNA, 590 bp, Cannabis indica
attatttattattgactatataacatgaaacattacaaaattagaaattttattaaatagcttttgtttgtctgtgctctagtaagcaatgtagtcactccacacctcctgagttactccgtcaggaggtaacatgtcggccctctcctgtccaagctccttaatgttttctatccactttttcttacaatctgacctccagtcacgtaaaccctttaacatctcgtactcacctacgaatgtagggttatctcgtgggaggacaaacttggtctgcaaaaagttacacattcacattaatacattaattaaaatttaataagaatatagtaaattaaaaattaaaaaatttaatacaaaatacctcaagtctgtcccacaatgcattaatttagctctactaacatcttcccatttgaatttattcatggggatggacatgcgaaccatccatttacacatattattgaatttttttccatttttgccaactggggtgcctgtctctgcatgcaattcaatgtgtaacttggcagatggtgttttggagagctcttcttcaacatttttgcctttgtgtttacctctga

SEQ ID NO: 288700 - DNA, 720 bp, Cannabis indica
acctcgccaaccgatcaaactgggtggtatactcagtcacgctcatgttttccttctgggttaggtgggtgggtgaactctttcctcttggcacttctaacggcctcattataatacttcgccttgaagagttcctggaacctttcccaggtcatagtggtgacatcatgaatctgagacactatgtcccaccagactagagcgtcttcttggaattagaaggtggcacacaccaccctatcattctcggtgacacccataaagttcaatattcttgtgatcaccgttagccactgctcggctttcatgacatccggacctcccagaaaaactggaggtgcctacttccagaacctttcatacaagggttccattctgttggccgctaccactatctcggcccgagcaacaggggcgggtgcaacaggaacttctggaaccggcactgcaggagccccctgctgtctcaatctctgtatctcaagatcttgctcctctattctggcttgcatttcagcaaacctagtttccaaattctaggcttcctgatcggcttgggcagcctgtggcgggttatcaacactccgaccacgggccctgcccctgggacctctaccacgacccctagcatgcggtggaaactgagctccctgaccgtgatttgaccctaccgagttgccctgactcctggggttccgcctggcgtccatctagtatgaa

SEQ ID NO: 288701 - DNA, 527 bp, Cannabis indica
aaatacatatatatactatacattgaggtttaaatttttactttataactgcaatccgacgaacaattccgcaaaaaatccggacactatgcacatacaacacaacaatattactaaaatgaaaaaacccaaaaataatttacaaattccaaaaataaaacaatgtaaattataaaaatgaatagaaattatatttataccttaaagggtgttgagatacaatgttttctcaacaaatgatggtggtcggagttatacccactatttttgtatgggttccgatgacacttaaatagggaaaaaaaattaaaactttttgggtgtataggattaagtatcgaaaatagaaaattttgcaacaaaaatgggctcaaatggttgagaaatgggggagaaatgggctggcggaggggtggttggcgagggttttctcttctctggtggtggctgtgctctctagttttggttcgcgttaggagaatgaggaagacgacatagggtatgtttatataaccctatgccgtcgg

SEQ ID NO: 288702 - DNA, 611 bp, Cannabis indica
gaatttaaaattcataaaaaataaaacttaattaaattaccataaaaaatattaaaattcccttcatatttatttttttaaaaaataaaacaaataaaactaaagtgattgccgaagttgtcactcgtgctggaaaagtcaccggagtttactgccggcaccggaaaagtcgtcggagtagccgccggtgccggaaaagtcgccggagttgctgccggcgccgaaaaagtcgtcagaattagcattgtcgctggaaaaatcaccaagaaactggtttcttgatgtaagaaaccggtttcttggtgatttttctggtaattttaccggtgacaatgccaagtccgacgactattctggagtttgatgtcggtgccgaaaaagttgccggagtagttcctggtgttggaaaaatcgccagagttattgccggcgtaaaaaaagtcgtcagaattggcattgtcgccagcaaaatcattagaaaaatcaccaagaaagtggttttttcatcaagaaactggtttcttcaccaagaaagtggtttcttcatcaaagaactaattttgttacacaacaataataaagattatgaaaacaaaacaaaaatgatatac

SEQ ID NO: 288703 - DNA, 651 bp, Cannabis indica
ataacatactctttttgctacttcacataacaaataccaaaatgtgaataacatatcattttgtaactacacattgaacccatgtagaaatatttctacataatgtagaaatgtagaaaacatataattttgactacatagtgggatcttttaaccaaatgtaatttttaccattatccatacttctctattatgttctacacaattaagttaaacattagttttgagaacataagatatacaaaacatactcattttgccacaacacatatctttaatgcaataaaagttggacaatgatgaaaaggcaaataaaaatgataaaaattaattttttaataacattctcattacgtttcttatcttagtctaaaatcttgatttggtttcccaatccaggtgtagcatctgtactttttttaacatgtgatttatcgatccaacaaaagtaatcacatcctcgactttcatcattctccttagttgaaaataaccctactagtttattgtggcagcctaagtaatgcaaatataaatgagaagtacttttgtaatctaaaaagacaaaactcttacatagtgtggacgatccaaacgaaatcgacgatcatgatttgctctactactacgaagtccaaacataagctagat

SEQ ID NO: 288704 - DNA, 613 bp, Cannabis indica
gttaaaaattcccccaaactattgagattgttaaattttaggacttgtgtctaatttcattcaattttactgttcattgattgtttatgtactaaaccatgctccctagactttgatatctaccaaatcatgtctctcaaactttgatatgtactaaatcataccctctgaactttcatccatgtcagaatatttttactaaaattagacaaaattccttaaatttaacaatctcaatagttcgggagtaatttttaacggccaaaaaagttcaaagaacatgatttgatggggaaaaattactaattaggttttttttttttttttagtcttactagatatagatttttgtcgtgacttggtacaagacataatccgctgcagttattattgtttatccaataaggctgccagctgtaccaatcttttgatatcttatggcccaccgtaatggtgtaatggattttttgttttttctttctaaataattgttatgtagtgcatctagtcatctacaatgcactacacgttatttatttaatttttagtctgaattttttttatttattttttatattcgtatatattataattatttaagatattatataaa

SEQ ID NO: 288705 - DNA, 499 bp, Cannabis indica
ggagaagactgtcacctcatggtcgatctagcttttctttgtcttcacctgcaccacatagcacctgtgagtcacaaggacttaacaagaaaagtaataacaataaccatgtaatttattatttgaatattatcagttatatcagacaatcagaatcaaacgatcacgcattactcataagatgaaatccaaatcactactggcatctgtcacaaatagacatcagtataaagatatttagtaatacaaaaccattggatcaataatagaaatcatattcatctaataatataatatatgggacacgattttgtcccgtgatgtactttcacggaatgtattccgtggtacattagatgcgtctcagggtacattagatgagtctcaaggtacgttaccattttttaaccctaattacccctagatcaaccccagccctcagatcaaataactctcccatttaatggttgtcgtacatcacggaatacattccgtgaaa

SEQ ID NO: 288706 - DNA, 581 bp, Cannabis indica
gtttttcgaacccagtggccgcggctagatttatggttgccgcggccataaaacctagcagagagccatcattttcccgattttgttttggccataacttttgactcgggactccattttggacgttccttatatcattggaaagctcgctctgagctctttatgattatttgtatttttaatgccaactttatattttgtgaaagtggaattagggattaaccctatttgtgaaatcccgaattgtgtgactaggattatcggtacctgatcaggagcacccaggggtttggaatctctgttattgcgggacaacaagtagtttgcacatagactatgcacggtggcgcttatgttgaatatgatatatgtgagtaattacaaccgggattagggttattaccctaacatgagcggtttaatagcctagggttattaccccagtgatatatgttgtgtaatactatgccatgtcggatatatgtatatattgggattatgaattatgcacttaaggcataattaaactagactcagtaagttagtaccttgagtttaattttaatgcggtctagggttat

SEQ ID NO: 288707 - DNA, 528 bp, Cannabis indica
gagacccggaccgggacctagactacttgttgcttacaaataagactcaatggtgttggctaaaagcaaggtcaacattttggtgctttcattgagagctgaactcaaggatcgctttttatctcaaatctaatcacaagtacgatggtggtacagactcgtaggggcgtggttgatccggtgaatccacaggcggtggatcatgcactgtagaacctagggaacacaagggttccgccaaccgtaaatctcggacaaccattaactgcgggtcacagtatgacgactcctgtgagtgaaatcacgcctggcgtgcaagagactgggaataccagttcagcagccaaccagggcattcataacatagccattccgcccactaccaatgttcaaacaaccattggagatgacactaaaatctagaacctccgtgctgctcttggagtcatgcagggtcatagcaacaccctgcatcatgatcaggaggaactccgtgctgcgatgaatcttgcatttgaagagcagagg

SEQ ID NO: 288708 - DNA, 624 bp, Cannabis indica
atgggattgttaggagcctagcttgttgagctcagtgggagtttttctattatgtattgaacatgctagtatcttgtatggaatgcttatgatttgcgttttgaacatgcataatgatattgtagtcacttctagttattgttgacatatacatgcatatatgtgttgtttattgaagtgacaggtacaaatggagatgaatgcgcatagtctcaattttgttgtacctcatgcatgtttggtttgattgttaatgattgttattgaattaaaatgtcttcaaggtcaattcatacataatatatatatcccgtcgatatgatactatgtatgtttttaattggttaccttatgtgtggtagacaatgttatggtgattaattatattgtccaagtgggagaatgttagaattaatattgtggactaatataatcataagcttaataccataaacacaatcattaactatgtgcccaatatttgttcataaccataatgggatggttgataaattaattatgtattagaggcacatgagagcaccctttatattataattggcccattaaattatagtataccataaaaggaccacttaagccctattagtgagtaacccctta

SEQ ID NO: 288709 - DNA, 907 bp, Cannabis indica
gcctgttaggaagcatgttagtagcctgatagtagaataggcgcatgtttttaattttcaaattaagcggcattagtaagctctcgttgatcatgacctgatgtgccaattcttggtttggcaggttgttcagactagatggacgtaaggcgaaataccaggagtcagggcaactctgttgggtcaaatcaaggtcagggagctcagtttcccccaaaagctcggggccgaggtagagttccctagggcagggctcatggtccgggtgatgttaactcgccacaggctgcctaagccactcagaaagcccagaattgggaaaataggtttgctgaaatgcaagccagaattgaggagcaagataatgagatccagcggttaagacaacagggtgctcctacaatgcgtgttccagaagttccagtggcacctgcccctgttgtccaggccgaaccagtagtagcggtgaatagaatggaacctctgtatgaaaggttctggaagcaggcacctccagtttttctgggaggtctgaacgtcattaaagtcgagcagtggctaacagtgattacgaagatattgaatttcatgggcgccaccgagaatgacagagtggtgtgtgccacttttcagtttcaagaggacgcattggtatggtgggacatggtgtccatgatacacgatgtcaccacgatgacctgggaaaagttccaggaacttttcaatgcgaagtactataatgaggtcgttagaagtgccaagagaaaggaatttacacacctgacccagaaagagaacatgagcgttactgagtacacaacgtagtttgatcggttggcgaggttggcgaggttggcctcaggaattgtgccaaccgattttagtaaaaaggaaaagtatttggatg

SEQ ID NO: 288710 - DNA, 645 bp, Cannabis indica
ttagttttttgggggggtgacttaaatttttatttttagttttttatttttaagttttatgccttttaatttttaatttttagtttttattattgtgagtcaatttgattaatgtgagtcaatttgaaagtaggtagatagcatgatttgaaatgttcatttatatttcgaaaaatccgtgtgcttggtgatgttatactcttgactaattttaattttgtgctttaaaagaacatggaatcatattaagtaatttttcagtaattgaattggtttatgtatgttaattggaacatgtggaaagttgtttggaaaattctagaacttgcttgcttgctatttgaggcgaaataataaattatgcatgactaggaaagtgatttaggcaattttttggatcgattgtgcctttcaagccatccttgtaattttatcctagttacccttttttgagccttaacctattctttgttcaacacatatgagcctagaaaagataaacccataaatatccaagatatttaaccctaattataccataagtagatctttagtttgggggaatttggatgggaagtttgttatgtgtgtggaaaaatgtatgaaaattgagagaatatataaaaaaaattgattggcaacaac

SEQ ID NO: 288711 - DNA, 605 bp, Cannabis indica
aaatacaaacaagagcaacatttctctgtcagcgtagcttggtcaaaattcaaaagataccaaagaaaattttgctacggtaaatagttattgtggatattgcccttaaaaaaaatacatatatatcatataaagagcaatatcttagttttaatcatttagcaaagtaaaaaatatatatatcggtaaaaatatatatgcatatataatatatatagaaaaaaaataatatatcatcatcaatcaaaagagactttgctatagtttatttttcgtaaattttagtcaccaaataacaaaaaaaaaaaaaaaaaaaaaaaacgttgtttatttctttattttggctctaggtattgtaatgaaatcccgaaagtaacttgtcatttgaattttaaaatatttttggttagcctatctattggtcaatagttgtttacattgttcgtcctaaaaatctttatccatttgagcgtaaattaatatacctttccaactccaagagtgacaacccttcctcttttcaaatatttcaatacctgtgaggatttggagttgagactttttactttaaagattttttttgatattatctgtgttatgaatta

SEQ ID NO: 288712 - DNA, 642 bp, Cannabis indica
ttcatcatctcgcaatttatcaccatagatgcttgtaactcaacaatagtgtcactgagggaactgttgtatagatgttgagagttattagaaaaccaagaatcttcctcttcacaactccactcatataatggattatagtcgtactcaggcttccaactataatcatcaaaacatttgtgattaaaccaaggatcttcctcttcacaactccactcatataagggattatagttgtactcaggcttccaactataataatcaagactattctgatagtaagagttgtaggattgttcttcctcctcatcatagggatatgcactagatgttgtatgttcacaaggacgtggtcgatgagactcgtaccaagctttccactttttggaattctcactcttgtaaaaagaatagtattggaaagcttcctccccatcactaaattctggttcgataaaattactagtaccttcagtagcactagaatttttattgtttaatgaagcaagatatattggatataaatattcaaatcgacgatgatcttcttcattcatatttttttttaattagtataaagttcaaatatgaaataatttaagggtatatacatgagatattcccaggccgattggaaaggtt

SEQ ID NO: 288713 - DNA, 705 bp, Cannabis indica
atcaaacttgaagaagaaggacattcgggctcagatcttgattatactctgctacagaaaggatacaagggttagagatctgagtggaaggagacattaattccgctgcatcaatgtaaggttttcttaactttatatgtgtttaatttatcgttttagaaagttcatatttagggtgtttaaacaacatacttgtgagtagatctaagatcctggtaaaataaatattccaacattatcctcattagaacttttgcttgcaatagaatctttttcttcgtcactatcgctccatgtggcaacaagggctttcttctttttgagagtgttggcacactcggcctgaatgtgtccgaacccatcacattctctacactgaatgcccatgctcttattgtcactgggttgctgaccatgccagaagttcccaagaggatttctttcggaagcattttccttaccttcagaacacagtttcttgtacttctttttcaagaattttgcatagttcttggtcagcaaatctacagcttcatctgagaaaccagcagacaaatctgggatagacttcttttcttctttgtgaatgaacgcaatattattgtcccctttttctttgttcacatccttcttctttttttctttcttccaccttgtaatgacatttcataatctgcaaggatccagtcagttcatcaagatcca

SEQ ID NO: 288714 - DNA, 749 bp, Cannabis indica
tccaactcgcccaggtacccgtcctggtcgagagttcgaaggcgtgcctccgaacttggacggaggacttacccacctggcgcccaaggcaccctccctcctatgaggaaccgcctcagcaagctccacactgacatagtccacgctctcaaccaagacgtctccgtcagcatcaactggctgcccagcctcgttgtactccccgaagttagggggttcaacctcttcctctccctccacctcggaaggactgcccggacgcacctcgtccagctcctcaacctcctggacctcagcgtccccctcacggtcctcctccatcgggacggccgaatcctgttcggcgtcgggcagagtggcaagccgagccacttgaggatcagaagcgtcggccagacgcgtggttttctttgtacgagccatcatcctatggctgggtacgaggtcagaagaatttccttcgctagaaggaggactagcacgaagacgaggatgaacctcgtgcagaagttgaagcaaatcctggtcgatctgatgcccgagttcccaagactcacctgggttcatctacaaaagacaacacacaagatgagtgttggacggagtatcaaacgagaaacaagcaaatatgccgaccaggagtactcaacagattaaagaacgactatgtttaaagaaaagtcaaaactcaagaagtcagaaagttttcttgagttagggcaaaaaagttcatgaagcttagagtaagc

SEQ ID NO: 288715 - DNA, 592 bp, Cannabis indica
tagtacagtcatctctaacctataaataaattgatgcaattttcacataaaattgtgcagctttattctcacaaatttactattggggtttttttattagtgtacaataaaaacaattatattacaaaaatgtgtaaaaaaacacaattttaaaaatgtacacatttgaaaatatatttacaaaaattcatacatatttttaattaaattataatagatatattaatgattcaactttctatatttagatttgtataactattttttatgactaattgatatgatattaatgagtaagcctactaactaacaaaatttatatattaatattaaaaaacataataagattctaattataaacaatagtatttaaaatatacagatgtaatattttaaatataaaataaaaaataattaacgattataaataataaacagttttaaattaataataaaaagtgaaaaaaatacattaaaaaaataaacaaaaacaacccatcaagtttaacaaaaacaatatataattaaaaaaaaaataactaaaaacaaaataaacaaatattaaaaaaataattacaacacgatacacaac

SEQ ID NO: 288716 - DNA, 477 bp, Cannabis indica
ttttcttttggttcccttcaacgggatatcttatggggctaggttctctagaccttcgctgttgggtgctaggcgaggattcctctggttccttgccaggcccagcagtcattgccttgggatgcacgtggatgccagccgcctccatggctttttgcatggccagcatcacctcttgcattttttggttttgtgctttttgggcttcgatctcagcttcgtgatcgatagctttttgccttagaagcaccaactctgagtagctaccttcatcgtaggcatactcatcgaggtttccctcgtagtcatcgtcaggaattccttcttcttcctcagagccctcagctgctcttgaggctacgtcttcctcatttggatcttgagcatcctctagagggcgaggttgacgagtacttctagtctccaccatttttgtaacgtgaagtgtatttttgcagaagctttcttcagctctca

SEQ ID NO: 288717 - DNA, 621 bp, Cannabis indica
aagactgtgaagaatccaaacaacaaaaaggagtttcgagctcagatcttggtaatactctgctacagaaaggatacaagggttagagatctgagcggaagaagtcatttaattctgctgcaactaatgtaaggtttctcataccttttatgtgtttattttatatcattttagaagttcatgtttaggatgttaaaaacatacttgttactaaatctagatcctggtaaaacatattctaacacgtcccatgggtagttgtgccacatttgacaccataaggaattaaggaggacccaatttacataatttttctcatctgcatgagtcccaaggaaatatatattgggttttgtgccctaaataaaactcattttaatataatcagatttactaataaagatcagaaataacatcttatgttgcatggttcacatgatttatttcatgattatattgaatgtatgaattctattaggtttagaacatatgtatttgttcatattatagtgttgtcagcacagtggaattataatcatgtttatatgttcgaaagtttaattccctaatttttcagttcactggatttagactggcatgataatcagcgataggtatgct

SEQ ID NO: 288718 - DNA, 533 bp, Cannabis indica
ttactacaacatatataatcttagggtaataaccctaacttgcatactatgtaatcactcatataatacatttctatatactcagataacatttactaagagtgttaaccctaactcatgctttcactggattcataatattctagggtaataaccctagaccgcattaaaattaaactcaaggtactagcttaccgagtctagtctaattatgccttaagcgcataattcataatctcaatatatacatatatccgacatggcatagtatttacacaacatatatcactagggtaataaccctaggctattaaccgctcatattagggtaataaccctaatcccggttacaattactcacatatatcatattcaacataagcgccaccgcgcatactctacgtgcaaactactgtcttacctgttgtcccgcaataacagagattccaaaccgctgggtgctcctgatcaggtgctggtaatcgtagtcatacaatccgggatttcacaaatagggttaatccctaattcca

SEQ ID NO: 288719 - DNA, 780 bp, Cannabis indica
atatatatatatatatcttctatcaactgtctccttatttctctttattttttaactttaaattatttccttattaattctcatattttttttaattttttcattctattttatttaattaaaagatcaccaattaattaaaaattttaaatttttttgcataatcataataactaataaataattatatatattaaaaaaatattaatctacctaatcagaggaaatatatacaattaatattaactaattatccaaaaatacataaagaataatttatgtagagcgaacttatgatattaatgatgactacaagtgatacgatgatgacatcaattttaaatatagtagtgaatacaagtgaaatccagaaataataattgtttagaaattatataatgcgttttctatagatttattatcttctttttgttttagatctctatttttgtgtgagaattgtttaatttcaaattttttttatagtacatttgaagatatttctttgtattttttttatataagaaattgtataataattttttttagaatttctttagatttctctatataaatttattatcttttaaaaacaaatatttttaacaaaaaataatcactaaacaaatacaaccgcacgcgaagcgcaacctgttgactagttttttatatggatcaattaaattgtgtcatgtgtacattgttttccacgtatatatacacgtggacagtccaacatggcacttaacacttaaaatagatagaattgttaaaattgct

SEQ ID NO: 288720 - DNA, 456 bp, Cannabis indica
aagcattctagctttaatattcttgatggcttcattagtccgttgtactaattctggacctaagtatttcttctcccacgtctcatcccagggaatgggagatctacactttctgccatataacaattcatagggagccatccctattgtactttgataactgttattatacgagaactctatcagtggtagatacttactccaggagccttcgaaatccataacacatgcttatatcttccagtatctgaattgtcctttcggactgcccatcagtctgaggatggaaagctatactgaatttcagtttggtacccatagcccgttgtaaactctgccataagctaggttatccaattacaaagtccatggtgatatcctcccacttccactcaggaagtgtcaaaggctgtaacaaacctgtcagtctctgatgttcatgttgggttttatgcc

SEQ ID NO: 288721 - DNA, 848 bp, Cannabis indica
agtattaaacaggctctggggctcaattgtgggatgggaaacataaattatctgggactccccttgtttagatcccgtcagaaggatgccgatttcaacttcatcctggataatttggttaagaagttgcatgggtggaaattaaaatcactttctaaggcaggtcgtgccacgttgatcaaatctgttggccttgcattgcctgtttataccatgcaaacgacgaaactctcaaaaaaactggcttcaagaattgacgggatggtaagagacttttggtggggttgtgaacaaggtaacagagggatctgtcttagggcttgggaccacctgtgtctacccaagtctcagggcggtcttggatttcgaaaatctttggaaatgaaccaagcccttttagccaagtggggttgggatcttctcaatgagaaccagtctttatgctgtaaggtgcttagagcgaaatacctgcggggtagacaattctttgattgtgatgttaagagttctgactcctggttttggaggaatgtggtgcgtacaaaagagattctaaaggaaggggcttgcaaactgatagctaatgggagcgatacaagcatttggaatgacccatgggttatacatggcagggatttttaccctaagcccaagcacaactaccagggaacacctgaatttgtgtcggatctgcttttacctgacgggaattgggacatccggaagctcaatgatctctttcacagggaaacagttaatagtatcttgaggggcggtaaaccgagtggtcagggtagggatagatggatctggactaagaactctaatggtcgattctctaccaaatc

SEQ ID NO: 288722 - DNA, 437 bp, Cannabis indica
acaacaatggtgtggagtatagctcaatgagaaaatgttaggaaagcctcacttagagacaggagaaaagtgagacacaattaggaccaaagtaacatatattgaagaatgtcatggcatgtcaaggactatacaagtttttgataagtgttgggattagaaaatacactcatgcaacataaaggaattcaaggcacaacgtaagcaaaggatactacaatccaattacgacttatattatgggcaatagtataagtatgttggagtgtcatctaatgagaaactaagaggaaaactcacaaagtccagccctgctgaaaagagatggtgtttctaggccctatagtgcccgagaagaaaatgactatggatttgtcaaaagctaaaattgttaagagcaaaaaaaaaggaaaaatattagatatttttctcaatct

SEQ ID NO: 288723 - DNA, 526 bp, Cannabis indica
gtgtaataaattattttattacctaacgatttaaaatatttaggtaccaaatttgactcacaaaattgcatagctaatacttctattaataaataaaaaattgaatttgctaccaattatggtagcaaacaaaattaatagaaaaaaaacattaaatcattttgctactaataatattttttgctgccaaaaatttaatagtaaataatgtacatttgctaccgaaatttttggtagctgaacacttttagggaccgggattcagctacgaacaagctaccaaaaattttggcagggtaatgttttttcgctaccaaaagatattattggctaccaaaattttgtaggtaaaacacatgtttcttgtagaattagtacgtgattcaagtttgccttctttctttctcaagacatgagcagggcacccccaaattctgtagtggcgtaaactaggtgtacgaccattccaaagttcgacgggtgtcttagggactgctttagatggaacaacatttaaaatgtcatt

SEQ ID NO: 288724 - DNA, 735 bp, Cannabis indica
ttttgatatttcttaaagcttcttctcttttctattttaatggcagcaagagttttatgggttattctaatattttctttcctttctttgcagctacaacccgagacaagaacaacccaaaaaactcactcactaaaggctttactcactcaaaaccgaacccccaaaaatcccctttaactttcggccaaaacatatcaaacccgaaaactcaagaacatgaacacatacacaaatacaaataccagaaaagtaataagagtgagatgagagaatgcaaacagtgattaagaagatgacaccaaaactttgatctcggagttcgcccaaaacaaccggctacttctccgtcaagccctcaaagcttgaatccattcatctcaaataataggttacaatctttgatttacaactttatatttctctctgtttttctcacttttgatactaacaaaactctcttttcttttacatgaacactctaggaggagctcacatggagatgacaaccctaagccaaaaggctctcttttctctgttgttatttttgatgttgttctctctggctgtgactatttacttttgttgtatctcttatttttgctctgtatattattgcttgttgtatctgagaaaagcacctccttttatatactgttctgtgatctgatctagggcagagccctagtgatatttgtaactgtttttataactgcttcagttgtaactgtcttt

SEQ ID NO: 288725 - DNA, 833 bp, Cannabis indica
tttctcctccatttctcatccattttagcccatttaattttttaaaaaaaaaaaatcttccatttttgatacttaatcacatacacctaaaaagtttttattttttatcctctttaagtgtcatccgaacccagctagaaaattgtgggtttgaaatccgtccactattttttgttgagcaaacattgaatctcaacctcctttaaaatataaatatagtttctattcatttttataatgtacattgttttatttttggtttttgtaaattattttttaggttttttcattttagtaatattgttgtgttgtatgtgcatagtgcccggattttttgcgaaattgctcgtcggattgcggttattaagtaaaaatttaaacctcaatatatagtatatatgtgtatttttatatgttattgaatatgtgtgtatataatgtgtgtatatattgtgtgtatattttttatgtaaatacaatttgtaattgtattgtatatattctatgtaatatatatatatatttattgtgaatgagaatgacattggagggatttaattagtgtgggatatattttttttttggagataatagtgtgagatataattgattatatatatatatatgtatgtataatttagtaactaagtaatttgttactattttttataactagttataagtaatgaaataattaattttgttatttcgttgtatttttttatattgtaggttcggtaaaattttgtgttgatcgcatttgagctttcatttataggtacatactttaactaattttttcttattatataattaattatcaatgcatgtta

SEQ ID NO: 288726 - DNA, 613 bp, Cannabis indica
cagtcatgagggtcagcaatgacttcaagtgtttgtgcttcccgcttactctaagcagatccgcggaagagtggttcaagaaattagaaccaggatccgtggattgctggaataagttgcaaaccagcttccggagacaatttgtcaccgcaaggaaagttaatctggaggtcagcgccttgactaacatcaagcagctgcctacggagacgttgaagaatttcataaagaggttcaaggaagaagcctcaaaaaccaagaaagtcgacgacggacaacaactcgctcttcttcaagcgggcatccgtacagggactccattctggaacgagttacagcaagaaggagcttctacccttcaagatttccagaagagagtccaaaaatacatcaacctggaagaggcccagatagtggcctatgggggatactatcccaccgggatagcaggatatgtacccggagctcagctcccaggagctttgccagcagccgttccacagatgagcggcatacaattttccgctactcccggatacagtcaaggcccagccttggcccccgcatcttcccactttggaaatccctcggggatgaatgggcaagccccgtc

SEQ ID NO: 288727 - DNA, 829 bp, Cannabis indica
ggatgatgatgacatgttctgtacacctgagaagacgaagatactcaggattctgaggtgcaggtgttagagacagctccagaactcatggagaaccggaggaagagaaggcggcctaggtggttcgctgagtacactgaaatgaagaagaagtctagggctacttcgacactcgtgaatgcggacccacttagagtggttgatcggaagctgctcaggacttttcacagttgggtactcggccagattgggaacaagtacccgagagagtgcttcaccggtcgatacgattcgtcttggttcctcgaactacatactccgaggatatggcttgggaacgatgtaagtttttaagacttttttacttcttttgcttttaaagactttatctaactctttttatttaatctctgacatatttaattttcatgttttagcatttggatgcggcattccatttgatgaggaggcgacaacacttttatccagaggtctacccaaatagatgtgtcatcatgccgtgtattttcccagcaggagttattgctcggtgggaagctgcgggtgatgaccaggctaactatcagtgggatgagggcatattagatttgattcgaggggatgaaggtcaattcttggccagttggaagaataaggagagaatatatatggccctctacttcgatagagcaaagcattgggtgacgctagaggtagatctggatcattggttgttgaacatatttgactcgagcctcggatcgatttccccgaacgaattgaagagtcacctggcaatgtgggaaaaattactaccaactttgatgct

SEQ ID NO: 288728 - DNA, 499 bp, Cannabis indica
atcgataatgaggtaattagtttgattaatcattgtgaattggttaaagaactaatgggttacttggagtttttgtattctggcaaagacaacatatctcgcatatatgatgtttgcaaagctttttatcgcgcggagaaacaagataagtctcttatgaattattttatggctttcaagaaaacatatgaagaacttaatgtgctattaccgtttagtcctgatgtaaaagttcaacagcgccaacgagaacagatggctattatgagttttcttgcaggactctcatctgaatttgactctgcaaagtcacaagttctctctggttctgatgtctcctctttacaagatgtgtttactcgtgttcttcgcacagagactacctcttcaactcctctgaatagcgccttggtgagtcgtaataattctgcaccggaaagaaactctactccaagtggatttaaaggaggtaattcacaaggacctgataaccgcacac

SEQ ID NO: 288729 - DNA, 819 bp, Cannabis indica
tggtcgcttccgtcatgaatctgctgatgtatgcccggagtggctcgcctggtcgctgttttacttcgaccaaatctcccagatgcaatgggagttggcgtgaggaagagaattgtgcatggaattccgaagagaaggttttccatgaactaaactttcctggagccaacttgaaataccattgctgtgcggcctctgacagagttgcggggaagattctgcaacatacgtctcctcgcaccccttgtaaatccatttgcatctcgaaatacttgagatgagatagaggatcttctctcccagtgtacatcttccacgttggcatcttgaacttgtgaggtagtggcaggaggttgatttctggcgagaagggagttccgcgtgcacggtctaactcaagatcattgttacgctgcccggccatgccatgaaacatattcttcagttcgtcaagctgggcctgtacggctgggctgacttcattggcattctggtcgggttgggctacgtcagcgtctttctgagcggggatttgagtatgggctccggactgcacattcgttgtagtattctgctcgtctgttccccttcttctgtttaggtcgtcccttaggtcacggggtgttcccaacctttcgaacacagaagaacctggctgccttagcgattattttgcgtggatccatcgagcatgactcctcctgatgaattcccagacaaggtctgttcgcctacctcggcccatgagtggaactcatgacctgggattggacggctgaccgttggttgtctgggaagcatttgttgggttttatgccc

SEQ ID NO: 288730 - DNA, 705 bp, Cannabis indica
accattttccttcaaaaaaaatatgggtttttcttaaaaaaattattttatgggaaattttaagaaaaaaaactaaaaaaatggaaaaagaaaaacaattaccgggttatctctttatggaaattagttatccctctggttatcataagggtacagagttacttttacttgattttttcacatctttcaacttttttttttcaattttttcaataaaataaattttttgaaaaaaaaaattatatttttacacaaaaagtataaaaactcataaaacttgtaatttcctcaataattattcatatttctatttagaatatacaaataaacctattgtagatgttagaacagaaaaaagggttatgaaaaaagattgaaagaaattctaatttggaaggatgagatattattcataatagattgtatttttataattagtacttaactttttagtaatgtgtcataattggtatcatatattttttattagttacaaatattttactttcagacacaaaattttagtaactaaaagtaatttttctatggtaatagtcaaacaagctaattggatcataatgatcatttgtcctttgcaaaacacccaacaaagtgaaaacccaaatttattttccctattacatctaacaaaatctaataaaactcaaactatatatgagtcaccaagaagagaagcaaacaaaa

SEQ ID NO: 288731 - DNA, 560 bp, Cannabis indica
gttcctcactattaggaacagtgagacaggcgccgaagttaatctttccttcagttctctgaaagcttcttcacaactatcatcccacatgaactttacttcttttcttgttaactttgtcaaaggcatagtaatccgagagaaattctccacaaagcgacgatagtagcctgccaacccaagaaaactttgaacttcagtgacattctttggtctttctcactatagaatagagtcttatctttgtaggatcaacagtgataccatcttgagaaattacatggcccaagaatttgacttcagtcatccaaaattcacacttctctttcttagcgtataattgatgatctttcaatttctgtaatactattgtcaagagttcagcatgatcctaacgtgtcttagaatacaccaagatatcatcaatgaataccaccacaaaattatccaagaaaggtctaaagactctattcataagatccataaatgcagcaggtgcattcgttaacccaaatagcattactaaaaactcaaagtgtccataacgtgtgctgaaagca

SEQ ID NO: 288732 - DNA, 559 bp, Cannabis indica
ttagtttcaaaatgtttgatggagtaatccgatcactcacaagggtcaggtatgtccctaatttggctagaaatttaatttctataagtgttctagatgacatgggtattgtgagtaaaattcaggcaagtacaataaaattaagcgagggatctatgactatcataaagggttacaagcatgaaggattgtactacctacaaggagaaccagtaactcaatgcaacaactcagtggtcatcttaacagatgacaagaagccagtcctatggcacagaaagctagggcatctcagtgagaaaggattgcaagtgatgagtgagcaaaacctactaggcagagacaaggtgggaaaacttgacttttgtgaatcatgcattttgggaaccaccatagactaaaattcaaaacaggtatacacaaaactaaacaccctctagaatatgtgcattctgacttatggggtcctgaaaagactctaacacatggaggtaatgcctatttcatgtctatagtggatgatcactctaggaaagtttggatttttctacttaaaaat

SEQ ID NO: 288733 - DNA, 524 bp, Cannabis indica
gagagagagggattaacactaaatacatgtattaaaataagattaccagtctgaaattgttacctgtgacttggaatcttcattgttgtatgattgaaacatcttgatagtggaatcgagctctcaaattcgaggagcagctcaaacggagacgtagccaattcgttggtgaacttcgggaaaatttggtgttttctaactccaaagctttactgttttgtgtgtttatatgtgtaaagatcagatcattgtagatctgatcttattgctgggtttgtgtttgggatttctgggtttctagggtttggctttgagtttctcagagagaaactctctgctagggtttcgaagagaagactgagaaagagagaaagtgactgagaagattctcgagtctttggttttgttcaaacacaaaacgaagccgttttgagtgttcagactttgaaaagtctttgaacagtgaaaggtcgaaattgaccttaattactgatctgtttggtttgttggtgtagggtcaagat

SEQ ID NO: 288734 - DNA, 322 bp, Cannabis indica
aaacatatagcaagtaggaatgacaagcgaaaatactaaaacggccattctatcttatgagcttccaccattgtttcatacttttgtaagccctattaaaagtcgccaccattagggtgatccatactaaaataaacacttacaaatagtacttatctttcgagattctacgacgttaaattgctaataaacgttcctccattagggaggattactcactaaaacaataactgtgcaaaaccaacaatggagatcgaatatcctaataataataaagctcattatttaaaaatgtattttcttctaatatttattttaatct

SEQ ID NO: 288735 - DNA, 645 bp, Cannabis indica
taatttgaatctagaagtggcgtctaccatctggtcaatcctggttagcgggaagcagtccttcggacaagctttgtgtagataagtgaaatctatacaaactcgccaagttccgttcggcttgggcaccaagaccaggttggctagccattcgggatagtatacgtcgcggatcatgtcgttgatcagaagcttatccacctctttctctagagcctctgctttcaccgagtcgagagggcgtcgcttttgttggactggtggcatgtccggattgacgttgaggacgtgagtgatgacgtggggacttatgccagtcatgtcctcttggcgccatgcaaaaatgtcgatggcgccctttagtgtctttattattttttctttttcttccggatctaggctctttcctagccagagtactttggtggagtcgaggtggcacactgatatttcctcgacatcctccattggttccactattttttcagaccccacccgggggtccaactcatcttcttcggccatttcaggctcaatggtttcccggaccattagcacgggcaggtgggttgcaacattgtaacattgccttgcttccccttggtttcctctcaccgtcccgattccagcttcctgggtagggaa

SEQ ID NO: 288736 - DNA, 598 bp, Cannabis indica
aggttagtcatattgggtattttaaatattatttgttgcgaattttattagtgttataattccaaaagaaatgttgatagttcaggtatgggtgaattataaagatcttgtaatttctagatatcatataaaaatactaaggtctaggaaggaatagtaaagctaaggtgattacgaagtaaaatacatgagttaagttactactagccctttggctagttaaagtaattcatagggggacgtagttaaatattttggatttaagtgtttaatcagattggtaatgttctaattacaattttgtggtctgatgttatttcaggtggaatttcagtgttacaggctgaaactttagccctgttggttggtcttaattgggctcatgtgtgtggtcttcaaattcatgcagtttattcagattcgttagctttagtgacggcattaacaaagggaagaagtatttcaacgagctatgagcattgtttgaagatgttatagctttattgtctaaattctcgggggcagttttgtcccatgtggctcgctctgagaatttagcggcccatggcttggcaaagcatgctctgcggttagacga

SEQ ID NO: 288737 - DNA, 555 bp, Cannabis indica
tgcctccctcatccccagggaccggagtaagcacgatattgggaggagcaggatgttcttccatgggggacaccccgccgtcaagaccatgggcaggagtgtcggctctcaaaggcttcttgggctcgtcctgggcaatcatcttgcccttgcgcttgcgaatcagagccacctcaggctcctcttcaccttcttcagcttcctccggaagagctcggagctcccccgcaccctcggcgacttcctcagaaaagccccattgctttccttgactttctcccggaagcacctcctcgtcgtccacttaatcaataatgtgagggggagcgctggaggagacctttagggaaggggctattggggaagaggtgaaggctggaggagccacgggagtgtgaactccggcaagctgttccaagatggcatccatggagacacctgttttacaaaaataggcaagtgttagatatctgtgagaaaccacttacacaagatacagcaaataagctactcctacccggacttcctaattcggccctagcaaagtcctgaact

SEQ ID NO: 288738 - DNA, 621 bp, Cannabis indica
gctaaaaatttttcaatgcattttatgagtccgttagtgtttatgttctttttttcttattaataatatacatatgaataaattatatttttggtaaaaaactaaatattatatgaatacttataaataaaaataaataagtaaaatataattaatataattattttatcaaagtattaaaattgaaaaaaaaatgaaattatttgaaattaatacaaaaaattaattaaagtaaataaaataataaaaaataaatatttaaaagtagagacttaatgttgctaataaaataaaaatttggttgcttatttatcaatatactaacacacttattcaacagaaattagatttcaaaatatatattaactttctttttattagtattagtgaatatactcatggagtaatagttactaattaaagaagcatttcaaaatttgaaattatatgattttttgtagagaaatgtaggagatatataggaataataaattagtaagtaattaagctgcatttaatgaggagaataaagtggtgatacaattattataggaataatcatttattaaaagttagtaagaaattcaaaaaataatagtaaataaattatatatatatata

SEQ ID NO: 288739 - DNA, 506 bp, Cannabis indica
tgtgcccaatgtcgttatgatactcgcatcgcttgttggggtccctccgggaactatccttgtacagaggaggtggtctccggtagtgtgtattttgcctagtagcaaagtacacacgctcttgggagtctgtcaactccgtgtactgggtgtactggggagtatacccccttttttgtcgcttttcctccgtccgggtgctgcctttggaggaccttttactcctcgagccctgggaaggaccggccaggctggcagttggagcggagtgtgagggagcttgtccatttatccatgagggattcccaaaatgggacgacgcgggggccaaggcctggccctggctgtatccgggagtagcggggaattgtatgccgctcattggtggagcagcggtcgggacagtacctgacggctggactccgggcatataccccgcttgttgggttttatgccctaaataaaactccatttcaatgtaatctattttattcaacatcaataaa

SEQ ID NO: 288740 - DNA, 820 bp, Cannabis indica
tttaaattttgttggttgagcatgtgatttttttttagaataggggctgttaagatttaaaacttgtgcaatctgatttctaggttagttttgagttgttgtaagctctggttaatagttttgaaaggtggaaatggaattgggtaagcttgagctttgaaactcaagtttaggtcattaatggcaagttggaatttattggtttgttctgtgattttctggttggtttaggttgtaaatgcactgtacacgtatactggaaagtttggtgtagtttggatggattttaaggtcaaggggagaattttttgttttcccaacacagaaccggaatttcggttgggaaccggtctgccggttgggagaatttttgaaaccctagtttttcccatttttgagagatttagggtattgccatgttatttatcgataggggaacttttagttttaagtttaaatcctcggaaagtgatttagcgagtcactcatctgtgttacaattaatgtgattagggcatccatctagcgcgagaatttccgttcaggtcggccagcacacttgaattcggaaatcaggtaagaactgtatatagcgtgttatatgagatatatgcatgttgtatgtatgattgtatatgttttgggtgatatcatagcggcacaacaattgtgtcggttcggcggtacaggcatcgtactggttaagagtgatattcaccccagagagtattaattggcgctatcatagcggcacaacagttgtgtcgattcggcagtacgggcacagtactggttaagagtgatatcatggccaattgta

SEQ ID NO: 288741 - DNA, 581 bp, Cannabis indica
tcctaatcatcctggaaaggcaaatgttgtggctgatgccttaagtagaaaaggacctgatcaaatagccaacatggttatgatttcctcacagctagcctcggaaatgactagagcaaacattgagttggtgactgaggaattatttaatctgacacttcagtcagatttgttggaaagaatcagaatggctcagttagaagattcagaattgactaagattcgagaagatgtcttagcaggcaaagctaaggacttctccattgctgacaatggaatgctgttgtttaaggcacgggtgtgtgtccctgatttcattgagcttaagaaagaaattttagaagaagctcatactaccccttactcattacatccaggaaccaccaaaatgtatcaagatttgaagccctatttctggtggtacgggatgaagagggatgtagtggactatgtcactaaatgcctaacctgtcagcaaatcaaagccgagcatcagcgaccggcagggttacttcaaccgttaacacttccggaatggaagtgggaagacattgcgatggactttgtggttggcttgccta

SEQ ID NO: 288742 - DNA, 476 bp, Cannabis indica
cttcacaaccttacacactatgattgagtaccacttgatgtgtgtggggcacttactctatcactaaagggtatgaaaatatgaagagagaaagagagaggagtggttcgaaaatagtaagagaaatggcttaggtaaatttgactgaaggcttgaatttcatcttctttaagtgtgaaccatcactatctatttataggcaaccacctaagtttaggttagaattattaggaattaaaatattggaaaaattaaatggtaaatccctagtaagtggcccaccataggatgtgggccttactttggaatttttgccattttgaacaatttttccttattttctcaaaaatgtcatttttctaatttaaccacacaaatgccaaaactatttatttaataattaaaaattaattatcaaataaaattgccatttaatatatttattaattagcttaataaagtctcttaattaataa

SEQ ID NO: 288743 - DNA, 599 bp, Cannabis indica
cttgcttggttctaattagatcagcagtgagtttatagatctcattctccttttcatcaagaagtctgttgaggtttttgacagtgtcttctaactttcctttttcagtctccacttgctctagtgaactctttagaacacggatctgtttagtcatgtactcccattgtgcaaacatttcttcataagcattttgtcgacctgtgctatcagcttctgatgaggtggagactgcatcatcttcagactcaactggatgacagctttgggccatgaaagccagtacctgcttatcctcatctgatccttcactggctgtggagttcttttcttcttcactgtcactccaggttgctgcaagggccttcttcttttttagtgtgttggcgcactcagcctggatgtggccatatccatcacactctctgcacttaattcctcaacctttttgatcagtaggagcttgtccttgtttgaaatttacacctttgtttctcttgagaaaatttctttgtcagctggtgaattttttctgtagttctttttcaagaattttgcatagtttatcgtcaacaaggcaatagttttgtcagtaatgc

SEQ ID NO: 288744 - DNA, 730 bp, Cannabis indica
aaagtataaggttttcttttcttatttagaaagaaaataattttttaatgtacctgttaaacacgtattataggacaaagattagttttttatttgtaggataagaaagaaaattgcattatgttatcatgattacacattaatatttgaaataatttgaattatattcccatccagctacgtacagaccaacttaaactactaatcattaagaaaattcaactaaagattaaaaaatataaagaaatgattatttatttttatttttttgagaggaaaagaaatgaatattattaacataaaaaaattgaaaataaaataattcattattgatacaaattaaaatagtttagttcctcctaaagctctattaagtaacataaaaccattttattgtgtgtagccattaatatttagcatatacataaggtaattctaatgtacaacctttaatttgtaccttatagtatgggatagttattttggttaataagattaaagtgaaataaaaattatacggtatggtagtatgtacgtacacatgtgatatatatttttttttttggttaaaaaaatagcagctgttttataagaaaaaattgttaaaaaaaatagcaaaaggaggaatgttttatatatgtggcgtgtatacattaatagatttggttttttttttttgtcctttaagttaatgagttttgctatttaatttttttgttattgaaaaaaa

SEQ ID NO: 288745 - DNA, 639 bp, Cannabis indica
ttatgaggaaaagtgcaaatgaggcctatgatttgctggaagagatggccctgaataatcagcagtggccaactgaaaggagccagacaaagaaggtggctgggatgcttgaggtggatgctattaccaagttgacagctcaggtagaggccctaacaaaactgatgtctgttcaagtaaaacaagctcaagtggtctgtgagctatgtggaggtcctcatccctattcagaatgtcaagaagatgtgaataatttgccaatggatgaagcaaaagccattggaaattactctcaaaacaacaacaactatgggtttaatcaaggaggaaatcgaaggaatagtgggttctatcaacagagaaatcagaaccagtcacagaaccaacaacagactcagcaacaaagctctagtggaaattctggtcttcagacagatttattattgcaattcatgacagagacgagatcttccattaaagacttacaaactcagatggggcaactggcaactcagatagcaactcgtcctcagggaaacttgcctagtacaaccgaagtgaatcctaaagaaaactgcaaggcaatcaccctgcgaagtggaaagaaatatgatgggcctgatatggtacagccagtgg

SEQ ID NO: 288746 - DNA, 490 bp, Cannabis indica
aaggggtgatccaccatgaaatggcacctacgaatcctttgctacagtggactaagcagatcacaatctgactgaaccactataattctttgtcttactgatattttccagttttgttgattgttctcacattcccagtcgagtactcgccgttataggttgaatactcgcacttgtcgtttctctaaaaattctctttcgtattaatcaaataatataatttggtgttgcgaaattcactcgacaacatttggcgccgtctgtgggaaacgactaaagatttcattcatttcaaagaacactaatcatcatggctggaaatcacgctaacggagctaacaacgggtccatcaacattggaatgatgaatgtaccgctgtctggagctggagtgccacctgtggacgtcattaacggcggagtagggagaagcaatatcagacctctcaacctattcccagaaacgactggccctcaagtgggggacaca

SEQ ID NO: 288747 - DNA, 894 bp, Cannabis indica
agggggagctaatctaatatatattgattcaatttttgatctcttattttcaaaataatcaaatatttgatatcatccaaaagggggagattgttaactcaaacttttaggtctccttgttttgatgattaataaatatttaattattatttattactaatgatttgttgattctatagcacaattaaaaggtaaaataaatttttttaaggcaaacttaactctaagggcgaaatggtaattttacaaaaattctcgaaagtgacccgaagtggattccaagactcaatgaactcaagacaagactccatgaaggtttatttacattctctagtattgtatagtaattttcaagtccatactcaaaaaagttttaagtacaaattttggcccactaacttgtgcgacaatttttctcaccaaatgatgtaaaaaaatttaattgactttctgaatcacatatcatttaattaagaaaataaaattgaaatttctaaaatcggataatcgagttgagagttatggtcgttttagtgcgaaaaattggactttttgccactaccaggaattcggttaaccggttctcttaaaaccagtttccaattggcaaacggtgaactggtttgcgcagtggcaatcttgcttatcgtgtccaacggctatatttcaccataacactatataaactcaatttatactcaaaaataaaaagttagaatgagcatttatatcataaacctaaacatattcaagtgatttaaaatgagctcccaagtttataatctaacaaacattttttcacacactttgagccaaaaatttgtgtttaaatcctttcaagtgtgcttgctaatctctctaagttttttattgtatcatcatacttgtagagtg

SEQ ID NO: 288748 - DNA, 569 bp, Cannabis indica
catttttatggagattatggccatgacaccaacgaatgcaacaatttgaagtgggaaattgaatttttgataagaaagaataacccgcacgtgcaaagatatgtcaaggccgatcaaaatcaaagggctgctcagacagataataatcaagatttactaccaccagcagtagatggacatttgcaagtcattattggaggctcgcacatagctagagattcaggcaaagcccgggaagggtatgcccgaaaattacatcacgagcaagaagaggtggttctggccgtcaaagaaaggaagctaaaaataccacaggcaggggaacccaccataacatttaatgatgaagatgttgtcaagattaatttcccacacaacgacccgttggtcgtggaagtccagatagccaacaaaatggtggcccgaactatgattgataatggagcctcttcaaatatcttgttcaaaacaccatatgaaaagatggggctccaactcaaagacttaaccccctcatcttcacccgtcgtatggtttctctggccagagtgttgcacctctagggaaaa

SEQ ID NO: 288749 - DNA, 640 bp, Cannabis indica
ataaagtaccaagattgtgtaatgtgtaatgtgtaaaggggtactttatgatattatgtaatgtgtaaacatgatgacatgagattaaattgataatcatttttcagttattgtttgttcacttttcttgctgagtctctgtgactcacaggtgctttatggtgcaggtaaggggaaagcaaaggttgagcagccatgagttcgaggtcgtagcagcaatgtacatatcagccgcagtgtatcggcccagtagtcaggatgctctattttgaaagtatttgggagtacaaagtttatgttgtaaaaacactattaaaccagtttgtgaatattttgaaaacagggggaccccatggttaataccacttatcttttatcatatagtctatatgtcaaatttttaattatcaaaatttaattaaccacacttttggtataattatatagtatctatataagaattttattaaattgcacacacgtggcgtccctgttggacagggcgttacaacatggtatcagagcgccaaggtttttagatcctgaagactggcttgacatgtacattggctgcaaggacttgatcgactcatggttcagtaagcttttagttaaaagatagtttgttaattttctaatt

SEQ ID NO: 288750 - DNA, 262 bp, Cannabis indica
tgttatcggcataaatttaccctccccgcgagaaggacttgtctatagagaacttgctgtattgaaggtggctcgcaatattatagtactcgcagtaccgaaagaaaggatctcgcaatattaactaaaagagacctcgctatgttaagaaaggcacacctcgcatatttgatgaagtgcagtatcaatagggaaaggcacaaatacatacaccaatcaacggaagtcaacagtcaagcattcaaagagcattcatgacaaa

SEQ ID NO: 288751 - DNA, 501 bp, Cannabis indica
catcgatattcgagacagcgagtccacggtgtcggcacgcgactaccttatacattcgaggcatgctcctgacatcgaggtcgaggagatggacgaggaatggacgactccagttcgcgagtcggtgaggaagaggaggaggcggaagggagtgggacagattcggtcgacgattcccagctgaacgagcccttcgcgtgtgaggatttaatctcgagagtttccaaatcagacttcaccacctttgtgaggttaaatttgctgcgactcgcgtttcagcgacctaagccatctcagagagcgcatcttccatttactaaccctgcgatcattcccacagaggatgtggtagtctcaatacccattcttcggtgtggggtatcggtcccctttcaccccttcatcgcagctattctcaggcgatatgatgtatcgccctttcagctaactccaaacagctaccgcactgctctgccttctatgcgatgtacatggagtatg

SEQ ID NO: 288752 - DNA, 445 bp, Cannabis indica
ttctcttcatatttattttttttaaaaaaaataaaacaaataatactatagtgattgccgaagttgtcacttgtgctggaaaagtcatcggagtttactgccgacaccggaaagccgccggtgcctaaaaagtcgccggagttgctgccggcgccgaaaaagtcatcagaattagcactgtcgctggaaaaatcaccaagaaactagtttcttgatgttagaaaccggtttcttggtgatttttccggtgacaatgccaagtccgacgactattctggagtttgatgtcggtgccaaaaaagttgccggagtagttcctggtgttggaaaaatcgccagagttattgccggcgtaaaaaaagtcgtcagaattggcattgtcgccagcaaaatcattagaaaaatcaccaagaaagtggttttttcatcaagaaactggtttctt

SEQ ID NO: 288753 - DNA, 796 bp, Cannabis indica
tgacaaaactagaagaaaattacagttttacaaatattgggtacttatgccgctaaaaataaacattgagtttatgccgcttacaaacttaaaactttgggtacttatgcctctatttaccctaataataataaaaatatatattactaatatatgtatatatgttatactaatcaaactatataccacaattaaaatatatataccatgataataaaattatataccaccattgtatataataacagttgtccctgattttgcccaaaatacgtggacctctataaagacgacacgtggagctgagaggatcagctcttaaagaaatcaactaagttttaggcaacagaggagtgtctctgggaagatgactcccgggaaagatatgagaaggatctttatgctcccggaggccagggccatactaaggcagctccgggaggtgctggactctattgaacaatcacttcgcatttaatgccgcatggggtaagacgtattgaaactaccataaacgatatgactgatggcgcaacccctcttttttagctattacgttgtgataaattgttgggttttgtgccctaaataaaaccctttacaatttgattacttatcaatataagaaatttgaagtgttttatatttgcatgaattttacatgctaatggtttaatatgtttattacatttatacacaaaatcagttaagtccaaatcatatgtttattcacaattacagtatcgtcaacacagtggaatgtgattgtgataatatgaatcaaaagactaagtcc

SEQ ID NO: 288754 - DNA, 795 bp, Cannabis indica
catgtggacttaatggggccaatgcagaatgaaagtatcagtgggaaaagatatgtaatggtcttggtggatgactactttcggtttgcctgggttgaatttcttagagaaaagtctgacacattcggatcgttctctgccttgacattaagactgcaaactgagaaagactccaaagttgggaaagtatttaggctgagaagtgaccatggaaaagagttcgaaaattccatattctcagagttctgtaatggaatgggaattcatcatgaattttcagccccaaaaactcctcagcagaatggagttgttgagcgaaaaaacaaaactctccaagaaatggctcgagtcatgatgcaagccaaagatatttcaaaacgattttgggcttaagctgtcaatactgcctgctatggaaaggaagacctccaaatgtgagccacatgcacattttcggatgtacgtgttatgttctgaatgatcgtgatcacttggccaagtttgatcccaggagtgatgaagggacatttctggggtactccaccaacagtcgtgcttacagagtattcaataaaaggactctctctgtggtcgaatcaatgaacgtgaaatttgatgacttagaaggacatgaagaagtgtgggtcgaagatgatgcacctgtcctctctggccctagaccagtcatcactagaccgcctcaagtgtatcctgacactcctacagagtctctaaatacagaaccaagtgtatcaggtgacaatcaagcaattgccagtgatccaggaagaggaa

SEQ ID NO: 288755 - DNA, 847 bp, Cannabis indica
tatatgattctgatatcggtggcaccgttgaggcagccatggagtcatatttgaagccttacagcgagctatttgcgaatctaattcgagctagcggttatttcccatacaacaattatgtacatccggtggagttgggcgatctcagtcagctcctacccctacattatagacgagttacctctgaggttgcaccacaaacgaagagcaggtgaatctctttttttttttgtatattttgagtaatttatttaattttgcactccattatgaattacttaacttaattgttgctaatatttagtaatttttttttgtagtggcaattgtggaatgtatgccatggagcacattgagcacttgatgctggaccggtcgttggagcatgttcatgatggtaacatgctcacctttagacataggtggtgtgtggacttattttaccagaacttaacatggtagttttttgtaggttcttatacacataaactccccttttgtaattgtattataatctcaccaaaattatatataacaagtaaatttaaagctatttaaattgttgcttgtatcaatttctttatttttttaatttttgataaatacctgtcttataacggtaactatgggaaatgatgacatcttgaaaaatgattctggtaacaatcgcattaaaatcgcacattaatcgcataatatcgccaaaaaatacagaaccaaacaaactaaaaaatcaagatcctgtcaattaacatcgcacaaaaatcgcactaaaatcgcataatatcgccaaaaaatacaaaaccaagcaaactaaaaaacaagatcctgtcagctaacatcgcac

SEQ ID NO: 288756 - DNA, 479 bp, Cannabis indica
tttgttttatcacttgaaatatgtttattggggtctaattagcaggtctggaaagtttggttgagtttggaaacgttctgattagggatctgatttttgtgggatttgtggggtctgtttattgtggtctaactggttttacactgcctgtaaaactggttacccggattttgcagcaggggtgaaaaccggtttttcccaacttgtcgtttcgtgctagtttcaggttttctggtagtttgtttcctgctagtttggggtatttttatattaagttgcagtaggttaagtttggttttaaaacctttttcctggttgtgatttagtgagtcacctaagtgttgtgattgttatggtttaggagcctgtaaattgccgtgcagttcgttccactcaggttgaccggcacacctgaattcaaaattgaggtaagattagtataacagtatgcatatgtattacatttttagcgtgcatgt

SEQ ID NO: 288757 - DNA, 625 bp, Cannabis indica
caattaaataaagtaattaaagtgaaagtaatgaaaaaatctcccacacttgtttcacaaaaaaattcagtatactctatgttggaaattatttgttataccaacacacttaaaaaaggcaaataatacaatagtatgcaaaagagagaaaaacagagagaaatacaaactgttgtaaatcaaaagtgtaacctttgtttgatgattagtggaatcaagctgagggcttgacggagaagtagccggttgttttgggcgaactccgagatcaaatttggtgtcatcttcttaatcactgtttgcattctctcatctcactcttattacttttctggtatttgtatttgtgtatgtgtttatgttcttgagttttcaggtgtgtattgttttggccgaaagttgaagaatggttgtgtggttttttgggtttgtattttcgggtagaaaatatagcaagaagaaataagaaaaacctagaaaaccctatttttctttgctgccatttagaagaagaaaagaaaaataaaataacccctttgaaccctaacccgtggctgtttaaagaaagagaagaaaagagaaacctagaaaaccctaatttctttgctgccattaaaagagaaaa

SEQ ID NO: 288758 - DNA, 151 bp, Cannabis indica
gtgatctaagatatagtcactgaaacaagagctcatccatttacttctatttagctaagctcgaagggaatcatcacttgacttctatacaccagtagaagctatagattcattatttatgttcagcgctcccactcaatcatactatcat

SEQ ID NO: 288759 - DNA, 602 bp, Cannabis indica
ggatgtgccactgcggagaaacttttgatgataacgtggtttgcccaaaagtcggtgaaaaaatggctatcgaacagcttgcaattatctgaaactattttgtacggcaatccgaactggcagattatgttcttcaaaatgaagtcttgaaatttctttgatgtaatggttgcgagctgttcggcttccgtccacttagtgaagtaatcaactactaccattgtatactgcacacctcctttgcctttgggtaattgtctgatcaggtcaattccccaaatggcaaagggccacggactctacatttcagttaactcgttaggtggagctttaggtatctttgaaaatctctggcatttgtcacatttcttaacatagtcttttgaatcttcaatcatcttaggctagaaataaccttgtcttagaattttcttagataaactttgcccggcggcatgatttccatattatccgtcctgcacctcagataggagtcgtgcagcttcttcttgagtaacacatatgagcaatggcatggagaatcctcttctgtatataattccctctactatgatataccgtgcaaccttccttctcatttt

SEQ ID NO: 288760 - DNA, 1050 bp, Cannabis indica
tacaggccgaagtagatggacaaactgagcccgacgccctcctcgagttcctgcattcgcaccgataaccctcaagtgacaacttctagacgtcatactaaccgtgacgcagggaacgagaaccaatcctgaaggtctagacctgaaccgtccaacgtcgagggatcaatccgcaaggtatccaaaccaaagcacagaaatcgatgaagatcctgagcgccgtaatcctcgcagccgaccatcaagagacaacgacgcagagtcagcctcttcgtcatcgcatggtcgcactccaagcaggtacacaaggtccggctctgtacagacacaacagggaggacgttatcaggtacaccgaggtgatctgcgtgatcatctcaacgcagttttcagggcacgctctcgcgtcccacataatactgagacactccgtgatccccatgcggacgatcagggtgccaacacttataataacccgcctaccgcgccgatcgcgaccactgggattaatgtcccagcaaatcttgccgcagtagttgcgagccccgcagttgcagcaaccccggctcctgcggctggagggattgaccaaagcatgcttctgcaggctttgaaaatgctcgagcagcaacgaaagcctatatataagttgcatggtacctcgccttttactacagaagtgcgacaggctcaacttccaaaagggtttcgtctatccgagtccctcaaatataaaggtacttctaacccgatagattatcttgaaaaatttaatactataatggaagtggaccaggtaccgcagctcgcaaagtgccgcattcttgcggcaacactcgaggagaatgcccatgattggttcacccaattacccgaggcatcgatatcgacgtgggaaaccttcgtcgacctattcctcacacatttccaggccacaatgacgtataggccaccttatacgactttggccaacatcaaacaagaacctggtgagtctttacaagactattttaaacgctttaacgcagaagtaacaaaggtcgagaaggc

SEQ ID NO: 288761 - DNA, 502 bp, Cannabis indica
aggaacctagtttcaaaaagaaaaagtttttttgagtgtagcgtagcttgtagcttaaaggtcttggattcgaactcataatctctcccttttcccatccctctctcactactaagctagctttaatggcttcaaaaagaaaaagttgttcattatacattttagcttagtaagttaaatgaatgaaatctaaagtttagttccaagagcatacatggtgtaaagagaaagttgattttgatagtgtttgatgcagattgcagtgccaatggtaatgaaatcaacagctcatatcgatattttaacattaatttcttactttatttttcagattgagatcaagatttagatggcgtttggttggagataataaaatagaatggaaaagaaacaatttgcattattttttttgtctagttacctttttaaagtattggaatatcgttctaatggaatgcattttctatcatttttggtcgaatgactattccatttcgaaatg

SEQ ID NO: 288762 - DNA, 593 bp, Cannabis indica
gttattcggtaaatgttaatatactgtgtttagtagaaatataagctctataattggtgtgaccacttttgatcttgtaatcctagctaaaactttgcatatccttaaaaactaatcgataccctttcggctttatctatcactatgcatgattgctgaataaaatttgaccatctactattgctttgctatttatggtgttgaattttaaaggtttttccactttgtgcagactgatagtgaagttgaggtacaagatctgcttgataatcttggacttagagataagcaacaatttgtaagttttcttagaattattaaaggaatacactataacttttcttatagaagagtttgaatatcttatatattcatccatagtgaagtaagttctgagaaaatttgtgtgctgcggtgatataaggatgagaacttgtctattgttttattgattatagttgaaattaacaaatggttatggttgataaaataggggaaatgctgtccaatttttatagatgtattttgtctgcattagtttttatataattgagtatgatgttaaatgtaggttatatgtctggccaaatgaa

SEQ ID NO: 288763 - DNA, 562 bp, Cannabis indica
atccttctagaataattcttccactcccaaagtaaccatcatctctaatataaagttctgagttggtgtagatataaggattctaatatacacccctatcatctaacatataggtcacttttagagattctttcttgattatatcccaatgttccttgtttgattacatctttgatggctcctactcaacagtaggagtctggttaaatgcatgtagaagtgtgtctttaactcttactattgatacttagggacatcttgttgtgacattttatcttagtctagaaacattaagttccttctagactaagtcatcaacatagcattcttgtataaacattgatgtaaaatacttgcttaatattaagtaatcattatagaaaccataaaatatttcataaggaataggaattgtgcttgagtcttttgaatagactttgcataaatttcctatcttatcctcataattttgataagttattactatgcatatgaatggttagattatcttttctttgttttattttaaaagttcctatcttgaacataacatagtaggcta

SEQ ID NO: 288764 - DNA, 453 bp, Cannabis indica
atgcaacgaaagaagaattgagttctatgtcacaaaatgaagtttgggagttagttgaactacccaaaggttgtagacccatcgggtgcaaatgggtgtataagatcaaacgtgactcaaatgggcaagtagagaggtgcaaggctcgacttgtggctaaaggctatagtcagagagagggcattgatttcaaagaaattttttcgcctgtttccaccaaagattcgttgcgaatcattgtggctatagttgcccattttgatctagaactcaaacaaatagatgtaaggactgccttcttgaatggtgacctatctgaggatgtgtacatgactcaacctgtaggttttgagaagtctggcgaagaacacatggtttgcaaactcaagaagtagatatatgggcttaaacaagcatcaagacagtggtatctcaagtttgatatgattgtca

SEQ ID NO: 288765 - DNA, 495 bp, Cannabis indica
ggggtagaagtagggtttttcttttggttcccttcagcgggataccttatagggcttggttccctagatttttgcctttgggtacttggcgaggattcctctggttcctttccaagtccagcagacatggctttgggatgcacgtggattctagctgcctcatggctttttgcatggccagcattacctcttgcatcttttggttttgtgctttttgggctgcgatctcagcttcatgatcgacagccttttgtcttaagagcaccaattccgagtagctaccgtcatcgtaggcgtactcatcgaggtttccctcgtaatcatcatcaggaattccttcttcttcctcggaaccctcagctgctcttgaggctacgtcttcctcattcgggtcttgagcatcttcaagagggcgaggttgacgagtgcttcgagtctccaccattattgtaacgtattgtgtgtttacagaagctttcttcagctctcaatgaa

SEQ ID NO: 288766 - DNA, 698 bp, Cannabis indica
gaaaagagatgtggtggactacgtgtccaaatgcttaacctggcagcaaatcaaggctgaacatccaaggccgacaggattattgcaacctttagtcctcccgagtggaagtgggaggacattgcaatggattttgtaactggtttgcctagaaccacaggaatgtatgattcggtatgggtcatagtggacagattcacaaaatcagctcactttctgccagtgaaagttacatattcagtggatcagtatgttgaactttacgtaaaggagatagttcgtctccatggagctcctaaatccattgtttcagacagggatccaaagtttacatcaaagttttgggtgagtcttcagaaggctatgggtaccaagctgaagtttagcacagcctttcaccctgagactgatggtcaatcagaaagaacaattcggatacttgaagatttgttgcaagccggtgtcatggactttgagggttcatggagtaaatacttgcctttgattgagttctcctacaataataactaccagagtacaatagggatggctccctatgagatgctatatggtaggaaatgtcgttcccctattcattgggacgaaactggagaaaggaagtacttgggtccaaaattagttcagaggaccaatgaagctattgacaagatcaaggctcggatgcttgcttctcaaag

SEQ ID NO: 288767 - DNA, 730 bp, Cannabis indica
aactacctccaccatctccaccacgtccaagggagcaaaggaaagaccaagaaagaagaactcctcggagtgaaaatcacgaaacaccaggcaccagtagcagccgcccaggtcctcctcgtagtactgtaccatctgattttgaagtttgtacaaaattcaaacctattgtgtggacaagggaagacatagaggaaaataatgtttatacaacttctcttactggtacacattcaggggaaatatatgttggcaagctgtatacaaataagactgaattgaaaaatgtggttggaaggtttgcattgaaaatgaattttgagttcatggtgaagaagtctgggaccgatgttttttatgcaacttgcaggggttcagattgcaaatggagagtgagggggaggaagagggcacgttgtgacatgtttgaggttactgtattccacaacgaacacacatgtagcctggattctagacatgctgataaccgtcaagcagcaccgtgggttgttggccacctcattaagaacaagttcaaatcagatggaactaagtacaaagctaaagacatacaaagggatatgtttcaggagtatgggatcaagatgagctatgagaaggcttggaggtgccgagagaaggcacttatgtattcgaggggtacgccagcagcagcttatagtcagttacctggttacttttacgtgctggaacagaagaatccaggtac

SEQ ID NO: 288768 - DNA, 526 bp, Cannabis indica
agcacagtggaatataatcatgattatatgttcaaaagtttaaatcccatgatttgtcagttcactggatttagactgacatgataatcagctatatataagatatacttacaccttggataagtgttatgtcctttccagggcattggcaaagtttactagtatcggatgtatggagtatacattggattggaccgatattgatcttggataagatatcataaacttaccgttatatctttctaagacaatatcactagttgatcttaggtctatggatcttaatcctgatatggttaggttcaacttagctgtattatatatattcttcaagttgttcgtgaaagctaatcaatcgtttcggcagatatttacatcttaggaacatggtagttcaattgagtgagagcgctaaacatagatatggaatctattgcttctataagtatttagaagtgaaacgatgattctttcgagcttggctgaatagaaataattgattgagatctcatttcagtaattatat

SEQ ID NO: 288769 - DNA, 706 bp, Cannabis indica
tttattttaattttattaaatatgtttatttgttattttgttgataagtaaactgatgttaactttaacataataaaaaaaaaaacaaaaactaaaaacaatgttaaaccaaaaattaatcagataaataaacattttttatatataaaagtatatgtgtgcatgttggcatataagcatttaatttgtttgtaatgtttactcatcacatcatcataacttgatcactattattactacccactcactcactcactcacactcactagtcactactaacagaaaaagaatgaataccaattttcaagtcacctctctaatatctctaacaatgataataaaggaaggtataaacggtagctgggatttagtaaggccacgtcaagcatcttcctttacttacagcaattgcaacgaatgaataattacacacgccaagtatgattgtttatattataatagagatttggactggacccatataatgcaccaatgggcttaatcacaccatagtatttgataatttaaccattggttttgttttgccctttcacaatatttacatcataatatatatatgtttggatactttaccaatacacaccttaaaaagttgtctactcagtgatgacccaaaatttttattttgtggtggtctattaattattaaaaaatatttatacttatattataatcactctattat

SEQ ID NO: 288770 - DNA, 496 bp, Cannabis indica
agaagggtggcttttataggccagaagcacatgtgaaacagctgtgatcagctaccatcgaacggctgggaaggcacacgattcgaattccctagatccaacggttggattgaatcgtcatcaaggcggtggaaacgtttgagtacccgtctgacacccattaatgcgccgtatcaataaatggacaagaaacgaatcgacgcctgcaaaaagtgaatcgctgcagtaatgatggtcattaaatacaccatcacgcgcccaaagcacgtgccaggaaaccgaggaggcaaccggaggcatctaaacaagccttgttcacttcacaattaaacaaggcttgggggtaaatgttgcccctgattttgcccaaaatacgtggaccaaccggatgatgacacgtggatgggaagggtttagcatttaaataaacagctaagtcttcttgaaagcaaaggattatctcgaaaatgcctcccggagaaggcatgtaagcctc

SEQ ID NO: 288771 - DNA, 855 bp, Cannabis indica
aggtgtcggacagtctcaaacgacgtcgtcacttgagcgtggattcgcaattgatatcttccttcttttttattaccaacaaaatctagagaattgaatgtattggccggtttctggctctatagaggccaagaaaaaacaaaagtaataattttatcttaaataagatgctatttcttaatttttttttccagcatatttccttacaattttttttgaataatattttcttacaagcttgatttttcctgtcgaaaatgaaaaatgaatggataaaattattagtaataaataatgcttccttaactaattgagttagtctcttccacatttccacccattatcttctccatatttttgaatagatccaagctatgattaatctaatctctctaaagggaatacaaaaaaaaaaagatggtccattttattcttaactcgagttataatgcaactagattgaaaaaaaaaaaatgaaaattgcaggtactaataaacaaagcattatcctcatcaaaataaataaataaataaagcattatattctctccactgtgtaatttggctcagttctttaatttttttggttaatttggctcaaataatataataattttttctcaaaaaaataaattaataaaaatatgtaatatacaaagcattatatggtataaaaataattatagatatgggaatgtgtaaattaagttaatagttgttgaaatgggtaatttgttgcataaatatttaagtttaatttttacttgtaaataaatattttgtaaataaatatataagtttaattttcggtataatacctaagttatatttcttttttttttttttttgagtgta

SEQ ID NO: 288772 - DNA, 1180 bp, Cannabis indica
aatgggtctaatttagtggtatttggaggttgtggaacacagggcttgctaaatgatgtttttgtgttggatttggatgccaaacctccaacttggcgtgaaatatccggattggctccaccactaccaagatcatggcacagttcttgcaccttgatggaaccagttgattgtttctggtggctgtgcagattctggggtacttctgagtgacacgtttctacttgatctctcaatggagaaacccatatggagagaaataccagcagcatggacacctccttctcggttgggtcacacactgtctgtatatggtggtagaaaaattttaatgtttggaggtcttgccaagagcgggccacttagatttcgttccagtgatgtgtttacaatggatctaagtgaggaggaaccatgctggagatgtgtcactggaagtggaatgcctggtgctggaaatccagggggcattgctcctcctcctagacttgatcatgtggctgtgagcctcccgggtggcaggatcctaatcttcggtgggtcagttgctggtcttcactccgcctcacaactttatctccttgatccaacagatgagaagcccacatggagaatacttaacgtacctgggcggccaccaagatttgcttgggggcatagtacttgtgtagttggaggaacaagagctatagtccttggtggacaaaccggagaggaatggatgttaagtgagctccatgagctttccttagcaagctctgccatctgattcaaaggattcacaataagttgtaacaaagtggtcactgcattcaacgacaaggtgttagatctctccgaagaatcagttggcagagaatcttgtatcggtcgctaataactctcttgacgatgatatcttactcgagtcagaacttgttttcttggtacgaccattgtgcaaattctttttgtaccggataattgttctggctcgagagatggacttttaacttgtttcgagagtgacttgtgaccgatcagtctttgttttttgtgaggtttgtgtgaaaactctgccccccctttactcacaattaattgttccctccttgtcaggttagtagtttatggtatagacaggtagtttttatatgtaggcttattttcttacttattgtgtcccatatgttgctttaat

SEQ ID NO: 288773 - DNA, 613 bp, Cannabis indica
ttaacccttcacaatcacattcaattgactcaccacaataatgttcaacaatgtatgatcaacaattccaaaaatttcaacacaaagtctaatattctctagcaatccacaaataatccaatcaaacttgtgtagagaaattaaaatttgttacctcaatgaaaatcactctttagtcaacctccattgatgagaaccttgaagctttagggaagaagaaggtgaatagtgatttttctgaaatttgggtgaggtttagggattttggaatggatttttagaggaaaagagtgttagatgagagaaataagggattatgatgatttgggatgaaagtttatggataattttgaggaaaattggtttgaatggggttagatgaagaaattagggtgaaaagggtggttttcggctggagaaggtagggttggaatgtggggttttgatttgaaatgttagggattttgagtttaaaaagggcaatctgaccattctcgccgcggcgacatgtagcctcgccgcggcgagaatccgtgaatttataggtcattctgtaagtccaatctcgatattggacctgtttcctgtaagacaattctggccgcggccagac

SEQ ID NO: 288774 - DNA, 567 bp, Cannabis indica
tttttgggtccgtatgtgttcttcagataaattttcaaatttcagtgatttttcacatgcttagatcgatctataatactatatgaatatagtaatgcacatataattcgaaataaacactgaaaaagaaaaacgaaaataaaacaatcaacggaccaaaaattccaatttatcatgtttatatatataccgcataacatattataaatatatgaaagaggatatttttaaactattattatgcaataaaatcatatatccaatatataatatgtgtatataaatattaatacgtgaacaatatatacatatatgtatatatataccgtatgtataaatatatattatatatatatgaagattaacatcaagatgaatatatatatgtaaaaataaaatatgaatttatttatataaacgagattatataatatgaaaatatatataatatataatttatattataaatgaagaacccgtaaatgtatatatatatatatatgaaactcaaaataaatcaaggcagagatataaaatccgctctgacaccaactgttagacatttat

SEQ ID NO: 288775 - DNA, 620 bp, Cannabis indica
tttgaaaaagagaattttctctcattctctctctctatttcggctggtgcatgggattcaaagggctgggtttttccatcaatttctagctagattcatcatcactttggaactcttgtttgtggtaggtgtttcttaattttcctcttttgttttcttgaaaaaaatggtgaaaagatgagtaaaatgcatgcttttgtggctgttattattgctgtgtttggttgttgatttctgaggtttaaagcatgtttaattgatgttaattgagctgtttgaagcatgctagttgtgttgttcaaagctttgagttttctatgctaaaaatgtgatttttggtgaaaatattgtgaatctgtttctgtgatgttgctgttgtttttaattgttttcagaggcttagataagcttgatttagtagaatttagctagtttgaatgcatgtttgggggttttgctcaagtttgagtttagaactcaaagcttgagctttaatggcaagttgtgtatctgtgaattctgggtttgtttgatgccttagatttgttctttggggtatttagagcaggtctggaaggtttggaaccaattgggtttgatttggttgagttaggaatttt

SEQ ID NO: 288776 - DNA, 792 bp, Cannabis indica
gtggattttgtttttttataagtttttttttattttttttaagaaaaagacgttattttcacgttactctcccgtagcaataacgtgaaaacaatagaaaaacactctatatttttgtgaaaacaaaattaaaatcttgaacaaatataaaaaaaaaaactggaatcagtaaaaatgtattttttttttttgtaattattttatggatatgtgaaataatctctttaatttttctcctaaaatccccaaatacttaggtcaggccctgcttgcccctagtgttgtgagtgctattgtatgggcagatacacctccttagtaagagcactcacaacaacttttttaagatagaaaagctataaaaaaattaaagaatgtattaaaaacaagttacaacaaatgctctaaactccttcattttaaagtttctttaaaatacactattcatgctttacatttataaaatactattcattgctctaaacatattaattgttttgggttttaattagagttaaaaatcgggcgggttgaccgattttcgggttcaaaaacttgtactcgaactcggcccgtgaaatggtttcaggttcacggatttcaagctcgtgggttcacgggttcgcaagttcgggttgacctggtcaactctcggtcaatgtatttttcttttcaatcacccaaattcttatgaaaaaaaaaaacatttgaaatcgaaagtagaaacgtaaatcaaataatccaaaaccaaacaaatcattcgtcaaacttatgttcattgttcattaaaat

SEQ ID NO: 288777 - DNA, 483 bp, Cannabis indica
tatttggttagcttggctgtgagtgaaaaaactcgatatgcgattaatggatgtagtgaatacctgggatttaagatgcctgatgcatataattcaagcaatcgagaaatgtgctcatttaaattacaaagatcattgtatggattaaaacaatcaggacgcatgtggtacaattgacttagtgaatatttattaaaagaaggatataaaaatgatcctatttgcccatgtgtttttataaaaagttcaagtcctgagtttgttatcattgctgtatatgttgatgatttgaatattattggaactcctgaaaaactttcagaagctgtggaatatctaaagaaagagttcgaaatgaaagatttaggaaaacaaaattttgtcttggtctacaaattgagcatttaaaatgtggaattttcattcatcagtcaacttatactgaaaaaattttgagacggttttatatggataaatcacacc

SEQ ID NO: 288778 - DNA, 685 bp, Cannabis indica
gccatgaaacatatttttcaatttgtcaagctgggctgacctgctcggcattctggtcgatttggattacgtcaacgtctttctgagcggggatttgagtatgggctccaggctgcacgatcgttgcagtattctgctcatctgttccccttcttctgtttagatcgttccttaggtcatgggtttctcccaacctttcgaacaaagaagagcccagttgccttagcgattgattcgcttggttgacgggtggaatagcaccattagtctggttggaaccgtcaggtatgactcctcctgatgaattaccggacaacgtctgctcgcctaccgttgggctcacgagcggaactcgtaagtggggattgggtggctgaccattagtagtctgggaagtattcatcattgggtcctcttccatttctcccaggggaatgacattcggcgattgctgacctacagtttggtaggctcttcgtatcagtatggtggcttgctgactacgtatggtgagcccttaatgtctccatctctttatctctcaactcagagaacatacgcctttgttcgtcaaacgcgagatttactgcagcacgcagttcgtcctgatcatgatgcagagtgttgttatgaccctgcatgagtccgagcgcgtcacagagattttgcaattcggttgcatctc

SEQ ID NO: 288779 - DNA, 465 bp, Cannabis indica
actatgtcttatttaagaattttcactaagcaagggcttaattgcgaagaaaagagattttggggtcaatttgttaattaagagactttgtatggtctaattaagtgggagcgccgatcatagatatgaaatctatagcttacataagtatttataagtgaaatgatgattttcttcgagcttggatgagtagaaataaatgattgggatctcatttcagtaactatattagtttactgaaatatcatttataggtagctaagtgttttaaggataaaatactgtaaagaccacttagtttaatttggaaataagcagttaatcatgtttaattatgaaaaattatttatagctatttaaataattattatactgttattattgaattcagaggtgtatttttatgtcatttagtagttttcataattttgcatttccggtgcccgataacatggaactcggtgt

SEQ ID NO: 288780 - DNA, 675 bp, Cannabis indica
atttaatgtcgtgacattgctaaccacatagctaaatttccacaattaccgggcccaaaataacgtatttcattaaataatttctcaacaatttacctaagtaagatcataatcctacttcattttccaagtaattacatatttaataaaatatgtccatttaaatattatttattttctgggatattacaactatcccccacttataggaatttcgtcctcgaaatttacctgaaaagctcgggatacaactcccgcatctgcgactctaattcccaagtcgcttcttcaactttgctgttccgccacaacactttgactagtggaatagtcttgtttcgcaacaccttttctttcctgtctaagatctgtactggttgttcttcatacgacaggtcggtttgaagctcaatgtcttcataacttaagatatgagttgtatcagatacatatttccgaagcatcgagacatgaaacacgttatgaaccccagataaagcaggaggtagagccaaccgataagctacctgacctactttctcaagaatctcaaatggaccaataaatctgggactcaactttcctttcttcccgaaccttcgaattcccttcattggggacacccgaagaaaaacaaaatccccaacttggaattcaacatctctacgctttgga

SEQ ID NO: 288781 - DNA, 494 bp, Cannabis indica
atggtcttgtcgttcgtgccggtaaactacttgaagcctagttgagagaaatagaattaccacgacctgccttgcttgggggtggacttcaaatcaaagaaccaagcaacttcatgaggaggaggagtaccccccccccctaggaagcgtaaaggacgaagagggcatataaatacttaatgcccttaggagtgaactaggtcgggaagagaccgaagaagtccggcacatccttgaagtatttatgcaagggcatcaacgctccttgctaaccatgggcacccgaccaggtgcgcatccccttgtcagggtttgtggcacaattgttgtgggcgggaatgtagcagtcaagctcgcccaggtatccgccctggtcaagagttcgaaggcgcgcctccgtaatcttggacggaggacttacccacctagcgcccaaggcaccctgctttctatgaggaactgccgcagcaagctcctcacggacgtagtcaacg

SEQ ID NO: 288782 - DNA, 724 bp, Cannabis indica
atcagaacacatcccagaccctgtttggatgcatcacaataaaccataaatttctcttgatctgatggcaaagctaacaatggagctgttatcgaacgttgctttaactcctggaaacttgtttcacacatatctgaccacacaaatgtctgatttttcttagtcaattcggttaagggcatagagattttagaaaatccctcgacaaatcgtcgataataccctgctaaactgagaaaacttcgaacctctgtcatagattttggcctcggccaattcttcactgattctaccttgtttggatcatccataatcccattcttcccaacgatatgacccagagaagacacctcaaacaaccacgaattctacacttttaaacttttagtcatacaacttgtgatccctaacgtcgctgtcaataccacttcgtaagatgatgctcgtgctcctcttctgactgagagtatacaagaatgtcatcgataaacaactataacggagttatcgacgaaatctttgaataccctactttatgagctccataaaggtcgcaggagcattagtcaatctgaatgacattaccttgaaactcatagtgcccataactggttctaaaagcagtcttcggtatgtcctcctcccgaattctgagttgatgataaccagaccgtaaatcaatcttcgaaaacactgtctttgcttgaagctaatcaacaaatca

SEQ ID NO: 288783 - DNA, 515 bp, Cannabis indica
gcaccatctttccttcttgcttgttcctcatgacttcaatccccaaaattttcttgactgctcccaagtccttcatttcaaattcagagttgagtttgttcttaatgacttgtatttcagccttgtctttgctgatgatcatcatatcatcaacatatagtaataggtacacaaccttaggtgttcctagttccttgtagtaaagacaagagtcaaattttgaccttgaaaaaccaatactctgaacaaactggttaaacctttgattccattgtctaggtgactgtttcaacccatacaatgaccttttaagcaggcaaaccagatcagttttgccattttccacctgaaaaccaggtggttgctccatgaatatctcttcatccagaaaaccatttaagaaggcagttttgacatccaactgctcaacttccaagtcattgtgtgcagcaatggctaacatcattctaatggtcttgtacttcacaactggtgagaagatagtctgtataatc

SEQ ID NO: 288784 - DNA, 310 bp, Cannabis indica
attgtagaattgatctctttaagaatgttacctgtttccagaaaagccagcactgcaccactaatgtcttctcctataatatcccaattgtcttgatagaagctactcgagaagccatcaggaccaggggatttagttccaggaatgctgaatgtagctttcttcacttcttcatgtgtaaacttctgtgttaggacacttggaagttccggagttagtacaggtcctctagccaaaacacttgcctcaactttccttctcttttctaacttggaacccagtaatcctttgtaaaattcaaggaaggcct

SEQ ID NO: 288785 - DNA, 603 bp, Cannabis indica
ctctttatatgtggtttggatggatagagagagatatttttaaaaatattgaacaagcctctaccgcttatgatatgtggaaaatgcttgaagttactcatcaaggaactagtgctatgaaggaaactaaaattcaaatttattccactcaatatgagaactttaagatgaaatcggatgaaaccattgctaatatgtatactcgcttcactacaattactaatggtttgaactctcttggcaaggtacttactcaaaaggatatggtgaccaagattttgagaagtctcaccaaggcttatcaaggaaaggtggttgccattcaagaagccaaggatctctcaacacttcccttggaagaactaattggctcactcatgaaccatgaaattttcatgagtgctcaagaagaagaggaagttgagaagaaaaagaagactattgcattcaagtcttcctcctcccatgccattagtgaagaagatgaggaaagcttatgtagtgacatggaggacttggcactcttctctaagaaatacaaaaagttcatgaaattcaaaaagaactttgggaagaagccacaaagagggagtgactcaaaag

SEQ ID NO: 288786 - DNA, 754 bp, Cannabis indica
gtttgatacaccttcatttttcttttgcctttttatctctttcaaaaatttatgatgtagaaagtaaattgttgagtaccaaagcaacaaactaagattgcaagagacaatacattcaaagacagtgagaagcaaagatagcagaatcaaacgcaaactttacttaattcggatcagaataaaaaaaactcaccctccttgtcagaatcaagatcacagtacaagaacactttgatatgcacttactcagccaaacactagctatattatagaattctctcactgggaatctctttgaaggttatggtgaactctaatgataaagattgttggagaagccacctttatatcaatgagcaaaaccaagaagccaagcttgactaagaatataccaaatactgtggacaaatttatgcaaaatcaaatcaactataattaaattacgaaacgaataggataacaaaatgttgaacgaagaactagagataaaatagggtagaacagagtaattaaaaccaaaaataaataaagacacaaaaataataaaattaacattaaaatatatattggttcaagttggctttactcaagttttggaacactattataatagtttttatttgaatgagcaaggacaaaatacaatacagttgcgatcaatttcctgtttagattctcttaaagtgtttatctcttacactctcatctaagaatcttcttcatctacaaaagattctttatacaaattccaaaa

SEQ ID NO: 288787 - DNA, 503 bp, Cannabis indica
tcgatttcatcaagtgattctgcaaggagtatgtgattggtaccttgatcgtacgtcaaccttctgtgggatggtggctcgagttcgacgggcagcatagcttcataaccgtacgccattgaaaatggtgtctgaccggttgctattttttccgttgtacggtatgaccatagaacttcggggagttcttctggccaatttcctttggcatcttcaagtttcttctttagtgtatccttcaaggtcttgttgactgcttcaacttgaccgtttgcttggggatgtgccactgcggagaagcttttgatgataccatggttcgcacagaaatcagtgaaagattgactgtcaaactatttgccgtagttcgaaccgacatatgatgttcttcactataaagtcttaaaccttctttgatgtgatagttgtgagtggttcgacttcagtctacttagtgaagtagtcgactgctaccactgcgtactgcactccgcctttacctt

SEQ ID NO: 288788 - DNA, 514 bp, Cannabis indica
ttaaggacttttttctaattttagtaaaaaaagtctaacatggatatatgaaagttcagggggcatatttagtacatgtcaaagttcgaatggcatgatttggtagatatcaaagtctggggaacatggcttagcacataaacaatcattgaaatagtaaaattgaataaaattagacaaaagtccttaaatccaacaatctcaatagttcagggagcattttcaatggccttaaaagtttagtgggcatgatttggtacatgtcaaagttcatgggacaaaaatccttatttttataggggtaagttgaaaaatggcacttttatttatcaattaatcaaatttgcctctacttttatatttatttgaaatatacctctttttatgtgtattgtactcaaaataccctggcataagagagttacatggagagtatcttgaagtgacaggggcaaaattggtataatctttgaaaaaagaggtaaaaatgatagctttaaaaaaaaaaaaaaaa

SEQ ID NO: 288789 - DNA, 531 bp, Cannabis indica
cctaaacaatggatcttcaccgtacgggctagaaagtcaccattttccgcttacaatctatattcggccgaacacttgaacagaaaatccattcccagtataatgtcaaactcagttaattccaattctacaaggtcagcgctcaactccctatcttcgatcctaaccggcatagacctaaagtgcctattagagataaccaacgccccactaggcattagggttccaaactctctttctaaaatatcacaaggccttacccaaaaagattaattattcacatagctacatatgaacgtgtagctcccaaatcaaacaacacgatataaaagaagtcgtttacagggagctgacctgccactacagaagagctcgctgcgtcatcagcttgaacattagcatacaccggagtaggaacaaatatcgcttcctgctcttgctcttctttctccacctgtgggcactcagggatggtgtttcatgcaacgtgggcactcagggtaagtgtaatgaccgctctagtaatgtgga

SEQ ID NO: 288790 - DNA, 626 bp, Cannabis indica
ttctaaagcactcaatcattgttgtaatagtaatgatcttgtagctaggatcgccgaatttattgattctgctatgtttgaagtcatcattgtgtaccttcttgtagggcagtggctcctggtccaaacctcatgtcgtattgtcttattcgtttgtcaattttatctatttgtgaagaaccattcccaagagtagtcattttctgagtctcctatcccaaatgctaaaagtttccatccatcgtagaagatgtgaatagagttcctccaaatgatgtttttaaaaatatttcgttggttacaatgactggcctgcaatgtttccaaccttctatggagttttcaaatgctagatacaaatatttgaaacgatccttcttatccgtttccaattgtgcaattgttccaggatttactacttttagcatgtgtaggtattttggtagttgctgataagattcatcttgccttccttttgctaactccaaagctttttctcttgctctccatgctttttggtagctcattgacactccaaaatcatcaatcatgtctatcataatgtcatttggtctgtgatttcttttgattgacataaatttcttttttatcatttctgcaatcat

SEQ ID NO: 288791 - DNA, 213 bp, Cannabis indica
cccatattcgcttttgaggcgggaagtcgaggcgtctaaggttcctttggatacagttaccctttcgcctatgaatactcatcgtattggcacataaccctagggttagaaacttctgcgactcttctttattatgtcttcatgtgggctgtcagccttagagcttatttttgaaccgcattgtgtctgtcttccatcttgcttattctaagc

SEQ ID NO: 288792 - DNA, 657 bp, Cannabis indica
gggtatactgctacctagttatgtctttcgtactgaaaaacgcgggcgcgacttatcaaagaatggtgaaccggatgttcaaaggcctcctagggcgaaatatggaggtatacgtggacgaaatgctagtcaaatcaaaagcatgtaatagccacacagacgacttagaagaatgttttgaagtggtccgaagatacggaatgaaactcaacccgaagaagtgcactttcggagttaagtcagggaagtttctgggcttcatcgtcagccagaggggaattgaggcaaatccaaaaaaaaattcaagctctcctgagcatgccatccccaaagaaacacaaagataagcagagcctaaccggaaaggttgctgccctgagccgttttatctcccggtccacagacaagtgccttcccttcttcaacatcttgaagaagtgtcagaaatttgaatagtccgacgagtgtgaggatgcattcaaaaaactaaaagagcacatggccaaacctccaatcctgtcaaagcccgttctcggagaggacttgttcctatacttagccgtctccgagcatacggtcagcggagccttagtccgggaagaggagaaaactcagcatcccgtgtattatgtgttggaatttattttaccaggatct

SEQ ID NO: 288793 - DNA, 865 bp, Cannabis indica
cttcattaatttttggattgtgtgaatgaaattagattatgaaagcaataaaaggagagacaaacaccaataataatgtggtgtcacgagataaatgcaggggcagttttgtcaacactctgcactcccaagtttgttgaaattataacaattcaaatgataattctccccagctgtccctttcatttcgttagaatagattttatcaatattccctttgcaaaatatctttgtacacgtggttgattgaattgattatttcttggctgtaaaccctcatactgtggtataaatagaaagcaaagcatcagcctcaatttgagctgattttcacatttaatactctgtctattcctagtttttgacttggtatcagagcagaatccctggccttcccatggcgactcttcaggaccagacatcaccagctcagtcgacaacaaatcctgaaaatcaggaccagccgtcagcccctggacagacgcaatcagctccattaacagccatggtcaaagcaccagttgctccgattgctaacccctttagcaatacgttgagccagcctttctccttaaaactagatcgaaataattttcccctgtggaaaacaatggtcaccaccataatcagaggccattgattggatggttatcttaatggccttcgacaacctccaccacagttcttacaagctgaaacagcagcagatggagcctcagaacaagcttttgatgtcaaccccgagtttgaaacttagctagttcatgaccaactgctaatgggatggttatatgggtctatgtctgtaatgtccccgcttcaagccgcaattggatccttacacccacggaatgaatggctctta

SEQ ID NO: 288794 - DNA, 877 bp, Cannabis indica
aatccaagcacacgaaaatgggtagaaagaggaaatggcactaccaatttctaccaactatcaattgatgaagcctattggatgttggaagacatggcggaatacaatgagtggtgttgtaattgtccaaacaatgaccatgtttgggaggacaactacaacaatttggagccaaattttgacacttacactcaagtaccaaatgatgagaaattgaaggattttcaagagttcaacatagaagaagagcctcatcaaatggttcaaccaagctcacttgaggcattgatgatggagttcatggcgaaaaatgatgccttaattcaaagccaagcttcatccttgaagaaattggagaatcaatttgagcttttggtcaatgagttgtatgctaaaccccatgagactttgggtattgatatggaaaattcaagggagaaagaagaaagtgaaaatgtcattttgaggaatggtaatgagttggagatacttggggaaaattttgagcaattacaagagctcacttcaatccaaagtagtgaaaaaaaagataaggaagcaagcattccaagttggtcaacatttattgctgctcataatgctgtagcattatcacagcaaaactgcccagtttttgaaaaaattcaacaagagcatttttttcattcctcaagtcaaagagcccatggtaatggaatattatgtttatgaggatcctttttggccactacctcctcctccacccatttggcatggtaccttggcatccatcatgtgcattcatcgaattcaagaaaagttgaacatttgggctattcaatttcatatctcgccaagcttgagggcgttcatgacaaagacccatttgtgagggcat

SEQ ID NO: 288795 - DNA, 674 bp, Cannabis indica
atcgacaaagtatcgacatacggtcgacaagtcgtcgacaatatagggcagaaaatacgctaaaaccaccaattgacatcctatcgacatacaaacgatatcctatcgacatataaataacagcaaaaattcaaacagacacccaatctatcgacatcctatcgatatcctatcgatatgtcatcgacaaccctgtaataaacacagataccattgaaacactaacatctacaacctaaagatcacaaaagctacaaaaaatccactaatctcaacaacatgcaataattggcatccaaatctatgaaaaatatattttttctcaaaaaaaacattaccttttaatgaatttggtggtggtggcgacgggtcctgctcgtggtggcgacggcggttcttccttcggtttgggtcgacgtttcgtcgtgggtttgggtgaaatttgagagagacacacctcggtttgggtttgggttcgcctcgttcgtgggttgggtttgcctcgtttgttgggttcgtggttgagatggtcgacggagatgggtttgttggtttgggggtttggggtttacgggttcctggttcgtggtggagatgggtcgaggtcgacggtggtttctggttcgtgaagagggaaagtcagagagagagagcgagaaagggaaagagagaga

SEQ ID NO: 288796 - DNA, 424 bp, Cannabis indica
tgctctaattctacgcagatgcaatttccaaacaccaaccaatacggtgacatctcgatcgctattttaaacgctattctataagcccatagtgcatcatctagctttcatgaccagtctttccttgatctatgcactgttttctccaatatcatctttatttcccgattagaaatttcagcttggccattgctctgtggatggtagggtagagcagttctatggcgaacgccatatctagagaggagtgcttcaaactgtttattgcagaagggactcccttcatcgcttatgattgcttggggagtagcgaactgagtaaatatattcttttgaacgaaggtaagaactattttaccgtcattggctggagttgatgcagcttcaacccatttcgagacataatccacatccaataagatgt

SEQ ID NO: 288797 - DNA, 609 bp, Cannabis indica
tgaaggaagtagcagagttttgaagaaaaaaaatatcggtcaaatgcaaacctgattgaaattgacattgctcgaagatgatgaatttacaaataaattagtttcacaatcgacattggtagaaacattatctccacaagaagattcatcttcatttatggtagtgtgagtggaatcatttcgcagtctttttgtttgttgttgacttgacgttgccgtattctcgacaatatatgtgtgaagatcaatatgactgggattactacttacactaatcggattgatcttaaatgctttttgtttagcatatctctctctttgttttttacatattgctttctttttttcgattggtaaatctttatatggaatccgctttgaaggttctctgtcacgatcttgtaaaattaaattatgaacattaatttcatatgtattagtttctcttaaacaaaacacatttttaagttttaggtattttgtgtatgacatcttaccatgtgtcattatgctaatgcagaaaatgttagaatccaatctacacaagtaaaaaaagatggtgtaataaagtaattacagacattaaatttaaataataataattcagaa

SEQ ID NO: 288798 - DNA, 712 bp, Cannabis indica
aaaatatatatattttatataaagaaattttaattttaatttaaaatagttaaaatattgtagatatttttaactatattttaattttttttttgtaaaaaattcatcatctttattattatttgcaatctatagtgattacataattaaaatctggagtaaaatcactactcctgataacacgatcagcaactaaataggatgcttgagctaagaaatgagcaacactatttgcagaacgtctaataaaattgacataaacatctcgcaagtcatttaacaacatcttacaatcaaaaataatactcccaaagtatgaaaccataggaatagagctacgtaatgcttgcaccacagtaagactatcagtttcaatgacaaccttcctccaatcttttcgtttaacccaacacagtgcctccttaacacccatagcttccaccatttcaggttgtaacacccctgaccaacagcaggtaaaagcttccaccaatgcgtggtttcatccctaatcacccctgcaaagctataagttgagttcctaaaaaaatggcaccatctacattaatctttaaggtgttttcagctggtttggcccaagtttcggcatcatcgacatcagtaaggaatgcagctgtaggattaaatgttgaatcttgagcccgagtccaatctgcgagtaaagcttgagctaagtgagcaacactcgcaa

SEQ ID NO: 288799 - DNA, 474 bp, Cannabis indica
aagacaaagcaaatcgggattgaaaaaagaaaaaagataaaaatagtgaaagagatccttacgttttcctccaccgaaaacctggtgaactggtatttctcgcccaaaaagcctgaaaatcttggtcttaacagaagacggagattccggtttcacttgctccgattcagagtcatatacccaaatacccataaaccttcacagtttcctgacacaaaatttttaaattttgaaatattacattgtaaattaccagtgatattattactcggcacaacttcaattagagagccattaagaaaaatggagaggccggagctgggagatgccgagtgtcgagaaggggggagagatgagtgaaacagagagagaagggtggtggagatcgacgccggcaataagagccaagaagagggagggaatcgtggagggtgagagtgagacgcagagagagggaaaattacagtaatttgc

SEQ ID NO: 288800 - DNA, 616 bp, Cannabis indica
tcttaggatctcaaagcattcttttaagtcttcaatgtgcccttgggctttcttagacttgaccacgcactgtgatcgacgtagacctccatgttcctgcctattttctctttaaacatcctgttgaccaacctctgataggtggctccagcatttttcaagccaaacggcatcactttgtagcaatacaagccgacgtctgttcgaaagcttgtatgttcttggtcaggtgggtgcatgcttatctgattataccttgagtacgcatccatgaaagttagaatttcacggccggctgttgcgtctaccaactgatcgattctcggtaagggaaaacaatcttttgggcatgccttgtttaagtctgtaaagtcaatgcacaccctctaggtgccatttggctttggaactagtacagggttcgatacccaaactgggtagtaggcctctttgatgaaattgttgttccatagtttttccacctcttccttcaatgccttggacctttctttgtcgagtaaccttcttttctgttgaactggcttgaagttttcgacgtcgatgtttaaagcatgacttatcacggtggggcttattccctccatgtcttcgtgtg

SEQ ID NO: 288801 - DNA, 669 bp, Cannabis indica
aaaatatttttttcataaatattaaataatttaatattaaaaaataaccaatccaaagtaactgatccaatccgcacttttgtggattgttggattggatttgagctattgtgcggattagattggatctgaaaaatgaaatccgcacttagtgcggattgaatgttgtttgaccaaaaaagtgcggattggatcggatgaacagccctagtgttaagcaccacgagtgcctttttagcatttctcttatggtttttacaaaagaaagtataattgtattttatttacataccatttcaaataatataatcgattaactaaaatcaattatctgagtcttacaagcagtttgtctcaactagtatggggaccatgggcctatacaaccgagcttccgataagcagaactagaatttaccaagtaaattccctaacttattaatttattattgcatccaccatagaacttagaattacactctcagtcatatagaacgctctatatgttccacgatatagatacgctatgaaaattttaactatcgttctaatcacaataatcaaagattctctataggtgatttacaccaagtagggacaaatttactgtttcacccctcaatgtattttatccttaaaagacttatctttctataataatatttcagt

SEQ ID NO: 288802 - DNA, 505 bp, Cannabis indica
cccaagtagtcgaagtttgcctgaggattagccttccaaaagtcgttaaaaagctcaagaccggctgtctccaaggcatgaattgtctctcccagcctcgtcacctcggccataagctcctcctccttagacttcttctcttcctccacctgacgaaggaccgctcgaagagacgtcctttcatcgtgaaggttgttcacttcagcagataaagtcttgatggtctcctcaagtcggtcagaagcctcaagatccttagtcagctcagctattttcttatgggcagtaaaaagcttcttgttggcttcaccgaactccatccgaaatgcttcgagtttcgcactagcgtcattatcatctttcctggccaagtccacctccaccctcatggtgttggacaaagccgtgttcttggaagaagcagacttagcccgggagtaggtgtaggctaacttcagaccggcctgcacagaggaaaaactttagtatttgagccaagtaaaga

SEQ ID NO: 288803 - DNA, 811 bp, Cannabis indica
aagatggcatccatggagatacctgttttacaaaaagaagcaagtgttagacatccgtgggaaaccacttacacaagatacagcaaataagctactcctacccggactccctaattcggccctagcaaagtcctgaactttaatgctggcagcatcatctccgagatagctgtccgaaggccggaaccagctggatgtaatgtaagctgaaggacctaagggaacaggctccggaggaccagaacccatccgggaccgacctaggaaatctcataagtttgaaaaataaaactcctttcaaacgatcccccccacccggtaccgggtacgggacggactaccttaaaccccttaaaaccttaattaagtaacggaccgtccgttccggtaaccccgaaaaccccgggaacccgggtacccgtaaccgtacggtcggactaatttacgttcccgaacccggaaaacggggaaaacggaaactaaattaagtaagttaaatttactaaacggaaaagggaacgttaacccgttacccgtcgtttggttcgtacttaaattttaaactttaaaaccaaaacctaaccgtaccgaacgtaaagttaacgtaccgaactaactaacgtaaaggttaaaagttaaacttcctaccaaccaacggtagggtagggtacgggtacgtaccctaccccaacgggaaagggttaaggttaggttaaaatttaaaacctaaccctaaaaccttaaaacttaactttaactttaaatttaactttacttacttcggtcggacgaagtactaaaacgtaaaaag

SEQ ID NO: 288804 - DNA, 974 bp, Cannabis indica
acaccaagctgatggaaacttgtaataaggactacttggatgtgaagaataagatgttgaaaaagattgagaagggagtcactcagaaggatgcaaaatactcatcctacggctatactgcaccgttgcagtattgggcatacgaggccatcttacaactgggcaacgagtatgcagtgaggaggtcacatcgctttccgagaatggtcaactgggagagtaagccaaacactacactcgggaaggatgaagtgaccagattacttgctaaaaatgtaagtttgttacactttatgttgaattcatattaatttccatatattatattaatatatttgttatatttttcagttgacagtgtactccatgttatgtcctcggccgaatgaggttgagtttgtgagttacataaccgggggtcagccgccgttatttgttgacttggaggaacttgtgttggatgaggatgggcaaccaacacaggatgctttgcgaagccaggccgaaaagcttgcctccacattggaagaacgagcggacacagcccaaatatttaaagactctacaccacctccaccgtgtccaccacgtgcaatgtctgtagttcctgatgggtttggtgttgactcatctgcagcttcagttccagatgactctggtgttgacccatctgcagcttcgtttccagatgagtgtggtgttgacccatctgcagcatcacaggatcctcctgttcccccgtcagcttctattctcagcacctcagaggctcgcgatccagtataccctgccattttggcaaggttggagactgtggagagggggtagattgctttgagggaagggcagaccgctctgctaagaggacaaacagtgattatggatcagttgaagaccataatgacgctcctgcaagatcctggaaggccggcaacagattcacagccacagccacaaccacaaccagaaaagga

SEQ ID NO: 288805 - DNA, 1068 bp, Cannabis indica
acaggtataggtgcccccaagtgaccgagcagacttatgactgttggtcacttgtttttttacaagtatacttttttatctgttcggagtcttgtgttcgaccagaccttttgtacgcactggatggtaaattatcaacatgttagtaatttcaactcaattttaattttgaaataaacatctttattcatttattgatcaaaaatgtgtttgttaccgtagtaacttatatcagggctatttgatctaatttgatcttttagcttaacatgaaataaaacaaattgcagaaaaagaaattgtactttaaatggtggtcattcgacctgagtactttttcatttttgtcgaaacatttgagcgtagtccacccagcaggccattcacttaaaagtaaatgttcttttagtacttagtatggtcgtccaacctggtactttattggtattattttcttaaatgttccccattccaataccgttgtactagaacaagttgcattctttcatcatacatacctaatttgtatgctccggattcgagaacttcgaccacctgatatggtccttcccagttaggtccgagtacacctgttgtactatctttggtgtttagaaatacccttcttaggaccatatctcccacgaaaaattttcgagccttcacttgtttattgaaatactgagctactttttgttgatgggctatcaactttaagttttctgtggttcgcttctcttcgatttcatcaagtgattcggccaggagtacgtgattggtatcttggttgtacgtcaatctcctgtgggacggtggctcgagttctacaggcagcatagcttcatatccatatgccatagcaaatggagtctgtccagttgccgttttctcagctgttcgatatgaccatagaacttcaggaagttcttctgggcaatttcctttggcatcttcgagtcttttcttagtgagtccttcaaggtctttttgacagcttcaacttgaccattttcttgaggatgtgccactgcggagaaactttttgatgataccatggtttgcacaaaa

SEQ ID NO: 288806 - DNA, 516 bp, Cannabis indica
tatgtcatatatattgttgtagtacactataactaccgctgatcttatatatatacatcaatatacattgcatcttaacttgtaaaaaattataacactattaatttgttaaataataaatattatgatcaaacttaaaatagttataatattataatatatatatatatagtttatatttagtctgaatagtatccaggccttgtggattgaatccaaagcattatcctcttgatattgtcatgtttgacacgctgattcaaaggcaaaaagttccaatctcaaaattcgtctctctttatcataaattttgcaataaatattccaataaatttaaaaaaaaaaaaaaaaaaaggtttagtaataaatatctacagcttatttagtaggtgatgcatgaatcacattgatgaaatgtgatatatatagcacctcctatcaaaatcaataaattaatcatattttttaattttatcaattatatttaaaaaataacagataaaatatctaattaaa

SEQ ID NO: 288807 - DNA, 501 bp, Cannabis indica
taactcgccatttggagaaggtgatcacgtacgttctgatgaggtttcatccgtgcattaatgaaattccttatcgcttcaaagcgagattgaattgatgccatcccgaatagttcagtcaactggttcaagatatatgtagccgtgagagtgttagtaaaccttgttttcaaggtgtcaaccatgctagaaagcattaagtatcgagctttgttgttggcattctaccaacgcttgtacttctccttcactgctttggttgcattctcacctggctgctcaggagacggttcagttaacacaaacatggcattttcaccaatgagagcaatgttaatgatctctttccatttgggaaagttagatccattcagcttattatcagtcaatagtgacgccatggggttggtcattgatatgttggatactacaaataacaataaatagaaaccaagtaaggttcaacacaaaatttcattcagaaattattagcacatagca

SEQ ID NO: 288808 - DNA, 489 bp, Cannabis indica
aagaatcttatcatggatcaaattgcgatcgtgataagtttgttacagaagcagccttcggagccgacacaaccatcaggaccggcacatcaatcagacccgacacatccatcagacacggcagagccattacagacggtacatccatcaccgccgacatatgatgatgatgatgatgtctacccagaagattggcaacctgacgtatgtgacgttccttctactcctgcaaacgccattgtcatttcgctgggtgatacagaatctcaggatgtggaagagttgcaggggccaccagctggggtggacttctgtagggttaggcgaaagcggaagccggttttcttgaatgactacacagctgggaagaagaaacaacgacatgggcccgtggtagtagacacactgaaaccagcggactcccggtgtactatcccagaaaataaataatatttaaatggacatattttattaaatatgtaattactt

SEQ ID NO: 288809 - DNA, 506 bp, Cannabis indica
gcttggtctttgaagtccttgagctccttcagctccacagccaggttggccctagactccaggtttgcctggtgagtttcctctaaggacttcactttggcagccatttcatccaaggcttccctagcctcccgaagctcacgcctggccttagcagcagcttcgacctccgccctcagctcctcttggtgcctggcctccagcctatctctccgaagggcctcctcccggatcattgcctccgcttgcgcctccctccgcttggcctcttcctcactggccttggcaagggcctcccggcgctcggcatcctcctgataaagccgcctttcagcagtcaggtcctgaaggatcttcttaacttcgtccatgcccccaaagtcggacaggacgaagccatgattaattatgttcttggaaaggcggccggcctcagcagcaagctgggaaaggatacaagtataagtaagaatctctaaaaaaaataataaggagaaaagtgaact

SEQ ID NO: 288810 - DNA, 615 bp, Cannabis indica
ttctgcatgcgagagggtaacattattttcatgtaaaattgatgatcaaaatgatcttgatgtgtattggtttgtgtggttcaggagtttagaaatgcctcctagaaggtcagttagagtgggtcgaggtcgaggtcgaggccaaggccaaggccgagatgatggagggatcaatgaaccacctcaagcaccacagggatgggaagagcgcattgccgcactggaaggaatcattcataggcaggatgaagaacttcgtcagctgagacgtcaaccggagccgccagtccaaataaggcaggatgcagaaaatagagacccaccagctgcagtggtatatcctgctacagaggctagacatgagttgttagcagagagatttcggaaacaacacccacctgagtttgagggaggcatagacccggtagtggctgaggagtggataagtcgcatagaaagcattttgcagatgctaagggtggatgggaatgaccgagtgaagtgtgcatcttacatgctgaggaaagatgctcgtatctggtgggaggtggtggaacaaacaaaggatgtagataccatgaactgggacgatttcaaaagggtctttaatgagaa

SEQ ID NO: 288811 - DNA, 568 bp, Cannabis indica
ctaatcagattgtaatgagttttatttagggcataaaacccaacagtaagaaacagtggttatggaagtcaactaagtcttagacgaaagagaagtgtctcagggaaggtgtctctcggaggaggcataaagagtatctttatgctccgggaggccagagacgtgctaaggaagttctaggaggtattgagatttattgaacaataacctcgcatttaatgtcgcatgcgggaagacgtattgaaatctccataaacgacatggcagatggcgtaaccccccttttctggctattacgctataatcaataaggctagtgacagctactttatgaggaatcacataacttaaggggggataaaagattatatgcacctaagtcctaagatacctaaggtataggtcatgtatttcctattttgtatttgctgggaatatgtgcccctatgaagctaacacaaaaagacaagtgatccattcccagggatcaccccagaaaaacactataaataccccacaaacagactaataaagggtcgagaactctgggtttaaaggaatcaaagag

SEQ ID NO: 288812 - DNA, 613 bp, Cannabis indica
cctgatgaacaactctttagtgtgagggaaaacctgatggtaccatggtatgctgattatgtcaatttcttagctgccaaaataacccctcccgagctttcgcgtaaacaattgaagaagttcttttctgaggtgaaacattattattgggaagagccaatcctctacaagcactgtgctgatcatataattagaagatgtgtgcctgaagaggagatgtattctatcctaaatcattgccatgctttaccatgtggaggacatttcagtgggaccagaactgctgttaaggtgttgtagagtggattcttttggccaacgctattcaaggatgctactacctttgtgaaggcatgtgatcgttgtcaacggacaagtaatatctcaagaagaaacgagatgcctttaactggaattttagaagtggaattgtttgatgtgtgggcgatagacttcatgggtccttttccttcatcttttagcaatcaatacatcctattggctgtcgattatgtgtctaaatgggttgaagctggagctacaccacaaaatgatggtaagacagttctccgctttctgcaaaagaacatctttactcggtttggtactcctc

SEQ ID NO: 288813 - DNA, 608 bp, Cannabis indica
aataattaatataataaataaaattaatattgatttttctttatcattaaaaaaatagacttggttggactcccatgagctcttttcatcttcaattgagttcttcattaccatatgagtttttatcttcatcttcataccactactcaagtatttcttcttcaatggtattcattcacatttgacctaaaaaattcaagaaacccttaaagaagaagtgaaaattccatccaacaattgtaaaggttagtaactgactttactctcaagtttaatgattgggtatttattattttaaggttatatagcaatataaagcataaatttaggttattctaaaaaaacctcgtgtgaaaataaccccagttcgaggttgaagatgacatgtgatatgcgaccatgtgcgaccaatttggttgcctttggtcccatatggtcgtttagtaaaagtaaaaaaaaaattactatgcgaccatgcgcgatcatgtaggtcgcacatgatcgctcagtgtaactagaaaactatactatgcgaccatgtaggtcgtacatggttgcacatggtcactcagtgcaactagaaaactatactatgcgaccatgtaggt

SEQ ID NO: 288814 - DNA, 1318 bp, Cannabis indica
acaattaatataatcaattcacacgacaaccaagatttggtcgttttcacttgcacgacaaaggaacttgtcgttcttaccaacacgacagatcgtttgattccaaaacgatctgtcgttcttctttgaataaaactcgaggaatcagagctaaccctagctcatttcctctcttcgaaccttcgagagtctcagaactctctctctttctctctgccttctctctggttctcaaaccctagaaccagagatctccctcgatctcttgatcgatctaacccagaaactcacccagaaacaccacacaacacatacacaaagataaaacaacaaatagtagggttagagagaaaaacaaacaccagaaatatagaggttcgccctagaaattaggggtacatcctctgatgagctcgccttgaagatcgacctcagatcttgcactatgatgaatgaatattacaacaggtaagaaatccaagtcacagatcgactggtatttcttaggttttctctcttttgtttttctgtgtttatttctctcttattttctgatttctcacactaactctcttctgtttcttgtgcatgtacttgaaacatcatctggagctgaaaaacttctcagatctggtaacctagggctttagcttctggtatatctcatctctcttctcttctgtattactctagtgcttttatagttgtagttttagggttgatcacagaactaggagttagttacaacttcggttgtaactaacaactagttcttgatccactagaggcgaagccacctaggatctattttctgttgtattctgtttgtattttatctgtatttttcacttcatcttgtaacacagtaataataaatattacagtgagatctaatttaacaatttccaccttagatctcttctgtaatgtttattatcattgtgcttcgtcttcaagggtcttagctcatagtggtagtggtcatccaccactaccaacccctaacaagtccaagcagtgcttgaacttggttaagggtagcaccttagtaccgatatcagaaggattctcttcagtgggaactttctctatctgtacaaccttctgtgtcactttatctcgtataaagtgatacttgatttccacatgtttggttctgtcatgaaagacaggattcttacacaagtggatacaactctggctgtctgaatagattgtaggttcttcatctaggagtttaagttcatctagtagtcctttaagccaaatggcttctttaatagcctctgtaacagctacatactcagattctgttgta

SEQ ID NO: 288815 - DNA, 556 bp, Cannabis indica
acccaaaaggttctcccaaatgcaatgctaaaataattggttgcttaaagttgtccataagaggagagaaatttgtctaacacatcctaatctacaggtgtggatggacttatatagtcttctaaatttttatcaatctgcaaaaaatttaaaaaatcactccaaacagctacatcaggatcaatccattcatggctaacatcttcagtgtcatgctcaattccactgttactcatgtcagagacatcttcttcacatttctttttcacaaaactcatgaaatgaaaaaaattatcttcatcttcggacaaatttgctataggttctatgttttcgttgtcaatcattttcgatgtaagtgtggtggagagtgaatgaaagaggataattgcgagtaagactttagttaattagaatttataattaaaaaaataaaaatcaagactttaaagattaattaggttttaattaagtgtcaatataatatcatcatgttttttaatttataaggacacatcctgcaaaaaagaagcagggtgtgttcttgtaaaaaaaa

SEQ ID NO: 288816 - DNA, 666 bp, Cannabis indica
tcgacctgaagtctacccccaagcaaggcaggtcggggtatttttactcctctcagccaggcttcaagtggttgagtgggacggaccacaaggccatcagcaaaatagggcgttttgttgatgagtacttcatggtgaaggatccgagcatcacccggactcagtttcagcagatcccaacatatcaccgtcctcccctcactcttgctcttagggatagagctcaaaaacttgcccggttgccagaggaagacaggaatatcatccagttgacctccgatgagaatttggtgcagtacgggctttacccagaggacttttctcctaagtctgtgacggggaagaaggggaaatctgatgctgcccggcctgaatgagctaataaggaggatgagctcattcaacttaagcgtgaagctaagttgaagggaggtgcctgggcaaagcagtatactcgggagcttatgaatcctgaagatgaagtcgagggtgaggctgaggctgagcaggtgactccattgaagaggaagaagaaactctcagccacgcccaggcctgttgaacatgcacttcgcataagggagcctatttcacctgttcatccatctcatccctttgctggaaaagggaaggctgttattctgagataaactcgatgtcaggtga

SEQ ID NO: 288817 - DNA, 1109 bp, Cannabis indica
tcacatgtccctacggtacttttgcttttagaagaatgccattcggattatgtaacgcccctactacatttcaaaggtgtatgatggctatcttcggacttaattgaatcctgcattgagatctttatggatgatttctcggtctttggctcatcattcgatcattgcttagagaatttggaaaaggtgctaatcagatgcgagaagtctaacttggtgctaaattgggagaagtgccactttatggtaacagaagggatagttctgggacacaaaatttcaaaagcagggattgaggtggacaaagctaaagtgtcaacaatagagaatttgccacctccagtttctggtaaaaggagtaaggagtttcttgggacatgctggtttctaccgaagatttattaaggacttctcaaatatctccaaaccattgtccagtttacttgttaatggcgttccttttgagtttggagaagaatgtttgaaggcattccaggttcttaaagaaaaattgatttcagcaccaatagtcacttcaccgaattgggagttacccttcgagttgatgtgtgatgcaagtgattatgcaatcggagcggtcttgggtcaaagggttgacagggtgtttcacacaatctactatgctagtagaaccctgaatgatgctcaactaaattatgccactacagagaaagagatgctggcaattgtgtttgcttgtgataagttctgaccctatctaattgggaataaggttcttgtctacacagatcactcagcgattaaataccttatgaccaagaaggatgcaaagccaagattgattcggtgggtacttctacttcaggagtttgacttagagataaaggacaaaaagggcactgaaaatctggtagcagatcatctgtcaagactagagttggaagagagccagaatacgaaagaggtacagataaatgagcaatttcctgatgaacaactctatagtgtgagggaaaacctgatggtaccatggtatgctgattatgtcaacttcttggcgacaaaaataactcctcctgagctttctcgtcaaaaattgaaagaaagtctttctgagtgaaacatta

SEQ ID NO: 288818 - DNA, 540 bp, Cannabis indica
cagatatcgaggaaatccttgaataccctattcataagattcatgaaagttgcgcgagcattggttagtccaaacgacataaccagaaattcataatgtccatacctagtacgaaaaggagtctttggaatgtcctcttctcggattctcaactgatgatagcccgatcggagatcaatctttggaaagactgtctttccctgaagttgatcaaaaagatcatcgatcctaggtaaaggatatttattcttgattgttagcttattcaattactggtagtcaatgcacatttgcaaagacacatctttccttttaacaaacagtaccagagctccccagggtgacacactaggccgcgtaaaccctatgtcaagcaaccccggaagtttaattttcaattctttaagttcttatataaccattctataagggtccttagcaacaggctctactccaggtgccaaatcaatgacaaaatcaatttctctctgtggtggtaaacccaaaagttcatcaagaaaagcatctagaaattcccga

SEQ ID NO: 288819 - DNA, 546 bp, Cannabis indica
aataaccagccaaacccagaaaacttctaacctctgtagctgatttcggtgctggccaatcccgaacagcttcaatcttggccggatccaccatgatcccatctttatccactatgtgccccaagaatgagacacgagataaccagaactcacactttttaaatttagcataaagcttgtgatcccgtaacctttgtaaaaccgctctgagatgcaattcatgctcttcttccgtctcagagtacactaaaatgtcgtcaataaacacaatcacgaacctatccagataatccttaaacacccgattcatcaaatccatgaatgccgccggggcattagtgagtccaaaagacatcacaagaaattcatagtgtccataccgagtacggaacgcagttttcgggatatcttcctctcgaattctcagctgatgatagcctgagcgaagatcgatcttagaaaagaccgtcttccctttcagttgatcaaacagatcatcaattcgaggtaaaggatatttgttcttaatggtaagcttgttcaact

SEQ ID NO: 288820 - DNA, 623 bp, Cannabis indica
aagggcaaaccaacaattagaccatgcaacagaaaatcataagagtcaaacaatgaaaaagcagaaaactttacataaaaaaatacatttgacaacatatgcaataacaaaaaacaaaatgaggagaaacccaaattaaattaagctaaacaattaagaactccaaaatcttcaatttttttcaagtcatgattaagtatgaaccaaagaagattcatctcattttacaggcaaaaatattgaatttctggttagaacatattctcattaaatgcaatagttttcgagtatgtaattttcttcaacatcgacacttaaatcttcagcaattagttaagctaatccaatcaacaccacataacacatttcttacagagtaactgaattaaggatctcagctgaagataactaccacaattagttcccagcacatagaacttttccaaatttaagtggtgctccacagctcttaatgctgcagtttaagaaattactctgcattacaatggtacaagtcacaacagagaagaagtaaaacaacacacttttattcgaaatacaaagcataccttgcacttggcaaccgacaccacagaaaagaaggagcttaacatttgcagcct

SEQ ID NO: 288821 - DNA, 540 bp, Cannabis indica
acaaaggaaagttctagcggtgcttctactttctaatcataaacctcaattttggcttctttaaccagctgccacacacaacttacttactctgaatttataaccatttacaattttttaacactcaaaaagttactgagtttgttttctatagctctacttattaaggtagaaaaatatttttagattgactccattctgtttattaaatgaattattttcaagttgacacattaacttaaaaatgacacaataatgacctactacaaagtatacacttatattcattctatttattgagaatcaaaacttcaatcttcttcactagattagccagagacacataatatttggacataaacacaggacacaatattataactcaaactcagaaacacttagtcgaaacttgaatgaataatgccactcttttaagttttaagactgtatatgactaggcaattttggttattgtattattattcctgctacatagttgatcatttttagatttttgatgtgaaatttcgtattgtgagc

SEQ ID NO: 288822 - DNA, 829 bp, Cannabis indica
agtggaaaacaatcttttgggcacgccttatacagatcagagaagtcaatacaagttctccaagtttcgttaggttttgggataagaacaggattagctatccacgagggataaaacacctcgcgtataaagtcattgaccaacaacttatccacttcctgtttaagggcctgttaactctcagaatccaagggtctccttttctgcctctttgatgggtagtttggatagacatttaaattatggcagataatattagggtcaatccctatcatatatccatggctctaggcaaactgatcttggttcgcccttaagaaacttattaactgctatttcaactgctcgtccaggtttttcccaatgtaaacacactttgcaagatttcctggtcgagaacaacttcttccaattcttcaattggtttcaataagtttctttcatcttgaattcgaggataaagatcttcatcattcttttcgcttccctctgtcaagagtgccattaattggtgaccgacttttctgtgttgcagctctatgtgatagctatcgcgagccagtatgtaatctcctcgcactacacccacacccatcgatgtttgaaattttaatgataagtgcttgatcgaactaactgctccttgtccgatcaatgttggacgacccagtaatatattgtaagccgatggcaggtcgacaactagaaagtctttcataatcgtgacaaataaagctacctcacccaaggtcaatggagctcgattataccttgacttgcgatattgtcgccaatgaatcgcatagatttaccatgcaaggcctcaatt

SEQ ID NO: 288823 - DNA, 554 bp, Cannabis indica
tcaaattatgccattaaagctcaaagcttgagtttcaaaactcaagcttgcttagaatcattatcaagcatcaaaaccagcagctagaaccttaaatcaatcaatatagagcataacaactaaacccaaatcatttctaaacctaacagccactaacctaacaaatcacctcttgaaactaagcaaaacttgagaaaaaacataactagagagcaactaaggttaccttggttaaatcctccttgattccttgctaaatcccaatgaaaagagaagaaaattctggtttggtccttggtttgtcccagccgaaagcaagagagagagagttcaagagataattcaatttttccaatttttcttctttatctcttaatttctcaaaagaaaagggttcccaattatttcttgctgaaaagtaatatgctaggtgtcactcactcatggcagccacctatccaccattaaacaaaatgtctaaaatgccctttagacttaaaactagggtatttctaaagctaggggtaaaatggtcaaaatccataaccccgctc

SEQ ID NO: 288824 - DNA, 724 bp, Cannabis indica
tttcatagtgggaaatattttagagaaaataaattatcgggtttgagcggggtatgggatttgaccattttacccctagtttggtggaatatctaagttgtaaataggagggcattttagtctttttcctttggtgaaggataggtggcagccttaagaagtgacacctagcattttatttcagcaaagaattagctttgttaactcatttatctcattttgggaattaaaagaaaaacatcaaaattgaagaactctttcttctcttctctctctctcttcgaaggcagcaagaacaaggggaaggggctgggatttctttggatttttcagcaaggattcaagctattgctagtgaggtaaagccctagactattggttattgattttcaagcttttaaagttaggttgaaatggtgttttggagtaataggagctgttaaggtttgaattgcctagggttcgaattttagggtcttgttgagttgattctaagtcctagctgctggttttaattggtgttgatggttttatgcaaatttaagtttagagttcaaagctttgagctttaatggcaagttgagatttgttgttttgttctgtgaaatactgcctggattttattgtttatgcattgaataggtgctctggaaggtttcatggcaattggtggaagattgagcaacaaatgaaaagtttggggaatactggtgcaaaccggcta

SEQ ID NO: 288825 - DNA, 501 bp, Cannabis indica
gactaaaaatatatttagtcacaataaattataatttttgtgactaatatttttagtcacgaacccttttagtcacaatataagaatcatgatttataataagtcacaatttttttacttttagttcacaaattttattgaaggcatttaagtccatggaaacacaacaataattaatgatataatatgtaatcatggatacatacacattgttgtaagccccaaaggacgccaaagctcacgctctcaccatgtcttgttgacacagtggtcataggtgtcgcatagagcaacctcattgacgatgtagtaaacgcaagcatcattggtacgtataactacatatacatcaccttatattcttcattttttatttcttgagtgggtttcaataagagattttgtgagagaaataaagaaagaaagataagttcagttctgattttctatctttaaatttttaccaaagctacataacaagaattgaatatggatttgttt

SEQ ID NO: 288826 - DNA, 533 bp, Cannabis indica
tacaatatgttcatataagatggtaattttattattatattcatctctttagtgtttctttattatttgaaccatacatatatctatgttagtttgattttattgacttagatacacatctttaaggctttattagtagataattttttatttatagacttaattactagtagttttatattaccttaatgaattaagagagataattttgacttttgtgatatgctctttttatttttgtttattatagtttttaatgagtgtgcattgtgataggagcagaaggctatagaaaggctcttgctcttgctcttgatcttgagtcaatgactttagatatgtaaatctctaatgaactttttttttgaaccctaataaattatttggataatcacttttacaattttagaaaatttatgcattgttatgatgataaatcaccttttgtatttgtatttgttctcatatacatgaatttgaatttttcacttatgtattttattattaaaaataaaaaaattaacaaattaaac

SEQ ID NO: 288827 - DNA, 834 bp, Cannabis indica
cctgagagtatgactgatgaagattgggaagagttgcaggcaaaagcggtaagcactattcgtttaagtttggctcctgaattaaagtatagtgtattgaatgaaacatgtccgtctgagttatggaaaaagttagaaaagctttatatgtcaaaatccctaacaaatagattatatttgaagaagcagttatatgaattaaaaatggttgaaggagaagatgttagggaccatataaatagatttaataagtgcataactcaattgttaagtgtagaggtcaaaattgatgaagaggatcaagctattattttgttggcatcattaccaaaatcatatgagacattagtgactacacttttggttggaaagactactttaactgtagatgaggtgtcaactgctcttttggagacagatagtatcaagcaaccaagtggtgtgtctcatactgatcaagctcttgtgacaaggtcagaatcaagtcgtggtaggagtacatcgagaggaagatatgatgacagaagagacaatcgcgctcattcacgcttttcgagggaagtggagtgctactattgtcacaaaaagggacatgttaggcggaattgtgaagagttgactaagcatcttgaagcaatgaggaatcaagaatgcaaagacacatcagattccacaaatgttgctggtgaaggctttgaaagtgactctgatgttctctctgtcatagctgatgaaaacttttctgactcttggattttggattctggttgttcgttccacatgtgcccgtataaggagttctttgacacttacaaggcatatgatggatgtact

SEQ ID NO: 288828 - DNA, 544 bp, Cannabis indica
cacagcagcaatttgaaaattttttgcagcagcaaccccaatcttttcctcagcagcaacaacagtctgctccgccattgggaaatcagttcttataccgaacaccatcagagtctcctccgctcggctcaaactttgctgattttggattatttgggagttcatcgcaggagaaccaattttattcaactcccattttcaaccaagctgagctcggtaatttaacgctgggtttatcatcagaccaagcatatgtgccttctccgccacgggcttcggggactcgtaacgaaaataatccagatcaagactttataattagagacctgaatgaagatgttaatgaataatttatttatgttttgtaataatttagtttaattttgagacaatattttattaggattaatatgttaaagttaattactttggagacaattttaaattatcaataaattttattaaattgttataattatattaattagattttatttattaaatatttatataaataattatttatttatatataaatatttat

SEQ ID NO: 288829 - DNA, 554 bp, Cannabis indica
gtatgtttttaacatcctaaacatgaacttctaaaacgatatgaaataaacacatatagactttcaagaaacttacaatggttgcagcggaatataatgtctccttccactcagatctctaacccttgtatcttttctgtagcagagtatcactaagatctaagtctgaatctccttctcttgaaacgggattcttcacagccttacacactatgattgagtaccactgtatgtgtgtgggaactcactcttttcactatagggcttcgattttgaagagaggaagagagagagaaggtttcgaataggagagtgaaggtggctcaaaattttactgaaggaatgagttgcatcatctttttctttgaagccatcactacctatttataggaaaccacttacggttaggttagatttatttggcattaaaataatgaaaaaataaagtggcaaattgcttcccaagtagccggccatggatagtgggccccactttgcaattttgccatttttctaatttttcatcttattttctcaaaaatgctatttttcaa

SEQ ID NO: 288830 - DNA, 615 bp, Cannabis indica
gttttggccattttttctctgaaaccctagaacacaaacactcttacactttgaaaaatgttagacctttgagagaaaaaaaatggaaagagaagagtgagtggtgatcgtgggtgagtgggtagttgagcatatataacatttgattttacttacccaaaatcagaaaaaactgaaaagaaaagtaacttccttacctttgactcacgtgtggaaagaaaaaggaaaccaaaaaaggtttttcaaaaaatggtcaatgtttccttaaatggaaaaaggaaaccaaatatccccacaaaatctaagaaataaaaaccccaccaaatccgaaattgccaccaaaaaggaaacaaaaaataattaattatttaagtacaagtttcctaaaaactccaaaataagaccaaatctccacaaataaaggaaacacaaaatagagtatacaattaaaacatgtttccataaaatgaaaaaataaaagaaaaaaatattacaaggattcgaaaaaaattcgaaaaaaaaaaatgccccctttttccttttattttttctaaaaaattaccccccaacaaaaaaattagcaaataatgaacaagagaacacacagagacacaa

SEQ ID NO: 288831 - DNA, 679 bp, Cannabis indica
cagagtgtcatgtgatgtggtaatcttcaagtcccgactaattgtagcattaagtcctcgaacatacttctgttttctggtgaaatctgtaggcaccagatcaccagcaaattttgataaccggtcaaactccagagtatactcggccacagacatttttccctgagtcaacttcacaaaatcttcttgatgtgaagtcctcacagccacattatagaacttttcctcgaaaagtttcttaaactcttcccatgtcatcacactgacatcccgagtttgattcactatgtcccaccaaacgcgggcgtgatcttgaaacataaaagccgcacaattcaccctctttgttcccgtcacctccatattatcaaggatacgggtaacagtgctcatccactgatcagctttaataatatcaatgcttcccagaaaaactggaggttgcagcttcacaaaccgctcgaacaccgagtcccggtgcggcataacatacctttggttacccaccactggcacaggagctggtggtaacccttgattagctgggatagcttgttgcctcaaacgttgcaactcttcttcttgacgaagtatgacactcgacatttcataaaacatttgctgtcagtcagtaggaggattagcattaatagcccccgcattatcccctggattttgc

SEQ ID NO: 288832 - DNA, 706 bp, Cannabis indica
ataattgacatgtttaaaatactaattaaaaataattattttaaaaatataattattgttataaaataatataaagtagatgagaggaaagaagaagaagatgaagagagaaagagaaagtgaatgagaatttctgagttgtttattccaatggggtgaacccctatttatacaaatacaagagtgagatattaagaaactaagaaaaagggaaactaaaaaaagaggaatattgattacaattaatggtaataaataaaagatttggacatccacataattattaatatttataacactcccccttggatgtccataataactgccttattaaaaatcttgctgaaaacttgatcaaaggaaaaagagtatagtgtaaactaactccccctcatttaagcatttgtggagatcttctaatcgacgaatttcgatcttatctgccgtcttctcaaatgttgatgttggtaataactttgtgaataagtttacaagattgacacttgattaaatatgttgaacaccaatatgtattttcttgaagcgtataaagaagaatttcgtgaaatgtgttctaactctatctccttcaatgtaccatccttttagttgagcgatgcaagcagtattatccatagagaattgcttgggttgatacttctttattgagtgcaatccatatgtttcccgaatatgctatgtcaat

SEQ ID NO: 288833 - DNA, 892 bp, Cannabis indica
atattccatctacttcgtctgatactaattctaggaaattctggaataaagtttggtattctaaagctcctccgaaaattaaacactttatttggagagttgtgactcacaccattcctgttgcttcttctcttttttctcgtcatattatagattctccactttgttctttttgtaaaagtaattctgagactgttcagcatgctctgttggggtgttccagattgaaaaaggcttggaaatcctctaggtttgctgatctttattttaaatttaaacatcttgatattactgattttttgttaacctcttttgagatgttagataaggaatatgttggcattttgttttgctttctttgggcattatggaataacagaaataattgcatacatcataagaatgctatccctgtttatgatacttttgattggagtctgaattacttttttcagtatatggatgctcagcagaaaattcagcagactcatgtgtcggctcaaaattcaaatagggagtcgacaagtacttctggttcttctttgcaggtttttactgatgctgccattgatgttcgtggacacaagcatagttatggtatagtggtggctaatgagtctggtgctgtcaaagctggtgtggctaaaccttgtattgggagtatccctgctgttctggcagaagctaaggccatttatcatgctattctttgggtgcagttacttcatcttccagtggatactttaaagactgattgtaaaactatagtggataaacttaatcattgtaattggaatgctagtcctctggatgatgtgttagtaggtattaaaaacttattatctttcagtcctaacctgagaattgagcatgtgtatcgagagtctaatca

SEQ ID NO: 288834 - DNA, 591 bp, Cannabis indica
gagagagagagaggaatttcactatatcaaggattttgtgattaaggatatgtaatggcagagaaaagttagtattcaagacaacttgaagaatcatgttataaagataatactacatactacacttgatctggatatcaaggtgttgagattatttgaaaagtacttttggttttatattagtgcaagtgggagtttgttgagttttgtgccctaaataaaatccatttcaaaataatctgatttactaattaataaaggatcataaatcattttatgttgcatggttcacatgatttatttcatgattacgtttaatgtacatattctattaagtctagaacatatatatatttgttcatgattatagtgtcatcagcaaagtggaatataatcatgatcatatgttcaaaagtttaactccaatgatttatcagttctctggatttagactgacatgataactggtgataaggtatacttacaccttggataaatgctatgtcctttccaaggtattggcaaagtttaccaatatcggatgtatggagtatacattggaagggatcgatgttgatcttagataagata

SEQ ID NO: 288835 - DNA, 557 bp, Cannabis indica
aaattttaccgtgcacctccttacaatgaatatattaatacactcttatcaattttagcactcgaaataattttttagtcaaattttttctcatagtcatgtatgttatacttatttaagatcctgcaaaattttaagaaatttaaaaaagtttaacacgccgaaaactacgttcaaacagtgtattgcacacgtgactattttattttatacgcgtataaaaagactgtttgaacattattttttatattgtaaattattcagaatttctcaaaaattttgtaggttatcttaaatagttataacgtacatgaatatgaaaaaaaaaatagattaaaaaaaatttctggataccgaaataagtcaagagcgtatcagtacatcccttttaagggggtgcattgtagaatcactctaaaatttatatatttaattgtattaagttttggaaaaattctacaatgcacacccttaaaatggatatattgatgcacccgtatctgtttttagcatccgaaataatttttttagtcaaatttttttctcatggtcatgta

SEQ ID NO: 288836 - DNA, 655 bp, Cannabis indica
gttctttccagaacattggcaaagtatgctagtattggatgtatggagtatacattggactgggaccgatattgatcttagtaaagatatcataatcttaccattgtatcttcttaagtcaatatcactggttgatcttagatcaaaagatcttaatcctgacatggttaggttcgatctcaagagtgttatttgtgttctttaatttgttagataaagcctaccatttgattcgggtcgaacgtacattttgggaatgtgatagtacaattaagtgggagtgctaaacatagatatggaatctatagattctatctggacatataagtgaaatgatgatttccttcgagcttggcttactagagataaatggaagagctcttatttgagtgattatattagtttacttacatatcatttataggaagctaagtgttttaaggataaaatacattgaagggtaaaactgtaaatttgtccctattaggtgtaaatcatctatagaggatctttaattattgggattagaacgatggttaattttcataacgtatctatatcgtggaacctatagagtgttctatataattgagagtgaaattccaaatctatagtggtgcaaggaggaattaataaagttagggaatttacttgg

SEQ ID NO: 288837 - DNA, 877 bp, Cannabis indica
aagcgtgaaaaaaaaaaaaatttcgacctgaagcccagaagtcgcgactagcattaagcctagtcgcgacctcagtcgcgacttgctgattttccagaaaggcctgaattttcctcgttagctagtcgcgactagcctttggccaagtcgcgacttgctgaccaaaaattctataaattcacactttccccctcattcaaccctacacaaaccaaattcaaatttcaaatcctctcagccgaccctaccctattttcctctcaaaaattcaatttttcatcttcaatcttcaatcttttcatcttttctcaaatttcttaaacccaatctaatcaaaaacccaatttcactcaacaatctacacatatcatcaaaacccacaccaaagaatacccaaatccaaaaaaatcaccattgttgtcaccctcaacctcaagctttcaagaacattcaacaatggaggtggagtaaagcgttttcgggtttgtaagtatcactttcttcattctttcaagaatttgattaattattttaaattttgagtgatataattgtgtgtggtgtaaaaatattgatgatattgggtttattattattgtattgtggtattgagtggttaggaacattgattgagtgaatttttatttttgggatagaggaaatttaaggggaggtgctgcccaatttttcttagaaaaaaaaagttttgaaaaaaaaaaaaaaaaaaaggaaaaaaaatggcaccaaagaggacaaggaatgttgaagaaggttcgtcttcgaacccaccaccaacgggttttgatagaacccgctttggtagtatcgaggctcacaatcgcttcgtaaggttgaagaatagagcctatattgaaga

SEQ ID NO: 288838 - DNA, 699 bp, Cannabis indica
cttctatatcttgctccatttttggccaatagtaagactttgacagcaaagctagcatcctagccacacccgggtgaccagcccacttaggatcgtgggtttctttaagtaactctcttctcaaagttccactgttcggtacaaacaacctgccacccttggcatagagaagaccatcttcttcccagtaccgcaccaattctccctttcttgcttcctcaagaagcttcttgtaaccaggatcgagcaaggactgctccctcacccggtcgaagaaagttgaactcacctgagtcaacgcaccaacaaaaacttgtacatcctttcggctaagtgcatcagccacttgattctgcttccccggtctatgaacccacacaaaatcaaattcagccaagtactcttgccaacgagcttgcttcggagttaatttcttctgagatttaaagtatgtgttggctacattatccgtcaccactgtaaactttgttcccaaaagatagtgcctccacacatctaaacaatgcaccaccgcagccatttccttctcatgagccgaatacctttgctcagcatcctttaacttccgactttcaaaagctattggatggccatcttgcaccagtactccacccaaggcacgatccgatgcatcagtttggacttcgaatggtaaatcaaaatcaggcaactttagta

SEQ ID NO: 288839 - DNA, 653 bp, Cannabis indica
tgctgcctctcctcatcggcaggaaccagagtaagaatgatgtcggggggtacaacgtactcctctacttcaggaggaatccctgaatctaagctgatagccggggtgtcctttcttttgggcttcttggaagactcagcctctaccatcttgcccttgcgcttccggtcgagtggagccacaatcttgccctcttcctcctcctcggcctccccatcctcgtcgatcaagacgattgtgcctaggggggcactggaagatgacctccccggggttaccatctgggcaggcgccggaggaagagaagagtccgggctgtaggtttcagtaagggttgctaagagatcttccattggcctaactgcttcgaaaagaaacaaacaaagtgttagaatggctataagaaagcatgcgcctgaaaacaaaacaataaagctagtcctaccccgactatctaactcagccctagcaaagtcttgaactacaatgctagcttcatcatccccaagaaagctgtccgaggggagaaaccagctagaaaacaactaagctcagtgatctagagggatgggtgcaggaggtccgaaacccatccgggaccggcctaagaaatgacctaaatgagaaaagtaaaaggccttggcatgatcccc

SEQ ID NO: 288840 - DNA, 571 bp, Cannabis indica
acagaggcagtggggccatcttaataagatgatagaatacttttagaatcaagataaaaaaattatctcctctactttcctactttgttttcagacttagtcattttcttagaaaagtagtatttgttgaaacaaacactttcttatcttaatgaccatacgatggtccacccctaatcacttaaaatagctatcaaacatgcaaaccttagttaacagttttagcttttcttaaggtcacgatcaagacatccatgaatctagtaatggtttacactaagtacacaaccattccatcattctgaaattttcctatcaatagggtatatcccttgaaggacttaggcaactgctagtagctaatcacaaactttatactttcatcattgtgcaaatcgaatttctagggaggtaagtttgaatacaatttaaagttcaacttaatgatctttgaactacatatccaccaaatatttctccacccctatcagttcgcaagatctttaaccacttaccttaatggtttttcaccatggctagaaattcatgaaatttctcaaacattttaaat

SEQ ID NO: 288841 - DNA, 552 bp, Cannabis indica
ctcgccacctcctgcttcagcttctttatatttttcttgaaaatgggcgttctgcctcttcagcgagtcggcttccttcgaaggagtagccgcggcttttatgaacaaagccatggattgcgcggccagttcagtagatcgagcaacgagatcctcgtaagggatctcagtcaggaatttttcctgcatggccaggaagtcgcgagcacgaactggagggtcgatgacgactttcttccccttatcctgagtagtcttggccaacttcttggaagagtctgcgacaagcgaagccatcacatcgctcttcctcttctgggcgacgaccggcgaagtcgccggtgttccacccttttgcttgatcttcaggacaggggcagacttcaaaaaagtcatgtctacaagcataaaggacagataagtaaaaaatcacaatcctacccgtcagtttatagcaaaaagacgagttacctgaaatttgccgaggagtttgcttagaaagacgtttgtctatccgctcttgctgcttctcagatggttctttatatactg

SEQ ID NO: 288842 - DNA, 626 bp, Cannabis indica
acgctaaaaagatcttctatctttcagatgagcgacttgtcggatagccaacagctcggctttggaggtcgtgcattcgatggtgaagttgaccaggaggaggacagctttctcccaacctcgctttccgaagaggaggccgctccaatagagctaggctcgatgtcttctgtggacatcgaaaggatggtgcaggatctcgccgaacctgggaccatcgatattcgagatagcgagtccacggtgtcggcccgcgactaccttatccactcgaggcatgctgccgatgtcgaggtcgaggagatggatgatgaatggacgaccccagttcgcgagtcaggtgaggacgaagaggaggcggaagggagtgggacagattcggttgacgatacccagctgaatgagcccttcgcgtgtgaggatctaatttcgagggtttccaaatcagatttcactacctttgtgaggttaaatttgctgcgactcgcgttttagcgacctaaaccgtcccagagggcgcatcttccgtttactaaccctgcgattattcccacggaggatgtggtagtctcaatacccattctccggtgtggggtatcgatccccttccatcccttcatcgcagc

SEQ ID NO: 288843 - DNA, 702 bp, Cannabis indica
ctaggtccaatttcagttatgattccaagtccaagtcctagttccagtaccggtcaacttccggttttggttccaattttgggtcgcaggctacgggttcgggtcaacttttgggtttggtactcggttcagatcctggtgtggctttgggtcattgtcaaggttcaggtccagggctgggtctcaaatccagacaccgactacagattttggtgccgggtcacgagctgggtcctaggttcaagttgaggtctgggtcgggtactaggtgccggtcctagttctgtttcccaggtccctattctgattctgggtccaagtcccgattattgtgtgggtttaggtcgcggtgtaggtttgggtttgagtcctagtctcggttcgtgtttaggtctctgtttgggttttgatctgggttcaggtttgggtttaggtcctggtccttgtcctagtcctagtttggttctagttccatttgcgatactgagtttgactttgggtttgagttcgggtcggagttcgagtcatggtctgagtttgtgttcgagtcctgatttcagtctaggtccagatcaggctcagggtgtgggttcgcgtcctggttctaggtctatgttgggtccgagtcccaagttcaatcccgatctgtgtctagattcagttttgggtctaagtcctttgttctgatcctggtgtgggttc

SEQ ID NO: 288844 - DNA, 591 bp, Cannabis indica
atagaacagaatttgtacataacatagttctatcccaaaataaattaattaggatgttttttacactgaaaaatgtaggttgtattgagatatactataatatcggtactgttatcacatgatgctttatctgactcaagactttagttttccaccccgcgtgtcgattttggtccagtgtttggcgcaccgacggctgtatcaaatatgataacactcatcccccgatggccttgtggactgcgggaggttgggtaggttcggttggatgggatatttggcggcgtctcaagtagttccctccagcctaatccacccatccgaacccttcgtcaacattacctgaatatacatgtagtacgtacataaaatttctaagaatcaatttgtaataatatactattgaaataaatagacaaaaatagttgagttattacccagatttattatgagatgattgattgaattgctgaaatttccttaatgcatctacaacacacggttgtagtgcataccaatccttctgtttacacatcttcacttcggtgcaacaacaatacataatttattttttcatatattatccctaca

SEQ ID NO: 288845 - DNA, 797 bp, Cannabis indica
aactattttgcaggtggtaaactgaggctcaagtaatttatgtgatttgtctaaggtcccataggctataagtgtcagagcccagattgagaagtgtttggctgttcatgcaagtgcaagcagctttcattaaactattcgcagaagtctgtcagaatagctagcaaggataccaactatctagggaaagtcacaccaaaggagtgacccaaagaaacacattttaacctgaactgcctggtaatacactgaaggcaaatcagccccaaagactaaaattgttaattttctgtgattcctcgctgttttatttaatataatatgaccttaacctagtcttgatatttgatttctgaacaatgagtcaagagagttgccttctctatgtagtagtactttactgttgtcaaagacttgtcctttggtgcttcatattttgcttttacctacatggaacattgctaatttaggtgatagcctaactatttatagttaaatacacccaccaagttccctttacccttcaaattaactaaaaagaaacaacttcctacttcttacaccacataaaattcatattttgctttaaatgtaattttttcagtcaaagagcctagtggagttcacttaaaactaaccaaatcagctgttaaaattgtccatttgatcacatgggttataggcatagttatttgactgagttatgactaatgctcagaaaacagaaaaagcaagtcaaaaggttgtcatgtaagttcaataaaaaattcaacagttgttttttaaaagatttttca

SEQ ID NO: 288846 - DNA, 539 bp, Cannabis indica
ttataggttaatggatcgtcatcaataccgtcactaacgaccatattgatttcaccatccaagccataacgagatggcttaatggaaaccctcccactaccacgaggagccgtgatcttctgaacaataacattagtggtagatttctcggttgtataaacttgcaaaggttcaacagagggagtgggattatcctctacttgagtagaagaggatggaacattagaaggagctatatctaaaagaatttcctccaatactactttgctttgcacatagaaattcttaatatagtcatcttcaaggaaagtggcgtttgtggaaacgaacactttatcatcctttcgactataaaatagtccacccctagtctccttagaattttcaacaaacatgcaaacctcagttcacttttctagtttgccatctttctttcttaagacatgagcagggtacccccagattctgtagtggcgtaaactaggtatacgaccatatcataattctaaaggtgtcttagggactgatttagatggaac

SEQ ID NO: 288847 - DNA, 806 bp, Cannabis indica
cgggagggctgcccggacgcgcctcgtctagctcctcaacctcctagacttcgacgtccccctcacggtcctcctccattaggaccgtcaaatcctgttcggcgtcagggagagtgccaagccgagcaacctggggtcagaagcgtcagccagacgcgtagttttctttgtacgagccatcatcctatggctgggtacagaataaaaagaatatccttcttttgaaggagaattagcacgaagacgaggacgaacttcgtgcagaagttgaagcagctcctggtcgatttgatgcttgggctcccaagactcacctgggttcatctataaaagacaacacgcaagatgagtgtttgacggagtatcaaacgaaaaaataagcaaatatgccgaccaggagtacccaacagattaaagaacaaccatgttcaaagtaaagtctaaactcaagaagtcagaaagtttttcttgagttagggcaaaaagttcatgaagcttgaaaaaagcagaatggaaaacagacgcaatgcagttttaaaataagccttaccgctgaaagctaacacaaagacatggaaaagaagagtcgcagaagtttcaaaccctagggtttcctatagtgttctttctacaacgaagttacattcaaagcataagcatgcaaaggaaaaacataaagggaatcagaaacttactcaaagattccagtgtccgagttcaagcaagccagaaatcgtctgtaagctcttcaacaactttgaaaccagaaagctctctctttttgctttgaagtttgcttaacaacg

SEQ ID NO: 288848 - DNA, 728 bp, Cannabis indica
aaagaaaaagaaagaagggcagaaaatcaagaaaaacgaagtcttctctatgcccttgaagaccatcacacgaagagtgtatggtcctttacaaaatataacaacagtgcgtaacaagagtaaccctaacccaagagaagggaaatctagacatactacgtgaaaactcaagggaatacattcccagaaacttcaaacacaaacccagaaaaacaaacagatagtaaagcatgccataaacacaaacagtaaagtgagggatgcgagaaacttacaatgaagtgttagaactgggagtttgctgttgatcaaacaaagaaatgtagactgacagtaatgagcgaaggttagcaaagaaatctgtaaagtgtttgaaggtgtttaggtttaaggaattctttctctctggaaaactcgaagaaagtttgcgaaaaaaaggaaagtaaccaaatgaaggaaaggtggtggcttttataggccaaactgcatgaggaacaggcgctatcacctaccaatcgaacggctgggaaggcacacgattcgaattcccaaaaatcaacggttggattggttcgtaattaaggcggtggaaacgtttgagtatccgtctgacaccattaatgcgctgtatcaatcaatgggcatgaaacgaatcaacgtctgtaaaaagtgaatcactatattaatggtgatcattaaatgcaccttcacgcgcccaaagcacgtgc

SEQ ID NO: 288849 - DNA, 639 bp, Cannabis indica
aaaaaatataaaataaaatttttattacataattacttatacacggttacatcaatttttttaccctctctctttattttattacatatataccacatgcacactccccccatgcatatgacacgtgcatctcccccatccctcttcaatcaaccatcaatcacttccctctctttttttcttttttttttcctttgatttttcatttcttttcagtatttttttttttaaaaaaatatcttgtaacctccattgctgatcgtgcttaacccatcccacacccattttccctctcatttttgttcttcaaaaatttttcaactcccactaacccaatcccatatccgtttttcctctttctttttgtttctcaatccttaaaaaaaatgactgtgacccgttcttcttcatctccttccactgttagaaaaaaagctccaaaatgggtttgaaatcattagctaataaagctaagggaaaacgtcctattattgaggaggaagactctgattttgctcctctattaacgaagcgtgggagagctcctcctaagaagaaaacaaaggtcggtgtgcaagaaaaaatggttgaagatgtgtctgggaaaaaacgagaatgttggtagtgctattcgaaccg

SEQ ID NO: 288850 - DNA, 576 bp, Cannabis indica
taaaattgcaccccatctaacactacaaaaaaatctactttagtgatacttttagtcacaacaaaatactacttgtgactaaaacataatatttagttacaagtacttgtcacgaatttagttttagtcacaacgagtattgtgactaaaaatacattaagtcacaacaaattgtaatttttgtgactaatacttttaaccacgaattttttaatcacaacataggaaccatgatttataattagtcataattttttcacttttagtcacaaattttgttgtgactaaaaataaatttttttatagtgcccgtcccaccacccattaaggtgggtaatcttcgtcccatttgggcatgcccaaccctagacataggtaggctaggcctgtgcctagggcccacctagcccacaagcacaaataatttcccctctttaaattacacatatttttttgtactaattttaaaaaatattacatttttttttcttaaataagaattcaaaataatattttttctataacttactaaatttcaagatcggctattcaagaaaggtaactgtcaccgcggat

SEQ ID NO: 288851 - DNA, 520 bp, Cannabis indica
ccttgtaaatccatctgcatctcaaaacacttgagatgggagagaggatcttctctcccagtgtacatcttccacgtttgcatcttgaacttgtggggtagtggcaggagattgatctctggtgagaagggagttccgcgtgcacggtctaactcgagatcattgttacgctgcccggccatgccataaagcatattctttagttcgtcgagctgcgcctgtacggctgcgctgacttgattgacattttggtcgggttggattacgtcagcgtctttctgagcggggatttgagtatgggctctgggctgcacattcgttgtagtattctgctagtcttttccccttcttctgtttagatcatcccttaggtcatgggttgtttcgagcctatcaaacacagaagaacctggctgccttagcgattggttcgcttggttgacaggtggaatggctccattattttgcgtggatccgtcgagcatggctcctcctgatgaattcccaaacaaggtctgcc

SEQ ID NO: 288852 - DNA, 744 bp, Cannabis indica
ggggggtgtctgagaggaaaccaacagtctgcacgggaatgttataaccttgcagtggccaaggctaagaaggaagtatcctccagctagagcacagacaagggaaaaaacattcccaagtagggaactttccaagatgtggatcctcgactgggacccaaacaacaatgttgaacctgtagaagaattagaagagatcgaaatcgatccagatatcccgaccagaaagctaaagatctgaaaaggtttgttgctcaaagtaaaatcagaattgataaaatttctgagagcaaacctagacgtttttgcctggtcacatgcggatttggtcggaatcgatccttctatcatttcacatgttctgaatatcaatcccaatttctggccagtttaacaaaaacgaagactgttggacaaagaacgagcaatagccctgaaggatgaagttgaaaagctgcgcaacaacaacttcataattgaagctttttacccagcttgggttgcaaatctcgtactagtgcccaagccaaataagaaatggcgagtctgtattgatttcacagacctcaacaaggcgtgccctaaagactgatttccacttccaagaattcatcagcttgtagatgcaacaacagggcacgaaatattaagcttcatggacacttactcaggctacaatcaaatcaaaatgcatccaccagacgaagaacatacaagtttctgaacagatatgggtctctattg

SEQ ID NO: 288853 - DNA, 908 bp, Cannabis indica
ttctcaccagaaatcaaccttccacactactcacagttcaagatgccaacgtggaagatgtacactttggaggggaagatcctctctccccatctcaagtatttcgagatgcaaatggatttacaaggggtcgaaggagacgtatgttgcagaaatcttaccccgcaaactctgtcagaggccacacagcaatggtatttcaagttggctccaggaaagtttagttcatggaaaaccttctcttcggaattccatgcacaattctcttcctcacgccaaactcccattgcatctaggagatttggtagaagtaaaacaacgaccaggcgagccactccaggcatacatcagcagattcatgacggaagcgaccaacgtatcacgggtaaccgaggatggaaagttatccgcaatactagggggcattgaaagtccttggcaaactatgggaggacataaggaaaaacggaaccggtcgactcaatagaacttctgatcaagaaaaacaacccacacttacagaagtatgtcaaggccaaccgaataaccaggatctgatgcctccgccaatagatggacacttgcaagtcatcattggaggcccgcacatcgctggagacacgggcaaagctcgagaaccatatgctcgcacagctcactacgagcaagaagaagtcatcctggccgtggaagaaaggaagcccaaagttccacgagacaggagagccaaccataacattcaacgacgaagattctgtctagataagatttccgcacaacgaccagctagtcatggaagtccagatagtgaaccaatggtgtccagacatgatcaataatggggcttcttcaaatattttgtttaaaacttcttacgagagatggggctccagctcaaggatttaact

SEQ ID NO: 288854 - DNA, 692 bp, Cannabis indica
ggagtgtgagggggcctgtccatttatccctcagggatttccaaaaagggacgatgtgggggccagggcctagccttggctatatccaggagtagcagaaaactgtatgccgctcatcggtggagctgctgctggcacagtgcctgagagctgggctccgggcacatatccttctaccccggtgggatagtatcctccataggccactatttgggcctcttcaagattaatgtatttctggactctcttctggaagtcttgaaggtttgaagctccttcttgttgtagctcgttccagaatggggtccccgtacggatgcctgcttggagaagggcaagctgttgtccgtcatctactttcttggttttagaggcttcttcccggaacctctttatgaaattctttagtgtcttcgtaggcagctgcttgatgttagtcaaggcgctgacctccaggttgactttcctagcggcgacaaactgtctccggaagctggtttgcagcttattccagcaatccacggatcctggctccaatttcttgaaccactcttccgcggacccgcttagagtaagcgggaagcacaaacacttagcgtcattgctgactctcatgaccgtcatgactcggttgaatcgtgacaggtgatcactcggatcagagttccccggtataagctgccatttcgggc

SEQ ID NO: 288855 - DNA, 649 bp, Cannabis indica
ttgattctcccttcttgaatggctttttattttcgaatctcggtgagggtttgccacccctttgtccgagaaatttgtatctcaacgttgcaggccttcgagacgagctcattaaaagttttgggcttctgctgtgcccacaaaagttgccacctcagggttgaggtttttggcgcacattgaaaccgccgcttgttccgatatcctttctggacattggagattgaggtttctccacctggttatgaactcattagcgctttcactaattcgttgctttgtttccaccaggtcatggagacttatggtcttctttgagctcacgaattgtgccaggaaagctttttgcatgtcatcccaagtagttatcgatcctgcgggtaactgagtataccaggtgaatgctgcctcttttagagattgcacaaattgccggatcaatagtgcatctgattgggcagattcaccacatgcagaggtgaaataggccaaatgctcatgaggagaaccattaattccatcaaacttttcaaacttttgtctgatgtagtttggtggaaatggaatttgatcatagtaagccgggtatggcttatgatatccaagaataggcattgttgcagcttgatattccccgaataccctccat

SEQ ID NO: 288856 - DNA, 860 bp, Cannabis indica
gtggacggtgtccattaataatgaattaatttaatataataattaaagaaagcgaatggtttttggaatttaccatcgtattatatgctaaactaatactacatacaatatcgaacaccatggctaatgttgtgatgtgtcgaacaagaaaacaaattgataatgcagtggtagtagttgcggtgtgctagggcacttcgtaacacaccgacacttgttataaggtacacgcgttgctttgcatgaaagggtatcttttcgtatgctagcttttccagcatttattatttttgtttttcttttgacaaccttgtttgttttgttctaataatacactattataccatttttattatataatatattataatttagagaaagaaaataaagaagagatgacaatttttttagtgttttatttcaacgggtgattttttatttatacacatacaagaattgaatattaagaaattaagaaaaagagaaactaagaaaaggaaatatttctttttttaagaaaatgctattatattaaaagtacaagagttaaaatacaataggtaatagaggaggaggtatttcctccacccatgaacatttagtatccaccgagagagtaaattgtgccaacaaatgcgcagcattattagcagatctattaacatgtgagatctgtgcttcagggaaattggaaactaaaagagaaatgttattcaacaaacaatgaaaatcagaaacaagctctttagacgaatttaaacctttaaccaccataagcgaatttgtttcgatgtagtgtactggcagttgtaagtctttaatccattgaagactatgcatcagagctaaagcttctgtaa

SEQ ID NO: 288857 - DNA, 570 bp, Cannabis indica
aacacgaacacatggccttcttcaaacaaagctgtatgcctacaacagaggcatgacaatggcgactctacaactaacacagtaaacataaagcagaactcgaagaacttaaacactcacacacccagaagcctctaagtgcgaacccagaaaacaaacgaagtaaatgtaagcatgttattatctaaagatgcaagaaacttacagttgattgttgaactgggggtactgagtgtggttgagtgagagttgagaagcactggcaaaatcgaacactggaaaattaaaagaagtgtttaagtgttaaagcagtttgtgctactttgaggaattttctctctgagaaattcgagcagaaatggcaaggaatggaaagtaaccgaaatgaaggaaaggtggtggcttttataggcaaaagtgcatgaggaacaggcgtcttcacctaccaatcgcacggtgggggaaacgcacgattcgaattcccaaaagatcaacggaccagatcaatctaccattaaggcggtggaaacgtttgagtatccgtctgacaccatcaatgcgccgcatcaa

SEQ ID NO: 288858 - DNA, 634 bp, Cannabis indica
cagtggttgcagcggaatataatttctccttccactcagatctctaatccttgtatcctttctgtagcagagtatcaccaagatctgagcccgaatgtccttctcttgaatctggattcttcacagccttacacactagaattgagataccacttgatgtgtgtgggcactcactcactcactttagggcttcagttttcagaagagaggaagagagagaaggtggcggctaggtataggaagaagggtttgagtttttctctgaaggaatgagatgcatcatcttttttctgaagccatcactacctatttatagcaaaccacctagggttaggttagatttatttggcattaaaataatgaacaaataaatggtaaattcctaacatagtggccggccatgatatggataatgggccccactttacaatttgccatttggtcattctgccatctcattttctcaaaaataccaattttccaatttaaccacttaaataccaattctaattatttaataactaaaaattaattattaaataatattgtcctttaatatatttattaattagggtggcgtttggtaacacttttttaatcagttttttattttaaaagtagaaaagtgaaaata

SEQ ID NO: 288859 - DNA, 720 bp, Cannabis indica
cgatcgcgaattcaatggcttcagttgggagataagaatactcgttttttccataagtttgcttctaacaggaagagaagtaatcgaattgattcccttacttctgaggatggaactgtttaccaggattctgagtccattctatctctcatccaatcgttttactccaacttattcacgtctcaacacccccaagatttggatatcgaggctgcgctctctgatccttttcctctgcctgaaccatcacattaccaattgcttgaggaagccttctccccctctgaggttgaaaaagctctgttccaaatgggtcctgacaaagctccaggtatagatgggtttaataacaaattctaccaaaaaaactggagtgttgtgggtaaagatgtcactgaagctatcctcaatgttctaaataatcatgctgacatctctccctttaattccactctgattaccttgatcccaaaggttaaaaaacctgtttccctgaaagactatcgccctattagcctttgtacaactatctataaaatcatttcgaaagtcttggctaataggcttaaggttattctcagccctttgatttccccaaatcaaagtgctttcctcaaaggccgcctcatctctgataacattcttatggcacaggaaatcctgcattccattaacaataaaaagcaagggagagaaagttggatggcggttaagcttgac

SEQ ID NO: 288860 - DNA, 595 bp, Cannabis indica
tacatatgcacctctctctctctctaactctttcttttctctctcatacatgcaaccaaatgtacacgtgaggattcacaggaaatctcccagtatatatatatatataatatatatatatgtttataatatctttgggtgtggacgaaggtaataaagtcaagacagtgaaaggctatccgaaagtgggaaggggatttggccctcacaactttaggtatataggacattattcatttggactttttcctttctttgcaatatcgccccccacaccaccaccttcttataaccttagccactttgctaacaaaacaaaatgcccttccttctctcactccaattcattcaccataataataattatatccttcttcatataataattcttttaaatcattcaccataataattatatcgttcttcatatatataataattcttttaattattctctctcttatgtagtgcctgtcaactgccacgtgacagtatatttatgtagtatgttagtttactcgagtttgatagatattaatggatatatttggtgtatgtgtgtactgctttgggttgtatttagatttagtatgta

SEQ ID NO: 288861 - DNA, 292 bp, Cannabis indica
aatactttcatatgacgcggcccaagaccttggatctaaactggaataagaccgagatccgaatctagacttgaggtttcggcctaacccatagtaagtgtttgaatccatgactcggacccagatctgtacctagacccggacctggacccagactggcatccaaacacgatctcggacccggaataggaatcacaccaggtttaggactagaacccagacctaggaagaagcaggacccaaacctaaacccaaactcagactagaacccataccgagattaggacttgga

SEQ ID NO: 288862 - DNA, 628 bp, Cannabis indica
gaccctagaacaatactaggaccgtgacccggacccggaccaagaaatagaaccgaacacaggcctagcctcagacccaaactgagactggaactcgggcccggcacggtcgtgtacccagaacgaactgagacccggacctggacctaaatctggcacccaatcccaaacacagacttggacccagatagggatccggataagaaccttgactaggaccaaacccagactgggatcgaaatgttggacctagatttagaccgagatcctgacccagacaaaacttggacccgcactcgggaccccaacttggacctcgacccgaacctagacccaatcggggttcagacttggacacaaacccagacacaaactcggacccgaacacaaacccacacctagaatcagacccaaagctagacccggactcggacacaaactcaaacccagaccaggatcagaaccaaggacttagacccagaattgaatccagactcagatcgggattggaacttaggaatcggacccaacctagaccaagacccaggacgcgaacccacacctggagcctgatctggccctagagtgaaatctagacccaaacccaaactcagaccaggactcgaac

SEQ ID NO: 288863 - DNA, 694 bp, Cannabis indica
accaggttcttgtttgatgttggccaaagtcgtataaggtggcctatacgtcattgtggcctggaaatgtgtgaggaataggtcgacgaaggtttcccacgtcgatatcgatgcctcgagtaattgggtgaaccaatcatgggcattttcctcgagtgttaccgcaagaatgcggcaatttgcgagctgcggtacctggtccacttcaattatagtattaaatttttcaagataatctattaaatttttcaagataatctatcgggttagaagtacctttatatttgagggacacggatagacgaaaccctttgggaagttgagcctgtcgcacttctgtagtgaaaggcgaggtaccatgcaacttatatataggctttcattgctgctcgagcattttcaaagcctgcagaagcatgctttggtcaatccctccagccgcaggagccagggctgctacaactgcggggctcgcaactactgcggcaagatttgctgggacattaatcccagtggtcgcgatcggcgcggtaggcgggttattataagtattggcaccctgaccgtccgcatggggatcacgtagtgtctcagtattatgtgggacgcgagagcgtgccctgaaaactgcgttcagggttggttcttcgttccctgcgtacacgattagtatgacgtctagaagttgttacct

SEQ ID NO: 288864 - DNA, 822 bp, Cannabis indica
aaatatcctccagccatagcccagacaagggaaaaaacattcccaagtagggaacttcccaaggcgaggatgaagatgtggatcctcgacttgggtacgcaagcagcaatgttggacctgtggaagaattagaatagatcgagatcgaatcaacaatcccgaccagaaagctaaaacttggaaaaggtttgttgctcgaagtaaaatcagagtagataaaatttttgagagcaaacctagatgttttgcctggtcacatgcggatatgttcggaatcgatccttctattatttcacatgttctgaatatcgatcccaacttccgaccaattcaacaaaaacaaaggctgttggacaaagaacgagcagtagccctgaaagatgaagttgaaaagctacgcaacaacaacctcataattgaagctttttacccggcttgggtcgcgaatcccgtactggtgcccaagctgaataagaaatggcgagtctgtattgatttcacagacctcaacagagcagggcacgaaatattaagcttcatggacgcttactcaggctacaatcaaatcaaaatgcatccaccggaccaagaacatacaagtttccgaagagatatgggtctctattgctacaaagtcatgcaatttggtctaaaaaatgttggagctacgtaccaaagattggtaaacaaaatgtttaaagatcagatcgggcgaaatatggaagtgtacgtggattacatgctcgtcaaatccagaaaggctgggggcacatagatgacctggacgaatgcttcaaagtcatcaaaaaatacaacatgaaa

SEQ ID NO: 288865 - DNA, 529 bp, Cannabis indica
ttatttatgctgttattattgaattatgaaatgcattttatgtcatatagtgattttcataatcttgcatttccggtgcccagtaacatggaactcggtgtttggctcaataaaatcacaacttagtatgttagtattgtgagacggcttattagatattgggaatgtcgggattggccggaaatttagaatttcccaaaaataccctttagtgccctttatgttattctatgtgaggaggggcaaaatggtcattttgcccccatttatgttttatccattagtggacttactaagtggaaaatggatgttatgttatgttttattggctgatgtgagtaattaaaactctttattttcattttacaaagtttcttggaatttttggaagaatttaatggtttgcatgcttagtttaggttgatgttgttgttgtgattttgttgttgtttctgaggtttaaagcatgttattttgagtagattagagctagttgatgcatgttagttgctttgtttcaagcttggaa

SEQ ID NO: 288866 - DNA, 89 bp, Cannabis indica
aaggtatgaaaaatatgaagagagaaagagaagagtggttcgaaaatagaaggagtgaaggctcaggaaacttttactgaaggcttgaa

SEQ ID NO: 288867 - DNA, 613 bp, Cannabis indica
ttgaaatagtcttgtaaagactcaccaggttcttgtttgatgttggccaaagtcgtataaggtggcctatacgtcattgtggcctggaaatgcgtgaggaataggtcgacgaaggtttcccacgtcgatattgatgcctcgggtaattgggtgaaccaatcatgggcattttcctcgagtgttgccgcaagaatgcggcactttgcgagctgtggtacctggtctacttccattatagtattaaatttttctaaatagtctatcgggttagaagtacctttatatttgagggattcggatagacgaaacccttttggaagttgagcctgtcgcacctctgtagtaaaaggcgaggtgccatgcagcttatatataggcttacgttgctgctcgagcattttcaaagcctgcagaagcatgctttggtcaattcctcctgtcgcaggagctggagtcgctgcaactgcggggctcgcaactactgcggcaaggtttgctgggacattaatcccagtggtcgcgatcggcgcgataggcgggttattatcagcgttggcaccctgatcgcccgcatggggatcacggagtgcctcggtattatgtgggccgcgag

SEQ ID NO: 288868 - DNA, 593 bp, Cannabis indica
aacacagcaacaacagccaccccaaaactagcatgcaacctaccatttctctttaaaaactttcaagaaacataagagaaagatgaagaaactttaccaacaatttgagatcactaaatctggtcaaaatgagcttgaatcaccaagaaaaactccacttccttgctgctcaaggagggccgaaaagagagagagcttgagagaaaaagttttgcttttctttctaaatttttctaacttttgaaacttagtaattttgtaaaataaaataaggggttttacttaatcatttcagccaacaaatacaaaataaaacacttaattcaatcaaataaggcccactaaaagacaaaatatcattggggcaaaaagaccattttgcccctccacactaaaataacataattaacactaaaggggtatttttgggaaattctaaattcccggccattcccgacattcccaatgtctaataaaccgtcccaaactactaacatactaagttgtgatttttactgagccaaacaccgagttccaaaataccgggcaccggaatgcaaaattatgaaaactactacatgacataaaaatgc

SEQ ID NO: 288869 - DNA, 539 bp, Cannabis indica
tcgatgcatgttcgccaccgtttggctttggcaccaacacggggttcgcaacccatacagggtagaaggcttcacgaataaaattgttggctaaaagtttgcttacttcctccttcaaggccacagctctaacctcatcaagtaatctcctcttttgtcgtttggcgggcacgtctttgtttagattcagcacgtgggtcatgacatttggacttatacctaccatatcagaatgtgcccaagcaaatacttcttggttgtcacggaggaactgaataacagccttcttaatctccttacttaggtgcttccccacttttacagttttggttggctcctttaagttaagagcaacttcttcaagttcctcaatgggacccaagtcaacacggtcatcgcccaaacgagggtctatctcttctatatcagaaatttctcttgctcctctgttttccacttcattatcgttgtttaccaccaacatctgggcccctggtcgggtttgtcccctcatagccacattgtagcattcacgtgca

SEQ ID NO: 288870 - DNA, 694 bp, Cannabis indica
acccacttttgagatcaatttttgaaaacacacaagaaccatgcaattcatctagcatgtcatctaaacgaggaatgggatgtcgatactttaccgttatattgttgatggctcgacagtcaacacacatcctccatgttccatccttctttggaactagaatcactggaacagcgcaaggactcatgctttctctcacatgtcctttctccatcaattcttcaatttgcctttgcaattcctttgtttcatcaagattgcttctgtaggctggtcggtttgggatggaagcacctggaacaaaatcaatttgatgttctattcctctaataggaggtaacccatgtggtacctgctcaggaaatacatcatcgaattcctgcaaaagagacacaatggtacttggcagcgaagaatcaagttggttagcatttaaaagagcctccttatacactagtaaaatcatgggctgttttgttgcacaatgctctcttaatctcacttttgtttgtcataaaagtagttgttttctctcacttgattccacacttttctctctttttctctcattctgtttcctctcactcatctttccactctcttttgtctcactcagtttctttttgttcactcaattttgtcaacctcgcttgatcttcatcactgtttgtgtcaaaggcgctagatgattgcc

SEQ ID NO: 288871 - DNA, 825 bp, Cannabis indica
acccagcaacgtttcaacaagtattgtttccatgagaattgataactcagggtcttctggtttgaagagaaaggacggttctaaggaaccatcaaaggattaaaagaaacaaaagccagtgtatactatttataccgagcttaatgaaactcgagagaatatttaccttgcacatgagcaaaaggttgccttcggcaagcccgagcccatgaggaatgcgaggagtaaaagagatcctaacaggtattgtaaattccataaggatattgggcatacgaacgatgaatgttgccaattcaaagatgagatagaaagtttcatcgctcgaggccactttaaacagtacgtgaaaaaatagggccacagatacaaccagcccagtctgcccaataacccaaacaatcaggggttacaacctcttcctgttgaaggagaggacatcctggttatttcaagagggccacatatcacaggggaaagcaataaagaacggtcagttggcatttgccccaaaacaatccaagaaagtgaaaaccgaagaaccaccaattatattcacggaggaagacgagaaaaatgtgagatatcctcacgtcgatccattggtgattaccattcaactcgccaataaaaggatcaagaaagtgttaatagaaaacgggagcttagtaaatatcctttacaaggaaatgctgagaaagatggagctcgaaaaaagccaaattgaggccttgtatggtgaatctttgcggattcactagggacagtcattcccagtctaggcataattgagctcgcattgaccttgggcaaggcatccctatc

SEQ ID NO: 288872 - DNA, 703 bp, Cannabis indica
aaaatgtgtacttaaaattcaaaagaaaaaataaataatagtttgtgtttttgctgcaaaatatgttagacaaaaagtaacaaagtaatgtgatgaattaatatgcacatcaattgtggtttcccctttttcttgtaagaaagaagttgacaaaatcaaaaggggctaattaattttaaggaatttggtagtttggtccttttttttagaaaaggaaattggtagttggtccttttttatttttttaattgaactattatgatttttttaataatacaaataaaagatgtaaacattatactttatttggtaaaaaaataattatttaatatatttacattaatttttgatattatacataaatacacaattgtaaaacctatgcaaaattcaatgtttattaatatgtttaaaagaatataaaaaaaataactttatcattaactttaaaatataaaataaatatatataaataattcataatttaatgttaactttaaatatactaataaattaataaaaataaataaaaaatattgtatttatagtaatacaaattttgcattatagtaaatgttgtgttaaatttgacacacaacttattgtgtcccaattttgcatcattttttaacacactattagaccatctctaagtagagatataaaaattgaactatatttgacacaaaaagtaattttgtga

SEQ ID NO: 288873 - DNA, 453 bp, Cannabis indica
tcagggccggccctgattaatagtaatatgacaatcaaaaagcattaattactaataatagttttagtaatttatatataattactagtcgttaagcatattttattctctaaattccaccattaaaatgtattggaacattagttttcctagaaccgcaataataaaataattaaactgattgcgtaattgcttagttaattcataaacatattgttacgatttcgttatcagacgaaaaattagaagaaaaggttaaattaataaatgttgatgtacgaaataaagtctttagggctcgtttggaatgccgtattaggtcgtattgtattgtattgtattatattgaattggattatatattatatttttatataatactaagttatactaaaatattatatacttaggtgtccataaaagttaataccacatatagttttacataaaaat

SEQ ID NO: 288874 - DNA, 850 bp, Cannabis indica
agtatacataacgacggtttaaaagtggcggtattctcaaatataggtatcaattttaaacattcacttaattttattagcgacaatctttgagaaaaaaaaacaaaattttttatctatcatattatttattgtagtagtgaattctcatagtcctctaagaatgagtgcaatagtgtaattacatatactatttttagataattataatagtaattttggatataattaccaaacatgaaaataaaaattcatatgcaattattacaattatatagttacttaaacgcacctaaattctttataaaatagttttgtgaattattaaacttttaaattttctaacaaagtactttcttgatagaaaatagttgtccaaataaataccaaggcacatcgttacaattttactacatcatttaaaaataacaacaaaacaataaaattacaatatatatatatatataacaagaaaatatcaatagtctgtattttttgtataaaaagtcttataaactgtaaaaatatttaaaatttacgtacaatcttgtaatatatatatatatttttactatttttgtagtatttataaaaattttaccttttattagaagtctaaaattaatttgtaagttattagaatgtttctacagagaaattaccccactatactatttttttaacttttgtagtttcgaaagttgttgcagcgctagttgcaataggcatttcttgtacgattttttgtttgcaatttatgttgcagcgccagttgcaatcggagttttcatgtagaattccgtaaaaatgcacaaaaaaaactattttgaagtgtaaaaataaaaaaaaa

SEQ ID NO: 288875 - DNA, 550 bp, Cannabis indica
tcaccaagatctgagcccgaatgtccttctcttgattctgtattcttcacagccttacacactatgattgagataccacttgatgtgtgtgggcactcactctatcagtcaaggtatgaaaatattatgaagaaggaagagaggggctggttcgaaaatagaaggaaggatggctcaggaaatttttttctgaatgcaagaaatttcatcatcgtttagtgtgagccatcactatttatttatagctaaccactaggtttaggttaggatttattaggcattaaaataagggaaatattaagtggaaaaaccatttcaagtggtcggccatggttagtgggccccacttgggcattttcctaattttgacaatttttccttattttctcaaaaatgccattttttcaattctaatcaattaaatgccaaaactaattatttaataattaaaactaattatcaaacaaaatttccatttaatatatttattaattagacttaataaagtctcttgattattaaataagacttagaatctcttttcttcaca

SEQ ID NO: 288876 - DNA, 501 bp, Cannabis indica
agcagcatccgtgggcgtgttttgagccccatccgcccggttgcatgcccctggacagtatgcaataacttccgattttttgtgtagttttgtatttagatatttactattcctattttaattctaattatcagaattaaattaattgaattttttaaaattaatttttgatattagtgtaatttgatcttgagaatagctaaatatctatcttttttgcttaattttatatcttatttttaaatttgattattttatcttatttttaaatttaaggtgagatattaatttttttaaaaaaattattctattttttaaattatttgaccttatttcaatttaaaataagattactataatcatgatattttgaatagatataagatattttgttattttttaaattttgttatttttttatttaaattaaattataaaatcagaaaaggatatttattatcatttttttattttattgaatatttaatttataaataacat

SEQ ID NO: 288877 - DNA, 727 bp, Cannabis indica
ccaggaccctagttcaagagtaggtccgtgactaggacccggacccagacctagaatcaaacactaacctagccttagacccaaactgagaacggaactcgggcctggacacggtcgtgtacccagaccggaacttagacgcggacctggacctaaatctgcaacccgatcccaaacacagacttaagataaggatccggatatgaaccaagactcggacccagacaaagactgggatcgaaatgcttgacctagatctggaccgagatcctgacccagacaaaaactttgacccccactcaggaaacgaacttggacctagacccgaacctagacccagatcagggtccagacctggacacaaacccggacacagactcggacccaaagtcaaacacccacacctagaatcatacccgaagttagactaggacccagacccaaactgaaacccagacaaggatcaggatcaaggagttaaacccagaattgaatccagacaaagatcgggattagaactcgggacttggacccaacctataccaagacccaagacgcgaacccacacccagagccttacctggacctagacttaaatctggacccgaaccgaaactcagactaggactcaaactcgtgaccggaacaaaaacccacactcgaactccgaactaggactaagaccaggacaaggacctaaacccaaacccgaacccagatcaaaacc

SEQ ID NO: 288878 - DNA, 577 bp, Cannabis indica
ttttttccctttgttcttcttgaatggcttgcgtttcttaggttgagtggtcaggtgaacactttctccttgctcctgtaggagcctggcttcctcttgaacacacatggtcatcaattcattgatagtccatttttctttatgtgtgttgtaggaaattttgaaaggcccatactgtggaggaagattgtgaaggatgtaatgaaccaggaaggtatcaggaatgataacgtcgagtttcttcaaatgagcagtgatgtccctcattttagaaatatgttctcgaactcctttaacaccggtgagttttgtggacgagaactcttggatgaggttgatgaacaaggatttatctgaagtgtcaaactgctcatccataactttgataaagtctttcaccttctcaggtggctccaccgatccacgcattcccataggaattctggacataatgaacatgatgcagagacgattagattgctcccacttttcacgcagtgcaatctcagcagcagtgctagtatcagtgatagcagctggttcatctttccttattgcataatccatgtcagtgcaa

SEQ ID NO: 288879 - DNA, 862 bp, Cannabis indica
catgtcgtattcggccctcaagatgtcaagatctacaaagatcttgaaatctctggaacaccgatgatgaaaggacgccgcttagagtctgtctatgtaatgttagcagagtctgcttatgtagacaagactcggaagaatgaaacaatagatttgtggcatgcaaggctaggacatgtcagttatcataaattcaaggtgatgatgaagaagtttatgcttaagggtcttcctcaactcgaggtcagaacagagaccgtatgtgctagttgccaatacggtaaggcgcatcaattaccgtactaagattcaaagttcaaagctaaagcaccattagagctggtccattctgacgtgtttgggcgagtcaaacaaccatcaatcagcggcatgcagtacatggttacattcatcgacaacttctcaaggtacgtatgggttttctttatgaaagaaaaatccgaaactttttcaaaatttaaagagtttaaagaaatagtagaaggagaagtcggcaagaaaatccaatgcctccgaacagacaacggtggcgaatatacctctaatgaattttccgagtatcttcgagaataccacatacgccatcaattcacatgtgcaaatacgccacaacagaatggagtagctgagaggaagaatctattggattttgtgccctaaatgaaacccatcacaatctgattagttatcaatttataattttgaagtgatttatgtttacatgtattttacatgtttatggtttaatatacatatttaatatatgcacaaaatcagttaaatccagaacatatattcattcacaattacagtattgtcaatacagtggaatgtgattgtg

SEQ ID NO: 288880 - DNA, 570 bp, Cannabis indica
tctgagcttcgatctcggcttcatgatcgatagctttttgtctgaggagcaccagctctgagtaacttcctccgtcgtaggcatactcgtcgaggttttcctcgtagttctcgtcggggactatttcttcttcttcttcctcggactcctctgccgctcttgaggccacatcttcctcatttggatcttgagcatcttccagagggcgaggatgacgtgtacttcttgtctcggactcaagggaaaatgtctatggctgagtatactctggagtttgaccggttatcaaaatttgctggtgatctggtgcctaccgattttaccaaaaacagaagtatgttcgaggactgaatgctacaatcagtcgagacttgaaaattaccacatcccatgacactctgtataagagagtggtagacttggccttaattgctgaggaggccgagcagcaagtgatgaaagagcaggctgcaaaggatgccgccatggcatcaaaccctcctgctggtggtaatgtcagtaaggggatcgacagtagcaaccctgagcacaagcggaaggctgaggctt

SEQ ID NO: 288881 - DNA, 764 bp, Cannabis indica
agtagtgggtacgattttactgaacccagccctccgccatttagtccaatagctcgagtttatttgccaaaattggactcgggcgtaatcattattatgtgatttagcttagaacctaattattagtgactagtgatatgattaagtttatgttttgctatctgcctaaatatgtgcatgtgcattttaattaagttttgtttttatttatgtgactacctgacacacatttccttactgagtttagtagctcacccttatcaaattaccatgtgcagaccaaggtaactgaaagtttagaaagccggtggcgagtggaactttggacgcttgtgtgtgtgaactcgctgagggccatataactgcgggcggtctagggcgctctgtttatttatttatgttattaaacttatgtcgcaattattttagttattaattattatgttttttttttacgaaaactggccagttgtgaacattttcaagtattaaataaaaatgcgacattacgattttccgcgtttaacgcttgtaaataaaattaatatttttataaaagtacgggcgttacagtttggtatcagagccacagttatatcggtcccgaacgttctcacgagttacacacatcagccaaaaagtttctgcttgccaccaagtaagtccattatatatgcttgcattttatgtgtattttttttttgtaatttctaaattggcattttacttaaaaaaaaaaaaaaaccttagtaccaatatccaag

SEQ ID NO: 288882 - DNA, 619 bp, Cannabis indica
atgtatatttaaattaaaattttttttttcatattcacttcaaaggtatccctaaatttgtattttttttgtttttaaagaaggagtacatcctacagatgtcaactcattattggaaattagtattccaatacaaactaataacaattatttaaaatcgttctttagggtttttaaggatttgttatttacttaagtgttgaaattattattttattataaaaccgtacttgggtgagttttaaatatatatgtcacatcatacgtacgtcgaagtctgtacacagtacgtctcacatcaccattttgttgggttaatccaaatgcctttttccaatgcattcacaaagtcatcttcattgataggttgtacagtctagtcaaatcaggttttaaatgtaaatatttaatattaatttgaccaagacggattcataacatcttcattgtaatggtagttggttgttcacttttattatttgaaaattgtaatgttgaatactttattgtaatcaagaagtgagaaattgtaatgtggttcctacaaattaattagcatatataaaagatttctttattctaataacgtatttctacgtatgtctttccaaccctaaaa

SEQ ID NO: 288883 - DNA, 709 bp, Cannabis indica
caacggataaatgtgtcccattcttcaacatcctgcgaggaaacaaaaatttcgaatggagcatgccgtgagtgtcgtactaatcagagaagaagacggcgtgcagcatccagtctattacatcagtaaaagaatcatcgaggttgagggccgatatccgttgatagaaaagctcacctactgcctcattctagcaacaagaaagctgagaccttactgtcaggctcatcctgttcaggtgtacaccgaccaaccactacgacaaatactgcaaaagccagatgcctctggacggttactcaagtgggcggtagaattggggcagtacgaaatcaacttccaaccccgaacggctatcaaaggctaagccttggccgactttgtggtggaatgcacaggcaaaattgaaagcataccagaaagcgatcttgagccaataccacagccgagtaatactgaaaacaaaccgacctggaagctacatgtggatgggtcggcaacagatcaattatccagtgcaggaatggcccttgtcacacctaggggcaacacctgcatgcagcagtcaaattcggattcaaagcctctaacaacgaggctgaatatgaagccctaattgttggactcaaactagcgaaggagatgaaggtcgagcgcattgagatctgcagtgattcacagctattgttaaatcatgtatctggcgaat

SEQ ID NO: 288884 - DNA, 535 bp, Cannabis indica
cccaatatgaaggggcttcccagggatcgcctggcttctcctctcgaccgggctccccacacgaagtggcctcccggaagctgcctgagccttagagtaggctttctcctaagccttccggtagagatagtcctggtacttcttctcggcagtggcgatgatctcgtcccggaaggtcttctccacggcaggcaccctcaaattgtgacagataacccgagaaaggttagggtcctccacggattggtgcggcaggatgagttttgccttcctgtagttctccgtcgtaaccaggcccccgacgtcgaggtctgcccggtcataagaggcgaaggcctgggctctccgaagaaagacctgagtaggtgcggtccgctcgtaagggggaatcctaacccactcagtgaggagctccggatggtccactgcccggaacccggaagagaagaaaaaatgatggcgatactccttaacatgagtttgcctattatacgggaccaccccatcattgccagggtgggcccggaacccataa

SEQ ID NO: 288885 - DNA, 554 bp, Cannabis indica
tgttcaagtttggagttttggctcaaaaactatgatttttaaagtgaaatgaggaattagttgctgtagtggttgtttgtgcgtgggtttgatttctgcagttatattatgcttgcttgagtagattaaatcaagttttgatgcatgtttattagatttaaccaagtttgagttttgaactcaaagcttggagctttaatggtggattttgattttatgcatgaagctttgttttgttgctttagaaatgtttattaaggtctatttagcaggtctgaaaagtttggttgagtttggaaacattttgattaggggtttgatttttgtgggatttctgggtaaaaccggctaaccaattttacactgcctgtaaaaccggttacctggattttgcagcagggatgaaaattggttttttctcagcttgtcggttcgtgctagtttcaggttttcaggtagtttcttccctgctagtttggagtatttttgtattaagttacagtaggttaagtttagtttaaaaacctttgtcccggttgtgatttagtgagtca

SEQ ID NO: 288886 - DNA, 257 bp, Cannabis indica
aaaaatgccactttttcaattctaaccatttaaatgccaaaactaattattcaataattaaaattaattatcaaataaaattgccatttaatatatttattaattagacttaataaagtctcttgattaataaataagacctagaatctcttttcttcacaattaagcccttgcttagtgaaaattcataaactagactctaattttagaagtataattgattaattaaaatcaattatcggagtcttacaagcagt

SEQ ID NO: 288887 - DNA, 539 bp, Cannabis indica
tgtaccccatcaccaagagaaaaactacggagagaaaggttttgatgcaaattggaagatcataccaattaaaggtcattacaaaatcgattctatggactccggtacgcttccgctaatctatattctattgtttaattctcatgaattaattagggctatattcagagtttccagtattctaacaatgtatagtcacccttcatttgagcatattctagattcaactttgctaaggtaaccagtaaccacatcatttacactaggaatttttttattatatacaaattcatttcaaggtcaccaaataatccaacaaatcacctctaccataacttgttgttctttacccacctaagctcccacctattagaaaccaaacataaaaatcaccccaatatcatctatcaaaccaacatccatattagcgctggccaaagattgggcatcaaacaaacagagaattagtgcatgtttggcaatgttttctgtttttgtttttaaaattttgttcttaaaacagaaaataaaaacagttt

SEQ ID NO: 288888 - DNA, 574 bp, Cannabis indica
atgtttgattatatagtttattctgtattgaaaaaaaaataaaaggttgttccaacaaacagaaattagtaggtttattgacatatataatggtaggttatatgaaatgaaatgaattgtttgttccaatatacgaaaagaaaaataaaaatttatttcaatatgccaaaataaactaataaatttattagcatatacgatgataggctatacgaaaatgctactatacaaacaaaagaataaaaatttatttcaatatgccaaaataaactaataaatttatttggcatatatgagtataggcatatatgccaaataaacttatgagcaagatatttaatcatatttgagaaatcatatattgttatctaagtttactagtaagatatgttacagtcatgtactttgtatacaaccagatttgatgtatcgacttaaaaaaatagattaattagtttgttattttataggcacccattgtgtttgaattaaaaatgaattattgttccaatatacgaaaaatagactaataggtttattggcgtatatcgctatgtttgattacatagtttac

SEQ ID NO: 288889 - DNA, 672 bp, Cannabis indica
atttttgaaaaataaatgaaatgaagtaaataatggactaacttgaattaatatcagctaataatcaaaaaaatcagatttaaaacccaatattaaatccataaaaagggtactaagggtattttgggaaattctaaattcctgaccaatcccgacattcccaatgtctaaccaaatcgcccggctatactaaaatactaaattgtgattctactgagccatacaccgcgttccatgttgctgggcacagaaaatgcaaacttatgaaatttcactatatgacactgaattcaaataaatcaacttaaataattatttaaatatcaataaataattttcataactaaaaactgattatatgctaatttccaaattttaaactaagcggtctttacaactatccccccttaaaaggatttcgtcctcgaaatctaacctgaataactccggattctgggctctcatatctgattctaactcccaggtggcttcctccaccttgctgtttctccaaagtactttcaccaaggctatggtcttattccgaaggactttatcctttctatcaaggatctgtactagctgttcttcgtatgacatgtctggctgcagctcaaggtcctcataactaagtatatgagtagggtctaaaacgtattttctcaacataga

SEQ ID NO: 288890 - DNA, 680 bp, Cannabis indica
acccagtctgggtctttgtccgagtccaggttcgtatcgggatccctatctaggttcaagtctgtgtttgggatcgggtccaagatttaggtccaagtccgcgtctcagttccggtctgggtacacgaccgcgtccgggcccgagttccagtcgcagtttgggtctgaggctacgtctgtgttcggttctaagtttgggtccgggtccttgtcacggtcctagtcttgttctggggtcctggttcggcgattcttatttaggttcaaatttttgctccaaggtctaggtctagggtcgggtttggttcttcgtctgggttctagtcctagtctgagtcctagatctagacaccgactactggtctgttccaggccccgttatccgaatcctgagtcaagatctggatcactgtcacgggtctcgttccggttctggttcaggtcccaggtctactttccgagtttgtgttcgggatcgagactggggtgcggttctatgtccagaccctggttctgggtccatagtctggtgccatgtttgggtctgagttcaggttcgggttcgtgtcctgattccaggtttgggtgggcatccgggtccggctcccaattcgggtctaggtccgatttggagtccgggtcctggtccggtgacgattctggatctacgtccaatttca

SEQ ID NO: 288891 - DNA, 617 bp, Cannabis indica
tagtccaaatttagtacaactcctaaataggaaatggttgaaactgtattaaaataagtattttacgaataaatatgtacgaaattatagtttacatttgacaaaaacttctaattatctcattaaattcaaatattgagtaaacataattgcaccatactgtatttacggtgtcaagtactgtgcacatatattgatgtacgttattttcaaacttgaacttattgagatatgggagatccagcttctgccgtacattgaaatacgtcccaaatatatttgctaattaatttgtgggaaccacattacaatttttcacatcttgattacaataaagtattaaacattacaaatttccaatattaaaagtgaacacccaactaccattaccatgaagatgttatgaatccgtgttggtaaaattaatattaaatattttcatttaaaacctgatttgactagactgtacaacctatcaatcaagatgactttgtcaatgcattggaaaaaggcatttggaaaatccaaccaaatggtgatgtgagttcaaatttcaaatgaaataatatttaaaaataataattaataatttcgaaggtattactaattacttgata

SEQ ID NO: 288892 - DNA, 777 bp, Cannabis indica
tggtacaggagctcgctgaacctgggacaatcgatatcccggacagcgagtccacagtgtcagcacgcgactacctcatacatacgaggcatgctcccgacatcgaggtcgaggagatggaggaggaatggacgactccagtccgcgagtcaggtggggaagaggaggaagcggaagggagtgggacagattcggtcgacgactcccaattgaacgagcccttcgcgtgcgaggatttagtctcgagggttgccaaatcggacttcaccacctttgtgaggttgaatttgctgcgacttgcgtttcaacgtcctaaaccatctcagagagcgcaccttccattcaccaaccctgcgatcatccctacagaggatgtggtaatctcaatacccatccttcgatgtggtgtatcggtcccctttcatcccttcgtcgcagccattctcaggcgatatgacgtatcgccatttcagttaactcccaacagttatcgtactgtcctggctttctatgcgatgtacatggagtacgttcatagggctccctcagtaggagaattcagttatttctacgacataaagagcgtaggtctccataacggcttctactgctttagcaaatgggcgacttctgaaataaacggtgttgagggaatggtgtcgaacatgggtgattggaagtcgaagtggttttacgtctttaaggttcctgggattaggaccgactttaatcgcagacccagtatgtcgcgtattttttgacttagacattttttgc

SEQ ID NO: 288893 - DNA, 624 bp, Cannabis indica
ttttactcatactatccttttccagcttgctgccgaggccggccgcctttccaagaaccttattaaccatggcttcgtcctgtccgactttgggggcatggacgaagtcatgaagatccttcaggatttgactgctgaaaggcggatttaccaggaggatgccgagcgccgggaggcccttgccaaggccagtgaggaagaggccaggcggagggaggcacaagcggaggcgatgatccgggaggaggcccttcggagggataggctggaggccaagcaccaggaggagctgagggcggagggcgaggctgctgccaaggccaagcgtgagcttcgggaggctagggaagccttggatgaaatggctgccaaggtgaagtccttagaggaagttcaccaggcagacttggagtctagggccaacctggccgtggagctgaaggagctcaaggacttcaaagaccaagccttgaagaaggctaagaaagatgagctcctttctcccacctcctgcagccggtgcgtcaagcgtttcgacgatggcgtctacatggcctggtctacaaatgaccagaatatcaagcttaacttctatcccaaacccgcggagatgattgcaaaatt

SEQ ID NO: 288894 - DNA, 637 bp, Cannabis indica
ataaataaaaaattatttataaatattaattgctaaaagaggtctttttaaatacttaattaattatttaagaaaatagttaattataattaattaattctaaaaaatgaatgtttacctattagtaacctgctactacaggtaaaataaaaatgtaatcatgaaaataaccattgaatagtcacccattattattattattattacacttcagcatatattatttaatttttttttaactttacatatatattatttagggaaattttaaaaaatatggttttttttattattttatttataattttacagttttaaaatttttaattgcaaacgtattcttataaaattttaaaattacaaaaatatactttgctcaacaaaatattaaaaaataactaaaaaacaaccttaaattaaaaattctcttaatataaaataaatattctataaatatagggacacaattttgtcccgtgatgtacttttacggaatgtattccgtggtacattagatgggtctcggagtacattaaatgagtgtcagggtacgtttctactttttaactctaattaccccggcttagatcaatctcagccgtcagatcaaataagtctttcatttgacggctaccgt

SEQ ID NO: 288895 - DNA, 119 bp, Cannabis indica
gttagtaagcctacgttttgggtcagggtgatttagatttggcatttaagtggttaaattagaaaaatagtattttgagaaaataagatgaaaaattagaaaaatggacaaaatgcaaa

SEQ ID NO: 288896 - DNA, 601 bp, Cannabis indica
taaaaaccagctactaggagtaaaaatcaactcaaaagaaccctaaaattcgaaccctaaacctacctaaacctaacagccactatatcacaaattcattaattcaaactaacataaaacttgaaaattcacatattcaaggattctagggtttaccttagttaaatcctccttgattccttgctaaatcccagaaaaacaagatgaaaattctggtttaggtccttggtttgtcccagccgaaagcaagagagagagttcaagagataatccaattttccaattttttcttctttatctcttaatttctcaaagggtttttaattaaatcatgctgaaaagaaatgtgctaggtgtcacacactcatggcagccacctaatcacttctttaaaatgactaaaatgccctttagacttaaaactagggccttcttaaacctaggggtaaaatggtcaatttccataaccccgctcaatcccgataatctattttctctaaaatatatcccactatgaaatagggttctaaacttacccatgtgattaatctagccatccatcgcattttccgttgtcgccgagcaaaaattacaaaattaa

SEQ ID NO: 288897 - DNA, 507 bp, Cannabis indica
cgggttaacccgactaaaccgaccaattcattgggcgagttgaaactttttttttcttaattcggcgggttgcacgtagattattgtaacccgatctttacattgggttaaataaaatataacgtaaaccgaccaaaccgaccgacatacacccctattgattacgtcccacataaaataaatgcagttattatttaaaaattatacagctgtgatttatccgcttttaccgggtcaattctgacgtgcttcaaagtgtatcccaaagagcacctcgctgagatagtaacaataaccctgacagcgagctagagcttttcccatgtctttccgaggttgataatgtaaataccgtcatttacgctattgaagacataacgctccatctgacaatcataattcttggtgacaaggtgaagttcagcagtcaacatcatttgaatgttagcttctatctgagagagctgactcgacagagcagtggatctcactaaaagatgtctgaag

SEQ ID NO: 288898 - DNA, 752 bp, Cannabis indica
caatatatgcattatcaaatacgctacctaattaaaaaaaataaaatttaaaaatacgtatatatatataatcacattcaaatgacacactaatgtagcaatagctaaaaaaaaattaaagatcaaaatctcaaaccctatttcaaaatttttttaaaaatacattacttaattaaaaaattaaatatatatgtattgcacttaacatcatttaattaaatctaattaaaaagaaaatcaattatacttccattgtgcttaacatcaacctagtatatatatatatatattctatataaaatatagcacggaattgttggtttaataatattttcggatttgtacgttaactttaacagaatatcatattacttaatagaatattctttattaattttataatgttattatatatgttgactgaatttttagccaacagacgcggagtcgtaataaatgagatttaaaccaagatcacaataacaaatgcagttaataacaccagaattcacaataaatgtaaataaaacacaccgtaatttaaagagcttatttttctaagtattttcaattgtggatccccctcccaggtcatgggtgaccccttatataggggaggggtcggtgcttctcgcttcaggagacgcgaccaacgcggagctatctcaaccgtctccttgattttcggaggcggttggagtctgattttttaggattaatatcctgctatttttcatgggttgacaactatc

SEQ ID NO: 288899 - DNA, 636 bp, Cannabis indica
tctaagcttcatgaaccttttttccaacttcaagaaaattttttgacttcttgagttctgactttttctttaaacatagccattcattaatctgttgagtactcctggtcggcatatttgcttgtttatcgttcgatattctgactaacactcatcttgtgtgttgtcttttgtagatgaactcaggtgagtcttgggaacttggacatcggatcaaccatgatttgcttcaacttctgcacgaagatcaccctagtcctccttctagtgaaggacattcttctgaacctgtacccagccataggatgatggctcgtacaaaggaaactacgcgtctggctgacgtcactgatcctacggtggctcagcttgccactctgcccagcaccgaataggattcggccgttatgagggaggaggatcgtcatggggacgctgaggtacaggatgtcgaggagctagacgatgtgtgtcccggcagtccctccgaggcagagggagaggaagaggttgaacccccaaactacgggggttacaatgaggctggggagccagtcgatgctgacggagacgtcctggtcgagggtatggattacgtcagtgaggagcttgttggaatttattttaccaggatct

SEQ ID NO: 288900 - DNA, 766 bp, Cannabis indica
ttcttccatatccagaacataaagtcagctggaaagatgaacttgtcaactttaactaacacatcctcaatgactcctctaggatgagctagtgatcgatccgccaattggagagttactgtggttggctttgcttctcccaactgcaatcttttaaacactgacagaggcatcaagttaatgctggctcccaagtcacatagtgcatttattccttcaattctcccaatagtacaaggaatagtgaaactccctggatctctgagtttgggagggagtttcttctgtagaatggcgctgcactcttcagttagggccactgtctcataatcctccatctttctcttctttgacagaatctccttcatgaacttcacataacttggcatctgctctaaagcttcagcaaagggaatgttaatgtgtagtcttttgaaaacctctagaaatttggtgaactgcttgtctagacttgtctttctgagtctctgaggatagggtattttcacatgatgatcaatactgattggtggagactgttgtggttgtgctgggctatcagtagccttctctactgttggtgttggggttggcactggttgaactttaatctccttatctacatcagctggttgtgtcaattcaggcccatcatatttcttaccgctcctcagggtaattgccttgcagttttctttgggattgacttcagttgtgctaggcaaatttccttgaggacgggttgctacctgagttgctagttggc

SEQ ID NO: 288901 - DNA, 547 bp, Cannabis indica
gaatttgacatgttgctggagtctgtgaaagtaacaatcaagaatgtggcacaactcatggagaagatcaacaacaacatcgacatcgcagaaatgatccgtattgaagattacttgacacctcaaaatcttagatgtattaaaaagttgtacagcgagcttggagttgatgatattgtggatgcaatgaggaagaaccctcttggtacgtcgccttttatattaagagaattggaacaagaatatgaaaagttggcgagacgtcgttgtgataagaataaagattgggcagatgtgtacaaaaagaactatcgcaagtcacttggcagaccactcaacagaaactgtcaaaacattaaaaactcatcttaattaattaataaaagtagcttgttctgaaattaatttattatgtatgtagcatactgttcaatatttggtttaataaataaagtattttatcttttattctgttttttttattaacattggtcttaatgaaaatgagaataatgaggtcattgattaatgagtttgttatatcata

SEQ ID NO: 288902 - DNA, 875 bp, Cannabis indica
gtggcaaccgaaagtgacgtgacctcgttgagtttgacctaattttaaaggccaaggactataggttttccctgactttgctggagaatgagctgaaggaaagcagcgagagcgattacctgtttctcattaagtttctgcttgtttgtattggaactgtgttgctgcccaagaatggtaccgaggtcagcactagctacatgcactctttagttgatacaaggtcaattaagaagaagaattgggcgactgctgggtttcgatatcttatgagctctctacagcggtacaagactaagaacacgaaaaatgtctccggttgcaccatatttttacaggtaagttttcgaattattgtgatggtagtaattttattctctcgtgtactgcggtgctaatagatgtatgtatttttgtttggtggcagctggtatatttgacgcatgttgactggactgctagtcacgtggaccgcactgtggctccaattgacttttggaccacaaaacagtgcaaatcagtgtacaagtggattcgagaccacggtggtcacacaagtggaaaggtacatttagtacttcaattttctgatgcgttagaattttatttgggagatatgctaactagtttttttggtgtactaagcaggtgaaattgactaacacatatgtgttactaccaagttttgaatccgctgcagttgggcaacccacaaatgacgcaatatacaaagttgtgtgtgagttgaaagatgaggtcttccggcttgatttgaaggtgaacagcgcaaaagagctgttactgaaggtactctcaacttaccttgggaaggggactatgaatgaagtgttggagatacctgagacgagcaaagt

SEQ ID NO: 288903 - DNA, 741 bp, Cannabis indica
tcctctcggatcctcaactgatgacagcccaatcggagatcaatctttgaaaagaccgtcttttgctaaaattgatcaaaaagatcatcgatcctaggtaaaggatacttgttcttgattgttagtttattcaattcccggtaggcaatgcacatacgcaaggatccatctttcttcttgacaaaaagtacaagagctccccagggtgacacactaggccgtgaaaaccctatgtcaagaaaccgttgaagttgaattttcagttccttaagttctgctagagccattctttaaggggccttagaaactggttctgctccaggtgccaaatcaatgataaaatcaatttccctttgcggtggtaaacccggaagttcatcaggaaaaatatcccaaattccctaaccaccttgatgtcttctggccgaattgacttagcccaagtggtatccaataccacggccaaaaaccctagacatccatctcgtaacaattccatggttgttagtactgaaattactggaatccaagatccttgaaccgatccaacaaaacaaacggttccccaccttctggttggaagattaccatcttctacttacaatcaatacaggctgagtacttggataagaaatccatccccagtataatatcaaaatccgctaagcccatttctattaagtcagcactcaactccctatcctcaattctggtcggcatagacctaatccaccttttgga

SEQ ID NO: 288904 - DNA, 506 bp, Cannabis indica
cagcattgaagttctgacaaacttccccttaaggcaagttttagcgaagccagaggcatcggggagaatattaaagtgggccatggaattgagtcagttcgatatcaggtataaaccaagaactgcgatcaaggggcaagccctcgcagattttatacttgagctaccgagaacagagatagcggttgtagacggtggaaatgacgtcgtcatgacaggcaaagacgtatggacattgtatgtcgatggggcctcaaataatgaaggttctggtagtgggatattgttaatcagtcccaacaatttcaaggtacacgctgctctacgtttcgaattctctgcatctaacaatgaggccgagtatgaggctttaatcgcaggtctgaaattggccctcgagatgaaagtcgaatacctacaagcatttagcgactctcaaatcgtggtatgtcaagtaagtggagaatacttagcgagaggcggaagattggttaaatacttagcca

SEQ ID NO: 288905 - DNA, 682 bp, Cannabis indica
ctgtccccatgcatgtgccgcagcgcttactcagaatgtcagtgtctacgctctgtcatccccctattacacaaaggagacgtggaagaatacttacgatgcaacaattaatgttgtgggcgaggaggatgaatgggtgcttccagaacacatgcagaacatgagaatcggtgtaccagtggagaagaaacctgtaggtcgtccaagaaagagcaatgcaggaagactacggactaaccgatttccatcgaacggtaccaaagtcaaggaaccacgcaaatgttcaaactgtggcgcattgggacacaacaaagctacttgcaaggccagggtttgagcagcattttcgtttttaaattgcatgcattattattattatggtttatgacatgttacttgtatttttttatgtatgactatgttttatggatattattttctgtgtacgtggttgtttactctcactatctcagatttttgtatataattgtgcatttcacgacattttgcgatatgtagcgacactttcacgacatgtttggaaatttattttattctggacaaggtcctgaaaatgcgactttccacgactacactagcgacatgtcgcgatataggaagaacttttttcaattatggaaaaatttaaaaactgcgactttccacgattacactagcgaca

SEQ ID NO: 288906 - DNA, 620 bp, Cannabis indica
tattgtatttatggtgccacgtcactaaaactcctcggttttcgtgtaggcgtggccatggttggccgttggattgggcaaccttaggcatcccagtcgccacgtgtcgcgatcccaattaatgagggatatgggtatttaaaccctttgatacgaatcaaattccctatttttccctctcatttcttaacttcctttctcccttatagaaacttcaaaaaccattctcactttttgctcagatttctatcgttcatctaaagcatccttcaatctcagaagcaatcaagagtaaccgcaggaacaacttgccaaactaaaggttagtttcgagttccattgtatttcttgttttctgtatttgagaaagggtgttatttctgggttttggtattttgggggttttagaaaatgcatgtttgtaagggatatgtatgaggttatattttttgggtaaagaactgggtaattttatgaaaaatgacctgtaatttggaataaccgcatactgtgtaagaaacatttaaatagacgctgtttcatactttgaatactcacgggtattcggatgcacagttcgaatactcgcacactgatagaacttatttacctttgactat

SEQ ID NO: 288907 - DNA, 804 bp, Cannabis indica
attaatataattatttatttttatttaacactcactaacttagaaagaaaagagaaaaaacattagaaagtaaaaaaaaaaatacaataaaaaaaaattaaattatgaaaaactaaataaaaaaatataatttaaacacattaaatagttaatattattttacatactgcaattatatttattttttaaattattttaaattttaattttaaagtattcttgtaatttttttaattttaatttttttaaattatttttatattcttgtaattttaaaactttaaacatatattttttttaaaatttgataaaagaaaaatgtaaaaaaataagtgcgagcaaaaatgataaaaaaaataccatacgtaagatccccatttatatttcatagatttcaatgcaaataaaaagtacaaaaacgatatgacgtcacattagttgccaccgatctttaataataataataatagtcaaatgggaatctaagcttaagtctacgatccaactcagcaagctacgtcacaatactcagacaacgtctacgaataagtacaagttggccaccgcctagtcgcctactactaagctacgcatactccacgaatcttcgtaccaagtctacaacggcaacctctgttactattacgaaacatttaaattggacataactaaatcacaaaaattacgacaagccgaacggtacagtttacacaatttaccttgcatattttttttaaaagaaatactcaaatgaaaaaattgaactatttttaggctgtgagaacaaaattaaagaactcgatt

SEQ ID NO: 288908 - DNA, 489 bp, Cannabis indica
ttagtggacttaataattggaaaatatgtgatttatgtgttttatgttggctgaatataagtgaattatgcctaatttcttttatttcaaaagttagaaaaaaatttagaaagaaaaacaaaacctctctttctctctttctttctctctatttcggtttggagcagctgggtttgggggggattctttgtgtgtttcaagctaaattcttcaaggtttttgtgatctttaagtgttggtaaggttccttatctttccctcttgaatttgttgaaaattatgaaaagatgagtattgcatgcatggtttttgatgttgttgctgctgttaattgttgttgttgttgtttctatgattaaaatgctggaattgattggattagataggctgaaatgcatgttagttgctcttgtgctagtttgagaagttttggttcaaaagctttagttttcaaagaaaaatgatgaagtttgttgctgtgtttgttgc

SEQ ID NO: 288909 - DNA, 515 bp, Cannabis indica
gtatatattctgatgattattgctcaagtattacccgtttttctatgtattgtcgattgtacttttgtgcatattttgcaactttcagaaataaactgatgtcattttatattttcactaaattaacttatgtcgaatgggcatccattggttattaaataatagcttactgagcaactacaacagtacactattctaccaaattggggtacgaaattttcataccatttcacttttaaaataaagtaggagactaaatttaacaccattaataatattgaattttgaatttatattaaattagtgcataattattttttttattcattctaactcttcaattaatttatttataaataattataaactaattgtttgacaattttttttgttcaaaaaaattgttcataattatatcataaattaatatgactattaacgtaaataataataattttttgaaatagagcgttgtctgcctttcatatttgcttttgtggttttttttttttttt

SEQ ID NO: 288910 - DNA, 734 bp, Cannabis indica
cttggctggacgacggcgggttcatcgccggtgattggaggcggcggcatcagccttctgttcagagagaaagtgaagagcaggagagagagagagagagagaggtgtattttaaaaattttatacttttaaatttaaagtttttatttttttttttttttaacggtattttataaaaacacaaaaaaaatcaagaaaactacatgaaagtaataaaaatacaataacataaaaaataatatacaaataacaaaaaatcaacaacaaaataaaaaaaacacacaaaataaacattattctatgtaataaaaatctaaaaaaccgtaaaataatattaaaaattctaattatactgtatttttgtaattttttgtttttaaatttttttttattaaattatcccaaaagaaaagagtttttttttgggtctattttcaaaaatatgggaaaaattattaaggttatgataaatatggcataaaaagtaaataccactaaatatggcattatctaaccaatcaaactaaaaatatggtttttttcttaaaaaaatccatacaaaacattaaaaataaatctgaatttaaaattcataaaaaataaaaggttaattaaattaccataaaaaatattaaaattacctttcatatttattttttttaaaaaaaaattaaaaactaaaataaaaactaatagtgattgccgaagttgtcactcgtgctggaaaagtcacc

SEQ ID NO: 288911 - DNA, 612 bp, Cannabis indica
cctattatcttgggtcgaccattccttgctaccgggagaactctgattgatgtgcaaaatggggagctcacaatgagggtgaatgaccaaaaagtcacctttaatgtgttcaatgctatgagatttccggatgagatagaagagtgctcccgcataagtgtaattgactcgatagtggctgaaaaatttcacaaggaagcttggagggatgagaaatttataagttcttttgatgagcttgaagacttgagtgaagatgaagacaaccaagttgcttgggtggagccattgcaacctattcctaaattcaagaagccctttgaatctttggagttgaaggaaagtaattttaagcctccaaaaccctccatccaagaaccaccgaacgttggagttgaaacccttcgccaagccactctgaagtaatgcctactttggggtaggaatgacacgctaccacgttattatagcatcaaacttaggtagttaaagatgaaggtgctttgctagaggtgttgaaaagacataagaaagcaaatcgggtgggactatggcgggacataaggggtaagttagttcccacgatttgcacgcacaagatacttttagaag

SEQ ID NO: 288912 - DNA, 652 bp, Cannabis indica
aggaggcgcttttgttgaaaaggaagcttgttggcaggagtgtggaagtggtgcagggaccgtcaaatccttgttagtcacgacagaggtcgagagttgataactgagatgggtctaattgggatagacatggaatgcttcagttgctacatgtgtgtgtcaagatgggcgcacatggagaccaagagggcagatgccgcaatcgtcagaggacgattgtacttggaagtgttcgcatgcgagttgtatttgatccatatggaagcgcgaggcagttgggttgagatgtgttggcttgttgaaccgccagagggcgtaagtcacacaaagatatcgatagagacgcgaagttgtggaataaaggcattaaggaagccagcagggctgagaagaccgagcgcaagcgttgagatggcgctagagtttgtgtggaggccagagggccgtaccagtgagacttagtagtcatgtgagcctgcgaaagtcaagaaaagtgctagagtttgcttgaaggccaaagggctgcattattggaacttagtacaccgtgggagccaaaaggacgtgatgcaagtgtgaatcagttggatggttgagtgggaagttagtgcatgcatgtggaaatcgacaggggtgctaatgagatagttga

SEQ ID NO: 288913 - DNA, 691 bp, Cannabis indica
acagcctttttccaaccccttttgtctatctaaaataaaagtgagttctgcagtgtcctccatatataagtcctccttcagtagttcagcaaaccatgtccaactatcagtgttttctttttcagttacagcaaaagcaataggaaacatgttgttatttgcatcaattccaattgctacaagcagcatacctctgcaatagcctttcaataagcacccatctagcccaattattggtctgcaaaacttgaagccagctttataagctgcaaggcagatgtaaaccctttcaaaaacccttttgtcatccactaaatttgatttgatcaaagttatacttccaggattaagtctcactagttgtgtacaataatcatcaaggattgcatagtgatctctcacaattccttgtaccttggccatagctttattcttagctctataaaaattctaaggggagactttggaatactactatctgtatttgcctttttcaaatcacccaatgacatgctcggattcaatctgaactagtctaagaattcctttgcaatccagtcagaatctagcagcctattctcccatataattccacaggtgtgatcatctttaacttgttaattctaaatgtagaacaatcatctctcatacgtcgagcatacaataaccacttacatccttctcctttaca

SEQ ID NO: 288914 - DNA, 613 bp, Cannabis indica
caacttaattattaattgtaattgaatatgttagaaaatattctaatttaagttggtctaaaattaattaaataattaattttaacttaaatatattttctaatttaattataatttcatgaaatagaaataaataattaagtatcttgaataaaataaactgaattattaattctacttaaattctaagttctaagaaaaattttctaatttaaattggtctaaaattaattaataaattaattttcaacttaaatatatttttctacttaactaaatattagaaaatataaattagctactagaaatcactatctagaatatttcattaaactaagtgtatttatctaaattaatttaaaataatctaatgaaaaattaattagatttattttaaaattaattatgttgctaattaaattttaattaggttaaactactataattagcctaatacaattatttaaataagacaaacgagccttcacaattggggttgttcatgtgagggaggactgggttcagtatgtcatacccaccactaatggccccctaactctcacacaaggcccaaaaggagaggaatttaacctttcattaaacaattgttatt

SEQ ID NO: 288915 - DNA, 693 bp, Cannabis indica
tttaatttttcattttttaatgccaagtaattcaaccataaccctgtgtggtattctataaatagaaggtaaaggcttcaggaaacacacacaacacaattgcattattttcttttcactgaaattcttcctgagccgccacattcattctctctttcttcttctctgtttcgaaacctttaagtgatagtgtagtgcccacacacatcaagtaatacctcaatcatagtgaggaagactatgtagaattcagaatcaacaaagaaggacattcgggctcagatcttgattatactctacaacagaaaggaatcatgggttagagatctgagtggaaggagacatattattccgctgcattcattgtaagatttctcatactttatatgtgtttatttatattcgttttagaagttcatatttaggttgttaatcaacatacttgtgagtagatctaagatcctggtaaaataattccaacaactggtactagagccatggtaattgatttgcttgcaagaaatttggacttaaaacaatttgtatgtgatttggatggtatcatgttgttttgtgtgtcttattgatgtttgtgaattctgagaaaaataattgattttatgattctggtattatttttaatggatagtttggaaaaaattaagcaatttacctttttacagaactcgattt

SEQ ID NO: 288916 - DNA, 803 bp, Cannabis indica
tactaatcttacctcaattccgaattttaggtgtgccggtcaacctgactagaacgaactgcgcggcggattacaggctcctaaaccataacaatcacaacactataagtgatacgctaaatcacttcccgatgacttaaactaggaattaaaagtttccctatcggcaaaaagaatggcaataccccaaataatataaaaacgaggaaatctagggtttctgaaaattgtccaaccggaattccggttctggaaattttcaaaaccccatccggaattccggatgcacaaccggaatttcggttcctcgcaggcagaactcaaaaattcataactctttcaaatccaatccaaactataccaaaacttccagacctgttctaaatgtcccatataacatttctaaagcaacaaaaccaccaagaatacacagaatcaaaaatcaccattggaggttcaagattgagttcaaaactcaaaacttgactaattcctccacacagccactaaaacaaacataactcaacataattcaacataataaaaccccagaacacacaattaaacagcagcaacaactacagcaacaaacttcatcatctttctttgaaaactatatttttgagtaaaaacttccaagcttgaaacaaagctactaacatgcatcaaactagctataatctactcaaataatcatgcttaaatctctgcaacaacaacaaaaatcacagcaacaacaacaacctaaactaagcatgcaaaccataaaattcttccaaaatttccaagaaacaagaaaagga

SEQ ID NO: 288917 - DNA, 582 bp, Cannabis indica
cgaagttaagcaacgaccaggcgagccactccgagcatacatcagcagattcatgacggaggcgaccaaagtttcaggggtaactgaggatggaaagttattcgcaatactggggggcatcgaagtcctcgatgaactctgaaaggatataagaaagaacgggccagtagactcaatgagtgatttccttgaccgagtcgaaggcttcatcaagctcgaagaagctattcaacgagcggaaggtgaacaaaagcctggcaagtcaaaggctccttccactggaacatctacccaacttccccaatacccaaacaattcaagctcaggtggtaagcgctccagtaacaaccacaagcaagggaatgggaagaaaggaaagtttactggcaaatccgaacaagctctgcgagagaatcatgccaaatacactacattcactattttgactgaaaatatagaaagtgtatacatggcaactaagtcgctggccctgtataagaagctcgggcccatgaagcaagatgccaacaaaagggacatgacaaagttttgtcggttccacggagactacgaccacgacac

SEQ ID NO: 288918 - DNA, 507 bp, Cannabis indica
tttcacaatatcaaggattttatgattaaggaaatgtaatggtggaggaaagtttgtattgaatacaacctgtcagatcctattacagagataatactacatactacacttgatcgggatatcaaggtgttgagattatttgaaatacactttcttttttatattagtgcaagtgagagtttattgggttttgtgccctaaataaaagccattttgatataataagattagaaatcgcattttatgttgcatggttcacataatttatttcatgattatgtttaatgtataaattctattaggtccagaacatatatatttgttcatgattatagtatcgtcagcacagtggaatataacatgattatatgttctaaagtttaattcccatgatttatcagttcactggatttagacttccatgataatcagcgataaggtatacttacaccttggataagtgttatctcctttccatgatattgacaaagtttaccagtatcagat

SEQ ID NO: 288919 - DNA, 586 bp, Cannabis indica
tgttttagttttttgttttgtcctcattttttttgtttcaattgatacaggaatgggattatatttatgatcagaagaatctcttcattgcgaaagccttttcgactgctactttccaggtgatagaaaacattaagtcttgcctttcacctgaacagcttgaaatgttttccaaaacctgttttggacatttccttaagcttcctgattttaaagttcaaccgcaagtgtttcatgggttgttgttgcgggaggttcagcaacctaatgatgctgagttgtgggtaatgatacgcggtgttaggcttaggtttagcattgaggagtttgctttgattactggtttagactgtgaaggtgactgtagtgttttagattttaagcaagacgttaatagtctttctgaaaaatattggccaacttcatcctctatcactaaggaatctgttagggaatgttttaccaccaagaggtggggtgattctgatgaggatgctgtgaagttggcagttttgtattttgtggaatggttcttgcttagtggcactaagcataaaaatgtacctaggtctattttagatgttgt

SEQ ID NO: 288920 - DNA, 599 bp, Cannabis indica
taaaagtaagtacttataaaaagttattgatctcactctcattcaacttctttctatagtgtcatttggtagagttttggtggatgaatcaatctcactctcactcacttggatagtcttgtaagtctcctattacaattataaaggtatgtcttattaacacaatatcttattttgacagcatgtgcttatcttttacttaccatataaatagagtctaatattgagtcatggattcaaagcatgttcattctatggttattacatatgatacaataacatagataagtatatagataagtatatattatccaagagacaaatcttcataacaaaagaagtgttaaactaaaagaaatgcttgtgttgtttccaaaaaaaaaaaactataattctcaaaaaaaaaaatgataacatcacaagattaaaagattgcattatttatctaattcatgaaaatagatagaaggtttactgatgaatatttaattaccatcacaatatttggacgtgttaactaatataaaatttatttttcaaaaaatctttatgaccaataagatgtgatattatgtttgagttcactaaagactattaca

SEQ ID NO: 288921 - DNA, 493 bp, Cannabis indica
tcaggtctagtgcataacattgcatacattagacttccaactacagaagcataaggaaccctactaatgtcctctatctcttgaggatcagtgggacactgttccttagatagattgataccaaatctagaaggcatatgcgcccctttggcattggtcatgaagaatctctctagaattttatcaatgtaagcagtttgagagagagcaagtgatctgttcctccggtctctaataatctaaataccgagaacataggcagcttcacccaaatctttcatttcgaattgagtgtctagccattcctaaatgttagcattttattcacattgttaccaatgatcaaaatgtcgtcagcataaaggaccaggaatactaccacttggtcatccttgagttggtaaatacaaggttcatcttcattctgaagaaagctgtaggtcttgacgatctcatcaaaccttttgttccaggagctgttggaaattatttt

SEQ ID NO: 288922 - DNA, 980 bp, Cannabis indica
aaagttgaacaaatcacgatgtaagaggtacaaatcttatatataaaaatatattttatttagccttagtaaacattgtcagtacaatatgaaaatctagtgattataagaaattcatttagggtttaattgagaggccatgttacactttattgtattatttagtattatattaaattattttttatgtaatatttttacataaaacttaatattaatttttatgggtatctaaatatataatattttagtataaattaaaatttaacatacgataattatataaagtactattttttgtaaaaaaaatacattaatacgtgaggctttcactaagttctgcaaagacacagggttgtctgcaaacacctcgaagtctcacatatactttggaggggtttagcgaaagaggtcaaatccaaaattcttgatatggttcaaatagaagagggaagcttccccctaaagtacctaggggtcaaatggaaagcagctgattgtggagttattttggacaagctgaataagaacctaaactactgggcaagtagaaatctttcttttgcaggtcgtgctcaaatgatccattcggttttgctggaataaggaattactagatgagtatcttcattctcccatccaaaattacggctgcaattgacaagagttgtcgggacttcttatggggagtttcaggggaacagaagtaagcttcaccgggtttcttgggataaggtttgcctcccgaaaaaccttggaggtgttgggtttcgagaaggggaaaagtcactacaacaataatggtttataccaacgccactattaccaacgccaaaaagtcctcattaaaaattggtactatcaataacgacacttacctgtcgttgggacaactattattatttttttttaaaaaaaaataatatcatcaataacgacaatgtcgttattgaaaatacttcaataacgacattgtcgtt

SEQ ID NO: 288923 - DNA, 725 bp, Cannabis indica
aaagattatgattgtgagattctgtatcatcccgggaaggccaatgttgtggccgatgctttgagcagaaagggtcctgggcaagtttacaccacggttttgatagcccctcaactagcctctgaaatggttagtacagggattgagttcgtggttgggaaattgcacaacttgacactccaatctgatctgttagagagaatcagaaaggcgcaattagaggatcccgagctagttaaggctcgagacgaagtaatggctggtcggcctaaagacttttcagtctcaaacagtggaatgttgttatacaaagctcgagtttgtattgttgatgagcttaagaaagaggtacttgatgaagctcataccacaccttattcattgcatccgagaaccaccaaaatgtatcaggatttgaaaccctacttttggtggtatgggatgagaagagatgtggtggactacgtctccaagtgtttaaccttccagcaaatcaaggctgaagatcagaggccggtagggttactgcaacctttggtccttcttgagtggaagtgggaggacattgcaatggattttgtaactggctttcctagaaccataggaatgtatgattcggtatgggtcatagtggacggattcacaaaatcagctcactttctgccagtaaaagttaaatattaagtggatcagtacgttgaattgtatgtaaaggagatagttcg

SEQ ID NO: 288924 - DNA, 821 bp, Cannabis indica
acccaaaaccccaaaatccaaaactcgaaacccaaaacatgcttgttatccattcataatttcaacatactataaataatgaccatgtataaacccctccttacaaaataaatagaagtctatcccataaaattcaagatgagagaagagaacaaagatatttttcaagcaatgacaacaaatttaagcaatgacaacaaaatttaaggtgttactgttaccagctgatttagaaaatcattttggatttgtcccaatctcttgcgctacctgcaccaggataaatttgctacatatactagacatagcttcaagttcgcttactccatgattcagtatttcccctctttctacaatggatttcataatcacaggacatagaagcttctatgttataaagtgtctagtgcttcaattcattacggctaaagcaaaaatacgaggagttgccttgcctcagaacagaagcagaaaatgaatgcaaatgtacatccgtacaatttggaatttgtttcatgcacgtaaaatacaaaattcaatctcttggaatcaaattttcattcttgagaaataatattgcttgggtttccttcacatagtatcttttctaaatccatagtcgttgatttcaaagacccattttcaaaatatgtcaggactcgaaacaaagtgaaatatataagagcattttttgaaataagaggggttttggatttcggggcttggggttggggtttttggtttcggggttttgggtctcgtggtggtgagacagtgcttcggctcctgtggtgagacgagagagagaaagagggttggga

SEQ ID NO: 288925 - DNA, 769 bp, Cannabis indica
aaactactttttctctcaatgtttccaatagaaaagtgattcacaacgctgttggtttcctcccagtgaaatttcacgatttttaaggatttgtagggtgagattttaagaaaacactaatgagtgtaagaggaaggaaaatttgtcaaaaatttaccgagaaaagtataacgtttttcaatttttaattagggggtcattttaaccaaatttaatgcaaaaacaatcttacatattcccatcttagtagtatgaaatcattgttactagaggggaaaaatatttcgagatgggtccgagccacatttcacaaagggttaccactatctaaaaatgtgagattttcactatttcaattaaaattgttgttagtgcttgaaaactactttttctctcaatttttcccatagaagagtgatgcacaacgctcttggcttcgtacctgtgaattttcactatttatcgagatttgtagggtaagatttttaaagaacactaacgagtgtaagagcaaggaaaaacttgttaaaatttatcctaaaaagtggaacgtcttcaatttttaattagtaggtcattttaacaaaaattaacgcaaaaacattcttcatattcacgtcttagtagtatgaaatcattgtgactacagggaaaaatattttgaggtgggtccgagccacatttcacaaaggggtactaatattagaaatgtgaaatttttactatttcgattaaaatgattgttagtgtttgaaaactattttttctc

SEQ ID NO: 288926 - DNA, 491 bp, Cannabis indica
atccaaatatcccgaccagaaagctaaagatcggaaagggtttgtggctcgacgtaaatcagaattgataaaatttctgagagaaaacctaaaggtttttgcctggtcacatgcggatatggttgcaattgatccttctattatttcgcacgtcctgaatattgatcccaattttcgactagtccaacaaaaatgaaggttactagacaaagaacgagcagtagccctgaaggaagaagtagaaaagctgcgcaacaacaattttataattgaagctttctacccagctttgtcgcaaatcccgtattggtgcccaagccgaacaagaaatggtgagtctgtattgacttcacagacctcaacaaagcgtgccccaaagattattttccacttccaaggatcgatcagctcgtagatgcaatagcagggcatgaaatattaagcttcatggacgcttattctgttggaaatatatttatccaggatcttag

SEQ ID NO: 288927 - DNA, 514 bp, Cannabis indica
attgggcacctgctttgtatataaaggggtgatccaccatgaaaatgcacctacgaatcccttgctacagtggactaagcagaacgaaatctgactgaaccactataattcaccgtctcatttatttttccagctttgttgtttactctcacattcctattcgagtactcgccattctaggttgaatactcgcatttgtcatctctcaaataattctctcttttaccagttaaattgtacttcttggtgttgcgaaatatcagtaacaacaatattatttttattctatgtgaaactaggggtgttcatccaatctaatccgcacttttttggtcaaacaacatccaatccgcactaagtgcggatttcatattttggatccaatccgatccgcataagagtttaaatccaatccaatccaatccgcaatagtgcggattggatcggttattttagatcggttatttttttaataataaattatttaatatttcataaaaaaacattaaataaa

SEQ ID NO: 288928 - DNA, 528 bp, Cannabis indica
tgattggtacttagctacagtcctcgtgggaacgatctcacttacctgagtattacttgttaaaacgatacgtatacttgcgtgttggatttatcacaacaactactatgctcctaatatgtaaatatatctgccataacaattgattagccttcacgaacaacttgaagaacataaataatacaactaagctaaacctaaccatatcaggattaagattcatacacctaagatcaaccagtgatattgacttagaaagatataacgataagtttatgatatcttatccaagatcaatatcggtccaatctaatgtatactccatacatccgatactggtaaactttatcaatatcctggaaaggacataacacttatccaaggtgtaagtataccttatcgccgattatcatgtcggtctaaattcagtaaattgacaaatcatgagaattaaacttttaaacatataatcatgattatattccactgtgctgacgacactataatcatgataaagtataatattat

SEQ ID NO: 288929 - DNA, 628 bp, Cannabis indica
acaagttgaggcagtaaacaaaacattggagactacattaaagaagcgcctagaggctgccaaaggaagatggccggaggagctcccacaagtactctggtcctataggacctcacaccgaacagctacaggaaatactcccttctcactcacctatgggagtgaagccatgctcccagttgagacccaagtcccctcacaccgaaatcagtactatgaacaacaccgtaaccacctactcctggaggaggccctagacttactcgatgaaagaagagaggagtcacaattacgtaatgccgctcaccagcaacgggtaaagaagtattatgactctcgtgttcgtaatagggagtttataataggcgacttggtgttaagaagggtgttcttagcgacgcgtgatccaacagctggggtccttgggcccaattgggaaggaccgtatcagatcgaaactgtcttgaggcctggagtatacaagctcgctcgccttaacggggagcaagtgccgcgagcgtggaacagtgagcacttgaggcgatactaccaataggtggaagtcctcctcggtcgggggtccttaccttactttgatatttagccaagtttcctcttagttcattta

SEQ ID NO: 288930 - DNA, 537 bp, Cannabis indica
aaccctaaaccaagaaaaagggaatgggggtcccctaaccgctggaaagaggccccctccagacgtctgtcaaacaaaaaaccctagaaggatttcctggacaaaagtcgggtgcaataaactcgcagaagacaacattgcgcataaaagaaaaagaaagggcagtaaatcgagaaaaaacaaagtctcctctatgccctagaagaccaatacacgaagagcgtatggtcctttgcaaaaaataacaacaaatacgtgacaatagtaaccctaacaccagaaatggtgaatctagacctgttacgtgaaaaatccaaaagaatgcattcctagaaatttcaaataccaaacccagaaaaaacaaaaagataagtaaagcatgccatttacataaacagtaaagcaagggatgcgagaaacttacagtgaagtgttgagactgggggttctgttgtcgatcaaacaaaggaaaggtagactgaccgtggtgaatgaaggttaactgggaaatttgtaaagtgttcgaaggtgttctct

SEQ ID NO: 288931 - DNA, 680 bp, Cannabis indica
actttttgaggaatcaaatacccagttgaaaccctccaaagtccaaacgccatcatacagtacaggcacaaatacagatgaatctgtcccaaagaaatacaaacaaacttacataaaaaaatcaccatactatgtcgcacacaatatcgcacaataatcgctttacacaaacataatataaaccagttatgatgtcgcacaataatcgcacaacaaaggaaagaaatcgcataaagtcgcacaatatcacatagtcaacaaaatcgcataacgatgcacaacatatcgcacacaaatcgccaaacatcattatcgcacataaaatcgtataataatcgtacaaagtcgccaaaattaatcatgtcatccctaacctcagatttctcatgaaatcgcacaaaacatcgcatgatgtcgcataaaatcgcaaaaaacaaaaaaacccagaaaaacacagactgttagccacaaactctacctccatttcaaggacacaaaagtcacatattacaactaacaacgttcagatccatgcaattcaacaaaaaactacactatttactaagaaaaacacttacccattgctttgttgagtgaggtggaggttgagggtgaaaatggtggaggtggcagtcggccgggagagggtcgatcggcggcagtgacaaaaagggagtgtg

SEQ ID NO: 288932 - DNA, 454 bp, Cannabis indica
aggggtaggggtaaggtaagttaatttacgttacgttagttggtaggaaacgaaaactaagttggtcggacgtaaagtaaagtaacttacgttggttggtttagtttagttggttggttggtaggtaagttaagtacgactagtcgacttaaagttaaagttaacttaacctacgttggtagtaattagtagtagtttagtttaatttagtttagttagttggtaggaaagtaaaattaaattagttgggttaggttagtacgaactagtttggttttagtttaattagttagttaggtaagggaacgactaggttaggttagtaagttaagttagtttagtttagtagtttggtttggtagtaatttagttttagtttaactttaactttagtacgtaactagttagtttcgttagctcacggggtactctgtgtgcaggtaaaggcaaaact

SEQ ID NO: 288933 - DNA, 404 bp, Cannabis indica
ttcagatgaattcatatattatgcacatataatcatgaaataaatcatgtgaaccatgcaacaatgaatgttatttctgatctatattgaaaagtaaatctgattatattgaaatgagttttatttagggcataaaacccaacacggcgactatgcaagtattttaccatttatattttcactattttaatgccatacatttctaacctaaacctagatggctttctataaatagaaagtgatggcttcaggacactaatatatgcatcttattcttttcagagaaagacctgagcctccactcttcttctctttccttctcttcattttcgaaatgccctagtgatagagtagtacccacacacagcaagtggtatctccatcagatcttgattatgttctgc

SEQ ID NO: 288934 - DNA, 724 bp, Cannabis indica
gttgattagaaactcacatcgtaatcttccaaggagtagtgtatatgggctactaggacaaagtgtatatgaagttcttatttttatttcaatgcatgagcaagagcatttcattttgtgatagagagaaaaagtttttttgaataaaaaaaaaaaaaagtatctttttaggctttcaaaaaaattacgtgaaaattttattctaaaatttttttaagaactttgttatatagtatatttaaataaacccaataaaaattttatttaattaattattgaaattaaaatatatttattaaataatatttaattatttgaataaataatataatcaaattcttttatagatatttacatctaataaccaattgaggaaatctctcaaccacttgagagaatatctcaactactttttaaattcaaatatttatctaattaaactagttatttaattaactcaaaaatacaaaaccaattgggacaccctacactagggtaggcgccactcttgtcttaactaagacaatgatggtatcttttgtcctgataattttttttttccttatttaattaatttgtagggtatggtgaggtagtatatgggagggtatggtgaggtagtctaccatgtgtaggtcggttttggattgtctttcttaaacaaagtttaaattacttgggtagaggtagggacgtcaacttgatcaatatacttgattttatt

SEQ ID NO: 288935 - DNA, 487 bp, Cannabis indica
aggctcattctactccatattctctgcatcccggcaccaccaagatgtaccaagatttgaaaccgtacttctggtggagcggtatgaagaagaatttggtagaattcgtttcgagatgcctcacgtgtcagcagatcaaggctgaacatcagagaccagcagggttgttgcagcctctaaccctaccagaatggaaatgggaggatattacgatggattttgtggtcgggttacctaggaccacgggtatgtatgattccatctgggtagtggtggatcgatttacgaaatctgctcattttctgccggttagaacaacgtttacagtggatcagttggcagagttatatgtcgtacggagggagtagtagtaggaacgttaccttaccggggtaacccgggggtaaaccggtaacgttacttaagttttacgggtttaccggaacgggaagggtaccgtaaaccgttaaacttaccctacccctaa

SEQ ID NO: 288936 - DNA, 427 bp, Cannabis indica
ttccactagggttaggtttgaattatttggcattaaaataatgaaaatatcagtttaaatttcctacaaaagtggccgaccctatactagtggatttaagcctcactttttgctattttgcagttttacaatgtctctgttcggacaattttcatggttcgggaagagacacttgttgctcctagagtggaaactccagtatgtctactctctatatgtctaatctcttaaacacaaccttttctccaccattactcttctttaataacaaaatctttgataatgtgaaattcctcttaacactagtagtttaaggcaatttggaatggtgccaaagatgtatagaactttccttatcactattccacccccagagtaatcaccatcttatcagaaagattttctagcacaaaggcaaatttcgaaa

SEQ ID NO: 288937 - DNA, 77 bp, Cannabis indica
atttaaataataattgaaatttaattaaagttgatttttattgttggttttacatagcgtttgttttagtgagtaat

SEQ ID NO: 288938 - DNA, 814 bp, Cannabis indica
aacagatttttttaaaaaaaataatttaaataaaaagttaaaaaattcgttttttgtttttttaaaaatacatcatacttctttttatatatattctaacacttggttgtgactcacttatgtattctcaaaaaacttcttactattttgtatccaagtttgaagatgtaggattttactgttttaaccctacaccaacaaagcttataatatcagtctcaaggtcagaattgacctttccttgtctaagtaaaacttagaccaatacgaccccgtattactccccacgacaccaatcttaatgtcgtatgaatcctttgattcaaagactcaatagaagagtctagaatcccaaacactcagacacttttcactcacacactcacaaactcgaaaccctagcagagcaagttctctctgagaacttgctcgattccaaaccctagaaacccagaaagcccagaaaaactcagatctaaacacacacacacatagtttttaggtttagatgaatgaaaaagagagataaggagagaaaacaccagatttgtttcagagttcaccccaaaaattagggctacgtctctgtcaagctcgtctcagagattagcttgatatccactatcaacaatggtgcagtacaatggttttggagcttcctgtcacaaaatcgatcaggtaagactcgattttgttgcttttacaagtttattgttttcttctctttctgttctttgaaatctgaatctgactttgtgttcttcttgtgcatgtacttcttcttgctcaataatcctcaccacgagagttttac

SEQ ID NO: 288939 - DNA, 1073 bp, Cannabis indica
tttgaggagttgtggcttgatcattgcattgaatctttaggtatttttctattgctgaaatttaatgaatttggtgctgtgattttatggttgaaaagcatgaaataggttgggatggtcttgagatgcatgttggtgttttcttgttgatatgagcatgtaggggtgagcatcggtcggtttggtcggtttttttctatataaaaatccaaaattcggttttcggtttggattggtgcaatccgaaaactgaccgaccaatccagaacctatcttaaaaccgaccgttttgaacctcggtttggtcggtttaaacagcccaaaccgaactttttttaaaaaaaaataatccaatttattctataaatatattattctacattttacaactacaaacatacaaattaattgttcaaaaactaattattttattcttttaactttaatattaataaaaaaaataatatagtatttttttatattattagtaactataatacatgaaaaaaaaaacttaataaattaatatatatatgtataacggtcggtttcggttttttcggtcggtttattaccaaaaaaaaatcggacgtttaatggcggttttaaccgttagcagttttttcggttttcggtttcgtcggtttcggttctaacgatgttcggtaggtcggtttgaacggttttttcgattttctggattttatgctcacccctatgagcatgtttgtacttagatcttttgaatttatgttgggttaggtttagacagaatataaaaggaattttattgtgtttttattctgttaatgaactttgaaattaattgttgaagttcaacttcttgagctttgaagttcttggtgattttgctcaagttggagctttgaattttatgttgtttaatctgaattttgggggtttttaccattggatttttaatgcatgaattgtattttaagcttcttgatttaattattgaaaaatctatttgatggattaagtttggttgtgaattgagttgcaatggatgagtttatgggctgaaattcattgttgaatgctgattttta

SEQ ID NO: 288940 - DNA, 283 bp, Cannabis indica
agtagatctaagatcctggcaaaataattttccaacatgacactcgtctaaaatcatgcggcgtcacaaccatcaactgggtggttacgttggttgattgaggatgtttgaaagctgtccgaaccgacttcactgtcggagtgatgtattgctgacactcatttgaaatcatccggtgtcaccaccctccgatgggatttcggcgggcgttcacgttgggtgattgaggatgtttgaaagccatcttgactgacttcattgtcagaaggatgggggacactcg

SEQ ID NO: 288941 - DNA, 700 bp, Cannabis indica
caacgatatctctgaatatgaatagttagataatatctcttacgtaaaatctctcgaccccttttcccagtgagcatgcatcactatttataggggctatgaacttggagaggaagtatttcccttctcgttacaatggatataagcaaaaagattgcatgataaatatagactacactgatcgtgggatttggacagcttgccatatctctgcaatctgatccccaagttatagggatttctttgatgactcacaatgcgaaagctaaattcactaagtcttggtcgctctgcgcggattgctgatcgctttgcttcaggcatgcatacgaggcattctgttcagactgtattctccgagcaaatactcaaagttgattccacgtgtcaccatcatgtgatgccacgtcagagtgcaaaaattgggataacatcacatttttcgttaatctcgttgattagcaacaagctgcacagtacgtttgaaatcacgctaacacgcctatattagttagggtgttaaaatttggtatcagagccgccagattgtcatccaaagatcgtcatgacatgtataatcatcatcagcagtcagctcgtttcatagttcagtaagcttttattgctttaataatatattttaatagtatgatttaagaaaagcctgttaggaagcatgttagtagcctgatagtagaaa

SEQ ID NO: 288942 - DNA, 672 bp, Cannabis indica
aactattgattaaagaattcataactttaatatgttgctgattattttattcataactaagtggtcttagttctctgtacagctacaagccacagcctcatatactaataaggtaattttttgatattttacaatttaacattcacacatacatcaaatgtttactctttatttaataatcaaaaatatctttacatgcttttcaggcataaatcctaacacttgagtcctctcgtcaatgatagccccatgtgtctctgcctcatgcattagctcaatcatgtgcaatacatgagattgaacagggacacccttcttcatcttgcaattcatgtagctacgagtagcatcatgtcttgtttgattagactgctgcccaaacatggcctgtagagaattcattatttgagatgatttactgagtttttttgcaaccaaatatttttagagcttaagaaaataatgaagacgtaaacaatgtaataacatacaagagatttttacgtggtctaggcattaactatctttagtccacgagtctatttatcaggctctggccgatgaatgtttatataaatacagaaataatggacttttactcctttccactgtgttcctcttgaggaagaggacgtttagtaggaatattctggagttaatagtagggttaca

SEQ ID NO: 288943 - DNA, 483 bp, Cannabis indica
aatattaatctttttttcatgaaaattagtctccacacgtttttttatatgtccaaccaccctgcaaaatttcatggaaaaactccaagtatttcttatacttccttcacatatgtctacagagaaaaaatcatctatgttcctggcagagccttaaaacctcatattgctctttaggggggtgagctgggatgggcaggcaaggtcaccatggggagggcggctgggcaaggcccctctaacccccctccccctacctagttggtcggccgacggacggtacggtacggaaacttaaagggttcggggtcgggtcggaaacgggtaaaggggtagttaaagggtttaaggggttttcgtttaaacgaaaccgacctacgttcggtaccggaacccgttaccgttacggtaccgggtacccgggaacggacggacgtaggttggggtcgggaccgtacctactacttcgtaaagttttaaacc

SEQ ID NO: 288944 - DNA, 731 bp, Cannabis indica
tggcgccgtctgtgggaaccgactaaagatttcattcatttcaaagaacactaatcatcatggctggaaatcacgctaacggagctaacaacgggtccatcaacattggaatgatgaatgtaccgctatctggagctggagtgccacctgtggacgtcattaacggcggagtagggagaagcaatatcagacctctcaacctattcccagaaacgactggccctcaagttggggacacatccacgccaccagcaaccatgcattttccccccgttactccggcggtggtgtccgagggaatgatccagctcaccactgatcaatatgctgcgattcaggatcaactgcgggcactacaggctgaagtagacggacaaagccgagctcgacgccctcctcgagttcccgctattcgcaccgataaccctcaggtaacaacttctagacgtcatactaaccgtgtacgcagggaacgaagaactaaccctgaaggtctggacctgaaccatccaatgtcaagggatcaatccgcaaggtttccaaaccagagcgcacaaatcgatgaagatcctgagcgccgtaatcctcgcagccgaccatcaagagacaacgacgcagaatcagcctcttcgtcgtcgcatggtcgcactccaagcaggtacacaaggtccggctctgtacagacacaacagggaggacgttatcaggtacaccgaggtgatctgcgtgat

SEQ ID NO: 288945 - DNA, 508 bp, Cannabis indica
gtatgccgcaagcttgatgtattctatcttctaatcgaatcttgatgaaacttcaagtgctcgaactcccttcgatctccttgaagagtgcttgcttcctcccgatgcaagacttgaaaagaaatctcccgaaagcttagtaaaaccttctcccgaaggtagcactgatgttcttcttctttgtagacttgaatatagactcaagacaatataaaatacaaataaacagagtaagagtcgaacaagctcttctctacaaaacaaagactctcttttctaaagatatgagtaaaaataaaaatttaaaagaggtactaaacctagctgcaataaagtgtatttataatcaacatacaccttattgacagcttacacacggtctgaacaagaccccagcccactaaaaaattccctaaaataaatcttctgttagcccaagaatttccatttctgtacttatagaattgtgggcagtaagtacaactttccttttatagaaaaggaaagt

SEQ ID NO: 288946 - DNA, 678 bp, Cannabis indica
gaaaccccaatgccctaattctgcaaagaacaaggtatttcttttcctataaactaatgtgttttagtgaattattatccacttggattattaattctggacctactaaccatgtttatttatttttcttcttattacagcgcaagctgcttgaactcggatgctatcttagcgagttgaatcggatggttggacaaaagcagtggagttcgtccaagatgaagatgaagcttattttttttattattttttaattaattgttttagtttcaaaacaatttggatttcaattattagtttgggattttattccctatttttcatattgttgcaaacaattcttttaattttggagaattttataataaaattttctattttggaaataaattgcatttatgaattgagcttcattcactttatcttgtgtatgctagtaccaattatatttatatgctttaatgattgtatgtgtatgtatttttattattgactcaaattctatagtatttttaaactcttcaaagagttaatactacataagcacttaaaatttctttctatgtttatgaataattgttaattctaaaataattattaagaatttgtttaatagaaagatcttttgatttgataggggtggaaaaagttaagaataatatgcagttcaacgatatt

SEQ ID NO: 288947 - DNA, 699 bp, Cannabis indica
aacaacctaaaatgccctattgcttccacatttaccgacttgccatctcccacataaatgcttctttcagcatcatttggctttcggtaactcaggcaaccctgcatagaaacactgatgttagtagtagcaccggaatctaaccaccaagtgtttcttggtactgaagctaaatttacctcagaacagaccaaagtaagaaatgtacctttctttgctcgccatgcaatatacttagcacattccttcttcatgtgtcctttcatgttgcaaaagaaacaaccatcatcactgttggtttgagtttgtttcttatgtgcaggacctttatccttagcagcctcattctttcttttcttgcccttatctttagaggtgcttgccaaatgagcactttcagtcttctcttgcttcaatctttcttcctcttgaacacaaaatgaaatgagctcattaagagtccatttctccctttggcagttgtaactgaccttaaattgactgaattgtggaggaagagagataagcactaaatgcacaagcaagtcatccgaaagctcaagctttagtgccttcaactttgaagcaaggtgagacatttccataatgtactcccttatgttttccttgcccttaaacttcatggaaataagtttctttaaaagagtacttgtttccgccttatcgctttttgcaaag

SEQ ID NO: 288948 - DNA, 220 bp, Cannabis indica
aatcaaaaggactttttaaggttagaatttatggcttaaatatttggaaaatgaaagacaattttggctaaaggtatcataagcacaaaagaacccacaagcttctcataattttaaaatttcccgaagtgttcccacaactaaccatgattgagatttttctaaattttttttctaatcaccagacatcactgaaattttcttttatttctgatttttt

SEQ ID NO: 288949 - DNA, 520 bp, Cannabis indica
gattataagattaattcaaattattgttcatatattaattaatcccattaataaaaaataattcaatgtgatttaatcaaatagagttcatatattgaattatttttgattaatgggattaatcaatatatgaacaataatttgaattaatcttataatcttaacttttaattcaattaataattatttgtcacgtaattattaagtctttttcctttaattttccttttgttgatgatgctaatttattcatattttgatttctacaatttttgtgttcagaccattaaggtagtgttctactaggggatctaacgagtttcgccccttcgctaatggcctctaagagttcaaattccaatattgtataaatcttcaatttgttctatttcttatattaactaaaatttcactacctttttttttttttttaattttacaactttattgtttatatcttattagggacattcatggaaattagggtttctttgaaatatacaattaatgagcattactt

SEQ ID NO: 288950 - DNA, 199 bp, Cannabis indica
ttgttataatcccaataatcaatgatcctctatagatgatctacattgcatatggataaaattaccgttacaccctttcaatgtatgttatccttaaaacactttggccacctataaatgatatttttagtgaaataatataatcactaaaatgagatctcaaatcatttatctctattcagccaagctcgaaggaaat

SEQ ID NO: 288951 - DNA, 256 bp, Cannabis indica
taaaataaaaactaaacacgcatgatctaaaataaaatgatatactatataataaaacttatataccatataacaaaaaatataattacaatagaaatatatataataaagacaaataaaaataaaaatatataagatactaataaaattatatatcatgtcaataaaagtacaaaagaaaatgaaacctaaatattatttaaaaataataatataccgtataacaaaaaatttatataccattcaccaaaatata

SEQ ID NO: 288952 - DNA, 741 bp, Cannabis indica
gtcggcatcatttgagatgtctgctcccatggttgtgtcggcatcgtctgcgatgtgttctgatattgctgcccttgtgtcgacatctgaacattttgcggcatctgtgacatttgtggcatccgaggctctgacacatgagacgtctgaggcgactgcgtcatcatattcaacaatacttgcgaattgtttggcgactaaacaaactgcaagtatgactggtacatttgactgtgaaattgctcaggacttaacattccaggcgaaggaacaagaggctgttgtagcagttgctgaaacgaagtaggagtctgatgcggctgctgaaaacccattgggttaaaacccatttgagagcgagacggttgaggacgtatgggttgggttggagctgcatcattcatctcaacatccattggttcccgacgttcacgtgacatttgttgagtcaacgtctgtatttgtttctgtaactcaacaactgtttcccgtaagtccggttgatcagcagttgcaggttgtgagcgtcgtcctgatgattggcctttcaacttgcgacccactcctcgttgatggccacgcctctctccaagtgttttccgaagaatctcaagttctgaaacttgtgaagattcaggagcactatttcgagttgtcaacatctcttcctataatataaataagttagaaatcaagcaaagttacaattatttgaaaatatttaaaagttattattttata

SEQ ID NO: 288953 - DNA, 886 bp, Cannabis indica
atcaatgaagggcaaagggaagtgatcctttcgtgttgctttgttgagttttctgtaatcgatgcaaatcctccaaccagtgactgttcttgtaggaatcaactcattcttttcattcttgatcacagtcattccacctttctttggaaccacttgcaccgggctaacccacttactatctgaaataggataagcaactccagcatccaaccacttaactacttcttttctgacaacttctttcatgggtggattgagtcttcgttgagcgtcgattgttggtttggcattgtcttccatgagaattcggtgcatcactgttgaaggactgattcctttgacatcacctagtgtccaagcgatggccttattgtgagctcggagtaccctcagaagtctatcagtttccacatcagaaagagaagctgaaacaataactggcagctttttatcttgacccaaaaactcatacctcaagtgactaggaagcaccttcaattcaagttctggaggcttttcagtagatggcattagctcttttggaactgctcccaattcctcaaaataccttctgttcaagggcccataggaatcaagccactgcacataacccatgacctcttgctccgtcaattcatcttcagttaaacttagttcaagaggatcatctagcagctttttctcacccacaatttcatcaatcaagtcaatgaagaaacagttatcacttgcctttgggtacgtcatagccttcagcacattaaagaccacttcttctccttggactcttagctttaattcacccttctgaacatcgatcaaggcttggccagttgccaagaatggtctcccaagaatgattgctacattgctatcttcttccata

SEQ ID NO: 288954 - DNA, 702 bp, Cannabis indica
tatgactttccagtaccttctcagtggatttcaaagcctgaggaaagggcacctttactggaaggttctgtggcacatcagcatctggagcgggcattggtacactagtggtcttaggtaatggtgataccgtactttgaccacttcgggtagtaatagcattaacccctttgagattagactctgaaggagcggaggtttgtgccatatgttgccctttgggagtgattagaggctgagcgggaagcttaccacgctcttgaatgactgaagaatatttacactgcggtcgccaaaaattgatgtcgcccaattagttacactgcggtcgcggtagtaaacgggctatgtcgtatccacagggaggcaaattaccactaaagattagtataaatagaaaaagatagacattggaatgaattaaaaatgatgaggtgagaaagttgatcagataaagaacttggtaaggtagaaatatagctatgaaaattctattctaataccgatatcaattcaaaacacaattgcaattctacaccattaaggcctaaatttgtatattttgagccttaatagtgtagctaaaattaatttcaattgaatattttcatggttttaatcataaaattattttatttgaaaatatttcatttggtttaattttgtgtcatttttcaaatttgattaaattggtataaatga

SEQ ID NO: 288955 - DNA, 673 bp, Cannabis indica
attttccgtttacaatcaatactagcagagtatttggacaaaaagtccataccaagtataatatcaaattcggccaatggtaactccacaagatcagcattcaattctctatcttcaattctaattaacacagatctaacccactttcttgaaataattaattctccagtaggcaacagggttccaaaccccgtctcaagaatatcactaggtctatcaaactgatcaaggagtcttgatgacacataagatcgagtagcacccgaatcaaataaaacagtataaacaaaaccgttgattagaagctgacctgtaactactgaagggctggcagcagcatcagcctgagttatagcaaatacacgagcaggtgcaggcacaggtttgacctcaggctttggttcctctttcttcaactgaggacagtctttcctgagatgtcccaccgaaccacactgaaagcaggctctccggttacaagtcccggggtgatgcttcttgcaacgcgggcactcaggataggaataagtctgacgtcctcctttgttctggtttcctcgaaaccttttaccttgccctgaacttcccgaagatgggaaagttcttttcttctgttcaaaggtagaacccccactctctttttcaggaccagacatagggagaatagtgatcc

SEQ ID NO: 288956 - DNA, 87 bp, Cannabis indica
ttccaataagcagatcaagaatttacatcctaaattcactgacttattaattcttcgttgaatccacgcatagaacttagaatagca

SEQ ID NO: 288957 - DNA, 596 bp, Cannabis indica
ggtaactttgtacatgaatcttctggggaggacaccaagcacctttcgaaccagtttcgagttagagtaagttttccccagagcatacgattcattagagatgtcacaaagttttgcatggaattcagccacagactcatcctcctccatggtaagattttcgaaagcctttgccaaggcacgcaggagcctttgagttgaaattcgctctttccatttcaacagtggtccattgactcataggtttgggtataacgatttcattctccatcatcatggtttccaccacccttcttctatggacatccaaactctttcatctacaactctaaagaaagcacgcatcttggttttccagtatggataattggctccttccagcatcggaggtctcgaggtggagcctccttctccaaacatttccatcctgtgtcgaaacgagtcactcgttcttcgtcgagtcaccagtctccctcgaaacctgtaggccctcctcgtcctccatctaaggtctctattcctaacccaaccagtgaacgtgttcaaaccaaacgaaaattgtaacaccctaactagcataggcgtattacgtgatt

SEQ ID NO: 288958 - DNA, 841 bp, Cannabis indica
gtccaaggattcccaagtccttggacattccaaaatagggcattcatgacgatcggcgacccaactcctttgggttcgccacattcgaagtaacatcaaggaccaaatcctgcaaagaagaaattttccccgaatcagcgtaaccattcatacccgatccatcattagcaaaaaccaattctgaaatagcactaccaatattattaagacgaacagaattcgattttcttctcttattcttcccctctcccaaaataacattactctcataaataataggaacatcatgaagagccattaaatccaaagaacattcagctggaaaattcggtagagaagagggattatgacaaatcaaagaattcgacttagaagacaaatccctgattcaatcatccagccaaacaccctttcttttaagattcaccatacgatctggagaaattaaagatacatccatcttatcaagagttttctcagcaaccctctccattccatcagcacaagaaacatcaacctttaatgagcataagccccgtatctacgccaacatccgtgggagacatagcagggatagattgtgaaggaattccactattagaaacaaagccacttcctgccccgccaggcttattcaaaaatgtcgaggttccactaagaccagaaccaggattcaccgacccattaactgaatttatgccaattttccccttcccaaatatattcatggcatgtttactaataagtaatggggttcaatagtaaggtaatcattcccttacatttgtttacttgcattattaaaattaggaaagggagaagttgattaaataagggagaa

SEQ ID NO: 288959 - DNA, 709 bp, Cannabis indica
aatactttgcgacagaaaggaacgagggttagagatatgagaggaatgagtcattatattccgctgcaaccaatgtaaggtttctcaaactttatatgtgtttacgtttcattgttttacaaattcatatttaggatgttattaaacgtacttgttagtaaatatagattatggtaaaatatattccaacattttgaacctctcgagcatcatctcttgactttgtatcaaaacgtttaccccttacaatgtacgttttatgctttgctaccacaaaatttgcttcaagagcaatatgactcaactcattggatactccatgattaggttcgttcaactttgctagaatggtattccttaaccacccaatgaaagtttgacaatgctcgtctgttacccattttcgtttatttttatgatgtctttgaaccattgattgaaataactccttatggtcactgcaaaacatgtaatgttaatcaagttatcgttcgtcttgactaattaaaggttatccaaaggaaaagctacctataacttaagttatacatggttgaacctctgcattattgttcatcacgactaattgagcttgatctagttcaaacttagacacagtcaccattgttcctttcccccttaatcctctatcaatctcatatagtcagttctggtttgtaattctaattgcctcaactctgaccatata

SEQ ID NO: 288960 - DNA, 697 bp, Cannabis indica
ctgaattttccccaaccggtagaccggttgcccaaccggaattccggttctgggaaatttcagaaccccatccggaattccggatgcacaaccggaattccggttcctcgcaggcagaacttcaaaaattcacacaatgctcaaatcaactccaaaccaaaccaaaacttccagacctgttctatataacccctagaacatttctaaagcatcaaactcacccagattgcacataaacaaaaatcaccattaaagcccaagctttgagttctaaactcaaacttggttaaacctagataacatgcatccaaactagctcaaatctacttaatcaagcctagaataacctctgaaaacaataacaatcatctacagcaagcaattaacagattgaacacatttctttgaaaatcatagcttttgaacaaaatttcacaaacttgaaccaagtaactagcatgcatgaaacctacttaattccattcaattcaagcatagaaaatcacagaaaacaacctaaaactacagcagcaacaacatcaaaattgaacatgcaaccattttcatttttttcttgaaaactaagaaaactaaagagcaagattcaaggcttaccaagagcttagaatcacccaaaaacagcttgaaaatcaaaggaaatccagccctagcacccacacaaccagccgagagagag

SEQ ID NO: 288961 - DNA, 580 bp, Cannabis indica
cgccattacagaatctgggggtgccctgctcatgtcttaagaaagaaagatggcaaactagaaaagtgaactgaggtttgcatgtttgttggaaattctaaggagactaggggtggactattttatactcgcaaggatgataaagtgtttgtttccacaaacgccactttccttgaagatgattatattaagaatttcaagcggcaaaggaaagtagtattggaggaaatgctttcagatataacttcttctaatgttccatcctcttctacacaagtagaggataatcccactcccttggttgaacctttgcaagttgatacaatcgagaaatctaccactaatgttcctgtttagaagatcatggctcctcgtcgtagtgggaggatttccacaaaaccatctcattatggcttggatagtgaaatcaatatggttgttggtgacggtattgatgacgaaccattgacctataaacaagcaatggcaagtcttaaacagaaacaatggtcagctaacatggattcagaaatggactccatgaaaaagaacaaagtctgggaatatgtagacgcacctg

SEQ ID NO: 288962 - DNA, 714 bp, Cannabis indica
ttcactcgaggcatgctcctgacgtcgaggtcgaggagatggacgatgactggacggccccggctcgcgaatcaggcgaggatgaagaagaggcggaagggagtgggacagactcggtcgacgacacccagctgaacgagcccttcgcgtgcgaagatctgatttcgagggtcaccaaatcagacttcactacctttacgagattaaatctgctgcgacttgcgtttcagcgacctaaaccgacccagagggcgcatctcccttttaccaaccctgcgattattcccacagaggatgtggtagtctcaatacccattctccgatgtggggtatcagtccccttccatcctttcatcgcagccattcttaaacggtacgatgtatcacctttccaactaactccaaacagttatcgcactgccctagccttttacgcgatgtatatggagtacgttcatagggctccctcagtagaagagttcagctatttctacgatataaaaagcgtaggccttcataacggtttctactgctttagcaaatgggcgacttctgaaatcaatggagtagaaggaatggtgtcgaacatgggggactggaaatcaaagtggttctacgtctttaaagtccctgggattagaactgactttaatcgcagacctagtatgtcgcgtgttttttaacttaggcattttttgaattactttgagatct

SEQ ID NO: 288963 - DNA, 504 bp, Cannabis indica
ttaatcagataataagtgggattatgatcctactaatctatttcaacataaaatttaaattttgctataagtgagtaaataagcgtaatgtataaattacggagatttatatatcatgtgtgaatgtaatatgagctatatgtagaataaaaatattttcaggttcggcgaccctgaagacttaataagtagatatataagcgtaatttattaattacgaagatttatttgaaatacatgaacacaatatgagttatttgtaaaataaaaatatttttaagttcggcgacctagagacccgattggaggccaaaatatcacagcagttttagttagaaatattaatgagattattgggataagttaattttaaaagtaccagggtattttagggtacttgaaatttgcctaataccttaaaagtagaagtttgttagtagctaataaataattagataactattaataataaagtttttattaatattattattaatattttat

SEQ ID NO: 288964 - DNA, 661 bp, Cannabis indica
aagggattctggtgttggatgaagtaaaaaaatcaatagagaaggggttcagggagtttaagcagttaagattgcagggtggaattgaagatccgcagcaaggggggatttgtgtgactcgttgggggcttccgagacctgctaggatgaagtgctttgttgattatgcttcggcttctgatgggggtgcggtggcagctgctatttttgacatttcaggcactatctttgcaatagcagctgcaaaagctgtggttaagtctcctctgcatggggaacttgaagccttgcggtctggttttaatatggcggctcagctgggggttgatgtgggaacgttttactccgacaatcaaactttggtgaaggctttcattgagcgaagttctccgcattggctgatgcactttgctttcaatcggattctcactttggtcgacaatggaaatgtaggggtgtgttggatttctcgaaaaaataatatggcagtgtgggcttttctagttgactgaagcctttgatgagcaggcccagcccaactagggttttgtagctaagtcccctccctaactctataaatacatattgtctcatcacaattgtataccttttgataatcagataaataaactgcttctgatttagagatctagggaggaag

SEQ ID NO: 288965 - DNA, 469 bp, Cannabis indica
ttatttggaataaaaaattgataaaaataggccaaaattaggcactagtggctgaccatgtaatgggcccaacactaattagatttttgctatttttcttaactattttatctatttttcacaaatatcattttttgcactttcaaccctataaatgcccaaactatttatttgataattataaataattaaaataattatcaaataaaattttcatttataatatttattaattagactccataaagtctcttgattaataaataaacattacaatcatatttcttcacaatcaagccatatctaattgaaaattcacaaactagacatagtctaattttagaattataattgattaattaaaatcaattaactgagtcttacaagcagtattgtcttaactagtgtggggaccatgagcctatacaaccaagcttctaataagcagatttagagtttaccaagtaaa

SEQ ID NO: 288966 - DNA, 648 bp, Cannabis indica
acatacaaatcatgacaaccataatatacaacaatacacaccataatgtacattgattcacaaactcatattgtgtccataccacacattctcagtaccatatacacactcataataatacatcacaaataatattttaatacacaaataatttaaattatgcagttcaatatgaaaaactacctaatttccttacctcaaatcccactgctaattaaggcttgttatcccgtcactagtctcttaataaatctcgaaagaaaagagtatgattgatactttgatccttgaaaacttagggtgaaggagtatagatagcagagtatttcccttagtcgtctcttgaatattacgtagtcgaacattattaataaccccagtagaatgtgtgatcataaacttatttagataattactaagacttcatggttccccatctcgtttttacaaaaatcaccaaaacatacattcagtcaagattattgatataattaaattgacacactactcctctctttatcctataaatccatatctattctatataaagtgtgcctatataactgaaattcttagtttttgagaaatttatgggtgagttttaatttttatttaataaataataaaatattatttatatgtaataaa

SEQ ID NO: 288967 - DNA, 527 bp, Cannabis indica
acggtcatcaatagattcatctacaaaaaaccttccaattgaagcttctgcctctcctcattagtaggacaaatgtttttaatctttaactgaaaatcataatcaaaaaaaccaaaaattgaaacaaaatcaattaaataaccaaatattaataaaacagcacaaaacagaaaaaaaaacagtaaagaaactgaaaattaccttgttcaacggcaaatcaaaaatcttgcccttcaagtctctaacagttggatttttggtcacaatggtattgctccaattcagaattattggaatcctagatgaaactcttttgcagaaagtgtttacaatggcaggacaacattcataaaaccaaacaataaacacccacggacatcccaatgccctataccaaccatcatactgacctcccttctctgctttcttatttttcattataatcccatgttgtattctacctttgaatgaatcaatagtcaattcaaatgattccctaccccaacaatatgttgggttttgtgccc

SEQ ID NO: 288968 - DNA, 201 bp, Cannabis indica
aacgaaaaaattgcgagctgtacggacagtatgcattgcatactgtccgtgcacgcgtatcagagtgcatgaccaagaatcctcggtgcaggaggctgcatgcagcctctccgcgcgcgcgaggctcggtttcagacaagaaacttgtctgtgcgcgtgttgtccgagagagaagccctcgtgcgcgcgcgtgggtagatg

SEQ ID NO: 288969 - DNA, 700 bp, Cannabis indica
ttttggtctttttatttttttgcgtctttccatacttaaaatctacaagttgaacttgttggagaatttgttccccagacagtggcaaaggagccatatcaccctcttcagtaccatcgaatgctttcttcttccgtctatcaggatgatttgcaggcaagtaccgtctgtgacccatataacacatcttgtgtccatttgccaagcgacgagccgatgtgttagtgcaacaaatcggacaaccttcgtaaccttttgtgcttaagcctgataaattactataagcagggaaatcactgacagtccacaacaacacagctttcagattaaaaaattcttttttaaaaccatcatagacctgaaccccgttctcatacaattctattaaatcgtcaatcaatggttccaaatatacatcgatattatgtccaggttgttgcgggcctgatatcattaaagaaagcatgttaaatttcctcttcatcactaaccagggaggaagattgtacataactaggaagacaggccatgaactatgacgactacttagagatctatgtggatttactccatccgcagacagaccgagacgaatgtgtcttggttcagatttgaattcaggatttatgtagtttacttttttccaagcttgggaatctgcaggatgtctgagttttccatctttcactctcttggtctc

SEQ ID NO: 288970 - DNA, 571 bp, Cannabis indica
attttttgacaagattcttcaagaagagattggggatcgtcctgccaggaggccccttcgtattgaagattcttccgagaagcaaacttcccggccacagccttcggtccccgaaccaaactcgggggctcccggtgctagcacctccggtgccggcggtaagtctcccttgataattcgttatgttccttccgttgatgaatacaccagtcgtaggcccgtagggttcgacgagcgtcttcgtagatttaggatgccgtcgacccggtggggggatcgtttgaaggagttttatttttcgaacttaggagattacctaggtcggtcccggatgggctccggccctccggaacctattcccttaggtccctctgcttacataacgtccagctggttccggccctcggacagttatctcggagatgacgctgccagcattaaagttcaggactttgctagggccgaattaggaagttcgggtaggagtagtttatttgttgtatcttgtataagcggttcctcacggacttctaacacttgcttattttttgaaacaggtatctccatggat

SEQ ID NO: 288971 - DNA, 975 bp, Cannabis indica
caccaacatctgggtccgaactggtcaggaggattcctgaacgggtgcaagcaccaactccacccatgcccgtgctgcctgaggtcaagaagggcagggaggtgatggctcatcacatgaaccggctggttcctgaggtcggtgagtagctggctggtgctgacgactcatctctagatgtgttggtgggcggagtcttgaaggagcttaccagggttagtcttttcttttcgacacttcccttttagcttttcatacttagcttcttatactgactttttcctttatgcaggccggtttgaagttggcttatacctactcccgggctaaatctgctacttccaagagtacggctctgtccgacaccttgagggcggaggcggacttggccaagaaggaagctgaggaggccagggcggagactgcagctgttcgccatgagttgggtgaggccaacaagaagctgtttgccgccgagaagaaggtcaccgtgctgacaaaggacctcgaggctgctgatcgctttgaggaaaccatcgagaccttatctgctgaagttgatcgtcttcaagatgagaggacttctctgcggcaggtccttcttcggctgaaggaagataaggacgctcaggcggccgaggcggaccgcttgaaggagaaggtcgatgctttggaggctgccggcctcgagctcttctttgatttttggaaggctaatccccaagccaacttcgactacttgggcgacgccaaggacatgtacttcgagtactgcgcggcccaagtcgcctatggtgggaaagaggtggttgcttcaactttcggccaagcttctgaccatgttgctgatgcttctcctgctcgaacaacagatcctcctgctccagttggctcagaagaaccgaatccagagcctgggactccagctgtttggacattgatctttttatctcttctatttatatatatatatat

SEQ ID NO: 288972 - DNA, 308 bp, Cannabis indica
tttgaattacatattcgaagttgcgatcagatctatcattaaaaagaattgattcaatacatttcttatgtacccataggtgctatattggatttgaatcagatttctgatcaatctatattgatttactgcctccattatgttgttgctagcaaataccattatgtagttgaaatgactgaattttgggttgttcgattaactaagggaaactcaataatggaattcataaatgtctcaatcttattttttttattgtcatatgaatattcaagagttaagaccattccaatgctccttttcgccat

SEQ ID NO: 288973 - DNA, 678 bp, Cannabis indica
cacaacactaataagtgatatgctaaatcacttactcggggacttaaacttgaaactaaaagtttccctatcgataaaccacatggcaataccctaaataacacaaaaatgggaaaaactagggttcccaaattttcccccaactggtagaccggttcctcaaccgaaattccggttcctataggcctctcggaaccggaattccagttcagtgcaggaaacactaaaaattccatatcttaagaaattcaaccccaatccactccaaacttttcagacctgttgtaaacatcctaaaggtcaataacaaagcaataaaacacagcttcatgcaccaatacaaaaatcaccattgatgagtcaagcttgagttcaaaaactcaaagcttgctcatcccacaaactagctattcaaaacctgctcaattcacaatatataaccataatataactccagaaaacaaacccgaacacaaacaacaaccacaacagctgattcatcattttaccataaaaaccaaagttttgagtttaaagctttacacatggttaaatccaactaactaacaacaaaactagcttgaatccacataaaaactcataaataaacctctgaaatataacaacaaagaactaccacaaagcgcaacaccaaaatcaccaagcatgcaaccattt

SEQ ID NO: 288974 - DNA, 1025 bp, Cannabis indica
ttacaattttaccacttacacacacatttcatgcatgcatcactacatgtcaatagactatgacctctatcaatcaatcatccatcattttcttctctttttctcttctttttccttttattttctatttcttttagtttttttttttaaaaaaatatcaacctccatagctgaactctttcttctccatgatcccaactccatttttcctcttctttttgttcttcaaattttttttcaactcccattaaccgaatcccataaccgttttctatccttttatttttctcttaatccatatataaatatagttgtaactcgttcttcatcaactccttcccctgttcaaaagaaaagctttaaaatgggattgaaatctttagctaatagaacaatggtaaacgacctgttgttgaggaggatgactctgattttgctcctccattgtctaaacgtaagcgacctcctccaaagaagaaatcgaaggtggctgcccaggaaaaaattcctgaagatgtttctcaaaaaaataatcaagttggtggtggtcttcgatctcaggtttgttttcggtttctttttggtttcccccttttttgaaattttttcgtatttgacattagtgtgttttgtgtttatcgattttactattttaggtttttccttttaacatttctttttgttttgtttggttttttagggcttctatttttttagtttaatttatatgttcttttatgggtttttcattttcgtttgtttagtcttaatttctgtttcattttgttgttttttttttctatttttatttttccagatgttttattgtttttcatttcaatttcttcatttgattatttctcattttgtaatagttttttcatagttttttaatagtgtaaacaccttctgtatgtattttttttaatatgttttttgtctagttatttcctgtccatttttatatcatcaatgggtaacaattagatttaccatggatgttgatgttcaaagagtttttcctg

SEQ ID NO: 288975 - DNA, 389 bp, Cannabis indica
gatgaaaaccctgcgaggtccatgcatcaatatgaaccacgaccggttcacacatccaaaagaatcccgcgagattcacatttttattgtgcgatggtcttataagagacttgcgagtttagataaccaatcgtaaatgtgatgcacaacatgaataaggcataatgatcatcgacaaacgcgggctctgactattttaagttctccaggacagaacaagctatactgaagaactaggggcatgtgttatcggcataaatttaccctccccgcgagaaggacttgtctatagagaactcgctgtattgaaggtggctcgcaattttatagtactcgcagtaccgaaagaaatgatctcgcaatattaactaaaagagacctcgctatat

SEQ ID NO: 288976 - DNA, 531 bp, Cannabis indica
ttcagatatgtagcactcaaccatacatgcttctggccgatagtggttacgcacataacttttaagtaccttcatatttctttcaaatggatacatccatctcgcccacaccggcccacacagccttgcttctctcactagatgaaccattaaatggatcatgatgtcagaaaaaagatggcggaaaaaactttttccaggttgcacaatgttttgactacatgttcatgtaatgcatctaacttatccaattctaattccttcccgcacagcctattaaagaaaatgcaaacatgtgtcaaacactctcgaacattttttggcaagactgatctaatggcaattggaagtagatgttgcattaacgcatgacaatcatgtgatttcagacccattagtttcaattcagtctcattcaccaagtttttgatgttagacgagtaaccatcgggtactttcatatttgcaagtgatttgcaaactgtttgtttttcttttttggacaaagtgaaacaagcaggaggcaaatat

SEQ ID NO: 288977 - DNA, 623 bp, Cannabis indica
tggttggccttgacatactttgtaagtgcggttgttttcttgattcagaagttcatttcccacttcaagttgtaacattaattcgttggtgtcgtggtcgtagtctccatggaactgacaaaattttgtcattgtcccttttcttggtatctttcttcatgggctcatgcttcttgtacggaattaacgactgagtggctatgtacactctctctatatcttcagttaagatagtgaatgcagtgtgtttagtgtgatcacgcggagtctgtccgggcttttcggtgaactttcccttcttcccgtttccttgcttgtggttgttgcctgaacgcttgccacttgaactgctggaatagttgggaagttgggcggacgttccagtggaaggaaccttcgttttgcttggcttttgctcaccttctgctcactgaatggcttcttcgagcttgatgaaacctttggcccggtcaagaaaatcactcattgagtcgaccggtccgctttgccttatatcctttcaaagtttgccaaggactttaatgcccccagtattgcggataactttccatcctggattacccgtgacaccttggtcgcttccgtcatgaatctgctaatgt

SEQ ID NO: 288978 - DNA, 765 bp, Cannabis indica
tataaaaaatcgttaaccaatcatagcatgccacaatattgagaaagttcagtcctaagtataaacgagcgagacctgtgctcaaggcccactgacccaaggacaagagcaaaaaaatatttcttttaaaattatacatatttttttttactagttataaaaataccataacttattttaaataaaggcccaaatttttttcctatgacctactaaaatttagaactgaatctaatatttagcaccttaaaatagtaaataaattgaaaaatacttattttttatatccattaatcaaaaatactttcatattctattttattaaaatatacccacttttatgagtgagttctccaatatacctttactttctacttatgtcaaacatatgatttaaattaacttaaggagtataatgtggacatcatctataaaaatgagtatatcttgaaaataaaaataaaaattaaaacaaataaaataaaatggatatactatatattttcctccttaaaatacctaatcaaatcataattaataattattcaaaaacacaaaacacaaaactcttccttttattaggagaatgatggtttattattctctttattttattttattttattaaaataaaataatgagaagaaaaaaaataaatgttaagtggaatcttttagagaaaaagaacactcttctctattttcttccctcatctcatcccattcccatctctctctctctctctctctctcctctctctctctc

SEQ ID NO: 288979 - DNA, 551 bp, Cannabis indica
tcaacactaggaacacaaactcgagctttgtataacaacattccactattcgagactgaaaagcctctaggccgaccagccattacttcgtctcgagccttatctagctcaggatcttctagctgtgcctttctgattctctctaacagatcagattgaagtgttaaattatgtaatttcccgaccacgaactcaattcctgcactaaccatttccgaggctagttgaggagctatcataaccgtagtacaaacttgcccgggaccttttctgcttaaagcatcggccacaacattggctttcccggggtgatataaaatttcaccatcgtagtccttaaccaattctaaccaccttctctgcctcatattcaaatctttcagggtgaaaaagtatttgagactcctataatcaatataaatctcgcatttcttatcatgaaaataatgtcgccatatctttaaagtagaaaccacagccgcgagctctaaatcatgagttggataacgctgctcataatctttcagttgacgagaggcataggctatgac

SEQ ID NO: 288980 - DNA, 586 bp, Cannabis indica
cttgcttgattaggcaatgcaatacaggattatcagattaaagtttcgacttgcctaattaggcaacgtgatgtaatgaagatggttactttatgaggtaacacgtatatataatttatataattaaatgaatatgaattttattattggtataatggttttttattaccaaatatttgtatactggtctttattcatggaagatgccagtagtgatttggatttaatcttatgaacaattcgtggtggtttgattctgattgtgtataaatgatagtattcgaataataaactatatgattattattattacttttcttgttgagtccttgtcactcacgggtgctatgtggtgcaggtaatggcaaaaaaagctagatcaaccatgaggtgacaatcttctccagcaatgttcatattgacctcgccgacctgcgtgccagattgttaggagttggttcaggctttatctattatgtattttagctttatgtttttgaggcgtcgttgtatatagttcttttataaaaatttttataacagtgattctcagaacacgctttttatgtcgttataatgtccgttt

SEQ ID NO: 288981 - DNA, 688 bp, Cannabis indica
aacatgttatgatgttaaaactttaataaaacgttttttagtagtgttaaaattttattagattaatttttgaatttttattacggtgtttgataatgataatagtgtaaaccgcctgtgccacactgtattttcgcggtatagtttttacagttttaatattttgcttacagtttaagaaattacaaaaacttcaaatgcggtttagtttaaaaaaaaaaattacaaccctcatcacaaataccccaacattttatttcctttgtgccttcaaattaacatcaaagatgtcattatttctatttatacgacgcatatgttgttgcaacaaaaagaataaataaaaccatatattgtcatatatttgtcacgaagatttaaccaatttctagattgccaaactgaaacattatgaatgttcggcaaacaaacgcaatcgttgattaagaattactcacaattttatctttacttttttactttgagcaccaaaaagttcatatttaaaaagaccacaatcatgttaatgcaaattactgaacttacaagctgctagtagtacttgtagttgtaataacaaacaagagtagatataagtcaataaccaaagtaacaagaaagaaagacactcttctccaatgcgtcccataattgaagcataataaatatttaattaataataataata

SEQ ID NO: 288982 - DNA, 497 bp, Cannabis indica
gcttcgatttgatccgggttcacttctacccctcgtcaagttactagatgacctaggaactttcccgatccgacagtgaaagcgcacttggctgggttgagcttcatcgagtgggcgaggaggatctagaaacactctcgcagatgatcgacgtggtcagcgccatctttggatttcactaacatgtcatcgatataagcttccatagtaagtcccaattgttgggcgaacatcttattcaccattcgctgatacgttgccccgacatttttaagtccgaaaggcatcaccttgtagcagtatgtcccccgttcagtgatgaatgatgttttatctccgtcgggagggtgcatcattatttgattataccctgagaaggcgtcaatgaagctcattagttcgtgccccgcggtggcgtcaattatcatatcaatgtgtggcagcgggaaaatggcctttggacaagctttatttaagtcagtgaaatctacacatac

SEQ ID NO: 288983 - DNA, 558 bp, Cannabis indica
cctagtctcggttcgggtttaggtcactgtctaggttttgatctgggttcaggtttgatcttaggtcctggtcctaatcctagtcctagttctgttctagttcaattggcgattctaagttcttgtttgggtttgatttcgggtcagagttcgagtcctggtctgagtttgggttcaggtctggatttcagtctaggtccagatgaggctccgggtgttggttagcgtcctgagtctttgtctaggttcggtcagagtcccaagttccaatccagatctgagtctcgattaagttcttggtctaagtccttggttctgatcctggtctgggttcgagtttgggtccgagtccgggtctagctttgggtctgattctagatgtgggtttgagttcgcgtccgagtctgtgtccgggtttgtgtccaggtctggaccccgatctgggtctaggttcgggtccaggtccaagttggggtcccagttgcgggtccaagtttgggtctgggccaggatctcagtctagatccaggttcgtatccggatccctatctaggtcca

SEQ ID NO: 288984 - DNA, 523 bp, Cannabis indica
tacaaatcaattttctaaatagtgtaccatatagaaataatattcaataaacgaaactccagatcccaattatataatcaaaacttacttatatattactctcgaataaagaaggaaagagggttgtgactctcgaataattagcatcaaatatcagttcaaatattaatgggatttgttttatttttattttattattttattatatataaataatattttattattttattaaatataaataaaaagtcaccatgaatttcttataaaccaagaattcagttatataggcacaatttatatagaatagatatatactagatgaaagttacgtggcgagccacgtaaatattagttttatttaagttctagtggtttttgtttaagaattcggtaactaattgtagattattttataaacaatatgttttatgaaagtaaacttgttaagaatgtcataattgtgtatataaacctacaatatatacattgttattcaaatgttataatggggatttcaacc

SEQ ID NO: 288985 - DNA, 377 bp, Cannabis indica
agtgttgtgattttttatagtttaggagcctgtaatccaccgcgcagataagttccagtcaggttgaccagcacacctgaattctaggaatcccagataagattagtataacagtatgcatatgtagattacatgtttagcgtgcatgtaggaagcctgttagattacattagttatgtatgttggcttcgaaccatccaactgtgtcacgtcggtacaggctggagtatgaccagcttatgatcgaggggtatgggcgtctgatcataaccgggattatgtatgagtatttttatgcttttcttactgagtctgtcgactcacactgctacagtttatgtgtaggtaaaggcaaggctagagctgatggaccgtga

SEQ ID NO: 288986 - DNA, 653 bp, Cannabis indica
ctctctctctctcggctggtatggtgctttagggctgagatttcttttgattttcaagctcttttcctttcaatctaagtgttcttcaagtgccttgtaagacctttgtaccttgttcttttaatttcttgaattttgatgaaaaagatgatgtatgcatgcttgaattggttgtgtagttgctgctgtgttttgatgttgatttcagaggtttagtcttgttattttaagtagattagagctagttaatagatgatatttgctttgattcaagattgaaagtttttagctcaaagtttagttttcaaagagaattttcgaaatcttttgctgtgattgttgcatgagcttgtgtttattttctgcaactttaatgagcatgtttaagtagtttttggctgttttggatgcttgatttgttgcttagacaagttttgagttttagaactcaatcttgaagctttaatggtgaaatgagtttctgtggttgaagcttagtttttatgctttagaattgttccttagggtctaaatagcaggtctggaagttttggtatactttggattggatttgtgcaatgtgtgaatttttgagttctgcctgcgaggaaccggaattgcgattgtgcatccggaattccggatgagggttc

SEQ ID NO: 288987 - DNA, 508 bp, Cannabis indica
tgagggaatggctgagatcctggacttggaagatggagttcaaggatgcacaagcagcgaaccgcttaggtgcacaccgggtaagctgggacgcaaactcgccagttatctctgcaacaaagggagctaaggtgggcccgaggaagcgaccgaaccagttcgacaggggatccaaatttagatcccacggattctggtattccgggttggttagagtattttgcatctaaactcgcaagaccctccaaagggcttccacctcagcatacccccaggagtattcgtccatggcgtagttgtgttaagctatccggagctcctgtctcgcctcatctcaaggaaccggagtcagcacaatattgggaggggcagtgtgttcctccatgggggagaccccgccatcgagaccgtgggccggagtatcagctctccgtggccgtttgggctcctcctgggcaaccattttgcctttgcgtttgcgaattagagcaatttcttgctcttcttc

SEQ ID NO: 288988 - DNA, 868 bp, Cannabis indica
gacactagaagatctacttcggcctactttttcttaacggggggaaattgtactagttggaaagtacaattacagccagtagtggcgttgtccactactgaatctgaatatatagctactacagaagctattaaagaggctctatggttaaaagggcttatggaggagctgaagttaatgaaaaaggagcctataatctactccgatagtcagagcagcatctatttatgcaaaaacccagtttttcatgataggacaaaacacattgagataaaatatcactttatcagggataaagtttcacaaggacagatcgggatagacaaagtgcctactgaagtgaatccagcagacatgggcactaaggttgtgtccctcaataagtttaagctttgcttaagcttattggggattgacacaggttggtaaaacccttaatgggttcgagctaagaccctcagttacactcaaacaacacagagattacagtgcacagttcatatggggtttaggtggaaattgttgaagtaaaccccatattatctatacactgtaaaaccagattttttacaaagagattacaaaggcagtaaaaatcctaggtggcctctggcctctatttacctagacaggtttataagttaattaataaagtttgttaaaactttattattaactcttttcctgtattccactactatatataaaggcaaaaattacaacatcagaaggtgaagaaaaaatccagatcagtgacaacacaacaaaagactgaacattacaaaaccagatcagagacaaatattcagattcttctagagatcaatacagagcaacaaaatagagggagttcgtggttgaggcttac

SEQ ID NO: 288989 - DNA, 1006 bp, Cannabis indica
agcagatgcatttcccaccaattttctacttgctgagagaacattgagcctttcaagtcggcattgaagcttacagcatactttgcagctgctgccaagtgatatggcttgagactcaatcaggacaacaatggacaaatactctgcatctaaaccagacaaaatgttagaaataaggtgcctctcagggtaaggttcacctccaagagctaaggagtcagcccacatccttttcatcttgagataatctgccatggattgagatcccttgcgtgtggtctgaatctttgtcctcaaatcatccatattggctcgagaatgtgctccatataactcctcgagtgcattccacgaagcaaaggcagattggcatcccatgacctcgaatccaatagcctctgtcattgacccatacaaccaacccattaagagctggtcatgtaaaagccaagtttcgtactctagattaagctccataccagatccaggagcatcttcaactattggaccagttcgaatgaactctacaggtgctggccgtgtcccgtttatgaatccttccaatcgatgcccacggatgatagtattcaccatagttttccacaagggaaaattgttacggtcgagtttcaaggagaaaggttggctcagtgtgttactaaaaggagtaacaataggtgctgggtttgaggaaaatggtgtagtagccaatactgaaggagacccaatagtgtgtccagcaggagtctgatcaccttgatttactgcagaacttgtctaatcttgaggagtcgacatagcgttggcaaaggtgctctgataccaagttaaatttcaaaggatgcagtagtaaaatgatcagctcaaatgagactgatgcagggcaaatccatttatagaaatcagaaagattacagaggtgaggatgatacaatctcaacccactactacaatattagcctttagaggcagttttttcaaccctatttataaaaagggaagctaa

SEQ ID NO: 288990 - DNA, 605 bp, Cannabis indica
gttgcatgcttagttttggtttattgttgctgctgtgtttatggattgttttcagaggtttaagcatgttggattgagtggaatgaaactgttttgatgcatgtttggttggttttaaaataagttagagttttggttcaaaagctatgggttttcaaaatgaaatgtgaaatagttgttgtgaatgttaatggtgcttgagtttgttttctagggttataatatggttgtttatggtgaattaaggcaggtttgatgcatgttagttagatttaacaaagtttgagttttgaactcaaagcttggagctttaatggcatttttagtatctgtgttttctgggtggttttgatgctttagaaatgttctttggggtatttagaacaggtctggaaggtttggtagaattggatttgatttgaatgagttttggaattttgcatgtttcctgcgaggaaccggaattccggttgcagaaccggtctgccggttgggggattttcaggaaccctagtttttctcgtttttatgttgtttagggtattgccatgctttttatcgatagggaaactgctagtttctagtttaagtcctcgggaagtgat

SEQ ID NO: 288991 - DNA, 903 bp, Cannabis indica
taatggtgatcaagcaaaagtaagcaattgcacaataaccacacttgaatgaacaaaaccaatttactaaaacatagcaataaaatatcaaatcacaattcaagtcaataaaaataattctagcaaaaagaaaattaactcataatggattgtgcaaaaattacaaagtttaaaataagagaaagaggaaaagaaaaacccatattggagttgtcacaatactccaagctttttcttgccaaaatcttcttcttcttcctttgaatatttgccaatctccaaaataaaaatgctaaattaaaaccctaaataaaactctctctctctttttctttttcttcttttttttcatttttctctttttttccctttcagccacctcctgcttttttttcaatccactcacgcctactgcccttctcaattcatcatatatataatgtctttttttttcatttctatttttttttcaaatcaagccctcacttgattttcttttctctttctttcttttttttttttggcccaatctttctttcttttgactttcaactaaagcccaataaatatagccactcaagtgtaaaatgtttgggcttttagtccatttcactttacatcaaatcttggtggtcattagtgagtccatccatgaacattaatactcttcatttgaactaatgtgacaagcccaaaatacacatttaaactttctacaaaataaaaacaaaacattgagattaaaacttataaaatgggaaactaaataaaattgataaaatattacaaaattaattgaaaaatactaaaattactatttatgcataactaaataaaaccaaataaaagtcactaaaataaactaaaaatacttgagaacaaagctaatttaatgcccaaaaa

SEQ ID NO: 288992 - DNA, 509 bp, Cannabis indica
gagttaaagcttatggccaacttgcgtgtgcaaggcacaatgttgttgccatttggagagactctgattacttccaaggcagagagcaaacctttggggaagttggtgtctaccaagcctcctcatgttattgcacattgttgggttttgtgccctaaataaaactcatttcaatataatcagatttactaattaataaaagattagaaatcattttatgttgcatggttcacatgattatatatgtttaatgtataaactctattaagtccaaaacatatatttattcatgattatagtgttgttaacacagtggaatataatcatgattacatatttaaaaaagtataagtcccatgatttgtcagtaaactcgatttagactgacattgtaatcagcaataaggtatacttacaccttggataagtgctatgtcctttctagggcattggcaaagtatgtctgtatcggatgtatcgagtatacatcgaattagaccgatattgaa

SEQ ID NO: 288993 - DNA, 1045 bp, Cannabis indica
ggtcagtcatcagtccatgaagcagccaaagtggcgtactcgtgtataagagccattattccgtgggtgtaaggacccaatggaagcttgaagcagggacgttacatttgtgttttataaatttttcgtgtcatgagttgtgttcgtgttagccctttaaaataaatctaataactccacacaatataataatactaaaaataacaatttaacttagcatgacacgagactctacgagttttgacactacacataatttattcaagtcatgtcagtgttttataaaattttgatagtcacagttcgtgtttgattcaacaattttttttcaataaatctaagacctcaaatacgattcagacacgacacgccaacacaaattgtcaccccaaaaaactaacctattttgccaatatatataaataatggatatattaataatgcatattattttacatgacatattgcatatcattttctaataataccttttgtcctaattccaacctcgatccaaccctaccctgacccaatcttaatccaacctcaattctggactcaaacttcagcctacctcgtcaacccaaacccaatccctatccgaacctaaccccaaactcgtaccctgacctcaactccaacttggatctaaaataatacaagttaataaagattatttattatttattaaataatacgattcatataatattaaaattaaaaattagtaatagttaatattagtgttgtaagttcgtgtgtgtcgtgttagcccgacatgtatttatccgtgcttttcaaaaaattgaccgtatcatgtcgtgccacaaaaaaatattggtcgtcgtgtcatgctaatatttttaaagggtataggcccggtacgggtcgtaggtccggtatttttgtattgtgctcggattcatgacgtgctttgctcgtgccgacccgtatttctttaggccaacctatttatatattcgggtttaaattcatactttacttttatatatatattacaattattaaattatatgtatctttg

SEQ ID NO: 288994 - DNA, 831 bp, Cannabis indica
agagcagataaatgatgaacttttagctttgacaaactgatttttacattcctctttagactctcaaaatcatttaaaagcctatcattttcttgtttttcaaaatcaagatcaatttcaaaaattttacattgattcaagatctttattttccttagacaaacatttgatagtctttgacatcaacttatttttagaacaaacctccaaccacttaccatacattaccttgtagaattcagctaaagaatctttgtccgattctgattcatcatgtaacaccctaactagcataggcgtgtgaacatgattttaaacatactgtgcagctcgttgctaatcaacgaggttattgaaaatcgtgattaattaaaatttgcttatttaattaaaaacttaaagtattacattatataatatttcgggatcccgtttacaaaatactttacaaaagtttgctatacatataatcaaaagtttgtcacccagcgactaaacaacaaaagtcctgatatcacgaggatcgtacgctccaaccctaaccgccccgacatgtacaatcttcatctgctcgtcctcacgattcctcagctttagccttgcccttacctacacatggaaattgcactgtgagtcgacagactcagtaagaaaagcataacataaacatacaactaacccgggttataacatggcgcccatacacccggtcataaccctaatccccgtgtctcacacggtactgagtctagaacgttcatacgacaatactatcgaccatgatgttagcctatactcaatatgctagtcatactctagctatattgatgt

SEQ ID NO: 288995 - DNA, 452 bp, Cannabis indica
taaggacggtttttatgggttccgggcccaccctgctaacgaaggggtggtcccgtataacaggcaaactcacgttaaggagtatcgccatcgttttttcttctcctccgggttccgggcagtggaccatcgggagctccttactgagtgggtgaggattcctccctatgaacggactgcacctactcaggcctttcttcggagagcccaggcctttgcctcttacgaccgggccgatcttgacgtcgggggtctggtcactacggagaactgcaggaaggcaaaactcatccttccgcatcaatccgtggaggactctaacctttcccgggttatctgtcccaatgtgagggcgccggtcgcggagaagaccttccgggacgagatcattgccacggcagagaagaagtaccaggagtatctctatcggaaggcccaggagaaggcgtact

SEQ ID NO: 288996 - DNA, 631 bp, Cannabis indica
cgaacccagatttccagatctggaagcttcagctccaaatctcagtgttccaagttcatgcaaagaaagaaaaagtgttagtgagtgagaaataagaaaatacagagagataaacacatagaaagaaaaagagagacaatctgaaataccagtcaaagttctgtgacttggatttctcaccttttgtatcaatcttcatcaaatagtgcagatctgtagatcgtcttcaaggcgagctcaaagaggacgtacccctgatttagggcgaacctctataatctctggtgttaattttctaaccctaacctaatgatctatgtttgatatttgtatgtgtgtgttgtggggtgtttctgggaaggtttctgggtaagatcgatcaagagatcgagaaagatctctggttctagggtttgagaaccagagagaaggcagagagaaagagagagagagagtttgaaactctcgaaggttcgaggagagaaatgagctagggttagctctgaactctctgagttttattcgaaggagaacgacagatcgttttgatcaaacgatctgtcgtgcaggtaaggaacgacaagttcctttgtcgtgcaagtgaaaacgaccaaatcttggttgtcgtgtg

SEQ ID NO: 288997 - DNA, 620 bp, Cannabis indica
attaatttacatttaaaatatatcagtgacttaaacatttatgatatatatttttttaaaatacagtttactaagatggtaagttactgaatgacaatttattatttttaaaaataaacttgaaagttactcaaatgtattaatatcatataaataattaatcgattattgaagcacatacatataaattttaaaagtaactaaaatgtatatcaaattatataatataaaagtgatacatttttttttatgaaaaagttacttattggtttattatcaacatcataagtaaccaaaatgttacttttgaaacgcaggaaaatttaaaaattaaagaatttcggaattagtttcatttcagacatattattttaaaattaaagtattttttaatgacgtagcacagtggcggacccagaatttaattggagggtgggcgtaaatttttttcatatataaaaatattccaaaaaaaacaagtaaatataaataaaaacacaattcaatatttcaattcccaactaaaaagatattaaatattaagcactaaaaatcttctaaatgaaaaaaaaaaacggacaatctaaaacgaatgttcaaaatatataacatactcaata

SEQ ID NO: 288998 - DNA, 771 bp, Cannabis indica
tttgaattagtcatgattttttgaagttttaaaaaattacggggatggtgacacacacttgtgcgcgcgggttgctgctgacatcactgttttgtgcgcccaagcagctccttgcgcccaagaatgtgcacctagatggtatgctttgcatgccatccgtacagctcacaatttttttgtttttcttcgatttttcatgctatttcatggaattaacttccgattttttgtatagttttgtattttgatttttacttttcatattacaaatctaattatcataattaaattaattagaatttttaaaattaatttaagatattaaagtagtttgaacttgaaaataggtaaattattttaaattttgattatttcattttatttttaaatttaaagtcagatattaatattttttctaatttttttttaataaattgaccttatttaaatttaaaaataagattattataatcatgatattttgaataaagataggatattttgctaactttaaattttgttattttatttaaattaaattataaatcagaaaatgatattaaattatcattttattttattgtaatatttaatttataaaataacatgaaatttaaaagatagttagcttttttattaaatgatatttaggttagttgaaacctaattttctaaaaattgtaggtttattttaaattttttttattttaaattttatttaaaaattgtaaaaaatatattttttatttatttattatttttcgatttttt

SEQ ID NO: 288999 - DNA, 499 bp, Cannabis indica
agtagtttgggacggtttattagacgttgggaatgtcgggaatggccgggaatttagaatttcccaaatatacccctttagtgttaattatgttattttagtgtggaggggcaaaatggtctttttgccccaatgatattttgtcctttagtggacttagtaaatgaattttatgtgtttattttaattatgtgttggctgaaatagattattgcttaagtattccttttgttcattttcattcaaaacttagaaaatagaaaaaaatttcaaaaaggctctctcttttcctctctttctctctcggctggtagggtgtttctagggctgggatttctgattttcaagctatttttccttcattctaagtgttcttcaagccttggtaaagtttctaactcttttccttttgtaatttttagaaaatgtttgaaaagatgatgatgcatgcttgatttttaatatgttcttgctgctgtgaattgttgttattttcagt

SEQ ID NO: 289000 - DNA, 587 bp, Cannabis indica
gaaaaaaggaaaccaaaaagggttttttttaaaaaaaaatggtcaatgtttccttaaatggaaaaggaaaccaaatatccccacaaaatctaagaatttaagtaccccaccaaaaccgaaattgaaaccaaaaaggaaaccaaaaataattaattatttaaggacaagtttcctaaaaacaccaaaataagaccaaatctccaaaaataaaagaaacacaaaatagagaatacaagtaaaacatgtttccataaaatgaaaaaaataaaagaaaacaaatttacaaagaatcggaaaaatatgcccccctttttctttaatttttttcaaaaaatgccccccaaaaaaaattttgcaaataaagaacaagagaacacaaagagacatataaagcactaatcaccacttaagagcaaaaaatagtgtctaagaatataatgaaacataacaagaaaaataacaagaatttttaagaaagctcaaatgacaaactcggtcacaaaaatttttaatcttttatttttattttttttatttttttgatttaaagtcagaaaaataaaataaccttgatatttttgtaacta

SEQ ID NO: 289001 - DNA, 1289 bp, Cannabis indica
ttcccctgatggggggcggcttcttgaagactccattcctctcttcaatcgcataaatgtggtctcggggcaccgcgagttcggtataattaacaaaacgcggtccacccttcctcttcggagaggactccttcttgggaggagatttggccaactttggacttcgttgtctccgtgggctgcgtcttctcgggcttcggcctctggaattcttccctcggggactgcgagatcttgatcgcggtattggtgatttacgtttatccttgcccttctccaactctgccagagaattctcaattctcttatgaggttcagccatagcgaagaattcgactagcgattctggccttcgagcttgtaactccttccagaaatcggttctcggcaaaatacctgttatcaacatgcaaacaagcgaagactcgggagccttctcgacttttgttacttcgcattaaaccgtttaaaatagtcttgtaaagactcaccgggttcttgtttgatgttggccagagttgtataaggaggcctataggtcatcgtggcctgaaagtgcgtgaggaataagtcgacaaaggtttcccatgtcgatatcgaggcctcaggcaactgggtaaaccaatcgtgggcgttttcctcgagcgttgccgcgagaatgcggcattttgcaagctgtggtacctgatccacttccattatagtattaaatttttcaagataatctataggattagaggtacctttatattttagggattcggatagccgaaatcccttgggaagttgagcttgtcgcacttccgtagtgaaaggagaggtcccatgcagcttgtatatgggctttctttgctgctcgagcattttcaaagcttgcaaaagcatgctttgatcaattcctccagccacaggagtcgggactgctgcgactgcaggagtcgcgactaccgcggcgaggttcgctgggatagtgaccccagtagtcgctatcggtgcgctaggcgggttgttgtgagtatttacaccttgatcacccgcaaggggatcacggggtgtttcgttgttatgggggcgcgagagcgcgctctgaaaactgcgttgaggtgatcacgtagatcacctcgatgtacctgatagtgtcctccctgctgcgtttctacagagccggaccttgtgtatctgcttggtgtcgaccatgcgaagatgaagaggcagattctgcgtcgttgtctctcgatggtcgactgcgaggattgcgtcgctcagggatcttcatcagcctgcgttcc

SEQ ID NO: 289002 - DNA, 599 bp, Cannabis indica
ataaaataacataaaaacatatatgaactcaattaaattcccataatttttattttttttaataataacaaaatctcatacataaccctaattatttaataatccaaagtattaatcatatgcggtctttacaattatccccccgttaaaaggatttcgtccccgaaatctatctgaacaactctggatgctgagctttcatatcagtctctaactcccaagtggcttcttccactttactattcctccagagtactttaaccaatgatatggttttggttcgaaggaccttttccttcctatccagaatttgcactggttgttcatcataagataggtcaggttgcaactccaacatttcataactcagaacgtgcattgggtcagatacatacttcctcagcatggaaacatgaaatacattatgcacagctgacaatgatggaggtaaagccaaccgataagcaacttgtccaactttttccagaatttcaaaaggtccaataaacctagggctcaacttgcctttctttccaaagcgtctgacccctttcattggggatactcgtagaaagacatgatcaccaggttggaatgta

SEQ ID NO: 289003 - DNA, 593 bp, Cannabis indica
ttacttaaagattatggtatatctaatatatttattcgtttttgttacaatataataatatgcaatactaaaaaattatataacttaatttaattattatatatttttataatttttattagctaatttattatatttagtcatgttcttgattttttttttttaaaatagagacatttattaacttaatttttaaaatctaagatcattttacatctcagcctaaaaagaaaagtgtctatagacaaacattgcataatgagaatgatttatctaaagtgaaaacctattttttgagaatcaagatcttcggtaaaaaagtggtgtccccatactgtgttaaatcaatcaaaatttaacacatcaattaattttgtttttgaataaaaatcataagatttattaattaataaatttgttcaaaacaatagaacgcacttcagaggaacaatcctccaactgaagcacacgacctgtagagaaacaagagtctcttgccaagcaatgagccaacttatttgcagatcgttttacaaaacacaaatcaaaaaaaaataaagccaaaagtaaatttcgaacatcttgaacaataa

SEQ ID NO: 289004 - DNA, 661 bp, Cannabis indica
gtatatgctatattacatacactatatatatagtctaacagttggtatcagagcggatttatctctgccttgattttatttgagtttcatatatatatatacatacatatactgttcatatatatacatatttgttttcggttctgtatatatatatatttatattcataccatttatattatatatactttttaatcagtatatacatatatatatatatattttattgttcatatatacatatatattatatactcatacattcgtacgtgtatatatatatattttatatgtatatatgtttatatatatattgtatattatatatatgttttgtcacataataataatcataatattcatttttttattatgtgatatatacatgcatatatatatatacatgcgtatatatatcggtccatggttttgttttttccttttttcatttttcggtgtttatttcgaattctatatacattactatattcgtatagtattatagatcgatctaagcattgaaaattcattgaaaaacttaaagatggaaaaaattttcagttaaaacttttcggacccgattagttcgtgatataagtatatattttttcgtgttttcgtgcataaaatctatgtggtatctctttattattttgattt

SEQ ID NO: 289005 - DNA, 681 bp, Cannabis indica
ttgtgaaaaagaaagatggttccctcagaatgtgtattgattatcgggaactaaacaagttgacgattaagaacaagtacccgttacccagaatcgatgatttgttcgatcagcttcagggaaagacagtgttttcgaagattgatttacgatctggttatcatcaactcagaatccgggaagaggacataccaaagactgcttttcgaaccagatatgggcactatgagtttctggtaatgtcattcggattgactaatgctcctgcagcctttatggatctcatgaatagggtattaaaggatttcctcgataactgcattatagtgtttatcgatgacatccttgtatactctcagttagaagaggagcatgagcatcatctttgaatggtgttgcagtgactaagggatcacaagttgtatgcaaagttcaaaaagtgcgaattccggttgtctgaggtatcttttctgggacatattttcggaaagaatggaattatggttgatccaagtaagattgagtcagtgaagaattggccgaggccaaaatcagtgacagaagttcaaagttttgtcggtttagcagggtattaccgacgttttgtcgagggcttttctaaaatctctatgcccctaaccgagttgactacaaaaatcagagatttgtgtggtcagacaa

SEQ ID NO: 289006 - DNA, 629 bp, Cannabis indica
tccacgaccaatgacttcttcttgctcgtactgagctgtgcgggcatatcattcccgagctttgcctgtgtctccagcgatgtgcgggcctccaatgatgacttgcaagtgtccatctattggcggaggcatcaaatcctgattattctgaccttggttggccttgacatacttctgtaggtgcgggttgttcttcttgatcagaagttttatctcccgcttcaggttgtagcattcgttggtgtcgtggccgtactctccatggaactgacaaaattttgtcatatccctcttgctggtatctttcttcatgggcccgggcttcttgtgcgaaattagcgactgagttgctgttgtcgagtgaatttcgcaacaccaaattatattgtattgttaataacaagaagaaatttatgtgttaaaacaagtgcgagtattcaacctagaatggcgagtactcaactgggaatgagaaacaatcaacaaaggctggaaaataacaataagacagagaattatagtggttcagccagattatgatctgcttagtccactgcagcaagggattcgtaggtgccatttcatggtggatcacccctttatatacaaagcaggtgtccaatcggtta

SEQ ID NO: 289007 - DNA, 508 bp, Cannabis indica
gacttgaactagaaactaaaagtttccctatcgataaaaagcatggcaataccctaaacaacataaaaatgggaaaaactagggttcccaaaaatcccccaactggcagaccggttctacaactggaattccggttctgggaatcctggaacaccatccggaattccggttgctgaaccggaattccagttctgagcaggaaacacacaaaatttcataacttgctcaaaacaaacccaaactgtttcaaaccttccagacctgctctacatatcccaaacaacaaaacccaagcaatagaaccaagctttaaacacagaaacacatttcaccatgtgagctccaagctttgagttccaaactcaaacttggctaaagctcacctacaagcatcacaaccagtttaaatctactcaaacatgcatataaaaacttctgtaaacactggaaatcaaccccaacaaacacaacaacaaaactcatcaatttaccttgaaaatcatagttt

SEQ ID NO: 289008 - DNA, 1214 bp, Cannabis indica
aaaattaaattaaatgaagtctacaaagacaccgtggaggaagagatgtattatttgatattgaaccctaatcagtattttattgtttattcatttatttatttgaaagcaaaccataaataggctgtttggaaatttcatcaacgattgaggtagttagattcaagaatttttttctaattttattaatggatacttgacatgaataaaagttcagaaaacacgatttagtatgtgtcaaaatttggaagatacgatttgatagatttggtacatggacaatcaccacattagaccatctctaatgggagatgtaaaaattatactatatttggcacaaaatgtagttttgtggtaaatttacactaaattttagctttgtgctccaatgcacaattacaaaattttgatgtaaaatttaatatctaattaatattttattaaaaaaataaaatctaataactttataattaattttattattattttaatatgtaagacaataaaataagggaaaatttacatggtatactaacttttgtcattttcttacaaaaatactgtcaggcggtatttttactttttactgtgttttttataagtttcatactgcagtatactgtgttaagttttcactggtgttctattagtattttgaggttgttctgttttgtgtgctactgtgttttataaaacacagtatttttgtaaaaaattccgtgtgacagtatttttgtaaaagttaccccaagttctagtatttttgtaaatttaccctgaaaaagagcattgcattaggcaccagtggtgcctagcaccttctcgacatgttgcgttgcaattggctagcgataactccctaaaagctattatattaaattatataggactcgatacttagttggaccaataatgatattgacacataggagggtgctaggcacctctgctgccctttagcatttctcataaaaaaaataatattaatgtttcttaatttaatatgatagttaaatatactaataaaataatagaaatgacatcaatgtaaataaaaaagtagtacatttattgtggtgtaaattttaactgttgtgctaaatttggcacaaaatttgttatgtgtcaaatttacatcactttttggcatactattggagcacattttttgttaaatgaactatattttagctttttaccacttatttacacct

SEQ ID NO: 289009 - DNA, 535 bp, Cannabis indica
ttttctctggatttttctgtctgaaactctgaaactgtaactgaattctaaaatcctaagcttctatttatagaagggtaaaaggactaatgtgcaattaaacttattacaaattgcatgtgggtaaaaatgtaaataccaataattaaaaccggagtgacacgtggcactgtcggattggctgcctttgatgagtcggtgccacgtgtcgagcttctgttggctaaaaataacaaattgtgtcatggagtgacacttggcgcatgcagaaagcttcctttttgaagcttggtgaccaaggtgggacgaggcccactctcgtggtaggcgcgtgaggagcacctgcggaccaggtgcgaaggtggacgccacgcgcgcgtggggagaaggagaggcggctggggtcaagctcctgctgggcttctgcgcacgaatggcagaccgccacgtggcggggctgtctgctggtgaggaatttgggccggtttttgggctgatttcttgggctttttgactttcaaaaatgccaattttt

SEQ ID NO: 289010 - DNA, 417 bp, Cannabis indica
gatgaattagttatctttttattaaaataaaaaataaaaaataagaaagaaagagaggagtaagtttaaaagagggtttttttttttttgtaatatttttccattattaatctatttgtatttgtacttaatcttccaaagtttaaattttggtggtaaaataaaaccctccaaatgactgaactgttagtaaatttaaggtatcatctattttttttacagttaactgccaacatacactacttatgtgtacactcttgtacaggtagcacatttatattggtacacctaatattattatttaaaaattataaaaaattatttcaaaatttataatatttttgaaatatttaattttttattttttattaattttatttaattttaaaataaattttgaaataggtaaccgaaagt

SEQ ID NO: 289011 - DNA, 555 bp, Cannabis indica
tatttattaaataagagactttactaataataaataatataaattttttttgataattatttaaattattaaataaatagttttggcatttatagggttaaaagtgcaaaaagtagtatttgtgaaaaaatagataaaatagttgagaaaaatggcaaaaatcaaactagtgtagggcccactaagtggccggccactaggtgatatttttgctctatttttatcaatttttttattccaaataaatcaaccctaaccctaggtgaaattagtataaaaggaaagctatggtctcattatccaactaatgcttttaaagctaaaaacctaatttatttatttattattattatttttagggacatatatgcaaaatattatccttattcaaaatagaaatgaaagataataattttagtttttaaagggaaatttgattttctacgcttaaaaaatcctaaaattatatccctaaacctaaatgttatgccataggcaatatatgactacttttgctttatccccataatacccctcacatttgaaccaaagcaa

SEQ ID NO: 289012 - DNA, 608 bp, Cannabis indica
ttgtcttttgtagatgaacccaggtgagtcttgggagcccgagcatcaaatcgaccaggagctgcttcaacttctgcacgaagtccaccctcgtctttgtgctaactctccttctagagaaggaaattcttctgattccatacccagtcataggatgatggctcgtacgaagaaaaccacacgtctggctgacgcttctgaccccaagtggctcggcttgccactctggccgacgccaaacaggatttagcggtcccaatggaggaggaccgtgagggggacgctgaagttcaagaggttgaggagctggacgaggcgcgtccgggcagtcctcccgctgaggagggagaggaagaggttaaaccccctaacttcggggagtacaatgaggttgggcaaccagtcgatgctgacggggacgtcctggttgagggcgttgactacgtcagtgaggagcttgctgaggcgattcctcacaggaggcagggtgccttggcccccaggtgggtaagtcctccgtccaagatttcagaggcacgcctccgcactctcgaccaggaccgatacctgggcgggctggactgctacattcccgcccacgacaatcg

SEQ ID NO: 289013 - DNA, 752 bp, Cannabis indica
ttccccaagcataccgcctgctctcaggcttatttattttttactccgcccggggatggggctctcccagtccggcggagattttgtatttttacgaactcgtttctgtccccaaaaagggggacaaatttaaagatggtttttatggattccgggcccaccctgccaatgatggggtggtcccttataataggcaaactcacgttaaggagtaccgccaccgtttcttcttctcctccgggttccgagcagtggagcacccggagcttctcacggagtgggtaaggattcctccctatgagcggaccgcgcctactcaggtctttctccggagggcccaggtctttgcaacttatgaccgggcggaacttgacgtcggaggcctggtcacgacggagaattgccggaaggccaagctcatcctgccgcaccaatcagtggaggactctaacctctcaagggttatctgtcccaatgtgagggcgcctgccgcggagaagatcttccgggacgagatcatcgccactgccgagaagaagtaccaggaatatctctaccggaaggctcaggagaaagcttactccaaggctcaagcagcttccgggaggccacttcgcgtggggagcccggtcgagaggagaagccaggcgatcgctgggaagccccttcgtattggggactcggctgagagaaggggctcctaggccaaagccttcggctcaggagccgaacactggggctcctggcgccag

SEQ ID NO: 289014 - DNA, 625 bp, Cannabis indica
taagtattaaattaataatgaaatttttttaataaaatatcataagatatcataaaatatcataaaatagcataaaattttatcattcaatttttctttatactattaaatcttatgtcttcataaaattttagatgacaatcgacaagtcttggaccactttgcgaaatcgtagatgtccacaatattgggatggtctaaatgcatttttagagatggcctcgaaatgtaaagattgtgatggtagaattaggtgcccttgtgtaagatgtgtgaacaataggcttcaaactttacctgttgtgaaagcacacatattcgattggggtttttttactggttacgagaagtggacataccacggggaagcagaatctagtgccactaatgcaatgaatgaccatgatgccgctgatgatgatcctgaaattgacgagatgattccaatagtggatgacttccttcagccgtcattcgaaatggatgataatcctgatgcaaatcaatggcgcgacgaattatttgaagaaattgaggccgagttgtatcctggttgtgattggatatcttctcttaactttttggcaaagttattgcatttgaaagttaggggaaagattcctaa

SEQ ID NO: 289015 - DNA, 438 bp, Cannabis indica
ggcacaaaacccaacagttgagacccggcacaactcgagaaagatactcaaactgatcttggaatcgtttgaggtagagttgttgtgtctcatactgctgcctcgtatgttgacttgtctgctccgcttcctccacttttttctgtaaagcctctactgtttcattgtaacagtcagtggggccgaagaatgcgtggcaggtgctcttttggccccaactcccttcagtctggggagatggccaaagcctctaagatgtctagatcgttctccgagtacttgcgtcataacaggtaagtctcgggggtaatgtgtaggatcgacagcaggctcatcgagctcatcttcagtgggcgctggttgagttgccgctatttcaaccatttgctcctaaaacaaacaaataagttaaataattaattttaatacaaaataaat

SEQ ID NO: 289016 - DNA, 331 bp, Cannabis indica
agggttgaagttacaaaaagtggtatttgtgaaaaataggtaaaatagttgagaaaaatgacaaagcccaaaccaatgtgaggcccattaagtggttgaccatagggtgcttattttactctatttttatcaattttttattcctaataattcaaccctaactcttcatccaaactaatgcctcaaaagctaaaaacctagcttttctgatgaaacctcttccttcttctttcttcttcaattcgaaacctatagcctctcttcacaaatattattcagccattagtgatagatgttggaattaatttaccgggatcttagatctactcac

SEQ ID NO: 289017 - DNA, 839 bp, Cannabis indica
gtcctcgacgatcgagtttagttacatcgattgtctcctgctttactggaaggcgacttttctgagcaaagcaaagtttagaacgttttctgagaaggtaaccggctgcccatagcaaagcaaagtcagtgggtgagatttctattttaacgattgaaaatcaaatcgatttgggcttctcttcttcttctccgaacacattcagtcggtagtgagattttgaatataacgattgaaaatcaaatcgttcatctgatatcgagatttgggggagatttcgagttttaacgattgaaaatcaaatcgatttggcttcttcttctctgaacacattcaatcggtagtcggtggtgagatgagaggaatgctagattttaaaattttttgggatttattttattttatttttattatatataaataaaaaagtcacccaataatttctcataaactaaaaattctcttatatagctacattttatatctactaggtgaatgtacgtgccgagccacgtattgatagttttatttaagattttagtctttttaagattttgaatatattttattttaaagatttcaaattttttgtttgaaaaaattaaatattcatatttgaaatattatttaataatgtattaaaaataatattagtgtaattataaaattgtaaataaatttattattggagtagtagattattctatttagttctttttttaacagagcattgtaatgtaagtttatatctataaatattctgtaaagtgttaatattatatgaacatctgcatttataaagctaaaaaagtgggtcaatgacagaagtggtatatatg

SEQ ID NO: 289018 - DNA, 344 bp, Cannabis indica
catgtactctatcacacagggttcgaatttagaagagagaaagagagaaagaaggattcgaaatagagagaagaagagaaggctcaaatttgactgaaaggcttaagtgcatcaatactatcatctttcaatttgagtccatcactatctatttataagaatccttctaggtttaggtttgagttatttgacattaaaaaattgataaataaatggtaaaatcatgcaatagtggttggccataggatgtgggcccaccacttgcaattttgctatttttcaactatttatcctattctttcacaaatgtcatattttcctattcaaccacttaaatgccaaaa

SEQ ID NO: 289019 - DNA, 614 bp, Cannabis indica
ttagttggtgggatttaaccttgtgtaaagctttgaactcaaaactttggattttgtatggtaaaatggtgtttttgctgctgtgatctttgtttgtgtttgaggttggtttctggatgttttatatgttgttttaggttgaatttagttggttgtgatggctggatgtggtgttagccaagctttgagctttgaagctcaaacttggagctcacatggtggattttgattctgtgcatgctgggttgttttgttgcttttgaattgttatttggggtatttggagcaggtctggagagttttaggtggtttggagttgaattggtcgagttatgaatttttgaaaaattcctgcactgaaccgaaattccggttcaggaaggcctgtaggaaccggtcgaccggttggcttccaggaattctacccagaaccgaaattccggttgaggaaccggtctaccggttggggaaaatttgggaaccctagttcttcccatttttgtgttgtttagggtattgccatgctatttatcgatagggaaacttttagcttctagtttaagtccccgcgaagtgatttagcgtgtcacttatcagtgttgtgattactatga

SEQ ID NO: 289020 - DNA, 810 bp, Cannabis indica
agaaattgggaagtgacagcaccatggactggggctaaaataaaagtgccagtaaggttcatagtaggggatgtggaccttttatacaattcattgggagttaaggattacatacacaaaggtggattcagaaaagatgttcctcttcttgaagaggtcatagtcatgaaaggtgttggacacttcatcaatgaagaaaaacctgatgagattagcaaccacatctttgatttcttcaacaagttttaataaatatatataatgatgatatgatgatgatgaagaatcgttattataattaatattattaataatttgttgtttttttttggtatgtgatctatcgataatttgctttcatttttgctttttttaattgtaagaactaatattaattatttgctattatacatgttataactcatatgttacatgtgttatatatcagtatcataatgtttaacaataataattccaataataaagcatggtctaaaatatagaagtacctttggaagaatttgaactactacaaataaaccaattctatacaacatattatatgtagatgtgtgtgtatataatatgatctctcttgcaaaaaaatgaagatataatatctcattaataataataataatataaaataacacatacatagtgtggtcttaaagtagtagcgatcgttggacaatatatatatagggatattattttgtcccgtgattatactttcacggaatgcattccgtgatatacgacagccgtcagatgaagggcttatttgatctgacggctgagattgatcta

SEQ ID NO: 289021 - DNA, 535 bp, Cannabis indica
caggattcgggtatgtaacattaaaattctgagcagtttgccattgtttaaggtaagttcttgctaacaacactatactttcaacactcaccattttgttattccaaactctgtcattccttgcattccaaagagaccaacaaagagcaatcaaaagtctcctctgatctgcatctaacaccagaaaagtcgaggagcaccagtcaaaaaaactctcctgctgctggtgcaccaccgtaccaatgccgactctattccagcaaagagcagctgctggacaagaaacaagggcatggaaagttgtctcctcgtggttgttacaaactgggcagacgagagacacagccacatgtcttgttcgcagttgagtcatggttggaagacaaccttggcaggccctccacaccatgtttttcatcttcggaggtgatttcactgcccagaattttctccaaaatgttgcagcgacatcaccatcttgaacatcttccccattaatctcttgggctaatcgatatgcacttttaacagtaaa

SEQ ID NO: 289022 - DNA, 882 bp, Cannabis indica
tactaaactcatatttcatacttcaacatacagtttgaatccattgacagaaaatggatattaaacacttgtgaaagtttaacttcattgtattttggaaatagaaatataaaatttctatttggaatctaaaatttaaagtcaaagacttaaatttataccaaatgtacaatgagttttattctagcttggaccaccactactaatctaactctaagtttaatctgcctaaggtaaacatttacatgtaggagatttttaagattgaggatttatatcatttcgggatagaatgtcggaatatagtcatctgtgtcattaaatttcgtaaaagaaaatagaatgacattataagcagataatttataaaccattcatccaatgatatactatgtaagcaaattcaaaatgaataagctaagaggaataattaaaggataatttcgattaaaataagaatccaacgatgtcccggtaggcgagaatcaaagttattcttattttacatgaaatttacaactacaattaataacagaaaataacatggttcaatataaattaacacacaattcagaaattattaagcatttagcaaataataaagacatgtgaaaaatacaaaactatcatatcttaaataattttcaagatttccaacaaactgatatagtgtcccggtaggcaagagtcaaagtatcattcattgaatagagttgtcagcttatctaaaatggacaccattctagcaacctattattcgatcaaaataaaaatccaacgttgtcccggtaggtgagagtcaaggttattcttattttatgagcttctgccattgtttcatacttcgtaaatttatctctaagaagtcaccgtaggggagag

SEQ ID NO: 289023 - DNA, 472 bp, Cannabis indica
ggtgaatgatggaacaactcctgttactgaaactgcgcctggtgtgcaagagaccggaaacaacggttctgcacacagccagagtgttcataacatgactgttccaccaggcatcaatgcccaatcgaccattggagatgcaagcgaattgcaaaacctccgtgctgcgcttggactcatgcagggccacaacaataccttgcatcatgatcaagaggaattacgtgccgcagtaaacctcgcgtttgacgaacagaggcgtatgctcaccgagtggagagacaaagagatggaggcgttaagggctcaccatgtagaaatcgaagatcgtagtcggcaagctattgtgctgatcgaagagcctatcagactgtaggccagcaggcgtcgagcgtcatccccttggagaaactgaggatgacccaacggtgaatgcttcccagcaaacacggtcagccgtccaatccccagt

SEQ ID NO: 289024 - DNA, 862 bp, Cannabis indica
tgtatataaatttatatttgaaaaaaaaattaaaaatattaaaaaaaaaaatattatataaaataagattttacatatttgtgattttaataaactagattataacattatcattatcataatagatcttaacaactcacagtactttaaaatttataatttaccaaacactcagctcagcttttttccacagtttttctacaactgttttttctcacagcacagctacagctactttttctcacagtacagctgtgtcaaactggccctaagagactcccatattctacaaactctaatctttatgctccaactatctgtatcagtatttaagtcggtaagaaaagaatactcaagtcggcaagaaaagaatatttcataatgagagaagaagagagaaggtaagtagtaaaatgaattatgaatttaagagaaatagtttttatttaattttttttttttactaatagaacactctcagcccatatgatataaaaatgagagatttttttttaattagatagaaaaattaagcataaaaactcaaaattttttaattttacccattcaatgggtaatatccattaagagtgcgcccatattatatatataaaatacataaatagtttcttgaaatgagggaatcacgtgggcttgcctaaatttaaaaaaaaatgaaaaaaaactaaataaaatcttttttaaaaaaaaaaaaacctgtacacaaaagtgatagagtcaccatttcaaaattttcaacttttgtatatactagatagatgttacgtatccagtcacgtatgtaattttattttagttttagtttttttaattatcatattttaaaatttataatattcaa

SEQ ID NO: 289025 - DNA, 756 bp, Cannabis indica
tgtactaataattaagttgaagtttgtgatgatgatgaggcgttttgttgaacatctaaggccaatcgagggttataacatactccgtcggcgttctttgtacaaagcatcgggtagcagcagggatatgaacccaaagcgcaatgctgacctttttttacacactgtggaacaggttcacatcttcgattctcaccccaccatgcttcacctgcacaatacagtcctccacagcaatacttgtcttgtgcccaatgacaatattcaccaggtaccatacacctgttaggtaccatattcagatgaatatccggttgtagtcgaccaaagcaccccacaaccatcacacccactaccaacaacgccattaccataaacttcttcatcattcttactctctctctctatactttcgataaataattaaactcttttatttcttttcttcgtttatattcgtttgatataatggccactgtatttataggggaaacgagcacttgctttaatagtttgatatttcacgcagaaacacgggtccatatgtaattatgtgtacatattgtgtggtgcagaaggccataacgtaaatatatgcttttaaaaagtatagtagtatcaccatgattctaggggggattgcaagattccacgtcatagttgcctttttgtataatctctatatctatatatctatttttatataatgtgtggttatgtaacactaatttttaatttaaggtatactttttttta

SEQ ID NO: 289026 - DNA, 495 bp, Cannabis indica
gaaagttagaagacactgtcaaaaatctcaaccgacttcttgatgaaaaggagaatgagatctataaactcacagctgatctaattcgaaccaagcaagctttacaattcattcccccaggcactgctgctatcaatcaaaccctacagcttcagaagccctatggtgatcgaacttcattaggatataagatgctatataaacaagggaatgacctgtctgttgagcattctttaccctcaaatgtcaattcatcaaagaaggaagatgggttacctgacacctcaatcaccattaacgaatctgactcatctgagaggagacaggttccaactggacccatcaaactcaagtttgaaggaaggaggactgatgctgacaatcttctacagaatgacaatttcattcctacatgtcatttctgtaataggagaggtcacattcgacctaagtgttacaaattgcagaactacttgaaagccatgatcaatcgac

SEQ ID NO: 289027 - DNA, 408 bp, Cannabis indica
tggaaaagaagacctgcaatgatctaaacagaaatttacgaaaaaaaaaccagaaaaactgggaagaaactaaaattacacaattgttttcggttttattcgatcaaaacaacttcccctaatatcgaaatccagattcatgaaatgtagatctgtaacaaacaaatctggagctccccccggatccaaaacaaggtatgatgtagattttttttttaaaaaaacctcatgaataatagatctacgttatatatagttgcattttggttgattactcgtttccaatgttgaatatatttttttaaaaaacacaataagaagagcaaatttgaattaagggacaacacattacgtataagtcgtgtttattttttgttttggtttgcattatagttgcattatcgtttt

SEQ ID NO: 289028 - DNA, 497 bp, Cannabis indica
aaaggagttgattgggttacattgatcgtttggaattggggctgtcacttggacattgttggtgtgcatttgcatttcaaaattgttctctgcagtggtttttattatggtgataattagtgaaatggtgtgaattggcagtggtaatgttagaaatagtgcaagtttgaactgatttgtggtgttggataaattagacattggaagagttccacagaggaagtatcatggccaagtactacatggattgtgtgtaaggtgtcaaaagttctacttggtgtggttgggttggcaatagtagtggtttttgaacaagattgggttagggacagtgaagtacattgtcagagatcttattgtgttgaggggcagcagtgagtaagacaacaaagaaaaaaattcattgtgttggggtagtgtgcaagtgaaaagaaaagaaaatgcccaaagttaagaagaccgccaacaagaataaaaagaaatcactgcatgaaatt

SEQ ID NO: 289029 - DNA, 267 bp, Cannabis indica
ttcactaagtaagggcttaattgagaagaaaaagtttctagggttcattttgttaattaagagtctttgataagtctaattaataaatatattaaatgacaatattatttaataattgattttttagttatttaataattagaattgacatttaagtaattaaattggaaaattggcgttttttagaaaatgagatggaaaaatgaaaaatggaaaaattgtaaagtgggtcccattatcctatcatggccagccactatgtgcata

SEQ ID NO: 289030 - DNA, 608 bp, Cannabis indica
accaaaaaaaaaaaatggagaagatgggcattttttgtttagagggtcatttttccagatatcaaaatgtatgagagcttggtggttaaattgcatatgaagctgagagtggagtaaaaaatgagttcgttgattttggatgtacaagcaaataagaaaagaaagagtgccagaaaagatgtggtgggtgactgtttgggtaaaaaaaaaataaggaatttttacactaaatacctaaattgatacttttttttacatttatacggatgtttgatgattttaacatttatacaaacttccatttacttttttacatattttgtttatttttatcttctaatttacgaagttccacgtacaggctacaatttttactaatagttatacgcattttatggttttaaatattctctctatttcaatatcctcacataataaagtgaatattactcatttgtttttttttaaagacttattatgatattattattatttaaataaaacaatatctttattctattgaaactatcatattttattattatcttttttatcttttgtcaagtatttattagtaatctaataaatatttactttcattttttttt

SEQ ID NO: 289031 - DNA, 361 bp, Cannabis indica
tagaggtgcgactccttggctgaagaaaccatacatgggcagaagataagggttagatcttttagttggagccccatctttcataggtggtcttgaataagatattggaagaggctccattatctatcatagttctagccacaatcttgttggctatctagacctccacaaccaacgagtcgttgtgtagaaatctgattttgacagcatctttgttgttgaatgttatggtgggttctcctgcctgtgggatttttggcttcctctcttctacagccaagatcacttcttcttgctcgtgctatactgttcgggcatacctctcctgagctttgcctaatctccagctatgtgcgggcct

SEQ ID NO: 289032 - DNA, 500 bp, Cannabis indica
cattattttggatttggtgggagctccagatctgtttgttacagatctacatttcatgaatctggatttcgatattagggggagttgttttgatcgaataaaacagaaaacaaatgtgtaatttcagtttcttcacagtttttctgattttttttcgtcattttctgtttagatcattgcaggtcttcttttccagttgatttcgccagaattaatggttgtattttccttcgttttggtttcattttggttgttttgctgttttgaaacgatcgaggtatgttcatcttcatcgttcgctctgtgcagctgaaggtttagtgcatgtggtatttttgtaaatatttgtatgtggactgtataaatgtttaatgggccggcccatagtattttgtaattttttttttccttttttgtatttttttgtttttttttccatatataaatatattgtaatatcttatataaatattttaacatatatatatatatatggaaga

SEQ ID NO: 289033 - DNA, 533 bp, Cannabis indica
ggtatccaagtgatgtacatgctgcttattctcttgatgtgttggatgacctctcccaaagggtgctagatctgcatagtgaagatgatctggaagttgctatacgagagaacttggagttgaattcaaacgagaacttttctaaagagatgttggatgtcataaccgcacttaataacgacttcaacaagctttacaagaaggtggcctatgtggaattgccagtcataactgataagttacaaccatctattgtacaagctcctattcttgaactgaagacactgcccaatcatctcaaatatgcttacttaggagagaatgaaaccttaccagtcataattgctacaaatctcgaccaagtgcaagaagaaaagctgatgagggtgctacgagctcacagaactgccattgcatggtatcagtcctgctacatgtatgcatagaattctcttggaagaagtagctaagccaagtcaattccatgcacaattgtaaaaccaggtttgatcattgcatgatagatttaggag

SEQ ID NO: 289034 - DNA, 872 bp, Cannabis indica
aaggtggttttgggtttctgggctcggctccaatggagatggtgggatgatatctggttttaaggttggggaaaggtggctgataggttttaccagttttcgggttcgcaggtttgggctcaaaaaatagtacccttacccgcccgtgaaatggacgggttggttgggttcgaaggccacgggttgacccgatcaatttttttttttttgtaaggattgtcttgtttctaatttagtatcaattagattgaaagattgtaaagattgtaaaggttgagaatcgtaataaatgggtgggaagatgaatcatttcctgacgaagggcttcttcctatcactcttcatacagtgtagaagctacttggttggtacactacacactggcaattctttcttttgtttgtttgttttttttttttttttaaccattaaaattttattttgtttttctctgttaaaaatacaatcaagtagtgatgttttgtttcaataaagaaaagtgtgtacataactacatatatctataagatcactgttttgagattatcaacaataatagattgaaattgaattaatgtattttaaacagttatctattgtttaaatgcaaactttaatattgttttgcagcaaaagtcacatattactatcgggatattggcggctaaaccacctgaactttacagtttgtaacacttaaccacaaacactgaatttttggcggctaaactacctaaaccttggttccgttttgctctgcacacctccgtcaaaaaatgacagttaagtgccacggtggactgtccacgtgtacacacttgtacacgtggcaaatttttagtggtccatgtaatattaattttaaaaaataa

SEQ ID NO: 289035 - DNA, 191 bp, Cannabis indica
taatcactaagttgttcgaaatttcaaggaagaagagagagagagaagtggcgtctagggtttagaaagagaaggctcaggtttttctctgaataatgaaaatgtcagatgataaagcctaaaaaaagtggccggccatggttatatggatttgggcctcactttttgcaattttgcagtttatcatttct

SEQ ID NO: 289036 - DNA, 538 bp, Cannabis indica
tgctatactagactagatagggtattttatgaaactcacttattaagaaagatgaaagaatagacctataaggagctagtactgtcttgatggatattctatggatacacacccctaagttagatatgaagactttagagaaaagtctattatacaaattagtccaaagaggactatgccatcacgtagaaaggagtgtagcgtactgaacagaatctagaataagaagttagaaagaaacctgatataatttttttaaagtaatgacttatgaaggtatcttgaacaccaagagataagtagagcatcaacaaatattagattaccgaaggaaaattgtaagcttcaaactcaaggtcagctactttgtgaggagacaataaagtaaaatgcgcatggtttcgataaagacaatttcaaaggaggaagaaaaagaagatttagacacggctaacaatttgggtacaacatgaatgagaggcaacacagaggacaactatacagaacaattcaaactggacaacttggagatcataga

SEQ ID NO: 289037 - DNA, 544 bp, Cannabis indica
tcgcccaactccaaccgaacagctccagcttccgccctggcttctccgcctcctcctggccaagtccacctccaccttcaaggtgtcggacagagtcgtgctcttggaagcaacagacttagcccgggagtaagtgtaggccaacttcagactggcttacacggagaaaaaactttagcatattgacctaagtgtggaaagttaaagggaagtatcaaaaaagacttaccctggtgaactccttcaagactccgcccaccagcacatccaaagacgagtcattgtcagcaccagccagttgctcactgacctcaggaaccagccggttcatgtaatgggccagcatctccttgccctttttggcctctagaagcactggcaaaggtggagttagtgcctgcacccattcaggatcactcctgaccagttcagacccagccgttggtggtccagactccttggacttggcaattttagggatagagagatttgcagcagtcagctcctcagaaagatcaataacctcccaagaaggtctcttttc

SEQ ID NO: 289038 - DNA, 667 bp, Cannabis indica
tttatgttgatgatatagtttttggatctacatctaaccatgaagtgcaggtgtttgttgatcaaatgaaaaatgagtttgaaatgagcatggttggtgagcttactttctttttgggtcttcaagtcagacagatggaaggaggtacatttgtatcacaaagtaagtatgccaagaaccttgtcaaaaagtttggccttgagtcggctaaacaggtaagtactcctatgagcaccactttgaaattaacaaaagatgagaatggagtgaaggttgacaatactctttatcatagtatgattggtagtctattgtatttaactgctagtcatcctgatattagatatagcgtgggagtttgtgctagatatcaaagtaatcctatggaatctcatgtatctactgtaaaaaggattattcgatatgttaatagtactctcgattttggaatctggtattctaaagatactaattctaacttggcttattttagtgatgcagattgggcaggcaatgctgatgatcgaaaaagtacaagtggaggttgtttctttcttggaaacaatttggtttcttggcacagttaagaaatgaattctatttcctgtccattgctgaagctgagtacattgctgctggtagttgtgttggattatatttttaccag

SEQ ID NO: 289039 - DNA, 709 bp, Cannabis indica
tacttcttctttacgcaaaaggaactcaacatgaggcagaggcgatggctagagcttgttaaggactatgattgtgaaatccactaccatccggggaaggccaacgtagtagcagacgcgctaagtagacgcagttatgccagcttggcaatactggcacaaatggaaatgccactacaacaagaactccaaagaagtggtatagagatcattacacaaaagctagctaacctaaccattgtctgacgctgctacaagaacttaaagatgcacagattgttgatgagttcttacagaagaaaagagcaggcatgccagagaaggaggcagaggatttctccgaaggtacagacggcatgctaaggtataagggaagagtgtgtgtagccaacgacatagagcttaaaagaaagatcatgatggaagcacacactacaccctactcaatgcatccagggtcaaccaaaatgtacaatgacttaaaaaccttgtattggtggccagggatgaagaaggatgtagctgaattcgtagctagatgcctcacttgtcaacaagttaaggctgaacatcagagaccagcagggatgttgcaacccttggaaatcccagaatggaagtgggaagatatagccatggattttgtgacaggactaccccgaacaaccaagcaacacgactcagtttgggtaattatagacagactcac

SEQ ID NO: 289040 - DNA, 694 bp, Cannabis indica
ggcggtgggcgaggacattttcaatacccaaagcagaaattgagaaagggcggggataatactatccgtactatatccaaccccgatatagatatatatataatttcctatttattcttagcgtatatataatatatatatcattgataatcaaagttattttgattatcatccataatcaaaattatatatcatgtgcttaaattatgaagatctaatgacgatagtgaactgttgatcattgtggattacaagcgtaaagatattttcttctcaatttttagtttcgtctttgtttactttttaacttgttgggagacttgagaggtatgagactatgatactatacttgggttatgatttttttgttttttttttcaaactttgagatagatttatttttattttctattgggttatgctatttattttctcaatatttttaattttgtaggcagatttgtgtttcatcttctatgaattatgaaggcataataaatatttgtgcgaatattaatttaatttaaatttattttttttcgtatttttttaattatttaattttttttatcctattttgtcttaatggatacgcgatggattccccataactgataggtattctcctaccccaaatttgtttgtaattagaaggaatgggggcggggattgcattccccgtacattaaccacc

SEQ ID NO: 289041 - DNA, 743 bp, Cannabis indica
ttttttaaaatatatgagctcaaccaaaatatgaggctatataatggaagtttaagtggatctgaggctgctaaaatagctacttttgataaatggctgttgcagataggagatggttcattatatgatgacattgacagagaattaattaaacttccttctgatatatgcaaaaattcatctcaagatccagtgaaatccatagttgaagctatctacccatcgcttttacaaaactacaacgatcctgcatatttgaaagaaagagcaatattaacacccaaaaatgaaatggtccatgaattgaatgaaatgattatgaatattataccaggtgaaggcagaatatattatagctcagacattgtatgtaaagcaagtgtaaggacaagtgatgatgatcttttgtatccacctgaatttttgcatagtttgaaatttaatggcataccaaatcacgacattcgactaaaggaaggtgttccagtaatgctccttagaaatttaaatcaaactaaaggcttgtgcaatggcacaagattgattgttacacatcttgggaaatggtccattagagctgacattatttctggaacaaatatcggtcaaaacgttacaatcccaagaattatcatgtctcctaacgaatcaaaatggccattcaattcaagcttaatagacgacaacttcctttaacaccatgttttgctatgacaataaataaaagtcaaggacaatctctt

SEQ ID NO: 289042 - DNA, 509 bp, Cannabis indica
acacacaagatgagtgttggacggagtatcaaacgaaaaacaagcaaatatgccgaccaggagtacccaacagattaaagaacgaccatgttcaaagaaaagtctaaactcaagaagtcagaaagtttttcttgagttagggcaaaaaagttcatgaagcttggaataagcaaaatggaaaacagacgcaatgcagttctaaaataagccttacggctgaaagctaacacaaggacatggaaaagaagagtcgcagaagtttcaaaccctagggtttcctaaagtgttctttctacaacgaagttacattcaaagcgtaagcatgcaaaggaaaagcataaagggaatcagaaacttactcaaagattcgaatgtccgggttcaagcaagccagcaatcgtctgtaggcactttggcaactctgaagccagaaaattttctcttttcgctctgaaagtttacttaacaacgaagggtgatgaaatgaggtaatgtgccagtactccaag

SEQ ID NO: 289043 - DNA, 640 bp, Cannabis indica
gtaattatccattcagttatcgacatgctatcgacattgtatcgatattcacgacaaatgtacattgcatgcgttccattttctacggttacacatttaatgttaataaattttacatacgttcccaacaactcttcccaaccgccacattgcatgtcagacacgtgtattgtcgataagctatcgacatagcattgacaaattagtatgtcgtgtcattaaatttgcatgttgtcgacatactatcgacatagtatcgatattctgtcgacaaatacaccatttcatacgtttcacctgtacagttacacatttgatggccattaaattttcctacattcccaacatgtatactgctctataaaagcaaatccctttctatttcataagtgctattgtcttctacttctctcgtacacttaaaaattaaaggcaaaattctcttattcttaagttccaaatatggctcctagaaagaacaagggcaaattcccaatcctaactcctcaagagctcaagcaggagcttgatgttggcataattactcctcaaatgcagaaagttctagacgccgatagaactttcgaaaaagacgaaatcggaacgagttaagtgatacaacttgaagcacaatttagca

SEQ ID NO: 289044 - DNA, 771 bp, Cannabis indica
gatttacttgattgtcttccaatgttcttctcctggattaatctgatacctactcattactcccactcaacagcaggtgtctggtctaaggcatacaaaagcatatctaagacctctcactgttgatataagaaattctttcatggctttatcttttctggaatagttgagacttttccttagataaataaaatctatgcctaagaagttgtgaagcttctatagattgccattagaaagaaaatgcttcagcatcttactaaagtaagttgcttgcattagagtaagtaattaccaggtataccacaagccataggtttagataaactcaaacctataatactaggaacaggaagttttgttaagtccattgaatagacttataaacgaaaatttccttttatgtccttgtaatagaaaactttaggttattccatgtgaatggattaaaccatagttctattggctttcttcttagtttcttatcttgacaatccattacttgtttaaactcacaatggattttaatcactagtgtctcctgtcaagtgaagaaagtgagttagctgttttaactaacttcagttgtgttctgttactttgtgtaacaactttctgttatttctggttcttctcttgctttgttttctttgcttgatctgtgtatataaactaaagctttggctttcaataattcaatgaacagaattcttttctctctgtttgcactttactttacatctcccaattcataagaaggtgagttcctag

SEQ ID NO: 289045 - DNA, 569 bp, Cannabis indica
aaaaacaaaagaacaaaacattatttaaaagctttcttccaaggcaagaaagaatcaaattttcaaactttccttcctcctcttccttcgagcagctgcaaccagccactagggggattatttttcttcagccatctcctattttcagagctaaactctaacttcaagccaaccttgaaccttaggtaagttcttccttatgttttggtgttttttttaggtttctaagctaggtttgttattctttttggaagttttcagggctgtaggtttagagaaggtttaggtttgttatcttagttgaatgaggtctgttaatgtatgtttgaattgaattcatggctgttggaattggtttgtgagtgaggaagctaaaagaatttagatttcttcacttgagtgtatgattttaagctagagattgaactactgtgttttgcagcttgggttatgccatatttatgttattatactgttctggaaagtttggttaggtttggaggagttttggttcgaatttggtgaagaggaacttttgttcctggtctgccagaaccggtcgaccggat

SEQ ID NO: 289046 - DNA, 589 bp, Cannabis indica
atttagtatacgtacctcgcacgtaacttgttactagtatatatatatatatatatgagaaatctagtgtactctcctttatctttacctcatagaataggaaagttaaatgggcctgtaaaaacaagaaaagatattgtacacttagtattggtggacttttatacagttgattttcttttttttaaaaaaaattaaaaaaaaaaaaaaacttgctttaacgcatggtgttggattaattttatgagcttttaacaaatttatgaattatttataagtttttaaaaattatatatataatattttaataataacaatatacacatcaaaaactcagattataattattaaagatttgaaaacacaaaatataccaatatcaagtgttgaattacatattttaattaaaaatacaaatttttgaaaaaaaataatacttttacccataaatttataatttatgacactattaaatgatgtctcatatggtatgcgacctgttaaaaatgttcctatacagttgtagaaatgtaccccttttgttactttttattaagagattttacaaaatactagattttaggggcac

SEQ ID NO: 289047 - DNA, 506 bp, Cannabis indica
atgtatactgctctataaaagcagatccctttctaattcataagtgctcttgtcttctacttctctctaacaaataaaaattaaaggcaaatttctcttattcttaagttctaaatatgtctactagaaagaacaagggcaaattcccaattctaactcctgaagagctcaagcaggaggatgatggcataattactcctcaaatgcagaaagttctagacgccgatagagcttttgaaacgaaatccaaacgagttaaggttgatacaacttgaagcacaatttagcaaaactggtgtatggccggctccatcactagggttccccgaaggatgtcgtcgttacaaattaggcatctttaatggtaaaccagtgaagcgtggatctttatgcaagtattgcaagtctcacccacaagtcaaacaattttaatttattagtttatggtttgtggtgagttttatttaatgtttgttttttttcttatgaacttttatgttttattt

SEQ ID NO: 289048 - DNA, 498 bp, Cannabis indica
tcgaccaacgattcaggtgatcgagctttgcagttcttctagaaatcggtcttggcaggacacctgtatacaacatacataatagcgaagactcgggagccttctctacttttgttacgtcagcattaaatgtttaaaatagtctgtaaagactcacctggttcttgcttgatattagccagagtggtatagggtggcctataaggtcatcctggacttgaaaaatgtagtgaggaacaggtcgacaaaggtctcccatgttaagatagatgcctcaggtaattggttgaaccaattgtgggcattctcttccaacgttgtcgcaagaatgcgacacttcgtaagttgaggtacctgatctacttccataatagtatcaaatttttctaaataatctatgggattagtggtagctttatactttagggattcggataaccggaatcccttgggcagtcgagtttgtcgcacttctgcagtgaaaaggagaagtcccat

SEQ ID NO: 289049 - DNA, 556 bp, Cannabis indica
ccaaacaattacaacaactacagacacgaaatttattaaattaccttgaaaatcatagttttgggtttaaaattccacacttagtaaaaatcaacaaacaccagcacaatcttgcttgaatcaacataataaatcatattctaacttcagaaatcaacaacaaaccaccacagccacaacaacaactaaactccacaaaatatgcatgaatcgtttccttaaaaatcaagaaatcaaatgggaagttgataaaaaaccttaccttgacttggagattacaaacaagagaagaaaatcacttgaatcacaaagaaaaatccacttccttgctgctcaaggagggctgaaaagagagagagagcttgagggaaaaacaagtttttatctaatttttctaactttttaataaaatgaaataatagctaattccctcatatttcagccaacacacaaagaataattcatgtaacacaataataataagtccactaaaggacaaaacataattaggacaaaatgaccattttgccctccacactaaaataacatacaaggg

SEQ ID NO: 289050 - DNA, 548 bp, Cannabis indica
gttttttgctattatttttgaatttacaaaaattcgtttttcattagaaaactaaaattctaaaagttttggttaaaatttggagtagaattctaaatttcaaattgaaaatctaatttcagaattaaaattaatttttattaattttttaataaattaaagttaattttagatattagtagcctttgaattttgaaaatttatttttctacaaaagtagccttatggttaattttgaaattttgatttattttatttattttaattataagatcagatattacatattttattattaaaatttgaatgatcttattttgatattaaaatattatttaaaaaaataatctagtataaatttcaaaatttgctaaccatatcatttgtttcaaaatttgttattttttgaaatatattttattaaattaaattataagatttaaaaaatattaattttgacattatatcttattagatctttttttaattaaaataattttggcgaaagtaacatgaaattttgaaaatttgttagtttaggtttgaat

SEQ ID NO: 289051 - DNA, 564 bp, Cannabis indica
agttccagtggcccctgcccctgttgtccaggccgaaccagtagtagcagtgaatagaatggaacccctgtatgaaaggttacgcaagcaggcacctccggtttttctgggaggtccgaacgtcatgaaagccgagcagtggctaactgtgatcaccaagattttgaactttatgggtgtcaccgggaatgacaaagtggtgtgtgccacatttcagtttcaagaggacgcattggtatggtgggacatggtgtccatgatacacgatgtccccacgatgacctgggaaaagtttcaggaacttttcaatgcaaagtactacaatgaggccgttaaaagtgccaagagaaaagagttcactcacctgaatcagcgagaaaacatgagcgttactgaatatacaacgcagtttgatcggttggcgaggttggcctcaagaatcgtgccaaccaatttcaatagaaaggaaaagtatttgaatggacttaatgtgaagattaaacatgacctgatgatcactacagacgacaagaccacctacgcggagatggtggaaaaagcact

SEQ ID NO: 289052 - DNA, 450 bp, Cannabis indica
aggccaacctcgccaaccgatcaaactgggtggtatactcagtcacgctcatgttttcctactgggtcaggtgtccgaactctttcctcttggcacttctaacggcctcattataatacttcgcgttgaagagttcctggaacctttcccaggtcatggtggtgagatcatgaatctgggacaccatgtcccaccagactaacgcgtcctcttgaaactgaaaggtggcacacaccaccctgtcattcccggtgacacccataaagttcaatatcctggtgatcaccgttagccactgctcgactttcatgacatccggacctcccagaaaaactggaggtgcttgcttccggaacctttcatacaagggttccattctgtttgccgctaccactatctcggcctaagcaacaggggcgggtgccacaggagcttctggcaccggcactg

SEQ ID NO: 289053 - DNA, 552 bp, Cannabis indica
aaggagtacatctcgaatgagttaaagtctcagttgagatcattttctttgaaatttatggacaaaggagaaggtgtaggtggtattgaccgagagttggaggaggatgctgctgcggaaacggggaagaaggcggagtgcagccaggccgtggaggagtccccgttgaagtcccctgtccgttcgaagactaatgttgttggtctatccgacgaaaatgtggtggattctgtaagtacgccttcactatctgttacaaaatctgttgaagatgaaggtgctgcacataagaccttcgacgatgaggactttgatatactcgaagtggcatctttctggaataaaggcaaagccctcgtcaaatcaaagaagacacagtcggagaatgtgcctttaattgaggatgacttcaacgataaggcgtacgagcaattcattgagtcgggcagaactgttgtcgggcctttcaagacgaaggaagcgatcccccgtaaccaatatgggttttacaagtttatttttagcaacacgttagatccggggtaagtaaat

SEQ ID NO: 289054 - DNA, 755 bp, Cannabis indica
acccatacggatgaatttgatattcattccccctccttaatggcagattgacatcaaggaggatgcgaatacgcatgtaggaaccagtaccctccttaatggtgtcttttgcaacctctataagatcacccacttccatagctattaaaccagcaagatcatgagacttacacataaagggataccatatacttgcacccaaaagggaacataatgtaggtatcaggggtaaggggaaaactgctatcagtagcagcaaatatggtgatgctctgagcaaaatgccagggctgaccatccaagactcgacccttatcacctttacagccaaaggtgacaagaaacataccatcggcatgctcagagacaaaaatagggaatcgacagagcgatgaccacatactagacagagttttcattagagagggtcgattatatggcctaatggtatggagcttaaggataaggcttataggagcagaggaggaactcgaagaaccaacctcacaagtgaagacagtggactcatcaggggggagggctaaagcattagacacagagcttaagaactcatccatactgacagacaaaagcacttcaaaaacaaaggctaaaaaaagaaaatcaggcagaaagaggtgataaaaatggtaccttggtttggatatatataggaaaaaccataatcccctgagaattttcctcatcgccgccctagtcacatccctagtcccatccattgaagaagcaatgat

SEQ ID NO: 289055 - DNA, 896 bp, Cannabis indica
gcgcccttcagtgtttttattattttctctttttcctccggatctaggctctttcccagccggagtactttggtggagtcgaggtcgcacactgataattcctcgacatcctccattggttccacaattttttcggaccccacacgggggtccaactcatcttcctcagccatttctggctcaatggattcccggaccatcagtactggcaggtgggtcgcaacattgtaacattgccttgcttccccctggtttcctctcaccgtcccgatcccagcttcctgggtagggaactttaggcacaggtgccgaatggacgtgactgcgccaaaatctaccaaggccggtcggccgaggatcgcgttgtaagcagtcggacagtccaccaccacaaaagtgcagtatttgaatgtgctctggggggtgtccggacacaaggtgactggaagccttacttttcccatcgggataagtgtcgttccattaaaccctgtgagttgggacccactgggtgagaggtctcggtccgtcaagcctattgcggtgaaggcctccttgaagagtaggttcacggaacttccattgtcaattaagactctggccaccactttattagcgatgggggtctctatgaccaatgggtcatgatgagggaagcgcaccgtcttggcgtcttcttccgtgaacgtgatgggttggtccatcagccggggcctttgagctgggagttgagtaacctcccaaacctcattgtgtttcacggcccccgcgtaccgtttgagctccttgcgagtagttcctccgatatggggacctccggagatcatggctaccctcccgttaggtctgggcggcagtccatcagctccgtgtactgggtgtactggggagtgtac

SEQ ID NO: 289056 - DNA, 83 bp, Cannabis indica
tcgaaggagatcatcctttacgtactattcgccagatagtagccagatgaattcatacattatgtttatacaatcatgaaacc

SEQ ID NO: 289057 - DNA, 633 bp, Cannabis indica
tacttattattatttcaagatggtgatgtgacatttttatttttactttaattctggaaattattatttaaatcataaaaccgtacgtactttttttttaatagaaaaatgtcacatcacatagtactttcccgatattacttagattttgtttgtgggatttgattgaccttctccttctattaaaattggttaactaataaatgggtaaattgggatttctcagattgtcaaaatttattaaccattaaatggttaaattgggaaaaaaaaaatccattactattacatgaacccaatcacgtgtacatcaacccaccaaaccactatataagtaaaggttaggttatccaaacaaaccatttttttcaaaccccgttttactatttcctaaatcaaatggacccttaccaaaacttcaacccttttgaaacaagtcctcaaaaatccccaccgcatcctttttcttccacaagacccgtaggtacaccgtcacggagtccaagactccgttcagcctccatttcaggatgtcctaactgtgcaaggctcgagtctgttctccacgaacacgaaaaacttataaggaaggcacatttacaagccacggaggccaagcaggagtcatacaaa

SEQ ID NO: 289058 - DNA, 501 bp, Cannabis indica
gtcctttatgttgatgacattttgattattggcaacaatatcaagaaaatgactgacatcaaggaatggcttgacactcaattcgaaatgaaagatttgggtgaagctgcttatgttcttggtattcaaatcatcagaaactggaagaacagatcccttgctctctctcaaacatcttacattgataaggttttggagagattctcaatgaccaatgccaaaggggcacaaataccttctagatttggtatccgtctatctaaggaacaatgtcccactgatcctcaagagatagaagacatgagaagggttccctatgcttcagcagttgggagtctaatgtatacaatgttatgcactagacctgacatatgttatgtagtaggaattgtgagcatgtatcagaaaaacccaggagaggaacattggactgcagttaaacatattctgaaatatttgaaaagtactaggcattatgtgttagtctacaagggtggtgct

SEQ ID NO: 289059 - DNA, 551 bp, Cannabis indica
atcctcgggacagcaaggctatttttctaactagtcactaggcgacaattattttgtatgaacaataacttttgtaaatgattttgtaatcgggatcctgagtcttttgtataaatattttacaagtttaattataaaagcaaaaattttaattaatcacgttttccataaacctcgttgattagcaacgagctgcacagcatgtttaaaaatcacgtaatacgcctatgatagttagggtgttacaaagaaaaatcagagatttgtgtggtcagacaagtgtgaaacaagtttttaggagctgaagcaacgctcttgttagctttgccatcagatcaagagaaatttgtggtttattgtgatgcatccagacagggtctgggatgtgttctgatgcaagctgacagagtcatagcctatgcctctcgtcaactgaaagattatgagcagcgttacccaactcatgatttagagctcgctgctgtggtttttgctttaaagatatggcgacattatctttacggtgaaaagtgtgaaatttatactgatca

SEQ ID NO: 289060 - DNA, 292 bp, Cannabis indica
gacttggtgttgtttctggaatagagaaaccattggttttactttgtgacaacactggtgttatagccaatagcaaagagcctcgaaaccacaagagaagcaaacacatagagaggaaataccacatcatcagagaatatgtggcaagaggggacgtacaggtggagaaagtggacactgaagacaacttagctgatccattcaccaaagtattgactgcaactacatttgaaaagcacagattgaatttaggattaattgaaatgtactgatagttttatgttagtgcaag

SEQ ID NO: 289061 - DNA, 522 bp, Cannabis indica
gtttgggatcgggtcccagatttaggtctaggtccgtgtcttagttccggtatgggtacacgaccgtgtccgggcccgaattccagtctcagtttgtttcagaggcaaggtctgtgttcggttataggtctgtgttcgggtcttggtcacggtcctagtcttgttctatggtcctggttcggggattcttgttcaggttctaattttgggtcccaggtctaggtttgtgttcgggtttggttcttcgtgtgggttcgagtcttagtttgagtccagatctagacacccactactggtctgttccaggcctcgttacccgaatcctgagtcaagatgtggatgactgtcacgggtctcggtctggttctagtttacgtcccaagtcccatttctgagtttgggttcgggatcgagactaggtgcaattctaggtctcgaccatggttctgtgtccctagtctagttccatgtttgggtctgagttcaggttcaggttcgggtcccgagtccaggtttgggttg

SEQ ID NO: 289062 - DNA, 521 bp, Cannabis indica
ccatacctccgtgccccccggtatttgcactctccgctgcaatcatggtaagatttagcttggttgacatccctgcaaatcatggtaagatttgcacgctctgataccaactgtcacgggccgcctatttggacaccccaagtaggtggaacgtgcggcacttgctggcacaccgagctagcaagtcagcctaaacgcgcctgcaggcaaacaagttcaaaggttaggcacgatacatgtctcgcacatgttgagtgcaaacaagaagcatgagcaagcaaacacaaagcgtcccccaaggaccaatctcacacaacccacaagcaaacatatagacaaatggcacgcaatggcccaacaaaggcaacaaacaggcatcacaaagaccatatagaagcatacacaagaagcatggataaacatcgttttattaatatatggccttgatagggcaagggagtacacagctgggcccctatcatgctggtgacaaggtgcttcataagtcacctggtcacccc

SEQ ID NO: 289063 - DNA, 1149 bp, Cannabis indica
tcactccctgtacagattctaggtctttcacctacaggtgagtgcacacctgatctacctatgatgacacagagactaggtcgtgaaacaacaatatgcatcgaacatgatcaacatggctctcatcaatataaccaaagcaggcaaataataagcataacaaaagaacatattcctttttattttctagaaaattcggcagcataacagctgtattttgaataaacccaaaaatcataacctgcataaatatttgcacacaaaaatatatttggcactcagtgccccagaacagtccagaaaatatgcagattaagttttcaatttttcaaacaattttgtaaatcataaaaattggaatatgtctaatgttatacaacgcatataaaaatcaagtccaataatcaagttgagtccctacctctcccgagtcgttaaactttttccaaaagacgatcttaagctctcaagtcccgagctccaattgtttagtccaaacttacatattactctcacctataccatcaaatggttaaataattatcattatcgcattctacattcaaaaccgagtccaacgacatataatatgactatatttaaaatttggggttccgaagcctcacctaagcggtgcacattaacaatcggtggcggtaaaaattggtgtaccggaaatgtcgccgaaaataggagtagtatatatcaaaacgaccacctcgacgagtagatcacacccatgccaaccgtttgtcaaaacggtacacgatgtcaccggaaagtcgccggaaaggggcggagctacaaaaatgtcaccggaaaaagttgtgaaccgggaaaaatggtttagtgtaggttgttctcctcgacgagctgagtttagtggtgaagacgattcgtcaaacggacgccggaggtgaccggaaaatccgttcaaagtttgaaatcccaaactttgacttgcgatcccgagtcaacggcggcgagaggagcggcgccgcttggggggtgaggtcgccggcagctggagttccgttctgaccggcgcgttgggtcgggcggtggccggaggttggtcgccggagtggtggtggttatggaggtttatgggttttatttttttgtattttaaagagagagaaagagaga

SEQ ID NO: 289064 - DNA, 721 bp, Cannabis indica
aattgagtgggagcgctaatgtaacgccctgaacctcaggaacgccatgtgtgtgcttttataatcttattgccattaatctattagtttaggaaaagtgtagtttaattaaaatttaaaatagaaactttagcttaattcaaaatactgtcgtgatatggggatcccctgttggtaaaaattcttttacaaccaattttaaaaaccgttatacaaaaacaggttatacatccaatcataaaaaaaaatgatcctgcttcctggaaaccaagacaacacggttgatatgtacattgctgggagacctctgactcgtggccaaacagaaccgctgatccttacctgcaccatgaagcacccgtgagtcatagtgactcagcaagaaaagctattaaagaatattatgaaaagtgatagtagatttcatttcaacagattattcataccagtagattacactctttcaatgtacatttacaattcaacgtctatacgagcaaactcattacaaaattaggagtatttacagctatacataatcaacaatctcagtatttcataaaacaccttaatcatgcattatcataaacattcattttcaatgcttcataaagcaccctatgttcacacattagcatatccacacaatttcagtgcttcataaagcactccaatcatacatcattaccaacctgtttttcttacatctctaagccactga

SEQ ID NO: 289065 - DNA, 710 bp, Cannabis indica
aacataaaaatagacataactaatttatcctatactaaaataagtatattttctttctattgttctatatgggctcgtttaaaacgtcgtattaagtcgtattgtgttgtattgtattatattaaataagattatacatcatatttttatataatactatactatgttaaactttaatttatactaaaaaattatatatttacgttcctataaaagttaatacctcatatagttttacataaaaatattacataaaatacaattcaatataatactatacaatacaatacggtgtaatacggcgtaccaaacgaaccctacattgattattttctaatgagttagtgaacgaattttctattgaagtataattcttacatcaaaaaataaataaacaaacataactttataaactccaaaaattatttaattagaaaaaataaacatgacacaataaacaaagaaaaagatgaagataaacaatttttttttatttatatatattaattattttctaaaaaattactaaaaaaataaacataacacacataagcttatgtgaatattattattttatttattaaatcagtatgtttaattaatagaaaataaaataaacacatatataagatattttttattatatgtatgtgacagtcagtagtcccgtgatccgtaaggggtaaacaccgggtaagctgtgcaatccc

SEQ ID NO: 289066 - DNA, 583 bp, Cannabis indica
acataggcttgtctgcgcgtgaacccttgtccgcgcgcgcatgcgggttgctcggtttcaaatattttcatccaaattcaaaaaatcataactaattcataaaaaatccacattaagttctgtaaaagtctaaatttattaattttttgtctactttccaggaaaaatattttcaaaacgtaaaaaaaaaattatgaacgtaaattgcgatttctatacaatcatcaaatatgcacataaaccaacatgaacacatccaaatcaacacaaacatcgttttaaatccatatttcatgaaagtaaattattaacctggatctgaggccagttgttggggattattttaccaggatctagatttagtaccatgtatgttgtttaacatcctaaatatgaatttctaaaacaatagaatttaaacacgtataaagttcaagaaaccttacattagttgcagcagaattaaatgacatcttccactcagatctctaacccttgtatcctttctgtagtagagtatcaccaagatctgagccagattctctttcagttgattagattcttcacagtcttacacactatg

SEQ ID NO: 289067 - DNA, 595 bp, Cannabis indica
ccttttcccttgggtaactcgccgattaaatcgattccccatattgcaaagggccagggactcgtgatagaatggaggttactctggggctggtgtgtgtaagtggctattcgctggcatctatcacacctttttgaaaatgcgagggcatcttgtcgcagtgttggccagtaatatccttgccgcataatttttaaggcaagggaagtacccccagtatgattgccacaaattccctcgtgtacttcacgcagtatgtaaccgcagtcttctccactgatacatttgagaagtggttgactaaaacttctgcgatacaaactctggtcatatatcacataacgggctgctcgctgtcgcaatttccgtgcttctattttatcatcaggtaggagccccttgtcaaggtatgcgaggataggagtcatccaggtaatcttctggacatcatcgatttccatgatcatttctcgatctatggttgggtgagccaatacatctaccggaattacatcgagtaattcggcttctctagtggaggccagtcgggccaatgcgtctgcgtggacattttgagcacgcggtactcgagaca

SEQ ID NO: 289068 - DNA, 636 bp, Cannabis indica
aatactcttgagatcgaacctaaccatatcaggattaagatcatttgatctaggatcaacaggtgatattgaattgaatagatattacggtaaattttaacatatctaatcaaagttcaatatcggtcccttccgatgtatactccatacatccgatactggtaaactttgccaatgccctggaaaggacataacacttatccaaggtgtaagaatacctatcgctgattatatcatgccagtctaaatccagtgaactgacaaatcagggaataaactttcgaacatataattaagattatattccactgtgctgacaacactataatcattaacaaattcatatgttctggacttaaatagaattcatacattatatatatataatcatgaaataaatcatgtgaaccatgcaacataaaatgttatttctgatctttattaataagtaaatctgattatattgaaatgggttttatttagggcacaaaacccaacagtagacgcacccgatgactatcgcccaatccgatgtaagtgggtctacaagaagaaaagaggcgctggaggcgaagtcgaaacctttaaagctagactggtcgccatgctcaaatccatccggattcttctctccat

SEQ ID NO: 289069 - DNA, 633 bp, Cannabis indica
ggaaggtaataatttaatgactatttatatatgtaacaaattattcaaataactattgaattgaaatattaatataatttttcaaacagagcatacgaatatataggggcatcaaatgtgtatcttggactgtggctaggaattttactagcaaatagtccaagacaacctaaaaatcaagaatgtggttattatgttttaaaatacatgaccgacatcgtcgcacgtgcaaaccccaaccgttatatataagatcaaaaagccgtaagttttaattattaattatagtatttattataataaataataatatatataaactaatataaattttaacttttgttatactttggagaaaattaggaatacaatctaaaaattgatttattaccattgcagcgacagtgtacagaacggttgatgatggtgattcatgaaggcttggacgattgatgctgaaaggtttaagaatttttcttccttagcttatttttttaggttaacttgtagttaaatttattaacttgttaatactttgactaattttataatatttgtgtaatatataattttaatttatttaattgcttctatgaaatgaaattaggtatattggctaatcataaaattaat

SEQ ID NO: 289070 - DNA, 360 bp, Cannabis indica
tttttatatataaaaaattattattacattacactgatggattgtttggtgttgtgtaatgttttaatgggccggaatggttctttcacatcctcttattgggcatggtattgtttgttgtaaacattgaaaaattattattgaaaaaaatagtttgttgtataaatatttaagtttaactctcaattttgtaaataaatacttaagtttagtttttggcagttataatatctaaattatatttttgaaattttggtatctagcgattaaatgtcaaatcattatcacgtatcattttttttgttggtatatataaattattcttaaaaaaaaataaaaaaaatttaatgacttggacca

SEQ ID NO: 289071 - DNA, 601 bp, Cannabis indica
gttgttcagggtagtcctgtcacaaaatccatggctatatcttcccacttccatttagggatttccaggggttgcaacatccctgctggtctctgatgttcagccttaacttgttgacatgtgaggcatctagctacaaattcagctacatccttcttcatccctggccaccaatacaaagtttttaagtcattgtacattttggttgaccctggatgcattgagtagggtgtagtgtgtgcttccatcatgatctttcttttaagctctacgtcattggctacacacactcttcccttatacctcagcatgctgtctgtaccttcagagaaatcctttgcctccttctctggcaagcctgctctcttcttctgtaagaactcatcaagaatctgtgcatctttaagttcttgtagcagcgttgagacaatggttaggttggctagttttggagtaacgatctctatacctacttctttggagttcctgtttgtaggggcttctccatttgtgccagtattgccaagctagcataactgcgtctacttagcgcgtctgctactacgttggcctttcccggatggtagtggatttcacaatc

SEQ ID NO: 289072 - DNA, 720 bp, Cannabis indica
acctggagtgttcggtctcgggacatctggggattgtattttggtagtcgctgtgcgactagtaatatatgtatttttggaatattaacttttaaaagtttgaaaacgggatcccggtacttgttaatattttaatataatatatagtttaataattaatataaaagttttaatttgacacgtttctcgagaaaattctttgattagcaaagattgcactgtaattaaaaaagcaatgtagcgtgccttagcattagggtgttacaacaatacagctgacttattgtcacaatacaacttaaggggtcttttaattccatccacaatgcgcagcccagtgataaagttcctcagccatatatcatggttggatgcctcatgagcatacattagactcccaacaaccgaagcgtagggattcttttgcatttcttgaatttcaaggcttcctttagggcattgtttaagacaaaatttgtctcctttaacgacaagggtatctcctagtctacaatctttcatgccaaaccgtttgagtactttatcggtatagctcttttgtgataatccaagaatacatcgagaacggtctcgatgtatttgaattcctaacacaaaagaggcgtcaccaagatctttcatctcaaaatgcttagataaaaatctcttggtttcgtgcaataagcctatatcattagtggcaagcaatatgtcatcgac

SEQ ID NO: 289073 - DNA, 501 bp, Cannabis indica
ccgaacctgaactcagacccaaacttggaaccagactagggacgcagaactagggttgggacctagaaccgccccccagtctcgatcccgaacccaaactcagcaatttgagctgggacttgaaccagaaccagacggagacccatgatagtgatccatatcttgactcgggattcgagtaacgtggcctggaacagaccagtagtctgtatctagatcttggactcagacgaagaaccaaacccgaacccagaccaagacctgggagccaaaattggaacttgaataagaatcgcccaaccaggaccctagaataatactaggaccgtgaccaagacccagacccagacctagaaccgaacacagacctagcctcagacccaaactgagactggaactcgagcctggacacggtcgtatacccagaccagaattgagacgcggtccttgacttaaatcttgcacccgatcccaaacacagacttggacctagatagggat

SEQ ID NO: 289074 - DNA, 524 bp, Cannabis indica
atgttccagatctcaaaagaaatcttccctctattggtatgtttgataaaatggggtatgttgtcaaagttgaggaaggtgtaatgaaaattgcacaaggcacaggaactgtgttgagaggaaggttgagtaatggattgtatttcttggatggaaagacaatctcaggttgtgcagcacctgttttggactcaaccaaacacagtcaagcaaggctatggcacctcagattggggcatgtaagtcagagaggacttgaggaaatgaacaggcaaggactgttcaaggagaagctaacagaaaaacttgagttctgtgatgaatgtgttttggggaaggcttgtagattgaagttcaacaaggcagaacacaccaccacagaaaggttagcttatgtccattctgacctttgggggccatctaggattccaaccaaaggtggagcacactactttatgagtattattgatgattacagtaggaaagtctgggtgtatttgttgaaaagcaaagatgaggctcta

SEQ ID NO: 289075 - DNA, 942 bp, Cannabis indica
cagatcagtgataatgccagcaagcccaagtccaccaccacaagaaccctcaaccattatatcaaatgtcagtcgaatgatgtcccccacattcaaattataccctttcataattccataaacatatttaagcctgtcaatctgagcatcagaaaagtgtttgttcgggagcaaccttgcactgacaaagtacagccacgctttggctattgggttgagttcacaccgaaacaattgatacggttctccatcataggtatgaaatctaagtcccggataccctagagtttcggctatatccacataatccaaactttttgctcggatttgctgcttcaaaggttgctgctctatagtaaaggttgggagctcataaagagcatgaatatcggctgtggaagcaggcaccttaacccccctaactcttactttgccatcctctctttcaggccagttggctaaaaattctaaagctagagtttggttaccccgctcagtgacatctacaaacttagtccactgcctatttaagatttgatctctaatagacgcaaaggcaggagggatgtttgcagtttggcttaggtttacaatgtctatccctctatcttcaatgaatgccctatctttcaatttcaaaaaccgctcttgagcatccatgttggtaaaccttactctatcaagattagagcgacccctaggtgggttggatgatgacgctcccacttcctcactcactcttgacctttttggacccatagcacccaaatttttctaactctcaagatttttcaaaattttgacagcacttccccttaaaaatccacttcccgggaattaaccctttcacaatcacactcaatttcactcacaacaataatattcaacaatgtatgagcaaaaattccaaaaaaaaaagatccaacacaaagtctaatattc

SEQ ID NO: 289076 - DNA, 618 bp, Cannabis indica
aaaaaataaaacaaagaaaaaggaccaactaacacaaagtcaagaggcatgaagcctttgcacacaaccaaaaaaaataaaagaaactaaataagccaaaaaaaaaaataaatgcaagaactagtttggtggggggccaaagcgatccatgtatgccctccattgtgccatctcctcttgcacatttgcaaacccatgaaccatgtcactcctcatggtgttgatgtcattgttgaggttggtgagttgtgagttgagatcatttctcaaggtttgaaattggttgtcaaccgaagtgtgaagacgagtaaaagcttcctcaaggttgaattggggaaaagtaggcatgggaggagcttgaggaggcatctcttcttcttcttcttcttcttcttcactttcacttgcgggcaaattaatttcttcatcatcactctccaaatcaatttgcattctttgccctcttttgggtgtgaacacccattcattgttaaggaatttgtaacccatagccttgaaagttttggatcctagaatgtcactagaggtaggatcatttttcttttcatgtagggtaggaattcctaagagaggaaaaaggtagctaagaagaaaacc

SEQ ID NO: 289077 - DNA, 642 bp, Cannabis indica
cattggtatagtgtatattgttaaagagtacattacagtgataccagcacaagtacgtgaaagtacagggtgtgtgtggtatatcactcagtggtactcagggtatgaatcaaaccctaccaacactcgtgcaatgaggtacgaagtgtatgtggtatagtggttgtaccctagtagggaacgttcttacttatcttttaagccttgtaaataggtgtacgggcgcctagatacaagtcggtattatatgatatgttatatgcttttcttactgggtctgtcgactcacagttttacttccatgtgtaggtaaaggaaaggcaaaagctgaacaggagtgagcccgagctgagatgaggttgtacatgtcatggcggcgcgacttggagtgttcggtcttgggacatctagggttgtcaatttgtagttgttgtgcgacctgacatctgtattttggattatattgtaaaaggtttaaaaacgggatcccgacttcgtatatctttatgtaaagttataaagtttaatatttaatataggagttttattttgacacgattttcaaagaaagttctttgattagcaaagatagcactgtaattgaaaaatcactgtagctagccttagcattagggcgttaaa

SEQ ID NO: 289078 - DNA, 713 bp, Cannabis indica
tcttatattctctcaataactagccacacccatttcacctctctctattttcaccaatcaagagtgcatcccttttatgaggaattataggccatttgggcctagctacatgcccaatttggagaaaattagttgtcttggcccaatgagctaaccaaagatgttttgtagtgtgtctatcggccccgagcgggctagtacgttatgtccatcccattatggcccgatggtaatatcatgcattaccgattatatatagttatcattatctgctaatactgacactgagtgagcgacacttaattatgtcagtctacataaaatgtaatcaaacttgtctcgtgtatagaaatacaggttcatcaaactgtctcgatcttttatctttatttgtccacatatagagtttcttaccatattatggccaatagtagatcattaataataacagcggaagcaactagatgagggataaacccacttgtcccataattttttttttttaaaaaaaaaaaaactttagtctaatttcagcttaaaacttcaatatatgtagctttatttacttatcaacaataatagttaggagagacatacatattaaactagatattctcaataaaaccttcgagataatcgtcttctcttatatgattaaagtccaagattatcaaatgcaatgtctcatattgcctcataatattaaaactcct

SEQ ID NO: 289079 - DNA, 588 bp, Cannabis indica
tgtagttgttttcttctcttggaatttgtctgagaccgcagcttttgaattgtgcgagcaggtcgtgtattttgctcagatatgctatcatcttttctccccgagcctcgtattcaccggatacatgatttaccaccaattgtgaatcactgcagattttaatgtgttcggccttcatttcctgggctagcttaagtccagcgattagagcctcatattcggcttcattgttagatgccttgaatccaaatttgaccgcagcgtgcaggtgttgccccccaggcatgacgagggcaattcctacaccagatagttgatctgttgtcgacccatccacatgtagtttccaggtcagtttgtcttcattgttacttggctgaggtattggctcgggattaatttctagtatgccttcttttttgcctgtgcactctaccacaaagtcggccaaggcttggccactgattgctgttcggggttggaagttgatttcatactgacctaattgtaccgcccacttgagcaaccgtctagaagcatctggcttttgcagtatttgtcgtagtggttggtcggtgtatacccgaa

SEQ ID NO: 289080 - DNA, 736 bp, Cannabis indica
cattagtaagctctcgttgatcatgacctgatgtgccaactcttggtttcgcaggttgttcagactagatggacgccaggcgggaatccaggagtcagggcaactcggtcgagtcaaatcagggtcaaggagctcagtttccgccggatgttatgggccatggtagaggtcccatgggcagggcccaggctgctcaagccaatcaggaagcccaaaattgggaaactaggtttgctgatatgcaagccagaatagaggagcaagataatgagattcagagattgaggcagtagggtgctcctgcagtgcctgtgccagaagctcctgtggcacctgcccctgttgctcaggccgaaatagtggtagcgggaaatagaatggaacccttgtatgaaaggttccggaagcaagcacctctggtttttttgggaggtctgaatgtcacgaaagccgagcagtggctgacggtgattacaagaatattgatctttatgggtgtcaccgggaatgacagggtggtgtgtgccacctttcagtttcaagaggacgcgttagtctggtgggacatggtgtcctacattcatgatgtcacaactatgacctgggaaaggttccaggagctcttcaacgcgaagtactattatgaggccgttagaagtgccaaaagaaaagagttcgcacacctgacccaaaagataaatatgagtgtgacagagtacaccacacagtttgatca

SEQ ID NO: 289081 - DNA, 775 bp, Cannabis indica
agccattagctcgggttgacagcttcttccagcttgataaagccatttactctatcaaaaaattcgttcattgtgtagaatacattgagacaaaggtcaaaccacaaaggactcatcgcctttagtccagctgtaagcgccattacccttacatcctcgctaagtatttttatcttggcagctgcctctaaaaattattgaatatagtccttgaggagctcatcttcctattgcttgacatctagcaaatcattgggctcgatttagtgctttcgagaatgaacaatctgattgccaaaagcaatcataagatctttccatgagtcgatcgatccaaggggaagtttgaggtaccatcgctgatccaagattgttattgtggcaagaaagattctgtacctgacatcatctcttactcctcgcagatcaatctgaacttcgaagtaagcgatgtgtgatagcggatcttccttcctggtgtgccagaatgggttcttgaattttggagggattggtagagccttgattcaattagagaatggtgatcgtcgttctcaaacaactttgaggtcgtgatccctttcactaaggctgctaggttgtcaaactctgtcatgttgacaccatggatggtggttttgcatctcggttggagcctttgttacccgattggggtctcctctaaaagctcccgcttccccacctgtctttggttagagtgtgtgcaggtttctgtctctccagtcaatatggactcagtagctttggtctgtcg

SEQ ID NO: 289082 - DNA, 515 bp, Cannabis indica
tttcaagtgaaataaggtttaaggaggattaagtttaaacgataatagcttttagctatggttggttcatatttttaggaattattagcaaaaagggaaagtggtggaatttagtattcagattctaatattattatttaaaattaatcaagtaatttaaagaataataaatacgaagatattgtattaaaaggaggtgggaatactaattgtcaaatgcgaatttattgtgttcagatatatttgggaagtcaaattttatggaatttggtttgtaatctatgtcgtataggaaggtatcattataaatgtttttatggtaacttaaaaggatacaatttttggaagttttacaacttgtcttttggaaattaaaataggaataattatgtcataataactaaattggattattttaagtaatttcaattcaatatagaattgattataataaagttttaccataaataaataaaaatgtataaaaatagtttttttaggataagtacaataaa

SEQ ID NO: 289083 - DNA, 635 bp, Cannabis indica
ttattaccctagaatattatgagtccagtgaaagcatgagtcagggttgatactcttagtaaatgtcatctaagtatatagaaatgtattatatgcgtgattacatagtatgcaagttagggttattaccctaagattatatatgttgtagtaaatattgaatacacgcatgtatgttagaagttatgtgtttaagacataactgggttagacctggtatatatcaccaggataaaccaccgaaagaacgtaatacatggattacgtatatacatgaatagggttatgcgagcaaggcataaccaggttaggctcggtaatcagaaccgaggtaaaccctactgaggccttattgtaattagacgtgtgagagcaacacgtaggtctacgccacgtagacataaataggcatgtgagcgtaacatgcaggtctatagcaaatagacaaatagtgcagtggcactaataattatgtgttacatattgagattaagggttatgtgtcaaggcataatcaagttggactcggtaactagaaccgagatgaactattctaaggccttattgtaattagacgtgtgagagcaacacgtaggtctacgccacgtagatatatatagtgttgggttttatgc

SEQ ID NO: 289084 - DNA, 757 bp, Cannabis indica
atttattacttagtaatcctaaatatatagataaaaaaaactcacaatattcctaaacatataaaatacacggaaaataaattcttaaaaaaaactatttaatcagatttttgccccgaactataatatatttattattgtctttttaaacttttcagcccatcaaaaataattttttactattcacaatattataaattggcttttctatcaagtttagttacacgtagcaaacaaaataatgatatagctgacacgccggtactatgtcaacaacacatgtgttattaatttgaaaaaaaaaaataatttataaattttttaatttagttttctataatttttttaattattaattgaattttaatttaataatttttttaaaaatgcaacacttttatatttctaatattaaattatacacgtggcattgtttatcattaattttgtttgattgacaaaatttgatagaaggaaaatttacaatattatgaatagctagtttaaagactctttgtaacaagttaaaaggttcgggagcataataatatatatatatatatcatagtataatggaataaaaattctaaataataaaaataaagagaaattcgaaaaggaaaatttgaatatttatgcatttattgaactaaattaatccattaaccaaatctattcaacatttgtagaataggttaatttttactaaaacccattttacccctctcattccaaaaagtggctctctctctctctc

SEQ ID NO: 289085 - DNA, 609 bp, Cannabis indica
tgaaggaagggttatgaccaggggcggcagcaaggatagaggaattgggaaaataacgagctttaagagtcctactaagaagagaatgaggattatccagaatacgccaagcttgtttagctaacatagcttggttaaaatgaacaagagagcgaaaacccaaccctccacagaattttgatttacacagggctttccaagatttccaatgaattttcctagactctccattagaaccccaccagaatctggccatcacagtctcaattcccttacaaagcttaacaggaagtctgaaacaagccatcgcatgagcagggatagcttgtattacagcttttaaaagaacctccttaccagctctcgaaaaacatttagaagaccaagatctaaggacggaggccactttatccttaagaaaagagaaagagtgaaacttagaacgagacaaacattgaggaagacctaaatacttagaaacaaaaggcttatcttctaaattaagagtgtgaaaaaacatagcacgaatttcctgaacagtattaggagagaaaagaatggaggatttagaaaattaatggcttggcccgaggccctagaatagatatt

SEQ ID NO: 289086 - DNA, 523 bp, Cannabis indica
aaaattacttaattcaaagttggtccaaaattaattaaaaattaattttcaactttaattttaattttcaatatttaatttcccaaaaataaaaaaaaatataaatttgaaaaataaataaataaattaaaataataataaaatatatatttgaaaattatctaatttaagttgttctaaaatgattaaatttccaacttaaattattttcaaaacaaaaatttaattaaataacaaattaagttacaaaccacttaatttaaaaaatatttcatttttaagttgatccaaaattaacaaactttcaacttaaaagaatattccaagaatctttcaataactaattcgtagaattcctcaacttaattttgaatttcaaaaatattcaaattcaagttgcttcaaaaaattagttataattctatatttaattaaatacaagaaaaatacatatagtttatcttgaataagtttcattaaactaagtgtgtttttctaaaattaatttcaaaatattcaaatg

SEQ ID NO: 289087 - DNA, 722 bp, Cannabis indica
ccaaatgcaatgaaaccttccagagtacctaataagggtatacacaatacattccaaccagaaaatcacagaacaaaccattgaatctcaacttgccattaaagacctaaacttgagtttcaaagctcaagcttacccaattccatctccacctttcaaaactaataaccagagcttaaaaacaactcaaaactaacctagaaatcagattacacaagctttaaaccttaacagcccctattctcaaaaatcacatgctcaactaaagaaaaagcttcaaaacacataaccaagagttctagggtttacctccacttcaagaacacttaatccttagcttaattccagaaaattgaggaggagaagttggctttcctctggtttttgcctcagccgagagagagagagaacttcaagggaaaatgttatttccttctaattttctttttgatttctttaattggaaaaaggattttaattaatcctttgctggccaaataattgctaggtgtcaacctcaaaatcagccacctatcccaccatataaaattactaaaataccccttgaacataaaactagggtatttctaaagctaggggtaaaatggtcaaatcacataaccccgctcaatcccgataatttattttctcaaaaatatttcccactaagaaataatgttctaaacttatccatgtgatcaaactagccatccatcgcattt

SEQ ID NO: 289088 - DNA, 504 bp, Cannabis indica
gtagcttgtcgttgatctccaaatcttattgtaaccgcacatgtgtcttcttcttggtagctccttattatgaacgtttctgtgtttccattttttgtagcctttaaactccatttgcagtttgtgtccgaacacactatgttctattcttttgtgcaagatttcattactttgtattgaaatgtcttcttgattgcaaagtagcatagtgtacttatcaatgtttctttgtccttgtaaattttccccctttctattgtttcatgtcgtttgtcattgatgataatcatttctgtgttgtccacttcctcttgttcttcctggttgttttcgagttgttgtaccatttctgcagccacaagctttgtgtagtcggtgaagtcgaaatattcatctactgctgtagttttttctctgttgttttctggttgttgtatggttgattctgttgggttttatgccctaaataaaactccaattcaatgtaatccattttattcaaca

SEQ ID NO: 289089 - DNA, 653 bp, Cannabis indica
ggacttccctacttggtctattttcgagatcaaattagcaaggtggattacaaagggttgcgacaaatcactagagggagtctaaatttgtttaagtcaattgtttttataatctttgatactttactaattgattttattctccgggcgtggccccgtggactagtagtgtttgaaagaacactgataccacgtacagatttcttgtgtcaagtgatttaattttctgtaattatttttatattataccagttctggtttgtgtctgcaaaactggtttctgcagtaacagaaatacatgctgctgctgcagacgtttacggttttatatttatgatatttctgtaatatttattaatatttgcaaaaactcagtttttcaactttgatgtcttatacatggtcttgtagaaaataattttattgatgatgaaattcttgattgtgtgatagttataattctagaaaaatgatagactcttatgatttgtttgcttaactcatgattaattactgctcaaacttaattttttttcaaaaattttgcacttcagttgaattaatatagtggcgtttggtaacatttttttaatcagtcttctatttttaaaattgaaaaagtgaaaatggtttcaaaaacatgttctacaaaa

SEQ ID NO: 289090 - DNA, 644 bp, Cannabis indica
gcataaaacccaacaattactccaaagggcatcaagtatttgtctgctctcttcgtcctctatgcttcccaaggatggggtgctccttcccctcacaaggtcgcttggttctttgacctgaagtctacccccaagcaaggtaggtcggggtatttttacttctctcagccaggcttcaagtggttgagcggcacggatgacaaggccatcagcaaaatagggcgttttgttgatgagtacttcatggtgaaggatttgagcatcacccggactcagtttcagcagatcccgacatatcatcgtcctcccctcactcttgctcttagggatagagctcaaaaacttgcccggttgctcgaggaagacaggaatatcatccagttgaccttcgatgataatgtggtgcagtatgggctttacccagaggacttttctcctaagtccgcgccggggaagacggggaagtctgatgcttgccggcccgaacgaactcatctggagaatgagttgattcaactgaagcgagaggctaagttgaagggaggtgccagggccaagcaatatgctcaggagcctatgaatcctgaagattaagctgaggttgaggctgaggctgagcaggcgaccccattgaagaggaagaa

SEQ ID NO: 289091 - DNA, 445 bp, Cannabis indica
tttttttatatttttttggttttattttctttttttttttaatttgagatatttaaaaattatatatatatatttttgagatgaaatatcaacttcattgaataattagcattctgaatacaaaagatgtaagagtttaccagatttagaaatatcagaaatactacgatcaaattgataccgagaatgtctagcaacataatgtgctactcggtttgctgatcgtcaaaagaaaaataaataaacatttgggagggtagatagcaaaagttggctgtcttttattaaaaggccgaaagtggacttcattgcttggtttcttcgaatagcttgtactgaaacaagactgtccgtgtcaatctgaacatgttgccaattattggtctttacccaactgaaagcttctttaatccccatggcttcgatgacttcagctgcatatctt

SEQ ID NO: 289092 - DNA, 165 bp, Cannabis indica
taaattttttttaaaaaaaatccttatattaaagagatataaacaaaataaaaactgatttttagttttttatttcttctacccattatttaaatataaatatagccaaatgaagacacataaatttgattttctatacatagaaaatcaaaaaatttgatttct

SEQ ID NO: 289093 - DNA, 225 bp, Cannabis indica
ctacaagcaacagaagttcagcaccaacatagaaggatacagcgatgccgactatgccggggacagagacagcagaaagtctacttcatcttacatgttcctacttggaggaaactgtgtgagttggaaagcccaactccaacctgtggttgcactttcaacaacagaatcggagtacatatcaaccacagaagctattaaagaagccatatggatgaaaggact

SEQ ID NO: 289094 - DNA, 504 bp, Cannabis indica
ctactgaatttttgtcaactattttttcattatataaaaggtattatatgttttattcttttagattttgctgttgttgttgctgtctaatatgttatttaagcatataattagtttttattaatatatcgtatgatatacaaacaatataccttaaaccaatatacatatatcacaaacttaaactaatatactattaaatgaattgttttccacaatatacagtagcatacaaaaacttataccacaatcataagcagatataccatagtcaaaaattaatataccaccagcatagtgaaaaaaaattatacaaaaaacttaatttaatattccacaagtttttttttcttgttctttccttcatgaaataccaatgaacataaaatcaatatacctcagtcaaatataactatacctcatacttaaattaatatttaatagtttttttttcctttctatccttcacgatatacatatcacatacaaacgatataccttaga

SEQ ID NO: 289095 - DNA, 682 bp, Cannabis indica
caataaattcacagaagacggcattgcgcaccaaagaaagagaaagggcagaaagtcgaaagaaagcaatctctcctatgccctaaacgaccagtatacgaagaacgtatggtcttttacaaaaaaaaaaaaataataacaaatgcgtgacaagagtaatcctatcaccagaatggtgaacctagaccgattacatgaagaatctaaaagtttgcattcccagaaacttcaaatacaaaacccagaaaaaacaagcagataagtaacagcatgccatgcatattaacaataaagcaaaggatgcaagaaacttacaatgaagtgttgagactgggggtcctgctgtaaatcaaacgaagataagaaggactgacagtagtgaacgaagatgaactgggaaaaattgcaaagtgttcaacagtgtttctcttggtctgagaattttttctctctgggaaatttgagcaaagttggcaagaaatgggaagtaaccgaaatgaaagaaaggtggtggcttttataggcaaagctgcatgaggaacaggcattatcacctaccaatcaaacggtgggggaaacgcacgattcgaattctcaaagatcaacggaccagattgatttgaaataaaggcgatggaaacgtttgagtatccgtctgacaccattaatgcaccgtatcaat

SEQ ID NO: 289096 - DNA, 624 bp, Cannabis indica
tcaaagtgttttcttcttttcttttttccaaaataaattcctgcaaaaagtagaaataaactattataaaatgattatgcaactgtaaatcaacttgaaaaaccataacactttactcaatttaacatagttgttgtcattgtgccttttcatcagttttatttgaatcagatcaatttccaactattataaaactaatttgccaccatttacataaatcgtaccttgtatatctgctattttttggtacccgtcaagtgacactccttcataatttgtaaactattttaaaacgatattgcaactgtaaggcaacgcaaaaaattaaaaataggcttatacataacatgtcattccttaattagaatcagatcttgtttattgtttttaagaatctgaattgcctattgtaaaccagggaatcaatcagaatgcaagtatatgacgtagatttatttttgaataaattttcatatcataccttgttttggattcgagggggagctccagatctgtttaatacagatctacattgcttgaatctgtattttctattctggattgagttattttgaacgattaaaaccgaaattaaatgtttaatttcagtttctttacagtttt

SEQ ID NO: 289097 - DNA, 556 bp, Cannabis indica
gatgtcttcaacctcagatttgaaaaaacccaaaaccgaccgaggaagtcgtggtcgggggctactgtcggtggtggtgggtggtcgtcggtggccgggcgtgttggtcgggcgatgaagccatggtcagcgagagggagagagagggtcgtgcgtggtcagcgagagggagagagagaatgacgaaagaatgttgggatttatttttcaaatgggaggagtattatgtggaaaaattaaatgtagtcatatataggcaattttaatatatatagatttaaggaaataattttagagtgttttatggatagtttttcaaatttcccttttttttagggaattagggttttttttttaatttttaattttttaaaatttagtttttttaattttctaaattaatttttttaaattaagttatttaaattaggaccaataaaattaatttctatgtgtacacagtgtccaccgtagacaacacaatagtgtacacatggagtagtccaaccgtggcgacttaacacctaaaaacttagatgaaaataggctaagtagc

SEQ ID NO: 289098 - DNA, 579 bp, Cannabis indica
ggtcccgtaaagacttggggaggtaagtgttatcccaaatttggcactctgacgtggcatcacgagaatggagacacgtggactctacttaaagcatctgttcggatcaacacgccgagcaggatgcctcgctggcatgtccagaatggaatactcaacgatccgtgcagaatgagcaacacttagcgaattcaaccaaacgcatcgtgagtcaccagctcaatccctataactcagggatcaacttacgtggatatggcatacacacgatcccactatcggtgtattcagcctcaatcccacgatccttgcattcagcattgatcacacgatctttctgtttatgcgcattgtaacgagagaggaaactcttcctcctcaagtttcctgccctataaatagtgaggaatgttcactgggcaaaagaggtcgaaaaactgtaaacagagaaatcatacgccgaaacgctataagctaaggctatctaagaattatatattcagagatattattgtaagagctataagaaaaggaatcttcttccttattcttaagtcaatacaactaacgaggattagg

SEQ ID NO: 289099 - DNA, 533 bp, Cannabis indica
agcagaacctagagttgtaggttcgggtttcctgggattagggtttcaatcatgtcatttacccgatttcattatgtgattagggcatccatttcgcaccagactttccgttcaggtcggccagcacacttgaatctggaaaagaaggtaagaactgtatataatgtgtgatattactatctgagtgtatgaatatgttatgtgtatatgcatgcttgaaatattaagtacactaccaacacttgtacagttatggtacagagtgcatcggtatagtgaatattgtttatgagtacagtatagtgataccaacacaagtacggggaagtgctgagggtgtgtggtatatcactcagtggtactcagggtacgaaacaaaccctacaaacactcatacagtgtggtacgtagtgtatgtggtatagcggttgtaccctagtatggaacgttcttactcatttgttgagccttgtaaataggtgtatgggcgcctagatacaagtcgaaattatatgatatgttatatgcttttc

SEQ ID NO: 289100 - DNA, 707 bp, Cannabis indica
aatcacgtaatacgcctatgttagttagggtgttataattcacttgttccccgtaaaagggattcgggtctgcattgacacttttgactttgccttccttgcaaaacttaaagcattggtggagtgttgaaggaatgactccatattcatgaagccatggtcgccctaacaacacattgtaggatgtatctgaatcgatgacatgaaataaggcttcagaatttaactcgcctatttcaatttttagtgtgatacttccccttactttttctccagcttggttaaaaccttgaatagtcaatgatgatggagacaattgacgtgggtgtaaaccaacatctctcaaggtttttaaggggagtacattcacagccgatccacaatccaacatgatgcggctcacgcgattatcagcaaccatacccgtcacgtacagaggtcgattatgtaaggcagctcccaactgacgatctttatcatcgaaagttatgcatgccatacaagaggtatgcgtctcaagtgatataggtttcattggctctattttctccgtataaaattcaggacttgtcaatgcgacaacaagtgcatttctatgctcaggagacatttgcagtgcatcataaacgcttaaaagagcagggatgcgttttagatgagccaatatatcatattttgctcgcgtcatctcatcttcaccagtgctt

SEQ ID NO: 289101 - DNA, 708 bp, Cannabis indica
ctatccaatttctcgaagagcctaacatcactggcacggaagaaattgaaatgattgatacttccccaaactggatgacaccaatagcagcctacctcgacactgggaaactcccagataatcgaaatgaagcttgaaaaatgagaaggaaggcagcacggtatatcatagtagagagaattatgtacagaagaggattctcgatgccattgctcagaggtgttacccaagaagaagctgcacgaatcctatctaaggtgcacgaaggattctgtggaaatcatgctgccgagcaaagtttatcaaagaaaattctaaggcaaggttacttttggccaacgatgattgaagattcataagcctatgttaagaaatgtgacaaatgcaagagattttcaaagatacctcgagcaccacctaacgagttaactcagatgcagagtccgtggccctttgccatttgatgaattgacctgatcggaaaattacccaaaggcaaaggaggagtgcaatatccagtggtagcggttgattacttcactaagtggatggaagccaaaccactcgcaacaattacatcaaagaaagttcaagacttattgtgacgaacataatctatcggctcagatggccatagaaaaatagtttcagataatggcaagcaattcggcagccaatccttcactgacttttgtgtgaaccatggta

SEQ ID NO: 289102 - DNA, 548 bp, Cannabis indica
gtttgcaccaggtttcccaaagctcttcatttgttgctcaattctccaccaattgccatgaaaccttccagagtacctaattagggcataaacaataaattccagccagtatttcacagaacaaaccaataaatctcaagttgccattaaagctcaaagcttgagtttcaaaactcaagcttgcttagaactaacaccatagaccaaaatcaactaccagaacctttaatcaaccaatattgagcataaaaactgaaccctaaccatttctaaacctaacagcccctgaaactcaatttcacatactcaacctaaacttaaattcaagaactagggctaggagttgctagagcttaccttggtttgattccttgttgaatcccttgctgcaaacaccaaaaatccacaacaaaaccccctggttttgactgcttcgaagagagagagaggatggcaagagttgctcttcaatttttgatcttttcttaatttcactaaatgaggtaaaaggtagggaaaatcaatttcccttgctgaaaaatcagctt

SEQ ID NO: 289103 - DNA, 931 bp, Cannabis indica
tgattgctttattcgagtgtttactgtttccatggatattctaacacttgcctcttttcttttgttgtagcagtaattccatggatgccattttggccgcacttgccggagctcacactcctgacgctccccttcctttaacttcctcccaggtggccactcccttgaaagcttcttccagtgcccctccagacactattgacttagtggatgaggaggaggcgcttcctgaggaagctaaagaaggtcaagaagagcaatgggctcttcctgaggaagttgaagaaggtgaagaagagcaagaagttgctctgattcgcaagcgcaagggcaagatggttgctgaggaggtgcccaaacggcaacggagagctgatactccggcccctggccttgattctgaggtttctcccgaggcggaggaatacacagtgcctcccaacatagtgcttactctggatagccaaacacaactacgccatggacgaatactcccggggtcatgctgacgtggaggctttgaggagggttttgcgaattgaaatgcaaaatacccttaacgatcagaactatcaaaatcagtgggatctaaatttggaccccctgtcggattggttcagtcgtttcctcgggcctaccttggctccctttgctgcagagatgactggcgagttcgtgtctcagctcacccggtgtgcacccaagcggttcgctgcttgtgcatccttgaactccatctttcaagtccacgatctcagccactccctgactgtggtaagtatttcgtagtttacttttttcctcattattttctcttaaggacttttacttatgcttgaatccttttccagctcgctgccgaagccggctgcctttccaagaacctaattaaccatggcttcgtcttgtccgaatttgggggcatggacga

SEQ ID NO: 289104 - DNA, 777 bp, Cannabis indica
gtttttgagaaaatagagataaaatttgataaaattgcaaaattaagtgaggcccaataacaccatatggccggccacttaaatagatttttcaaattaatattttcattattttaatgccaaataattctaaacctagacctagtagttgcctataaatagaaagtgatggctcagtcaaaacacaagttttcaataagcctttctgacagaaatttctctcttcagaaaactgagccttcccactttctatccttggccgaaatacctctctctcttttcccttcatctttttcgtgaccctagtgaaagagtaagtgcccacacacagcaagcagtaactcaatcatagattggaagactgtgaaggatcaaacttgaagaagaaggacattcgggctcagatcttgattatactctgctacagaaaggaatcaagggttagagatctgagtggaaggagacattaattccgctgcatcaatgtaaggttttcttaactttatatgtgtttaatttatcgttttagaaagttcatatttaggatgttaataaacatacttgtgagtagatctaagatcctggtaaaataattcccaacagttaaataccataaatttattaaaatgctttcatgtttcgaatccccttgccctttttttctatgtgtatctacattttattattaagatgtatgtgaaagttaataaaatgtaggagcatgagttcttaaagattaaggtttgtaagtgacataaagttaatatttatttttag

SEQ ID NO: 289105 - DNA, 293 bp, Cannabis indica
tctgttttctcttaagaaattgaatggcacatatgattatattcccgacattttatcccgaaatgatataaatcctcgatcttgaatctcctattgtatatatgtttactataggcaatttaaacttagagttagattagtagtggtggtccaagagagaataattactcatgtatctttggttaaatttaagtctttgactttaattttagattccaaatagaaatttaataatttctatttcctagaacacattacaccattacagtatgactttctactaagtttttttt

SEQ ID NO: 289106 - DNA, 1257 bp, Cannabis indica
atttttgatgattgtatacgtatagatattgaaaaatcacttaaaaattctaaaatagttttactgtatacaaaaataaagttttaaaaaaattagttactatacgcgtattagaaaataatacgcacttacaacaaaataatataaagttattttttgactttgtaaatttcttcatcagaattttctaaaaatttacaatataatcataaatagctacaacgtatgtgaatcaataaaaaaaaattaaactaaaaaaactctcttaaaataccaaaaagtaagcaggcatgcatacaatcgggtactaattaatttaaatttaattttatttttaatattgtaaattattttaaaaaattcaaaaatgagctgaatacctcatattatgttgtcatatatgaaaatttagattataatttcttcattccaaaattaaacaaaaataatgctccatacctaactagtttttccaacatatatattatatatatatgtgcaaatttatttagtcaaaactagttaagttgaaaattaggtttttaattagttaattttgctgttagtttgaacttattattagagtagattttgaatcacaagcgactcttttggcttagaaagtaggattaggtgagtgtatggtaaagtgtatagagttctatcttaaaaccaattgacaataaaaagagtagtttataattttatatatggtatttagtttacatatattgtcaatgtgggattctttaacaattttaattttagatttttaataaaggagaataaaattgagtatttcatggatataaaaaaaaaatataaccatgcatagttatatattttttatgatctgcaataataagtcactaaatagataaaagtattttcaaaaattaatatttataatttctttttattttaagaaaataaataaaattatgttagtatcagattacaagtaatttattaattatttttaatgaatttttttaatttaatcacaactgtctaataattatctaatagctaaacttaaatataattatcatcattacatatatcgtatttgatgtaattattgaacacaatcgtcaatattattaaaataatcattataaattgagctatattagtacagtaaaacctctattcaagaatacacttgggaccaagtaaattatattctaattggaaggttataactaaatagagttacactagaaaaaaaaacttaaaaaaatcaaaaaatatcaa

SEQ ID NO: 289107 - DNA, 503 bp, Cannabis indica
ttgttaaggtgaacattgaacaccttatgttgcgctcaacaactatcaacacctaaacgatttttatatccaaaaccagtgggtattaaggataggtttcttccattagctagtagggccggagaattattagagaaccttccatgaccattcggacaatgaaatcccctacagtgcatacttttccatattctgatcaatcctccatacttctgtgtccactccattgttccatataaccaagttgttgtatcaatggttaaggataggtttcgtccattagctagtagggccggcgaattcttagagaaccttccaagaccattcggacaatgaaagccactacagtgcatattcttgcatattctgatcaatcctccattcttccgtgtccactctattgttccatataaccaagttgttgcatcaagtggttatgctgatctaatagccgatcaatctagtactttcgcatattgtgatcaatcatctatgctttgtaa

SEQ ID NO: 289108 - DNA, 593 bp, Cannabis indica
tatatgtgacatatatgtgatcacgtgtttgtatcatattgttatatatagtaatatagaatatgatatttaaattatgtgagatatataatatataacatgtatatatgagtaatatatattatatatatgtagagcatgtgatataatatatattaattaatgatattaaatatgtagaaataattatttctatgtatttatatgagacatgcatatataatacatatattatatataatatatagcatgcatgtgtattaaagtatatatgttatatatgtgtgaggtatgtaacatatataattatgtaattagtatatatatattatgtgtatatgatatatatgtatatatgctacatgtatatgagatatgtaacatatgaatttaatattgatattatgtgtatggttacatatttgatgttgattagtaacatacatattatattagttggcatagaattattatttgagagttataattcatgcatgagagttatatatattaattttgtatattaatatacaaattatataatatatatgataataatattaatagtagtataatagtgtttattactattg

SEQ ID NO: 289109 - DNA, 601 bp, Cannabis indica
cttgaaccacttaatgaccatatttggagttagatgactcaaaattcacataacattagaaagatttcaaaaagattgggtttgggttgaattatatgtttatagatattctgataattgtagttgttgtggataagactatcatttcattattaatgatgtattaaaaaggaaatatgaaaattattggcaaaagaagaaatctctaaaaaaaaaaattgacttttagcccaaaaaaaaaacaaaaactagtgactaaagaaaaaaatataggtgtcattaaaaatcacttttatatcacaactacaatagtactatcttcataattataattagtcacaattattttttagctacaactttttgtttttaatttttattatcactaatatataattattgacttacaacaattccttgtcactaattttctttaattagctacaacccacgtaattttacttactaatttttgtttagttcatatttatagataccaaaaaaaaagacaaataacttatatatctatatatatttacatactagatgattgttacgtgtcaagccacgtagtgttagttttatttaatattttaatttt

SEQ ID NO: 289110 - DNA, 751 bp, Cannabis indica
gttagttcaacatacccaaccaactaataaattttccttgaaagacgtaatttgaaccaacctattgaccggttttgttatggtttggttcagtttgtacgtgtaagaaattagtacaatttgtgagaaaaataattgttattagtttgtattggaatactaatttccaataatcagttgacatgtgtaggatgtattaccttctttaataaaataaaaaatatttatttaaatatacaaacctttgaagtcaatatgaatgaaaataatgttttaatttaaatatacattttgactgggttaatatcaatgaaacttaaattacctttgtttaatttttgtcttatgttaataaaaactcctacagtacatatgatgtgacatataactatgtaaaactcagccaagtacgtttttataataaaataataatttcaacacttaaagtaaacaacaaatccttcaaaaccctaaaaaacgattttaaataaatgaggaagaccttttttgtattttaaaataataaacattttaataatattttcccatcaatccatatacggtcaaatcagtaggttgtactatccacttgaataacctaaaataaaaattacgtagaaatctgttattactataattaaattattcaactaattctgttcttaataaaattacagaatttattaaaaagaaaatcaagtaatatagtactatttatttttttgtatctaagtcaaatattgtatgtata

SEQ ID NO: 289111 - DNA, 635 bp, Cannabis indica
ttttctttttcctctggctctaggctctttcccaaccggagtactttggtggagtcgaggtcgcacactgatatttcctcgacatcccccatcggttccacaattttttcggaccccacccggggatccaactcatcttcttcagccattcctggctcaatagtttcccggaccatcagtacgggcaggtgggttgcaacattgtaacatttccttgcctcccccttatttcctctcaccgtccctattccagcttcctgggtagggaactttaagcacaggtgccgaatggatgtgactgcgccaaagtctaccagggccggtcggccgaggattgcgttgtaagcggtcgggcaatccaccaccacaaaagtgcagtacttgaatgtgctctggggggtgtccgggcacaaggtgactggaagtctcacttttcccattgggataagcgtcgttccattaaaccctgtgagttgggaaccactaggtgagaggtctcggtccatcaggcctattgcagcgaaggcctccttgaagagtagattcacagaacttccgttgtcaatcaagactctggccacaactttattagcgatgggggtttcgattaccaacggatcatggtgagggaagcg

SEQ ID NO: 289112 - DNA, 737 bp, Cannabis indica
tttgtcggatcggttcagggatctcggatcccggtaatttcagtactaacagctagggaattgttacgagatggatgtctagggtttctggtagtggtattggataccactcgacctgactccgttcgaccagaagacatcaaggtgtttgggaatttctagatgtttttcctgatgaacttctgggtttaccaccgcagagagaaattgattttgtcattgacttggcacctgaagcagaaccgatttctaaggccccttatagaatggctccagcagaacttaaagaattaaaaattcaactccaagggttacttgacatagggttttcgcagcctagtgtgtcaccctaggaagctctggtactgtttgttaagaagaaagatgggtctttgcgaatgtgcattgattatcgggaattgaataagctaacaatcaagaataaatatcctttacctaggatcgacgatctcttcgatcaacttcagagaaagacggtcttttcaaagattgatcttcgattgggctatcatcaattgagaatctgggaggaggacatcccaaagacagctttctgcactaggtatggacattatgaatttttggttatgtcttttggactgaccaatgctcccgcagctttcattgatttgatgaatagggtattcaaggacttcctcgatatctgtgttaatgtatttatcgacgacatccatgtgtactcttaatcagaagag

SEQ ID NO: 289113 - DNA, 546 bp, Cannabis indica
atgaatccgtgttggtaaaattaatattaaatattttcatttaaaacctgatttgactagactgtacaccctatcaatcaagatgactttgtcaatgcattggaaaaagacatttggaaaatccaacccaaattgtgaagtgagttcaaatttcaaattaaataatatttaaaaataataattaataatttcaaaggtattactaattacttgatagtaattatatgtcattatttcactaattttgtaccattaatccgtataaggtcacaacattagggtgtaccatctactttgaaaaccctagctcatccacttattttattttggaattattttttaaaatctgacattgcaagtgttgttcgtaacttattggaaatagtgaaactcaatggcacatattgagtgaacatatttccattccaaataaaatttaagtttacagttacaaagacatacacaatagaacagaatttgtacataacttagttgtatcccaaaataaattaattaggatgttttttacactgaaaaatgtaggtt

SEQ ID NO: 289114 - DNA, 603 bp, Cannabis indica
tctcgagatgatgctgccagcattaaagttcaggactttgctagggccgaattaggaagtccgggtaggagtagcttatttgccatatcttgtgtaagtggtttcccacggatgtctaacacttgcctatttttgttaaacaggtacctccatggacgccatcttggaccagcttgccggagttcatactcctgaggctcctccggcctttacttcttccccaatagcccctgccctaaaggcctcttccagcgctccccctgacactattgacttagtggatgacgaggaggtgctaccgggagaaggtcaagaaaagcaatggggcttttctgaggaagtcgcagaaggtgcgggagagctccgggctcttcctggggacgctgaagaaggtgaagaagagcctgaggttgctctgattcgcaagcgcaagggcaagatggttgcccaggacgagcccaagcggcctcggagagctgacactcctgcccatggtctcgacggtggggtctcccccatggaagaacatcatgctcctcccaacattgtgctgactcaggttcctagggatgaggtgaggcaagagctccggatagccaagca

SEQ ID NO: 289115 - DNA, 536 bp, Cannabis indica
tgtttgtgaattttcgtgaaaaataattcaaattctgtttctggaattataattgttggatagtatggaaaaaattaagcaatttacttttttacagaactaaatttgaattaaattgaaataagtaagaatttttgaaagttttgaaaaatatcagggtcgtgcaacccactcacgcgcgcggatgagggtgataccctcggacagcacgcgttcagacagctactcgaccaagtttttgtctgaaactcgtccctacgcgcgtggaacaggctgcatgcagccttctgccccgagggacctcgaccatgcacctccccatgcgcgcgcgggtagtatgcacaacatactctctgtacagctcgcaatttttttttcgtttttcttcaatttttcatgctatttcatggatttaacttccaatttttcgtgtagttttgtatttagatttttatttttcaattttcgaatctaaatatcagaaataaattaatttgaattttttaaaattaatcttagatattagtgtaatttga

SEQ ID NO: 289116 - DNA, 533 bp, Cannabis indica
atttagatcaagcaataataggttttagaaaaaacttacaaacaatctaaaacacatactcatgcaacaagttagatttggatagttggatgtaggatttatttaattttaaaatattaaatatatttcgaaaataataaaaaaatattttcggtttttaaaatgaaataaaataatatttaaaattaaacctacaattttgaaaaattaggtttcaagtaacctaaatatcatttcaaaaaaaatttgctaacttaccttttaaacttcatgttatttaataaattaaatattcaataaaatagaaaatgataaatacatacctttttctgattttataatttaattataaaaaaaataacaaaatttaaaagttaacaaaattatcttatttccctttttaaaatgccatgattatagtaatcttattttaaataaggtcaaattactttaaaaggaaatattttgtaaattttttttatatatctcacctttttttaaaaaaaaaatataagataaaataattaaatttt

SEQ ID NO: 289117 - DNA, 1149 bp, Cannabis indica
ttagactttcattacagaagtttcgacgcgagaattcagataggttgttctgttcatcttcacttcgttgcgtaaagtgttcttttcaaagtttatatgccatatagtgattaatctttcctttcttttttcctctcctcttttcagattagtgtgcagcagggaaacaaaagcatgttctacgtaatttgtgtgattagtggagttcctcgtttgatgtgttgctaattcattggcaccaaaattactttacattctgctttttctttattgtgttttatctttttctggtcattttgcgtacacatttgttttgtaatcctcggtttacgttagtgagtgccgagtgtggatatgtaggaactaatcatctctcaacactgaaaagcgtgatatgtttcgatcttacctattgttactacgaattaaatttcaccaaaattgccttccaaaatctattatctcttattttgtgagggaactcaagacttttcttattattattattattattttttacaattgggggtattctatttcttagagcacgctatttgtcaaaataattcactacaaattgtaccttttttttttaatgtttttttaattttacatcatacaacaaatttttgaaatatattttactcaatttaatatacaaaaatacacgttaacgtatgtaacaataaaattaaaacttaaaataattgttattgataaattttattgaagttgcaaaacatcaattgtgactgttcttaattgagttaattgtgaatttttatattcttaaaaatacaataaggcttcccacaaatttatacaaaataattttttttgggttgagatgcaaaatggccataaatttggtaactaagttagtaaatgtccactttttaaaaaaattaaaaaaatggccaaatttaataaattagctaataaaaattataaaaatagatttatcacatatttttttttaaaaaaaatgtatataataacaaaattaagttacataatttttttagtattgcatattattatattgtaacaaaataaataaatatattagatcatttaaatatatacaacagtattagatatatcgtagtacagaaaattagtataccgtagtaataaaattatatacca

SEQ ID NO: 289118 - DNA, 685 bp, Cannabis indica
ggatatccgcattttgcggattggattggattggatcgtacggattggattggatcggatactttgtgaacacccctagaaaaaattactaattaacctaataataataataataataataataataataataataataataataaaatattactaatgtatatgtaggatacttctgctgtatacaggttaattttgtgcgtatatgataagaacaatttatggactgtagatcattaagactttatgatatattggataagtagaatgtagataattacatcagattttttttgggttgagatgcaaaataactttaaatttgaaaattaagttagtaaatgtacccctttttaaaaaaaattaaaaaattgccaaatataataaattagctaataagaattataaatatatatttatcacatatttttttaagaaaaatatataataataaaattaagttatatataatttttttagtactgtatattattatattgtaacaaaaataaataaatatattagatcactaaatatatacagtagtatttgatatatcgtagtattgaaaattaatataccctagtaataaaactatataccacaaagaaattataacaatactaaattaatactcaaaaatatatatatcatgctaacaaaattatatataccaccattaaaa

SEQ ID NO: 289119 - DNA, 196 bp, Cannabis indica
attctaacctaaccctaggtggcatcctataaataggtagtgacggcttgaggaaaaatatgatgcatcttattccttcagagaaaaactgagtgccttctctccctaacctagccgccaccttctctcctccttgtgagtagatctaagattctggtaaaatatttccaaaaactggcctcagagccatggtaat

SEQ ID NO: 289120 - DNA, 659 bp, Cannabis indica
aatgcatttggaccctccacgtgtccatatttatgagttaacagaagtgctagtaacagatgtataattgtaacattgggtatttttacctctaaaaataaaggtaaagtatttaagtatataaaatctgaaacattagttatgtatgccgcaatttacccaatttgtatttgttaatatatattgatagttgtattacataaaatataatagtgaataataaaataacacatgcaataataataatcaaatgaaaaattttgtcaaataaaaatgcataataaatagatgaaaagttttgcactaaaaaatatttgaacgatcttgattaccgtcgatctcatttaaatttgatagtctatgacaactttcgataattataaaacgtgtggtaagacattaatatcatccaaacataatagtttattgttgtaaaatttatttactatgtaagtacacacaatggtaatttatttgctatgcaagtacacacagtaaaataaactaaacatttctttatacatataattttttactttccttatgtttgttattttttattttatttattttagtttgttgttggcgtaaataaaaataatttattttattttgttgttagttatgtaaaaaaataataaatattaagtaattcaata

SEQ ID NO: 289121 - DNA, 547 bp, Cannabis indica
aaaggacctcgaagctgctgatcgcgtttttaggagaccatcgagatcttatctgctgaagttaacagcttcaggatgagaggagttctctacggcaagttctctcggctgaaggaggagagggacgccaaggtgaccgaggcagaccaattgagggaggtcaatgctttggagactgccagcctcgagctacttcttcgatttctggaaggctaatccccaggccaatttcgactacttaggcgacgctaaagacatgtaaccttgagtactgcgcgacccaaattgcttatggtgggaaagaggcggctgcttcaacctccggccaagcctctaggcaggctgctgatgcttctcctactcgaacaacagatcctcctgctccagttggctcagaagaaccgaaccaagagccttggactccaactttttgaacatttctttttttatctcctgtttatatatatatatatatattatatgcagcctcaagccctttaagacatcgtgactgatcaagcggtctttaaacttggaattatttttc

SEQ ID NO: 289122 - DNA, 414 bp, Cannabis indica
ctaattaacaaatatatatatatttgtattaaaattaaaatgtacaatagacaaagaaaaaattaaaaaaaaaagctggtactatagtagaagtagtagtggttttactattgcaacatttataagcatttttttagtattgagacattactatggactttatggactttagatttttattttatggactttatagattttatggactttatggactttagatatggatattggatatggatgtattttgaaatattttagttttcacttttatcatgattcatgaacaataacatgaactttgatttgatttgatgaataggttgtttgtttgttggttggattgattaatgcatcttctcttcaatagtatataaacaaattgttatatttatatatgtttaatttaataaa

SEQ ID NO: 289123 - DNA, 789 bp, Cannabis indica
taagtaaaaataacaaaatttaaaagttaactaaaatatcttatttccctttttaaaatgccatgattatagtaatcttattttaaataaggtcaaattactttaaaaagaaatattttataaaaagaatttaatttctgaccttagatttaaaaataagataaaataataaaattttaaagaaaataagaaaagatgtaagcaaaacttgattttaacctattttcaaattcaaattacactaatatctaaaattaattttgaaaaagcaaattaatttatttctgataattagatttgaaatatgaaaaataaaatcaaaatacaaaactacacaaaaatcggaagttaatttcatgaaatagcatgaaaaatcgaagaaaacgaagaaaaattgcacgctgtacggatggtatgcattgcataccacccccgcgcgcaggaggggtgtccagccgtgtttccacggcgctgggaggctgcaagcagcccttccgcgcgcgtgggagaggtgatcaccaccttaatttttctcgattttcaaaaattcataactaattcaaataaaatcgaaatcgagttttgtaaaaaaataaattgcttaaaatttttcaaactatcaaataaaaataatttcagaaacagaaaatcaattattgttcccagaagtcacaaacatcaatcaagcatcaatatgacacaccatgataccatccaaatcacaaacaaatcgttttaaggccaaatttcttgcaagcaaatcaattaccatggctctgataccagttg

SEQ ID NO: 289124 - DNA, 601 bp, Cannabis indica
ccattcctatggtactttgatagctattattataggagaactcaatcagaggcaaatatttgatccatgaccctccaaaatccatgacacaagctcgtaacaaatcttcaattatctgaatagttcgctcagattgcccatatgtttgaggatgaaaggccgtgctgaatttcaaattagttcccatggccttctgcaaactcacccagaacttcgaggtaaatttagggtctctatctgaaacgatagactttggtaccccatggaggcgaacaacctccttcacaaacagatcagcatactaatctactgtataggttaccttaacaggcaagaaatgtgctgactttgtaaaacgatccaccacgacccaaactgagtcgtacattcctgtggttctgggcaaaccaaccacaaaatccattgcaatgtcttcccacttccattcaggaagcgatagcggttgaagtaatcctgctggtcgttgatgttctgttttaatttgttggcaggttaagcatttagtgacatagtctacaacatcccttttcatcccataccaccagaaatagtgctttaaatcttgatacatcttggtggt

SEQ ID NO: 289125 - DNA, 565 bp, Cannabis indica
aagtgaaaatacaaaaacaaacaatcctaaataatttccaagatttccaataaactgatacagtgtcttgtttaggcgagagtcaaagatatcattcattgaatagaatagtcagctcatctaaaatggaaacctttgtagcaactttttattcgatcaagatgagaatccgacgttgtcccgtttaggtgagagtcaaggccattttatcttatgagcttccccattgtttcataatttgtaagtcctactcttagcaaccactattggggtggacgttactaagaataaaacacttacattaatacttatttttcgagattctacgacgttaaattgctaatgaacgctcatccattagggattaatctcactaaaataagaactatgtagaactaacaatggagatcgaatatcctgataataaagctcattattttatagtgtattttcatctaatatttattttaatctatttattttaatatatatatatatttaaataaaattaccaatttagataattctaattataaattttaatttaatatttataaaattatac

SEQ ID NO: 289126 - DNA, 553 bp, Cannabis indica
acatggacgaagtcaggaagattcttcaggatcttactgctgagaggcggctttatcaagaggctgctgagcgccgggaggccgctgccaaagctaatgaggaagaggctaagcggagggaagcccaggcggaggcgatgatccgggaggaggccctgcggagagataggctggaggccaggcaccacgaggagctgaggacggaaggcgaggccactgcaaaggacaggcgggagcttcgggaggccagggaacccttggatgagatggctgccaaggtgaggtccttagaggaaactcaccaggcaaacttagaatccagggccactttggccgcggagctgaaggagatcagggacttcaaggaacaagcctcaaagaaggcaaaaagagctgagcttctttctcccgtttcctgcagctggtgcaccaagcgttttgacgatggcgtcttcatggcttggtctaccaatgaccagaacatcaagcttaccttctaccccaaacctgagctgatgatcgccaaattacgggagaagaagaaaaagcttga

SEQ ID NO: 289127 - DNA, 484 bp, Cannabis indica
aaaattttaacaattttttttaaactaaaagtaaatattaatttttatttaataaaatattagattattttttattattaatctaattatttattaatattttttattgtaagaatttattaattattaaactcattacttattcaattattaattatctattttcaactaataaaacttatttattaaatatttaattatttattattttatgatattttatatattttatgaattttattattttatatatttgagcttattccttttgctcttgtcccacttctcaagaccataatgggatatatgtaaactatatatgttggggtaaacctcattactaaacacatgctaaaaccttttgaattatgtaacaatgtcacagcttttatgttcttatacaactcattcatccatttttttttccttcaaaaaaaaaaaaactttaattaatagtaacttagatcattagcaccttgattat

SEQ ID NO: 289128 - DNA, 658 bp, Cannabis indica
tagtataataattttttattttgcacttttcattctaaccgagtctgcatataactggattgtccattttttttgtgtataaatcgaatatggtagtgtcgacaaagcggcggtgttcctgcaaatagttatttattttcatttaagatgattagacatggtgtgcataattaatttaattaaaaaaatttacttatgaaagacaagtaaagttattttatttctttaaaactacacctctgcagtataatccattaattggacaccagtacacgaaaatattttttcctgtgaaaaaaaaaataattagaaaattaattttcttttttcttaagataaaacgaaattagggtaagtaatttttttgttttgatattatttttataatattttttaagatcatcaaaaaaagttttaaaaatatcagtgtatatttttgtaaaggataattttatgatttttttgactcatgtggacccaacgcgcatggataattcagttttttttttttgttattttcatattagagagagtgaaaaaaagctatatattatttcaaaaaaaaaaaagctatatattatatttattaactatcctttcgaagatagaaaagaaaaaggactgtatatgaatatactgcatagtaaaacacattaag

SEQ ID NO: 289129 - DNA, 627 bp, Cannabis indica
ggggccggagtgtccactctccacggtcgcttagatgcctcctcagctaccattttgcctttgcgcttgcgaatcagagcaacctcttgctcttcttcaccttcttcaacttcctcaggaagagcccattgctcttcttgaccttctttagcttactcaggaagtacctcctcctcatccactaagtcaatattgtctataggggcactagaagaagccttcgtaggggtaaccatctgggaagaagttggaggaaggggagcatcgggagtgtgagctccatcaagggtggccaaaattgcctccatgggattagcagctgcaacaagagaaaagagttaagtgttagaatatctgtgaaagcagtaaacacttaaaaaagcaatcaagctagtcctaccctgactctctaattcggccctagcaaagttctgaatcttaatactggctgcatcatccccaacatagatgtccaagggctggaaccagctagaagaaagataggccgaaggatccatgggaacgggctccggaggtccagaacccatccaggaccgacctaaataatctcttaagttggagaaataataatcctttgcatgatccccccaccgggtcgagggcatc

SEQ ID NO: 289130 - DNA, 518 bp, Cannabis indica
gcactataaaaggaatttatgtatagcatttaaatcatacaaatcaaaattaattgtattaaaaataaatttgccaaataaatacaaattaatacaattattgtatgataataaattaaatgcttaattccataatatataattaattatgcatttatgaccatataatatcttaaatatttgcactaataattaatttgtataaataaggtaaatatacaaattagtacaattaattatatgaaatgaattaaatgcaaaattaaagaatatacttaatggcagattttttcaacttttattaatttaaacaataaattacataaatttggtaataaataattaaatgcacaattattacatgcctaaataaatcatgtaattaattaccaatttaaaacaaatttccattttcaatttatactaaataacatattaattctaaatatatgtattaaattaaaaatggaaattgaatgaatgtaatttattgactaaattaacacaaaataggaaaa

SEQ ID NO: 289131 - DNA, 744 bp, Cannabis indica
ggaaggatataaggaaaaacagaccggtcgactcaatgagtgagtttccttgaccgagccgaaggcctcatcaagctcgaagaagccattcaacgagcagaaggtgagcaaaaagccgggcaaaacgaaggctccttccactggtacatccgcccaattccccattattccagtaattcaagtagcaagcgttcaggaaacaaccacaagcaagaaacgggaagaagaaagctcaccgaaaagtctggacagactccccgtgatcacgccaaacacactgcattcactatcctaactgaagatatagtgagtgtgtatatggcaactcagtcgttaattccgtacaagaagcccgggcccatgaagaaagataccagcaaaagggatatgacaaaatgttgtcggttccacggagactacggccacgacaccaacaaatgctacaacttgaaacgggaaatagaacatctgatcaagaaaaacaacccgcacttatagaagtatgtcaaggccaacaaaggtcagaacaaccaagatctgttgcctcaaccaatagatggacacttgcaagtcattattggaggcccacacatcgctggagatacgggaaaagctcgagagagatatgcccgaacagctcagtacgagcaagaagaagttatcctggccgtggaagagaggaagccaaaagttccacgcgcaggagagccaaccataactttcaacgatgaagatgctatccag

SEQ ID NO: 289132 - DNA, 631 bp, Cannabis indica
aataaagtgcacacacgtggcgtccctgttggacagggcgttacaccctgtctcgaggcatcacaataaaccacaaacttttccttatctgaaggaagagataatactggagcggtaatcaagggctgctttaactccaggaaacgtttcccacaccgatcagtgcaaacaaacttctgattctttcaggttagctccgttaagggtacagcaatctttgaaaaaccctcaacaaaccgacggtaataaccagctaaacctagaaaacttctaacctcagtagctgatttcggtgttggccaatcccgaacagcttcaattttggccagatccaccatgatcccatctttatctactatgtgccccagaaatgagacacgagataaccagaactcacacttcttgaatttagcatagagcttatgatcccgtaaccgttgtaaaaccgctctgagatgcaactcatgctcttcttctgactcggagtacaccaaaatgtcatcaataaacacaatcacacacctatccaggtagtctttgaacacccgattcatcaaatccatgaatgtcgtcggggcattagtgagtccaaaagacatcacaaggaattcatagtgtccataccgagtac

SEQ ID NO: 289133 - DNA, 611 bp, Cannabis indica
tccttcatagattcatccctttctgtcttagggctttgttccttagaaagtgtatactaactagtaataggttgcttaacaaccttagcatccctcatagaaaacttatctatgatcttctcaatgtagtcttcctgtctaagtattagttttcctttatccctgtctcttaggatagaaatcccaaggatcttggtagcatttccaagatccttcatttcaaattctgtcttgagcagagccttaaccatttcaaccctagacctttcttgacttataataagcatgtcatctacataaagcaataagtagatgacatcttttatagagtctcccttgtagtatagacaagtgtcatgatagcttctgttaaatccatgctttatcataaaagcatcaaactttctattccattgtctgggagcttgtttgagtccatacaaggacttaaccaacttgcagaccatattttcttttcccttaatctcaaatcccttaggctgttccatatagatctcctcttctaggtctccatgtagaaaagctgtagtaacatccatttgatcaatttccatgtcaaattgattagctatagatagcattatccttat

SEQ ID NO: 289134 - DNA, 479 bp, Cannabis indica
cttcttcaaccctgaatcacaatcggtggagtgggcgacgccatggtcgaggactgccgagaacttcgcaaatgccaccggagaccaaggataccccagtgaaaattcttcgacccattgggaccgccggaacactgcagaacggtgagtatattcccgatgtggagaaactggagagattgaagcttgctgagattaaggttgggggttgatggtgatggcagtgagaagaaggagaagaagacgaagaagatgaagaagaaaagaaagaaaaagaaaaaaaaagaaaaaggaaaaagaaaaaagaaaaaaagaaaaagaaaaagaaattaattttaaataagaaaataaaaataatattaaactttttatttatttattttttaattatttttttttatttttaattatttttaattaaaattaaaatttggaccaataatacttcaacacgtggcattcttgccagtacttaacga

SEQ ID NO: 289135 - DNA, 995 bp, Cannabis indica
tattcataaaattttattaatgttgaaaagaatatctcaatgctttggtatacttataaatatataccatagctttgttatatttcataacactttacaaatcattcaaatttgtaatactttatttgtcgcctaaattgtagatggcgacaatcgataagtcttggaccaaaatcagaaatcgtggttgccatgaattttggaatggtctacaagcctttttagcaatggcatcagaacataaggattgtgatggaagaattcgatgtccttgtgtgagatgtataaatagtaggtttgaaaaaatagatagggttagagcacacgtatttgatcgaggttttatgcaaggatatgagaagtggatttatcacggggagcctgaggatgttgtcgatgatgtagcagttgccgatgttgaatcagaggatgaaatgattcctattctagaagacttctttccctcgacaacagaggatgtacaaggagaagatgaacaaccaaccacaaacccacattttgatgacttatttgaggaaattgaagctgaattgtatcccggttgtgattggatttcgtctctcaactttttagcaaagctattgcatttaaaagttagaggaaaaattcctaataacatctttgaagaattgttgaagcttttaaagtttgcatttccgaaggaaaataatattccagcaacttactacgaggcaaaaaagagattgaagaaattaggcttgggttatgactctatccatgtctgtttgtataattgttgcctattttataaggagaatgcatccaaggaggcttgtccagtttgcggaactagtcgttgggttacttccgagaacggcaaagcaaaaaaagttccttgcaaagtcatgcgatactttccgttgacacctcgacttaaaagattatatagttcgaggattacagcgaagagcatgatatggcatcatactggaaaatcaaaagatgatggggtg

SEQ ID NO: 289136 - DNA, 697 bp, Cannabis indica
agccattcagtatgcataatacataataatatattttgatcaattttgagagtagagcactgcataatactaatttgaagtataaagcatcgaatgatcatagtcaagaacataacgtacgaaaatgtgtattttgttaacaaacataattctaaaatcaactttttttttgaagcacctaattaggtccatttacttttttgtcatttttaagattggatggcccagctagtcactggagcagtggagattgtgggccttccttgaaaggtttgctctcattaagaatgggcagttaataaaaaagagcagatagtgggcccatagaaagaaacagatagcgggacagtctcgtctcgtgtagattagatagagttaaaagagatgtattgtacactacacatcgcttatagctacctattgggttgggacctcttcctactttaccactgtctattgttccctgttgctattgttaacgtatggtcggataccctaaaaatactaaaatttaggttaatatttacaaaaatattatcacacggaaatctttttaaaaatactgtagttttaaaaaacaccagtaaaacacaaagtagaataactcaaaacaacagtagaacaactaaaaagcaacttaacacagtatactgtattatgaaacttacaaaaaaatacagtaaaaaagtaaaaaata

SEQ ID NO: 289137 - DNA, 612 bp, Cannabis indica
tcaatccaccattagagagctaagtttgagttcacaaactcaaaccttaaattaaccttcaatttcaattcaaatgagctcaaacaacctaaaaccatttccagaataccaagttataccatttcaatccacacagccacctagaacctaaattcacatgtaaaaacctaacctagactaaagaaaacttaagagaggagagcaagaggaaataccttgaattggaacttcaaactcaactagaattcaaagatttcagcaagaaataacctccttccttgctggttgatggatcgaaagagagagggaaaagagagatgaaaatggaaacttcactactaagcttcttctaactcatctccttgttttctttcttttattaattaatttttttttaaaatcaaagtcaatataataaaaggcagccattaatcactaaaagccaaaacaagggttttagaaagaaaagacctaattacccttctaactaataaagctagtcaccaactcccaagggcaaattggtcaattaccacaccccgaaaataccaactccgctaaaacttagcaatgatatcccgaaaaaatattctaaaccatataatacaattc

SEQ ID NO: 289138 - DNA, 800 bp, Cannabis indica
actatggaacatctgtttcttacttgtgatgtagctatgcacctgtggcgttcatcaccgtggggaatctttcctgtgtgtagttccggtattcgagtttgggattgggtgaaattcatttggagcctcaataagaggggtatccgagttgaagatgtctttctttatgcttctattgttgtggacaatatatggagaatgcgtaatgaggtgatacacaataatggagctcctgatattgtaaaatgtattgatcaaattgggttttcttacgcagagtcacatacttctctcttgcctagtcctccgccgcctgtgcaggattgctggacacctccacctctggactggataaaattgaattgtgatgttcgtgtgggcttggagagtatgtgcatagctgttgtagctaggaaccacctggggagggtgacctctattcacacgtcccggttggatttctcggaggctctttgtggagaagcggcggcctgttgcttggcggtgtctgttgctttggagctaaagtataagtatgttattgtggagagtgactcgagactagcaatcaatgctctcaatgggaaggtatcccattgggccctagagaattatgtctccttttgtactaggtcttctccttattttatttgttgtaatttttcaaatgttagtaggaactgcaactatgcaactcataatgttgctaagtgggctttcacccaccacgtgtatggatcgattccgatcaactccgttccggagaacttattgtgtaacgaccatgaggtctaattttc

SEQ ID NO: 289139 - DNA, 561 bp, Cannabis indica
aaaagactcatcgaggccgaaggtcgatatccattgatagaaaagctcacctactgcctcatcctagcaacaagaaagctaagaccttacttcaagctcatcctattcgggtgtacaccgaccaaccagtacgaaaaatactgcaaaagccagatgcctctagacggtcactcaagtgggcggtggagctggggcagtacgaaatcaacttccaaccctgaacaactatcaaaggtcaagccttggctgactttgtggtggaatgcacaggaaaaactgaaagtatcccagaaagcgatctcgagtcaacaccacagccgagcaacacttaaaacaaactgacctggaagctacatgtggatgggtcgaccacagatcagctatccggcgtaggaattgcccttgtcacacttggggggcaacacctgcatgcagttgtcaaattcgaattcaatgcctccaacaacgaggccgaatatgaagccctaatcgctggactcaaactagcgaaggagatgaaggccgagcgcatcgagatctgcagtgattcacagctagtgg

SEQ ID NO: 289140 - DNA, 337 bp, Cannabis indica
aatttgattttattcaagatacttaattatatatttcttttatttaatatatttaattaaatagaaaaaaaagtatttaaattgattttaatctagacacttaaatattagttattttcaagaaatttaattagatagaaaattatatttaagtaggaaattttaatttcagaacagcttaaattagaataatttcaaaatatattttattttattaatcattttccactatttcgaattgcattttatttaaatgctgatattttgaaattttgaaaaatagattaaagttaaaaataaatttattaattaattttagaccaacttaaatcaagta

SEQ ID NO: 289141 - DNA, 1223 bp, Cannabis indica
acagaaaggaatcaagggctaaaaatctgaatggaaggagtcatattattccgctgcacccactgtaaggttttcttaactttatatgtatttatttttcattgttttagaattcatattaggttgttaatcaaacatacttgttagtaaatctagatcctggtaaaataatttccaacagcaccatccacgtataacttccaggtttctgcgtctcgctgatcaggtgggatttcttctagagttattccttctatcaagaagtcagctaaagcttggcccttgatggaagtttgaggatggtacgttatgtcgaactgccccagttcaattgaccattttatcaatcttctagaagcatctggttttgataaaacttgtctcaaaggttgatcggttaacacttttatggggtgagcctggaagtatggctgtagtttgcaagatggatggactaggcataacacaagtttttctagagggggatacctggattctgcccctagtaaccttttacgtacatagtaaataggttgctggtgcttatcctcttctcgcactatagctgcactaatcgcatcttccgagatggctaaataaagagataacgtctctccagttattggtttcgccaaaactagaggcgttgcgagatgcctttttatgctctgaaaggcctcttcgcactcttttgtccactcgaactttttgttgactcacaatatgttgaagaacagtacacacttatcagttgacttcgaaatgaatctgttaagtgctgccattcttcctgtcagggcctgtacttccttaggctttgtcggcgatgtcatgtctagtaatgccttgatctttttaaggatttgcctcaatgccccttgcgttaactatgaatcccaaaaactttccgaggagactctgaaggaacatttctttgggtttagtttcatgttatacttttttaatattttaaagcattccgcgaggtctgaggtatgatccttactctttatcgacttcaccaacatattgtcgatgtaaacctccatgtttcgccctatctgatttgcgaatatttcgtttactagtcgctaatacattgccccagcgttcttcagtccggacggtatgactttataacaatagagtcccatgttggttacgaagcttgtatgttcttgatctgggacatacatttttatctggttatctctagaatatgc

SEQ ID NO: 289142 - DNA, 653 bp, Cannabis indica
tagagtggttgatcggaagctgctcaggacttttcacagttgggtactcggccagattgggaacaagtacccgagagagtgcttctccggtagacacgattcggcttggttcctcgaactacatactccgaagacatggcttggagacgatgtaagtttttaagacttttttacttcttttgcttttaaagactttatctaactctttttatttaatctctgacatatttaattttcatgttttagcatttggatgcggcatttcatttgatgaggaggcgacaacacttttatccggaggtgtacccaaatagatgtgtcatcatgccgtgtattttcccagcaggagttattgctcggtgggaagctgcgggtgatgaccacactaactatcagtgggatgagggcatatcagatttgattcaaggggatgaaggtcaatacttggccagttggaagaataaggagagtaatatatatggtccttctacttcgatagtgcaaagcattgggtgacactagatgtagatttggatcattggtgttgaacatatttgactcgagccttagatcgatttccccgaatgaattaaagagtcacttggcaatgtgggaaaaaattctaccaactttgatgctgcaggctggcctat

SEQ ID NO: 289143 - DNA, 670 bp, Cannabis indica
cgaccaggcgagccactccgggcatacatcagcagattcatgacagaagcgacaaaggtgtcacgggtaaccgaggatggaaagttatccacgatactagggggcattgaagtccttggaaaactgtggaaggatataaggaaaaacggaccagtcgactcaatgagtgatttccttgaccgggccgaaggtttcatcaagctcgaggaacccatccagcgagcagaaggtgagcaaaagccgagaaaaacgaaggttccttccactggaacgtctgccaacttccccattattccagcagttcaagtggcaagcattcaggcaacaaccacaagcaaggaaacgggaagaagggaaagttcaccgaaaagcccggacaggctccgcgtgatcacgccaaacacactacattcaccatcttgaccgaagatatagagagtgtgtacatagcaactcagtcgttaattccgtacaagaagcttaggcccatgaagaaagataccaacaaaagggacatgacaaaattttgtcggttccatggagactacggccacgacaccaaaaaatgttacaacttgaagcgggaaatagcacttctgatcaagaaaaacaagctgcacttacagaaatatgtcaaggccaaccaaggtcagaataaccaggatctgat

SEQ ID NO: 289144 - DNA, 577 bp, Cannabis indica
accccagtctcgatcctgaacccgaactaagaaatgggacctggcacctgaataagaaccacaccgagacccgttagagtgatccagatcttcactcaggattcaggtaaaggggcctggaacagaccacaagtcggttcctagatttcggactcagactaggacaagaaccaagaggaagaaccaaacccgaacccagacctagacatcggacccaaaattagaacctaacaaaaattggcgaaccaggaccctagaacaagactacgactgtgaccaggacctggacacagacctagaacggaactcaggcccggacacggtcgtgtacccacacctgaactgagacccggacctggacctaaatttgggaaccgttcgcaaacacagaattggacctagatagggattcggatacgaacctggacttggaccaagacaaagactgggatcgaaatgcttgacctagatttgcaccgagatcccgacccagacccaaacttggacccgcactcgggacccaaacttggacctacacccgaacctagacacagatcggggtccagaccaggacaca

SEQ ID NO: 289145 - DNA, 513 bp, Cannabis indica
taaggatctagtttgggggaatttgttaggctaaaattagtctaagtttcgggtcatattttcggttagttttcactatttgtttctagttttagggctattttacgcttgattcttttgtttcaggttctcgggtgtttaaagaaactatgtacaagaattgaggacaagtggtgaaggaattgaaaagaaaaaccaaattacgtgtcgctgcctaatccagtcgcgacgggcaatatcccagtcgcgacggggattggcagagagaatttcgagacaaagatgcttaacccagtcgcgacgggagctttgccagtcgcgacggggacccagagacgggatttttgggcagttttgtaatttcacgaattttaaagatgagacttagtttaaatagagagagctcgtaaaaattagggattattcagatttggagccctagaaacaaaggaggaggctagaagagcggcttgtggcgaccctgatcaattgcttcaactagttctttctctt

SEQ ID NO: 289146 - DNA, 648 bp, Cannabis indica
cttctttatcatgtcttcatgtgggctttcagccgtagagcttatttttgaaccgcattgtgtctgtcttccatcttgcttattctaagcttcatgaacttttttgccctaactcaagaaaactttctgacttcttgagttttgacttttctttaaacatagtcgttctttaatctgttgagtactcctggtcggcatatttgcttgtttttcgtttgatactccgtccaacactcatcttgtgtgttgtcttttgtagatgaacccaggtgagtcttgggaactcgggcatcagatcgaccaggatttgcttcaacttctgcacgaggttcatcctcgtcttcgtgctagtcctccttctagtgaaggaaactcttctgaccttgtacccagccataggatgatggctcgtacaaagaaaaccacgcgtctggctgacgcttctgatcctcaagtggctcggcttgccactctgcccgacgacaaacaggattcggccgtcccgatggaagaggaccgtgagggggacgctgaggtccaagaggttgaggagctggacgaggtgcgtccgggaagtccttccgaggcggagggagaggaagaggttgaaccccctaactttggggagtacaacgaggctgggcagcc

SEQ ID NO: 289147 - DNA, 372 bp, Cannabis indica
tgtctcagattcacgacgtcaccaccatgacctgggaaaggttccaggaactcttcaacgccaagtattataatgaggcggtcagaagcgccaaaaggaaagagtttgcccacctgacccaacgagataatatgagcgtgaccgagtatactactcagtttgaccggttggcgaggttagcctcgggaatagtgcaaaccgacttcagcaagaaagagaaacacctggacgggttaaatgtgaagattaagcatgatttgatgatcaccaccgacgacaagaccacctgggtgcatgtcggagtcggccagtactccggcgagtggtggggctcctaccccacctgcatcaggctttagcaaggggagtagt

SEQ ID NO: 289148 - DNA, 568 bp, Cannabis indica
agaaatcatccataaaaatttcaatacaagattcaatcaaatctgaaaagatagccatcatacacctttgaaaagtagcaggggcgttgcacaagccgaagggcattcttctgaaagcaaaggtaccgtagggacatgtgaaagtagtcttctcctgatcttcaggtgctatagctatctggtggtatccagaatatccatcaagaaaacagtaatattcttgccccgccaatctgtctagcatttgatcaatgaagggcaaagggaagtgatcttttcttgttgctttgttgagtttcctgtaatcgatgcagatcctccaaccagtgactgttcttgtaggaatcaactcattcttttcattcttgatcaccgtcattccacctttcttcgggaccacttgcaccgggctaacccacttactatctgaaataggataagcaactccagcatccaaccacttaactacttcttttctgacaacttctttcatgggtggattgagtcttcgttgagcatcaatagttggtttggcattgtcttccatgagaattcgatgcatcactgt

SEQ ID NO: 289149 - DNA, 517 bp, Cannabis indica
gtgtactgccttttaattcagctctattcttttttgttttttttgactgtttgtgtcaaaagtgactagttctttattttttttttattttaatggatttaaaaattattatttattatttttaatatttaataattattatattatattttcattaaatggttgatgggatgtggcctttcacaaaagtgacatgtttttttttttttaataatttttttattttaaattagatttaaaaaatctcacaccctatgtttcactatttatcaaacacatttccttctaaaatatttacagaacaagaacaacatgaagtacctgttctttttagaagatgggtggactcatctgatgaacatgaagataaggtgtcatgtaatagtaattgctcctcttctgttcttcttcttcttcttcatgggtctctttcttttattttatttttttaaaaaatccatacacttatcatcttttttctcactatcttcctccttaagttctcttactctctcca

SEQ ID NO: 289150 - DNA, 914 bp, Cannabis indica
aagtattgtttctctttcttccaatattctttcggaagaatatcagggttcattattgtgtatgatgctcccgtgtcaaagaatccggccacttttatcggcttggcatattttgttggaagaactcgcacagtgaggacaggggatggctgcattgtgtgaatagtggacatttgatagcattctggagtgtctgaatcactccattgttcgaatgcacaaagggagtctgagttgaattcatcatcggtggagaagattgactctatgtcgttctctttaagagacatcccggtcgtttgttgaatatgtgatatgagcttgactgtttttccttttgggcactgttttgcataatgccccttttttccacacacaaaacatcgatcagattttttgcgaaagtcacgcttctttcgtaaaaattttattttacgtcccttgtgtttcgagaacttgaacgtcttgaacttggtttttttctttggggttttgcaggaacacgaagattcagaagggcatttgatgagtaaatctcgtctgctacaaactttgcctagttttttggattgcttcataaattcctggagaaatttcttctgggagcacattttttcaagggcctttaagactagttggaaaatttctccaattgtagcatccgttaggcttttccctgatccagagagtagcctgaaagtttcttcgccaagaggctctggaatagaggaaaggaaggcttgctttagatttggatcatcaattccacctatttggtagaatcgtttagtcattcttttgtaatgcttttccaagtctcttttgtccattgaacaacacttgagcttgaaaaactctgctctaagtctttcagttacttgtgcatcttggccacaaaattcgacatagagatg

SEQ ID NO: 289151 - DNA, 395 bp, Cannabis indica
agatcctggtaaaataattcccaacactccccgacgtccagggccttcttgtcatatgtggcgaaggtcttagcccgttggagaaaaagctgagtaggtccagtccgcgcataaggagggatcctaacccactccgtgagaagctccggatgctccacagcctggaacccggaggagaagaagaagcggtgacggtattccttcacatgcttctggtagttaaaagggaccaggccctcattcaaaggatgggcccagagaccgtaaaaaccgttcttaaacttatccccctttttggggatggaaacgagttcgtaaaaatacaaaatctctgccggactgggagagccccagctccgggcagagtaaaaaataacaagcctgaaagcaggcag

SEQ ID NO: 289152 - DNA, 499 bp, Cannabis indica
atggattttgccctaagatttataggcttgggttgggctcatatgtatgggcttaattaaataaatataaaaattgaaattttaaaacatgcggtgcggtgcagtttgaattgcggttttataattcaaaacagcaaaccgcaccgcaccgcgtggcttgggaaaaattcaaaccgcaaccgcaccgcgaagaatttaaaaccccattttttttttgcggtgtggtgcagtgagggcggtttgagtggtttcagcagtttgatgtacaccactacctggtcctagttctgtttcctaggtccctatcctgattctgggtccaggtcccagttattgtgtgggtttgaatcaaggtctcgattcgggtttaggtctccgtctgggttttaatctgggtaagggtttgggtttaggacctggtcctggtcctagtcctagtttggttccagttccatttgaaattttgagttcgagtttgggtttgagttcgggtcggagt

SEQ ID NO: 289153 - DNA, 646 bp, Cannabis indica
ccaccggatgcagtggatgttctcctcttctggtccatggccgaaccactacctcccctgctaaaacctgatgcaagaggggtaggagccccgccactcactggagtactagccgactccgacatacatccaactgcgccctcagctcgcagtgccttctccaccatctcagcataggtggtcttgtcgtcagtggtgatcatcaggtcgtgtttgatcttcacatttaacccgtccagatacttctcctctctgctgaaatcggttggcactattcccgaggctaacctcgccaaccggtcaaactgggtagtatactcagttacgctcatattttcccgctgggtcaggtgggtgaactctttcctcttggcacttctgactgcctcgttataatattttgcattgaagagttcctggaacctttcccaggtcatggttgtgacgtcgtgaatctgagacaccttgtcccaccacactagagcgtcttcttagaactggaaggtggcacacaccactctgtcattctcggtgacacccataaagttcagtatcctggtgatcatcgttagccactgttcggccttcataacatcaggacctcccagaaaaactggaggtgcttgcttccggaacctttcataca

SEQ ID NO: 289154 - DNA, 874 bp, Cannabis indica
tcgggcaattacctaaaggtaaaggcggagtgcagtacgcggtggtagcagtcgactactttacaaagtggactgaagccgaaccactcgcaactatcacatcaaagaaggttcaagactttatagtgaagaacatcatatgccggttcggactaccgtacaaaatagtctcggacaacggcaagcagttcgacagtcaatctttcactgatttctgcgcgaaccatggcatcatcaaaagcttctccgcagtggcacatccacaagcaaatggtcaagttgaagcagtcaacaagaccctgaaggacacactaaagaagaagctcaaagatgccaaaggaaattggccggaagaactccccgaagttctatggtcataccgtacaacggaaaaaacagcaaccggtcagacaccattctcaatggcgtacggttatgaagctatgctgcccgtcgaactcgaaccaccatcccacagaaggttgacgtacgatcaaggtaccaatcacatactccttgcagaatcacttgatgaaatcgaagaaaaacgagcaactgcaaacttaaagttggtagctcatcaacaaaaagtagctcggtatttcaacaaacaagtgaaagctcggaaattctttgtgggagatatggtcctaagaagggtattcctaaacaccaaagacagcacgtcaggcgtactaggacccaactgggaaggaccttatcaggtggtcgaagttctcgactccggagcatacaaacttggtaagtatgacgaaaaaatgcaactcattttagtaccacgatactggaatggagaacatttaaggaaatactaccaatgagtactcaggtcgggtagaccacttcaaagtac

SEQ ID NO: 289155 - DNA, 537 bp, Cannabis indica
cttagttttatgctaggtattttctactttatttacaaataatacaataaataattgaagaaaaaatattattaattattgtttgaaattatttttaatgtatacaataaataaataatacattttacattaattaatgtaaataatggtgttgcaaattaaaaatatactgaatgcaatatattaattttaagaaatcttgattatctaacggcaaattgttctcaaattaatccaaaaataaactaaaaattaatgttcaaaatattaattgaaaaatatcgtacttttaagaaagttaaaacattttcacacaacatgaattaaataattgtaattaaaaaaacaacaaaaatattatatatataaatacgatataataaaacaaccttttaatcttcagcttaaaattaaaatctaatcacaacaagctaatagacttttcgttgttgattgagaccaccaacacatctcactcttgggtaactaccataacttccaattgatattggtgccacaaagttaagaaatcaataa

SEQ ID NO: 289156 - DNA, 422 bp, Cannabis indica
agagcctaatctagaaatttgggaggactagtatgatagtgaagaggatttagaaagtacatggcaaacatgtactcagaaaaaatcggcaaaaattccatctcggaagccatctggaaactctggagtcaaatttcggagtagacaagatataaaggatcaaaagagtaagaaaaggatcggcaagcaaaaggccgtttccaaaagaaacgaacccgaacaaccaaaacgaaatctagtaactctggaggagtttttaccaaaagagttacgggacaaggcagctagttgtaatgacagtgtgtcggattgctgcatgactttaacaaaagaagatcctgaatctacctcacctgaaagtgaaaaagaggtagatgaaattaccttgcaagatatgcggcggaaaatttttgcaaagaagg

SEQ ID NO: 289157 - DNA, 650 bp, Cannabis indica
ttcaggctagattggaagaatctggaagacctgaaggaagatttaacagagactagaagtgacaaatacattgatgggtgaaaacggtaaattttatcccactaggaaagggaaagggaaaggaaaaagcaaagtcatccgctcaagcctacgctcttggggttgatgatctacagggcggtgctgaccagggagttgttgatggtatggctcttatctcacactattgggctcatgtgttatttgatactggtgcatcacattcctttatatctttaatgtttgctagtatgttgggtttgagttgggaaacttttagtcctacattgcatttgagtgtacctatggggggacacagtgaggtatccaccatatgtaggtcagtttgtattgtgttcgagggacacaagttatctggaaacttattagtgttgcctatggggcaatttgatgtaatttcggtatggattggttgtctaaatccaagctattgtggattgttcacgtaaaagagtgactcttttaacccctagtggtgatttcattgtttatcgagccaacatgagtgcagtgagacaaaaatcctatcttaagggcatttttaggtggaaagagaaacttagagtgtatgggaatctgtttgcgatcga

SEQ ID NO: 289158 - DNA, 766 bp, Cannabis indica
taatattaatatcaccataggctttaagtttttggagattttaatttgacgcatcaaataacgaggctgagtatgaagccttaattgatggcttaaagatagctgaggtgttaaaagtcacaaacctcatctgccatagtgactcatagctgattgtgaaccaggtccttggggaatactaggctaaaggtttaaaaattgcaaagtatttattcaaaagagcttggaaatattcaattattttaaaatcaagaaaattacatgagaacaaaactctaaagccgatgccttggcaaaactggcctcgcacaatgacttggatgaattgaacttagttctggcggaggtactaagcgagctaagcatacgtgaaacggaagacgtcgagatggtagacaactctcctacatagatgactcctattatcaattacttactcgacggacaactttcaaatgacaaaaacgaggcgcaaaaattcttgtattcactgccttgctacacaataatcaaaagcaaactatataaaagagggtattcgatgctcctaggtgtgttttccctacagaagtaagtgaaatcatcaaagaaattcatgaaggcgtttgtggggatcatgaaggttggcaaagcctatctaaaaagatcattagacaaggatattacaaaccaacgatcaataaggacacccatgagtttgtcaagaaatgtgaaaagtgtcagagattttcacagatacctcgcgtgccgccatcaaaactaagaa

SEQ ID NO: 289159 - DNA, 506 bp, Cannabis indica
atcaaatatttacaagttatctgatccacgtgtcccttttcgactggtccacgtattttgggcgaattcaggggcaacacatatatatatatatataaatatatattgttcaaagaaaaaaaaaaacttatatattcatcttccattatctccatgatgtactcttcccttagttatttgcctacattagatattttagaaatagtaaccatctctgtttttattattcaactttttaaatttaaactgttagagatattattataatggaagataaaccaagatatatacaactcaattgtaaaaataatacaaggtcaataaaagagaattgattaaatatatattataatacacatatatacactatttatattactatgtatatatatatatgaatggtagaaggagaagatatatatcacatgtaatataaatatatatataacaagaagaataaatatatatgcatatacacttactcacaaccttgagtgtagaatagt

SEQ ID NO: 289160 - DNA, 200 bp, Cannabis indica
ttttttcctcttcccgtactagggccgcgctaaccgcattctcggagacagccaagtataggaacaaggcatgctcaggagagcttgaatttttctggatttgcctcaattccccgctgactgacaatgaagcccagaaacttctccgacttaaccctgaaagtgtacttcttcgggttgagtttcattccgtatctccg

SEQ ID NO: 289161 - DNA, 547 bp, Cannabis indica
cgaatagtttatagtgccgaaaaatacatttagtaacaacgttttagttataacatatttttttatgactaaatgtaacttttaatcataaaaaaaatatttatgactaaaatatagctcttagatataaattgtcgccaatttagttttagtcacaacaagtattgtgactgaaaatacatttagtcacaataaattataatttttatcactaatacttttagccacaaactttttagttacatacaaaaataataatttatatattaattataattttttaaattttaataataaatttgattacaaagtaagattttttttttttatatagtataaaagtattagggacctagttataagaaggctcggacatatattgtccctttcattctcctatgtcgtaccaatacaaatagaagtatagttgctttctcatcattgtgacgtttaaggccaatgggaacttctattttgttgatgcagatcactgtcataacaaggccttgttagcagattgactccaaaagcaaatccggagactgga

SEQ ID NO: 289162 - DNA, 558 bp, Cannabis indica
tgggcatatcgtactgctaaaacgcccattggaatgtctccctatagacttgtttatgggaaggcatgccacttacccgttgagttagaacatagagcctattgggctattaagcaactaaacttttccttagacaaagcgggtgagaaaagaaagcttcaattgaatgagttagaagagcttaggcatgatgcatatgactattcgaaaaagtataaggaccgaatgaaattttaccatgacaaaaatattttgagaaaagatttttctcccggtcaaaaagtccttttatacaattctcgtttgcatctctttccgggaaagttacgctctaggtgggtaggtccatacattattcgcactgtttttccacatggagccattgaaattgaaaatcctaataatggtaatgtattcaaagttaatggacaaaaattgaaaccatttttagaattgaaaaatgtggaagtggatgaaatcctccttgaggatccaatttaccatgatccttaattgctctcatcaattcttggtaatatgtgtttttctttatgtttt

SEQ ID NO: 289163 - DNA, 599 bp, Cannabis indica
aataaggaaaaaaaaggtacatgtaaatatcacaaagaaaataaataaaagtatttaattatatataaaaatatattaaatagtttattggtgtatttatattgataaataatataattataattatcaaaaaaaaattattactttttcagaaaaaaaaaatttaagttgtattaatttttatattgcataattttctaaaaaaaaaactttacaatttttgtataaatattaattgttattttttttattgtaaatatatgtgtatgttttttttattattcttaatgtggttaattcttttattaatgaaaaattagtagaataattatattaaaaatagtaataatacaattgtaataacattgtactatcataactaattattaactaaaaattgtcagagagagtaaaagagaaggataatatattgccacagccatacctccaaaattgcaacaattatggcaaaacaattaatataggaggattgttatcaggcaccagtagtgtttagcactttctcgacatgtcgtgttgcgattgactagcgatactctttaaaagttattatactaaattatatgagactcgatact

SEQ ID NO: 289164 - DNA, 645 bp, Cannabis indica
cccattagtgttttgtcttttagtggcctttttatttgaaaaataaatattatttgagtgtttaattggctgaattggatttatgttatgtgtatatgctttattccaaatttttacaaaaaatgctaagtgtagaaaatagaaaattttgaaaaagaaactctccatttctctctctatttcggctgaagctttgggcagcaaggagctgatttcttcattgatttttacttgttgattcatctcatcttaaggtcctttgcaagctaggttagctcatcttctcccttctttaatttcttgagttttgatgaaaaagttgagtaaatgcatgttaatttgaagttcttgctgctgtgatttgttgttgttttctaaagtttaatcttgctatttttaagtaatttagagctagtgtatgcatgatgattacttggaatcaagttttgggagtttttagttcaagagcatgaattttgaaaatatatgttgaatctgtaaattacttgctgtggttgattattttcattttcagaggcttagttatgcatatttatgtaggtttgatctagcttgattgcatgttagtggattctaaccaagtttgagttttggaactcaaagcttggtctttaatggtgtttt

SEQ ID NO: 289165 - DNA, 847 bp, Cannabis indica
tgctctcaggcttatttattttttactccgcccggggatggggctctcccagtccggcggagattttgtatttttacgaacttgtttctgtccccaaaaagggggacaaatttaaagatggtttttatggattccgggcccaccctgccaatgatggggtggtcccttataataggcaaactcacgttaaggagtatcgccaccgtttcttcttctcctccgggttccgtgcagtggagcacccggagcttctcacggagtgggtaaggattcctccctatgagcggaccgcgcctactcaggtctttctccggagggcccaggtctttgcaacttatgaccgggcggaacttgacgtcggaggcctggtcacgacggagaattgccggaaggccaagctcatcctgccgcaccaatcagtggaggactctaacctctccagggttatctgtcccaatgtgagggcgcctgccgcggagaagatcttccgggacgagatcatcgccactgccgagaagaagtaccaggaatatctctaccggaaggctcaggagaaagcttactccaaggctcaagcagcttccgggaggccacttcgcgtggggagcccggtcgagaggagaagccaggcgatcgctgggaagccccttcgtattggggactcggctgagagaagggctcctaggccaaagccttcggctcaggagccgaacactggggctcctggcgccagcacttccggctccggtaagtctcctttagcagtacattacgtcccttctattggcgaatatgccagtcttaggcctgtagggttcgatgagcgtctttataggtttaggatgcc

SEQ ID NO: 289166 - DNA, 588 bp, Cannabis indica
tattacaatattacaatttaaaattttaatttataaaaatattttttaaaagttttaaaattacaaaaaacacactttttttaagcaaaattaaaaaataagaaaaaaaaattaaaaacaacgagaaattaatttcatgacaactgtaaataaactataaaaatagctaaaaaaataacaaaaaaaaaataactatatgacaactataatatatctataaataaactataaaacaactaaaaaagtagtctattattttgatttatattaagaagtatttttgtaaataaaaaaaaaataaagaagtaaaaaatgaatataaattgtgttgaaatacttttgtaatttgttttaaaaaaaatttgttctattttgtaaaaaaaaaaataatctttctcacttgtatttttttttctcttctgttaaacaaagaaaaaagtgtatttagttaattaggtctacccacgaacttaccttgggatgttgtgcttcggcaagttgacgaaaataatcaggatacctgctgcaaaatcatatcatatatgcataaaaaatcacattagtacaattatatatttatatatatat

SEQ ID NO: 289167 - DNA, 877 bp, Cannabis indica
actcaacaagaaaaataataacctgattaggcaagcccgtgtcataacctgacaccatacatcatctgacctcatcacctaatcaggtgagctcgtgcaacaaactggtaccaacatatcgcatcgcctaatcagaagagcatgtgccctaatctagcaccaatgttgtaacaccctaatacttaggcgttgcagtgattttctaattaacgtagcacatttgctaatcaaaggatttttcttaaaaatcgtgctaaattataacttttgatttaaattattaaactttataaacttttatatatttatctacataaattgggatcttgtatttaatcttttacaaacattatcaaaatacatttataaacttgtcgcacatggactataaaatacaatccaagatgtcccgcgactgaacactctaggtcgcgtcgcctcgacatgtacaatcaccatccaagctcagagctcactcatgttcaacattcgcctttcctttgcctacacatgaaagtagcaactgtgagtcaacaaactcagtagaaaagcatataacaaatgatatattatcaacatgtatctaggtgctcatacacctatccacaaagcttatctgataagtaagaatattctttactagagtactaccactgtaccacatgcactatgtactgctactgtacaagtgttggtaggatttatcctgtaccctgagtaccactaagtgttacaccgcataaactccgtacccgcccgtactagtgttggtaacactgtactgtactctttaaacattgtacgctaaaccaatgcactcagtaccgctacagtactagtgttggtagtatacgaatcacattaagcatgcatatat

SEQ ID NO: 289168 - DNA, 574 bp, Cannabis indica
gaaattttgtgcccaagaacaattccttctgttaccataaagtggcacttctcccagtttagcaccaagttagacttctcgcacctagttagcactttttccaaattttccaaacaatgatcgaaggaggaaccaaaaaccgagaaatcatccataaagatttcaatacaagattcaatcaaatctgaaaagatagccatcatacacctttgaaaagtagcaggggcgttacacaaaccgaatggcattcttctgaaagcaaaggtaccgtagggacatgtgaaagtcgtcttctcctgatcttcaggtgctatagctatctggtggtatccagagtagccatcaagaaagcagtaatattcttgccccgccaatctgtctagcatttgatcaatgaagggcaaaggaaagtgatcttttcgtgttgctttgttgagtttcctgtaatcgatgcaaatcctccaaccagtgactgttcttgtaggaatcaactcattcttttcattcttaatcacagtcattccacctttctttggaaccacttgcaccgggctaacccacttactatctgaaa

SEQ ID NO: 289169 - DNA, 626 bp, Cannabis indica
tggttgtttaacgaggtatctcagatttttgtatataattgtgtatttcacgacactttgcgatatgtagcgacattttcacgatatgtttggaaatttaatttattctggacaaagtcgtaaaattgcgactttccacgactacactagcgacatgttgcgatataggaagaacttttattaattctggaaaaattaaaaaattgcgactttccacgactacactggcgacatgttgcgatataggaagaacttttattaattctggaaaaattaaaaaattgcgactttccacgactacactagcgacatgttgcgatataggaagaacttttattaattctggaaaaaatttaaaaatcacgacgtttcacgattacttttgcgacattttgcgacattaatggaactttaattcatttagtgaaaagtcgatatcttgcgacgtttaacgattacattagcgacatgtagcgacagttaccaattacataagttacaacaattaaaattctttgccatgtcgatgagccttgcaatatttgcatagagatccaggcttcacctgtttaccattaaaataacctaacttgcagcgacggcagccttcggggaaccctggtggt

SEQ ID NO: 289170 - DNA, 503 bp, Cannabis indica
gtgccgcacgggtgttccgctgcctgaaaaggtgagcccgtgacaccgagccacctcctcccgcacaaaacccacgtcgatccacctcctccaccgcaccgctcgaccgccgcaaccaccgcaccgctcgacgccatgaccaccacgaaaaccgaccaaaacgaaaacccacgcgcaggtccgattcaggcgtgaatggttggggaagacgaagacccggtgggtccgatggggctgggctgggtccgatgggggctgtgctgggtccgatggggctgggtccgatgggggctgtgctgggtccaatggggctgggctgggtccaggggggggggggctgggtccgatgggggggataggttcatagtcaagtgttgagtcagatttgaatgaggggtaatgtgggaattaagtaaatattgtcctattttaccaatataagatattttaggtttaaggaaaaaaatttcccttcaatgtaaggataaaaaatcaaatttccc

SEQ ID NO: 289171 - DNA, 678 bp, Cannabis indica
gcaggacccccagtctcaacactccactgtaagtttcttgcaccccttgctttactgttaatgtacatggcatgcttttacttatctcctcgttttttctgggtttcgtatttgaagtttctgggaatgcaaacttttagatttttcacgtaacaggtctaggttcaccatttctggtgataggattactcttgtcacgcatttgttactattttttttttttgcaaaagaccatacgttcttcgtatactggtcgtttagggcataggagagattgctttctttcgattttccgccctttctttttctctggtgcgcaatgtcgtcttctgtgaatttattgcacccgactcttgtccagggaatccttctagggtatcctgtttgacagatgtccggagggggcctctttccagcggttaggggacccccattccctttttcttggtttagggtttggtatggggcctaactgctggaatcttaattctttttacagaatcgaaacatgtctgcttctggttcaaagtcatccaagaagagtggtaagcgtctggctaccctcgaagatgtctcgctgggtcccgttgcccaggaggggtacaagtctcgggccaccggatgggaggcggcagagcttcactctactctaacttgcccccatcagctggagaacat

SEQ ID NO: 289172 - DNA, 140 bp, Cannabis indica
gagccttctctctatacctagctgccaccttccactcattcttcttccttgaatatttcgaacctcttagtgatagagtagtgcccacacacaacaagtagtacctcaatcatagtgaggaaaatcgtgaagaaagacat

SEQ ID NO: 289173 - DNA, 563 bp, Cannabis indica
ggatcagctaagttgtcttcagtgtccactttctccaccagtacgtccgctcttgccacatattctctgatgatgtggtatttcctctctatgtgtttgcttctcttgtggcttcaaggctctttaccattggctatagcaccagtattgtcacaaagtaaaaccagtggtttttccattccaggaacaacaccaagtcctgagaagaactttcttagccaaacaagttccttagcagcctcagcggcagctatgtactcggcctccatggtagagtctgatattgcagtttgcttagcgcttctccaaacaactgctccacccccaagagtaaaaaccatcccagatgtagactttctgtcatcaagacaagcctggaaatttgagtcggtatagcctacgggatttaaagcaccacccttgtagactaacacataatgcctagtacttttcaaatatttcaaaatatgcttaactgcagtccaatgttcctctcctaggtttgtctaatacctgctcacaattcctactgcatagatgtcaggtctagtgcataacattgc

SEQ ID NO: 289174 - DNA, 737 bp, Cannabis indica
aaacaactcgacaaggagaacattgtccttaagaaatctaacaaagtgattcaggaagaaaacaagaaggtcattgaaaagcttaacactttacagaagaagattgaagagactgataaagagcttgtaaacgaaaaaggagaaatcagctggatgacattgcatttaaagctatgtataaagctcgcctgcaattgttcacctatttcaaaaaaggtaggtctgctacgtggaaggtagatgaggagttagaagtttataggaaaatgtttcctgattcagttgcctctggtgacgaggaatctactgcttctgagtttgacactggtgttcctgaggctgaagaagatggcaatcaggttgtcgagttcgacaaaggtaccattgaagttaaagttgattctgaggcggctcattagtatgttatttctacttgttgtatgttaattttatttgagcgatgtcttgtcttatttaagatgggaaccttgtcgttttttggactttattttatgtgtaatgctctatgtcaagctcttttgatgtgggtttatgctctgtggattgagctttctcgatgtaggactttgctctatgtatttagctttctcgatgtaggactttgctctatgtgttgagctttcttgatgtgtattagacctctttgatgcacaactttgttctatatgtagagcttgtgtatcgttgtttcttgatgtaggattatgagtattatt

SEQ ID NO: 289175 - DNA, 605 bp, Cannabis indica
tcttacgtgatgtacttctccacttcattacaattgttcagaatgtaccactctgccttcaatttatcttgcattggtaaagcaacaatggtcctctgaccaattggtcgcccaacatgcttaaatatagagaattccctttcaagcttatttgggaggacatcactatttcgatcttcacgattaaatctagtttctattacccggaagtacattgaacagaaggttaaggcttcgttaactgcataagcttcagaaatagatccttccggtcgagaacgatttttgacatattgtttgtacacagacatggctcgttcgattggatacatccacctgaagtgcattggtcccccaaccatcgcttctttaggtaaatgcatcaccaagtgaacaattatgtcaaaaaatgctggtgggaaaatggtttccaatttgcaaagaatgtctagaatacttttttgcatgatctgcaagtctgtaacattcaatgtcttacagcaccatttctggaaaaatacacagaactcagttatggtatccctaacttctttcttgaagaactttctaatgccaccaggcatcaagcattgtagcaacacatg

SEQ ID NO: 289176 - DNA, 912 bp, Cannabis indica
accccaaataacataaaaacgaggagaactagggtttctgaaaatcacccaaccggtagaccggttgcccaaccggaattccggttctgggaattttcagagccccatccggaattccggatgcacaaccggaattccggttcctcgcaggaatttttcaaaaattcacacattgctcaaatcaatcccaagccacaccaaaacttccagacctgttctaaataccccaaataacatttctaaagcatcaacacagcccagaaaacacagaaacgaaaatcaccatgggagctccaagctttgagtttcaaactcaaacttggctaaagctcacttacaagcttcaaaactagcttagaactacataaacaagcataaaaacactgcagaaaactaaccctaattcatgcaaacactacagccaccaaaacctcaattttcacttgaaaaccatagctttttaacaagaaaactaaccaactaaaacaagaacaactagcatgcatttcaacctaactaaacatatttaattcaacattttaaacatagaaacaacaacaacaactagcagcagcaacatcatcaaaatcatccatgcattactcatctttttcatcaaaatttcaagaaaacaaaggaagaaaactagacaagaaatacctcaactagaaacactttaacttgctgaaaatcacttgaaattgaagaggaaaatccacttttcttgctgcctcaagtggccgaaaaagagagaggaaaagagagagagcttttgagaaattttgtaattttctaagtttgtaagaaaatgaaattgaaatgccacatagcctcttttacttcagccaaaaagaataattaaataacatatattttccactttattaagtcacaaaagacaaactaacaatg

SEQ ID NO: 289177 - DNA, 592 bp, Cannabis indica
aactcaccttttgttatgtattctatgatggggaccatccagctggttcttgcccaaccgttattatggcctcttttactttgatgcttggctctgccaagcgttccactggtactacccccagcccttcgatttcactatctgaagctaacttagccagacagtctgcatgagcgttcttttcccgggggattctttctattttgtagtccgtgaactcgtggagcagctcccggactattgttacatatgcggccattcgctcgccgcgcgtttggtattctcccgatatctgatttacgaccaactgggaatcactgtagacttccactcttttggcccctacggctttcgctaatttcagccctgctattaaggcttcatattctgcctcattgttcgaagctgggaagtcgaaccgtagggccgcctggagtcgtagtccggtcggggatatcattgccactcctgctccggatccattttcattggaggctccgtccacaaacactctccatgtggggaccgatggtgctggcacatttgcggttgcctcggcttcgttgcattcggtaatgaagtccgccaaggc

SEQ ID NO: 289178 - DNA, 648 bp, Cannabis indica
aggaccgtgagggggacgcgtgaagtccaggaggttgaggaactggacgaggcacgtccaagcagccctccacctgctgagggagaagaggagattgaacccccaaaactacggggagtacaatgaggctgggcaaccagttgatgctgacggggacgtcctggttgcaggcgtcgactacgtcaccgaggagcttgctgaggcggttcctcatcggaggcagggtgccttgggcgccagatgggtgagtcctccgtccaagatttcggaggcacgcctccgcactctcgaccaggacggatacctgggcgagctggactgcttcattcccgcccacgacaatcgcgcttcaaaccctagtgaggggatgtgcgcctggtcgggggctcatggccagcaaggggcgttgatgcccttgcacaagtacttccgggatgtggcggacttcttcggcctctgcccggcccagatcactcccaagggcattaagtatttgtctgccctcttcgtcctctacgcttctcagggatggggcgctccttctccccacgaggtcgcttggttcttcgacctgaagtctacccccaagcaaggcaggtcggggtatttttacttctctcagccaggcttcaagtggttgagcgggac

SEQ ID NO: 289179 - DNA, 520 bp, Cannabis indica
aacatagccttctggttgctccatatagatggtttcttcaagaattccgttaaggaaggctgtcttgacatccatctgccagatttcataatcgaaagcggctgctatggagagaagaattctgatggatttgagcatggcgaccgggctaaaagtttccttatagtccacgccttctctttgggtgtaaccattggcgaccagcctagctttaaaagtttcgacttcgcctgcaacgcctcttttctttttgtagacccacttacatctgattggatgatagtcatcgggtgcgtctacatattcgtagactttgttctttttcatggaatccatttctaaatccatgctagctaaccattatttccgttctagacttgtcattgcctgtttgtaggttaatgggtcatcatcaataccgtcatcaacgaccatattgatttcaccatccaagccataacgagatagtttagtagaaaccctcccactacgacgaggagcggtgatcttctgaacagga

SEQ ID NO: 289180 - DNA, 609 bp, Cannabis indica
catcatactggcctcccttctctgccttcttatttttcattataatcccatgctgaattctacctttgaatgaatcaatagtcaattcaaaggattccctaccccaacaatactcgtcccaccgaccgctatccacaacatctagatcaaacctagatacttctttatcaggagtattactaagaagaaaacactgaataaaatacaacacaaccagtttcaatccaagggactcatccaaaccccacctactacccaaaaaagcatcctcaatagctttgtggtcaatggtttttacaccacgaaaacaaatttctaccaactgatttgattcctgtgaaaacaacaacttgttgcaatcaccgaaacaatcaattccagtaatcaaataaaattcctcagcactaaaccgtatgcaacgaccagcaaccttagcccaaaactctttaggattgggctggaaaacttccctcaataatagactatgaacaacttggggatggaaaacaaactcaggcatatctagaaaatgaccaaattgagtctcacgaaacatgacagtaaattgacagataaagttttcttaatatcatcaatgacagaaaaaag

SEQ ID NO: 289181 - DNA, 683 bp, Cannabis indica
aagtagaactgtgagtcgacagactcagtaagaaaagcatataacatatcataaaatttccgacttgtatctaggcgcccatacacccatttacaaggcttaacagatgagtaagaacgttctaactggttgtgctattgaccatgatatcacccactaccagtactaagattgtacaataggatcgacactatgttcctgccgctatgatagcatcaataacatcgaagagtacaattggccataatatcattcttaaccagtatgatgcatgtactgctgaaccgacacaatgtttgtgtcgctatgatagcaccaattcatactctctggggtgaatatcactcttatccagtacgatgcctgtaccgctgaaccgacacaatgattgtgtcgctatgatatcacccaaacatattcaatcatgcacacaacatatatatatatcatacatatatacatttgcataaatatcacatattatacacaattcttaccttctttccgaattcaagtgtactggccgacctgaacggaagtctcgtgctagatggatgctctaatcacattttgaaaccgggtaagttacatgattaaaaccctacttccgggaaacccaaaaccttaaccttaggttctgttatactttctataggttattctaactctggaaatggggaaac

SEQ ID NO: 289182 - DNA, 484 bp, Cannabis indica
agaaaataaggaaaaattgttgaaaaatggaaaaattccaaagtggggcccacatcctatggcaggccacttgcaagggaattgaccatttaatttttcaatattttaatgccaaataattacaacctaaacctaggtggttgcctataaatagatattgcctcatatcaaaagatgatgaaattcaagccttcagtcaaattttctgagccatcacttctacctatttcgaaccactctcctctattctcttttcatattttcataccctatagtgatagagtaagtgctaacacacatcaagtggtactcaataatagtgtgtaaggctgtgaagaatccagtttcaagagaaggagattcggactcagatcttggtgataccctgcaacagacaggatacaagggttagagatctgagtggaaggagccattattattctgctgcacccactgtaaggattctgaaactttatatgtgttt

SEQ ID NO: 289183 - DNA, 529 bp, Cannabis indica
attgttttaaattttttagtttgtatcggaccctaattgtttgtataggttttattttttattgttttattatcaattattaattattgttttatttttaattttttattaattattaataatagttttattattaattattgttttattttttattattttattaattattaattatggctttattattaatttttaattattgttttattttttattgttttattaattgttaaatatgattttattattaattattaattattgttttattaattattattttattttttattgatttattaattattgttttattttttattattttattaataattatttattttttattgatttaattcttggtttttatagagacctccacatctaataattccagtgtcggagcattacacaggccgtatcacatggcgcggtggtagttactactacccgaagattaagactaaatttgaagaattcagactatgggatagggtgagggaatcccctttcaaacagtttt

SEQ ID NO: 289184 - DNA, 589 bp, Cannabis indica
tagactatgtcttatttaagaattttaactaagtaagggattaattgtgaagaaaagaggttttggggtcaatttattaattatgagactttgtatggtctaattaataaactatatataaatgacaattttatttgataaataattataattattaaataaatagttttggcatttataggattgaattagaaaatatggtattattgaaagaagaataactagttgaaaaaagtggtgaaattataactagagaatggtcctattaatggccggccctagtgttgatttttgtccaatattttattcttttttaatccatataattcaaccctaatccctagttgaaacactataaatggaagatgatgctctcactcatccacttgatgccttcatccaaatcaaacctagtttttttatgtcaaacaactagtagatgagagagtgccttctataatgatttcacctccttcattgttcttcaccatattcaaacccttagtgaaagagtgccatgcccacacatagcaagtcaagtactcaatcatagtgagtaagacggtggtaaccaaacccgaaggagaga

SEQ ID NO: 289185 - DNA, 564 bp, Cannabis indica
tgacttgatgcactctgaactcactggagctcgttcagaattgaaaccaggggagagtcttcgaattactcacctcacttttgctcatgcttcccttatgcggtttgcactaagcaattgggttccaaattcgaacaagaccgtggtgtctcaagaagtggctacactcctataccgcatcacctctggaacttccattgatctagcctctcatattctcaaccagattgtctcctttcgaagaggtaaaaagccaaccttcaaacttgtatttccaaatctcatctataaggttttatcctctcagaagaatgtggcccaagcacatgaaactcttgagcctcccatcactggccctacattccaaccttctgaatattttgatggtgtgttccaaaaacggccaaaggctggtgctgctgctgcttctgctggtgcaagttcaggctctgctgctgcagagctcctggaagtcaagtctgaacttcagaatgtgtacactcgtcttgaagcaatggctgatgtccagcatgacatgtccaggcaactgtccaccttgattaa

SEQ ID NO: 289186 - DNA, 823 bp, Cannabis indica
gagcctacaattgaagatcaagatccttgtgaagaggaactcattgaatatgaaatcacaagcaagggtatggatagccaagtggagagtgagcaacaagaagaagggttgttagatgaaagtgtagatactgtgacattggaggatgaggaagcacatgacatcattgattcgacttcatcaatgatattgactaataaaccaccaatgaatccatatatttcatcaacaccatattatatcctctacaagctacgaaaggcttctccccaagcacatcatccaaagtcttatgttgttggtgctgactttggttcaaactcatcgcttgccaagcttgaaggcaagtacaataacaattttcaagttgtcttgcatgacgcttattacgggcgtcaaccgcttattgatgtggcactcaggtaagtttcctttcctttttctttaatgtcacattggggacaatgtgtcactttagtttgggggtgacttaatttttatttttattttgagtttttattttattttattttgagttttatgtcttttaatttttagtttttagtttttattgttttgagtcaattttcttaatatgagtcaatctgaaagtaggtagatagcatgatttgaaaagtttatttatttttttgaaaaatccgtgtgcttggtgatgttatactcttgactaattttaattttgtgctttaaaagaacatagaatcatattaggtaattttctagtaattgaattgatttatgtatgctaaatttgacttgtggaaagttgtttggaaaattctagaacttgcttgcttgctat

SEQ ID NO: 289187 - DNA, 641 bp, Cannabis indica
ctgggtgcctgaaaaacggtctgccgtttttttcctggcagccatggaaattctggttttttcaccccaaaaaccaatccaacctccaccaaacctgctcaaaccttccagaacagtataataacataaatataacatatcccaagcttcaaattacagtagttcaatctctaacccaaaatcatatgctcaagtgaagaaaaacttgattttagcttcaaccaacacaactctaagtcaaccagccatggaagcctctcaaacaaactctaatatactcaaaaacctagcctaaacacaatccaaactcagtttaattctcacatcaactaaagagcgaaaccctaccttaaaaccaatcttagaaccttgagttttcaatccaaaaaggttaagaatttaccttcaagctctcctaggttgagttggggcaagaacctgctttgaaatggaggtagaggctgaagaaaaaatcctcaaagtgggctggcttggtttacacgaagggaaggagaagaagaagaagcttgtcttcttttttttttttttttttttccttgccttggaagctaactcccttaaatagggtttttatttttttttcttttcttttttttttaatcagcccaaaaataaaaagg

SEQ ID NO: 289188 - DNA, 769 bp, Cannabis indica
ctaggaagctgagaaccatggaactgttatagatcagacaactcaagcgagtttgatcttgaacagctgactccagccttctgcccttcacttcaattatgtcatgaacaagttggagcttgactttcacgagttaatcaacaaccttcagacattgaaaacttgattggaggaccacagaaaggaggagctaaagctcctaattctgggactgctaatagtgcggctaagactgaggcaaacattgcctctacttcaaaacccaacaacaagaagaagtggaaaaatatcaagaagcctgttcaagctgtgaaaatagttaaaaggaaaaaggctgctaatctgatggaaagccaaaaggaaaatgtttctattggaatgaaaagggtcactgaaaaccccaataccctaagtttcaagcaaagaaacaaggtatttctttctatgctataaactcatgtgttttagagaataattatccccttgggttattaattctggatctactaaccatgtttgtttttcttcttatttcagctccaactgcttaaacttggattgctatcctagcgagttgagtcggataatgtgacagaagggtggagattgtccaagattgaagatgaagctcgaaatcttcttttaataatttttgaattaattgttttaatttatgaacaattcgatttcaattattggtttgggatttttattccctatttttcatattattgcagacaattcatttttttgagaatattataataaa

SEQ ID NO: 289189 - DNA, 383 bp, Cannabis indica
tgcatagaaagtgaagttataagttaatgaactgagagatccaaacctagccatttcataaatgtgttgttgttcttgtgccgggggttaaaatgtaggtggagatttgtcttcgtggatttgctccatcgcttcatgagaagagtattaggtattcttctcatgtttaatcttttcattgtagcccataaatgtctacaagggtacccctgactttcatatagcatggagctacagtgtagtgctcgttggccttaacagtaatgaactcggtattggaattccggatgctgaaactttccaatggtgtatatctgccactctccttcttggtcctgactcatgacaaaataattattctctaaatcaagctgctcagcaac

SEQ ID NO: 289190 - DNA, 636 bp, Cannabis indica
aagtggcttgattcttatgggcctttgaacagaagatactttgaggaattgggagcggttccaaaagagctgaagccatctactgaaaagcccccagaacttgaattgaaggtgcttcctagtcacttgaggtatgagtttttgggtcaagataaaaagctgccagttattgtttcagcttctctctctgatgtggaaactgatagacttttgagggtacttcgggctcataacaaggcaatcgcttggacactaggagatgttaaaggaatcagtccttcaacagtgatgcatcgaattctgttactatggggtcgggctaatgttactatggcctgtgaattccttgcaaattggcccgaccgccgaaatggggaagtaaaggttcgtggaaagaaggttcccgccactgctgatgcattcaatgtgatgttctctgtcccagattacactagggaggaacaacgcctccgaattattgaggaggaagagcaatttgatatggtagatgtcgcggagacagtgggatttcctgggttgaggttccatgacaatgatggtaccgaggggtcgcccaatattctgtaccggtgtgagcttaacccggtggcaaaaacatggttgtactttgtgagt

SEQ ID NO: 289191 - DNA, 743 bp, Cannabis indica
tcctctttgttgccatccccaaaagtgacagatccccctttttcatctttgaagttaactagcaatttcttatttccagtcatgtgacgcgaacatccactgtcgaagtaccactgaccttcaacaaaggcagacagagatagctttgcaaccaaaccaacatcaggatttggtttggactttattttccattctcgacgaggtttgcgtccatgtgacttatttggtggagggaaactatttggtcgattgatcatggctttcaagtagttctgcaatttgtaacacttaggtcgaatgtgacctctcctattacagaaatgacatgtaggaatgaaattgtcattctgtgggaggttgtcagcatcagtcctccttccttcaaatttgagtttgatgggtccagttggaacctgtctcctctcagatgagtcagattcgttaatggtgattgaggtgtcaggagacccatcttccttctttgatgaattgacattggagggtaaggaatgctcaacagacaagtcattcccttgcttatatagcatcttatatcctaatgaagttcgatcaccatagggcttctgaagctgtagggtttgattgatggcagcagtgcctgggggaatgaactgtaaagcttgcttggttcggattagatcagctgtgagtttgtagatctcattctccttttcatcaagaagtcggttgagatttttgacagagtcttctaactttccttt

SEQ ID NO: 289192 - DNA, 674 bp, Cannabis indica
aataaaataataattaacaaaaaattagaaaaaaaataacaatacaaaaaaataatataacatgtatgctcgtatagtcttctacactattatatatttactaataaataaatatgaaaaaagcattaataaataagaagcaaaaaaaaattaaaaaaatgaagaaaaaatggtaaaaaatgttaaaaagattaaaaaaaaaagtttaaaagaaaaaatggagtaaaaaatgagagagatttattgagaaaaaggaaaaaaaaagtagaggtttaaaaaaatgacaaaaatattaataattggtacaaacaaaacaaaatacacaactccaaacataacaaaaaactacaaattactaagaatcttatttagtttgaaaaaatataaagagcacacaatagaaaaaccttacctaagtgtcacgggccgcctatttggacaccccaagtaggtggaacgtgcggcacttgctggcacaccgagctagcaagtcagcctaaacgcgcctgcaggcaaacaagttcaaaggttaggcacgatacatgtctcgcacatgttgagtgcaaacaagaagcatgagcaagcaaacacaaagcgtccccccaaaggaccaatctcacacaaccccacaagcaaacatatagacaaatggcacgcaatggcccaacaaaggc

SEQ ID NO: 289193 - DNA, 349 bp, Cannabis indica
tttgcagagatgcaagatagaatccgccaacaagatgaagagattcaaagattgaggcagcaaggtcctcctgccgtgcctcctcaggtggttcaggccgttgcagttcctgcggtgccaggccgttgtatgaaagattccaaaaacaagcacctccagtgtttctgggaggccctgatgtgatgaaggccgagcagtggctttcggtgattgaacgcatcctcaattttatgggagtggttggaaatgaccgggtgacctgcgccacttttcagtttcaggaagacgctctcgtgtggtgggagttgataaccctcactcgagacgtcacgctgatgacctgggaaga

SEQ ID NO: 289194 - DNA, 1009 bp, Cannabis indica
tagggcacaaaatccaacaggtgacagctgtgtaggtctcttaaatttccttatagttatggttgatacgaaatagagaaatggcaggttgactccacacgacccgcaaacaaccagaatggttgtgcgggatcacatcaaggttgtataaggggttgccttacctcatgccaacacaagcttcagaattgaccatgagaatgagagtcccggggttgagtgcaattgtgaagaagttgttccggtcaggagggagagacacaagccttgtgtcatcctgtcaagccttgtgtcatcctatccaattgtcccttaggttactatgataacaatggccattcgttgaacaagctcaatgagccttcagtactatacctggaccatgtcttggaccaatcccttgagcccgaaattcttgatgaaagttcacaaagggtcaggtggattttccctgcttcgtccctctcaaaggacaactttgagaggatgcaggccgctgggctagtaggggatatctactgtaagatacctcccccaaatcaactagctcataggttagctctcaactgaatggcatggtcagaagaccacattgatcaaggagtcttacttccttttcattcatacttttgtgatattgctccttatttcaagatgtgcccaacacaaatcacctcggaaggtatattgtgatattttgcacacgcaagttcacgtatcgtgacaagtagtaaactcaccaagagtgaggtcgatcccacaaggattatagttaagtatgttaaaattaaacttttacttcaatttggttgaataaaaaattaagaaagaattaaaactagaaaataaaaatagtgcaagaataagcaattaaactaataaggaaattaacagctaataaaaactagggcttcgacttcaatttttttattgattatggcctaatatgattatctccctattatcaatttctatgcaatagcaggtttactaaggtaatttatagtct

SEQ ID NO: 289195 - DNA, 570 bp, Cannabis indica
ttaggtaaataacaaacccttttaaggtttcatgtcttggacgcatactgttggaactttgtatgaaatatgtaaaaatagaaaagtgaagtgtgtgagtaggagtcccacatgggatagaaacactacattttaagtgtatatctagtgcaagtttgagatatgggtttgggccccaaggggtacccagttttgcgcgcatgggtgaggactcacacactggaccaccacacgcgcgcgcgccgccgaccgaccgagccgggttggcgggtgaggtgtcactttattttttgaagaaaaaattatttaattaaataaagatttatttttatttatttatttattaattaattttaacacgtgatcagaagaggtaaaacgcgatcagtcaatgatccgccttttcctcccacgatccaactcctcccacgaacgataatattaccgttttcttaccgttttttcttggatcgacttctatataagtcgtatcagaacaacgtaagaatacatcttttctacattaaaaaaaaaaattcttttctttctttacgatttttctgagagcaa

SEQ ID NO: 289196 - DNA, 946 bp, Cannabis indica
aacccttggtgattaaacagttcatgcgtcgtttgagacctgctattcgtggtccaacaggccctttgacctttaacaacctgactgagtgtgtgacagtagccttgcaaactgaggctcatgtagaggggaatgagaagaagaacacaagcagaggaagaggaaatgaccgaaagatgaccaagaagaatcaaggacagtggtcccaaggatgacaatttagtgggggtagcactagtagtggtttatctggaaagactcgtagtggaccatacaggtgttttagttgtggtcaataaggtcataagaagaaagattgcccacaacgacaacaaagatttcgagcatctaatggaggacccatagggagctatgtagaatctactccttttcatggacagcccaggacaaaccagtcccaatcttcatcctatagtttcacaccccaatcgggccagcagtctcagtatcaacatcagtttaggccacaaggttcagggttcaacatggggtactcacaaggttttcaaactcttgctcctagtgggagtcaaagagggtacaatcaaggtggagggtctggtgcaagtacaagccatcctagtcaaggaaagggaaaggttaagcaaagtcatccgctcaagcctacgctcttggggttgatgatgtacagggcggtgctgaccagggagttgttgatggtatggttcttatctcacactcttgggctcatgtgttatttgatactcgtgcatcgcattcctttatatctttgatatttgctagtatgttgggtttgagttgggaaacttttagtcgtgcattacatttgagtgtacctattgggggacacggtaaggtatccaccatatgtaggtcagattgtattgtgttcgagggacacaagttatctggaaacttattagtgttgcctatggggaaattt

SEQ ID NO: 289197 - DNA, 516 bp, Cannabis indica
acaaactcgagctttatataacaacattccattagtcgagcctgaaaagtctttaggctgaccaactattacctcatctcgaaccttgactaactcagaatcttctagttgagcttttctaattctttccaacaaatcagattgaagtgttaagttgtgcaaccttccaactacaaattcaatccctgcactaaccatttcagaggctagttgaggggctatcaaaactgtggtgcaaaccttcctgggacctcttctactcaaggcatcagccacaacattggctttcccaggatgataaaaaatttcacaatcgtagtcttttaacaaattccagccacctcctctgcctcatgttcaaatccttctgggtgaaaaagtacttgacactcttatgatcagtataaatcccacattttttaccgtaaagataatgccgccatatcttaagagcaaaaacaacagcagcaagctctaggtcatgagttgggtaacgctgctcataatctttcagtt

SEQ ID NO: 289198 - DNA, 641 bp, Cannabis indica
gttatacggtaggaaatgtagatctcccatccactgggatgagacaagggagagaaaatacctaggtccagagtcagtgcagcggaccaatgagggcaaattagaaaaaaaagtaaaagtaaaacgtcgtaaagtaagtcgttcgttccgtccctaccaacgaaggacgacgaacgaacgaaaggaaaggttaacggttaccgacgaagtaccgtaaacccggaaaccgacgaaggaagtaatttagttaggttaccgttaaccgtaaagggggtaaccggggaacctagttggttttttacggtttttaacggtaagttacttccttcgtagtagtaagggggaaaggggtactaaaccgtttaaaccggggtttaaaacggggaaaaagggacggaaacttaaaatttagtcccgtacccgtaagtttaactttaacgaaaccgtttaacccgtttacggaagttactttccgtacggaaaggaaagtaaggttacggtaacgtaagggtcggactaattacggtttacgggttacgacttagttccgtcccctaccgaccgttacctttactacgacgacgttacgttaccaaaccgtaaacgtttaccttacctagttcgttccgtacgtagtttgg

SEQ ID NO: 289199 - DNA, 493 bp, Cannabis indica
ccagagatccaagaacagaagctgttgacccatcagctaaggtgacaacagaagtgggactgtgagactgaaaagtggaaaagagacgggaattacctgtcatatgatctgtggcaccagaatcaatgacccattttgaggatttggaaagaaggcatgcattagagttacctgaatcagcaatcgcagtgacagaagaagatgaagacttaagtgtttcctgataccttgagaacttggcaaattcatcagcagaaataaggaccgatttgtcagatgcatcactagtgcttgcaatattggcagagtgttgttgtcgattcttaaattgtaacttcctacactcaaacttggtgtggcctggtttcttacaataattgcacatgatgctcccagaatttggtgtgcggttatcaggtccttgtgaattacctcctttaaatccacttggagtagagtttctttccggtgcagaattattacgactcaccaa

SEQ ID NO: 289200 - DNA, 536 bp, Cannabis indica
atatatataaaatttgatttttatacttaaaaactatttttttttttttaaaccaatacattttacactacaaaaaatatgaccactttactaatttttctaaactacccctcacatttcaaaacatgaccctctctcttcctctctctcagccgaaccacgaaacccagcccccctctcacagccgacgccccctttctcagccgagctctgtcgacgctcaaccctgaccaacccagctccgccgaccctcaaccgcgaccacccagaccctctgtcagacccgaagcctcaaccacacagccccctctctctctcttcgtctctctctctcggaccgaaacaaaaaataaatgcacggtggtccgatggttggaccatatggtccaatggggtccgacaattcggacccattggacccatggtccgaccatcggaccactgtgcatttttttttttgtttcggtttgagggaaacgaagagagagacgaagaaagagaggcacagtggtccgatggtcggacccatggtccga

SEQ ID NO: 289201 - DNA, 416 bp, Cannabis indica
agacagtttttcgccgcaagaaaagtcaatctggaggtcagcgccttgactaacatcaagtagctgcctacaaagacactaaagaatttcataaagaggtccgggaagaagcctttaagaccaagaaagtagatgacggacaacagcttgcccttctccaagtaggcatccgtacggggactccattctggaacgagctacaacaagaaggagcttcaaaccttcaagacttccagaagagagtccaaaaatacattaatcttgaagaagcccaaatagtggcctatggaggatactatcccaccggggtagcaggatatgtgcccggagcccagctctcaggcgctgtgccagcagcagctccaccgatgagcggcatacagttttttgctactcccagatatagccaaggccag

SEQ ID NO: 289202 - DNA, 822 bp, Cannabis indica
cttgttgacaaaggcgatgtccatcttacgaagtggcaacaccgtgttgtcaaactctaactggggaacttcatatgccccgcagagttctgtgataacccctgccaaaccgaaaccacctcccgtggctccttgcacgatttggtcaatgctctgccgtatgacttgtccaatgttaatgttgtaccctttcattatggcgtacacatatttaaggcgatccatttggacatcggaaaaatgcttgttgggcactaaccgagcactcacaaagtacagccatgtttttgccaccgggttaatctcacaccggtacagaatattgggcgacccctcggtaccatcattgtcatggaacctcaacccaggaaatcccactgtctccgcgacatccaccatatcaaattgctcttcctcctcaataattcggaggcgttgttcctccctagtgtaatctgggacagagaacatcacattgaatgcgtcagcagtggcgggaaccttctttccacgaaccttcacttccccatttcgacggtcgggccaatttgcaaggaattcacaggccatagtaacattagcccgaccccgagtatccacaaaacttccccacttcattctttcaatttgcgctctgattgtctcaaaccgaggttggcgcctcaatggattttcagggaattcaatacccctatcttcaatataggctctattcttcaaccttacgaagcgattgtgagcctcgatactaccaaagcgggttctatcaaaacccgttggtggtgggttcgaagacgaaccttcttcaacattccttgtcct

SEQ ID NO: 289203 - DNA, 545 bp, Cannabis indica
agatacttcagttagtcccataaaagtggaagaatattttttgggttttgaaagtagatgatacttcaggaaaaggtctatttaccgaacttataagagaaattgaaagtttgaaacttgacattaatgacataagagggcaaggatatgataatgggtccaacatgaaaggaaaacaccaaggtgtacaaaaaagattattagagataaatcctagagcattatatacaccttgtggttgtcatagtcttaatttagtgatttgtgatgttgctaattcttgtgttaaagctgtaacattttttggtgttttacaacgtatatattcattattctcttcttcacctaagagatggacaatattgaaaaataatatatctacgttaactgtgaaatcattgtctcaaacccgttgggaaagtcgtattgaaagtgttaaggcaattagatttcaagctccaaaaataagagatgctttgcttgaactagcagaatcaagtgacgatcctaaagtaaagagtgaagctaagtgtctagcaactttt

SEQ ID NO: 289204 - DNA, 814 bp, Cannabis indica
ttgccaagctgagagctgacatcaacaacttcacccaacatgacgacgaatctctttatgaagcctgggagagattcaaggacttattgaggaagtgcccaaaccttgggattgaaaagtggttacaagtgcataacttctatactggattactgaacaacacccgaacactgatagatgttgccgctggtggagctttcatgaggaaaagtgctaatgaggcctttgaattacttgaagaaatggccataactaatcaacaatggtcaacagagagaggcccaactaaaaagttgcaggtatgcaagaagttgatgcaataaccaagttgacagcccaggtggaggcattaacaaagttggtgactgcacaagccaaacaagctcaagttgtctgcaagttgtgtggaggacctcatactactgacacctgccctatagatgtcgacagtttgccaatggagcaagcccacgccattggaaactatcaaaataattatggtcgtcagaagaacttccagaagcagtttcctaatcagcaacaacatgggttttatcctcagcaaagcaaacatgaacaacaacatgactctagtgtagggtctaatcctcaattagacatgttgctacaattcatgacagagattaagtcatccattaaggtcttggaaaacaaagtggagcagttggcttctcaaaacactaacaggactcaaggtaacttgcctagcactactgaagtcaatccaaaggagaattgtaatgcaattaccttgagaagtggtaagacctatgatgggccaaacaaagacaag

SEQ ID NO: 289205 - DNA, 1364 bp, Cannabis indica
gctcgtcaattttctctagtgtatagaaaggtggatgcctcactctatattgtccgtgattgattcggataacttcacctattcttttgaatcttgtccttgaatctacgtctttcgagacaggatgtgtctcgtcaatacatgaattaataatttgtgtattcttgtctcgcgtaaaactatacagtagtgagttatgaatatactctattaattctatctttaatgagttattctctttttgcattaaatgatataatcgttattatatctggtggttcacattccacctaattggcacgtttcactctctgaagttagctgaatttgggtataataataataataataataataataataataataataataataataataataataataataataataataataataatatgccactttaatattcttaaatattgaaatattttaagttagaggagttctatttgcaccccataaaataataagtacacatcattatccaaaaagaaatcaacttaaatagtttttaaaaattagttttaattgttttttttttttaattttgctccttacattattttatgttaatttcaatacttattttgattttatttttatgtttttttttcctaaatcatgtatataattttattttttctaagaaaatttcatataattttttattttaatttttttgtcataaaatttaaaatatatttgtttttatttgatagctatagtatttaagaaaatgaattggaagaaaaaaattaaaaataaacctattacaattaaagatataaattttatgtaaaatgaatattattaaaatggggtgcctttaaaattttttggggtataaataaaatttttcagttattatttattatattaataattttttttaaaataatatactaaaaaaattaaaataaactacaggaaaagtagctatattgcctaattttatatataaagatatatatatatatatatatatatatgaggagttctctttacaccccataaattataatacgtcccaatattaaaatatataaacttaaattattttaaaattactattaataatttttaaatttttttctcgcattgttttatgttaatttcaattacttttttgattttattttctaaaattttttctaactcatgtatatatattttttatttttttcttaagtcaaatttcatatcattttttattttatttttatcataatatttaaaatataatttaatttgtttgtatatgtatattttttaagtaatataaattggaaaaaaaattaaaagacttagtacgattaaagatataaatttatataaataaaattatt

SEQ ID NO: 289206 - DNA, 409 bp, Cannabis indica
tttaaatactgcactttcgtagtggtggactgtccgacagcctacaacgcgatcctcggccgaccggccttggtagactttggcgcagtcacatcgattcggcacctgtgcctgaagttccctacccgggaggccgggatcggaacggtgaggggaaaccagggggaagcaagacaatgttacaatgtcgcaacccacctgcccgtgctaatggtccgggagtcagttgagccagaagtggctgaagaggatgagttagacccccgtgtggagtccgaaagaattgtggaaccaatggaggatgtcgaggaagtatcagtgtgcgacctcgactccaccaaagtactccgactaggtaagaacctagatccggaggaaaaagaaaaataataaaaacactgaagggcgc

SEQ ID NO: 289207 - DNA, 1009 bp, Cannabis indica
aaaaaaggtcttctatttagaatttagttgaggccctaagctttatggtttcaccacacgacactaattatattctaaattaaaatgtataagagttctctctaaaaaaatgtataagagttgataaatttcattaataacaatatgccacatattcttttcaaaaaaaaaaaaaaaaaaaaaaaaaaaaaaaaaaaaaagtgaaatagcaaagctaccacaaaagtaaaactcatttttaaagaccattccatattttcggccttattagatttagaatttgggctaaagttcacgactttcattctttggttttactttatataaggataattaaaaaaaaatacaaaaacaacaaaaaattacaaaaatacagttacatagaattttaatatttttacgatttttacgattttatttataaaaaatccggtcttattttgatttgtttttatgctacactcttgttattttactgttgattttttgttattttttattattgtttggatgttattttcctatagttttcttgcttcttcgtgttgtttttatagaacatcataaaagtatatatatacataaaaaaaattgaacgtaaaaatcttacataaaatagtgctccatctaatagtcagagtaatacatagtaagttatcacacttcaatttgtaactactatggtaaccaaaataatttaaaaggcaaccaatacaaaaatactagaaattttgagaactaagatccattggtacaacttacaagttgagaaataatatatttggtacttgatcaagattgagaaaggaaaaataaaataaaaagtgtaaaaattattatgtgtgatttgaattagtggaggggctggggtgagagttggcgtttgcagtggcatcttggtcaagagtatcttcaactccaagttgaacaatactactactactgggactgcctcggatagtaaaactagaaggctctgattcttgatgtggcctctttttaaaggtat

SEQ ID NO: 289208 - DNA, 681 bp, Cannabis indica
gattatcgtgtagcaatttatttaacacttaacagctaaataactataaaagttccgaaattatattataattctatttttgttattccatcctactaaaatttttaaatgacaagtgttatataataacgttccacgcaggactatggctctgaaatttagtgggctatagaaaaaatattaattttggactcctatttataaaagaaaaatgtggtatctttgaaaattactaaaaatatatacatatttgtttaaatgggggaattttttcgggctcttaaattaagtaagccctaaatacaagcctaatttgcttatgcctaaggccagacctccttccacacataaatgttctattatttcagcttcaaatagaagagaagagataaaaataaggcttcaggatatttattaaatttataaatgacataaattaataattttttttttaaaaaaaaataattacccaaagatatatattaaaattatagtttggttagtcctctaactcaaagatatgttttagtagctgactagaatgacgcgtaaaaatttaggtggcatttggttgggaagaataaaaatatgagaataggaataggaatagaatggaataaaatttaaattgcataaaagaaattaataaaaaaaatcattaaattttttctcatgttacat

SEQ ID NO: 289209 - DNA, 572 bp, Cannabis indica
ttttaattagttagaaagaaagaggaaaattaaaggaaaaataccgattttgaagggaaagctctctttctttcctctctctcttcgaaaccagcaagatcaaggggaagggctgctgatttgtggtgttttcagcaaagaaattttgggagaatcaagctaaggtaagccctagtggaacccttctctagtttttaagtttttgcttagtttgaacttgtgaaattgtaaattgggggctgttagggtttaacgcttgtatagtttgaattctagggttagtttggattgattttaactcatagcagctggttttagtgtttgttataggttttgtgcaagtttaagctttgagttcaaagctttggtctctaatggcaagttgagtttcaatggtttgttttgtgattttctggctggaatatattttgtataccctaattaggtactctggaaggtttggttgcatttggtggagaattgagcaaagaatgaaaagctttggggaaacaggtgcaaaccggctagccggtttgcagagcctcaaaaaccgactagccggttttggcagg

SEQ ID NO: 289210 - DNA, 569 bp, Cannabis indica
aactacattatgttcatttattttttttatataggctctcagttttaagttaattatttatttaatgaaaataatagaataattagttttgatcaatagctaagatttatcaatcttactcaaaatctaattcaggtcaatttttaaattcttattataaccatgtaattaaataaactattattattgattaattatataatataaatataatatagggtaaatagcggtataagtacccaaattttaagtttgcaagcaacataaactcaatgtttatttttagcagcaaaggtacccaatttttttaaaactgtaattttttttctagtttcgtcagtacaaattccgttttgaatttattaaaaaaatatttggaagtaactgatactacatgtttctatctagacccaatgatttagaattcggatcttatatgtgccctatttaagataataacagagtcagtactgacaaaattagagaaaaattatagttttacaaatattaggtacttataccgctaaaaataaatatagaatttatgccgcttacaaacttaaaacttt

SEQ ID NO: 289211 - DNA, 390 bp, Cannabis indica
cttggtcgcattctcacctggctccttaggagcctcttcagtcaacacaatcgggcattttcacctatgagagcaatattaatgttctctttccatttgacaaagttagctccagagagcttgttgtcagtcaatagtgacaccttgaggttgttcatagtcatatagggtactacaagtatcaataaatagaaattaaataatgtttaatacaaaatcatacacattcagaaattattagcacttagcaagtaggaattgttggaattattttactctaatcactaaggtaatttcgaaatatgaaggaagaagagagagagagggtggcggccaaggtagagagagaaaggctcaggttttctgattcagaagtgtaattttcctgaa

SEQ ID NO: 289212 - DNA, 680 bp, Cannabis indica
tctgtggacgggagagttggggcagccgttgagtgacccttgaaaagaaggcggttggtgggagactgctggagatgagagggttgggtttggtggtggggggctgttatggggtaggagagagagagagagatgatgcagagagagtttgggggaaagagaaagaatgagtttgaattgtgaaggggtatttttggagttttaataaaaatgtcattagttttttttttatttgaaaagtttgagtttaataattaattttttttaatttttaagtatataaaatcaaatttcccaaaataaaatggtttatgagaaattcatggatcactttttatttaaatataataaaataaataaaataaattctattaaatctaaaaaaatacgattgggtttttgctgttgtacatctacgattgggtttttttttaattatttattgtattcatttttctattaccatttggacattcccatggaatcacacataatattccaatctacacttctcttttttcttcttcacaacttaataacaaaatatataagtaataataataataaaaaagaagcgtgacttttatcaaagttcacaaaaccaagcatcaatggcgaaaaaaacccaacaaaatttacaactaacaaatgattgtaagtgctcggcatatgcattagtt

SEQ ID NO: 289213 - DNA, 708 bp, Cannabis indica
gctcgccttgaagatcgacctcagatcttgcactatatcgaagaaaaattacatcaggtgagaaatccaagtcacaaatcgactgatatttctgataagttctctcttttgtttttctgtgtttatctctctataattttctgttctttttgcatgaacttggaacaacgtttggagctgagtacttcctgatctgaaaaactagggctctggttttctggtatctctcaactgagagattggtaaggctctagtccctttatatatgtgtagattagggttgatcaaggtctgggagttagttacaatttcggtaggttgtaactaactaccagatcttgatccactagaggcgaagccacataggatctggtctggtatttatttgtatttcttcttttcttgtaaaactgtaataataagtattacaaagggatctaatttaacaaattttaacctaaatttttttattataacttaagagtaaataaccacataaatattcaaagtttggaatttacaaatggtataataccgattgaaccctagattttaaatcattgtgtgtcaagttttttattgtatgaattttgaatttttatattgtttgacttttaagaatattttatattgttatttatatattataaatctattacttatcatgttaaatatatattttgaaaaataaaattaaaaacttaataa

SEQ ID NO: 289214 - DNA, 578 bp, Cannabis indica
acatcatgtttcaatcaactcatttagaatgaaagataaattttaatattttagtatgccaaatttaaacttaaaataatacaaatatatatatatatttaatttggactggaatttttatcatgaacctcatatacacagatattatatataattatatctttccaatgcaactcatatataataataatagcccatatttaattatatatattagaaatgtataatatatatgtgcctataaacaaaaatcttaaaattaataataaatacctcatatataactatgaatatttaaccaaaatatgaaatgaaaagttttaataaaaagaatcacacccatagtaatggtgaacttaatccaaaagtctaaaagactcaatatatgagtgaaaacttagaatcacatcacatatgaatacatatgtcaaatataaagtatatatacataaaaaggaggcataaactttaattctaatagtgactttatgctaaataagatgagatcggtgacatatattatatgatatattagtagtcaatccatattaacaaaaaaaaaaaactaaaaaaagtaa

SEQ ID NO: 289215 - DNA, 502 bp, Cannabis indica
tgtaggtatgagactacacagttgaagagggcttaaatgaattgatttgtactacctatataaccaaggtgcatcttgtttttcggtagcccatcacaaaagaacgccacagttaagctagcaaactgtaacgccctaagatttaggcacgctacccaatatgattaagaaaccctaatcccctaaacgggattggttttaaaataagcgcggaaattaaaactttaaacgaaaacggaatgaaaataaacttgtaataattttaaccttacaaacaaaagttacatgtttcgggatcccaaaaaaaatcattttacaaaatattacaagtcttttctccttagccgacctaagcggcaaaaatagagttacaaaagtttcaacgctggtagaccccaacccgcttggtctagtgtggcccgaacatgtacatacatcgcccaactcccatactcatggctgatcagagatagatttaccctttcctgcacagtagagcacc

SEQ ID NO: 289216 - DNA, 634 bp, Cannabis indica
aaaccctgacgaagaaccagactcgaacccagacctagacctaggaccccaattagaacctgaacaagaatcgacaaaccaggaccgtagaacaagactaggaccgtgaccaggacccagacccagacctagaacagaacacagacctagcctcagacccaaactgagaccggaactcaggcctggacactgtcgtgtaccgagaccagaactaagacccggacctggacttaaatctggaacccgatcccgaacgcagacttggacatagatagggatccggatacgaaccttgagtcagacagagacccatactgggatggaaatgctggacctagatcttgaccgagatcctaacccagaaccaaacttggacccgcactggggacccaaactcgaacccagaccaggatcagagccaaggacttagacccagaactaaatccagacttagatctcgattggaacttggtactcggaccaacctagaccaagtcccaggatggaaacccacacccggagcctgatctggacctagactcaaatccggacccgaacgcaaactcagactaggactcgaactccgacccgaactcaaacccatactcgaactcagaatcgcaaatggaactag

SEQ ID NO: 289217 - DNA, 593 bp, Cannabis indica
tttatctgtaaaaatttctaaaaaaatataaaccaaaacatagctaataggaattagcgtttaaagtaaaccctcttaaaccttatttcagtttaaaatattctttaaatcataccttaaccaaaataatcattttattccgactaataaatctgtatagtgcataacttattaacttttaaaatattattgtgtcaaaattttcttatacattcaataccgaaaaacatgaaaatttaaacaaactaccctaaataattaggggcccaaccatataataggtgctaaagccttataaggcgccaaagccatatataatgacgcaaaatagaacaaaatcaatataaataatgctatttttatccattaaaaaatgctatatttataatcatgattccaaaaaaaggtaaacgtagaaatataattattactcccaaaattaaagaaaatgcaaattaaattaaataccataaatgtagaaaccataattataggaaaaattaacactgatatcaatcaataattaagtatacacaaatttacgaaaattaagtaacgtccttcaatttcgtcttcagctaagtggtcaaatc

SEQ ID NO: 289218 - DNA, 618 bp, Cannabis indica
tggatgttttgaactaaactcctatttagggaggatgatgaatgttgttttaagtttttcctagttaatgaataattgccattccttcaatcttgatttgtgaaattatctatatttgtgcttaattccatgtgtaagcttgatcaccttctacatgttttatgatctcaattcaaaatctgaaaagtgagaattgagaatgctaaaattggataatctaggttttgatgtgaaacgaaagtatttgcatagcctttgtgacatttagattattgcttaatgctgatttcatgttagtttaattaagagattaattaaagaacatgtgatttagaacctaaaagatctgaaaagagttaggttaatttataatctgtcattcacttcaagaaaaggatagcaattaggcattaacaattgtggtaaactaacaacaggattctcctccctaatctctcatcttgattaatattcacttgtttctttaagtttcttgaatttctttcttcctttttcaatcataaatacttttgatttgccaaatagaattataagtatagtttagtagtaattaatccaattccctgtggttcgacctcacttgcgtgagtatactac

SEQ ID NO: 289219 - DNA, 844 bp, Cannabis indica
cttcacaacaaaagagagctaatggctatttataattaggacatgttgtaactaatagagttagttagagcacttgctaatgtggcaaagtccaatatcttttactgtcattaattataacaatatatgtgttgtaatattatgttgtaactaatagagttagttagagcacttgctaatgtggcaaagtccaatatcttttagtgtctttattaatcataacaatatatgtgttgtaatatatatatagttaatatcttatattatccttgtattagatttttaattctttatttatctttaatatattaggtatatgattataggagttattccatgattattatacacaacaaatcttatatggtacaaatttaattgagtttgtataaatacttgaatgtaatggaatgaagtaaaagaggctggacaattttgagatgccattatattttccaagaggattaagagaagtgaaaagtgtgattgaagaagaaggatctttttgaaggttttcaaatggcttgttgtggatgcaggtttcactattaatcttgatgaagatcatgacatgcataagagagggaaatatatttatgattactacatgagagcaagtggtgagcatattttggtgaatcaatattttggactacaagttattatatttgatgatgatagagtaacagaaatagattgttaaaaaagttagttattacagttgttatttgttagtttactgttgtaacaaacttataacagtttttggtttataaatacaagcttggccaatcagtttttgattgagcaaaattcagttccatctttttctttcttctctctc

SEQ ID NO: 289220 - DNA, 735 bp, Cannabis indica
ttttcaacaaactgatatctgaaagtgcaacttgttgattttaatgatccaaattaccaagttgattctctttagattgattgatttcaagaaatgaattatagacatgaattaatagtcaagcagtaaatcacacaacaatttacaagcttcatctgcactgagaacacatctcagccgactagtgcttgggttccccgaaccagggtaaattcatctactaattctcaaaggttcatattacaatttccaattctctctaaaggaatcaaatacaaccttaacagcaattagtaatgaattaccaacaacaatcaagaacactgattgttaatgcacaatcccttgtgcagcaactgagctcttcttcaacatgtcttcaacctgaaatcccttcagatctgatgatgaagatgacactgaactcccttcagtttgaactcagcaattccagattcagatcattccgccattgatgaacatcctcaagctccacgatctgacctgtaatcacaacaacaagaaacaagatacgactctatctccacacacaaccgaaataactgcctgaacgatttaatggataaagcaattactaacagaaaccgactatttatatatccacaaaataagtccacctggcactaactaatacttaactgaaactcacgtaacagaaagctagtgcagatataacagactaaaaacccagatacgactagacattgaacagaa

SEQ ID NO: 289221 - DNA, 733 bp, Cannabis indica
aagaatagggttcaagggcatcatgtgacgacgagatagtgagcctaacttttggcacctcacacatgaacgacaaaattcgttggtgtctttgaacaaagtgggccaataaaggccacactgtaagatttttgcagtagttttcttcacagagaagtgaccaccacaagcatcattgtgacaaaagttcaaaacactagacacctcatcatcagggatgcatcttcgcatgatctgatcggggcaatacttgaacaagtatggatcatcccaatagaaattgcgcacctcgaccagaaacttgcgtctatcttgtgaactccactcagaaggaagttcacctgttactaagtagttaaataagttgggtaacttagtaacaacaagcagttgttcatcggggaaatcatcacgaataggtggatcatcagcagaatcactaaattcaagtcgagacaagtgatctgcgacgacattctcaacacctttcttgtctttaattgtgatgtcaaattcttgcaatagaaggatccaccgtattaagcgcgccttagtatcctttttggaaaggaggtacttaagggcagaatgatctgtgaagatcgtaataggtgaaccaatcaagtaagctcgaaatttgtcaagagcaaagacaacagcaagcaactctttttcagtagtggaataattcatttgagcactattaagagttcgacttgcataatagacaaca

SEQ ID NO: 289222 - DNA, 719 bp, Cannabis indica
gaggagatgtactctattctcaatcactgccatgctttaccatgtgggggacatttcagtgggacaagaactgctgctaaggtgttgcagagcggattcttttggccaacactttttaaggatgctagtacttttgtgaaggcatgtgatcgttgtcagcgtacaggtaatatctcaaggagaaacgaaatgcctttaacaggaatcttggaagtggaattgtttgatgtgtgggggatagacttcatgggtccttttccttcatcttttagcaatctatacatcttattggctgtggactatgtgtcgaaatgggttgaagctgcagcaacaccagccaatgacggtaaaacagttctcctcttccttcaaaagaacatattcactcggtttggtactcctcgagcaatcataagcgatgaagggagtcacttctgcaacaaacaatttgaagcactcctctcgagatatggtgtccaccacagaactactctaccgtatcatccacaaagtaatggccaagctgaaatttctaaccgggagatcaagatgattttggagaaaacagtgcatagatcaagaaaggactggtcacgaaagctagatgatgcactatgggcttatcgaacaacatttaaaacaccaattgggatgtcaccatatcagttggtgtttggaaaagcttgccatctgctagtggaactagaacataaggcttt

SEQ ID NO: 289223 - DNA, 689 bp, Cannabis indica
tgcaaaccggctagccggtttgcaccagtttccccaaagcatttcatttgttgctcaatcttccaccaattgccatgaaaccttccagagcacctattcaatgcataaacaataaaacccagccagtatttcacaaaatcatcaatactcaagttgccattaaagcccaaagctttgaactcaaagctcaaggttgcacaaagctcaacccaatcaacaatatcagctgctaggaacttaaattaactcaaataacctataaaattcgaaccctaagcataaacaaacctaacagcccctatcaaaccaaaacaccatttcaacctaacttaaaagcttgaaaataaataaccaatagtctagggctttacctcacttgcaatagcttaaatccttgctgaaaatccaaggaaatgaaaggaagaaatctggttttgcctttgatttgccccagccgaaagcaagagagagagaggaaagggttgagatagttttctatgttttcctatttttctctaaatgaaataaagttaggaaaaatcctttttccttgctgaaaatagcttggctaggtgtcaactaaccaaaaagccacctatccatgatttaaataaaaagtccaaattgccctttgactcaaacttagggtatttctaaaactagggttaaaatggtcaatttccataacc

SEQ ID NO: 289224 - DNA, 528 bp, Cannabis indica
ctgggaattcctgaaccctcatccggaattccggtcgcacaaccagaattccggttcctcgcaagaaacatacaaaaattcataacttgctcaaatcaaaccaaaatcacaccaaaacttctagacctgttctaaataccccaaagaacaaatccaaagcatcaaaaccatccagaaaccacagatacgaaaaatgacatgtgagctccaagctttgagttcaaaactcaaacttggctaaagctcacctacaagcatcaaaactagcttatatctactcaatcacgcatataaaaactgcagaaaatgaactcaagcacaaacaatctctacaacaactaatttcacattttcactttgaaaaaccatagtttttgagctaaaattcacaactttaaacaacaccactaacatgcatcacaagcagctcaaatctactcaattaatcatgaataaacttctgtaaacatcatcaaaaattaacagcagcaacacaaccaaatcaagcatgcaaatcatcattttctt

SEQ ID NO: 289225 - DNA, 346 bp, Cannabis indica
aaatggttagaattggaaaattagcgtttttgaaaaaatagaaatgaaaattgttaaaatcgcaaaattccaagtggggcccattaacaccatggccggccacttggagaggctttgtccaattaatattttcattattttaatgtcaaataattactaaacttaacctagtggttacctataaatagatagtgatagatcacaccaaaataagagtttcaagtgattcaagagattgccttcagaaaattgagccactcactatccttctatagccgaccccctctctctctcttttcttcttctaatttcgaataccttgagtgatagagtagtgcccacatac

SEQ ID NO: 289226 - DNA, 622 bp, Cannabis indica
cgggcaaagccatgtttgcgattcggaccacagtcgaagatgagatgttggagcacatcaggccggcgaagacaccgaaggaagcatgggatacttttgcatcgctgttcaccaagaagaatgatacaagattgcagcttctggagaatgagcttctctcaatcaggcagcgcgacatgacgatcaaccaatacttcaccaaggtaaaatctctttgtcgcgaaatctctgcattagactctggtgctggcatgtcagatgctagaattagaagaattattattcatggatgggataattgcggcaaaagtccccaaaaacttgaggttgatgccgattagtcctcaacctcaaaaattggcggtgaaaatacctaaggtctcaatttttatttgtctgttggtcctttttctaacggatccgttaaattcaaatgaaatccacgtgtcaaatttttattggtccaaatcatatttttaattaaaaagaatttaaataatttaaataataattaatttattaaaaaatgaataaaaactttaacacttttatttttatttttattttattttttatttgtttttctccttcttcttcttcatggaggaaagaccacgatttg

SEQ ID NO: 289227 - DNA, 676 bp, Cannabis indica
gatggtgcattttacaacaatgatcctatagtagatttgaacgaggatggtgatgcggagttggaagttcatgaacctatagaagtaccttatttaaggttagaactacctccaccatctccaccacgtccaagggagcaaaggaaagaccaagaaagaagaacccctcggagtgaaaatcacgaaacaccaggcaccagtagcagccgcccaggtcctcctcgtagtactgtaccatctgattttgaagtttgtacaaaattcaaacctattgtgtggacaagggaagacatagaggaaaataatgtttatacaacttcttttactggtacacattcaggggaaatatatgttggcaagctgtatacaaataagactgaattgaaaaatgtggttggaaggtttgcattgaaaatgaattttgagttcatggtgaagaagtctgggaccgatgttttttatgcaacttgcaggggttcagattgcaaatggagagtgagggggaggaagagggcacgttgtgacatgtttgaggttactgtattccacaacgaacacacatgtagcctggattctagacatgctgataaccgtcaagcagcaccgtgggttgttggccacctctataagaacaagttcaaatcagatggaactaagtacaaagctaaagacatac

SEQ ID NO: 289228 - DNA, 572 bp, Cannabis indica
ctcacatgaacaatcccaattgtaaaggtctatttcccttatttaaataattgtattagactagttatactagtttagcctaattaaaattgaattagcaacatatttaattttgaaataaatgaaattaatttttcattggattattttaaattaatttagaaaaacatacttagtttaaagaaaaaattctagataatgatttctagtaactaatttatattttctaatatttaattatgtagaaaaatatatttaagttaaaaattaattatttaattaattttagaccaacttaaattagaatattttttttggaacttaaattagaattaataattaagttaattttattcaagatacttaattatttgtttctatatcaagaaatttaattaaatagtaaaatatatttaagttgaaaataaatttttaattaattttagactagcttaaattagaatatttttcttagatattaaattagaattaataattaagttgattttattcaaaatccttaattatttgtttctattttaataatttaattaaatagaaaattatattta

SEQ ID NO: 289229 - DNA, 476 bp, Cannabis indica
gctgatttcggtgctggccaatcccgtacagcttcaattttggccggatccaccatgattccatctttatccactatgtgccccagaaatgagacacgggataaccaaaactcacacttcttgaatttagcatagagcttatgatcccgtaaccgttgcaaaactgctctgagatgcaactcatgttctttatctaatttagattacaccaagatgtcatcgataaacacgatcacacatctattcaggtaatcttggaacgtccgattcatataatccatatcaaatatactacgtatccttggcccatcattcaccctgatagtgattcttgcatttcggacattcaagatatgacttgaaagaggatccgtgaccttgacggccacctcaatttccccgatgctttctatttattaccccctgatactccgaaagcctcagccttccgtttgtgatcagggttgccactgtcg

SEQ ID NO: 289230 - DNA, 874 bp, Cannabis indica
ataagaagaaaataaacttggctattagatctagaattaataacccaaggggttaataattctctaaaatacatgagtttatagcatagatagaaataccttgtttctttgccaaaaacttaggacactggggtttccagtggcccttgcaatagaagcactttcctttttgcttttaattgggattagcaacatttttcttattagctgtgttaacagctttaagaggctttttgctattcttccacttcttcttttagctgggtttcgaagcagaggcaatgtttgcctcagccttggctataccattagcagtgccagaactaggagctttcctcctttctgtggtccactaatcaaattctcaaatgtctgaaggttgttgattaactcgcggaagtcaaaatccaactagttcatgacataatttgatgtaaagggtagaaaagctggagtcaaactattcaagattaaactcagttgagttgtctgatctataatacctccattatttttagcttcttggaagtaactagtcatctggagcaggtgatcacgcacgttctgatgaggttccatccgtgcattaaaaaattcatggtcgcctcaaaacgagcttgaattgacgccatcctaaacagtttagtcaactggttcatgatatctgcagccatgagagtattggcaaaccttattttcaaggtgtcgaccatgctagacagcataaagtatcaagctttattaatagcattctgccaacgctcgaacttttcctgactgtctggtcgcattctcacctgactgctcaggagcctctttagtcaacacaatcaaggcattttcaccaatgagagcaatattaaagttctctttc

SEQ ID NO: 289231 - DNA, 812 bp, Cannabis indica
aacttctaaaatgatataaaataaacacatataaagtataagaaagcttacagtggttgcagcagaatatattgtctccttccactcaaatctctaacccttgtatcctttctgtcgcagagtgtcaccaagatctgagtctgaatgtccttctattgaatctggattcttcacgatcttacacactatgattgaggtaccacttgatgtgtgtgggcaatactctatcactcaagggtttcgaattttaatagtgaagaggaagacttaaagtggcggctaggttagggagagaaggcactcaggttttttcttgaagaaagatgtgttatatttttctgaagccatcactacctatttatagcaaaccactagggtagggttagaattatttggcatctcatgagtggataatgggtcgtacttttgcaattttgctgttttatcatttctgcatctcattttctcaaaaatgccaattttccaatttaaccatttaaatgccaattcaaattatttaataactaaaaattaattattaaataataatgtcatttaatatatctattaattagactaatcaaagtctcttaattaacaaatgtaccctagaaactttttcttcacaatttagccctattaatcaaaaccaattaattgagtcttacaagcaatattgtctcaactagtatgtggaccatgggcctatatatccgagcctccaataatcagaccaagaatttaccaagtaaattcactgacttattaattccttgttgctccacgcatagaactcagaattgcactatcag

SEQ ID NO: 289232 - DNA, 525 bp, Cannabis indica
atatttgttgatttaataatatttaagcattttattattattattattattattattattattagttaacctaaacctattacaatacgatatctcataatcttaatttttatcaaaccctaaactatgcaaaccaattagtcaaagcctcattcttcttcatggttgctcctctcaacccttcagtacttcttcttatttttctaccttcattcttaaactttttgatttttaatcaaggcttgtgggcttgagacatcacattgaaagttttgaaaaggtatgaaatattttctttctcaataatgctaaatgttatctagggttcaaacttattatattttttcgttttcagaaaaataagttttagtaaagttatgatatctctctcgatattggtcagttttcaacgatttttgtatcgttggaaagcttattcgatgatctacaatttttataaagaaactattcactaattcgatgatattctatgtcaaaaattatcatctttctgatgttgttgta

SEQ ID NO: 289233 - DNA, 548 bp, Cannabis indica
ttctattcgccgctactactggttcggcctggaaaacaggggtaggtgccactggaacttctggcacaggcactgcaggagcaccctgcagtctcaatttctgaatctcactatcttgctcctctattctggcttgcatttcagcaaacctaatttcccaattctgggcttcctgattggcttaggcagcctgggcagcctatggtgggttaacatcaccccgaccacgagccctgcccctgggacctctacctcggcccctaacatttgggggaaactaagctccctgaccttgatttgacctgaccgagtttccctgactcctgctatttcgccttgcgttcatctagtttgaacagcatgcgaaaccaagagttggcatatcaggtcatgatcaacgagagctgactaatgctgcttaatttgaaaattaaaaacattcgcctattctactatcaggctactaacatgcttcctatcaggcttttcttatttcataacaattaaaataagctactaaagcaataaaagcttactgaaccgtagaa

SEQ ID NO: 289234 - DNA, 723 bp, Cannabis indica
tagccttggccactgcaaggttgtaacattcccgagcagattgttgattccctctaagacaccctaccccgtttttggttgggaacttcaagcacgagtgaaatattgatgtgacaacttttaagtcatacaaggctggtcgccctagcattacatcaaaggctgaaggaacatccaatatcaggaattgtgccatgatagttatgctcgtcggagcttgtccaactgtgaggggtagccggatttgtcctagaggtgcaactccttgaccggagaaaccatagacaggctgaaggcatggagttaaatccttgagctggagccccatcttctcgtaagcagtcttgaacaaaatgtttgaagaagccccattatcgatcatggttctggccaccatttttttgctatctggacttccacgaccagcgggtcgttgtgcggaaatcttatctggacagcatcttcgtcgttgaaagttatggttggctctcctgcgcgtggaactttgggcttcctctcttccacggccaggatgacttcttcttgctcgtactgagctgttcgggcatatctctctcgagctttgcccgtgtctccagcgatgtgcgggcctccaataatgacttgcaagtgtccatttattggcggaggcatcagatcctggttgttctgaccttggttggccttgacatcttctgtaagtgcgggttgtttttcttgatc

SEQ ID NO: 289235 - DNA, 818 bp, Cannabis indica
gagcgagattggcttttggcaaaagttatgtgtgaaaaattgaagttgttttacaatgtaactgtgatgttttctggaactaaatatcctactgctaatcatttcttctctaagatttgtgaaatttggttgttgcttaaggagtgtcttaaatctttctatgatgagattaggattatggcattaaatatgatggataaatttgagcagtattggacttccattcatggcatattagccatagcaactgttttggatccaaggttcaagatgaaattgattgagtattactttcctaaaatttatgttggtgaatatcaaaatgaagttaagcgaattagaatgttgtgctatgatttagtgaaagaatataaatcgaatgatggaaaagaaaatcttcttgaacctttattcaatgcttctggagttggtggagataatgatggatgtgtagatgatttagttggttttgacttgtatgttagtagtacttcaaatgtggaaacttacaagtctgagttagacttatacttggaggaagcagttttgcctaggagtggagagtttgatattttagcttggtggaagacaaatggtcttaaatatccaatattacaacaagttgctagagatgttttggctatcccagtgtctacagttgcttctgagtctgctttcagtactagtggaagacatgtgactccttgtcgtaataggcttcatccgaacatgttggaggctttagtatgtacacaagattggctatgggatgagaaattaggtatctatcaattatggaatgaatttagttttatgtt

SEQ ID NO: 289236 - DNA, 512 bp, Cannabis indica
aaaatttcgattttaccaattcagaagatcaatatatgttcaaaaagtcgttttctcaattctcacttctcacaaaaaatgaaagcttttaacttaagatttttctcaattaaatgtgttaaaaacaatcaaatcatatgtttggtttgtgcaatttttactggaattactatctaagtaactaaatatagtataaactagtctaacacaatatttatttattcacataattagcagcagaatttgactcaaaattttcaaaaaggtaagaaatttatcgaacttaacgcaagaatatactcagtacccccaactaaaatgagacagtgtcctcaatgtctaaatatgtatatgataagaacatgagatgagatgagaaccgaaaaaaaacagagaatatgcacagtgatagatgttgattttctaaaaaaaaaaacaaatgacagaaaataaactaaaatactgaaaataaagaaagcaattaaagataggaccaatagtgaaagaattca

SEQ ID NO: 289237 - DNA, 887 bp, Cannabis indica
tgggttcgagttcgggtcctggtgcaggtctatgtttgggtctaattttgggtctgtgtctgagttttggttcggttctgggtttggtcctggtatgtgttcgtgtccaggttcctgtcctagtttgggtccggggcagatttcatgtccaggtcttggtccgacttcatattccccgatccaggtcaggtccttgttcaggttgaagtcccgaatttaaatcatggtctgggtttcggggcctaggtccttggtctaggtgccccatccaagtccggttccttggtcctagtctggttccaagttcgggttcaggtcctgagtcttggttttagtcgaggtcgcggtctgggttcaggtctagggctcgatccctatctttgtctgggtttaggttagagtccttgtcagtgtctagatgctggtctgggttgcgagtgtcaggattcagtgagggtttaggacaaggtcaggtccaggtcccgatgccgatcctagtccaggttcaagtcttaggtctcaggtcccaatttggttccgggtctgggtctgggtcaaggtttgtgtcagggtccgagtcttagtttgtgtctgggtacgggtttttcggatctcggtctgggtccaggtctgagtcaaggttcaggttcaggtcttggttctgggtcccaagttcgtgtctggctgggtctacgtctgcgtctgggtctaggtcccgtgtttcaatccctgtctaggtttgggtcagtatttcggtctgggtatgggttcgtgtccatatctaggtccgaattccactttaggtcaaggctttgtcttggtctgggatcgagtcccgagttcgtgttgaggttctggttcgagtcttagtcctagtctaggtctag

SEQ ID NO: 289238 - DNA, 809 bp, Cannabis indica
caattacaaaaaaattggatatccaattacaattggattggagtggatgctaaaagttggattttaattagattgattggttattggatatcaatctcaagatccaattaaaaaccaatccaatccagtccaattacatttatatatgttaaaaaattatttatatttatttatataataaaaatataatatatattaattatatttttattggattttatttgtgttaaatttgtaacagttggttgtttagtgtatttattttcatgatgttttgttctattttattacttaaaaatgatgttattttaattatttgaaacttttagttgcattacattgtaatgatgatatattcattgagtattaaacttaaatagaaggtaatatttaatttttacgtatttttctttatatttttatgttaacatatcattgttgataaatttacagatttagaattataaatgatttaagttatataataagaagagacataaaattagattatataataagaagagatataaaatatttttttatatatataaaaataaaaaattatttattataatttattcaagtgcaaaacacatacaaattaataatgacatctttaacttccaacaacaaatttactaaaacaacataatactgagtaaatttttgttggaaaaaaacacacatcaatttttacatactaaaaatctaataatcaaacataactaaatttataatcaattgatggattagcctgttagaaatttattgacgtcacaattgtatatataaaaatgtgtgttgggtca

SEQ ID NO: 289239 - DNA, 647 bp, Cannabis indica
cccccactcaattgtattaccgtgttcccaaaatgtacgtattaccctgatacaaaactaggcttaactaacaaatcaaagaacacgaataatactcttgaaattgagcctaaccatatcaggatttcgatcatgtgatctaggatcaacttatgatattgaattgaatagatgtttacggtaagtttcaaaatctaattcaaagttcaatatcggtccattccaatgcatactccatgcatccgatactggtaaactttgccaatgtcctggaaaggacataacacttttccaaggtgtaagaatacctatcgctgattataccatgtcagtctaaatccagtgttctgacaaatcagggaatcaacttttgaacatataataaagattatattccactgtgctgacaacactataatctttaaccaactcatatgttctggacttaaaaagaattcatacattatatacacatataatcatgaaataaatcatgtgaaccatgcaacataaaatgttatttctgatctttattaataagtaaatctgattatatgaaatgagttttatttagggcataaaacccaacaataaaacatatctaagacctcaacagcaggtgtctggtctaaggcatacaaaagcat

SEQ ID NO: 289240 - DNA, 680 bp, Cannabis indica
atggtatactgctgcaacatcatatgggctggtcactcattttaaattgatcattgagcctcactaaacatctccaataccagctggtttggcttgatgtttcataggcccaccaatcaccattatgaagatagacactattaatccacctcatccataaactatcttctttgttagcaatagcccaaatgtacttccccatggccgccttattccaagcgcctatatccttgaaacctattcccccagctgcttttggttggcaaataaaatcccaagcaattgcacctggcccatggtactcagctttggcattccaaagaaagttcctgcatatagcttcaatattggacacaactttcttagggagaatcattacctgacaccaataagagtgaatggccattaagacagaattgatgagaaccactctccccgcaaaggagagatttctagaactccacactttgattcttgctgtcattttctcagctaggatctcacattccttccccagatattctcttttgcaccaattaacaattataaaattgcattcatagaattaattaggtgatttagatgttacttgagctgtcgaaatatcccaaatgttcaaaaaagtacaatattgaatatgctgaaaaatttagtaactggttactggtttctgattccta

SEQ ID NO: 289241 - DNA, 533 bp, Cannabis indica
aagaagaggattttggcaagaaaaagcttggagtattgtgacaactccaatatgggtttttcttttcctctttcttttattctaaacttgtaatttttgtacaatctattatgagttaatttttattttgctagaattattttgttgacttaaattgtgctttgatattttgttgctatgtttagtgaattgattttgttcattcaagagtgtttattgtgcagttgcttacttttgcttgatcaccattagtaagtagtagctaatcttgattttggaaaaaatagggttagtggaattgcttgaatgatgcatgaatataactttggaaaaatgtggtttgtaaatggcataggaatatatcatttaccatgtatgacttgaaggaattgtgcttaaattggtatgcttaaaattaattgggcataggaatatgttaattaattagagaatcaaatcataaacactttggaaaaaggattatgacattttaaattcctagtcttatatatcaattttcaattttcaatccc

SEQ ID NO: 289242 - DNA, 656 bp, Cannabis indica
taaggttgacttggttgggcatgattcagatttggcatgttgaattggtttccttggttcatttgtggttggttttgtctccatgtaaaattgggatggtttctccaattaggattgtatgtgttataaaatgggctatcatttggtttaccatatgaatgtaatgcattagcctcttcgaaaaaatgtttcaagaaaaggacatgattgatcattatgacaagtactagcacagacatcttttttaggttgaacatgagaattcatagtttgacttatgactaaggcttctacttttcttgctaatttttcaaaagatgttctcaaatcagtttcttctttaatttcatattttcctcctcttttaggtgaattatttgctctagacctaggctcagaataattccattgttgtgaagtaacagacaattcttcaagagcttcccaagcctcttgcccttgtaatttcaaaaattttccggtatgcatagattgaatcatttgtcggtttgaaggggttaaaccatcataaaaatattttgcaagtctccatttttcaaaaccatggtggggcattttaataataaatctttaaatctttcccaacattcataaaattcttcattatctttttgataaaattcggagatttctct

SEQ ID NO: 289243 - DNA, 658 bp, Cannabis indica
aggtatttatttctataaactgatgtgttttagtgaattattatccatttggattattaattctggactactaaccttgtttatttgtttttcttcttacagctcaagcttcttaaactcaagtgctgtcttagcgagttggatttgaaagctggaaaatggggtggagttcgtccaagataaagatgaagctcatttatttatttaattttgaattaattgtttcaattttaaaacaatttggatttcaagtttgggattttattccctattattttctcatgatgttgcaaacaatttttttttaattcataataaagttttttttacaaataaattgtaatctatgagttgagcttcatttctttatcttataaatcaattaaaaattattatatttaccatgtttgtatgtgtatgtgtttttataattgatacaaattctatagttatttaaactctttacagagttattactacataaacactagatattatttctatgtttatgaataattgttaattctaaaacaattattaagaatttgtttaataaaagaatcttttgatctgataggggtggagaaaaattaagaataaatatgcagttcaacgatcttctatatctgatgaactctggattatattcaactccaca

SEQ ID NO: 289244 - DNA, 871 bp, Cannabis indica
atgaagccgagtatgaggctttaatcgcaggattgaagctcgctctcgagatgaaaatcgagtatttacaggcttttagcgattcccaaatcgtagtgtggcaggtgaatggagaatatctggctagaggcgggaggttggttaagtatttagccagtgtatgcgaactgatgcagaaattcaaaagagtaatcgtgtctcgagtaccgcgtgctcgaaattcacacgcagacgcattggcccgtttggcctcaaccagagaagccaaattgctcgatgtaattccggtagatgtattggctcacccaacgataaatcaagaagcgatcatggaaatagataccactcaagaagtcacctggatgactccaatagtcgcatatctagaaaagggcatcttacctgatggcaagatggaagcaagaaaactgcgacagcgagctgcccgatatgtcatatacgatggaaggttatatcgcagaagttttagtcagccgttactcaagtgtatcgacggggaagactgcgactatatactacgtgaggtacatgggggtatttgtggcaatcatacaggaggtaactcccttgctctaaaaatcatgcgacaggggtattactggccaaccttgcgacaagatgctttcgcttttgcaaagaaatgcgacaaatgtcagcgaatagccgcatatgtccatcaacctccaagcaacctacattccatcacaagtccttggcctttcgcggtatgggggatcgacttaataggcgaactacctaaaggaaaaggcggggtcaaatatgcagtagtcgcagtagactattttacaaaatgggccgaagccaaagcactcgcaaccattacagcgac

SEQ ID NO: 289245 - DNA, 500 bp, Cannabis indica
attttgtgtacatattaaatatatattaaaccataaacatgaaaaatacatgttaacataaatcacttcaaatctcttaaattgataactaatcagattgtaatgggttttatttagggcacaaaaacccaacaatacgatgattcacatgcccgagttctgatttcggaaatgctacaagaggacgctgaaattccaatctcaattgaagggtgcagatatgttagggacgtaccaaacatgttctttccttggcctaaacacttaattgtaacatctgaggtaacttctcttataaattaattattaatgattagtggagtttgaatatcttcaatattcaaccatagtgaagtaggttctgcgaatatatgtgctgcgatgggatggatgaacaaactactgttatatctgtgttatttgtcattatacaggcatgtttaaaatttttgggggcattcaattacagccgttatactgctgaaatttcggtagaattt

SEQ ID NO: 289246 - DNA, 373 bp, Cannabis indica
aaaccttacattgggtgcagcgggataatatgtctccttccgttcagatctctaacccttgtatcatttccgtcgcagagtattatcaacatctgaacttggatctctttctctcctttctgtaatgctgaatctctttcttgttgaatgtctttcttcacaatcttcctcactatgattgaggtatcacttgttgtgtgtcggcactactctatcactaagagtttcgaaattattcaaggaagaagaagagggtgacggtggcgggtaggtttagaaagagaaggctcaggtttttctctgaaggacacaagatgtgaaagtctgtatatttcctgaagccttcactatttatttatagcataccacatag

SEQ ID NO: 289247 - DNA, 589 bp, Cannabis indica
tttattgattggtataatgctcataagaacaccgttcctactcatgatgttaatggttcggatgttgaagttctagagcattggaccgcccctcaatttcctatgattaaagttaatgttgatggtgcaatcttctctaatgagaggcgttttggcattggtttgatagcaaggacagcggctggggttgtcttacaagctaagagtctactcaaagagggtgtgttgaagccccacgtggtggaagcaattggcataaaggaggctctgagttggattaaagacaatagatggacgaatgtggtggtggagtcggattgtttgagagtcatcagggatttacaaaagtttaaacatatggcttctccttatggccatatactttctgattgtatgactttgtgttcgggtgttgatgatgtttcttttaattttgttaagcgatctgctaataaggttgcgcatgctattgcgcgatcttctcttgttgaggctgattgtacttattctggggatgcattacccatggattttgcatctttagttttgaatgatttgatttaataaaatttcatcattattcaaaaaa

SEQ ID NO: 289248 - DNA, 1282 bp, Cannabis indica
tgagacacactcttctcttctatctttcaaacacaaagctagagagttctaaggcttgataattcctagaagtatttccacaaagccctaagtgtttcatagagggggaaataatcttcttggacaaaggtgtagaaactttgttcaagcttttggtgatccccatctccactttgggtgtttgttcttctttcttattttgttctattctcaagttttattttgttctcttgttctcctctaaacactcctatatatatactatcatatatttatatattgactatatagtattatatatattatatatacatactatatatacactctttatatctctactatatatcatctattatatatatattctatatcatatatatatatactctattatatatattctatatcatatatatatatacactattatatatacatatatgcttttatatagtttacatttacttgtatctttgagttttgagttgtaactcttttcttttatttgtattttgtgctttgggattgtaactctttatttaatatattgtccttgtaatattttgtttagagttgtaattgtcttagtcttttattcatcttattttattcttccattgtaatctctctattatttctaacaatcaagaagattattttttgttttcaatggaaggagaaactatcaagatgatgaaccaagacttggtgagattggaccgctttgatggcaccaatttcactaggtggcaagacaaggtgaggttcctcctaaccacactcaagattgcctatattcttgagtccaccttggagcccttacccgcacctaccgacaaggataccgatgaggtcaaggcacaaaggaagaagagagaagatgacaatcttctatgtagaggacacatcctcaactcactctcggataggctttatgacctatacaccgacactaaggatgccaaagaaatttgggatcaccttgaaaagaaattcaaggccgaggaggaaggtaccaagaaatttttaatttctcaatattttgatttaaaatttcttgatggtaaacctcttttacctcaaattcatgagttgcaagttattgttaataaattaaaagtgctcaaaattgaacttcccgaggcattccaagttggtgcaatagtggcaaaattgccaccatcttggaagaattataggaagagaatccttcataaaaatgaggattactctttggaagaaatccaaaaacatattcgaatcgaggaggaatcgatat

SEQ ID NO: 289249 - DNA, 535 bp, Cannabis indica
gagcaattgaacttcctccgcttcgcgccaaagaagagccactccaccacttttcccttgcgcatcaacactcactgccccttcgaaaccaagtgaaattcgaagcttctcaacagcatccttcttagccaacgtctcacaaagaaacaacacaatgggcttcttttggataacaatatcctttatgaattggatggcccatgggttcccaagcccatggcaattccatgttataatactcataatgataggtgggcttgggaaccaagacccacctttattaagttttttggcccaacaccaatatttccatcattttccatcataatacactcaccctctgccacctcattactctcaccagaaattccattttccatgcgcctccttttggaatctatgataattttggaaatatcttctccctccacctcagcattaattttgtcaacatgttgcatgggtgactcattccccaatcgtggactagatacactatcaatctgaacattcacattctttccttttataacac

SEQ ID NO: 289250 - DNA, 619 bp, Cannabis indica
aaactcaaacttgagcaaacccctcaaacatgcattcaaacctgattaaatctacctaaacaagcatattacaacctctgaaaacaactaaaaacatcaagcaacaacccagcaacagattatataatttctttcaaaaatcatagttttgagccaaaaattccaaactttgaacaaggtaatttacatgcatttctaacagcttaattaacctcaaattaacatgcttacatcacagaaattaacaataaaacacagcagtaacaacagccacaatttcatgcatgcatcaaaccatactttcttaaaacacaagaaaacacaaagagaagttataagtgatcaaaccttgacttggattacacaaaggggagatgaaaatcacaagatttgagcagaaaaatcccagccctagcagcccaagtcttggccgaaaagagagagagagagctttgagtgtgtgtgattttgaaatgttttttctaattttgactaagtgtagaaaatgagagaaaatgacttttaaggcatataacacttaatttcagccaaataatacataattaaacattttattttcatttagcaaaatcacaaaaagacaaaatactaatggggc

SEQ ID NO: 289251 - DNA, 737 bp, Cannabis indica
tctaacgggttagaagtacctttatatttgagggattcggataaacgaaacccttttggaagttgggcctgccgcacttctgcggtaaaaggcgaagtgccatgcagcttgtatataggcttacgctgctgctcgagcatcttcaaagcttgcagaagcatgctttgatcaattcctcctgtcgcaggggttggagtcgctgcgactgcggggctcgcaactactgcggcaaggttcgaggggatattaatcccagtggtcgcgatcggcgcgataggcgggttgttaactgtgttgacaccctgatcgcccgtatggggatcatggagcgtctcagtgttatgtgggccgcgggagcgtgccctaaaaactgcgttgaggtgatcacgcagatcacctcggtgtacacgataacgtcctccctgctgtgtctgtacagagccagacctcgtatacctgctcggagtgcggccatgcgaggatgaagaggccgattctgcgtcgttgtctcgagatggacgactgcgaggattgcggcgctcaggatcctcgtcgatttgtgcgctctggttaggaaaccttgcagattgatctcttgacatcgggtgattcaagtccagagcttcagggtcagttcttcgttccctgcgtacacggttagtttgacgtctggaaactgttacctgagggttttcgttgcgaatggcaggaactcgaggagggcgtcgagctcgact

SEQ ID NO: 289252 - DNA, 592 bp, Cannabis indica
aacaaacatgtaacaaataactggaaagtaggttaggatatttctattttaaaataaaatatttaaaatatatcttaactagaatttaaaatttaggttgttagacaatatctcaaaatctaacaaatcacctaaatatccaaaattctaactgaaatttaaatatctaactaattttcaaatttttcagtttatttaaacaatttaaattaattagttatctaataagataatataatataatatcttaatataaaatttagatatttctaatcttataatttaatatatcaaatataacaaaaataaacaatttaaaaaataagatatttgatggttaggatattatcaattctatttaacaattaaataaaacaaaatatcctaagtttgaaaagttaacggttagaaaccctaaaatatttattcaaaccaaaattaacaaattttttaaaatttcatgttattttacaaaaaataaaattttaattaaataaatatttaataagataaaatatcaaaactaatatattttcaaatcttataatttaatttaataaaataacaaattttgaaaatatgatatggttag

SEQ ID NO: 289253 - DNA, 617 bp, Cannabis indica
atcgtggtatgccaggtgaatggagaatatctggcaagaggcgggagattggttaaatatttagccattgtatgcgaactaatgcagaaattcaaaaaagtaactgtgtctcgagtaccgcgtgctcaaaattcacatgcagacgcactggcccgtttggcctcaactagagaagccgaattgctcgatgtaattccggtagatgtattggctcacccaactataaatcaagaagagatcatggaaatagataccgttcaggagatcacctggatgactcctatcgtcgcatatctggaaaaggggctcttgcctgatgacaaaatagaagcaagaaagctgcgacagcgagccgcccgttatgtaatatatgaccaaaggttgtatcgcagaagttttagtcaacctctactcaaatgcatcagcggggaagattgtggttatatacttcgcgaggtacacggggggatttgtggcaatcataccggaggtaactcccttgcattaaaaatcatgcgacaagggtattactggccaaccttgcgacaagatgctctcgcatttgcgaagaagtgtgacaggtgccagcgaatagccacatatacccaccaacctcc

SEQ ID NO: 289254 - DNA, 541 bp, Cannabis indica
ctctccgaagaaagacctgagtaggagcagtccgttcataagggggaatcctaacccactccgtgaggagctccgaatggtccaccgctcgaaacccggaagagaagaaaaaacgatggcgatactccttaacatgagtttgcctattaaaacagaccaccccatcattggcagggtgggcccggaacccataaaaaccgtccttaagtttgtcccccttcttggggacggaaacaagttcataaaaatacaatatctccgccgggctgggagagccccatccccgggcggagtaaaaaataaataagcctgagagcaggcggtatgcttgaggaataagttggtatggcgcaaggccgacaaaaactaaaaaattaacaaagtagtcctggagaggaagcatggccccggccatcaagtgcgtctggctccaagccccgaagccgccgtagttgtgattgggcgtctccgcatcacgaggtggccggtggtacgtcccggatgtggaaggcttgattccagctacctccacgatgttctc

SEQ ID NO: 289255 - DNA, 755 bp, Cannabis indica
gctaccgatattagtagtaggagttaatggttaaatgaaaaatgaatttactcaattaaaaaaaaatatatagaagagtgggataaaaaaaatatataaaagaagcatccttgtattttattggcaatgacaaggaaactgcctatctaaaatcatagttaaataagtcaataatatatgaagtcaataccttgaaaaaattaaatttaattaattaagccatatatgtttaattgttatcatttataaaattatttccattgttaaaaagttagatgatgtaacatactttatattttatgcaatatactatagtagatgctcatttataaattttttttttttttctaacttattccatgaagcatgcatctttaatcctgttggtttagattaatcaaaacaacaatacgtgacaaaaataatataaaataattaaataaataacaaataggataaaaatatatgtaaaaaataaaataaaataatataaatttatttatttatttctaaatttatattatattgaaataaaagtgctatagctatgacaaataataataataatgggaattatcatatatattatttttttaacttttttttttaaaatttaccgtttggaatttttaaagtagttgtcagcgctagttgcaatagggatttctatataatttttgtttacaatttaggttgcagcgctagtttcaatttagtttgccagctctagttgcaataagagtttctatgtaaaa

SEQ ID NO: 289256 - DNA, 636 bp, Cannabis indica
ttatgctcatgttggtactcatttttctaccctcatgttttttgcagttgggctctggtgaaagaccctgaagtagccagacgaatgaccaaattcgtggagctcaacacgattggtgtgtctaaggactcccagatccgagctgccaagatactcgaagttgtagcagacagctgcgagcaatcaggcagctcggattttgaagagtccttctttgagttcagttaccatctcatggaaaagagatggcaacaactcagagagactgtgagcaagagcggaggcatcttcagcttgcctcagttttctcctgccttctgccatttccacagtaaagtcctgcagcctcatcctggtaatgaaacaatcaaaaagtgttatatgatccaatactaattttgcatgaattaacatttatttaatgataatgcctacttaacatatgcagctttcgcttggctgagatgtaaagatggcattgaggactgcgaaagcttccttaaaggccacaaaatattgacacgaggagggcggcattttggcgcgagctcgagttatgttcgggttagcatgttggatagggatgatacttacaaaatgtttcttaaaagactgtcctctatccgctgatcatgg

SEQ ID NO: 289257 - DNA, 607 bp, Cannabis indica
tttgaattattgtgtctacgatacccaaatattccaatacaatctccgtaattaataaattacgctttattactcattaattcatatttccctaatcaaatcatgattagcttaagtaggattataatcctactctaataacccataatcacatatttaataaaatatgtccgattaaaatatcaatatatttttcgggatattacatcctcccaattttatctcccttataactaaatgtctctccactgtcacctaccaactttccttaaatggtcaactatcaactgttttctcatcttcccgtggcatccgtcagggcgatcccctctctccctatctcttcttaattgtggctgaaggcttatctgcagccatccgtattcaagaggatgctgccctgttctctggcatcaaaatttgccgaggtgcaccctctttttctcacctcctttttgctgatgatagcatggtctttgttcctgtcacttctcaatcctctgaaaccataaacagaattttgcacctttacttccaggcttcaggccaatctgtcaatagggataaatcctcaattctcttctctccaaatcctctcctgattcac

SEQ ID NO: 289258 - DNA, 324 bp, Cannabis indica
agagattctagggtttatttgttaattaagagtctttattaagtctaattaataaatatgttaaatgaaaattttatttgataattaatttaattatttaataaatagttttggcatttaagtggttgaattggaaaaatgatatttttgagaaaataagataaatagttgaaaaaatggcaaaattgtaaagtggagggcccacatcagtggccggccactcctgctgctccagacgcttgattatcttctgatttatgttgttttttaatttcacttttttttttatatatatgcggtacaagggtactcgcacttctgtac

SEQ ID NO: 289259 - DNA, 631 bp, Cannabis indica
gaaaaagaaatctaagtacagagaaagaaagaagaagaagagagtacaaagaagaagactaagaagaaggagaagaaggcaacctacaaagagaggatttgagtttcaaactcatttctcttgctctcctcttcattttgtatcattttctactctctagttttctctttaactccatgaacatttcattttctggtttgatgtttttaatttcagctatgaactataatatttgagatttgggtggttataaacccttgtatggactagtactttgattttgcagggattaagtaatcttttctttgttcaattagttgtgatgaaatgttgattgaatgttaatttttggccagctttaacatttagcaagctagatcttacttggaaaagtaagacctagttgaacccatctaattgatgcatgatttttacccttttctttaggtattaattagtagtgaaataggcatattttgctaccatgcataactaaggatttgatgctttattgaactatttgtgatctaatctgatgtattgttgagattatgaatggttaattgcaagtttaggaaaaagcttgctggttttttttttttttttgaaatctgttaactctgccaggatt

SEQ ID NO: 289260 - DNA, 645 bp, Cannabis indica
ctgggtccaggtcccggttattgtgtgggtttaggtcccggtctaagttcaggttcgagtcctagtcttggttcgggtttaggtctctttttggtttttgatctgggttcgggtttgggtttaggtcctggtcctggtcctagtcctagttcagttctatttccatttgcgattatgagttcgagtttgggtttgagttagggtcggagttcgagtcctggtctgagtttgggttcgggtccagatttcagtctaggtccagattaggctccgggtgtgggttcgagtcctaggtcttgtctagattggtccgagtcccgagttccaatcctgatctcagtctggattcagttctgggtctaagtccttgcttttgatcctcgtctgggtttgagtttgggtctgggttcgggtctagctttgggtctaattctaggtgttggtttgagttcgggcccgagtttgtgtccgggtttgtgtccaggtctggacgccgatctgggtcaggttcggctccaggtccaagttcgggtcccgagtgcgggtccaagtttgggtctgggtcaagatctcagtccagatctaggttaagcatttcgatccaagtctgggtatttgtccgagtccatgttcatatccggatcc

SEQ ID NO: 289261 - DNA, 607 bp, Cannabis indica
atctttgacaattcacctgaaatcaatatttagagtaagttttttcctttatcaatctatatttggtcttattctacatagtcttatttaacatttaacatagtgatgttatatgacttacagtgaacacttagaagagataaaacttcagtacccagatggagatcataacattttacacaaaaaaattttccagcgatggtttcataagaaggtgatatgagtgattcaattatgatttgaaaatgatcatgattaattatgagtcattctaagataattttgttcatttagatatatgatttacacaagcttggatcattggagaatggtgaagagttgctagctttagcatgtgggtcagatcacttagtaacatattatgaaggggttttagtgaatggtgttcgttacatggtagctgaacgtgataagaagcgtactactcagaatagcggtgtctccgtggcgggaacagaaggattcaattattatggaaccttagaagatgtgatgatgttcactttttgtggtgtgtattcagtgacattatttcggtgtaaatggttcaataccaatccacagaggaagaaaacaatcattgaga

SEQ ID NO: 289262 - DNA, 736 bp, Cannabis indica
ttatggtacaaaattatattacatatgttacatgtaatgggaagttgtttatattgaaaattaattaacactttatgagttttactaccattttgtagtataattattttaaaaaataattatttataaagaaaataaaaagggtaactattatcctaaattgttttccatctttttattttctcacaaattaaaaaatatatattttgttaaaatttttccaaaaaaaaaacataaaagtgaaaatttctcatgtttaaatcacatatatgtatgatagcattatatatatacatatatacgcacaccatttttttttacataatatatcaattttttttttttaatacggtgaacagagcaacacatgaatatcatcatatttgttatttgattgagagaaaatatagaaagagaggcctgacataaatgaaattaatcaatcataatggccaataaattaaagttatgtttattgttaaaaattaatattgactaatttctttggttgactattctactatatcatcttttatgcttattaatggcgtaccgttgtagtaattgctcattattcgttaatcttatgcatttatgtgtgtgctgtgtatataaatttagagaattactaaaaaaatattattggtatttagtattatttttggtgttatattattattggtgtatttaagtatcgaatcatttcatataacttaaacaattaatttttaaaaaa

SEQ ID NO: 289263 - DNA, 593 bp, Cannabis indica
ctactatcggctactaacatgcttcctaacaggcttttcttaaatcatactatagaaaataactactaaagcaataaaagcttactaaattgtaaaacgagctgactgctgatgataattatacatgtcctaacgatattcagaagacaacctggcggctctgataccaaattgtaacaccctaactagcatatgcgtgttatcgtaattttaaacgtgctgtgcagctcgttggtaatcaacgaggttattgaaaatcatgaataattaaaatttgcttatttaattaaaaacttaaagtattacatatataatatttagggatcccgttgacaaaatactttaaaaaagtttactatacatataatcaaaagtttgtcgcctagcgactatacagcaaaagcctcgatgtcccaaagatcgtacgctccaagcctaaccgccccgacatgtacaatcttcacctggtcgtacatacggctccttaactttagccttgcccttacctacacataaagatagcactgtaagtcgacagactcagcaagaaaagcataacatattacatacaaataacccgggttataacctgg

SEQ ID NO: 289264 - DNA, 542 bp, Cannabis indica
atagagtatgtataaaaaaaacttaattaaaaataaatgattaatatcatttttaataacaacaataataatttgtaagttcaattctaaataacacgttacatattatgcataaatctctaaattaaatactacacattgtctaaaaaaatacaataaaagactactagttaatttttatatatcaagggaagcaattgacttaaccactgttgtcgaagcggtaagagatgatcgtcctcaaaatattgggataggccgccaaactgtcaaattaaaaaaataaaactaattaagaagatagtacttttatatgtttgtatttatagtaaaaatgagcatatacttacttttgcttttatggctgtaataggatttgaatgttgaagcatatcacgaatgtaagttagtacatagtaaccacattcgtaattgtatggttgctttggacaagcaaaggtccatatctccggtccatttttgccaaatacaatagcatttgaactaatatttgcatatgcactgttaaagacattaaaaaa

SEQ ID NO: 289265 - DNA, 552 bp, Cannabis indica
tataaataaattttacatgcttgtattctaaatactgtatggaatattgaacaaatcaaatacaataccaaaataaaattagtaaaaacttctcaaaagctccaagacttaatcatcaacccagtacactatccaaaatagtcattacccactaaaataaaatattagccacaaaaaaaagtagaaaatagaatgaaaatattcgttgaagttgttatcgttgtcagattatcatcgaaaaattcgtcggagttgtcttcattactggaaagtcaccattgttagacattggagttgtcactggtgttagacattagaatttgatacactgaaaccagttacaataatcagctagttaaaactataactgagaaaccaattatttaaccgaatcaaaaactaaaatattagagccagttacgtaaaacaacaaaaataataactaaaaagggaaacaagttaccaatacaacctaaaataatcaaaagataaattgaaacataaaaactagttttcttaaaaaaaaaataaaactaacacttaaattgcaga

SEQ ID NO: 289266 - DNA, 204 bp, Cannabis indica
aaataacatggaatcaagatagaaaaataacctataatcacaatacaaactcaacaaacatgaatcccaccaaatcatgcaattactcactcaatttactaagattaaaatcaaaaatcaagcacatgcaacctcaagagaagaatcaagtaatactaagcaattcacaccaaaaagctagaattttcaagagaaggtcaggat

SEQ ID NO: 289267 - DNA, 348 bp, Cannabis indica
ctactctatcacttagaggtttcgaaacagagaagaagaaagagagagagagaaagtggcggctcaggaaaatttctgtgaaaggaaaagaaagcaattgtgatgtgtgttttcctgaagcctttaccttctatttatagaataccacacagggttagggttgaattacttggcattaaaaaatgaaaaattaaatgataaagggcaactctagtggccggccatggcaatatggaaacaagccttcacttttgcaactttcctattttatcatttatgtttcccattttctcaaaaaatgccaatttttacattcaaccatataaatgtcaattctaactatttaat

SEQ ID NO: 289268 - DNA, 547 bp, Cannabis indica
ttcctattttcttgcccactgtcgcctcagtgatggttacctctgcggaggaaactgaggcaacaccgacttctcaacctcagagaggtaggaaggcaacaaaagggaggaggggaacaaacacttcaccttcaccaaaccctcttgaaacgagggaattagtaggaggcaccccgattaggcctccgatcgtaatctctgtcaaccgccaaggtcaacagggggcatctattgagatcaatgaacaccctttattagatgaggggtgtaggacgcctttctccttcccaaagaaggctagaagcgatagtgtaagggttcccaaagcaagccctaactcattccgaagagaacatggtgactggatgtttctccagggataccgaccaacaagggtcacttcaactgttaagcctacctcctacacgggccctgtaactcgatcgagagctcgtgccatgcgtacaactcctattcaggaatcagtgaatccctcttttcaaaaagttcaagaagaggggtgttgtacatctgaacactctttaga

SEQ ID NO: 289269 - DNA, 537 bp, Cannabis indica
ttttttgtttttgtcctgatttattttgtttatattgatacaggaatgggattatatttatgaccagaagaatctattcattgctaaagccttttccactgctactttccaggtgatagagaacattaagtcttgtctttcagatgtacagcttgaaatgttttcaaaaacctgttttggtcatttccttaaccttcccgattttaaagttcaaccccaagtgtttcatgggttgttgctccgggaggttcagcaacctaatgatgctgagttgtgggtaatgatacgcggtgttaggcttaggtttagcattgaggaatttgcattgattactgggttagactgtgaaggtgactgtagtgtcttagattttaagcaagaggttaatagtctttgtgaaagatattggccaacttcgtcctctatcactaaggaatctgttagggaatgttttaccaccaagaggtggggtgattctgatgaggatgctgtgaagttggcagttttgtatttcgtggagtggttcttgcttagtgg

SEQ ID NO: 289270 - DNA, 693 bp, Cannabis indica
gtgcggatcggataggatcacttgcccgcaagggatatggctctgataccatgttgagaatcatagggttccatctcaaaactaattggtaatgagtggagtaacccatgttctttatatatgactcaatactctaccatctatttcatgtgggataatgtccacaataatataaaagtgcttattcagagtcgttctagttgggataacatcaaacaagatattccactaaaaaactttgtggcgctctattgttaaggggtcctcatcgctaggaaaatcattcaagatgggtcttgtaccattttggcaaatgggaaagatgttgatttatggtaccaaccctgcatcccgtggctgtcctatgaagatttctgtgatgtgatggaaaaagcctggactaaagcccccatctcagaacggtctttgaccttctctggagcagaacctgtacctagatgaagctactcggttgtgttgagattctctagggtgcctgattgcaactattgagattaataagaacctccttcgggatactgttatctagaaagactctaccaaaggctccttctctgtcaagggagcttattggctgaccaatgtaatcgtttcagcaaccagagccaattggagatgattggaataacggtatccatccgagacgtcagtcttatcctctggcgtgctctc

SEQ ID NO: 289271 - DNA, 563 bp, Cannabis indica
gtccttggcctttaaaattaggtcaaactcaacgaggtcacggtcactttcggttgccacgggttctcccccatccctgattcccatgacatcctcaaacagcttcgacgatagttggatcgttcttccaaatatctccagccgagaagtggttggatccacgtgatcgatgagccaactaactatcttagcatcgatgtacggggcatcctcccttaagaatgtagagaaaccggcatttctgaccatttctttttgagcgtcgttgagaagtgggactattctacccaaacgttcgaaggagcaacggccagaaacttgaacatcccctaccccttcattgttctcaatccctggctcagcagataatgtctcctttaacttcttccctttccctctaacaccaaccttcgagggggaagcctcaacttcatatgaagcccacttctcaatctcttcctcactaagcagcttaaattgctccttaaaactaccaaggacctgcaatattaagactctcgattattaagtaaagtacgctaaataaaagataaaaaataaaa

SEQ ID NO: 289272 - DNA, 589 bp, Cannabis indica
catttttgtttggaaaatatgctttactttctgggttcgggtattttaaaggcttttttaggaatgtatgctagtaggtgtttaaaggctttaccctgcatatgtgttttaggtaagtaaacctgggtaaattcatagaatatgacctgtaaactgacataaccgcacacaattcataggcactgtttcacgtcttgaatactcgcggatattcggatgaacaacttgaatattcgctggtgttcagatgaacagcttgaatactcgcgtattgccaagatttacttccatttgactgttagctagatcttttaggatttttatatgtcgcgggctgagttgcgagggtatcaatcgccgttccaaatggtgggtgtatctcagtattctaatggtcatatatgcgattatatgccccttgagatactgaggtacacccagccatttgcaatatgcgatgatactcaaatgatcgtactttttggctgataggtagtctcggaacggtgggggtctcccagtaacttcagggttatgctcgaaaacgcataccccttgagtcactgggaaactcccagccgtttctgga

SEQ ID NO: 289273 - DNA, 285 bp, Cannabis indica
ttcttgactttacagcctgaacacaatcaatctccatgatacttatctcgatgcttgtaatgaatccctagtctgttgagtgaaccgtgaggtctctcccccacttcatctgttggcgtcctcgacaatatgcccacacgcaaatgcctgactgcccaactcttcatgcacaccaagcctctaaaagtgcatcccgcagaatgtgactctcgagtcaactatctcatatagcacccccgtcgatttccgtatgcatgcaatgtttgaatttattttaccaggatc

SEQ ID NO: 289274 - DNA, 594 bp, Cannabis indica
aaggactcgaggaagtcaacagggcaaaagaacaggtggagctcgagctcaagaagtcgcaggacacgatcgctgagatggctcgcgacttggaggctgagaaagagagtgggaagaaacagtacgatcaggctgtgtctgactacatttacactactctttccaaggtccctgacttcgacttctcgctgcttggagctgaagctgctgaaatggctgaagcctttcgcgcgatgtctcctacccagactcaaggtaaccttccggatgaaatcgagggagtacaggctgaagaggtcgagaatgaagtcgtgagcaagattgcagacgaggctgctcctgatgagactactcccgttgcttgattattttctatcttactttttttttatctgcggtacacgggtactcgcatttctgtacttaaagaaatttatcttactttttggacaaatttctatcctcgcagggatagcttacattttaatatttacgcagtacacgggtacttgcgattttatatatatttaactttgatcacagcttggtgtgaatgcaattatatatatatatgcgactttaattacagcttgg

SEQ ID NO: 289275 - DNA, 595 bp, Cannabis indica
tgcaaactagaattgagcaacaagaagaagagatccgacgactcaggcaacgggatgctcctgttgagcctcccccgcaaccgcctgctgcggctcctatagctcctgcagcccctgtggtgccagctgagcaaaatattgctggtaaccgcatggagcctttatatgaaaggttcagaaagcaagcgcctccagtatttctgggaggccctgatgttttaaaagctgagcagtggttgaccgttattgagaaaatattgaattttatgggagtagttggaaatgatagggtggcatgtgccacatttcaatttcaagaggatgccctgatctggtgggaaatggtatccctcaccagagatgtgaccagaatgacctgggaggagttccgggaattgttcaacgccaaatattacaatgaggcggtccgcagtgcaaagcggaaggaatttattgagttggtacaaggtgagggtatgtcagtgactgaatatacaaccaagtttgatcgcttggccaagttagcctccggaatcgtaccaacagacttcagcaagaaagaaaagtatttggctggattgaatgccaaaatcag

SEQ ID NO: 289276 - DNA, 474 bp, Cannabis indica
ccagagtttataaggaggcttaaggtcatcgtggcctgaaagtgcatgaggaataagtcgacaaaggtttcccacgtcgatatcaaggcctcaggaaattgggtaaaccaatcgtgggcattttcctcgagcgttgccgcaagaatgcggcattttgcaagctgtggtacctgatccacttccattatagtattaaatttttcaagataatctatagggttagaggtacctttatattttagggattcgaatagccgaaatcccttgggaagttgggcttgtcgcacttccgtagtgaaaggagaggtcccatgcagcttgtatataggctttctttgctgctcgagcattttcaaagcttgcaaaagcatgctttgatcaattcctccagccgctggagtcaggactgctgcgactgcaggagtcgcgactactgcggcgaggttcgctaggatagtgatcctaatagtcgct

SEQ ID NO: 289277 - DNA, 734 bp, Cannabis indica
ggaacttgggactaggacccaacctagagcaagacccaggacgcgaacccacacccggatcctgatctggacctagactgaaataaggacccgaacccaaactcagaccaggactcgaactctgccccgaactcaaacccaaactcgaactctgaatcgcaaatggaactagaaccgaactaggactaggaccaggaccaggaccaggatctaaacccaaacccgagcccagatcaaaacaaagacagagacctaaacccgaaccgagactaggactggaacccgaaccttgaccgggaccaaaacccacacaataaccgagacctggacccagaatcaggatagggacctgggaaacagaacaaggacatggacctattacccgacaaagacccgaacttgaacctagtacccagctagtgacccagccgaaaatggaaccagactcggacccgagattgggatccggctctagacccagagcttggacaaaacctgtagtcggtgtctggatttgggacccagcccaagacccgaaccctgacgaggaccagaacccacacccggaccagaacacagtcccaaaaccaaaagttgacccgaacccgtaccctgtgaccctaaattggaaccaaaacaagaagttgaccgggactggaactaggacttggactttgaatcataactgaaattggacctagatccaaaaccgtaaccagaccagtacccggact

SEQ ID NO: 289278 - DNA, 519 bp, Cannabis indica
ccgaagaaagacctgagtaggtgcagtccattcgtaaggaagaatcctgacccactcagtgaggagctccggatggtccactgcccggaacccagaagagaagaaaaaacgatggcgatactccttaacatgagtttgcctattatacgggaccaccccttcattggcagggtgggcccggaacccgtaaaaaccgtccttaagtttgtcccccttcttggggacagaaacaagttcgtaaaaatacaatatttccgcagggcggggagagccccatccccgggcggaataaaaaataaataagcctgaaagcaggcggtatgcttggggaataagttggtatggcgcaaggccgacaaaaactaagaaattaacaaaataatcttgaagaggaagcatggccccggccatcaaatgcgtctggctccaggccccaaagccaccgtagttatgattgggcatctccgcgtcacgaggtggccggtggtaggtcccggatgtggaaggcttgattccagc

SEQ ID NO: 289279 - DNA, 639 bp, Cannabis indica
ggtgatgaagtccgccaaggcttggccttttatggagatgcgggggatgtagtgtaagtcgaattgacttaactccattgcccatttgaggagccttccggacgcttctggcttttgtaggacttgccggagtgggtgattggtcagcaccttaattgggtgcgcttgaaaatatggccttaattttcttgaggccattaggaggcgaaaaactagtttttcgatgatggggtaccgcgtctccgcccctaccatgcgcttgctgacatagtatacgggatgctgagttttctcttcttcccggactagggcagcgctgatcgcgtgctcgaagacagccagttataggaataggtcctctccgagaacgtgttttgacaggattggaggcttgtccatgtgttctttcaattttttgaatgcctcttcgcactcgtccaaccatttaaatttttggctcttcttcaatatgttgaagaaggggatgcacttgtctgtggaccgggagataaaacggctcagggcagcaacctttccggttaggctttgcacgtctttatgcttcttgagggatggcatgctcaggagagcttggattttttctgggtttgcctcaatgcccctttggctgacgatgaa

SEQ ID NO: 289280 - DNA, 577 bp, Cannabis indica
tccgggtgtgggttcaggtccttgtcagtgttctggtccagggcggggtcccaaatccagacactgactacgggttttgtctaagccctgggtctagatccagatcccaatctcgggtcggagtctggttctacttctggtgccgggtcttgagctgggtcctaggttcaagttcaggtatgggtcgggtactaggtcccgatcctagttctatttcccaggtccctatcctgattatgggtccaagtcccggttatggtgtgggtttgggtcccgagtgtgggtccaagtttgggtcttggtcaagatctcggtccagatctaagtccagcatttcgatcccagtttgggtcttggtccgagtccaggttcgtatccggatccatatctaggtccaactctgtgttttgaattgggtccaagattcaggtccaggtccgggtcttagttccagtctaggtacacgaccgtgtccgggcccgagttccagtctcagtttgggtctgaggctaggtgtgtgtttggttctaggtctgagttcgggtcctggtcacggtcctagtcttgttctagggtc

SEQ ID NO: 289281 - DNA, 280 bp, Cannabis indica
tttttttaattttttttatagaaatattaaataatttatcattaaaaaaataaccgatccaatccgcactattgcggattggattggattgatttaaactattatgcggatcagattggatccaaaatatgaaatccgcacttagtgcggattagatgttgtttgaccaaaaaagtgcggatttgatcggataaacattcctagccaaattactacaaattgcttgaacaataacaaatcaatctctctcaagaatcacatattgccaccaatgaacctt

SEQ ID NO: 289282 - DNA, 553 bp, Cannabis indica
ttcacttgtttcttaaagattttgatttaattttattttgttttaatcctgaaaattatcgattggccaaatagaatcataagtataatttagtggtagttaatccaattccctgtggttcgacctcacttgcgtgagtttactacttgattacatacacttgcgtactattattaattttcgcaacatattttcatagaaaaattttgtaaatcacataacatcatcaagtaacacataaaccaacatgaaaccatccaaatcaatgcaaatcatcgttttaatccatatttcatgaaagtgaatcattaccatggctctgaggtcagttgttggaaatattttaacaggatctagtttactagcaagtatgtttcattaacatcctaatatgaatttctaaaacaatgaaataaacacataagggtttaagaaaagcttacattggatgtagcggaatataatgactccttccgttcagctctctagcccttgattcctttctgtaacagaacattatcaagatctgaacttggatctctttctctccttc

SEQ ID NO: 289283 - DNA, 463 bp, Cannabis indica
acatagatatggaatctatagaatctatctggacatagaagtgaaacgatgatttccttcaagcttgactgaatagagataaatgattaagatctcattttagtaattacattagtttactaaaatatcatttataggtagctaagtgttttaatgataaaatatattaaagggttgatgtcacccaattagttacactgcggtcactgtagtaaacgggttatatgtcgtatccacagggaggtaaattaccactaaaaattagtataaatagaaaatgatagaaatgtgaatgaattaaaaataatgaaatggtgagtgaaaaggggatgatcagataaagagctttgtaaggtagagatatatttatgtaaatcctattctaaaaccgatattaattcataacgcaattgcaattctacaccattaattacaacaggaagatatatatgttatgcgcaca

SEQ ID NO: 289284 - DNA, 682 bp, Cannabis indica
attgttttccccaaaacacccttccccaatttcatcaactcatctatttccatcatcttccccgtaaacgtacatcggacccatcgggcccaaggcatcggccccaagcacaagccaaagggtgcatcggaccctatatcgggccatcgggccaatcgggcaatcatctttaacctccagccaagcccccatcagacgggcatcgggcccgatctgaaaaatttcattttcgacagatctcttcctaatcttcctaaatctaaccctaactaacaaatttcacacaaaattgtaatatattattatatttcatggatttaagcaccaaaaattaaaagaaaaaattggaaaaaaaaattaccttaaacattttgggttttgggcggtcggcgtgggtgatgtgggttgagggggacggtcggccgtgagtcacgtaggctggtcgactgcgtgggtggtctgcgtgtgtgggtgcgacgaggagaggcaacaccgagcgagagagaaagagaggcgaaagagagagggcaaatttcgaatggggggggggggtaatgtgggaattaagtaaatgttggcccattttaccagtaccccctattttaggtttagggaaaaaaattacccccctaatggtatgcataaaaacttcaaatttctctattgaaaacttgattataat

SEQ ID NO: 289285 - DNA, 640 bp, Cannabis indica
cactctctttttcaggaccagacatagggagaatagtgatcccaccaacaccagaagactctcgggtttcttgcaaaaatttaactgctccttcagctcgaagagccttatcaaccatttctgcataagttgtggtatcatttgttgtaataaccaggtcatgcctgatcttggcattcagcccagccaaatacttttctttcttactgaagtctgttggtacaatcccggaggctaacttgccaagcgatcaaacttggttgtatattcagtcactgacataccctcaccttgtaccaactcaacaaattccttccgctttgcactgcggaccgcctcattgtaatatttggcattgaataattcccggaactcttcccaggtcattctggtcacatctctggtgagggataccatttcccaccaaatcagggcatcctcttgaaattgaaatgtggcacatgccaccctatcatttccgaccactcccataaaattcagtattttttcaataacagtcaaccactgttcagccttaagaacatcaggacctcccagaaatactggaggtgcttgctttctgaacctctcatataaaggctccatgcggttaccagcaatattttgctcagctggcacc

SEQ ID NO: 289286 - DNA, 656 bp, Cannabis indica
tcaaggtaatccctagcttttctatttgagtttttcttagtctttgaagtagattttatagctttaggcttgaattaggggctgtgtgtatgtgtttggtttgggctcttaatctgaagttagataattgtagattttgttgttttaagctgagtttgttggctattttggtgtttggatggaaatttaagttcaagagcttaggttggagctctaatggtggtttggaattttatgtgattttatgggttctgttgattggaattggtttatattattgtattcaggtattctggaagtttttagaaagtttgggattaatttgagttgtgggggtcggatttttggttcccagttcagaaccggaattccggttcctgggagcctgtgtcaaccggtcgaccggttggtcccaggaaccggacttccggttgggaaccggcctgccggttgggactttttcccgagccctagtttttcccgtttttaagtaatttagggtattggcatcctttttatcgatagggttaagcttagtttctattttaaatccccgtaatgtgtttagcgagtctctcatcggattttgaacattatggtttagggccctgtaaaacgtcgagctgcacttccactcaggctgaccggcacacttg

SEQ ID NO: 289287 - DNA, 877 bp, Cannabis indica
gttttattttattaaatctaatgggaatataaaatgaaaaatacgttagtaaaataatataaaaaaaatacattaaaaaataaaaaaaatagttaatattaccttttaatatatatatatacaatcacataatgtattttttaagatatatgttaacccaaaagataactctctctagaaagaacaaatatcctcatatttaaagttttttttcttttaattctatgaaatccacaaagtaatactgtacaaacaaccctcacacaaaaatgactcaggtaaaagaagaaattaaatagtgatatattaaattataaatattataaaattattactattttaattaatttgtttgaagaatttgcattttattatgatttataacacaatcaatatatcaatatcaatcaatatcaatatatacatataaaggaaagcattagggagttgaggtggcaatctatatgtgttttctatcctattctttattttcttaatttttatcatttatttattttttcaataataattttaactaaatatctattattattatcaatagagtaactcccattcacatctattattattaattaataatagtgtaacttataactacatttaattactaatgtatgatatattaatataaaaataatttattactttatgatatataggaaagtaattattataaattggaaagcattatttacattttctctctattaaacaaaataattttcgggcatgtggtatactatatttttaaaactaaatactttttgatcatattttgactaaatctaaaaaatgtactcttatatatgcaaagtgaaaaaaaagaacaagcaaaaaaaaagattaggtaatgtat

SEQ ID NO: 289288 - DNA, 519 bp, Cannabis indica
tcggtaccatcattgtcatggaacctcaacccaggaaatcccactgtctccgcgacatccaccatatcaaattgctcttcctcctcaataattcggaggcgttgttcctccctagtgtaatctgggacagagaacatcacattgaatgcgtcagcagtggcgggaactttctttccacgaaccttcacttccccatttcgacggtcgggccaatttgcaaggaattcacaggccatagtaacattagcccgaccccgagtatccacaaaacttccccacttcattctttcaatttgcgctctgattgtctcaaaccgaggttggcgcctcaatggattttcagggaattcaatacccctatcttcaatataggctctattcttcaaccttacgaagcgattgtgagcctcgatactaccaaagcgggttctatcaaaacccgttggtggtgggttcgaagacgaaccttcttcaacattccttgtcctctttggtgccattttttttctcttttttttt

SEQ ID NO: 289289 - DNA, 302 bp, Cannabis indica
gtatctcgtttacaatacatgctataatcatgcgagccgttatttattcagattgcatataactttttgtttgagaaagaatctcacttacaatagctaatttaattttctcttaaagaaaaggtttttcaatcctttcttttgtgatttttttttttttaattttttaggtttaaaaaaaaaactattaggatttttgctcctgaattttgacatgtaccaaatcatgtctcgtgaactttgaagattgttaaaaatccccccctaaactattgagattattggatttaaggacttttgtg

SEQ ID NO: 289290 - DNA, 619 bp, Cannabis indica
ggttcaacttattggaagctcaccatataggtccatggtccccattctagtttagactatactgtttgtaagactcaataattgatttatgattaatcaattataattctaaaagttagactatgtctaatttgtgaattctcacagtttaaggatgaaattgtaaataaaagggtttctaggtttaattattaattaagagactttgcatgtctaattaataattattttaaatggcaatattatttaataatctattttagttattaaataattagttttggcatttaaatgattagaattggaaaaatggcatttttggagaaatagaaataaaattgaggaaactgcaaaatccatgtgaggcccatacacaccatggccggccacatgcttgcatgtttcccaattattattttcaattttaattgccatgtaattgctaaaacctagtaataataggaaagtggtggatcacactaaataaggcagttaatcaattacacagtaaaagaggaaactgcctatttggaaagttgtgctctcccttctccctatataaagcaacccttgttctcttctcttgtatgctgataacccacgaaaataagagagaaaa

SEQ ID NO: 289291 - DNA, 617 bp, Cannabis indica
atggtataattcatgagagttcggcaccacatacaccacaacaaaatggtgtagccgaaaggaagaatagaacatttcttgaaatggtcaattctatgatagtgtactctaagttgaacaacaaacttatggggggaggcacttttaaccgcatgtcatattcttaatagaatacctatgaagaaaaatgacatgtctccatatgagttatggagaggaagaaaaccaaatattggttacttcaaagtgtgggggtgtcttgcttattgtaagaagaccgaaccaaatagaaccaagttgggttcaagggccataaaatgtgcatttgttggttatgccaacaatagtaaggcatataggctattggatgtggaatccaatgttgtaattgaatctagagaagtagaattttttgagaataagttgtatgaggacaactctcaaagttccacacctctaggtgagaatattttatatgaaaataattctcaagcttctacttctaaaagaggatctcaagaggagaacactactaaagttgtagaacaacccattgaacctaggagaggtcaaagggtgagaaaagagaaaagtctaaataaggatgaaatagattc

SEQ ID NO: 289292 - DNA, 589 bp, Cannabis indica
gaggtcgagaaggagaatgggaagaaacagtatgatcaggcagtttctgattatatttacaccactctttctaaaatcccagacttcgacttctctatcctcggagcagaggccgctgagatggccgaggcttttcgcgccatgtcgcccactcaaactcaaggtggtggagggaatcttcctgaggaggccgagggtgcggatgctgaggaagtcgagaacgaggccgttagcaaagtcgcggatgaaactgctcctgctgctccagatgcttgacttttctatgtttaaactgttatgctttttgaatttgctcgtttagtttttatgcggtacaggggtactcgcactctgtacttagacaaatttgcattttactttggacaagtttatatcctcgcggggataattatcctttaacattttcgcagtacacgggtactcgcgtttttaatatatatatgcgactttaattacagcttggtgtaataagtagaaatatttacaagtcttgacaaaatttgaaaatttaacaaacatgaggcatttcctttatataatcaatagtacattatggcatatatacccc

SEQ ID NO: 289293 - DNA, 566 bp, Cannabis indica
attgttaatctgtaaagataatatggctggaagagatggaaaaattgattttatttcatttattatgtatagaatgttttttcttttttgaataatattttttttgttcaactaataatgtttgattcatattaaattttttctataaaaataatactttttctatattctgcatagtaaaaaaaaaacatcacacctatatatagttatgaatacatatatatatataaataattgaataattatttaattttaatattattaatttagtttatatttattattatgtatttttaaaaaatatttaatttaagatagatattttatagaaatttattaaaataatagtaaaatattttgtaaatttattctctaataaaatattaaaaaaattgagagaactaaggagaaaaaagaaaaataagctttaaagagattttagaccgccacattaccgcctcatacttctcctttatatatatatagattaatttttttttgacatagtgatgaagatcactattggaatatacgatgttggcatctgccatcgaattaggatagct

SEQ ID NO: 289294 - DNA, 563 bp, Cannabis indica
ttttccctgatgctttgaatttctaaacctgctatgtctctgtcagtttgcttgtgatttgcagcaccagttttcatggccatttcatgttctttgaaaactacatccctgctgataatgcattttctgtggccatcttctaaacaccacagtttgtatccttttaccccttcagggtaaccaaggaacaaacacttgagagctcttggctctagtttgtcttgtctggtatgtgcaaaagctgtacaaccaaacactttgagatggtcaacacttggaacatgtccagtccagacttcttgtggtgttttaaatttcagggctgtggatggacacctattaattagatagcaagcagttttcaatgcttctccccaaaatttcttgtcaagtgcagcaccctttagcatgcaccttactctttccaatagagttctattcatcctttcagcaagtccattttgctgtggattcttcacaacagttttgtgtctgtcaatcccttctaattgacagaatctattgaactcatcagaacagaactcaagtccattatctgttct

SEQ ID NO: 289295 - DNA, 573 bp, Cannabis indica
ttagtatgacgtctagaatttgttacttgagggttatccgtgcgagtagcaggaactcgaggggggcgtcgggcccgattttgtccatctacttcggcctgtagcgcgcgcagttgatcctgaatcgcagtatattgatcagtggtgagttggatgattccctcggataccactgccggagtgacagggggaaaatgcatggttgctggtggtgtggatgtgtccccgacttgagggtcagtcgtttctgggaacaagttgagaggtctgatattgcctctccctactccgccgttaatgacgtccacaggtggcattccagttccagataacggtacgttcatcgtcccaatgttgatggacccgttgttagctcctccgtttgtgtgatttccagccatgatggtattttttctttgaaatgaataaaatcttagtcgttcccacagacggcgccaaatgttgtcgagtgaatttcgcaacaccaaattatataatattattagtaacaagaagaaatttatgtggaaagacaaatgcgagtattcaacctagaatggcgagtactcgact

SEQ ID NO: 289296 - DNA, 1005 bp, Cannabis indica
ggtcagcgccttgactaacatcaaacagctgcctacaaagaccttgaaaaactatataaagaggttccgagaggaagccttgaagaccaaaaagttgatgacggacaacagctcgcccttctccaggcaggcatccgtacagggactccattctggaacgaactacaacaggaaggagccgcaaaccttcaggacttccagaaaagagtccaaaaatacatcaacctggaagaggcccaaatagtggcctatggaggatactatcccaccgggatagcagggtatatgcccggagccccgccatcgggtactgtcccgaccgcgactccaccaatgagcggcatacaattctctgctactcccggatatagtcagggccaggccttggcccccgcatcgtcccattttggaaatccctcagggataaatggacaagctccctcgcactccgctccaaccgccagcctggcaggtccttcccagggctcaaggagtaaacgatcctccaaaggcagcacccggacggaggagaaacgccaaaagagggggtacactccacagtacacccagtacacggagttgacggactcccaagagcgtgtgtactttgctactaggcaaaatacgcactaccggagaccacctcccttgtacaaggatagctcccggagggatcccaacaaaagatgcgagtaccacaacgacattgggcacaacaccaatgaatgtaaaaaatctcaaggatgagattgaaaacctaatccgattggggcacctctatgagtggatcaagaatcggctgcctcacattaatccgggtcaggcgacaggggttgtgccgcagggagcaccagggggtgcagcaggagtattggctccagttgctcctaccggagatgcccagcatatccccggtctgccacccagacccaatgggacagtggccatgatctcaggaggaccccatattggaggaactacccgcaaagaattgaagcggtatgc

SEQ ID NO: 289297 - DNA, 548 bp, Cannabis indica
gctcagaaaatgagaagaaaggcagcacggtacatcatcgtagacgggatcatgtacagaagaggattctcaatgccattactcaggtgcgtcacaccaaatgaagctgcacggcttctatatgaagttcacgatggattctgcggaaatcatgcagccggacagagcttatcaaagaaaattctaaggcaaggctacttctggccgacaatgattgaagattcgaaagcctacgtaaagaagtgcgacgaatgccagagattttcaaagataccaagagctccgcccaacgagctgacgcagatgcaaagtccgtggccctttgccatctggggaattgacctaatcgggcaattacctaaaggtaaaggcggagtgcagtacgcagtggtagcagtcgactactttacaaagtggactgaagccgaaccactggcaactatcacatcaaagaaggttcaagactttatagtgaagaacatcatatgccggttcggactaccgtacaaaatagtctcggacaacggcaagcagttcgacagtcaatc

SEQ ID NO: 289298 - DNA, 636 bp, Cannabis indica
tttagtggactttatttagttaaattatatgtttattaatattaattattggctaaaataaagggttgggttgcatgtttactctttttattcaatatcaaagttagaaaaaattaagaaaaatcattttctctgaaactctctctctctattttcggccctctttgagcagtaagaagctggccatttctcttagtttttcaagcatttctcaaccattctagtgtaattcaagttattggtaaggttcttgaacttgtcttgatgttcttgaagtttttaagaaaaaaatagtaggttgcatgcttagttttggtttgttattgttgctgtgattttatgttgttttctgaaatttaagcatgcttgattgtgtgaaatgaaaccgatgttgatgcatgtgttgaaatttattttaccaggatcttagatctactcacaagtatgttgtttaaacaccctaaatatgaactttctaaaacgataaattaaacacatataaagttaagaaaaccttacattgaagcagtggaattaatgtctccttccgctcagatctctaacccttgtatcctttctgtagtagagtataatcaagatctgagcccgaatgtcgttcttcttcaagtttgatcc

SEQ ID NO: 289299 - DNA, 540 bp, Cannabis indica
aatcattcgtattaactgcactttacctcttattcaatatttactcagcaacaaattcaagagtttctcttatctctatgacgaggagcaatttatagcatcacttacaaatgacatactcattgttaagagcttgcctgaaaatttgaaagcagccaggaaaaaaaatgcatttcctacttttaagcccaaaagatcagcgaatccaaagttctatcttaaagaagtgctaccagcattaaagaaagccaaagttattggtttggttattacagatggtggatgtctgcaggtaatttatccttataatctctcaaaggtcattgagttttccaagaaataattcgtgtttctttagctaccatggatttactgcaatgatttggaagtaattttcctacaatagttgcaattcctatctgtagtgtgcatctcaaatttgtgaatgtcatatcattttaaaaagtagttgttgaatctattaaccatatcaggttgcttgttttctagggtaaacaattaccaaaacatgcttttatt

SEQ ID NO: 289300 - DNA, 706 bp, Cannabis indica
gcataagtacccaatgtttacaaaactgtaattttcttccagtttcatcagtacagactctgtaatgtcttaaacaggacacatataagactcaaattctagattatttggtctggacgaaaatatgtagtatcagttacttccaaatctttttttaataaatttaaaacggagcatggactggcaaaaatagagaaaaattacagttttacaaacattgggtatttatgccactaaaaaaaatcattgggttcatgccgcttacaaacttaaaactttaggtacttatgctgctatttacccaaaacgtaaaattgctccaaataagagtaaaactaaattaaaaacacattaaaattaacctaaaagtaatactaaaaataacctaacaaccttaaatttagaaactaagttagtaaatgtcatttttaaaaataaaaaaaaataaaaagtggccaaatataataaattagctaataaaaattataaaatacatttactactgttgcccctgattttgcccaatatacgtggaccaaccagacaaggacacgtggatcaaacaacttatcatacaaaatatttgttaagtccttatgtaataagacagcatccgggacacgcctcccggatacggcatatggaaccccatatgctcccggaagccccaagtaacgctaaggcatctccgcgaggtgtcaggttt

SEQ ID NO: 289301 - DNA, 545 bp, Cannabis indica
ctcccactcaacagtaggagtctggttaaattcatacataaaagtacatttaaccgcttactattgttttgagggatatcttgttgtgacatattatcttagtctgaaactgtaagttcctttaagagtaagtcatcaacatagcaatcttagtatttcaaatgaagtgtaaaatacttactagagattaagtaatcaatagagataccattaaaaaatttatgaggattaggagtttttgcccaagtcattcgaatagactatgcaagaactctactatcttattctcataattctgataaattatttctatccatatgaatggttagatttactttctcagtagtgttcttaagttcctatcacaagtgtcaaccaaatgaagatgggtaaagaattttaaaattcttccactcaattaaggtagtgtgatacattgtcaaagaactttattggtatcaatttctattacaacagtaaaatattaatttgaacataaaccaagatcaagaatatattctgataatttgctaattcaatatatt

SEQ ID NO: 289302 - DNA, 674 bp, Cannabis indica
tagttgaaagaaagtggaaaaaaatctaactagaaagaggtcccattaagtgtacgaccttgtgtggatttttgcccaatattttattcttttttttaatccatataattcaaccctaagccttcgttgaaacactatacaaggaacatgatactctcactcatccaacaaatgtcaacttgatgccttcaaccaaatcaaacctagttttctatgttagacaactagttgatgagagaattccttccttagtaatttcagcctccttcattgttcttcaccatatttgaaaccttgagggaatgagtaatgtgcccatacatagcaagtcaagtactcaatcatagtgagtaagatggtggtaaccaaacccgaagaagagaaagagatccaggttcatatcttgataatgctctgctacagaaaggaatcaagggctagaaatcttgaacggaaggagtcattatattccgctacaaccaatgtaaggtcttcttaaacccttatgtgtttattttcattgttttagagatttcatatttaggatgttaattaacatacttgttagtaaatttagatcttggtaaaatattctcaacatccggcatcagagccatggtaatgatttactttcatgtaatctggatttaaacgatgaatattatttgtgtgtt

SEQ ID NO: 289303 - DNA, 542 bp, Cannabis indica
acttagggaaactctagaaatactcttcaggatttatcaagccttatatactcagcctagtgtctaaggatgagcatatcctcacaaggttctaaccacaacaaatagtttcaaccacttctttaacaagtgaacaatatgacctctatttatagagtttttcactcccatatgaacatgaatgaccaccataaagcccttggatgtcacaaattataaattgggcattgatagtattaaatgggtgattttgaggagttttggaatgctagaaagactcacaaacgtttgtgcttgtatgctgaaaaacagtaactagttactagtcaccatttcttttagctttagccaattcttctccctagtgttccaaatcacttccacttgattttgaatcatttatacaccttataaatgaataaatcaagtctccaacatctatatttttaatagctatcattcattcacattcataaacaattagtaacatcttttacttatttaagagtgaaaaagagatgagagttacatattcaagtgat

SEQ ID NO: 289304 - DNA, 946 bp, Cannabis indica
cttagaccatatacatacattttatataataggatattccaagtgatctataataaccataatttgtactatcaattcaaagcaaaattaacaaacttgataactcataccatatcttactaaatataaaaataaaacatgtatgggcatatttatctatatatttatgcatcaatcttttcaaggtttaattttatttgtctttaggttttaacaaaatatattattagtttcaattttcaagaccttccaaaagtctatatttatgcttaatattataagtatcatatatttatttcaagctcttttcaaaatatatataaatatattgaaaatttattgagactaattgtaatatttttcttatttgtaggataaaattaaaatatttattaaatactacaattagtaatattaaatatcaatcgaagcactattagcaataaataacatacaaatcaaatataaaattaagatattaaaaattaatttctaaatggaaacacaataatgtcaacaaaacttatgagaataggagtttgctaaaatcatctatactatcatcaatatttcataataggattacaaaattttgtttaatacaaccaaagactcattacaacttcaagattcaataatatcgaattaacaaaacaataattattatcgataaagattgatatgaaagagtaagttttgatcttaccaaatgaatatgaatatagtagaaagacacttcaaagagaacaatcacttagatttaccgcttaaaatttaagataaaatgaatgagaatcaaaacttgatcttcaaggttatgtgccaaaaccctctttctctcattaaactctccttcttcactctctttttcttgttgtctctcattgttcttacttctcacattttgtttaagggattattttacaaatacataaaacaacaaaaa

SEQ ID NO: 289305 - DNA, 571 bp, Cannabis indica
aaagtaaacacataaaaggtatgagaaaccttacattggttacaacagaagtatatgtgttatcccaatttttgtactttgacgtggcatcactcgatggtgacacgtggaatcgactccaggtatctgcttgcaaggcacgagccaaacaggagacttcgtgcatttgctcggacaaagtcctttaaaccgagcagtgggcaatccgcacagaatgccaacacttagcgaattcaacttttgcatcgtgagtcatcaaggaaattcctataactttgggatcaaattacagagatatggcaacctgtccaaatcccacgatccgtgtattttgtatttactatgcaatctttctgcttatatcaattgtaacgagaagggaaagactattactgatgcatattcactgggcaaagggtcaaaaacattttggtcaaaagattttgtctaagaattcatattcagagatactgttgtaagagctataagaaaaggaaccattctccttgttcttaagtcaatacaaataacgaggattaggctattactgaactgctcagggctgaacctc

SEQ ID NO: 289306 - DNA, 414 bp, Cannabis indica
ttatcgaatcttgaaatgcattttatgtcatatagttaatttcataattttgcatttccggtgcccggtaacatggaactcggcgtttgactcagtaaaatcacaacatagtatgttagtattaggggacggttatttagacattgggaatgtcgagattggccacgaatttagaatttcccaaaataccctttagtgccctttatgttattttagtgtggaggggcaaaatggtcattttgcccaattgatgttttctccttttatggacttagtaattggaaatttaaatgtttattatgttaattgttggctgaatatagagttggtattgcatttatcctttattttcaaaaattagaaaagttaaaagaaaaaccaaaattttctcaaagctctctctttctctcttgt

SEQ ID NO: 289307 - DNA, 692 bp, Cannabis indica
aggccatgcaagttttggggaagaagtatggccagtgcaaagggactcgattccctcgaatgttgaactggagcacccccgacacagtcacgaaacatgatgtgaagcaagctgatgtggctgcactctttgagaaaagggtacgtgaatctttctctattttagcgcaattattttttgctttaagtgtaatctgtgttatatgcgatatttgatgcgatattttgcgatatttgtgcgatttactttacagtgcattataaatgttcagtgattaataagttttttggcgactttgtgcgatcatagtgcgattttgtgcgattttacttgcactccttataaatttttacttgtatttgttttatttgtttagcgactttatgcgattcttgttgcgattgttgtgcgatttgttggaagtctcatgttttccacttgtattttttgatattttttgtgcgactgtatgcgattactgtgcgattttgtgcgattttcgatgacagtagcaaatatacttttctatgtatatgtaatagttttttggcgatatagtgcgatttttgtgcgatatgtatgcgatttttttagttttatgcgatttatttgcgatttttgtgcgacatatttgcgatttaccatgatcttgtgtttttgcagatggttgtgcttcaaatcttgtatcctcg

SEQ ID NO: 289308 - DNA, 706 bp, Cannabis indica
agtagtgctgattgttagttgattagtggtttatttactaattatttgaattgtcttcttatttgatatgtgtaaagttgttagagaagcgtgataagtttttgatataaggttgctaagtatgtctatgcatgtgcggtaatgcttattagcattaattctagttagaaagattttaactatgagaaaggattgatcacgggtatactaggaggtatacctgaggtgatctagtaagtaaaattgagagcctactaggctcggggtaggtagtgtgggtataaatcttcctaccacagggctgagagcaaatgaatgctatgaagtaagagattatctgagtgacactatagtagaacctgtatggttgatttcgggcagcgcaataatggagaatgatactaagctagaccgattggcaaagttttgttaaaatgcaacgactactaaggccgctaggaaggctttaaggtggaacaggtatattgttcagaatgtagatattatggttaaataattaggagttttctagttttatgctcaggtgattgagctaacccttactgttgagggtataaggattagatcacaaaggaaataatatgaagagagatattcatgaaagtaaatgtccagtgttggattggctaaaggatgttaactttaatgatcttgacaaaaaaaaacccattggttacgggtccta

SEQ ID NO: 289309 - DNA, 721 bp, Cannabis indica
gcagtaacggagcatgccataacgccgtactaatcagagaagaaaatggcgtgcatcatccggtctattacatcagtaaaagactcgtcgaggatgaaggccgatatctgttgatagaaaagctcgcctactgcctcatcttagcaacaagaaagctaagaccttattttcaagctcatcctgttcgggtgtacaccgaccaaccactacgacaaatactgcaaaagccagatgcctctgggcgattagtcaagtgggcggtggaattggggcagtacaaaatcaatttccaaccccaaacagctatgaaaggccaagccttggtcgattttttggtggaatgcacaggaaaaattaaaagcatctcagaaggcgatcccgagccaacaccacagccaaccagcactgaaagcaagccgacctagaagctttacgtggatggatcggccacagatcagctatccggcgcaggaattgcccttgtcacacctgggtgcaacacctgcatgcagcggtcaaattaggattcaaagcctccaacaatgaggctgaatacgaagtcctaatcggtggactcaaactagcgaaggaaatgaaagccgagcacatcgagatctgcagtgactcactgctagtggttaatcatgtatctggcgaatacgaggctcggggagaaaaaaatgatagcatatctgagtaaaaaacatgatctgctcgcaca

SEQ ID NO: 289310 - DNA, 894 bp, Cannabis indica
gttcctataaaagttatatttcaagaaattttattaacaaattttatattataacatatacacaataacttgatagtgtataaaattcggtgctacaaaaatactaatttatataactttataccaaattcccaagttagatactaaatatgcccattttcatgttttcatttaggaagataagaaaagtgctattataatataatatatatgtgacacgataagcttggaagagttgattacgcgtttaaagtttaaactaataaattagaattaatgatgatctatcttatgtgatttaatctcttaatagaagaattaattgttttggtgcctgttcaactctttgcttagaaaatttcagctgactgagttggcattcttggagctgtcttttataatattttgtttgtataaatatatataataattagccatctctatttatcgaaacatgcacgtttggaatatagaacaagtaatatatttataaggttaggtcagtatggaatgtataacttgtcctggatttagttagtttcttctgaatttgtaatgatctaatgaagatggtaagataagaacggttgaaatgtaataatgtgttattttctttgtatttgttttgacattatgctattttctttgtatgtatatattttttttttttatactgttattttctttgtattgatccttcctcgttatgaaataaagtgtatacgtatatattatcctataattaattaacctatatgtctattgacacatttacttgattttgtacttgtacgcagggacggatcgactttgattgatgtggggctatagccccactactaaaaatactgttttttaaaaaattaaatgcaatttttttattttataattata

SEQ ID NO: 289311 - DNA, 684 bp, Cannabis indica
tcatcaggaatagcaggcctacaggctctttgtgatcttctcaccacaacctcatcgtccccccaaatcaagattttcatcttgtactggatcttaaggttcaccatgagcttctattggaacttgttcaatcacagggtcattagtaggattagaagcggaagcggaagcaacaggtacagggacatagacacactcttccctgaatacaatttcctgacccttgatttgaaccaaattcatcctcaaaatagacagctcggtttgattccatcaccctggtggtgtgagagggacaatagaacttagaacctcttgaaccaatagtgtagcctacaaaactcccactgattgtattcggatccagcttcttagatttagggttataaggccttacctcagctttgcatccccaaacgtgaaaaataacgcaaaatcgatttcttgccagaccacaactcgtatggcgtctttggaaccgacttgctaggcacttgattcaagatataagcagcagtccttaatgcctcaccccataaaaactctggtaagctagaatgaattaacatacaacgtaccatatcaagaagtgtgtgatttcttctttcagcaatttcattctgctggggtgtacctggcattatatatatcttgcatcaatgccacgttcgtgcaagtatctgg

SEQ ID NO: 289312 - DNA, 680 bp, Cannabis indica
gaagagtttattaaaaatgagtatggaaaaaaagaagttgtggagaatagtgttagtactactaattaccatgatcatcttcatcatcatcgtcgtcaattcaaccaacaaattaggatttgtgggggtgaacaatcatggtaaagctcaataaactcgtcaatccctaaaaaatacggtgtgaagtattttccttacattagtgaattagatagtaatcataacacaaataaaaatcctaaattcaaatattattgtggagagtactactactgaaagtggggttgaagatattgaactagttttctatgaaaggctaatgaggtcataaaaatttcggtattggtattggaggagtagccaaagtttcgtctctacaaggggttggaatcgttttgtgaaggaaaataatttgaaggcgaatgatgttataacattgtatacatgtcataaatgcaacgtcgaaccacccctttcttccctcgccgtcttattccctctctcgatcttcctttcttctcgtccatcgatctccacccacccctcctcccgtcggtctctccctcctctctattgcatatgtcgaatcaccaccgcctctcgtcggtgtcccacttatctctgtctcatacgttggaccaccaccacctcctgtccgtctccctctctctctttctctc

SEQ ID NO: 289313 - DNA, 657 bp, Cannabis indica
tttagttaattttttttttcagaatgccaaatattaaaaaattaatgtaaattattaatgttactatgaattggacattaataagtaaaataattagaaaaagttaataaaaatttgaaaagaaaataggaaatttagtttctccaaaaaaaaagttaaagggccacatcacatgctttaactcaacataatatattaataataattacactattaaaaataaaaaaggatcataaatgccatagaacacaaactgttcttcttctacacgattaataataataataatcctggttatgctgaggcgttaggagtgaaagaagctctaagttggataaagaattcaaatatctccaacgtcacagtggagatggatagtcttgttaccgtccaagctctccggagttccataactatggcttctccatttagtagttgcatcgaggagtgcaaatctcttctttccaacttgaataatgttaattttcgttttgttaaacgatctgctgatcgtgttgctcatgctcttgctcgagtttcatggttacatgctgattgtagttattcggtttcctccattccgagtaacatctttgatgtaattgagcaagaaatgcattataaaatcatcatcttttattcaaaataataataata

SEQ ID NO: 289314 - DNA, 601 bp, Cannabis indica
ctctctctcgaaaatcctagggcagctagggttggtgttcttcatctttttcctttgattctcaactggttgtagtagtctcaagccaaggtataatctatttaactcctattcttgttttcttgaattttaagaaaatggtattttacatgaattagagttttgtgttctgtagtggctgttattatttgagttagttttctggagtttaaatatgcttagaaatgttgtttggagcatgaattaagggttgttagtgagtttaaccaagctttgagttttagaactcaaacttggagctttaatggtgaaattcaaatctgagctttgattgttgttttgctgtttggaatatgtttattggggtataatatgcaggtctggaaagtttggttgggtttggaaacgatttggttagggtatgaatttttgttggttttctaggtaaaaccgattaaccggttttacactgcttgtaaaaccagttactcgaattttgcagcaagggggaaactcgttttttcagcatgtcgttttgcgtctgtttcaggttcctggttggttggttccctgctagtttgggatattaccatattaagtt

SEQ ID NO: 289315 - DNA, 861 bp, Cannabis indica
gaacagaaatgaagaatcgaaaatgaaatgaaaacaaaatgaaaaaagagagggaagagagtatgatttgattgatgatgcatggggagagcacacgtgtatgcatggtatgatgataagtggtaaatgtgtaataaaaataactttgtaagtagaaatgtagtaataggcgtgtgagggtaattttggtaataaagtgtgtaaaaaggatttttcatgtaaaaatttcaaaataagggaggaaatctaatttaaacattgcatacactaaagtaatttatagagaaatttagtaaatgatcccaaatcatatgattatgttagtaaatattctcattttaaaacttgtaccaaaatgaccctttcaaatcatttattatttatattatcttttgtcacataaaaaaaaattaataaattttttctatattttttttagaatttggaaacgaaattacttaacgattatggtatatctacattagatttataaaaatctttttttttgaaaatataaaagaaaattatttgaaagttatgtcgatttttaattttttatgagttgttgtaggttgttgatatataaatttgttgtacagtgtatttttgttttgttgtatcgtatattattattcttagatgatatttattttttattttgctatgtataacagtggcatataattttgttagtataatataaatattttaatgtatatatataattttattgatatgctacatatatttaattattatttatatattttttaattgtatgatatatatttattttaaataatatttaattagtttctattttattatatacaatggtggtatataatttggttagtatag

SEQ ID NO: 289316 - DNA, 1015 bp, Cannabis indica
cacgatcctcctccatctggacggccggtcctgttcggcgctgggcaaagtggcgagccgagccacttgaggatctgttgcgtcagccagacgcgtggttttctttgtacaagccatcattctattgctgggtacagggctagaagaatgtccttcactagaggaaggcggactagaatgaagacgaggatgatcctcgtgcagaagttgaagcaaatcctagtcgattcgatgtccgagttcccaagactcaactgagttcatctacaaaagacaacacacaagatgagtgtttggtcggaatatcgaacaataaacaagcaaatatgacgaccaggagtactcaacagattaaagaacgactatgttcaaagaaaagtcaaaactcaagaagtcaaaaattttcttgagttagggcaaaaaagttcatgaagcttagatgagcaagatgaaagacggacgttatgcagttcagaaacaagcattatggctgtaaacccgcaagaagacatgataaagaagaatcgcagaggtttctaagcctatggtttcctaaacatttttctacagcacagtagaaggagcattcaaaatgtatacatgcaaagattagcctaaagaaaatcagaaacttactcaagattcaaatgtctgggttcgagcaacgtctatcgaacaagcagcttgtacgaaggcacttcggaaaacttgaaaccaaaaaaattttacttttcgactctgaagcttacttagcaaaggaagggtgatgaaatgaatttaagtgccaatgctgtgggtatttaatagaaaagtcacgaaaagaggtaattgtctcaaagaaacctcaaacgcctcagtttcccgcctcaaaaacgaatatgggaaatgaaaagtaatcgagtgaaaccgtcagccgtggagaaagaaaatcggatttcaaaatattaattgtcagaagcatttattagccgaaaactgatgggatgcccagtcagcctcacatcgagtctcgaac

SEQ ID NO: 289317 - DNA, 577 bp, Cannabis indica
caagtgctctcgtagatctagttgggagtaattgctggcagatctcgtctttctcattaaccgcgtcctacttatagactttgtttttaagtggcttgcagatttacttattcccatactctcccgatcattgactcgttgagtactttctcctcttcgagttgatcagctatgagttttagatcgcctcgaagtcacacttaccttttcacgctctattctttcctcccgagagcagtttgtcgtattttccccattcgggtacgtacgagtcctcgctctatgggtttgggaagaacgctggtgattcctagcaagtgatctccgttcccccggctaagttccaagatcttcctcattttcatgagggatttctcgttcatcagttttcggttgtctcctttttggctgttcatcctgattttcaagaggtgtctcattttccccgggtaattcttcccaggcctttttttgtctcctggttcgtgagccacgaggtctgactcgcggtcttctcactgcgccttttccaaacggcgtctcaagcggcgactttccatttcataagttctttctc

SEQ ID NO: 289318 - DNA, 605 bp, Cannabis indica
taagtgagattaatgagcttccaagtttaaaatccaacaaacacttttcacacactttgagccaaaatttgtgtttattcatcttgagtgtgcttgcttatcactctaggtttccattgtattatcataattctagagtgattttgcttgtaatatcaaacacattttcatattgtgattgaggtgaggttggcaccggtattgtaaacaacccggttatagtgagattggcacttcaacaatccgagaaagaggttaatagtcctcgggggtgcgaaactattgtaagaggtttggaaacaccttggtgaaaatttcccggttgtaagggttagtcaagcccgttaacttggctcgatattggaactcaaagctaggtccatagctttgaagaccaaggacgtaggtggcatagttctaccgaaccttgtaaaaatcgagagtttgcattttctaatccttaaactctttactttacaagtttgaatatttgttataatatattgcttgccatattacttgcttttatttgattaagtggttaattgcttaattttgtgttaaaagttttaatttaccgaaattagtttaaatttccaattcac

SEQ ID NO: 289319 - DNA, 514 bp, Cannabis indica
acttgaatgaagcaagtgaaaacctagatttaggcttttctttgtaagtgggataggaatatttcatttaccttgcataacttaccaaattaatgtttgaatagtgttctgcttgctggtttgatataggaatatattgagctaaatggtagaattaaagttgtgagtgttggaaaattctcacaagcctagaggaatttgttgttatctctgtgcagaatgctagagtaatgctgaaccgatgctgtactgactgtaaaaaaacctgactagaaggaattagttattcaagccatttttaccatattacaatttttatcttgcaaccaatttgttttcttagcagcagtagtttaattctaacaagtttaattcatgtcatttctaattttgaatcattactcaaccatttgcatattatttctttttattttaagttgtaattagttggttttacaagatatttttgtttgcaatccctgtggagacgatcttacttatcactttattactt

SEQ ID NO: 289320 - DNA, 574 bp, Cannabis indica
aaaattaaattatattttaaaattatgacaaaaaaattaaaataaaaattatatgaaattttctcagaaaaaataaataaatatttacatgagttagaaaaattatgaaaatgaaatcaaaataagtattaaaattaacataaaataatgtaaggaaaaatttaaaaaaatattaagaataattttaaaattatttaagtttatatttttttaataatggggtgtatttataattttatagggtgcaaatataactccccaaaggtaaatagtggcataagtactcaaagtttcaagtttgtaagtggcataatctcaatgtttatttttagcggcataagtacccaatatttgtaaaactgtaatttttctctaatttcgtcagtacaaactctgttattttcttatataagccacctagatcattgggtctagataaaaatatatagtatcagttactttcaaatgttcctttaataaattcaaaacggagtctgtcttgacaaaactggaggaaaattacagttttacaaacattgggtacttataccaaactttgggtacttatgccgct

SEQ ID NO: 289321 - DNA, 423 bp, Cannabis indica
aatttggacttaaaacgattgttatgtgatttggatggtttcatgttgatctatgtgttatatgatgattgattgatgtttgtcaattttcgtaaaaaataattgaaattatatttctggaattatttttattggatagtttgggaaaaattaagcaatttaattttttacagaactcaatttcgattttatttgaattagttatgaatttttaaaaatcggaaaatatcgggatggtgtcacccaccctacgcgcgcggatgagggtgaaaccctcggctgcacgcgctcagacacgagctcgaccgagcttcctcggtcagacaagatcttgtctaaaactcgtcccttgcgcgcacggacaagctacatgcagcctcctgcgccgagggacctcagtcaagcctccctgcatatgcgcgc

SEQ ID NO: 289322 - DNA, 998 bp, Cannabis indica
ctcctatgtagaggtcatattctaaatgtcttgtctgataggctatatgatctctacactaatactaattccgcgaaggagatttggaatgctttggaacaaaatacaaggcggaggaagaaggtacaagaaaatttttaatttcacaatattttgaattttcttttagtgatgttaaagatcttcttcctcaaatccatgagttacaaatcattgtgaacaagttaaaggttctcaagattgagcttcccgaggcattccaagttggtacaattgtggcaaagttgccaccaacttggaagggctattggaaaaaaatccttcataaaaatgaggattattcattggaagagatccaaaaacatatcctaatcgaagaggaatcgagattgagagataagggaaatgtgaaagaacctaaagatgagatttctaaggccaatgcggtctcaaacaagcatcacaaaggcaacaacaataataaaagtggtggaaaatatttgggtccaagaaaagacaatagccaattcaaagaagtgagaggccattgttttgtgtgtggaaaatctgggcactacgcaagagattgtaggcatcgtaaggatccaatgaaaaatgagattaataccatagatgatgaggaagtgattatggcatagtcatgcttatattgttttgtgagatgattgtctatgtattgacatatttaaataatgcttgtgaagctataaataaataaagttcatttcactttactctatgtgtttggtatatcattttgagaatgagaattttgtgtacaacaaatttacaaataattctattagtttgagtatattgcatgttaatatatatgtgagatatataatatatagcatgtatatattatatatgttgagcatgtaatacatgatatatatttgtgatgagaatatttatttatgagatgcatatataatatatatatcataagatgcatacaataaatatatatatat

SEQ ID NO: 289323 - DNA, 485 bp, Cannabis indica
ctatctagaatatatatcatttaactaagtatcttttcaagatttgaaaaatatctaatttaagttgttatagaaagaatctaaaataaccaacttaaaagttttccaaataaaatttaattaaatatcaaaattaagtggtaactacttaatttaagaatattccattttaagtttcaaatcaacttaaaaaaagatctaaagaatcttcaataaccaattcctcgaattcctcaacttaatattaaattcaaaagatattcaaatttaagttaataaggaaaattagttagaaataactaatttataacttaaataagaatatttaatgaaataattaaagtaagtttcagaaagaatctagttagttataattctttatttaattaaatacaagaaaaatacaatagtttatttagaaattaattcattaaactaagtgtgtttttcttaaattaatttcaaaaaaaaattgaaattaatta

SEQ ID NO: 289324 - DNA, 1071 bp, Cannabis indica
tgcctgcttcttcgaacctctatccaaacaaatcattgaggaagtcaagtaggttttgagtagaactttaatgtgaagtgcacccttcacccactggcacgagccaaactagctaagtgcgagaaaatcttcactctccccctaatgaagataaaatctcccctccctttaataaaccatgggagccccaaagttgttaccgagaaaatctagttgtcgtgacgatccctttcttagtggaggatcaaaaaatctttctcatcatcataagactgatcatgaagtgatggagaaacatggggagtaggggtacttttgagtgtaaggtaacgatactatctaacgttgaagtaaatagatgagctagttacagcgacgggggcaatcaatatttatagataaagttccatgataacaagaaaatagaaattaattgtccaatgtcctactcgttctcccctcttcaattcccaatgcacaacgtgatcttgacctatcatttgttccattttgttgatatgatacttagttaactctttgatctttatgttctgaccgcgcccaaatgaacaaaactcattttcctttaagggaaaagtggcgcataaaagagggatggcctgtcaaatgtctggttccttcatgaacgtagttcaatatcaataagggatgtaagaatgggagtgtacaactgaggtgcaaccccacttttttgtagcccacagttcactcttatgaatggagttcttcaccaacaaactatctggtgccacctcctctcattagtgcgatacaaacttcaaaacatgacgaaagggattgagaaaaggtatgaatatccatatcaatcaacatatagaaagaaaggagatggctagcactccctttccttcatgcttgtctatggtgaacctgtctcttccccaaatagcattccatttccttcaaacctgtcagtgtgaaatcaagctcccagggataggaaaacttgcaggaagagtgttacacttcaagataagtggaactaaagttgaagcaaaaaacccagttctctataaagccttcacgtag

SEQ ID NO: 289325 - DNA, 565 bp, Cannabis indica
ctaatatacacccttatcatctaacatataggtcactttcagagatttttcttgactatctcctaatgttccttgtttgattacatcttagatggctcccactcaacagtaggagtctggttaaattcatacatagaagtacatttaaccgcttactattggttcttagggacatcttgttgtgatatattatcttagtctaaaactttgagctccttctagactaggtcatcaacatagcattctagtattaacattaatgtaaaatacttgcttaaaattaagtaatcattagagataccataaaacatttcatgaggattagggattttgcctaagtcattcgaatagactttgcaagattttctatcttatcctcaaaattctaataagttatttctatccatatgaatggttagatttactttctcacttgaattctaaagttcctatcatgatcataacatagtaagctatcactattctcatccaaattaagatggtcttagaattttaaaattttcccactcaaataaggtactgtgatactgttgggttttatgcc

SEQ ID NO: 289326 - DNA, 623 bp, Cannabis indica
caaggttcttaccatctatttcatagataattttctgttagtgttcattaaacaataaattttagacattctcatcagcaaaaaaagctgaaattgtagccagacattttggttgtgtttcttctattctgattctgtgctcattcaaatacatgttgcagatcatagacattagccagaaatgtctctataaaacattgagagctggccatcaggttctttctcatctcttgctatattttttgtttatatgtatttcttttttctcaatttaaatgtgaatgagcgagcaatatcattgaaaatagaaaacaaagacaacgaggatattaagctcgaccttgatcaccaccggttctggaccttgcccagagctcgataacagaacattgtattcgatttgtattatattttttttatattaagatgggattatgtgctggctgctgatgtatatatatgcatgaaatgaatgggcaacatttctttaaggaaagataaaaggtctttctagattaaggaataaattcaagttgataaggggaatcggtcttgtgtgttttgtgaaagtttgggagttgaaaagggcatattgtttgttgatagagatgtaacattcaatc

SEQ ID NO: 289327 - DNA, 763 bp, Cannabis indica
atattccgtttgatcatttgatcttgtttttacttttggcctgttttacatttgtccgtgtggtatgccttagtacccccctgagtggcatgaaaactttgtttttaaggcactcagctttatttaaaatttagaggttgcatacactttacggtacaaattcttttaacaaagcctaagtttacatttttggactattggtaatacttccggagatgatcggcgttccaggcccttggcacaatggttccgtccaatctttttagcttataggttccggagccgatctcatcctcaatttcatatggcccttcccaatttggcccaagtacccccactccgggttcttgagtggctgggaagactcttcttaagaccatatcaccaatagtaaattttctacttttaaccttagagttaaagtacttagtcaccttcttttgataagctgccattcgtatttgagactcatcccggagttcttcaatttgatccaacgcttcttgtaataaagccttgtttgttgttggatcgtaagttgttctcctgtgggacgggaataacgtttccaccgggaccattgcttcacaaccgtacgccattgaaaatggcgagtggccggtcgtggttcttggggtcgtccggtaggcccataacactcttggcaattcttcgggccaattgtttttgcaggccagcagctttttctttagggtgacctttaggattttgttgccgcttctgcttgtccgtttgtttgcgg

SEQ ID NO: 289328 - DNA, 761 bp, Cannabis indica
ccttcttcctccttgatctcctcatccctggggtaatcggttactttatattgcttttctcatattattttttaacagggtggaatttgagctaagatgaagatgaattaggtttgcgcttaggacctcttgtttgataaagatcctaacgttactatttttgtagaaatttgaatattgcttaatttgagatattttgacatataattatggtaattattatttatttattattttattcctaaaataataattatctaaccaaatctattttaaaattggtttattttattaaattataagatttgaaagtgatattgaagattctttctttcaaatcattgatcttatttgatattgttttaacaaccctaatttttttaaaatttagttggttagtttaagaataataatttaattatattaattaatatcttatttcacatttggtacatggacaatgtttgtttatttatttatattgtttattctaatttttttttacaaacctattatttatttgatctaaattgctatgattaacttgttgacagatccaatgatttgattttaatcatagtccaattgtcaatagatcttataaataatttgtaacaggtaaattttgtaacatgataggttccatccaaatcatttgacctgtgtgagcctatatgtttgctattgggcttagatgcatataggaagctcatgtaagtttttactaagtaaatggactaggttgataaaaataaaatttg

SEQ ID NO: 289329 - DNA, 664 bp, Cannabis indica
tctttgtatgcttctatatggtctttgtgatgcctgtttgttgcctttttgggccattgcgtgccatttgtctatatgtttgcttgtgggttgtgtgagattggtccttggggacgctttgtgtttgcttgctcatgcttcttgtttgcactcaacatgtgcgagacatgtatcgtgcctaacctttgaacttgtttgcctgcaggcgcgtttaggctgacttgctagctcggtgtgccagcaagtgccgcacgttccacctacttgggggtgtccaaataggcggcccgtgacagttggtatcagagccaagagaaaagggaagcttggtaacacgacataatggtgagcaacacccaaaggattcaagagcttgagaggcgcataggggaattagatggcctggacgagagggtcagggatctagcccctaacaatcagaactcagggccaacagtgacacaacaacaagttgcctcgttggctcaagactatgctaacttgttggccagggtagctgcgatcgagagaagagatgctgctaccggaacatcaggtgcacctcagatggaggatcgcatcaaggcattagaacaagcaacagcagacatgcaggctgctatcactgtactacaaaatgggcaggctgcattacaagactccc

SEQ ID NO: 289330 - DNA, 545 bp, Cannabis indica
aaataaatcatatatatttaaaaggggtaagttgaaaaatgcctcttttattcatcaattaatcaaatttacctctaattttatatttatttgaaacatacctctttttatatgtattgtacccaaaatacccttacataagagaattacatggagggtatcttgaagtgacaggggcaaaattggtacaatgtttaaaaaaagaggtaaaaatgatagattttaaaaaagaaggtaaaaataaaagaggacaatataaaaagggtatagagtgtaatttgctctatttaaaaagaaaaaagaagacaagtggcaaattaagtgcctttaaagaggatttaaaaataacaggcccccacaaaaagactaggcccaccaatttgtgggccggatttagtatatatccacaatcaagtggcaagctgaatgagagagacgccgcatccccacgagaaatctatccaatgtaactgggagtcaatttatttggtaaatccgtctcttcatttctttcattctttattatagaaaagaaaatgaataat

SEQ ID NO: 289331 - DNA, 674 bp, Cannabis indica
tggtgattcaagctcctttttagcaaattttagtgatctcaagttgttggtatgtttcccttagctttcctttaagttttatgtaaatttgagaaagtttgttaggttgcatgcttagttttgtgtggattcttgctgctgtttattgttgttgatttctgtggttgatcatgattctagaatgttgattcaagcttgattgggtttatgattagttggttttatcaatatatggaattttaactcaaaaatatggtttttcaaagaaatgtcttgaatctgttgtttacttgctgttgatgtttgctgctattttcagaggttattttatgcatgattaagtagatttgggctgaattgaatgcatgttagtggggtttgatcaagtttgagtttagaactcaaagcttgatgctttaatggtggttttggtttggttgcatgaagcttggtttttatgctttagaattgttccttagggtctaaatagcaggtctggaagttttggtattgtttggattagttttgtgcaatgtgtgaatttttgaagttctgcctgcgaggaaccggaattccgattgtgcatccaaaattccggatgggttttgaaaattcccagaaccggaattccggtttcaggaaccctagatttcctcgtttttgtgttatttggg

SEQ ID NO: 289332 - DNA, 544 bp, Cannabis indica
atttcaaaattgaaaaatcaaagaaaaagcaaaaccaattttcctctcaaactctctccctctttcggcccctttgagcagcaaggatttgtcatttttctttgtggattcaagcagattttgagggaatccaagctctaggtatagctcttgctctctctctttagtttttttgaaatttaaggaagaaaatggttgcatgcttgatgtttttgttgatggtaactgctgtgtatgattgttgttattttctgaagattagatatgtttatttgagtagattcaagcttgttttgttgttagttaattggtttttaaccttgtgtaagctttgagctcaaaactttgattttcaaggtaaaatgatgaattttgttgctgtagttgttgttattgtttgattgtgttttcagaggcttaattatgcatatttgagtagatttaagcaggtcttgatgcatgttagtggggtttaaccaagcttgagttttgaattcaaagcttggagctttaatggcattttttgtatctgtgcttactgggt

SEQ ID NO: 289333 - DNA, 341 bp, Cannabis indica
agatcctggtaaaataattcccaacactatctgcttctgcagacgcatactgttttatattttcttatatataattgacatttgcaaaaatacggtttttcatgttgcactaaactcagtttcttctaagtttgtttgtgattcacaggtgaaagaaaaattggtatgtttgaataataccattgaaaaagaaaattctgattctgattctgatgaatctgacatctgtgaggagtcactggctgagtcttacaaggttatgtatgaaaagtggatacaggttacttctgaaaatagatcattgtcaaaaataaataaacaattgtctaatcaaactgaat

SEQ ID NO: 289334 - DNA, 828 bp, Cannabis indica
accgtaccgagactaggactcaaaccagaacctagaccaggacccaaacccacacaataaccgggacctggacccagaatcatgatagggacttgggaaacagaactaggatcgggacctagtacccgaccaagacccgaacttgaacctcggaccccactcgtgacccggcaccagaattggaaccagactgcgacccgagatagggatccggatctggacccagggcttggacaaaacccatagtcggtgtcttgatttgggacccagccctggacccgaaccctgacaaggaaccgaacccacactcggacctgaaccgagtcccaaacccaaaagtggacccgaacccgtaccctgtgacccaaaattggaactaaaaccggtagttgaccgggactggaactaggacttggacttggaatcataactgaaagtggacctagatccataacggtaaccggaccaggacccagactgcaaatcagacctagaccggaattgggagccggacccggatcccaaaccaaacctggactccggacccgaacccgaacctgaactcaaacccaaacatggaaccagactagggacacagaaccagggtcgggagctagaaccgtaccacagtctcgatcccaaatccaaactcagaaatgggacctcggacctgaaccagaaccagaccgagacccgtgatagtgatccagatcttgactcaggattcaggtaacggggcctggaacacaccaccagtcggtgtctagatctgggacacagcctaggaccagaactcagacgaagaaccaaacccgaaccaagacctag

SEQ ID NO: 289335 - DNA, 708 bp, Cannabis indica
tcgatctcactgtttgaggctaatttagccaggacagtcagcgtgagcgttcttttctctagggagtctctctactttatagtccgtgaactcgtggagcagttcccagactattgctacatacgcggccattctttctccccgcgtctgatattctcccaacacctagtttactaccagttgggagtcactatagacttctaccctcttagcccctacggtctttgctaatctcagccctactatcaaggcttcgtattcggcctcattgttcgaagctgaaaagtcgaatcgtagggctgcctagagtcgaagtctactcagagatatcattgcaacccccgctccggatccattctcgttggaggctccgtctacaaatactttccatgctgggaccgacggtgttggtacgttcgcgggtgcttcagcttcattacactcggtgatgaagtgtgctagtgcttgtccctttatggaaatacagggaacgtagtgtaagtcaaatttacttaactccattgcctatttgaggagccttccggatgcctctggcttttgtaggacttgtcggagtgggtgattggtcaacaccttgattgggtgagcttggaagtaggggcccaaactcctcgaggccattaggaggcaaaagactagttttccaatgacagggtatcgcgtctccgcccctatcatcgcttgctg

SEQ ID NO: 289336 - DNA, 638 bp, Cannabis indica
ttttttttcaaaaacaaaaaaagtacaatgttttatttcggacgtacgaaaatggttcaactcattgaaaaacttaggtgaaggcccattaacataaggccaatctatttaaatgccaccaccaaccctttcaactcaataacatcacccctttaaatttttcgtcaataaccttattttacaattacatgtggaatgaaattaaaacaatttgtactattatactgttctgacgtacgagaggagttgaattcagattgtaatattgtagaggcccattaatatcagcccaacagctttaaatgtgatcaccaaatgagatcaccaactccacacaaccttattatctcagccctttaaactcacaaaatctaatttcaatcccctcagcaccctctaaaccttactcctcatctacaattcttacaaatcaataacaagccaacatgaatgacgaacacacttatgaatgggaaaccatcacagcagagctaaacatcataaaaccagtgaatgagattgaaatacaggacgtgctaggcaagagtctcgacaaactagaaaaatgggaagcattctacgaaatgtacgcgaaacggatgggtttcggcacaaggaaagacgatgtacgacgttct

SEQ ID NO: 289337 - DNA, 861 bp, Cannabis indica
aaacttacagtgaagcgactgggggttctgttgtcgatcaaacaaaggaaaggtagatttacagtggtgaatgaaggttaacagggaaatttgtaaagtgttcgaaggttttctcttggtctgaggattttttctctctggaaaactcgagcaaagttggcaagaaacgggaagtaaccgaaatgaaggaaaggtggtggcttttataggtaagaatgcatgtggaacaagcactatcacctaccaatcgaacggttggggaggcgcacgattcgaattcctaaacatcaacggttagattgattcgtaattaaggcggtggatccgtctgacaccattaatgcgctgtatcaatcaatgggcgtgaaacgaatcgacctctgcaaaaagtgaatcgctgcattaaaggctatcattaaatataccttcacgcgctcaaagctcgtgccaggaaaccgaggagtcgaccggaggcacttgaacaagccttgttttattttcaaataaacaaggcttgggggtaaatgttgcccctgattttgcccaatatacgtggaccaaccggacgaggacacgtggatcaaacagcttaacatttgaattatttgctaagtctttatgtaataaggcagcatccgggacatgcctcccgaagaagacatagggagccccatacgctcccgaaagcccaagtaatactaaggcatctccgcgaggtgtcaggcttcccctgagcaatcaagtcgcatttaatgttgcatgggaggaaacgtgttgggactgctacacgcaataaagtctgacgacacaacccccaatctgcagctacaaagtaaatgatcatttaagtctattgacggc

SEQ ID NO: 289338 - DNA, 669 bp, Cannabis indica
tctaaaatttaaagtcaaagacttaaatttataccaaatgtacatgagtaattattctctcttggaccagcactactaatctaactctaattctgatatgcctaaagtaagcatatacaagtatgagattctaagattgaggatttatatcatttcatgatacattgtcgggaatataaccatatgcgccattcaatttcttaagaaaaaatagatgacattgtatgatttataaaccatttatccaatgatatattatttaagctaattcgaaatgaataagttaagaggaatcagaataatttcaaatttaaataagaatccaacgatgctctgattagtgagagtgaaagttattcttatttatataatcttcttgtttcatattgtaaatacttgtctaaggtgtcatctattgatgaacaactagatgtttcatttacaatatttatctatcgagatctaacactattatgtttgtctaatggatgacaatccattagggattttgttggaatttattttaccaagatcttcgatctactcaaaagtatgttgtttaacaccctaaatatgaactttctaaaacgataaataaacacatgtaaagttaagaaagccttacattggttgcagcggaataatatctccttccactcaaatctctaa

SEQ ID NO: 289339 - DNA, 144 bp, Cannabis indica
gggggtgtccgagcacaaggtgaccggaagtctcaccttccccattgggataagtgtttattccgttaaaccccgtgagttgagaaccactcggtgagaggtctcggtccgtcaggcctattgcagtaaaggcctctttgaaaa

SEQ ID NO: 289340 - DNA, 717 bp, Cannabis indica
gacatttttgttaatagaaagaaataatttaaatacaatttatggaagtttttacattttattttgtggtataggtggaacattttttccacaaaaatgaatgtaggatgacaattgtaaaataattcgtcataacattatatgtttttaagaactgaaaaattaggattttatataaaaatattagtgatagaatttttatctatgaaatatataataagaagattaattttaataaattatgtgaatgtgttaatttctactttaaatgaaaaggaaagtcatgattcatatagctaattagttctataatgaaatgtgtatttgtcttaatattttctggtaattaagatgataagtacagtataaatttggttgagcgctggcgcgatcgttataatcattaaaaaataaaatttaacttacgattatttagttatttcagaaattcatatattaagtagatgttaatatttttactatataagtaaaatattataattattttctttttatttctaaataaaaattgaaataatttttattattttatatatataataatattatatatattcaaataaaattaataatttaaaataaaaaaaaattactattataattatatgtagcatatatcgataatgatgtgatcaaaccgatcacaatgtccaaatatcaagaacaatctgattaatctaagtctatgacagattg

SEQ ID NO: 289341 - DNA, 1026 bp, Cannabis indica
agttgagcttgtcgcacttctgtagtgaagggcgaggtccatgcaacttgtatatgggcttccgttgctgctcgagcattttcaaagcctgcagaagcatgctctggtcaatccctccagtcgcaggagtcggggctgctacgactgcgggagtcgcaactactgcggcgagatttgctgggacattgatcccagtggtcgcgatcggcgcggtaggcgggttattataagtgttgacaccctgatcgtccgcatggggatcacggagtgtctcagtattacgaggggcgcgagaacgtgccctaaaaactgcgttgaggtgatcacgcagatcaccccgatgtacctggtaatgtcctccctgttgcgtctgtacagagccggaccttgtatatctacttggtgtacgaccgtgcgatgacgaagaggctgattctgcgtcgttgtctcttgatggtcgactgcgaggattgcgtcgttcagggtcttcatcaacctgtgtgctttggtttggataccttgcggattgatccctcgacgttggatggttcaggtccaaaccttcagggttggttctccgttccctgcgtacacgattagtatgacgtctagaagttgttacctgagggttatccgtgcgagtagcaggaactcgagggggcgtcgggctcggttttgtccatctacttcggcctgtagcgcgcgcagttgatcctgaatcgcagtatattgatcagtggtgagttggatgattccctcggataccactgccggagtgacagggggaaaatgcatggttgctggtggtgtggatgtgtccccgacttgagggtcagtcgtttctgggaacaggttgagaggtctgatattgcttctccctactccgccgttaatgacgtccacaggtggcattccagttccagataacggtacgttcatcgtcccaatgttgatggacccgttgttagctcctccgtttgtgtgatttccagccatgatggtatttttctttgaaatgaataaaat

SEQ ID NO: 289342 - DNA, 788 bp, Cannabis indica
accgaaccccttgagtgatagagtgagtgctcacacacatcaagttgtacctcaatcatagtgtggaagatcgtgaagaatctagtttcaagagaaggacattcgggctcagatcttggtgataatctgtgacagaaaggatatagtagttagaaatctgagtggaaggagacatcatattctgctgcaaccactgtaaggtttctcatactttatatgtgtttatttattattgttttagaagttcatatttaggatgttaagcaacatacatgttagtaaatctaagatcctggtaaaatatttccaacatattttacctcgatctagatttactaacatgtatgttgattaacatcctaaatatgaattctccaaaaaaataaaataaacacataagggttaagaaaaccttacattgattggagcggaatataatgactctttccattcaagatctctagcccttgattcctttctgtagcagagcattatcaagatctgaacatggatctctttctctcctttgggtttggttgccaccgtcttactcactatgattaagtacttgacttgctatatgtgggcatgacactcataaataagggttcgaataggtgaagaacaatgaaggaggtttgaatcattaaggaaagaactctctcatcaaatttagttgaatagtcaagatgacaaaaatttgacaaagcgtcaagtggatgagatgagaacatcatgttccttttatagtgtttcaactattgcttagggttgaattatatggatta

SEQ ID NO: 289343 - DNA, 519 bp, Cannabis indica
taagcccgcgagcttacaccagaatatgaacagccaactcgaacattagaagtcgcatacgttgctgtatttagtgaataggaattgttattcatttattgatgtttacgttttagtttaattactgtaaatcaatgtataaacggattgataatgaatgcaatccttgtgtaactaactggacacttgctttatatataaaggagtgatccaccatgaaatgacaccctacgaaactcttgcaacagtggactaagcagaccgtgatctgactgaaccactatactcctttgtcttcttgatatttccagtttttactaagtacttacgttcccagttcgagtactcgccgttttaggttgaatactcccagttgttcttcacataatttcttcttattattagtattattattcatttttggtgttgcgaattttgctcgacaacaccaccaaaagagtgtactcattacaattaggagaaaaatacaattctaccaatttaagatttttttttttt

SEQ ID NO: 289344 - DNA, 713 bp, Cannabis indica
ttagaggaaataaattatcgggattgagcggggttatggaatttgaccattttacccctagctttagaaataccctagttttaagtctaaagggcattttagtcttttccttggtgggagtaggtggcagccatgggtgatgacacctagtttaatttaattattgattgggaaaagagggattactttgaagaaaagcaaaattaagaaagaaggaaattggaaatttgagttgtttcttgaactctctctctctctctttctttcggctggggcaaagcaagggcaaagatcagatttttctcttccattttctgggatttagctagaattcaaggaggattcatcaagaggtaaaaccctagaccattagttacaagtttcaaagcttatttctttagtgtgattatgtgaaattgagttttagtggctgttaggttttcttatgtttagggttcagttttatgctcaattttagttgattagaagtcctggtagttgatttgtggtgcttggtgttagttctaagcaagcttgagttttgaaactcaagctttgagctttaatggcaacttgagatttattggtttgttctgtgaattattggttggaaatggttgtttatgaattgtataggtaccctggagagtttggttaagtttgggcttgaattgagttaaaggggttggttttgtattccaagcacagaaccg

SEQ ID NO: 289345 - DNA, 570 bp, Cannabis indica
atcccaaatatcaaacaaataatccaaaactatccaacaaattcacaaattcttcaataaaaattggattggaagtcttagaatcaatacctcaatgacaattcttcctttaatcatcctccattgttgaaatcttgaagcttttgagaaagaaaaggatgaataagggtttttaatttttgggtgaggttttagggatttggggttgatttttgagtgggaattagtgtttgatgagagaaataagggtttaggatgattgttgatgaaagtttatggttagaattggtgaaaaggagttttgaatgggattagatgaaaaaaaaatggtgaaaaggagtgttttcggcgtggagaagagagggtttgaatggggtgtgatttttgaaatgttagggatttggggtatttaaataaaatctgaccattctcgccgcggccacatgtagcctcgccgcggcgagattccgtgaaaatgaccccctttctgtaaggccaatctggccgcggcggtatgtcccctcgccgcggctagaaatcgtgaaaaatagcctctctctgtaaggctta

SEQ ID NO: 289346 - DNA, 1088 bp, Cannabis indica
atttttatagatatatgacttgcagaagctggatcattagagaatggcaaagagttactagctttagcatccgggtctgatcactttaggtactttacaatgaaggttgtattgtgaatgcagttcgatttatggcaaccaaacgagatgagaagaggagcacacaaaatagtggagtgtttgtggcaggaacagaaggttttaattattacggcacactcactgaagtgctaaagttaaccttcactagtgtttactctgtcacattatttaagtgcaagtggtacaatacaaatccaagacggaagaaaacaatcgtcgagaaccttatcactagtattaatgtcagtggtgtatggtataaagatgacccatacatactttctagtcaagcaaagcaagtgttttatctcgatgaattacttgagagggaaaaattggaaaatagttgagaatgtaaatcaccgacaaatttaggacatcgtggatgatgatgctaatgtcgaaattgatttggtacacgacaccaactcatccaattttgtgttaacaattgatcttggggagttaattttgctacctaatcaacctccgatggacattggcactgaaccaagtttgcatgtcaacgaagatgaccgcaacatggacgacgaagatgctactgaagaatctgacgaagaaattttagttgacctgtgtgaagatgatgtgaatgataatttagttaataatgatagtgatatggatgattaattttcaatcactttattttgtaatacatacaattattaatttcaagttaatatttcttatttcaagttaactttattaattttaaattattgttactattacttataaatgaaatattttttttttcaaaaaaaagtaatgtcagctgatgtatcaacttatcatggtggagacgggggtggtaccgatccaccagaccctagtagggtaccgccgacttgtcagtcggctccaccgccaagaagaaggggacgtggccttgctaccaacatggatgttgagaaaagaaggcgggatgcaggaaaaccattaccactaaaacttgatgtcat

SEQ ID NO: 289347 - DNA, 455 bp, Cannabis indica
ctttttgaaaaatgtgctaacggctataaacggctagtttttgttcctacactatataaactcatttttcactcaaaaattaaggttggttgagcttctattcatcatataacatcattctaagtgttctaagctaaagaattatcatcttttcataaacacaccaaccacacacacttgagccaaacttgttcttatcttctctagtgtgcttgcaattctctctaggattttacattgtttttcatcttattagagagagtttgctttgtatttcaaaattacatattcattgtattgagaggtgaggttggcaccggtagaaaaacaactcggttgtaggtgaggttgacaccgatttttgtaaacaacccgagaaaagtgagattggcacttcaacaatccggtgaggttgatagtccttggaagaaaactattgtgagaggtttgggaaa

SEQ ID NO: 289348 - DNA, 509 bp, Cannabis indica
cgcaggaaacaggagaaaggagctcggctctttttgccttcttggtggtttgttccttgaagtccctgagctccttcagctccgcggctagagcggccctggactctaagttcgcctggtgagtttcctctaaggatctcaccttggcaaccatttcgtccaaggcttccctggcctcccggagctcccgcttggccttggcagcagcctcactttccgccctcagctcctcctgatgctgggcctccagcctgtccctccgctgggcctcatcccggatcatggcctccgcttgggcctccctccgcttggcctcctcctcattggccttggcagccgcctcccggcgctcagcagcctcctggtagagctgcctctccgcagtgagatcctgaaggaccttcctgacgtcgttcatgtccccaaaatcagacagaacgaagccatgattaataatgttcttggagaggcggccagcctcagcagcaagctgaacaacaacacaagtg

SEQ ID NO: 289349 - DNA, 688 bp, Cannabis indica
ttaagttttttgttacatttctattagactactttaaagtattcaatatcataccgatgtggtacttataattagttagtattttttgtctttgtctttggtgttttattttttttttattttttataaataagttttgttactattttttataaatagtttttgtactattattattatgtggcactttaaggtgctcaattccatacaaatacacatacacaataattgattagtatttttttaaatcatattaaattaaaatttgtaggaactaatatgaaaatgcaccaataacgatatgttaccttttgtggtactttgcaacttaatgtgtcccttaacattttcattattaatatgtacatgtatttattaactttaattattattttaattttttgttattattatatataagtttgcaagagtattcttaataggatatatataaattttgctatatttaaccaaaaaaattaacttgtgatacatttacatcaatttttagtattatgttccaatgcataacggcagaacttgatgtaatttttttttcttttatttttttttattatgaatgattatcaataagtgaacttataccacactatgttcttatataaatataattttttttcaataattgtttaaatataattgataaaagtaacatatatgattataa

SEQ ID NO: 289350 - DNA, 717 bp, Cannabis indica
atttttatgggttttaaggtataggtttaaaaatataatttattattacaattttttttttttttttggaaaaatttataaaaaaaaaaagttaaaaaaaaaagtaataaagtaactggttacctttagttactttaagggaatttgattactcttacatgtatttttcaattttttattaattttttctcataaaatgtatcatatttttacacatattaataggataaaaaatccataaaatttataatttcatcataaaatagttgatgtaatttaaaacctaacttattaccgtctatagctagtttgggaccatatgctatataaatatacagatagtaataatattccttttattataccttctaattaatcaatagggaaaagaccaacttaccaacgacaacaaattggaggggaaaggcagctggaggcgttcgaaaggagaactccggtccggaaccaccgcatcggtagtaataggtggtggcaggctccaatggtccaatagtaacatggtgaatcttcccagagctatagaagaagtacctataagatgtgtattctccggtggccgtgaaattatattcattgggtcttatcccatattccactattgattgtgtatgaaagtgttcatttgtactccatgacactctcatgtggtctttcccccattaaagaaatatgtacctaaacaaaaatccccattat

SEQ ID NO: 289351 - DNA, 470 bp, Cannabis indica
atgctaaaaggacatgagtactagctcttttaaactaactcttactaatgagttaatagaactactactggagagtatcattcatatgatctggtcatttgtagtacttcttgaggtcctcctgtcacgacccgagccctaggccgtggcagatatgtaatatccataactttggtggtcaaaagtcacactttgacccttgtaggaacataaagcttataaatgatcctttaatttatattataaaatactaatttaaaaagtaatggattaacttctatattaataagaaaatattagtaaattgatccctgagttatagggattgtgttgatgactcatgatgcgaaagctaaatccgctaagtgttggttgctttgcacggatcgctgaatatcttgctccagatatgccagcgaggcatcttgctcggcctgtcttctcgagcagatgttccaagtggactccac

SEQ ID NO: 289352 - DNA, 780 bp, Cannabis indica
acaaatattgtatttacaaaattacaatccataaaaccaatccctatctttacaactcaacttcttaggcaaaaacatagtcacccgagtctttattctccaccgaacagcctccatgattttcacacaatccggctgctcattttgccattcaagcttgtttctagcctcccaaatgctatacaccagacctgcaattacagcagccaaaacattcttcctaaacttacttatcttagctttccttatccatctcaatatcaaaggaagctcattggcagccatgccccaaaccagccatttttttgctgcctgtagacactttccagcaaaggaacaagtgaaaaataaatggtgtgtatcctctgaatgatcattgcataaacggcacctgttttcaatttgcatgccaaacttggccaacctttcctttgtctttaatctgttcaatacagccaaccaaagaatcacactatgtttaggaatgtttaatcttgcccaaacttctctactccaaggaactttatcatgttgtggcttgagcaaatcataacctgcagaaatcacatattgtttctcttggaactccctcgggttctggatggattttagatgatccttaagagttacaagcttcctccaataccaactcgaatggatagaagctttgtaactccaccaaggctctcttttgatatatacactatgtacccatctcaaccacaaactttcttgttggtttgcaatagcccatatgtacttacacatagcagccctatt

SEQ ID NO: 289353 - DNA, 623 bp, Cannabis indica
attttaaaaattaaaataatcaatttattacatagaaaatataaattgacattttatttacaaaaatacttccataaggtaaagacaacatttataccttttatgtgattttaattactaaaataacacttacattatcatcacttacacaatcagacgatggttgcagggtggttgctgcgtggttacacggtggttgcatcagacgatagttgcagggtggttgctaggtggttggctgaaggttgcatcgaacgaaggtttctatcagacaaaagtttctaggtgcttgctgggtggttggctggaggttgcatcagatgaaggtttcaatcagacgaaataactgttaagaaaaaatatttaggcaactgtaatgcaactataatgcaactgttgtgaaaacatttaaaaatcaaaaacagtattttcacatacgtaactctatctacatgtctcttaatgatttaatatgaataaaattcaccattagaaatttggaaaagcaacaaaaaatacaccaggataaaacattttaactatagtattgattgtattttttttttggattatacttgagttggattgtttgggaaactccagctcaacttttttgaaatctg

SEQ ID NO: 289354 - DNA, 573 bp, Cannabis indica
aagcttttaagcaaatgggactacaagaaaaggatctgcgaccagtcgtttccattatctatgattttaccggggacaccattgctttaaagggaatgatcaaactcccaatcactttgggaaccgcacctgtcgtggccaagtcaatggctgacttcgcccttgtcgactagttactcagcatataatgcagtgattggccgtcctatcctaaaggaaatgaagattgtgacatccctataccatcttcccatgaagttccctactcccgcttgagtgggatctgtgcgaggagtccaactggactcacgagaatgttacaacgcggcattaaagctcgcaaaaaagaagtcggttaacatgatatacatgttagaagcaccaccccctcgacaagaggtgttaagaatcttaagataaagaagatgaactatatgttagtcgataagggtgtatttaatactcttagactacaccaaatcaaatttctagacttgccttagtgctagaaagtctgctaagagatggtgattactcgtgggggtggagtagtgattttggagaagtgtaaaa

SEQ ID NO: 289355 - DNA, 299 bp, Cannabis indica
ctattaaaacaaaaaacaactaacgtcggtaagcttgaataaccgataacatctcacttgcccaatgctctttaacttcatcaatttcttcttctgtataatttgcatcacttaactacaaaatttaaagataaataatatattaattaaagttatcatcatatacattaataataataataataataataataataataataatatatgacatatttatatagtttatatgttatgtacctcggccaaaaagtgtttccggttcgaagcttgaattaaatctttcatcatcttcatta

SEQ ID NO: 289356 - DNA, 417 bp, Cannabis indica
tgaggaactcccagataaccaaaatgaagctcggaaaatgagaagaaaggcagcacggtacatcatagtagaagggatcatgtacagaagaggattctcaatgcaattactcagatgcgtcacaccaaatgaagctgcacggcttctatatgaagttctcgacggattctgtggaaatcatgcagccggacagagcttatcaaagaaaatcctaaggcaaggctactttaggccgacgatgattgaagattcgaaagcttatgtcaagaagtgcgacaaatgccagagattttcaaagataccaaaagctccgcccaacgagctgacacaaatgcaaagtccgtggccctttgccatttggcgaattgacctagttagagttacctaaaggtaaaggcggagtgcagtacgcagtgg

SEQ ID NO: 289357 - DNA, 552 bp, Cannabis indica
ttataaattttatttatttggaatattaattattttcctattttgtgttaatttagtcaataaattacattcattcaatttccatttttaatttaatacatatatttcgaattaatatgttatttagtacaattgaaaatggaaatttgttttaaattggtaattaattacatgatttatttaggcattgttgtcgagtgaatttcgcaacaccaaaaagtattatctaattaatataaaagagaattttcagggaagtgacaagtgcgagtattcgacctagaatggcgagtactcgactgggaatgcaagaacaatcaacaaggctggaaaatatcaataagaccgagaattatagtggttcagtcagattgtggtctgcttagtctactgtagcaaaggattcgtaggtgccattttcatggtggatcacccctttatatacaaagtgggtgtcctatcggttacacaaggatcacatttaatccattatttacatatttaattgcaataattaaacccaaacaacgttaacattaataaatgcgtgac

SEQ ID NO: 289358 - DNA, 480 bp, Cannabis indica
aaaatttcaatttgttgttttacaaatctccctaatttgtctctatttcgtgacattcacttttttttttttttttttgtattttctacttgttaaataatgtaaattacaactatgtaataatgcaagggtattcacacaagatattcccaggccgattgggaaggttgccaaggtaccgcttcatcccacacttttactagaactccccggggttgctagaaagtgtagagggtactctaccacaaacctttaaagtcaatctttcttagacagaataatcacaatttgtaccccttttaccattacacaattggatttacactaaaaagtttatgaaaatattttatgcacaactttttttttttagcctaaagggtaaaaaaagtctacaactaacctaaaataaataaaataaaataaatggctaatcctaaaggaaaaaaaaaaagtatacaaaataaaagaatgtaaaaaaaa

SEQ ID NO: 289359 - DNA, 500 bp, Cannabis indica
actgaaatatcatttgtaggtagctaactgttttaaggataaaatacattgaaaggtgtaacggatatttatccctactcagtgtagatcatctatagaggattattgattattatgattataacaatggataattcatagcatatctatatcgtagaacatatagagcgctccatataattgagagtgcaattccaaatctattgtggtgcaaggaggaattaataagttagagattttacttgataaattctacatctacttattggaagctcggttatataggcccatggtccttattctagttgagacaatactgcttgtaagactcaattaattgattttaattaatcaataataattctaaaattagactatgtcttagttatgaattttcactaagttatggcttgattgtggagaataagaattttaaggtttatttattaattaagagactttgtggaatctaattactaaataatataaatgataatttt

SEQ ID NO: 289360 - DNA, 647 bp, Cannabis indica
tagatttaggggctccatggagacgaactatctccttcacatacaattcagcatactgatccactgaataggtaactttcactggtagaaagtgagccgactttgtgaatctgtccacgatgacccatacagaatcatacatccccgtagttctaggtaaaccagttacaaagtccattgcgatgtcctcccacttccattctggaaggactaaaggttgcaataaccctgccggcctctgatgttcagccttaatctgctggcaggttaaacacttggacacatagtccaccacatctcttttcatcccataccaccagaagtagggtttcaaatcctgatacatcttggtggttcccggatgcaacgaataaggcgtggtgtgagcttcatcaagtatctctttcttaagctcatcaacactaggaacacaaactcgagctttatataacaacattccactgctcgagactgaaaagcctctaggccgaccagccactacttcatctcgaactttaactagctcgggatcttccagttgtgcctttctgattctctccaacagatcagattggagtgttaaattatgtaatttcccgaccacgaactcaattcctgcactaaccatttccgaggctagttgaggg

SEQ ID NO: 289361 - DNA, 480 bp, Cannabis indica
aactaagcggtctttacaatttcgatttaatttgaattagttatgattttttgaagtttcagaaaaaatcagggtcgtgcaacagggccacgcgcgcggacagcacgcattcagacaagctgctcgacgagcgcctgtctgaaccgcccatccgcgcgcggaaatcctgcaaacctccccatgcgccgtgtttcctcgcccatgcactccccttgcgcgcgcggacagtatgctcagcatactgtccgtacagctcgctatttttttcgtttttcttcgatttttcatgctatttcatggatttaacttccgattttttgtgtagttttgtatttagacatttactattcctatttcaattctaaatatcataattaaattaattaatatttttttaattaattcatgatattagtgtaatttgaatttgaaaatagtaaatatctatctttttgcttaattatctatcttatttttaaa

SEQ ID NO: 289362 - DNA, 530 bp, Cannabis indica
gggtatttatagtgttttggtggggcaatccctagaattgttcttacacatgtgtctgtaagtatccataaagttgggcatttccgatgaatataccatgggtgatgcatggtcaaatccctaggtgctgtagggtttttatggagaatgtcctttttgtcttatgattgacgtgactcttcgcagagtagccgtcgctagacttaaatgatcattactgtagcgctgctgtttgggggttgtgctgtcagactttattgcgtgttacagtcccaacacgcttcctcccatgcagcattaaatgcgacttgatctctcgggagagacctgacacgtcccggagtgccttcaagctatgctcacttccgggagtaccttgtactccgggtctatcctccgggatccatgcgaataacgcttcctggtgtcataaaaagacttagcagttcttcccaaataatttgatccacgtgtcccctcttgactggtccacgtatattgggcgaatttaggagcaacatttacccccc

SEQ ID NO: 289363 - DNA, 491 bp, Cannabis indica
actcgaactggactcgaactctgactcgaactcaaacccaaactcgaactgagaatagcaaatggaactataaccgaactgggaccaagaccaggacaaggacctaaacccaaacccaaacccagagcaaaacccagacagagacctaaacccgaaccgagactaggactcgaacccgaaccaagaccagggcccacacccacacaataatcgggagctggacccagaatcaggatagggacctgggaaacagaactaggaccgggacctagtacccgacccagacccgaacttgaacctaggacccagctcgtgacccggcaccagaaatggaaccagacagggacccgagattaggatccagatctggacccagggcttcgacaaaacccgtagtcggtgtctagatttgggacccagcgctggacccgaaccctgacaaggacccgaacccacacccggacttgaacccagtcccaaacctaaaaggg

SEQ ID NO: 289364 - DNA, 471 bp, Cannabis indica
cgcatcttttgctcggatctctccgggagctgtctttgtacaacggctgtggtctccggtagtgcgtattttgcctagtggcgaagtacacacgttcctgggagtccgatagctccgtgtattgagtatattggggggtgtacccctttttctggcgcttctctcccgtccgggtgctacctttggaggaccttttactcctcgatccctgggaagggcctgttaagctagcagtcggggcagcatgtgaaggagcttgcccatttactccggacgggttgccaaaatgagaagatgctggtgccaaagcttggccctggctatacccgggggtagcagagaattgtatgccactcgcttgtggagttgcggtcggggcagtacccgagggcgatactctgggcatgtaccctgctatcccggtgggataatagcctccataagccacgatttgggcttcttcgaggttga

SEQ ID NO: 289365 - DNA, 675 bp, Cannabis indica
ctcgagtgaataaggtagtcgcgggccgacaccgtggactcgctatctcgaatgtcgatggacccaggctcggcaagttcccgcaccatcctttcgatgtctgcagaagacatcgggcctagctctattggtgcagcctcctcttctgaaatcgaggttgggagaaagctgtcttcctcctggtcaacttcgccatcgaatgcacggcctccagagccgagctgttggctatccgacaagtcgctcatctgaaagatagaagatcttttcagcgtgatgcatgtgtgaaaaacaaaaataagtgatctcacccgcattaaaattatagaatcgcagctgccagggtagtcaacattcttgcgaatgctgaccacccaattcgtgtgcgagttaaaatgcgaataagtcacgcatcctgggccgagcgatatacctccagaaacggctgggagaaacccagtgactcaaggggcatgcgttttcgagcatgaccctgaagttactgaggtactcccaccgttccgagactacctatcagccaaggagtacgctcatttgagtatcatcgcatgttgcaaatggctgggtgtatctcagtatctcaaggggcatataatcgcatatatgaccattagaatactgagacacacccaccatttggaatagcgattgata

SEQ ID NO: 289366 - DNA, 443 bp, Cannabis indica
ccaggatcagcttggccttccgacagtgctccgtcgtgaccaactccccaacgtcgagggcattcttgtcatatgtggcgaaggtcttagcccgttggaggaaaagctgagtaggttcagtccgcgcataaggagggatcctaacccactccgtgagaagctccggatgctccacagcctggaacccggaggagaagaagaagcggtgatggtattccttcacatgcttctgatagttaaaagggaccgggccctcattcaaaggatgggcccggagaccgtaaaaaccgtccttaaacttatctccctttctagggatggaaacgagttcgtaaaaatacaaaatctctaccggactgggagagccccagctccgggaagagtaaaaaataaacaagcctaaaagaaagcggtaagcttgaggaatgagttggtatggcgca

SEQ ID NO: 289367 - DNA, 543 bp, Cannabis indica
catgtcaggattgagatcatttgatcaactaggatcaactaggtgatattgaattgaatagatattacagtaagattatcatatctagttcaaatttcaatatcggtcccttccgatgcatactccatacatccaacccaggcttactttgaccaatgccctagaaaggacataacacttatccaaggtgcatgtaaactacgttgtagattctcatatcagttaaaccctgtgtacagacaaatctaggaatacgctgtgttgacaacacaataaacaagaatatcagtgtgaaagggtttggatgaatttattaatcaaataagtaaatagatgatcatatgaaccaaataacacattaaataagtaatgaaattaaatttgtctctttattgatttgagtagaaaagattacattgaaatagagttttatttagggcacaaaccccacttgcgctaacataaaactatcagtacattgtgcttttcaactgtagtggcagtcaaaactttggtgaatggatcagctaagttatcttcaat

SEQ ID NO: 289368 - DNA, 524 bp, Cannabis indica
tctcagtgcagatgaagcttgtaaattgatgtgtgatttactgcttaaagcttaattcttgttcataactcatatcttgaaatcgatcaatttaaagatgtacaacttggtaacttgaatcaataaaatctactagtagcactttcaaatttcaatcctataaatgtcaaaactatttatttaataattaaaattaattatcaaataaaattttcatttaacttatttattaattagaccttacaaagactctcaattaacaaataaaccctaaaacctcttttcttcacaattaagccctttctatttaggggtgttcatccaattcaatccgtactattttgctcatagcgcatccgattcgcactaagtgcggatttcatattttggatccaatttaatctgcacaagagctaaaatacaatccgatccaatctgcaaaagtacgaattggattggttattttagattggttacttttcaatattaaaatatttaatatttatgaaaaaaatatatttttt

SEQ ID NO: 289369 - DNA, 951 bp, Cannabis indica
ggcgaagaactctaccaaggattctggccttcgggcctgtagctctttccagaagtcggttcttggcaagatacctgttattagcatgcaaacaagcgaagactcgggggccttctcgacctttgttacttcggcgttaaaacgcttgaaataattttgcaaagactcaccaggctcttgtttgatgttggccaaagtcgtatagggtggcctatacgtcatcgtggcctggaaatgtgtgaggaataagtcgacgaagttttcccacgtcgatatcgatgcctctggtaattgggtgaaccaatcatgggcattctcctcgagtgtggccgcgagaatgcgacacttcgcaagttgcggtacctggtccacttccattatagtgttaaacttttctaggtaatctaacgggttagaagtacctttatatttgagggattcggataaacgaaacccttttggaagttgggcctgccgcacttctgcggtaaaaggcgaggtgccgtgcagcttgtatatgggcttacgctgctgctcgagcatcttcaaagcttgcagaagcatgctttgatcgattcctcctgtcgcaggggttggagtcgctacgactgcggggctcgcaaccactgcggcaaggttcgaggggatattaatcccagtggtcgcgatcggcgcgataggcgggttgttaactgtattgacaccctgatcgcccgtatggggatcatggagcgtctcagtgttatgcgggccgcgggagcgtgccctaaaaactgcgttgaggtgatcacgcagatcacctcggtgtacacgataatgtcctccctgctgtgtctgtacagagccagacctcgtatacctgctcggagtgcggccatgcgaggatgaagaggccgattctgcgtcgttatctcgagatggacgactgcgagggttgcggcgctcaggatc

SEQ ID NO: 289370 - DNA, 550 bp, Cannabis indica
cctttaagtcatacaaagctggatggcctagcattatgttaaagactgaaggaacatctaataccaggaattgtgccataatagtcatgctcgtcggagcttgtccaacagtgaggggtagacgaatttgtcccagaggtgtgactccttggccggagaaaccatagacaggcaggagacatggggctagatccttgagctggagtcccatcttttcataagaagttgttgtcgagtgaatttcgtaacaccaaaatgtattatttaattaatataaaagagagttttcagggaaatgacaagtgcgagtattcgacctagaatagcgagtactcgactgggaatgcaagaacaaacaacaagactggaaaatgtaaataagacaaagaattatagtggttcagtcagattgtgatcttcttagtccactgtagcgaaggattcgtaggtcccattttcatggtggatcacccctttatatacaaagtaggtgtccaatcggttacacaaggattacattcattgttaatccattatttacatattgaat

SEQ ID NO: 289371 - DNA, 628 bp, Cannabis indica
accactaccaccatttttcactattctaaatttttagtgtctctaccagtatttcttttaggaaactaaggtatctattttataattttgagttttttagatttaagatcaaagtctcatatatatatatatatatgtaatatatatatatgggagctaatacaataggtattgtaatttttacctatcaataaggatagtaatttataaccattgatttaatctaatggttcaaatcaactcttgaaaactacaccaaaattaatatatttttttatttataattaattttgaatattattaattacaagttcaactaacaaactccaaacctaactccaaactttttttttgttacttatttatcttatgactagttataattttcaattaattagttttttaatttgaaatgtatatttttattttttacttaacacaataattgtagctaaaaaagtacaaaatattcaagttatttaatcctaccataatcaatacaaccaataatataataatggtgtaagaggtaaaattattgtatatcaagtacaatgacatgagtttaattctttcaaaaagatatgatttttttttttaatttaagattttaaattaatttaataat

SEQ ID NO: 289372 - DNA, 594 bp, Cannabis indica
aagaaaacgaaaaaaaattgtaagtggtacgcacattctgggggcctgaccgaggaagcacggcgcaggaggctgcatggagcctctacgcgcacgcccaaggtcaatttcaaacaaggtgcccatgtcctaaccgagaaaactcggacacaagcctatccgaagcccacgtccgaggaatgaggctcatccgcgcgcgtgcatgtgggtgatgacaccctaatattttccaattttcaaaaattcataactaattcaaataaaatcgaaattaagttttgtaaaaaagtgaattgcttaattttttccaaaatatccaataaaaataattctagaaacgaaaattcaattatttttcataaaatttcacaagcatcaatcaatcatcatataacacacatatcaacatgaaaccatccaaatcaacacatatcatcgttttaattcatatttcatgaaagtaaatcattaccatgactctgaggccagttgtaggaaatattttaccaggatctagatttactaataagtatgtttcattaacatcctaatatgaattctaaaacaatgaaataaagtttaaggaaaccttac

SEQ ID NO: 289373 - DNA, 618 bp, Cannabis indica
ttaaacattgtactaattttaccactgtcacttcaagatagactttcttatgtcaggttattttaggtacaatacatataaaaagaggtatatttcaattaaataaaaagtagaagtaaatttagttaattgattgaaaaaaaagacatttttcaacttaccccttaaaattatacatcctttttagtagtttttgaaaacatcacatattttttaaataaaggacccaataattttttttctcttaagacctataaaacaactaaaaaatagtttattgttttactaaaaaggtatttttgtaattaaaaatgtataaagagtacaaatgaaaaattttctgtattgatgtatttttgtaatttttttcaaatttttggtaaattgtgtaaaaattttctaatatgtcttagtttgatattctttaattaataaattagtacatggaaaggggtaacgtatatatgtacataatacatagatttgttttttctcctaaaaaagattgtatttttaaaatacatagtagtcaaacagattattattatgacttaaataatggttaaagcatgatataatacagcacatattatgacatatttctttttcttttttgac

SEQ ID NO: 289374 - DNA, 565 bp, Cannabis indica
cttcttatagctaaagcttcttaaactcgggtgctgtcttaacgagttggattagaaagctggatggtggatggagattgtctacaataaagaagaagctctttcatttgaattaattgtttagtttttcaaacaatttggatttcaagttttgggatcttaattccctgtttggttctcataaatattgcaaacaatttttggtttataataaaatatctttttcaattatattgcaatttatgagttgagcttcagttctttattttatctattaccgattattatatttattatgtttgaatgtgtatgtgtttttattattgatgcaaattcaaaaagtatttaaactctttacagagttattactacataaacactagaagttatttctatgtttatgaataattgttggtttcaaaaacaattatttgagaatttgtttaataaaaagatcttttgatctgataggggtggagaaaagttaagaataatatgcagttcaaacgattttttatatctaatgaactctggattatattcaactccacagactctctatcac

SEQ ID NO: 289375 - DNA, 640 bp, Cannabis indica
tgaagaacgaggtcgaacccatgtgaattgcgtgaaatcaaagaaaatacttatttaatctaagctaataaaactctaacctagttccgaaaatggtgaggtttttggtaacaaaataaaataaagtgtttaaatgataaaaatgacagtaacagatattttcagaaatattttgggatattattaagggttcagaatccacttaagtgtatataaaaatatttatgtttatattgattctcataatttaatcagcaatcaaaccaattattttctaataaaaaatagattttccttcgctttaaaattataacttctaagcattaaatgtgaaacaatttaatgtaaatacaaaaaattataacttctaagcattaaaattataacttctaataaaaaatagattttctttcgctttaaaattataacttctaagcattaaatgtgaaacaatttaatgtaaatacaaaaaatcaaagaatattatttttaataaaatgtagaaccaagcattaataatttctaactatcaaaaatacgtgatattaaagataaaagaaaattattttaagaagcgaaaatcataagcatatattgtactgagaatcaaaataaaaataaatacttaattaaatacact

SEQ ID NO: 289376 - DNA, 716 bp, Cannabis indica
aataggtcacatgctcctgctttaggttctgaccctacagctcccttaagaatcgtggagattagtggtctgccgtctcagcagaaaaagtgagtgtttcttttaagtttattttatgttgttttttagttgctaaactgtttatatttttttctgtttttatagtgattgcggagcatatgttgctgcatttgccgagttctttatccacggaaaggatgtccctgcggactttgatatcgaagtttatcgtactcggcttgctgcacttttcttctcatatggccaaaggaaaattgatgaaagcattgatagcgaggatgagaagcaaagcaagtcttctaaggcatctaaattgaaaaaataggatcttttattttggtgactattttgtgttattggttgaatctattatcagacaatagttagtgttattggttgaatgtaggtattatatttgattttatactctggacctggtttaaaacttttaggatatttgacatttagtccttataatatgtttattgtataggtttgtatttcctaaagttgtttgtttttttaattgttcaagtttttatatacggtcgcacaactatggagaaactattaaccaactgaatacaaacaatgtttttatatttctaaattgtgctatgaatgtatttttattctttgtttttccattactcctttttcctttattttagtta

SEQ ID NO: 289377 - DNA, 600 bp, Cannabis indica
aaaagccttcgtttttgttgaactggccggaagttgggatcgatattcagaacatgtgaaataatagaatgatcaattccaaccatatccgcatgtgaccaggaaaaaaagtctaggtttgctctcagaaatgttatcaactctgattttacttcgagcaacaaaccttttccgatttttagttttctggtcgggatatctggatcgatctcgatctcttctaattcttctacaggtctaacattgctttttgggtccccaagtcaaggatccacatcttcatccccgccttgggaagttccctacttggaaatgttttttcctcttgtctgtgctctggctgtaggatacttcctgcttagccttggccactgcaaggttatagcattcccaagcaggttgctggtttcctcttagacaccctaccccattctttgttgggaacttcaggcaggagtgaaatattgatgtgatagcctttaagtcatacaaggccggtcagcctagcattacgttaaaagctgaaggaacatctaatatcaggaactatgccattacagtcatgctcgtcagagcttgtccaacagtacgcggtagacg

SEQ ID NO: 289378 - DNA, 830 bp, Cannabis indica
tcaggtggttccaataaaaagggaaaattcagaaattggtcagaaaagggagttaagtcccaggttaatcagcctgtttgagttttcagaaagggaaggtcgggtagcttattagctagccatactccctgttttatttagagtttacaacatatgcttcaaggttttagaaatacaaagtggaagaaatccatatacaaacctgggagaatattgaatttcaaacagatttgttatatgaggaacaatcggtacagattttagaacagaaaagagaaagtgctgcggaaccaaaactataacactagttccagtgctgtgaaagaacaataagagtgagaggcaatttgaaagatgaaggcacagttgcgagagctgtgtctcgagttgtttgaataaatttcgaggacgaaatttctataaggaggggataattgtaatatcccgagaattatattgatatttatttggccatattttattaaatatgtgattaagtgggtattagagtaggattataatcctacttaaactaatcatgagttgattagggaaatatgaattaatgaataataaagcgtaatttattaattacggagattgtactggaatatgtgggtatcgtagataccatatgtaatatcccggaaaataaataatgtttaaatagacatattttattaaatatgtaattattttggaaacgaagtaagattatgatcttacttgggataattattgagaatttatttaacgaaataaaatattttcgggcccagcaattgtggaaatttagcgatgtggttagtaatgtcacgacattaatggaa

SEQ ID NO: 289379 - DNA, 1068 bp, Cannabis indica
agcaacaaggcagggcaagttacacttcatgtctgatcaacatgagtgggagtagattatcgtatgtgaggacaatgtgcgataagatactatgtgttatgtgtgtgagtatagcatgcattaagattacactgtgatatgatgttgtattgtatgtgagaatagtatgtgatatgacatgttgttatatgtatgcaagtatggtatgaattgatttgatgttgtgatattgttatacttatgactatgttatctggttgggggggttatgtcctacatagctcttcttactgggcgttagctcacgggtactctgtgtgcaggtaaaggcaaaactatacagtgagggtggcgagctcgaggcgtggattacatgttaggggattgtcacgatgttttggtttaaaaatatttcatttaagattatgattcaaatagtttttgtaaagctttatattttaaggttatgaataaataaatgttttgttttaaaaataatgagatctcatgcttagttatttttcattaaagaagtcttttattgtctttatcttaaatggttttaaacggactagctagtgtgacgtctcgggaaatcggggcgttacaatatggtatcagagcaatacggtcctaaaggatgtggttgaccctaacatgtaaagttcattgccacgagacgagctcgactcactgtactgtaagttttagttaatctgttcatgttagtcttacatattttatgttgcgttacatctttagtgtaactagaagttttctttgtgtttagaagaatatgtcttaaaattttatgggtaggattcgatctatgagatatttttggaaaaaaaaaaaaaaacttaacaaggtcacttcttaaaacaaaacacatgtgttaattcaatttttggtatatttaattgacaaaaatattttttatttaatgtatatttcagcaggagtgtttaatatggtttccctatttgtgtatatctaaactcggaaggaaagttgtctagctttcctatttatggaaattgaggtaaatatggtaagttttgattacac

SEQ ID NO: 289380 - DNA, 641 bp, Cannabis indica
aatcaaattgacagtgaccaattatgaaaatacaaatctatggctggattatctcttttataattagatttgtatttaattaagggattaagttgactccaacagacaaatctaatctataattttttatagacaatttgtatatataatgaaaaaaaacgtaataatttaattagtttttccctcaaaattctcattcccaaacacgtgatacacaccttacatctcagcatattcttctcttgtaatttataaattaaattccttaaatgaatgatatatgaacacacggaaaaaactcacaagcagaaaactcttgtagctaaaggaacaatatggtgaaatttcattcaaagtacacgaatatactattttttatatactgctgatatggtattgttcagtcaagactagagctaaccattatggttattattgcattcaagtacagttgatgccattcataaacaacatcaaggacaaatgattagtgttgtgttgttcaatcctaagacctagtaaccaaaacagagagctgccattcataaacaaaatcaagctttaaaaataaaagttttagagctgagatggagatggaccatgcaaggagagaagcttccattgagagctacatcggagca

SEQ ID NO: 289381 - DNA, 899 bp, Cannabis indica
tgtcaaaatatatgaagaaaatctttaaagttttatatggtgttgttttcttataagatctaccatcaagttttttcttttgcattttaaattttgtatattctgtttttatttttattatttttcttgtataatcttgttttgatagttgtaagaggaaagagtacggagcaaactatgaagttttcttcaaagaatttgttgtccgaaaatttcttgtttctataatgttgaattgttataatgggatatattgtaatctttttgttattggtttgttctatatttgcgccatttttatggctttggcgccttacaaggctatagcgcctattatatggctggcccctaattatttagggtagtttgtttaaaattttacggcttcttgtattgaaaatataacaaaatgttggcacaataaaattgcaaaataaacaagttatgcactagacaaattttaagttaaggtatgatgtaaagaaattttaaagtgatattttaaaaatattttcaagtgaaataaggtttaaggaggattaagtttaaacgataatagtttttagctatggttggttcatatttttaggaattattagcaaaaagggaaagtggtggaatttagtattcagattctaatattattatttaaaattaatcaagtaatttgaagaataataaatacgaagatattgtaataaaaggaggtgggaatactaattgtcaaatgcgaatttattgtgttcagatatatttgggaagtcaaattttatggaatttggtttgtaatctatgtcgtataagaaggtatcattataaatgttttatggtgatacaatttttggaagttttacaacttgtcttttggaaattaaaataggaataattatgtcataata

SEQ ID NO: 289382 - DNA, 539 bp, Cannabis indica
attttcactaagcaatgacttaaatgtgaagaaaagagattctaagatttatttattaattaagagactttattaagtgtaattaataaatatattaaatgacaatattatttaataattaattttagttattaaataattagaattggtatttaagtggttaaattggaaaaattggcatttttgagaaaataatatggaaaaatgagaaaatggcaaaattgcaaagtggggccaatccaactcatggccggcaagtttgtatgggattcgccactttagtttttctaatattttaatgctaattaaatctaacctaaccctaagtggtttcctataaataggtagtgatggcttaagggaaaagatgatgatacatctcattccttcagtaaaattttgagcctcctttcctatagcatagccgaaaccctatccctctctttctctcttcatattttcataccttgagtgatagagtgagttcccacacacatcaagttggtcctcaataatagtatgtaagactgtgaagaatc

SEQ ID NO: 289383 - DNA, 749 bp, Cannabis indica
catcacgctgaaaagatcttctatctttcatatgagcgacttgtcggatagccaacagctcggctctggaggccgtgcattcgatggcgaagttgaccaggaggaagacagctttctcccaacctcgatttcagaagaggaggccgcaccaatagagctaggcccgttgtcttctgcagacatcgaaaggatggtgcgggaacttgccgagcctgggtccatcgacattcgagatagcgagtccacggtgtcggcccgcgactaccttattcactcgaggcatgctcctgacgtcgaggtcgaggagatggacgatgattggacggccccagctcgcgagtcaggcgaggatgaagaggaggcggaagggagcgggacagactcggttgacgacactcagctgaacgagcccttcgcgtgtgaagatctgatttcgagggtttccaaatcaaatttcactacctttgtgaggttaaatctgttgcgacttgcgtttcagtgacctaaaccgtcccagagggtgcatctcccgtttaccaatcctgcgattattcccacagaggatatggtagtctcaatacccattctccgatgtggggtatcggtccccttccatcctttcatcgcagctattctcaggcgatacgatgtatcaccttttcaactaactccaaacagttatcgcactgccctagccttcaatgcgatgaacatggaatatgttcatagggctccctcagtagaagagt

SEQ ID NO: 289384 - DNA, 466 bp, Cannabis indica
tgtccccgatttgaaaatcaatatcccaacgctttggatcagcataactcttctgtctactctgagccgcgagcattcgcgctctaatcttgtcaactgcctcactcgctctctgaacaacctcgggacccaagaactttctttcacctacttcatcccagcgaatagatgatctaaattttaatccatataaaagctcataaggggccatcccgattgttgcctaatagctgttattataagagaactcgatcaggagaaagtactttccccatgatccttcaaagtcaagcacacatgcccgtagcatgtcttctaaaatctgaatagtcctctcggattgcccatccgtctgaggatgaaaatgctgtgctgaactttaactgagtaccatagctagatggagactctccaagaatctcgatgtaaacttcagatctctatccgaaacaatggactttgggac

SEQ ID NO: 289385 - DNA, 676 bp, Cannabis indica
tattattttttcttttcctccggatctaggctctttcccaacaggagtactttggtggagtcgaggtcacacactgatatttcctcgacatcctccattggttccacaattttttcggaccccacttcagccatttctggctcgatggtttcctggaccattagtacgggcaggtgggttgcaacattgtaacattgccttgcctccccctgatttcctctcaccgtccctattccagctttctgggtagggtaactttaagcacagctgccgaatggatgtaactgtgccaaaatctaccagggtcggtaggccgaggatcgcgttataaacggtcgggcagtccaccaccacaaaagtacagtatttgaacgtgctttgggaggtgtccgggcacaaagtgacgggaagcctcactgttcccattgggataagcgtcgttctgttaaaccctgtgagttgggaaccgctgggtgagaggtctcggtccgtcaagcctattgcagtgaaggcctccttgaagagcaggttcacggaacttccattgtcaatcaagactctggccaccactttattggcgaatgggggtcttaatgaccaacggatcatggtgagggaagcgcaccgtcttggcgtcttcttccatgaacgtgatgggttgatccatcagccgggg

SEQ ID NO: 289386 - DNA, 753 bp, Cannabis indica
aaatgctttgtacaggtataggtgccccccaagtgacggagcagacttatgattgttggtcactggtttgttacaactatgatttttatctgttcggtgctttgggtttgaccaaaccttttttacgcactggatggtaaattagaaacatgctgataattttgactcaatttgaattttgaaataactacctttattcatttattgatcgaaaaatgtgtttgttaccgtagtaacttacatcagagctatttgatctaatctgatcttttagcttaacaaattgcagaaatagaaaatgtactttaaatggtggtcacatgacctgagtactttttccttttgtcgaaacctttgagcgtagtccacccagcaggccatttacttaagagtaaatgttcaatcagtacttagcgtggtcatccgacctggtactttattggtagtattttcttaaatgttccccattccaataccgtggtactagaacgagttacattttttcatcatacttatgtatgctccggattcgagaacttcgaccacttgatatggtccttcccacgttaggtccaagtacacctgccgtactgtctttggtgtttaggaatacccttctcaggaccatatctcccacgaagaattttcgagccttcacttttttattgaaatatcgagctacttttgttgatgggccatcaacttcaggtttgcatggctcgtcttcttcgatttcatcaagtgattcagcta

SEQ ID NO: 289387 - DNA, 503 bp, Cannabis indica
tccaagtccaagtcctagttccagtcccgatcaacttcaggttttggttccaattttgggtcacagggtacgggttcgagtccacttttcactttgggactgggttcaagttcgggtgtgggttcggttccttgtcagggttcgggtccagggctggtcccaaatccagacaccgactatgggttttgaccaagccctgggtccagatctcgatcccactcagggtcccagtctagttccatttctggtgtcgggtcacgagctgggtcctaggttcaagttcgggtttgggacgggtactaggtcccggtccaagttttatttcccaggtccctatcctaattctgggtccaggtcccgattatttgagtgggtttgggtctcggtctaggttcgggttcgagtccccgtctcggttcgtgtttagtctgtcttggtttcgatctgggttcgggtttgggtttaggtccttgtcctggtcctagtcctagttcggttctagt

SEQ ID NO: 289388 - DNA, 741 bp, Cannabis indica
ttgttgaatactctgtaagcccgactgttggtggagtaccccaaaaatgttccttcatcactcctgggatcaaacttggtcaagtgatcccgatcgttcaggacataacacgtacatccgaaaatatgcatgtggctcacgttaggaggtcttcctttccatagctcataggcagtttgagaggtaccagtgcgaagatgaactctattgcacacgtagcaggcagtattgacagcttcagcccaaaatcgttttgaaatatctttggcctgcatcatgacccgagccatttcctgtagagttctgttttttcgttcaacaactccattctgctgaggagtttttggggctgaaaactcgtggtgaattcccatgccattacagaactctgagaatatggaattttcgaactcttttccatggtcacttcttagtcgaaaaacttttccaactttggagtctttctcagtttgcaatctcagtatcaaggcagagaatgatccaaatgtgtcagacttgtctctaagaaattcaacccaggtaaaccgagagtagtcatccaccaagaccattacatatcttttcccactgatactttcattctgcattggccccattaagtcaacatgcattagttccaacacacgagaggtgagaagtctattaattgtgggatgagatgccttatgctgttttccaagctgacatggaccacatactctctccttggaaactttcatg

SEQ ID NO: 289389 - DNA, 555 bp, Cannabis indica
ttagtaaaaaaaagtctaacatggatgaaagttcaagggtatgatttagtatatttcaaagttcgagtggtataatttgatatatatcaaagtctgggaagcatggtttagcacacaaacaatcaatgaatagtaaaattgaatgaaattagacaaaaaattttaaatccaacaatctcaatagttcaggaggtatttttaactccttaaaagttcagggggcgaaaattataatttatctatttttttaggctaattagtaattttttccccccgaactttgacatgtaccaaatcatgcctccttaacttttgtggccgttaaaagttccccttgaactattgagattgttagatttaaggacttttgtcaaattttagtaaaatgattctaacatggatgaaagttcaaggtgcatgatttagtacatattaaagtttgaggggcatgatttgatagatatcaaagtctggggagcatagtttagtacataaacaatcactgaaacaacaaaattgaatgaaattagacaaaaatcctaaatttaacaatct

SEQ ID NO: 289390 - DNA, 793 bp, Cannabis indica
taaatagatagtgatggtctcaaattaaaagatgatgatgcactcaagaattttagtcaaattttgagcctagtcttctctttctatttcaaatccttcccctctctttctctattcaattttcgaaccctatagtgatagagtacatgcccagacataacaagtcagtcctcaatcatagtgtgtaagactgtgaagaatccaatcaactgaaggagaatcgagctcaaatcttggtgatactttgctacagaaaggatacaaaggttagagatctgagcgaaaggagtcatttaattccacagcaaccaatgtaagatataacgccctaatgctaaggcacactacagtgctttttcaattacggtacaatctttgctaatcaaagaattttcttaaaaaaacgtgtcaaattaaaacttttacattaattagtaaactttataatatattaaaatatttacaagtgccgggatcccgttttctaacttttcaaacttaatatcccaaaatacataatttacaggtcgctcagcgactacaaaatataattcccagatgtcttgagacggaacactccaggtcgcgccgcttcgacatgtacaatctcaccctagctcaggttcactcctgttcagccttcgcctttcctttacctacacatggaagtagaactgtgagtcgacagactcagtaagaaaagcatataacatatcatataatttccgacttgtatttaggcgcccatacacctatttacaaggcttaacagatgaatacgaacgttccatac

SEQ ID NO: 289391 - DNA, 655 bp, Cannabis indica
cttcgattttcggctaattaatgctctgacaattaatattttgaaaatctgaatttctctctccatggctgacggttgcactcgattacttttgatttcccatattcgcttttaaggcgggaagccgaggcgtctaaggttcctttatgtacagttacccttttgcctataaaattatactttaggaagatctgaaaaataaaatttattttccatagtataaattttccaataaatattatgaaaattacttaatttaagttgattcaaaattaattaaaattaattttcaactaaaatttaatttttctataaacatatattggaatttgaaatccaatgtattaaaaaaataaatacattttcgaaattcatcaaaaacaataaaataaaataaaactggaaaaattattctaattcatgttggtctaaaattaactaacattaatttttaacataaatataattttcttatttaattaaatttctaagaaaaatatcaaatatttaatgtcttgaataaaatcaacttaaatattagttttctacatttaataaatatatctaggaaaataccaaaagtctacctataaaatatctatctagataattcataaactaattatttttttattaaaatataacatattttagt

SEQ ID NO: 289392 - DNA, 705 bp, Cannabis indica
aacaaagttaaatgattcttcagcattcagagcgtggtaagcttcccgctcagcctctaatcactcccaaagggcaacatatggcacaaacctccgctccttcagagtctaatctcaaaggggttaatgctattactacccgaagtggtcaaagtacggtatcaccattacctaagaccactagtgtaccaatgcccgctccagatgctgatgtgccacagaaccttccagtaaaggtgccctttcctcaggctttgaaatccactggaaaggtactggaaagtcatagtgagatccttgactttttgacacaagttaaggttaacctgccattacttcatgtaatcaagcaagtaccggcttatgccaaagttatcaaggatctatgcactatcaaaaggaagcaccatgtcaagaaaactgcattcttggcagaacaagctagtgcggtgatcgactgcaagacaccgcttaaatacaaagatcctggttgtcccaccatttcatgtcaaataggggaacaggaatttggccaagccctcctggattaggtgcaagtgtaaatctcatgccttattccatatacttgcaactaggcctaggagaacttaagcccacatctgtggtgctacaattggccgatcgatcagttaagaaacctcggggaatagttgaagatgtcttgattcaaattgataaattcta

SEQ ID NO: 289393 - DNA, 585 bp, Cannabis indica
tttagttggtgtatatactgtttgatataatgtctgtgtgattcgtgaaagaattggttatattaagggccagtgatcacgattttgaagcaacttttctgtagtttaatacctcttgatcatattcattgttcaagttaccttaagagttttctattttaattttctttgtctatcgtttgttgttgtaaatgagttcaatatttttctttcttttttgtttcacaactctttttttattctttcttttttcaatgtttttcttttttgttataggtttgttttatattgattttgttctattttgcgccattatttatggctttggcgccttacaaggctttagcacctattatatggttgggcccctaattatttagggtagtttgtttaaattttcacgtttttcggtattgaatgtataagaaaattttgacacaataatattttaaagttaataagttatgcactatacagatttattagtcggaataaaaggattattttggttaaggtatgatttaaagaatattttaaactgaaataaggtttaagagggtttactttaaacgctaattcctatta

SEQ ID NO: 289394 - DNA, 507 bp, Cannabis indica
aagtctttcggtcacttgggggcacctatacctatacaaagcatttggtaaagataaaacagtcacaattgcatgatgattataaacagagaatgaaattcattaaaaataacaaaggcacataataacaggattaaaagctgcccggtcagcccgttgtctgtaaaatgaagaataattccaagtttaaagactgcttggtcggtcatgatgtcttaaaaaaggcattatggctgaataagatatataaaaataaaaggaataaaagaagaagtgtttaaacagctggagtcccaggctcttggttcgggtcttctggcctggcaggagcgtggaggatctgttgttcgaacgggaggtagatcagcattttggccgaaggtagaagcagccgcctcggtttcaccataagctacttgggaagcacagaactcaaggtacatgtcctagtcttctcctaagtagtcgaagtttgcctgaggattagccttccaaaagtcgtagaaa

SEQ ID NO: 289395 - DNA, 514 bp, Cannabis indica
cagttcttggtttatacttgatgtcgaactgactcaattccattgcccatttcaacaatctccccgatgcttctggtttcgccagaacttgtcttaaggggtagttcgtcaaaacttcaatactgtgagcctggaaataaggtcacaattttcttgatgatattatcaaggcaaatgccaacttctccatttggggataacgcgtctcggcatccagtaatcgcttactgacataatacaccgggtattgacgtccttggtcctcgcgtattagtactgaactaatcgcatattccgacacggctaaatagatggataggacttcaccggtcaatggctttgacaagatcggaggttgccccaagtgtatttttaaagcttgaaaggcctgctcgcacttttcggtccaatggaactttttgttgcctttcaaaatctgaaaaaactccttgcacttatcagaagatctagatataaagcgatttaaagctgcgactttacctgtgaggctttg

SEQ ID NO: 289396 - DNA, 1128 bp, Cannabis indica
tctattcccagcacctcagaggctcgcgatccaatataccctgccattttggcaaggttggagactgtggagagggggcagattgctttgagggaagggcaggccgctctgctaagaggacaaacagcgattatggatcagttgaagaccataatgacgctcctgcaagatcctggaaggccggcagcagattcacagccacagccacagccacaaccagaagaggaggtcggacaccggaagatgacttcattctcccaaatgattaccaaccggatgatgatgacatgttctgtacacctgagaagacgaatatcaccagcatcggggatactcaggattctgaggtgcaggtgttagagacagctccagaagtcatggagaaccggaggaagagaaggcggcctaggtggttcgctgagtacactgaaatgaagaagaaggctagggctacttcgacactcgtgaatgcggacccacttagagtggttgatcggaagctgctcaagacttttcacaattgggtactcggccagattgggaacaagtacccgagagagtgcttcaccggtcgatacgattcgtcttggttcctcgaactacatactccgaagttttggcttgggaacgatgtaagtttttaagacttttttactgcttttgcttttaaagactttatctaactcttttttatttaatctctgacatatttaattttcatgttttagcatttggatgcggcattccatttgatgaggaggcgacaacacttttatccagaggtctacccaaatagatgtgtcatcatgccgtgtattttcccagcaggagttattgctcggtgggaagctgcgggtgatgaccaggctaactatcagtgggacgagggcatattagatttgattcgaggggatgaaagtcaattcttggccagttggaagaataaggagagaatatatatggccctctacttcgatagagcaaagcattgggtgacgctagaggtagatctggatcattggttgttgaacatatttgactcgagcctcggatcgatttccccgaacgaattgaagagtcacctggcaatgtgggaaaaattactaccaaatttgctgctgcaggctg

SEQ ID NO: 289397 - DNA, 782 bp, Cannabis indica
aagagcgtttccgtgcaccaagagcccggagggagaggaagaaggggccagaaatatcctcccattgatctgagaaatcagattaacgggaaccaaggtgatctccgggatcacctagaccaaaagaaatacggacccgcggtctccacgggaacgttaaacgaaggaatcatggcagaacttgccatactccgaaaagacatcgcccgagtctcccggagacagaaaggcgacgactccgactctgactgtgaagaccgggagccatgtgcaaagcgtatcctggaagcagagctccccaaaaattttaagatgcccgagatggcagcttataccgggaactctgatccaagcgatcacctgtcacggttcaaccgagtcatgacagtcatgagggtcagcaatgacgccaagtgtttgtgcttcccgcttactctaagcggatccgcggaagagtggttcaagaaactggaaccaggatccgtggattgctggaataagttgcaaaccagcttccggagacaatttgtcgccgcaagaaaagtcaatctggaggtcagcgccttgactaacatcaagcagctgcctacggagacattgaagaatttcataaagaggttcagggaagaagcctcgaaaaccaaaaaagtagatgacagacaacagcttgctcttctccaagcaggcatccgtacagggactccattttggaacgagttacaacaagaaggagcttcaaaccttcaagacttccagaagagagtccagaaatatatcaacct

SEQ ID NO: 289398 - DNA, 264 bp, Cannabis indica
atataagtttgttttgtaggtatcaataaagaggaaccaaggttggctcttgggtgttgatgcttaaagaagaatgtcaagttccgacaattaccaacaagtctcaaaaatcatagaaaaagaatgtgtcaattcttgaacacaacccaaattgtaacaaatttgattcattctacttattttgatgagattaagatgcctagatgaaaagaaaatgaaatttgacgtgtttggttaattgacttgcttttgatccttcttgtt

SEQ ID NO: 289399 - DNA, 887 bp, Cannabis indica
tggaaagaatagtgtggccaccaaaatcaagaaaatcagccgggagacctagaagaaaagaataagatcaaaaggagaaccaaaagttgtcttgaaatgtacaaggtgcggaaaagttggccacaaccgaagaacgtgcaataacccacagctttacaaaccaccaaaacagaataacaatagcaacgagtcaaagaagaatgaatgaacagctacaatagaaatagatattcattgacagttttataaaaactggtttctcagcattgaataaagtagaacattatataattttagtgattgacagttttatagaaactggtttctcaactttgaatgaagttgaacagaatataattttttcacaaggatacacacaacatttttacacttttgaaattttatctgtttacataatcattgttttaaagattttttctaaatatcttagattatttcaaaaaggtacattcaaaaatataaattttataaaaacaagaaaccagttattgagaaagtatactaaaaaaaccaagtgccacttaccaaataaataaaaacacatactgccattggtatcacctacataaaaagaaaaacaaaacaaaaaaaaaacaaaaatcagttaacagtacattcaaataaaaaaaattgaaattaatagtaaaaaagaaaccagttagaaaaaaaagaaagaaaaaaaaattaagccatgaactaaaaacttataatacaaagggttgctgattcattgaaacatccagtctttacaacaaaaaaaaaatacaaccactttaactaagtaacaagtctttcaaaaaaaaaaaacaacactaaaaaactatatagcattgtcttaaaatatcaaatacaaaaaaaaaaaaata

SEQ ID NO: 289400 - DNA, 507 bp, Cannabis indica
ataaggggatgtgcgcctggtcgggggctcacggccagcaaggggcgctgatgcccttgcattagtacttccagaatgtggcggacttcttcggcctctgcccggctcagattactcccaagggaattaagtatttgtccgctctcttcgtcctctacgcttcccagggatgggatgctccttctccccacgaggtcgcttggttcttcgacctgaagtctacccccaagcaaggcaggtcggggtatttttacttctctcagccaggcttcaagtggttgagcgggacggaccacaaggccatcagcaaaatagggcgttttgttgatgagtacttcatggtgaaggatccaaacatcacccggactcggtttcagcagatccaggcatatcaccgtcctcccctcacccttactcttagggatatggctcaaaaacttgcccggttgctggcggaagccagggatatcatccagttgaccttcgatgaaaatctggtgcagtacg

SEQ ID NO: 289401 - DNA, 110 bp, Cannabis indica
ccaaatccatattgtataggccggccacttttataggatttatcaaatgatattttcattaaattaatgccaaataattcaaacctaaccctagtggaatgctataaata

SEQ ID NO: 289402 - DNA, 826 bp, Cannabis indica
tggctgtctccgaacacgcggtcagcgctgccctagtccgggaagaagagaaaactcagcatcccgtgtactatgtcagtaagcgcatgataggagccgaaacgaggtaccccatcattgaaaagctggtcttttgcctcctgatggcctcgaggaaattgaggccatacttccaagcacatccgatcaagatactaaccaaccacccactccggcaagtcctccaaaaacctgaagcatccggaaggctcctcaagtgggcaatggagctaagtcaatttgacttgcactacattccccgaatttctataaaaggccaagccttggcagacttcattaacgaatgcaacgaagcagaagcaactacgaatgtgccggtaccgccaatccccacatggagagtatttgtggacggagcctccaatgaaaatgggtccggagccggagtggcaatgatatcaccaaccggactgcgactccaagcggccctacggttcgacttcgcagcttcgaacaatgaggacgaatatgaagccctaatagcagggctgaaattggcaaaagccgtaggaggcaaaagagtggaagtctacagtgattcccagctggtcgtaaaccagatatggggagagtaccaaacatgcggcgagaaaatggccgcgtatgtaactatagcccgggagctgctccacgagttcacggactacaaaatagaaagaatcccccgggaaaagaatgctcacgcggactgtctggctaagttagcttcagatagtgaaatcgaagagttgggggtattaccagtggaacgcttggcagagccaag

SEQ ID NO: 289403 - DNA, 706 bp, Cannabis indica
aacatgaactcggtgtttggctcagtaaaatcacaacttagtatgttagtattgtgggagggtttattagacattgggaatgtcgggatcggccgggaatttagaattttgcaaaatacccctttagtgctctttatgttattttagtgtgaaggtcattttgccccatttatgttttgtcctttggtggacttagaaattggcaatttaaatgttatgtgaattatgttggctgaaataaggtttattatttgattattttctctcatttcattaaaagtaaaagttagaaaatttagaaaaaagaaaagctctctctctttcccacttgtattcggccctccttgagcagcaagaaggtgggattcttcttggtgattcaagctctttgtagcaaggttttagtgatcaagttgttggtatgttttccttagcttttctttaagtttttcttgaagttttgagaaatgtttataggttgcatgcttagctttgagatgttgttgctgctgtagttctaggttgttttctgtgattgtatatgcttgaattgaatggattagaggggttgtaatgcatgcttgttacccttgtttaagtttgggaatttctagtacaaaagctatgttttttcaaagcaaagtgttgattttcgttgctgtggttgctgctattgttgagtagtgtttcctggtgttaaattatg

SEQ ID NO: 289404 - DNA, 181 bp, Cannabis indica
gatactgagtccccctaactgccatgtccaacacctggtcatactccagcatgtaccgacgtgatacagtgtcagccttgtaatctacatatgcatactgttatactaatcttacctggattctgaattcaggtgtgccggtcaacctgactggaactatctgcgcggcggattacaggct

SEQ ID NO: 289405 - DNA, 619 bp, Cannabis indica
gagtcagtcccgctcccttctctcttcttcatcctcgcctgattcgcgagctggggccgtccaatcgtcatccgtctcctcgacctcgacgtcaggagcatgcctcgaatgaataaggtagtcgcgggctgacaccgtagactcgctgtctcgaatatcgatggtcccaggttcagcgagctcctgcaccattctctcgatgtccgcagaagacatcggacctagctctatacctacagtaggtgcgatctcctcttctgaaatcgaagctgggagaaaactatcttcctcctggtcctcgtcaccatcgaatgcgtggcctcccgagccgagcagttgactatccgacaggtcgctcatctgaaagatagaagatcttttcagcgtggtgaatgtgtgaaagcaaaataagtgatctcacccgcattaaaactataaagtcgcacttgatagaatggtcagcatccttgcgaatgctgaccaccccatcaatatgcgagtagagataatactaaaaatgcgaataagtcacgcatcctgggccaagcgatatacctccagaaacggctgggagaaactcagtgactcaaggggcatgcgttctcaagcatgaccctga

SEQ ID NO: 289406 - DNA, 519 bp, Cannabis indica
agatattgtaataaaaggaggtatcttgtcaaatgtgaatttattgtgttcagatatattcggtaagtcaaattttataaaatttggtttgtaatctaagtggtataggaaggtatcattataaatgttgttatggtaactgaaaaggatacaatttttggaagttttacaacttgtctttggaaattaaaataggaataattatgtcataatagctaaattggattattttaagtaatttcaattgatttgattataataaagttttaccataaataaatatttataaaaattgcttttttgggataagtacaataaatgaattactaatattttagaaatggggacattaataatgaattaatatggttgattttgtctattttgggaaggattatggaattaatgggtcattaatgcttaataatcaaggttattttgtttcattgtattgaattacacttgttgaccgagattttcggcaactctaaaatatgattataatattgagctgtaaga

SEQ ID NO: 289407 - DNA, 527 bp, Cannabis indica
cttctaagtctaatattttcttcagtctgaatacaagctcctctatctgtgaaagtatttgtagtatcctgggcatggtcgaagcttccgtcactacttgggactccctaacatcattggccgaaacaagaatgctattttggggtttttaaagaacaaagtcataaaccgtttgaacagttggcatgataagtatctctctagagctggtaaggagattcttctcaaaacggttatccaatcacttcctacttacgccatgagtgtttgccttattcccactgacacttctgatgagattgaaaagcttatggcccgattttggtggaaaactagttcaagcaaaggaaatgggattatatggatgtcctgggagagaatggctactcataaagacctcgggggaatgggatttcgtcatttaagtgatttcaatcttgctatgcttgccaaacaaggatggcgtttcttatgtaatcctaactctcttgttagtcgggtctataaagcaagatactttcccactc

SEQ ID NO: 289408 - DNA, 184 bp, Cannabis indica
ttagggttattcatattggcactacaacacatcaataaaacagaagtaaggttttggttcataaattcatacacatgttcagaaaataacaaataatcacatatgttataaaaatactaaatctaacatactttattttccaaggtttttcaacaaactgatacagtgtcccgtttaggcgaga

SEQ ID NO: 289409 - DNA, 555 bp, Cannabis indica
atgctttgttgaggtctgtgaaatcaatacagactcgccatttctggttcggcttgggtactaatacgggattcgcgacccaagctgggtagaaagcttcaattataaagttgttgttgcgtagcttttcaacttcttccttcagggctactgctcgttctttgttcagcagccttcgtttttgttggactggccagaagttgggatcaattctgattttactttgagcaacaaaccctttcagatctttagctttctggtcgggatatctagatcgatctcgatctcttctaactcttctataggtccaacattgctgcttgggtccccaagttgaggatcttcatccccgccttgggaagttccctacttggaaatgttttttcccttgtctgtgctctggttggaggatatttccttcttagccttggccactgcatggttgtaacattcccgagcagactgcgagtttccttttagacaccctaccccattctttgttggaaacttcagggatgagtgaaatattgatgtgacagcctttaagtcttacaa

SEQ ID NO: 289410 - DNA, 532 bp, Cannabis indica
gggtttggctggttattaccgtcagtttgtagaagggttctctaagatttcaacacccttaatcgagcttactaagaagaatcaacagtttgtgtggacagacaagtgtgaagcaagctttcaagagctaaaacaaagattaatcacaactccagtattagccctaccttctaataaagaaaagttagtagtttattgtgatgcatccagacagggtctggggtgtgtactgatgcaggccgatcaggtcatcgcttatgcctcccatcagttgaaagaatatgaacaacgatacccgactcatgatctagagcttgccgcggtagtgtttactttgaagatttggcggcattatctctacggagagtaatgtgaaatttatactgaccataagagccttaaatatttctttactcagaaagatttgaatatgagacagaggcgttggttagagttcattaaggattatgactattaaatcctttaccatcctgggaaggccaatgtagtggctgatgccctgagcaagaag

SEQ ID NO: 289411 - DNA, 346 bp, Cannabis indica
tccaatcccggtcacgagttccactcgtgggccaagaggtaggtgcacagaccttgtccgggaattcatcaggaggagttatgctcgatggatccactcagaataatggagtcattccacctgccaaccaagggaaccaatcactaaggcagccacggtcatctgtgttcgaaaggttgggaacaccccgcgacctaagggatgacctaaatagaagaaggggaacggacgagcaaaatactacaacgaatgtgcagtccggagcccatactcaaatccccgctcagaaagacgctgacgtagcccaacccgaccagaatgccaacgaagtcagcccaaccgtaca

SEQ ID NO: 289412 - DNA, 679 bp, Cannabis indica
cacatagatgctaagcccattaacaattgatcaccaacaacatgggctaacacagcaaagaactatccaatcaacccaagttttaataaaaccaataaaatttaatgtaagcccaaataaaagtctaacacggtaccaatcctaagccacctcctgatgatcctctttatagttcttggattcgttgtaatcaaatggtccaatcttggatccttcactcggtttcatccgaaatcaagagcagtatcatgtatcttgatactgctgctgaaatgtggaccgagctcaacaatcgattcaatcaaggtaacggtccacgcattttcgagcttaatgaaagcctcgcttttctccatcaaggagatgattccgtcagtacctacttcaccaaactgactgccatttgggatgaaattcagcaacttcgcccaaagataccttgcacttgtgttgctgctactaaagcacaagaatatcacaaccatgatcaggtgctgcaatttctcaagggtctgaatgaatcttaccatgctgttcgtgatcaggtattgcttcttgatccttgtccaccattaaccaaagttttttctatgattgttcatcaagaacgccaaagaactcttggcaatagaaatgttaccccccttgctgcaaccgcctcttcatccacaccttctac

SEQ ID NO: 289413 - DNA, 663 bp, Cannabis indica
agttgtttaactctaaatattataatgaagccgtccacagtgctaagcagaagagttcactgagttagtgcaaaccggaggggagtgtcgggtttactgagtatactacaaagtttagaccgtctggccaagctcggtgtgggtatcgtgcaaactaactttggtaagaagaaaagtacttggttggtttgaagattaggcatgatctggtgatcactaccaatgaagcaacatcttatgctgaaatggtagaaaaggccctacaagctgagggtgcggtaaaattcctttaggagccccgagtgactctgaatgttggtggaacacccacttttcttactcctgtctatggtagggatggtggtgaatccaacactgatcagaagaggaaagttacctcgacatctagtggtttggggcagagcaccggtccgtgggaaccaaagcagaggtagactctaggattactcttaccctgagtgccctcgttgcaagaaacatcatctgggagtgtgcaaccggaagacatgctttctgtgtggcatggtggggcatttcaagaaagattgcccacatgcaaagaaagaagagccgaaagctaaggtaaaaccggtacctgctcaagtgtttgctgtcacccaagctgatgctgcagccagtcct

SEQ ID NO: 289414 - DNA, 606 bp, Cannabis indica
gggaaggaccatacctcatcgcagaaaaaattggtgatgccacgtaccgactcgcaacactcgatggaactgcgattccacgagcatggaatggcgagagtttgaaattttattatcaatagtactcgcattattcgactatgttcactcttgtacttatacttagatatttttcatgcaagggaaaaatcctaagtataggggggtatatatgcccgaatgtactattgattatatgaatgaaattgattgttaaattttcaaaattttcaaaattttatcagccttgtaaatatttctacttattacaccaagctgtaattaaagtcgcaaatatatatagaaaacgcgagtacccatgtactgcgaaaatgttaaaggatagttatccccgcgaggatataaatttgtccaaaataaaaggaaatttgtctaagtacaaaagcgcgagtacccctgtaccgcatataaagaaaaaaagagaagtaaaattaaaaagcataacatagaggaaaattaaacatctggagcagcaggagcagtctcatccgcgactttgctgatgacctcgttttcgacttcttcagcatccgcaccctcgacctc

SEQ ID NO: 289415 - DNA, 510 bp, Cannabis indica
gatgtctttgtttgcagaaggaagttccatctctagacctcctctattgaatgagtcgaattatccttattggaaggtcaggatgagagctttcatcaaatcgcaagatgagaaagcatggagagctattcttacaggttggtctcaacctactgaaaatgatgaaaaaggtaatactcaggtaaaatctgaactcagttggaccactgaagatgaaaaactgtctggttataataataaggctttacatgctatttttaatggtgttggtgaaggttttattaaattaatctcatcttgtgaatctgcaaaagaagcatgggaaatccttcaaattcaatttgaaggtactgctgatgtaaagagatcacgatttaccatgctgcaaactagatttgatgaattgagaatgtcagatactgaaactttaaatgatttctatgaaagattatctgatatttctaatgagttttttgccttgggagaaaaactagatgaatctgtcttggt

SEQ ID NO: 289416 - DNA, 530 bp, Cannabis indica
aggggtctagtggacggtgtgatatgcatttgacgtttgatttgtgattacttgtggtctctctactttgtttatacttagtgatactgttgatgagatattttaattctacaaagctaaccctgcaggaattttattaaaccaaggggtcctttgatattagttgttttcctactgggctttataagctcaccccctattttctcccattccaggaactcagtttgatgctagtggatgaggatggtaccgttgggaaaggaatgtcgttattagtttagtcttattttactctttcaccttctaatgagactgattttgtatttaagctgaaatggatggtctggatgacttaaattagctatgtactagttagaaatgagaaatgatggatgctaggtattattttggtattttattgacttattaaatctatctatttggtgattacataactgtggggatattattgttcttttatactgatgagtggtcctgattttgttactaatattttcttattaatatag

SEQ ID NO: 289417 - DNA, 563 bp, Cannabis indica
acactcataatttcattctttttctttatttgatgtatcaaggaatttggtctactaattagaggacagctgaatgtgatttacaaaatattttagaaagaattattataaagagattattgtgtgaaaataaacataataataagaaataaggtggggtagggtataggttgtttgtgtgaaaataaacataataataagaaataaggtaggattattatattgtataagttgtaactcatgtattgatcacacattattagtgtaataaaaaggttgttatacaatttgatgataggattcaaatggtttgaaatatagttgttacacattttaatattaaaactcatttatacgagagaaataaatgttgtgtatttttgaattctaagtgtgattacttaaatattataaaaggaggtatttggtgctcatttgaaagagaagttttctatcaataaaatacattgttgaaaaccctaaagcttgataattaattactaaagctatttcccagagagttcccttagatagtgagaaataagcttttggataaatgtgta

SEQ ID NO: 289418 - DNA, 715 bp, Cannabis indica
ttacataaaataaaattaaaaaaatatatatttttctctcttcttttttcttatatattttctatatcgcctgcatctctcttcaatctatctctcgcgcaggaaaggactgtcaatctccctgccactcaatcaactccagtcacgtacatggaaaagtattcttctctaaaatcacacacacatatacatacatatagattatatatcttcccgtgtcaattcaaccgcaagatcttttcggttcaattatctttgtaatttggtgtaaatagctaaatccaatcttttgaatcaaagccaaataaacgtttaaaaaattccattacctatatcttcttctcctcattattttttttcttaatgattacattgtcgtcagaaggagagcagtgctacatttataaattttcatgacaaagaggtatgaagagttccattgtaatttataatgatgtaattcctgttgtaacgtttttaactattgtctataaatctcaacaaacaataatagtatcactactaacctatctttctttccatcaaaattcattttattttctctctataccaaagttttctatgtacaaaagaaaaagaattaaaatattactgcaaactatatttttctaaatgcttgagctccttgaatttctcaaaagttgatccaatatacaacttttaaaaggtgatttttttttatcaattagatatc

SEQ ID NO: 289419 - DNA, 856 bp, Cannabis indica
gtggaagctggccacaatttggtgattaacctaagtatagttgatcttcatatttttgagaaataagaaaatagaaaaaaagagtgaatttgagagaaaccttttctctctttctcttgttcgaagccctaggaaccagcagcttgtggggtgtttttcttggtgaaatctgagttaaagatcaattgttagtgacccaattcaaggtagaactcttggactcaatctcttttattttcttgagcttcaagtaatgaaattttgcatgtatttgaatgtttgagctctgtgtttgctactggtgtttcaatttgttttctgaagtttggttatggttatttaaggtgattcaagcaggttttgtagttattttttagatttaaccaagtttgagttttgaactcaaaacttggagctttcatggtggattttaattctctacttgggttattattttgttgctttagaaatgttctttgggttatgtagagcaggtctggagagtctcatgtggtttggagttgttttgattgagaaatgaatttttttaagtttcttgcaatgaaccggaattccggttcagagaggcctgtaggatctggaattccggttggcttccaggatttcctcccagaaccggaattccggttgaggaaccggtcttccggttggggaaaatttgggaaccctagttcttcccatttttgtgttatttagggtattgccatgttatttatcgatagggaaatttctagtttcgagtttaagtccccgggaagtgatttagcgtgtcacttatcagtgttgtgattattatgatttaggagcctgtaattcgccgagcagttcgttccac

SEQ ID NO: 289420 - DNA, 492 bp, Cannabis indica
gtctatttgaagaaaaatcaaggaaaaaggaaaaatagaaaattgctttgttcttgaccctctctctctctttcttgctttcggctgagacaaaccaagggagtttggtgttgattgttggatttcagcaaggatttcataggagataatcaatctaaggtaagctccattgaacccttcttagttttcaagtttttaagttaggttgaaatggtgttttgatgtaataggagctgttaaggtttgaattgcttagggttcgaattctggggttaggttgagttgatttgagtccctagctactgtttttgatgcttgattttagttctaagcaagcttgagttttgaaactcaagctttgagctttaatggcataattggatttattggtttgttctgtgaaatactgcttggattctattgtgtatgcattgtataggtatactggagagtttggtaaggtttgggcttgatttgaattaagggggatga

SEQ ID NO: 289421 - DNA, 826 bp, Cannabis indica
gttggactgggttcaggtctgagtgagggttcgggtccttgtcagggttcgggtccagggttgggtcccaaatccagacaccgactacaggtgttgtccaagccctgggtcagaatctggatcccaatctcgggtcccactctggttccatttcttgtgccgggtcacgagctgggtcctaggttcaagttcgggtttgggtcgggtactatgtcccggtcctagttctatttcccaggtccctatcctgattctagatccaggtcccggttattgtgtgggtttgggtctatgttcgagttcgagtcctagtctcggttcgggtttaggtctctgtctgggttttgatctgggttcgggtttgggtttaggtcctggtcctggtcctagtcctagttccatttgccattcttagttcgagtttgggtctgagttcgggtcggagttcgcgtcctgggtctttgtctaggtttggtctcagtcccaagttccaatcccgatctgagtctggattcagttcttggtctaagtttttggttctgaacctaatctgggttcgagtttgggtccgggtcttgggctagctttgggtctgattctaggtgtgaatttgagttcgggtcggagtctgtgtccttgtttgtgtccaggtctggacccccgatctaagtctaggttcgagtccaggtgcaagttcaggtcccgagtgcgggtccaagtttgggtcttggtcaggatctcggtccatatctaggtccaccatttcgatcccagtctgggtcttggtccgagtccaggttcgtatccggatccctatctaggtcca

SEQ ID NO: 289422 - DNA, 478 bp, Cannabis indica
gattcaaagcttaaatcaaagaaagttacctcaaattcccaattcaaaagcaagctcaagattcaacaacaaccaagcttcaaagcaagccaagatcaaccttttcctttaaaaaaatcaagattgaatgcaaagagggtttgaatgagagagagagagagaggggtcgggtgagtaaggggataacaccagaaaattccattttcttttcctcaaaaatccatttaattccatgtaaatcaaatatggtcaaatgaccattttgcccctagggcttaaatacacacatacaccctcacaagggtaatcttgtcatttcacactcatttatttccaaataatttcagatttcatattatcaaataaaatgccaaataattcaattcaaattgcatttcgggcccgaaccccgttcggcccgaaatacccggttgtgactataccgcgacaacctgtcagaacacacctgaaaagacaa

SEQ ID NO: 289423 - DNA, 520 bp, Cannabis indica
tgtttcttcacctcatccaaccccatttccactgtggagacctcaccctcacaattttccttccagtagtcgacctcccaattccgaggatacaaaatttgaagcacaaccatctgaaagaaagccaaaaaaacatttaacaaacaaaatcgcacaggaatcgcataaaatcgcagatactgacaaattaacaagtattgataaatcgcacataactcgcacaacatcgcatacatatcgccaaaaatatcagaatagcaaaaatcaaggacaaatcgcacacatatcgcataaaactcgcataacatcgcataaaataactgctctaacactaacattatacatcgcacaaaagttgccaaaacatcgcataacatcgtatatgaaaacagattaacaaacaaaatcatgcagaaatcgcatacatatcgcattaaaatcacttaaaatcgtataaaatcacagtttcacaatttaaataccaaaaaaacaaagaaagtaagattgacatacccttttc

SEQ ID NO: 289424 - DNA, 551 bp, Cannabis indica
gtctattactggtgcagcagaaccagtaacagagtgcccatcaagaaagtaaattccatttttgagtttgcctttggcaacaacaagtgatcctctagtaactttcagtgtgccatcatctatcttaacagtatagccatttttatcaaaagcaccaattgaaagtaagtttctctttagatcaggtacataccttacttgttgcaaagttctaatttcaccatcatgcattttcatttgaactgatccaattccttcaatcttgcatgatttgttgtttcccaataggacacttccaccttgttcattagacagtgtgttgaacagcttgtcatttggtgtcatgtgaaatgaacaacccgagtctagtatccattcttcaccagactttatgcttgatgcaacaagtacatcagcagactcataaccatcagcagctaggtctcccttgaacttgcttttcttgttttgctctctctttaatttggctttgagagcaagcaatcatccctaaagtgcccttcctttttgcaatagtagcattgtttccc

SEQ ID NO: 289425 - DNA, 742 bp, Cannabis indica
ccaagtgtattcttggatagaggttctactgtactaggtaggagttacgtgccgaggcacgtttggttatttttttaaaaaaaaaattttgtaactaaaggtatgattatgtgaataatttattttattaaagtaataaataaaaatacttaattgtttttttttaaaagatattatttttaattatttataataaatattgtcatatataatttaattaaataaataatataattctaaaaatattaatataagatatgaaaaataataacaataataataaatacaaaaaaaatatttagaatttttaaaattttataatataaaactttaacatataagttacaacgttataatctttgattttttatcactcacaaattatgttttttaacttcactaaatatatttattttattgtaaactaaatttattaattacaaaaaaaaaaaaaaaccaaatctataattataaattaaaattggaatcattcattaaaaaataagactaaagctattttaaatagattataacatatattcaaattatagtaactaatggttactttaaatttttcatccaatctaaaaataaactaacaaacaaacaaactacaaatatcaacatttaaaagcttattgacattttttttcaataagaatttttttgaataactgtaacgccccaatattttgccttattttacaaaatactatttttgatgcattaattaaaaagattc

SEQ ID NO: 289426 - DNA, 863 bp, Cannabis indica
tttagagactctgtaggagtgtcagggtacacttgaggctgtctagtgaggactggtctagagcctgagagaacaggagagtcatcttcgatccacacttcttcatgtccttctaaatcatcaaatttcacattcattgattcgactacagagagagtccgtttgttaaatactctgtaagcccgactgttggtggagtaccccagaaatgttccttcatcactcctgggatcaaacttggtcaagtgatcccgatcgttcaggacataacacgtacatccgaaaatgtgcatgtggctcacgttaggaggtcttcctttccatagctcataggcagtttgagaggtaccagtgcgaagatgaactctattgcacacgtagcaggcagtattgacagcttcagcccaaaatcgttttgaaatatctttggcctgcatcatgacccgagccatttcttgtagagttctgttttttcgttcaacaactccattctgctgaggagtttttggggctgaaaactcgtgatgaattcccatgccattacagaactctgagaatatggaattttcgaactcttttccatggtcacttctcagtctaaagacttttccaactttggagtctttctcagtttgcaatctcagtatcaaggcagagaatgatccaaatgtgtcagacttgtctctaagaaattcaacccaggtaaaccgagagtagtcatccaccaagaccattacatatcttttcccactgatactttcattctgcattggccccattaagtcaacatgcattagttccaacacacgagaggtgagaagtctattaattgtgggatgagatgccttatgctgttttccaag

SEQ ID NO: 289427 - DNA, 587 bp, Cannabis indica
tatagctaaatactatatttatttatttatatatttatttattgaatttcactagtaatactaatgatcaattacaaatataaatattaatataaaatataaattaaggttccaaaagggttaattgatgatcaaactggagaagcacataacaaaggaaacatttacattacgaagacaagtcctgctgtggtgttcaaatcatatttggatcaatttcaaaaggatttcacaaatttcttaagatatcgttcagaggaaatggtgagtggtggtatcatgatattaacattccttggaagtattcaaagtaattctcctaagagtatttatgaaatactgggaaggacactgaatgacatggtcaaagaggtatattttatttattgatttacattaatattttattaaaaaaattaaaaaaaaaatatacatatccctattctatataaaatatggctatataacagaatttttgatttatgaaaaattattggtgactttgtttaaataaaaaaataacaaattattacatgttatcacgtaaagggtcagcatatatatagttagttaaacctaaataaaat

SEQ ID NO: 289428 - DNA, 511 bp, Cannabis indica
aattgatggttattgtggattcattatattatatgtgatatatatagagagagatggatggtatttttcaaagggaaatttgaattcctatacttacattaccccaaaatttttcccctaaatgcaaagttattaaaattggtaatatatgaccattttaccaattttcctaaactacccctctcatttgaaatcagcctctctcttcctctctcttcgtctctctcagccgaacaccaaacccaaaagaaaaaacccacacagtcggacgaactcgaccgaagctcaaccccgtccccaccgtgctccgtcgacgctcaaccccgacccacccacgccgtcgacgctcaaccccgaccaaccagaaccggcgaccccgaaccccacgaaaatgcccctctctcttcctctctctcaccgtgagtgaccgcccacttgaccgcccccaccatttgaccgcccccacccccaaacgcaccaccacggctcacctccaccacccacccactgt

SEQ ID NO: 289429 - DNA, 793 bp, Cannabis indica
tcttacttgaattttcacttcacaacattaccttggtagagtgaaaaatctttatcactctgtccaagaggtatcaagtttgatccttccccaggtcactttttccattcttatttctattatttacgcatacatatatttatattttttgcatatatatatggtttaatatacttggatattttctgcccttgtcttcaccttacttggcttgtgttacctttgaccctggagtgacatcttaacacttgcattttgatatgggtaataggcatctttactcactccatagcaaattgccctttctttgtgatctttcctgcttcaagaggtaccacacttatctctatctcttccatttttgttacctctgcactacgtgtctaagttgtggtccgtatgttatctttgtggtgccgattggaccacttgcatcccggtaggggcatacacccctatgtataatgtctaatgaccttaataccttgattttacctcttaggtgggggtgtcagggcagcacatctctttgaattatttcgttttgggtcccacttgtgagtaactcttcaaagtaatttatattcaatggcccatatgagtcaagctatttggcatattccatcacctcaattccatcttgttcattcagatcctcttcagtcaaaatcacttttaatgaatcttccatcaactttttctctccactatagtgtcaagagatccacacagaacaaattgtcactggcctttggaaaaagtcattgccttaagaacattaaagaccacttct

SEQ ID NO: 289430 - DNA, 677 bp, Cannabis indica
  modified_base (651)..(651): a, c, t, g, unknown or other
aatcgtaaaaatatttaaaatttcgtaaaaccgtatttttgtaattttttattttattatttttgtgtatttgtgaaataatcccttaattatatatagaatgtacattagattttaaagaggtcaaccatataatatttataaaaatatatatatatattttaaagtttgtaataaataatgagaaaaagtaatgaaaattctagaaaataatctatttttattgtttaaaagttattttagtaaacaatatgttaaacactacttgtaattcaaaaaataatttttaaacatataaaaataataattttttaacactctctaaaaaatagtaattctctgtaacatatattttaatttattttaatttgttgctatagtaggataaaacttatttgtgtcaatataatctttgcaaaatgtgttattcaaaagttaaaatttatataattacagtaaaatatatagtgcaaaatataaaatagaataaaataaaaagcaaatacgattcagcaatcgagattgatccatttgtttgaaggggtaaaatgattaagcaattaaaaaagattaaaagtctcgtatcttctttcaggtatgcatgcttttttgtttgaacaatcttggtatgcttttttttttttttttttnttttttttttttttgtttataaatta

SEQ ID NO: 289431 - DNA, 375 bp, Cannabis indica
tcttaatcttgacatggttaggttcgatctcaagagtgttatttatgttctttgatttgttagttaagcctacgttttggtctaggtgatacgtacattttggaaacatggtagtacaattgagcgggagcactaatcatagatatggaatgtataacttctatccggacatagaagtgaaacgatgattttcttcgagctaagataaatatagataaatgatagagcgctcatttagtgattatattagttcactaaaaatatcatttataggtggccaagtgttataaggataaaatacattgaaagggtataacggtaattttgtccatatgtaatgtagatcatatatagatgatcattgattattgggat

SEQ ID NO: 289432 - DNA, 590 bp, Cannabis indica
agttgagacaatactacttgtaagactcacttaattgatttcggttaatcaattataattctaatattagactatgtctagtttatgaattttcaataaacacgggaaaaattatgaagaaagagtttctagggtacatttgttaattaagagactttggttagtctaattaataaatataataaatgacattattatttaataattaatttttagttattaaataattgaaattgacatttaaatggttaaattaaaaaattggcgtttttgagaaaatgagatccagaaatgataaaacagcaaaattgcaaaagtggggcctgttatccaattgctatggccggccacttatgaagggatttatcatttatttttttatttattttaatgccaaataattctaacccagccctagtggtttgctataaataggtagtgatggctttagaaaaagaagatacatcttaactcctttagagaaaaactgagtgccttctccccttaacctagccgccaccctctcttccctttcttctcttctaaaaccgaagcccatagtgagtgagtaactgcccacacacatcaag

SEQ ID NO: 289433 - DNA, 454 bp, Cannabis indica
aaatactatgttttagttacaagtaatattttattgtgactaaattaaagtcacatttagtcacaaaaaaattatgttgtggctaaaatgttgtcacaaaaggtagcagttttttgtagtgattattggataatgtattaaaataaactaatgaaatacgtcgtcatgtgtttctgagctgacatttaacaagcttaattggtaggggtgttcatcaaaccgctcaaactgctcaaactgcccgcaccacaccgcaccgcaaaaaaaaaatgcagtttgaaattctttgcggtgcggtcgcggtttgaatttttcctaaactgcacggtgcggtgcggtttgcagttttgaattgttaatatgcggttcaaatcgcaccgcaccacatattataaaaatatcaatttttatatttatttaggtccaatatgtgaatgttcaaaccaaagtccac

SEQ ID NO: 289434 - DNA, 702 bp, Cannabis indica
attcctgatgtccaaagtcgaacaatggtttgctacacgaaggaaaaagctgacaagtggacgaagatcctaacacaagaaatggaggaggacttggcattgcaaatttgaaaaatctcggtatttaagcattgacacatgtggaccttgcacgttctagcttcaccttggaggaacagttgagaccggtggcgtagtggacttgcaggaacagagcttgcacttgcggcttgttccagtgcatgaagtttccttgtcctcatgcatgtgctgcagctcagcagcgaagtattagcatgtatgcactatgctcgccatattacacaatacaatattagaggagcacatatgaaggtacaattatgccagttggtgacgaggatgattgggaattgcctgatgacataaagaatatgtcagttggagtgcctattgagaagcaaccagtagggcaacccaagaagcaaattgttggaagaattaagtcaaaccaaactgcttgtaatggtttaaggattatcataccacgaaattgttacaacagcggtgccaaggggcacgatagaagcacttgcgactaccgaggttaaatatgaatttttaatttattcgtatgtgttggactattatgtattgttattaatatttgtggtgtaaaatattttcaatttgtagcatgaacatgaatgtcaaatttaatat

SEQ ID NO: 289435 - DNA, 625 bp, Cannabis indica
ggtacatgttttttatttttttatatatatttttttaattaggtgatattgaattgaataaatattacagtaagtttatcacatctaatccaagttcaatatcggtctcttccaatgcagactccgtacatccaacccaagcttactttaaccaatgccctggaaaggacatagcacttatccaaggtgcaagtaaactacgttgtagattatcacatcagttaaacccgaatatatttaatcacacaatcttgattactttccattgtgtcgacgacacaataaacaagaatataagtgtgataaggatttggatgaatttataaatcaaataagtaaataaatgatcacatgaaccaaataacacattaaataagtaatgaaattaaatctgtttctctatttataattgaatagaaaagattacattaaaatagagttttatttagggcacaaagcccaacatgcactccactgcgccctcagctcgcaatgtctttcccaccatataagcataggtggtgttgtcatcagtattgatcattaggtcatgtcttatcttcgaattcaacccatccaggtagttctctttcttactaaaatcagttggcactattcctgaggc

SEQ ID NO: 289436 - DNA, 510 bp, Cannabis indica
ctccattcagcgaacatatgcctctattcatcaaacgcgagatttactgcggcacgcagttcctcctaatcatgatgcagagtattgttatgaccctacatgagtctgagcgcagcacagagattttgcaattcagttgcgtctccgatggtcgtttgggcgttgatgcttggtggaatagtcatgttatgaacgccctggctgtgtgcggaactgtttttctcagtcttttgcacaccaggcgtagtttcagtaataggagttgtcccaccattcaccatgtttcccgtctgtccaagattgacagcgggtggaacccttgaactccctgggtcttgcaatgtcggatccagcgtctgtgagtttgctgggtcaaacaaacctctacgagtttccaccatcgtgtcgaatatcgaaaagagcgatctgcgattctcctctcaatgagagcaccaaaatgttgacttcgctttaagccaacgacaatgagtctttctgataagcgataaa

SEQ ID NO: 289437 - DNA, 708 bp, Cannabis indica
ctgaatcaatttatgccattaaatcaaagattgggtttctaagttcaaacttgcataaatacaacaccaaacaataaaaccagctaccaaaaccatcaattgacttaaattgaacataaacaccgaaccctaagcatttctaaccctaacagccattaaaactcaaaatcacatatttaaaccaatatcaaagcttgaaaaaaatacaacaaatgatctaggggttacctcaacttgatttctccttgaattccttgctgaaatgaagaatccagcaacaattcactatggttctagctgggttcgaagagagagagaaggaaagaaagagtgttcttcacttttttggcttttcctcctattttccttaagtgataaaagattaaatgatttaatcttagctgaaataatatttactaggtgtcatgaacctaggcagccacctatcccttcatttggcaatttactaaaatacccctaatgcttaacttttcacctatttcaaccctaggggtaaaatggtcaaaaaccataaccacgcacaacaccggtattttattttctccaatatacatcccacgaagaaataaggttctagacttacccatgtgatcaaactagtcatccatcgcatttttcattgtcgccgatcaaaaattacaaaaataacataattcacatatagctcatataatacacctagagttt

SEQ ID NO: 289438 - DNA, 655 bp, Cannabis indica
ttatcttacattttgctacgtgttgagctaattggtatattactgcttagtcattatacatacgtgttatatgagtgaaagttactctctctttaaaaagttagtataaatatgctattctaacatgatcaaacttatcaaacaaactgtttttaagaaatagaagtttgcttcttcaaactctcaggtttggtttagtgaatcattatatagacttgttttgatgtatacttaaatcatgctttcatgtatatataattttatttttggtgaaatttattattatgtatctaagttttatgctttgatgggtattatatgtgtatgttttcagtttgtgattgaatctttgtgaattttttcttattttatatacccgtgtagttgcatatgaggctgaacatctctctctctctctgtttcctttttctcttttgcaggcatgttctaattctgttttggtggatttgtattacaaaattctctcatacctttaaaggtttaatttctttgaatttgtaaaatatatttatagtaactgattgtttcttctttttatttctaatttattagattaaaagattttctaaaatttttggcttttaagaggtttcattttatttgttttgttagtttgctctgctatcattccaac

SEQ ID NO: 289439 - DNA, 516 bp, Cannabis indica
taagtaaagtattttataatattacttcactttacaactttatgtgcaattaatatattttgttgtctaactgacatttccctttatatgcagcatatagatgcagcaatgcatatgctgaggaggcgacgcgccgactatccactgacatttcctcagaagggtatcattctctccacattcgtgaccaccatgatcagcagtgcatggacgaaccacaggggtccgaggagaaactttgtgtgggaggattatatcctggagtactgcagaggggttcataaggtattgttttagtaagattttaaatgttgaactatgattataacttcgattgttaattgtttgggaggattattatggtttgttaattgtttcgttgttctccgtaattacagtcccaagtctttgagagatggatgggtaacgagtatatttacttcattctgcatcttcccgaggcaaggcactgggtcacacttgaagttgacatagagctgtggaaaattaatgtct

SEQ ID NO: 289440 - DNA, 487 bp, Cannabis indica
ttgtcctgaccgagaaagctcggtcgacaccttgtttgagcgcgtgcatccgagggaatcaccctcgtccgcgcgcgtagggtgggtgataccattctgatattttttgattttaaaaaattcataactaatcaaataaaatagaaattgagttctgtaaaaaagtgaattgcctaatttttttccaaactatccaataaaaataattccagaaacgaaaatttaattattttaataaaatttcacaagcatcaatcaatcatcatataacacacagatcaacatgaaaccatccaaatcaacacatatcatcgttttaattcatatttcatgaaagtaaatcattaccatgcctctgaggccagttgttggaaatattttaccaggatctagatttactaccatgtatgctttattaacatcctaatatgaattctaaaacaatgaaataaacacatgtaaagtttaggaaccttacattggtgca

SEQ ID NO: 289441 - DNA, 526 bp, Cannabis indica
tgcctccaatattgcagttgatctctccactttgcatctgtattctctctatttttctctctttaattgcttaaagaaatcaactctcttcttccctttatataggtttgaaggcctaaaaatatggaaaaaacgcacatgtctaaattcccatccgaatttaaatctttgggaaacctcaaacgagatattttttctgctacgtcgactgatagtattttggccataactctcttaatattagtcagaatcagacgattcaagatgttccggaaagataaaaaagagatatagaactttaatattttgactttttccaaaatctaataaaaagatagtcgaattcaggattgaagtttcagctttattttcttgcacaattttctctattttaaatatcatttttttgtgagatatttttatcttttttcccatctttttgtgtgatatttttctaatattcttctattttaaatctgcacaaataaaagataacaagtgtaaaaatgctccaaacacgattaaa

SEQ ID NO: 289442 - DNA, 880 bp, Cannabis indica
atgatctgattttaaccaatggtacaaatttgcaaaaaggtcaaataaataatttgtaactagtaaattttgcaatcttctttcatttgtatataaacctagtaacatgataggatccatccaaatcagtgtgcatgtgtgagcctatatgtttgctttgggcttagatgcatatagggagcccatttaatttttgtaattaaaatggactaggttgctaaataaaatagtcacatatgatagattttatttaggcccaattagtttttgggcctattcaattaataacagttgtttaaattaaggttaaattcctctccttttggccttgtgtgagagttagggggtcattagtagtgggtacgacatactgaatccagccctacctcaaatgaacaaccccaattgtgaaggtccatttgaataactgtaataggttaattatattagtttaatctaataaaattgattagcaacataattaatttcgaaatatataaaattattttttcatcagattattttgaaattaatttttaaaaacacatttagtttaatgaaatataattcaagataaactagatgtatttttctgtatttaattaaataaaaaaagttataactaatttaattcttttagaagcttaattatttgaattttcatagaaaatatatttaagttgaaaattagtttttcaaactgattttggatcaacttaaattagaatattttgaaattaataattaagtagaatcttctaaaaaattagttattcagatactctttaaaatattttaagttgaaaattttttaattttggatcaacttaaatagaaatatttttcaaattaaggtgattagttcaatatacttaatttg

SEQ ID NO: 289443 - DNA, 732 bp, Cannabis indica
tattttggatcttgtattttacaaaaattattgattaaactctctatactctctgttttagtaaaagacaaattgaatcttgaattttttaaatattactaaatattgtcttgaactgatttttttttaaataaaactcaatactaattcgatataaaggtattatgacaaaataagttacgttttctacatctgttcatgctagaaattgttttcaagttggttgtatcaaaaaatattatcgaaaattgagctcaaggtcctatttgtactatttataaaatacaggtttattttatcatttaacaaaatagatggtccaatgagtaatttttgcaaaatacaaggtcgaaaatagtattaaccctcgataatattttgaaaaatttacataaattactatttttgatcaaatttttacacttttacaattaaagatttttttttttacattttttatagtatttataaaaataacacaaaaacaagaagaaacccatataaaaacaacaggaaaacaacatcaactaaaaatgtaaaaaaaataacaaaaatacaacaataaaataacaagagtataacataaaaatacatcaaaaaaaatcaatattttatgtaaataaaatcttaaaaaacagcaaaaaatattaaaattaccgtataatagtattgggaaaattctacaatgcatctcttaatggatacattgatgcacctttatctgttttacca

SEQ ID NO: 289444 - DNA, 589 bp, Cannabis indica
gtagcgtgccttagcattagggcgttacaataaccccccagttcatttaaatacacagtctagccctccaaagctgagaccaaagaaagtgaatcagaaaaaaactttctccacgggaagtcccacatcttgagcccaacgcaatcctactagtaaagcaactgcttctgcctggaaaactgaaaaggaacctgcaaatgagatagttaaaccaataagttcatttaaatttaaaactcaaattttagagtataattgttatagagtcaaaaccaaagggaaacccctttggtttgactctttatctaacttttaacatgataatataatagtataaatttaaataacccctacgctaaaaaggatcatatatctattttgaaaaaccataattattaaaattctttaaagttaatccaggtaaaaaccatttataattatttagttaaaatatttaagttgtattcacatttgttattattacatcgttttataccttcataagtaaatttgaaaacataaactgaaaactaaaaaatagacccaaatgatatttactatattattttaaaattgtatgtattatccc

SEQ ID NO: 289445 - DNA, 565 bp, Cannabis indica
tagggtttgtttcataccctgagtaccactgagtgatataccacacacacccagtacttcccgtacttgtgctggtatcactgcaatgtactctcaactaacattcactataccaatacactttatactttaagtgtacaagtgttggtagtgcaactaacactttaagcatgcatatacacataacgtatacatacactcagatattgatatcatacattatatacagttcttaccttctttccagattcaagtatgctggccgacctgaacggaaagtctcatgctaggtggatgtcctaatcacattatgaaactgggtaagttatacgatcaaaaccctaatcccgggaaacccaaatccataaccctaggttttgttatactccctagaggttactcaaactctggaattagggaaacacccaaccacgacactaaaatggacgaaaattgagaaaatgaagcgtttggggatcctgccagccggttttatgggtctggtaaaacagactaaccggtttgcaccagtccaccccaaacatttcattctttgctcaatttt

SEQ ID NO: 289446 - DNA, 827 bp, Cannabis indica
cattaggtaaagaaaactatatctagagtgttatagtgagatttctcttacctagaaactcgagaccagacccctacttagaggacacgtatactcagattttccaaagaaagctgagacgtccctgagggactcctcgaagttttaaacctcgcttaagatagaatcagcgagaggtggcgagcatgaccgaagtctaatcgcatccgagacaagagagtagctcgcatatatcaaatatatgcgagcatcctccccgtgtccttgtatcaaccaggagaacgattctctataaatatgagttggtcttaagaaccctgcagcctttataatgtaatataggcttgcataactaggccctatcagccggtcatgcgatgtccacaagaggcgactgcctaaggacgcagacatcccgagcataattgatgaacccgcgagtttatcaccagaatatggacagccaactcgcagatatagaagacgcatacgttgataaacttagtaactgtcgttcatttattaatgttaacgttgtttagttaattattgtaattcaatgtgtaaaaacggattgacaatgaatgcaatccctgtataactaattggacacctactttgtatataaaggggtgatccaccgtgaaatggcacctacgaaactctcaacagtggtactaagcaggaccgtgatctgactgaaccactataattctttgtctcattattattttccagttttttgttaattatttctcatttccagttgagtactcgccattctaggttgaatactcgcacttgttctttcacgtaaattgcttctt

SEQ ID NO: 289447 - DNA, 738 bp, Cannabis indica
ctttaatattactactactactactttgtttagttaaaactgtatgttatgtccctctgttttctctttctttctttgctttttaagtagtcatggcctcgttaaaaaaaaattaaagggcaaaacttggtgtgcagaacgatacctttataaaaactcgtctactgtacagtatcctcagtagcgaacgaagaatttcaagctacaaaacgagttacccagttaacatctgtaaggcataacaaataaaagaaatcattacacacaaaaattacaaaaattagagtattgtcatttttttttttttatacatttttttaaagtctatcatttttacttttttttttaaatattgtatcaattttggtcctatcacttaaagatactcttcattcatgtgactctcttatatcggatattttaggtacaatacatacaaaaagaaaggtatgtttcaattaaatataaaattagaggtaaatttaattaattaattaataaaaataatatttttcaacttttccccaaaaattataacactaataataattagtgtaccgctatcggtgctataagtgtaattatatcactagttcaattataatttaataaataactataaaaaaaaattagctaactacgtggtatatcaatatagtattaaatattttaaggggtttgagatgtaaaatggcctcaatttggtaactaagttagtaaatgtccactttttaaaaa

SEQ ID NO: 289448 - DNA, 851 bp, Cannabis indica
gagatctgaacggaaggagtcattatattccgctgcacccaatgtaaggtttcctaaactttatatgtgtttatttcattgttttagaattcatattaggatgttaatgaaacatacatggtagtaaatctagatcctggtaaaatatttccaacaactggtatcagagccatggtaatgatttactttcatgaaatatgaattaaaacgatgttatgtgttgatttggatggtttcatgttggtttatgtgcttatgtgatgaatgtatgtgttgtacaaattttttccatgaaaaatatattttttttctgtttttgaaaatattttatttggattccttgtgaaaaattaagcaatttttgtttttacggaactcgattccgataaaaattgaaaaagtatgaatttttgaaaatcgggtgccaggctgccgaagcttggtgcacgcacgcaccaggtgcttcggacaaccaggacacgcgcgcggaataaggggacaagcctttgtcttcagacacggagtgggcattcagacacgcccagaaggctgcaaatcctcctccaggaggctgcaaatcctcctctaggaggctgcaggcgccgagaatcctcggcagtcactccctctctgcgcgcgtatgaaggctgcgtgcagcctgttgcacgcctactcttgggcagcaacgtttttttacccaaaaatctgattttttggggatttttcccaatttcggatttttcaaattttcaaaccctaaatttaaaataaaatattatttttaaatatgtttgaacttaaatatcatattttaaattaataatatttattttcaatagattattattaat

SEQ ID NO: 289449 - DNA, 781 bp, Cannabis indica
atagtaattctttaagaaacataaatatatttttctattttattattttgaaaaagaacaataatagaaataaatatattatataatcatattaaatataaaaaaatattaataaaagataagagagatatgtggtgaatttaattttaattgttatatttaaaaaaaaaataaataaataaaaaaaaaaataacactctaaatatatagccatagatatatgcaactcagttccaactccatcaagctaaagatccaaaattattaactacgaaaataaaattgacagaaatagtgaagttgtatataagttaccactttaatttgattgttctcaaccccacattcttttatcaagttgagagctgccactattgtgccacctagtagtcaatacaaagagattacgaaatagttgaaaaaccaaacccagtttatacacataagaaattaagattcaaaacagatactgtaatatgcaagaaactattttgcaaaatatagagatcattttggagccattaaattcatacctgttgctaacatggggtcaacaacaaatacgcgagagtcttcaggaaacttttcaggtagcctataaaagaggcaaaagatttataagaacctactccaattcataggatttaaactgtttatgcagaatgaaaaaggttatttccacatttcatgaaaataagtaaagggaaactgaaatcactgaacataatatgacaggaaagtcttacttgtttagatatattgatggttgaagtgtctcctc

SEQ ID NO: 289450 - DNA, 44 bp, Cannabis indica
ccatgggtctatatatccgagacttccaataagcagatctagaa

SEQ ID NO: 289451 - DNA, 528 bp, Cannabis indica
ctcatcaacaaaaagtagctcggtatttcaacaaacaagtgaaagctcgaaaattcttcgtgggagatatggtcctgagaagggtattcctgaacaccaaagagagcacgtcaggtgtactaggacctaactgggaaggaccatatcaagtggtcgaagttctcgactccggagcatacaaattaggtacgtatgacgaaaaaatgcaactcattctagtaccacggtactggaatggagaacaattaaggaaatactaccaataaagtaccaggtctatttgaccattttaagtacacaggtccggttgaccactccaaattactcaagtcgggttgaccattttaaagtactaaatgaacattcacttccaagtgaatggccttctgggcggactacgcgcaaaggttttagaaacaaagtactcaggtcgggctgaccactttaaagtacagtttcttatgtctgcaatttgttttatttcatgttaagctaaaagatccgattagatacaatagctctgatgta

SEQ ID NO: 289452 - DNA, 746 bp, Cannabis indica
ttttttttttgaaaaatctgccctgaaaaacgacataataaattttccttaaacttccaaaaatcatgaaatcaattccaaaatgatctaaatgaaaaaattaagagatctatattgatttcaagcatcgaaaacacgcaaaatgtatactttaatttcaaaaagtgttctcgggtccgaatggatttttccagtaaagttttcagattttaaggtattaaaattattttgatgcacaaaatcgatctataatatcttatgaatatagtaatgcatatagaattcaaaataaataccaaaaatgaaaacggaaaaaatacggaccgaagcataaaactttcatgtatatatatactcgtatacaatatatactgcataaaatcatcattaatgtatggaagagagtattacatacaattttatgcaataaaagtatatataaaaaatatatatatacgtatatatatacaacaatacttacgtatatatataatatatataaacaaaattaaaatatgaatatatatgtatatacgtagattgaattaaaatatatatatgatcagaattatatgaatatgaatatatatataaattaagaaccgatcatatacgtatatatttatatatgaagatgtatatgaatataaatatatatatatatatgtatatatacatatgaagatgaatatgaatatgaatatatatatgtataaaaaagaattgagtatgaatgtatatatata

SEQ ID NO: 289453 - DNA, 681 bp, Cannabis indica
acaacactataatcattaacatattcatatgttctggacttaaatggaattcatacattatatctataatcatgaaataaatcatgtgaaccatgcaacataaaatattatttctggtctttattaataagtaaatctgattatattgaaatgggttttatttagggcacaaaacccagcagtgaggtcctcctgagatcatatccactctctcgttgggtcttggcggtaggccaggaatatgttgggcatctctggggggagcaactgaggccaaagctccgcctacaccccctggtgctccttgaggcaaagctcctactgcctggaccggattgaggtgacgcaaccggttcttgatccattcgtagagatgtcccaatcggatcaagttttcaatctcgtctttgaggtttttgcattcattggtactgtgcccaatgtcattgtggtactcacatcttttattaggatccctccgggaggtgttcttgtacagaggaggtggtctctagtactgcgtattttgcctggtagcaaagtgcgtattttgcctggtagcaaagtgcgtattttgcctggtagcaaaatcacacgctcttgtgagtccgttagctccgtgtctgggtgtactggggagtgtacccccgttttctgccgcttgtcctccgtccagttgct

SEQ ID NO: 289454 - DNA, 511 bp, Cannabis indica
atgggctaccgaaaaacaagatgcaacttgttgatataggtagtactaatcaatccatttaaactctattcaactgcgtagtctcatacctacacagtcttagaatcatcccacttgaccttccccaagcagtgtgagattgtacagcttactcggtattttcccttacagatcacgggactactgactgtcacaagtctcaaaaaggataagtaggataaaattgcagggttgacacaattcacaattagcatacataaaccaaatcaattactagaaaattacctaatatgatttcatgttcttgtaaaatacaaattgaaattcgttaagaatgtaatatcaccaagcacacgggttctacgaaaaataaatgaactttttaaatcatgttatctacctactttcaaattgactcacattaagaaaattgactaaaaactaaaaattgaaaattaaaagacataaaaaaaaacatgtcaaaacttgcagaataaaaattaagttcact

SEQ ID NO: 289455 - DNA, 607 bp, Cannabis indica
attaatacaagagataataccactcagattacaactgttgtggattcggaagtggctctcttaagattaaaatagtgagaatcataacgcaaatgtcaagtaagagagatgaaggagacttagtctcatctacaatggctagggcatgtagaagaaagggagagagagagctagggtttgagacataaagcttgagagcttagggtgcttaggaattagggaaattaggtttaggttgatgttatttatataggagagcttacaagagaataataggttaatatcccttaaaaataggaaatataatatatctgttacataataaaataataaacaattaatatgttaattaatccccaagaataggttaatagctgatatttatcgcctattttgtgggtggttgaagcctaatttgtagcttgaattattgtccaggttgcaagctagcacctagtgcctgccagggtgtaagctggttggccaagtgcctgttaggatgtccagcctttccttttgttggggctagccggcctatgctggcgatatggccaactagggggagtctggctagacccctaaggtggccagtttgttgtctctttgt

SEQ ID NO: 289456 - DNA, 793 bp, Cannabis indica
ggtgtaggaacatcgtcgctgtgaaacattttttgttcctcctctgttaactcatctggttcaaaagaagcttttaaacaatcactattttgatggattgtgactcctttttgcttcttgaaatgaacatttttcttcgttgttttgaaggttttcggagttacagaagtggaggacgttttattgagagtaatgactcttttatttttcttgctatctttaccaaaggaaactgaaatttgcattttacccttgggtagtgactgatcgattttccttagtggtaaagtaaagcttgtcatcagggctgtcatcgaatcttcgatcggtgtcaaagctttttgccctactcctcgttgacttttagggatatacttaaaggttcgtttttggttagataccttcaagttctcctctttggactgaggagatttcacaagggatagtcgcttaatttgtggagagttttgtacgactgagttttcatgacgtttgctctcctcaggtttccctttcaagatggtgacattagctggcttgtaaaattttgcatcagcataattcacttgttccccataaaagggattcgggtctgcattgacacttttgactttgccttccttgcaaaacttaaagcattggtggagtgttgaaggaatgactccatattcatgaagccatggtcgccctaacaacacattgtaggatgtatctgaatcgatgacatgaaataaggcttcagaatttaactcgcctatttcaatttttagtgtgatacttccccttacttttt

SEQ ID NO: 289457 - DNA, 614 bp, Cannabis indica
atgtgtaggtaagaacaaggctaaggctgagcagccgtgagagcaagcagatagggattgtacatgtcgacgcggttaggcctggagcgtacggtctttgggacatcaaggcttattttgtatagtctctaggcgacaaacttttatatatgtacagtgaaacttttgtaaatgcttttgtaaatgggatcccataattatatatgtatgctattttatgtttttaattaattaagcaaaattttaattaatcacgattttcaataacctcgttgattagcaacgagctgcacagtaagttaacaatcacattaacatgcctaaaatagttagggtgttacacatggttagtagatccagaatcaacaatccagatggatttgtcattctctaaaatacatgattaaagaactaaagcattaccattgttcttagtgttcagaagtctgggacaatttgatttaaaatgtcccttctgttcataattaaaacattcaataatatgtctgcttaactgttcttggattgttcttattgctggttcaatctgttgtgaaagataatatgaggaagtggaatcactttctctatttttctcaactgagcttgaagta

SEQ ID NO: 289458 - DNA, 526 bp, Cannabis indica
ccatgtttatttgtttttcttcttattacagcccaagctgcttgaactcggatgctatcttagcgagttgaaacggaaagttggacaaggggtggagttcgtccaagataaagatgaagctcgtttttttatttatttttgaattaattgtttcagtttcagaacaatttggatttcaattattagtttgggattttattccctattttttgttgcaaacaattcctttaattttggaagattttacaataaagttttctattttggaaataaattgcaatttatgaattgagcttcatttactttatcttgtgtaaccaataccaattatatttatacattttaataaaagtatgtgtatgtgtttttattattgatacaaattctatagtatcttaaactctttaaagagttaatactacataaacacttagaattacttttctagttttatgaataattgttaattcttaaacaattattaagaatttgtttaatagaaagatcttttgatctgataggggtg

SEQ ID NO: 289459 - DNA, 457 bp, Cannabis indica
acattgtgcaccagagaaaaagaaagggcagaaaatcgaaagaaagaaatctctcctatgccctaaacgaccagtatacgaagaacatatggtcttctgcaaaaaaatagtaaaaaaaacgtgataagaataatcctaacaccagaaatggtgaatctagacctgttacgtgaaaaatctaaaagattgcattcctagaaacttcaaatacaaaacccagaaaaacgagcagataagtaaaagcatgccgtgtacattaacaataaagcaaggggtgcaagaaacttacagtgaagtgttgagactgggggtcctgctgtagatcaaacgaagataagaaggattgacagtagtgaacgaagatgggactgggaaaaattgcaaagtgttcaacagtgttttcttggtctgtagaattttttctcgtctgggaaatttgagcaaagttggcaagaaa

SEQ ID NO: 289460 - DNA, 582 bp, Cannabis indica
gccacaattaaattttaagggggccaaaaatatatttatacatgcaattagatatagtttaatatgagtgcttaataaatatatatatatatataatatatagcctataaatataattttaaaacttttataggtacatgccacaattaaattttaagggggccaaaaatatatttatacatgcaattagatatagtttaatatgagtgcttaataaatatatatatatatatataatatagcctataaatatactactagaccgtttgtttcaatgttctttgaaaactttttacatttattattatagttaattaaggggtgggcacctagtaacatttgatagaaataaaactacatatatagtaaaattaatgagaacaagatacctcagtattttgggtggggagctagggctaccactacaaaaaattttacttttaatcacaacaaaatttgtgactaaaagtaaaaaaattgtgactaattatcatcattcctatcttgtgactaaaaagtctgtggttaaaagtattagtcacaaaaattataatttgttgtgaataaatgtgtttttagtca

SEQ ID NO: 289461 - DNA, 540 bp, Cannabis indica
gtgtgatttatttaaagtttcgtttgattttgatttttgcacttttagttgttaattttcctatatacacatatattttaataattagttcatcaattgtaaaaaataatacaaaaatatggagaatgaattttagtgcgtataagaaaacaggttggtctattaaagagaaataggtcgacccgagtaaagtatgatacaaatccaagcacaacataaaattattggacttgcgggtcataacgagcctaccctataaaattattgcataatacattatgactcatatttttttatagcacggcacaacacggcacgactcatattttcttataacccaaaacatcacgacccatattttaaaaaattacaaaaaatatataccaaactagcatgataattctaaaaaaacaaacacattatatagtatccttttatatatactaggtgaggttggcacgtgcaaatacacgtgcttggctctttttattctatttcattcatatttttaattatttaatttttattttctaaataatt

SEQ ID NO: 289462 - DNA, 781 bp, Cannabis indica
ctcagatcataagagcttgaagtatctttttactcaaagggacttgaacttgaggcaaagaagatgggttgagtatatggaagactatgatttcactttgcagtatcaccccgggaaagctaatgtagtagctgatgcactaagtagaaagcctcatagtactttggcatgtttggctcttgaggactggaaaaggacaatcacaatgggtgattataacttgcaatactatgaaggggaagaagtagcttgtatctctaacttagtggctacaccagtactacttcaacaagttaagcaacgtcagtggcaagatgagaaattaagacttatttggaaccgaatccaggatggtgagcaactagatgggtggacagttaatggtgaagggtacctataccatatgggaagactagttgttgcagatatccctgaacttagggagaccattttgattgaggcccatagatccaaattcgctgtacatcctggaagtacaaagatgtaccaagatttaaagagacaatattggtgggaaggaatgaaaagagatgtggccagctttgtagctaagtgtatagtatgtcagcaagtgaaggctgagcatcagagaccctcaggtttacttcaacctttgcctataccagaatggaagtgggacaagattaccatggactttgttactgggttgccattgacacctttgaagcatgacgctgtttgggttattgttgatcgtttgactaagtctgctcattttattccaatcaggaaggattac

SEQ ID NO: 289463 - DNA, 546 bp, Cannabis indica
ctgttaagaaataacttacagcatcgtcgagccattcgttcagcaccatcaatttcacgaaccaggatctagtggcttcgccagtgtgaacatccctaggacggccgttgtccctagcataagtgatccacttctggaaaaattttaacagccgggagtccgccggtttcagtgtgtctactaccacgggcccatgtcgttgtttcttcttcccagctgtgtagtcattcaagaaaaccggcttccgctttcgcctaaccctgcagaactccaccccagctggtggcccctgcaactcttccacatcctgagattctgtatcacccagcgaaatgacaatggcgtttgcaggagtagaaggaacgtcacatacgtcagatgccaatcttctgggtaaacatcatcatcatcatcatatctcggcggtgatggatgtaccgtctgtaatggctctgccgtgtctgatggatgtgtcgggtctgattgatgtgacggcccggatggttgtgtcggctccgaaggctgcttctgtaacaaacttatcac

SEQ ID NO: 289464 - DNA, 528 bp, Cannabis indica
ggcgaggaacaatgtggccgcggtgagatcccgtatggccaggggaaaaatcgtccgacgaaccctaaaaattagttataaatagaaaaatgcgattggaaattagggagagcgattttgaaccctaaaacacagcacaaagcagcaagaagagcagaggaaatcaaagtgaagatctagagtcattccaccaacagtttctttctctattcttttttaatttctttatgttgaattttgttataggaatggttatggaattgtttatgaactaaatttcccatttagggaggatgatgattgtttaatatttttgcctagttaatgcataattgccattcctccattcttgattgtgaaattatctttatttgtgtttaattccatgtataagcttgatcaccttctgcatgttctatgatctcaattcaaaatttgagaagtgagaattgagaatgctaaaattggataatcgatgttctatgtgaaacgagagtatttacatgacttatgtgacaagtagattat

SEQ ID NO: 289465 - DNA, 528 bp, Cannabis indica
ggagggttagttttggaaaattagtaaaattgtcatatattagcaattttagtaagtatgtatttaggaaaaaaataatggggttttgtaagtatggaaattcaaatttcccttcttatatcaaaaaataaataaacaaacataactttataaactccaaaaattatttaattagaaaaaataaacatgacacaataaacaaagaaaaagataaacaattttttatatatattatttattttctaaaaaattattaaaaaataaacatcacacacatagagtgatataataaacttatgtgaatattattattttgtttattaaattagtatgtttaattaatagaaaataaaataaacacatatataacatgttttatattattggatatttttttattataattgtaaacataaaaataaacatagtgaatattagcatatatatataataatcaattattattaccatatatattataaaagaaattgaaaaaaagtttttaatatatataaaaatgtatgagaa

SEQ ID NO: 289466 - DNA, 121 bp, Cannabis indica
tgaagaagaaaagagaggatgtggtttcgattttgctataggaaggaggcttaaaattttactgaaggaatgtgatgtatcatcatctttttctttaagccatcactacctatttataggt

SEQ ID NO: 289467 - DNA, 399 bp, Cannabis indica
aggttatgaagtagaatgctataatttagttgttactagccaaagggtaatccctttgactagttttagtattttatagggaaatctagttgcttagtcttggtggttggttgattctctttagaattttttaattaaagttttatgttgttttttgatgttattttcaggtggaacttcagtattttattgagttaggagcgttgtttgaagatgttatagctttattgtctaaattttcggtggcagttttgtcccatggggcttgctctaagtttttagcggcccatggttggcaaagcatgctctgcggttagacgatgagttatcttggttcgaggagattccagcgtcggtggcggacgtgagcgtcgtaaattcatgagtgattttaatcac

SEQ ID NO: 289468 - DNA, 522 bp, Cannabis indica
gaaaatctcaccctccacagccgcttccgcacttgcaaccagatccacagccacagcttcctccacagcaagacatgtttgagtatagattgaattgaaagaacaaattttcttcagagatgaggaagattcggttttgatgattgaagatagagcgagttttgagtgcgaaatcagaaatgaactaaaccgcacctgtttttatagagcaagagcgagtcaatctctaccgtacatgtgctaatcaagggatccacggtgctctaactcccacgtggcctccctttttatctcagatgttggcacatgtgtctagagttttctctatacgttgacgttaaggtatcaaccgtccgattgactttaattgatcaaagatataatcaacggttccggttgagataagtcctaatgtctatctcgcgcacttggtcatcaatcatgattattatacttttatgtggcttttggtaacacttttttaatcagttttctgtttttaaaagtagaaaagtgaaaata

SEQ ID NO: 289469 - DNA, 722 bp, Cannabis indica
gttaagcaaacttcagagcaaaaagagagagctttctggcttcaaagttgctgaagagtttatagacgatttatggcttgcttgaaaccggacacttgaatctttgagtaagattctgattccctttatggtttttcctttgcatgcttatgctttgaatgtaactttgctgtagaaagaacactgtaggaaaccctagggtttgaaacttctgcgactcttattttccatgtccatgtgttagctttcagtcgtaaggcttattttagaactgcattgtgtctgctttctattctgcttttttcaagctttatgaactttttcgccctaactcaagaaaaactttctgacttctgtagtttagacttttctctgaacatgatcgttctttaatctgttgggtactcctggtcggcatattttgcttgttttttcgcttgatactccgtccaacactcatcttgcgtgttgtcttttgtagatgaacccaggtgagtcttgggagcccgagcatcaaatcgaccaggagctgctccaacttcttcacgaagtccgtcctcgtcttcgtgctaattcttcttcaaaagaaggatattcctccgattccgtacccagccatagaatgatggctcgtacgaagaaaactcgcgtctcgctgatggatctgacccccaggtggctcgacattccactctgcccaacgccgaacaggatttggcggt

SEQ ID NO: 289470 - DNA, 558 bp, Cannabis indica
aatatacatgacccaaccagaagggtatgtagagaagggaaaacctaaccatgtttgtaaactggttaagtccttgtatggactcaagcaatcccctaggcagtggaataaaaggtttgacacctttatgatgaaacaaggtttctcaaggagttactatgatgcatgtttctatcacaaaggaactgacatcaacacggtcatctacttgttactttatgtagatgacatgcttatcataagcaaggaaagatctcaagtggatgagatgaagaagcaactcaaggctgagtttgagatgaaagacttggggatagcatctaagatactgggtatcactataaagagggacagaaagttgggcaagttattcttgacacaagaggactacattcaaaagattatagagaagttttcaatgaaagattcaaagaaaacttctcagccaataactagccagtacactttgacaaaggaacaatgtcctaagactgaagcagagaaggaagcaatgagtaaagtgccttactcaagtgcagttgggactattatgtactt

SEQ ID NO: 289471 - DNA, 344 bp, Cannabis indica
tcgagcttagctaaatagaagtaaatggatgagctcttgtttcagtgactatatcttagatcactaaaacatcatttacaggtagctaagtgttttaaggggccaaatacattgaggggtgaaaacggtaaattttatcccatctcgatgtaaatcatctataatttacttggtaattcggttggacttattggaagctcagtaatatacatccatggtccccattctagttgagaccatactgcttgtaagactcaataattgatctatgattaattaattataatttttaatgttagactatgtctaatttgtgaattttcactaagcaggggtgaaattgt

SEQ ID NO: 289472 - DNA, 539 bp, Cannabis indica
ctcaaagctcattaatggggtcaagaattttgggttgcataagtgaaagaagagtaaatactcaccaagaacattgtctgtattaaatacactcataaatatacagactcgtggactaaggctcattaacgccccaaccacgtaaaaatccttctcttaatttcttacagctctttaatcttttattattttattggttgccgaaaacctcggtcaacagttacatttataaatatttctatcgagatctaacactatgtttgtttaatggatgacaatccattaggaatttgtcccattaaaaacaacgagccaagttagaccaacaatgaagattcaaaatttaaactacaattaacaacataaaataacatggttcaatataaattcacacacaattcataaattattaaacatttagcaaataggaatgacaagcgaaaatactaaaacatacaatcctaaatattttccaaggtcttcaacaaactgataacagtgtcccgtttaggcgagagtcaaagataccatccattgaa

SEQ ID NO: 289473 - DNA, 733 bp, Cannabis indica
aaaaaaatcaaatctagctgaactgcaacagaatattttaaaaccacaaggttaaagaaagtgtaataattcaacgattaaaagtaagtgaaaagtttaattttgtaagtaataacctggagaagattcaaaatctgcaaacacttaccaaactcattcaattccaaacaattaccaaatataataaacagatagtacacataaacatataaataattacctgattcaaatgagtgtgattaacaataaaaaaatcgtaatatatttattgagaattaaaaaaacaaattctcaatatctcaatgatcatcaaaagtcaattaaaaaaacaaattaaatatatatatttattgagattagaccctcaatcgtcaagaactgaacaataacagagtaaattcacttgatagatccaattgaaaaaaaaatcctagaaaacgtaattgaaggagaaaagagtgagaattgtgatgtgggtcttgaaggaacaatacctagcaaatgataacaaatttagagaagaatgatagagaaaaatagttaacgatgattcgattacagaatttgtgcatttgtgcaattataagttaggccttgttgttgtgggtcttcgtgattagtatcaaatatactaattaacagtgttaattttaaactgttaaacagaaaattcacaacaaatctgttaaacacaacaaatatcagttcaaatattaatgggatttgttttatt

SEQ ID NO: 289474 - DNA, 628 bp, Cannabis indica
tacaactatatcctccatcgcccacaaccagagaaagttacaggtgtggccccctcattctgatgcatgtggcattaccttttctccttcaatttgaaccaagttgatggctttcaagtcaagaaaagatggcatgtggatcccctatcaaaacctctcccaaatgctttcattgtcactttaggagatctgctagaggtaactctaaatttacataaactacttttggtaaaaaattgagtaaatactattttggatcctctgttttgtaaaagttacaattggactttctgttttgtaaaagttacaattggactctgtattttttaaaatggtacaaatagaatcctgaactgattttttatcaaaataaaatttaataaaaatctgatataatttttaaaaaaaagttagtcaaaaaattaagcccagggtcttaattttatcattttttgaaaatacaggggtctgttttgtcatttaacaaaacatagggtctaatctgtaacttttataaaacacaaggtccaaaatgctatttaccttataaaaaattatatacttttaaagattttttaaaatatttttacagtgtttttaataaaaataacaagaaaactacgtaaaa

SEQ ID NO: 289475 - DNA, 675 bp, Cannabis indica
tgtaatatcccgaaaaatatattgatattttaattggacatattttattaaatatgtgattaagtgggtattagagtaggattataatcctacttaaactaattacgagttgattaggaaaatatgagtaaatgaataataaagcgtaatttattaattacggagattgtataattcgaataaaatattttcgggcctggcaattgtggaactcgacagaatggtcagaaatgtcacgattgttgaaattgtgttatattggaaattataccggactaggttaagatgttgagaactaggttaaatcgggaaagttagaaaattaccaaaatgcccctaggttattttaaagtttaatttctttgggggtaaattagtcattttgtataataggtattttgactttctagactttgtgggctgcccactattataaaaaaaaagaaagaaagaaaataataagaaaccctatttaagggaaaagcttccaaggcaagaaacaactttttcttcttctccttcttcttcccttcgtgtgaaccaaaaaccagccagcaaaggatcaaaacttcaccatttctcttgaattgaagtagcttgtagaacctaagcacaacctagaagcaatcaaggtaagttctatgctttgttctaagaatttaattggttttggag

SEQ ID NO: 289476 - DNA, 498 bp, Cannabis indica
gtgactgcacaagccaaacaagctcaagttgtctgcaagttgtgtggaggacctcatactattgacacctgccctatagatgtcgacagtttgccaatggagcaagctcacgccattggaaactatcaaaataattatggtcgtcagaagaacttccagaagcagtttcctaatcagcaacaacatgggttttatcctcagcaaagcaaactgaacaacaacatgactctagtgtagggtctaatcctcaattagacatgttgctacaattcatgacagagattaagtcatccattaaggtcttggaaaacaaagtggagcagttggcttctcaaaacactaacaggactcaaggtaacttgcctagcactactgaagtcaatccaaaggagaattgtaatgcaactaccttgagaagtggtaagacctatgatgggcaaacaaagacaagccaaaggaggaagatgatgtagagacaacacctacaccagagaaaga

SEQ ID NO: 289477 - DNA, 488 bp, Cannabis indica
aattttttttcctgtacctctatatagttataacctctcaattagaatataattttcttagtcccaagtatattcttggatagagattctactgtaatataataaatatattttttgaaaatgtataattaatatacataataatatttataaaagtaaatatgcatacttaaaaaaaaaattgatgaattaaatattgtgatatcaatacccataattttaaaattcgtgcctattttaaaatttatgaaatattttttttttaaaaaaataaataaataaagtattaattgatattttttataaaataaaaaattcaattttaattttcgcttaaagttttgaggcgccctcctatgactacttgatttagccttaaataggcttaggactcaaatttatatatatatataaatatatataattgtttttacataaattcctagtgaggatgatatttattgtatattttatattattaactaaga

SEQ ID NO: 289478 - DNA, 564 bp, Cannabis indica
aatggaaagtaatcaagattgtgtgattaaatgtattcttatgatttatcagtacacagggttgaactgataggataatctacaatatagtttacttgcaccttgaataagtattatgtccttttcatggtattggttaaagtaagcttgggttggatgtatggcatatgcatcagaagggatcgatattgaacttgaattagatataataaacttaccgtaatatctattcaattcaatatcccctagttgatcttagatcaagtgatcttaattttgagatggttaggttctagttcagttacattatttgtgttcttcaatctgttcgttaaagtagaccaaatggttcttctcgtgacatatagattaaggacatggtagttcaattgagtgagagcgctaatcatagatgcaaaatttatggcttctatacagacataaaagtaaaacgatgattttctttgagccttgcttaatagagataaatggttgagtactcatttcagtgattatattagttcactggaatatcatttatagctagctaagtgttttaaggat

SEQ ID NO: 289479 - DNA, 729 bp, Cannabis indica
aaacaagaaaaccagttatgatcatttacattttcggacacactaactgcttgtggaacatcctacagttgaatagcaggatcaacataaggaacaatatcctgaaaatattgatcagaacattaacaacacaagaacataaacaacaaccatgatattgaaaaaaaaaaataaagaacataaaaatttaaataaatacctttatttcttaggcctctttctttttttaacatacacaatagtatctgctttcttatccatgatattaaacctaaacaacacaaagtatacagagaaagataaacaagtaaataagtgcacataaaaaactaacaataaacatatataaccaatcaaaatgtaaatgtcaacccacatcacaaacacacaacaaaaagaaaacggccacaacgtggcaaaaatagttaccacacccactaaaaacataaacaaataaaaaaacatttaaaaaatagattaaaaaaaaaccagttcaaaaacaaaaaagcgaaaaatcataatacaaaaatcataaaaaactaaagagaacaaatactattatactattaagaaaatctattatacaaaaaacaaaatcggtttcatttaaaaattattaataaaatctgaaatgtatgcaattcatgaagaccaaaacaaagaacaaactaactaacacaaagtcaagagacatgaagcctttgcacacaaccaaaaaaaaaataaaaa

SEQ ID NO: 289480 - DNA, 579 bp, Cannabis indica
aatcggaatcaatatttgtaatatgctgtttactaataattttttagaaatggaatagttgtgatttatctaatttactttatttggaaacataaacagagtgcttaaattgactaaattgcccttttgagttaaactacattatatggtaattattttgtaagatatattttaaaggataaaattgtcattatatacttaatattaaaaaataaaataaaaataattaaaattcattacccttaatagcattccctggcccatgcccattcccattctcattctcattcccattcccattcccattcccattcccattcccattcccattcccatccccattcccattcccattcccattcctattccaattttcattccccgtccattcccaatcccattgctgttccctggcccattctcatttgcatttgcattcctattcccattcccatttccaggcccattcccattcctattcctattcccattccctggccaattcccattcgctttgcattcccattcccattccctagcccatttcaattcccattcccattcgcattcccattccca

SEQ ID NO: 289481 - DNA, 774 bp, Cannabis indica
gcagtatgacagaaaaactttttcttacgcaagccgaaagataggcaatatcctcatcgtggtggcacacagatgtggaggcgttcagactaatgacaaaaagcggtgaccgtcacattgttaattccgaaccagatgtaaatgcaatttataagcaagcatctttcggctcatctttaactcttgccaaagtaatgctattgcatgaacagccaagccttgagacaggggattccatgggaaggtcttctaccagctctttgaacttgggtggtacaagtgaaggccagacaatggacgatctagatgaatgcactttgcttcatcttgcatgtgaaactgcagatataggcatgctcgaactcctcctacagtatggtgcaaatgtaaatgctactgatataagaggtcaaacgcccctccaccgttgtattctcagagggaaaacaacatatattaaatggcttcttgcaaggtgctttaatgatctggttcctgtcagtttgtttttagtttgcatcttatttttgttacaaaactgagtttttattgaacttgcaggggagccgatacacgagcagtggacagggaaggcaaaacaccctttgagcttgctgttgagctaaactttgatgatactgatatccttgctctattatccgattccagtggatgacgaggaatcaccgaagagccaactaagatgctggaatttagtgtgaaaaagggagaaagataaaaaaaaaaacttacatatatatagatatatataca

SEQ ID NO: 289482 - DNA, 360 bp, Cannabis indica
ttgaggatgtctcactgggtcccgttgcccaggaggggtataagtctcgggccacaggatgggaggcggcagagcttcactccaccctaacctgcccccaccagctggagaacatcgtggaggtggctggaatcaaaccctcaacatccgggacgtatcaccggccgccccaagatgcggagacgcccaaccataactatggcggcttcggggcttggagccagacgcacctgatggctggggccatgcttcctcttcaagactactttgttaatttttttttttgtcggccttgcgccataccaactgattcctcaagcataccgcctgctctcaggcttatttattttttactccgcc

SEQ ID NO: 289483 - DNA, 672 bp, Cannabis indica
caaaagtaagctcggtatttcaacaaacaagtgaaagctcggaaattcttcgtgggagatatggtcctgagaagggtattactaaacaccaaagacagtacggcaggtgtactaggacctaactgggaaggaccatattaagtggtcgaagttctcgactccggagcatacaaattaggtaagtatgacaaaaaaatgcaactcattctagtaccacggtactagaatggagaacatttaagaaaatactaccaataaagtacaaggtcgggtgaccactttaagtactaaatgaacatttgctttgaagtgaatggccttctgggcggactacgcccaaagttttcgataaaagaaacaaagtactcaagtcaggtgacaactttaaagtacaatttcttatgtctacaatttgttttatttcatgtgaagctacaagatcagattagatcagatacctctgaggtaagttactatgataacaaatacacttttcgatcaataaatgaataaagatagtatttcaaaatttaattgagtcaaaaaaattggcatgttataatttaccataaaatgcgtacaaaaggtttggttaaacccaaagcaccgaacagataagcaatatatttgtaagagacaagtgaccaagagtcatacgtctgctcggtcact

SEQ ID NO: 289484 - DNA, 644 bp, Cannabis indica
tcaaatggatcagacaactcaagattagtctatcttgaatagtctgactccagcttttctgccctacacctccaattatgtcatgaataagaaggaacaagactttcacgagttggttaacgaccttcagacatttgaaaatttgattggaggaccacagaagaaagggtctaaagctcataattctggaaatggtaatggagcgactaaggctgaggcaaaccttgcctctacttccaaacccaagaacaagaagaaatggaagaatagcaaaaagcctgttcaagctgtgaaaacagttaaaaagaaaaaggctgctaatcctggtgatgcaccaaaaggaaaatgcttctattgcaatgaaaaaggccactggaaaccccaatgccctaaattgctagcaaagaaacaaggtatttcttttcctataaactgatgtgttttagtgaattattatccacttggattattaattctggacctactaaccatgtttatttattttcttcttatttcagccacaactgcttgaactcggatgctatcttagcgagttgaatcggatagttggacagaagggtggagatagtccaagatgaagatgaagatagtccaagatgaagatgaagctcggaatcttcttt

SEQ ID NO: 289485 - DNA, 198 bp, Cannabis indica
cttcaagcaaatagaaaataactatctagattttcactaaataattactttattttctaattaaaatataatatattttagtctatttattttaattaatcattaatgaaaaatttaattgatttaagttgatctaaaaattaattttcaactttaatctatttttacaaaaaaaaaaattcaaaattttcttcattt

SEQ ID NO: 289486 - DNA, 570 bp, Cannabis indica
gtaaattcaccagcattatcaaggcggattgtcttgattgcatagtctgggaattgtgctcgtaatcagattatttgagcgagaaatcttgcaaatgctacattacgagtaaataataagcaaacatgtgaccatctagttgatgcatctatcaataccataaaatatctgaatggtccacatggtgggcaaataggcccacatatgtcgccctgaattcgttcaagaaatccaggggattcaattccaacctttaccggtgagggcttaatgataaactttcattgagaacaagcagcacatgagaactcactggataaaagaatcttttggttcttcaatggatgaccatgtgagttctctattattctacgcatcataattgaaccaggatggcctaacaggtcatgccatataacaaatatttttttttgatttgtgcacttctcgttcacaataacatgagtttctattatacttatacgtgtaatgtacaaacctgaagacaaaccatgtaattttctaatatgtattttttctttgaaacaatagatgtaatgcaaagatatt

SEQ ID NO: 289487 - DNA, 698 bp, Cannabis indica
tacagagcaaaacggaaccagggtttagatagttatgtcgccaaaattttcgtatttttgtggttacaaaactgtacaaacggaaccagggtttaactgttacaaactgtaaagttcaagtggtttagccgccaatgttcctttgtttattccgtccgactatctcattgagctttcatgcgtgtttaggtataatgaacagatttataccactacaattacccaaatgagccacaaaggagcactaccatagctcttgttattgctttattgtgtgtttttttttttttttttgctaaaagctttatggtgtgtactgtgtactactttaacaaatagaactgctctttcaaatgaggttgaacatgttattcctaatattatttactctttgtaataatcttactatttttgggtttcaatcattgtaataggggttagctcctcatgtagcaaaaatggctgttcacttattatttgcttgaaaaaaataataaaaagggaaaacaattggaaacaaatagtgttgggaatattttaccagaatctagattaacaagtatgttgatcctaaatatgaattctctaaaacaatgaaataaactcataagggtttgagaaaaccttacattgattgcagtggaatataatgactccttccgttcaagatctctgagcccttgattcctttctgtagc

SEQ ID NO: 289488 - DNA, 614 bp, Cannabis indica
taattttaatttctacatactcactaaaaaaaccaattgttgtcttatcaatatttaattttctgtctacgtcccacagtgtactcactgacgttaaatggaatatttcatatgctttaaataacgtacgtcagagatgtcacagtgtaacgtcaaatcaaattcagtacatgcagatctcatgggattccctgatttgagttaattaagatactatatgcaaacacgaaacctaggtatattacttaaggagatttaatatttgttgggctgtaatatactaatatcacatttttgttattaaaatttggacaaatgaattaggtcagctttaatacgatagtagtccctatgatagtattacccaacaaaattaacaaaactaagttaattaactatggtagtggtcccaacaacgattatgatgtcaaattttaataaattattgactactgaaatgagtggatgtcatatcacattttttatttcaccatttaaaccatgtacttattatttcaagatggtgatgtgacatttttatttttactttaattctggaaattattatttaaatcataaaaccgtacgtacttttctttttaatagaaaaatgt

SEQ ID NO: 289489 - DNA, 543 bp, Cannabis indica
attgagagtacacaaggatgtcgtcgataaatacaataacacaaatatcaaggaaatccttgaataccctattcatcagatccatgaaagttgcgggagcattagtcagtccaaaagacataacaagaaattcataatgtccatacctagtgcggaaagctatctttgggatgtcctcttctctgattctcaactgatgatagcccgatcggagatcgatctttaaaaagaccgtcttcccctgaaattgatcaaaaagatagtcagtcctaagtaaatgatatttattcgtgattgttagtttattcaattctcgatggtcaatgcacatttgcaaagacccatgtttcttcttaaaaaacaatgccggagctccccagggtgacaccctaggtcgagaaaactctatgtcaagcaacccctggagttgaatcttcaattcattaagttctgctggagccattctgtaaggggccttagaaaccggttctgctccaggtgccaaatcaatgacaaaatcaatttctctctacggtggtaaac

SEQ ID NO: 289490 - DNA, 498 bp, Cannabis indica
tgacttttaacgaacaaattaaaaaacataaataatacaactaagttgaacctaatcatatcaggatgaagatctgtagacctaagatcaaccagtgatattgacttagaaagatataacaacaagtttatgatatcttatctaagatcaatatcggtcccttccaatgtataatccatacatccgatactggtaaaaactttgccaatgccttggaaaggacataacacttatccaaggtgtaactataccttatcgttgattatcatgccaatctaaatcaagtaaattaacaaatcatgggaattaaacttttgaacatataatcacgattatattctgctgtgctgacgacactataatcatgaatacatatatacatatatttacaaatgttttgaacttaatagaatttatacattaaatataatcatgaaataaatcatgtgaaccatgcaacataaaatgtgatttttaatctttataattagtaaatct

SEQ ID NO: 289491 - DNA, 462 bp, Cannabis indica
gaggggagctaattgggtcggttcgtgcccatcaggtccttgagataatttgacagttgaggagctctttgcaccttagcaccggacgattgcaccttagcacctgacggagtcaggagcttagtgcgcccaaaatgctcctctttggctattgagctcctcattggccaataagctcctccatggcccatgagctcctctttggcaaatgagctcctccttggcccatgagctcctctttcgccaataagctcctccatggcaaatgagctcctccttggcccatgagctcctctttggctattgagctcctccttgacccatgagctcctctttggccaataagctccaccttgttggacctccatatctagagtaaaaattcatgcacaattattttggattttttgagagataacagttagttaagcctactttttggtcagagtgatacgtacattt

SEQ ID NO: 289492 - DNA, 532 bp, Cannabis indica
atgggactccaactcaaggatctaaacccatgcctccagtctgtctatggtttctccggtcaaggagtcgcacctctaggaaacattcgtctacccctcactgttggacaagctccgacgagcataactgtaatggcatagttcctaatattagatgttccttcagcttttaacgtaatgcttggccggccggccttgtatgacttaaaggctgtcacattaatatttcactcgtgcctgaagttcccaacaaagaatggggtagggtgtctaagaggaaaccaacagtctgctagggaatgttataaccttgcagtggccaaggctaagaaggaagtatcctccatccagagcacagacaagagaaaaaacattcccaagtagggaatttcccaaggcggggatgaagatgtggatcctcgacttgaggacacaagcagcaatgttgttcgaagtaaaataagaattgataaaatttttgagagcaaacctagatttttttttccttgtcacatgcggatatggtctgaat

SEQ ID NO: 289493 - DNA, 1288 bp, Cannabis indica
aataagctgaaagtagtgggattattagttaatttttttaaaagtactttaattgactaagttagaaaaatcgaacacaaaatagaatttgctctctctctctctctctctctctcttgacctctattgatcccagctgaaatctaaggtttggttgatcgattgttgagtcttctagcaaggattctctaggatctttacgaatccactcaaggtgaactcccacacttctttttcctttgtaattttatgtttgaggttaggtttctatgcttgatttctgagttagagttgttgtgcaagctggttaagtttacgtgtagtttttgaggtgcgtgtttgatgattttagtgattttaagctgaattgggtgcgtgttggtgtgtttggacaaagtttgagctttagagctcaaattttgctctttcatgatgaattatgttttagaggctatacttcgtgttactgcttgaattgagtttattgtggtcttattaggtactctggaaggtttgagatcatttagggttgattatttttgggattcttgcactaaaccagtcgaccggttcagtttggtccagtagaatcggtctaccggctccccccaagcagaccccatataattggttttcctagttgggaacctagtttaccgtattgagcagtttagggtaacctagattttcatgttttagcaatatttagggtattaccatcttatccattgataggaaaagttttagttttgattttatgtccccgaaaagtgatttagcgtatcactcatcaattttacgtatattgtgacttaggggcctgtaaaaggtggagcaatagttccactcaggttgaccaacacacttgaattggggattgaagtaagattagtataattgtatgcatatgtgattacatgtttagcatgcatgattatgattggctgttagattacattgaaataacagtatcactgtacgtagagttatattggatacagaagaatgtatgtttggcataagtactgattgacgcaatcacgtcggtaccactagagtacagagtataggctgatagtatggtcaatagtactatcgtacgaacgttctagactcagagtataggctgatagtatggtcaatagtactatcgtacgaacgttctagactcagtatgcatgggatgaaacatagggtgatgattgggtgtatgggcgcgtaattataatccaattcatttttatgttatgattatactttccttactcagtctgtcgactcacagtta

SEQ ID NO: 289494 - DNA, 649 bp, Cannabis indica
acgccagatttttagtgcaaaaaccactgcggctaactctaggtcatgtgtcgggtatctctgttcgtattcttttaattgccttgaagcgtaagcaattaccttcccttcttgcattagaacacaacccaacccttgtttagatgcatcacaatataccgcaaattgtccctcttctgttggtaaactgaggattggtgctgagataagtctattcttcaactcttggaagctttgctcacacttgtctgaccaggaaaattttagattcttcctagttaattctgttaagggtgtggctatctttgagaacccctcaacaaaccttctataatagcctgctaaacccaaaaagcttcgaacctctgaggcggtctttggtctaggccattctttcactgcagcaaccttggcaggatctacttttattcccccgttagtgacaatgtggcccaaaaatgcaacctcggacaaccagaactcacattttttgtacttggcatacaattgatgttctctcagtcgctgcaaggtcaagcgtaagtgctcctcatgttcctcctctgtcttagaataaatcaatatatcatctatgaatacaatgacaaactgatccagatattccttgaagactcggttcatgaggtcc

SEQ ID NO: 289495 - DNA, 565 bp, Cannabis indica
tagccgtctccgagcacgcggtcagtgctgccctagtccggaagaagagaaaactcagcatcccatgtactatcaggaagcgcatgataggagcggagacgcggtaccccatcatcgaaaaactggtcttctacctcctgatggcctcaagaaaattaaggccttatttccaagcatacccgatcaaggtattgaccaaccacccactccggcaagtcctacaaaaaccagaagcattcggaaggctcctcaaatgggcaatggaattaagtcagttcgacttacgctacgttccctgcatctccataaaaggccaagccttggcagacttcatcaccgaatgcaatgaagccgaggcaacggcgaatgcgccagcaccatcgatccccacatggaaagtatttatggacggagcctccaatgagaacggacccggagcgggggtggtgatgatatccccgaccggacttcgactccaagcatccctacggttcgacttctcagtttcaaacaatgaggccgaatatgaggccttgatagccgggctgagactagcgaaggccgt

SEQ ID NO: 289496 - DNA, 585 bp, Cannabis indica
atttacaaatttaaatgatataaaaatatttgttaaaattttaatgtagttctataattatgaaattgtttgttttaaattgcttaattcttaatttaaaatattattttttttatattatttaaatttttaacttgaaaaaataaattaaattaaattaattattaatgtattatgttatttaaaagttgtttctttttttaataaaaaaattaactaaatatcatagttttttttagtggactcattgttgaaagggatatatattgatgtttgatatttttatttatttatcttttatctcaaaagaaatatgtgaattcatctttatataaaataataaataatgaaattttctcttaaatattatattacaccttatattatattctttagaaaatgtgattagtgcatattttttcttttattataaaagtataatttttatgatgctataaaagtcccacatagcttagaaatgtgattagtgttagacttgtaacctataaatatatcactcattctttttttcactatatgggtgattgattaattcaatgttacccccattaagtatacattttt

SEQ ID NO: 289497 - DNA, 647 bp, Cannabis indica
gttcttaccttctttgtgaattcaagtgtgcttggcgacctgaacggaaagtctcgcgctagatggatgccctaatcacattatgaaatcgggtaagttacacgaacaaaaccctaatcccgagaaacccaaaaccataaacctaggttctgctacactttctaggggttacccaaactctgaaattagggaaacacccaaccatagctggttttagaggtctagcaaaaccggctagctggtttgcaccaattctccccaaacccttcacctcttgctcaattttccaccaaatgctaccaaactttttcagagttcctaaacaatacatagacaatattttccaaccagaatttcacaaaaaaacctaatgaatcaatttatgccattagagttcaaagcttaaacttgcacaaaaccaaaaccaaacatcgaaaccagctgctcaatgctatactcaactcaaatgaacctgaaaaatcaaaccttaaacaaacctaaccctaacaacccctatttcacaaaattcacacattcaacccgagaaaaagcttcaaaagcatgctcaacagttcagggttttaccttgcttgaatcctcctcaaccttgctgaaaatccaaattttagcaacaaatccccctggtt

SEQ ID NO: 289498 - DNA, 186 bp, Cannabis indica
aacttttgaacaaattaaaatttaagagaatattttagttgtgaaaaaatatttttaactcgaacaaacaacaatataaaaatctagaatagtaaaataaattcttaaactaaattaatttcataaatatatataaaataaaaattattataaaaaatttaatcattaaaagataaataactactt

SEQ ID NO: 289499 - DNA, 515 bp, Cannabis indica
taatcttaattatatgttcgaaagtttattccctgatttgtatgttcactagatttagactgacatgataatcagcgatatatggaaatacttattagtattgttaatacctggaatgtgaccgcaggtgtatagattatgcacccgaggcgaactggtaggggtacccgcgagctcgctacactcggggcttctggtgagggcgagaaccctccactaccaccaaactgggaagagttatatgctgcaatgcaagagactattcagcagcagggtgagcaaatcagagaactgagagagtagcgagctcagcctgctctaaaccctaatctcgatcctccaacacctctggtagtggcaccggatgcagggaatcgtttggaaccgttgtatgagcggttccggaagcagaacccgccagtgtttgagggtggtgctgatccactcaaggcggagcaatggatgagtatgataacatccattttttattttatgcgggttgaagataatgaccg

SEQ ID NO: 289500 - DNA, 616 bp, Cannabis indica
gtcacccttgtcgcggattcctctaagaagccaactaagggcacgcaagacaaggggaagaaagttgtgatcgatccggctatccgagctcgcaacatcttgaatctccaagagaagttcgtgggcgatgaatttatatcaaaggtcaacaagacccctactgaagagctggtgcctcgttctgcggagttggcttcgcagtttattgccatgttttcaagggcctttgtcactggatctaaggaagtcgaacttgtgaagagacagaatgttcagcttcaggaggacatcaagaagctgaaacaagatgcaacttccaaggaaaaagagcacgaggaacttcgcaaggccaagaagcaagttgagctcgaagccaagagcgctcagatgaaggtcgaggagatgtctcgcaacttggaggtcgagaaggagaatgggaagaagtagtatgaccaggcggtctccgactacatttacaccactctttccaaaactccagactttgacttctcaattcttggggcagaagctgcggagatggctgaggcttttcgagccatgtcgcctacgctgactcaaggcggtggagggaatcttttgttggaaatattttacc

SEQ ID NO: 289501 - DNA, 728 bp, Cannabis indica
ttcataaacagagtcatcgactgcgacgccaactccacagaacgcggaacaagctcctcagagggatcttctccgccttggacatgaactcctcgcccacgaacttctcctgcatagccagaaaatcgcgggctcggacagttggctcgatcatgaccttcttccccttgtcctgcgtggtcttagccagcttcttggaagaatctgcggcaagagtagctacaacatcgctcttcctcttctgggcgataacgggcgatgtcgtcgctgttccactcttcggcttgattttaaggacgggcgcggacttcaaaaaagtcatctctgcgaggataaataaaagataagtataaataaaattcaaggcatcagtttataacatgagataaattacctgagactggtcgagaagtttgcttggagaggcgtttgtctatccgctcttgttgtctctcagacggttctttgtatactggctctctttgaagacttgcgttctctggaatcagctggtgttctcgcagcttggcagtcgtacacagtaatcgccagtcgcgatcttgtaccggaaggctcccgaggatttcagctgtttctctgcgagttgcgtcaagtgccggtcgagctggtctatctgcgagaacaagaaagagcgagttagcatgagatctcaaagtaattcagaaaatgcctaagttagaaaacacgcgacgtactaggtctgcgat

SEQ ID NO: 289502 - DNA, 796 bp, Cannabis indica
cagcaacatccatcttttgcttcaacctgttcttcactcctataattttcctccatgaccagcagcaatcattaggtggttcataatcccaccaactaccatgtttcaaatagacattatgaatccacttaacaaagaggcaatctttcttacttgctatgtcccaaacataccttcccatagctgcaatattccattctttgatgtttcgaaatccaagccctcctgcagatttagtttgacagatattgtcccaagcaaccaaaccaggacttgaagtctcttgtgtacctttccataagaaggatctgcatacagcttcgatgtctttcaacaacttcttaggtaagatagagatttgagcccaataagtgtgaatggccaacaaaacagaattaatcaatgttgttctccccatataagacaagttcctagaactccacatccgaatccttcctgtcattttttccagcagctcctgacattctcctctagaaagccttttagagcaaatgggaattcccaaatatctaaaaggtagtgtgcttctagagaagtttgatgcttctaagatccgattcacctccaaatctggcatccatgaacaatacactgaggtcttctgaacattaggctccaaaccagaagtggaagagaaaaagcttcaaaaccttggagcatgagcataaactgaaaataaaaatcaccattgcaaaacaccaataaatcatctgcaaaacaagatgattcagtttcgagtacctgtacacctgtcatggaacttgaatcctggcca

SEQ ID NO: 289503 - DNA, 608 bp, Cannabis indica
tttgtgtcattttcttatgtacgtcatgatgcacaaataagtatatttatacttatattatatactagttgcaacaacacgtgctacgcacgtgtaatctttttggaagtaaatatataatttttattaatgtgctaaatcagttaaaagataagattcttccttaatagcttgtactgctactaagcaatctgactccaactccactttctgtcaaggttgagttttaattcagtatagcatgcgtcatgacaaattaaatgtttgtataaaatataacacaatttttatatttctcattgaatacgatctgaacattttattaactatatgcgataaaatctaacataattcatttatatttaacaataggattagttcaaagataatcttaaaaaaaatacaatttaatagtggtcctaaaaaatctttaataaacacttattttctcttcttaaaaaaaaagaccaaaaaaaaaaaaatagaagaatgtatactataaaaagtaaaaaaataaaaatattaaaattattttttaatgtgaaattatgttatgtaattctttacaaaaagtagaaaattaaaaatattaaaattatttttttaat

SEQ ID NO: 289504 - DNA, 537 bp, Cannabis indica
aacaacaactatgggttcaatcaaggaggtaaccgaaggaacaatgggttttatcaacagagaaaccagcaccagacacagaaccaatagtatactcagcaacaaagctctagtagaaattcttgtttgcagacagatttattgctacaatttatgactgaaactagatcttccattaaagatttgcagactcaaatggggaaactagcaactcaggtagcaacccgtcctcaaggaaatctgcctagtacaacggaagttaatcctaaagaaaattgcaaggcaattaccctgaggagcgataagaaatatgatgggcctgaaacggtacaaccagtgaataaagagattaaagatcaaacagcaccaactccaacatcatcagataagaagactactgataatcctgcaccacaacaacagtctccaccagtcagtattgatcatcatgtgaagataccttatcctcagagactcagaaataccaatctagacaagcagttcacaaatttttagaggtctttaaaagactacaca

SEQ ID NO: 289505 - DNA, 601 bp, Cannabis indica
agatcttcatagtggcgtcagaatcatgacggacttggtttgatcaaattgacctcccaagtagagctttaatcgctgcccattcactttgaaagtattaggaccttcaccttttagttccaccgctccatagggaaacaccttgatcactgtaaatggccctgaccaccttgactttaatttaccaggaaacaactttagtcttgagttgaagagtagaacttgttgaccaggttgaaactcctttctgactaaacttcggtcatgccacctcttagttctttccatgtaaatcttagcgttctcataagcttcatttcgaaattcttccaactcatccaactgtagtagtcttttctgcccagcagcttttaagtccatgtttagagttctcattgcccaataagctttgtgttctaactccaccggtaaatgacacgcctttccaaacaccaaccgatatggtgacatcccaattggcgttttgaacgctgttctgtaggcccacaatgcgtcatccaactttcttgaccaatctttccttgatctctgcaccgttttctccagaatcatcgttatttcccggttagaaatctcagct

SEQ ID NO: 289506 - DNA, 702 bp, Cannabis indica
gatttagctagaattcaaggaggattcaacaagaggtaaagccctagaactcttgagtatgtgttttaagcttatttcttaggttgagtttgtgtttttgagtaataggggctattaagtttagaaatggttagtgttaggtttttatgctcaattttgattgattaaaggttctggtagttaattttgatgcatggtgttagttttaagcaagcttgagttttgaaactcaagctttgagctttaatggcaacttgagatttattggtttattctgtgaaattctggttggaaattgttgtttatgcattgtataggtactctggaagttttaggaaggtttgggattgaattgagttaagggagttggtttttgtgttcccagcacagaaccggtcgaccggttctgggggacttgaaccaaccagtcgaccggttggtgtcccagtttttggacttccggttgggaccggtctgccagttgggggaatttttggaaccctagtttttccaaattttgagatatttatggtatttccatgttgtttatcgatagggaaacttttaatttcaatttaagtccccggaaagtgatttagcgaatcactcatctgtgttacaattaatgtgattagggcatccatctagcgcaagcatttccgttcaggtcggctagcacacttgaattcagaaaacaggtaa

SEQ ID NO: 289507 - DNA, 517 bp, Cannabis indica
tttcagctttcattgggaatctgaatacacgtgtccttttaaagaggggtctggtctcgagtttctaggtgagagaaatctcactataacacttttttctttttggaccagcccttcgggtcaggatgttttacttttggcctgtgttttgtctgtccgtgtggtatgccttagtacccccctgagtggcacgaaaacttaattttaaggcactcagttttatttaaaatacagaggctgcatacacttagacggtacaaaccctttaaacaaagcctaagttacatatttggactattggtaatattttcggaggtgatcggcgttctaggcccttggcacaatggttccatccatcctttttagcttataggttcctgaaccgatttcgtccccgatttcatatggcccttcccagtttggcccaagtacccccactccgggttcttgggtggccgggaagactcttcttaagaccatatccccaatagtgaattttctgtttttaactttggag

SEQ ID NO: 289508 - DNA, 611 bp, Cannabis indica
aatctcttactataaaaaaattaagaaattagaagtttgtgtcttttttttaatattactagaaaattaatatatattatatattataattttttaaaaatatatataattaagtgcagattggattggatcgggtactttttgaagtcaaacaacatccaatccgcacaagtgcggattttagatttttcaatccagtctaattcgcgcaagtgcgaatattcgcattttgcagattggatcgtacggattggattggatcggatacttagtgaacacccctaattaaatattattttcttatagttacataccatcttatttactaaaagcgtattatttaatacactaagggttcgtttggtatgttatattaggttgtattgtattgtattgtattgtattatatggaattggattatacatcatatttttatataatgctatattaaaaccttttttttttggaacaaaaggaaattttattcaaaaccaagcaaaaaaaaatacacaagaggcattatacctcaaaaaacacactgctgcaccaaaacaccaacagtaacaaccacccctactaccaactatttattgttggattttgtgcccta

SEQ ID NO: 289509 - DNA, 912 bp, Cannabis indica
gcatccttcccttttttattatatattatatattatatatatatattattagtttagtgtattttgtggagttgaaattctagatatcacaattataatttttacattattaagtaaacaaaattaatttttagtgtaattttattttgatatgaaggcactaaaatatgaaaaaacttaaatacacattagaaagcattataaatttaaatcatagtcaacaatacactaaattattaattagatatactaaactgttaaaattttaataaattaataataataataataaatattctatttatttaaaaaataatgtgataataaagaatattatttttagtgaacttttttttttttttttgacaaagtgattaaaatcactcatgaatttacgacgcccacgtccgccaccggcgctggaacctcctcgaaccaggatagctcatcgtctaaccgcagagcatgctttgccaaccataggccgctaaaaacttagagcgagccccatgggacaaaactgcccccggaaatttagacaataaagctataacatcttccaacaacgctctcaactcaataaaatactgaagttccacctgaaaaaatatcaaaaaaatagaataaaactttaattagaaaattattcaaactgaatagaatcaactaaccaccaagactaagcaactagatctccctataaaatactagaactagccaaagggagtaccctttggctagtaataactaaattatagcattctacttcataaccttcataggatccctattccttacctttacccttttaaaaacaaacataaataaaattttccttttaatacccattattccttaaatattcaaaatattatatactaattctttcatttatttcttaaaagtattact

SEQ ID NO: 289510 - DNA, 375 bp, Cannabis indica
aagaagctgaacctggagcagaaagatgtgatccaaaatgctggatttggatcattcatcagagaggatgcaccatacattgacacccgactagtgagttggttaatcaaacatgttgacccaaccactagcatactggatttgtatggaaggaaaattcacttatctgccgcgatgttcggagatgttatgggggtggacgacggaggggatcctgtagtcaccgagggtgatagtgacactcgatatctggaggagatattgaacgttgtcgactacaccgtgtcgttgacagggttggagaaatctttgttggagtgcgttgaggcagacagcctatttctgattaaattttctttggtggtcatagggaca

SEQ ID NO: 289511 - DNA, 635 bp, Cannabis indica
aggagacaggcctgagctatctcctactctcttctgcaaagcctcaataatcttctgagacatttctgcacgaataaagcaatgcagtcagaagaagatataaaatatgtgaagacataaagatcagaaaaataaatgcaagttgaagtaccctgcacgctgatgggagcattctgccgaacaattacggatggagcatcatcgtctgaggagtcttcctactcttccaggacggcttttccctttccttatacaggtgtcgacggccgagcaggcacaccaggttccctaatctgaatagcatgttctattggcacccgcttggtcgggagagttttcttcttcttgcgcggtctctcctgctctaaatattcttgagcctccttctcctactctgaatattattgagcatactgtttggctccagcaccacccttcaacttagcctcacgctttagttgaatgagctctttctcctgctcgacatccttagcttggctcggcctagatttcttcttcttctccttcacgggctagggtataaaaatctgtcggctaaaagcttgacttcacaaagttgcctttgtggtcacaagtgatatttcgagcagcctccggcagttggagaatttttc

SEQ ID NO: 289512 - DNA, 500 bp, Cannabis indica
tagtttttgccaatgaaaaattacacactccaaagaaaagttcccctcaatatatagcattttgacatgctataaccgttcaatgaaaaaaataaaatcctaattaattgagtttgatcttatattaattaatttgaataaatggaaaactaattataggaaattgatttccctcatttagtcaaatgtgatagagatgttgaggccttggactgcggataaatgaagaagttgataacctttccttccctttggttcacacaagagataaaacaaaatcaattatcattatgttgatgaagagtatctcgagctggctgccaactttgatgcatgaaattgattatgcatatcctcttgtggtgtacgggttcagaccaagaagtggccttacccactttgtcaacttcacttattttgtagtaatttattgctttcttttttttatctcttctttggcaataccaaaaatcattttatttcctgcaaaatgaacataa

SEQ ID NO: 289513 - DNA, 640 bp, Cannabis indica
cttggcgctctgataccatgttgtaacgccctgactctcaggaacgccacgtgtgtgcttttacaatcttattatcaataacctactagcttaggaaaagtgtggtttaaataaagtttgataatttaaaatatacatataattttttttaaaatactactaaagtatggggatcccttgtttataaaatttccttataacaaatttcaaaaccattattaccaaaataaagttacatttccaaacacaaagaaaagaaatcgatcctgcttcccggaagccaagacaccacggctgatatgtacattactgggagacctctgactcatggccaaacacagccctaatctccttacctgcaccatgaagcactcgtgagtcacaatgactcagcaagaaaagctactaattagacattatggaaagtgcaggcagatttcataataatataatatacataccggtaggtcttacatatgtcaatctacatatacaaaaatagcataacgcttatgtaagcacacttaatacataataaagaatatttatagctattcataatcaaccatctcagtggttcataaagtaccctaatcatacatcattataaacactttcagtacttcataaatcactctaa

SEQ ID NO: 289514 - DNA, 637 bp, Cannabis indica
atgttaattataaagttaactgaaactagttacatcagacaataaaataaaaaaaaatacacacacacaaaaatacaaaaaaaaaatatatatatatatatactaatcacaaatataatcaaaacaacacaccatgcataccaatattaaaaacaaaatataagtgtaagtttcgaacctagaaacaaaataataaaaaagtaacttaaaataaaaaaattgtaataacataatgaaactattaattttttattcttttaatgaaattattagtttctttcaatgttgatgaaactgatttttaaagtttgtattatttttagattatattttttttttccgaatgatgttgatgaaactgatttttttttctgctccttttgatgaaataattagtgtttaacaaaaaacaaagaaaaaacaaacagtagtttaaataaataaaagaaaaacaagtttaatttctgtaaaaaaaaaaacatctacagttgagataattctttatttattttagtgttttagtttttaagaaaagtaaaaaaaaataaaaagaaacacaaaattttaaagttttgttatggcattcctcataactttttcccatatttgtaagttttttttaaaaaatgccatattt

SEQ ID NO: 289515 - DNA, 736 bp, Cannabis indica
gcaataaagtctgacggcacaacctccaaccagcagcgccacagtaatgatcatttaagtctagcgacggctacactgtgaagagtcacgtcaatcaaaaggcaataaggacattccacataaaaaccctacagcacctagggatttgaccatgcattacccatggtatattcattgggaatacccaactttatggatacttacagatacacttgtaaggacaattctagggattaccccaccaaaaacactataaataccccctcaaagctcattaaatgggatcgagaatcttgggctgcatatgagcaagtagagtaaatactcaccaagaacattctctgtatttataagggtgaaattctcccaagtatattctctgtattaaatacatccataaataacaaagactcgtggactaaggctcattaacgccccaaccacgtaaaaatccttctctcactttcttacagctcagtaattttataatattttattagttgccgaaaatctcggtcaacagttctcaaatctatatttaattaaatatgtacatatatgttaaatcaatttagttttttttttttttttacttttacctattcatgaaaagaattttttttacttaaaaaaataaaacaaaagtaaatggacctaacatatactatcgaccaggcataattatattagtttattttttgtcttttattgtttctttatatatatctttatatat

SEQ ID NO: 289516 - DNA, 87 bp, Cannabis indica
agattatacgatggttaaatgagatagcatatctatatcgcgccattacacacaccatggccggccacttaaattggtttttcaaat

SEQ ID NO: 289517 - DNA, 503 bp, Cannabis indica
agtgacttaaatataattttttagtacacaataaaaaaattgactttatgaaataaaacataaatattttaaatataaattatttactaattttaattttagttcataataagtactctaattaatcttttagtcacaataaattgttatttttatatactaatatattttagctacacatctttttagtcatataataaaaaataataattttataattaattataattttttatttttagctataaattttattataactaaaagaaaaaaaatttatagtgttattatcacattgccggtgacacttgcgtagcacacacattacatacactttttcaatatctttggtcttattacacaccgttctttatattaaaaaatataagggcttgtttggaacgccgtattaggtcgtattatattgtattgtattatattgaattgtattttatataatatttttatgtaaaaccatatgtggtattaacttttatggacac

SEQ ID NO: 289518 - DNA, 351 bp, Cannabis indica
gtagtgtgattttgcctagtagcaaagtacacacactcttgggagtctgacagctccgtgtattgggtgtactggggagtgtaccccttttctggcgcttctcccccgtccgagtgctgcccttggatgaccttttactcctcgagccctggtaagggcctgccaggctagcggtcggagaggagtgcgaaggagtttgtccattcgtcccggacggattgccgaaatgggatgatgctggcgccaaggcctggccctaactatattcgggagtggcagagaattgtatgccgcttgtctgtggagtagcggtcagggcagtacccgagggcggtactccgggcatgtacc

SEQ ID NO: 289519 - DNA, 645 bp, Cannabis indica
ggttgggtctgaactagtcaggagtgatcctgaacgggtgcaggcaccaactccacctttgacagtgcttccagaggccaaaaagggcaaggagatgctggcccattacatgaactggctggttcctgagatcagtgagcaattggcaggtcctgacaatgactcttctttggatatgctggtgggcggagtattgaaggagttcaccagggtaagtcttttttgatacttccctttaattttccacacttagctcaatatgataaagttttttctctatgcaggctgatttgaagttggcctacacttactcccgggctaagtctgctgcttccaagaacacggctctgtccgacatcttaaaggcagaggcggacttggactagaaggaagctgaagaagccagggcagaagctggagctgttcggttggagttgggcgaagccaacaagaagctgtttgccgctgagaagaaaatcactgtgctgactaaggatctcgaggttgctgactgttttgacgagaccatcgagatcttatctgctgaggtaaacagtcttcaagatgagaggacttctctacaagcagttcttcatcggatgaaggaggagaaggatcccaaggagggggagctttcggccgagg

SEQ ID NO: 289520 - DNA, 651 bp, Cannabis indica
attaaatgcgagatgactgctcaggggaagcctgacacctcgcggagatgctttgatgttgcttaggcctccgggagcatagggggcttcgtatgccttctccaggagcagctcctggatgctacccttcttgatgaagacttagcaattaactcgaatgttaaactcttttggtccacgtgtccctatccggttagtccacgtatattgggcaaaatcaggggcaacaattcccatggctctgaggccagttgttgggaatattttaccaggatcaagatttactaacaagtatgttgattaacatcctaaatatgaatatctctaaaataatgaaaataaacgcaaaaggatttaagaaaaccttacattggttgccgcagaatataatgactccttctgcttagatctctaacccttgtacctttctatcgcagagtattatcaagatctgaatctggatctttttctctccttcggttttggttaccactgtcttactcactatgattgagtacttgacttgttatgtgtgggcatggcactctatcactcaaggggttcgaatatgaagaacaatgaaggaggttgaaatcactatggaaggaactctctcatctactagttggctgacagagaaaactaggtttg

SEQ ID NO: 289521 - DNA, 710 bp, Cannabis indica
gtttattttattgtattagaaaattcatatttagggtgttaatcaacatacatgttagtaaatctagatcccggtaaaataagtttaacaatataaacatattttaagaaaagtgatgcgatttatgatttagaattaatgtatatatatagataactgttatctaatttaatttaagagtttggtttgaagattgttttttttaaaaaaaataattagaaaataagttttaataagcttaataagccaaaacgtgaccaagtgatgagcaaaaaaaagctaataaataaaatatcaatttttttgagtttatcgtttttttttttttaaaaaaaaaaatataagcttaataaaatgtgaccaagtgatgagaaaaaaaactaataattaaaatattatttttttaaaaaataaacgaattaaggtgaaaataaatatattttatattaatttactaattaatatatatgaagctaataaaaaaattaaagaaaaagaaagaataaataatactcattagagagatcttagagtgtcgcatcaccgtcttatacttctcctttatctttacagatttagatattaattttttttttaattctataattacaatatttatataaaaaaaaatagctaaataaaatatcttattttttaaaaatatgtaatatatattttaaattttaaaatttttaaaaaaaattaaaaaa

SEQ ID NO: 289522 - DNA, 541 bp, Cannabis indica
acctttacctcttctcccccggccccttccctgaaggtttcttccagcgctccccccgacactattgacttagtggatgacgaggaggtgcttccgggagaaggccaagggaagcggtgggacttctcggaggaagtcgctgagggtgcgggagagccccgagcccttccggaggaagctgaggaaggcgaagaggagcctgaggtggctctgattcgtaagcgcaagggcaagatgattgcccaggatgagcccaagaagcctcggagagccgacactcctgctcatggtctggacggcggggtctcccccatggaagaaaatcctgctcctcccaacatcgtgcttaccccggttccgggggacgaggtgaggcaagagcttcggatagccaagcataactatgctatggacgagtactcccgggggtacgccgaagtggaagcccttaggaggattctgcgggcggaggtcgaggcgagcatcaaccacccggagtaccaggatccgtgggaccttaatctggaccccttatcggact

SEQ ID NO: 289523 - DNA, 573 bp, Cannabis indica
ccgacggagatttttgattttttacgaacttgtttctgtccccaaaaagggagacaaacttaaagacagtttttatggcttctgggcccacccttcgaatgatggcgtggtcccttacaatcggcaaacccatgtcaaggaatatcgccatcgctttttcttctcctccgggttccgagctgtggagcacccggagctccttacggagtgggtcaggatccctccgtacgaacgaaccgcgcctactcagatctttcttcaccgggcacaggtcttcgcgacttatgatagggctgacctcgatgtcgggggcttggttacgacggagaactgccggaaggccaagctaatcctgccgcaccagtcagtggaggactctaacctttccaaggtcctctgcccgaacgtgagggtcccggccgcggagaaaaccttctgggatgagattattgccaccgcagagaagaagtaccaggagtatctctaccggaaggcccaggagaaggcttataccaaggcccaggcagctttcaggaggccccttcgcgttgggagcccagtcgagaggagaag

SEQ ID NO: 289524 - DNA, 576 bp, Cannabis indica
ataaacacataaatataattggtactggcatacacaagataaagtaaatgaagctcaattcataaatgcaattaatttccaaaaaagagaagaactttattataatattctccaaaataaaacgaattgtctgcaataatatgaagatagggaataaaaatcccaaacgaataattgaaatccaaattgttcttaagttaaaacaattaattcaaaaattataataaaatagaagattctgagcttcatcttcaatcttggactatccgactcaactcgctaggatagtaatccaagttcaagcagctggagctgaaataagaagaaaaaaacaaacatggttagtaggtccagaattaataacccaaggggataataattctctaaaacacatgagtttatatcatagaaaaaaataccttgtttctttgctagaaacttagggcattagggtttccagtggcccttttcattgctatagaagcattttccttttggcttatctccaggagtagcagccttttttctttttaactgtttttacagcttgaatagacttcttgctattcttccact

SEQ ID NO: 289525 - DNA, 770 bp, Cannabis indica
agtgatatcaatgagcaacatcaaaacatcgattttctattggtatttcttttctctatattttataatatatttctttgtatattataaattattgtcaatattctctctactttttctttttctataatatatatatttatatatatagattctcaatctttctttcactcatgaaaatatttctcgataagttggagaaatataatcgatgacttcaccgttgtccataatttcgaattatttatgatttattcattagtaagtgttgcccctaattttgtccaatatacgtggaccaaccggatgatgacacgtggatggaaagggtttagcatttgaataaaatagctaagtcttcttaaagcgcaggattaccttagacatacctcccggagaaggcatgtaagtctcgtacgctcctggagagcaagatggcaacaaagcacctccggcaggtgtcagattttatctgaacagtcatctcgcatttaatgttgcatgggaggaggcgtattgaaactgccatacgcaataaagtctgacggcacaacctccaatatgtacctactatgctatgatcaataaagtctagtgacggctactctgtgaggaatcacatcagtcaaaaaggattaagaactgccctcataaaatccctacagaacctagggattagaccatgcattacctatgataaattcattgggaatgtgtggcttactgatagttacagaaatgcatgtaccttaattctagggatcacccca

SEQ ID NO: 289526 - DNA, 791 bp, Cannabis indica
ctctctctcgctctcttcacgaacccacacgaaccagaccaacgtacccacggcgtcgaccacgaaaccaacaaacccacgccgccgtcgaccacccacgaacccaacccacgaaccaaacccacgaacccaatcgacgaaccgaaaccgtctgtcgatcttcgacccaaaccgacgcaaaactgccgtcgccaccacgaggagaaaatgccgtcaccacccacgagcaaaaaccgtcgcctacaccaccaaattcagtcaaaggtaagatttttttttgaaaaaatatatttttcatagatttggatgccaattattgcatgttgttcagattagtggattttttgtagcttttgtgatctttaggttgtagatgttagtgtttcaataaaatttgtgtatattacagagttgtcgatgacatatcgataggatgtcgataggatgtcgatagattgggtgtctgtctgaattttgctgtaatttgtatgtcgataggatatcgcttgtatgtcgataggatgtcgacataattgtttaagtgtatttctgccctatattgtcgactatttgtcgacagtatgtcgatggtatgtcgattaaattaactcgttgattgttaggttgtattgtcgactgaatgtcgatatattgtgtaattgttatttgattgaatttatgtttgcattgtcgactgaatgtcgattggtagtttaagtgtatttctgccctatattgtcgacgacttgtcgacagtatgtcgatgcgatgtcgattaaattaacttgttg

SEQ ID NO: 289527 - DNA, 503 bp, Cannabis indica
cgtacccccgggagtactcgtccatggcatagttatgcttggctatccgaagctcttgcctcacctcgtcccccgggaccggagtaagcacgatgttgggaggagcaggattttcttccatgggggagaccccgccgtcaagaccatgagcaggagtgtcggctctccgaggcttcttgggctcgtcctgggcaatcatcttgcccttgcgcttacgaatcagagccacctcaggctcctcttccccttcctcagcctcctccggaagggctcggagctctcccgcaccctcagcgacttcctcagagaagtcccactgcttcccttggccttctcccggaagcacctcctcgtcgtccactaaatcaatagtgtcagggggagcgctggaagagaccttcagggaaggggccacgggagaggaggtaaaggctggaggagccacgggagtatgaactccggcaagctgctccaagatggcgtccatggagacacctgtttca

SEQ ID NO: 289528 - DNA, 647 bp, Cannabis indica
gattgttacatctacaatttgtccggcctgtttctcaaatttgattttagatgttcgttgtctttcgtcctttttccttaaagcaattgtttctcatgttaggagaaatgctaaccatgttgcacatggtttggcaaaatatgctttagagttggattaagaagtttgttggtcaggagaaatactgttagatagtcctacattgctaatgtgtggaaagatataaattatataagaggaacgggctactcctcccattgccaattagttttgagatagaaccacatttatcttatcttaaattctaacatggtatcagagcaaaaacaaacaaaaaatcttctaatgactatccaaccccaataaaaaataaaccgatcgaagtagagccaaaaaaacagagccaccaaaaatccaaaaagaactaatccaagagccaaaagtcaaaaaatgtcacttgtgaatcagggatagtgagccaaaaaaaaaaagagccaccaaaaattcaaaaatactgatccaaaaagtagagcaaaagagtcacttgtgattagggatagtgatcagctaaaaaggagtcgcttatgatcgagttgtctaagatagtgagcatataaaatcgtcaccatcttgagggaggatgttag

SEQ ID NO: 289529 - DNA, 564 bp, Cannabis indica
aaaaacacaaataatatttagttatattcttagtggttatgtatatttttagttgtataattagtctttttttttaatgttattcaataaataaaattattattttattaaaaaatatttaatttaagtgtatttataaaaataaaatataataatattcaaaatttattattaattatattcttaatttaatcactgtaatacttttaattttatatataatacttttcactgtttttgaaatataaaatacttttctaatttttttaaaaataataatagaaatatattttttttaaaaaaaaaatatttaatttaagtgtcatatataaaaataaaatataataatattataaatttattgttaattataattttagtttaattatcatgacactattaattttatatatattactttttattatttttgaaatattatacacttttttctatttttttttaaataataatatagaaatatatttttaaaaatatgtgtaatggagtttatatttgaattgcaatattaaaaaaaactttatgttatatagatacatttaa

SEQ ID NO: 289530 - DNA, 732 bp, Cannabis indica
actgggatcgaaatgctggacctagatctggatcgagatcctgaccaagacccaaactcggagccgcactcgggacccgaacatggacctggaccggaacctagaccctgatcggggtccagacctagacacaaacctagacacagactcagaccaaaactaaaacccacacctagaatcagacccaaagctagacccgaacccggacccaagctcgaacccagaccaggatcagaaccaaggacttagacccagaactgaatccaaactaagatagggattggaacttgggactcggacacaacctagaccaagacccaggacgcgaagccacactcgtagcctgatttggtcctagactgaaatccagacccgaaccaaaactcagtccaggactcgaactccgacccaaactcaaactaggactcgaacccgaacgtagactgggaccaaaacccacgcaataaccgggacttggattcagaatcaggataggaacctggtaaacagaactaggatcgggacatagtacctgacccaaacccgaacttgaaattaggacccagctcgtgacccggcaccaaaaatggaaccagacagggacccgagatttggatccggatctggacccaaggcttggacaaaacctgtagtcggtgtcttggtttgggacccagccctggacccaaaccctgacaaagacgcgaaccctcacgcggacttgaacctagt

SEQ ID NO: 289531 - DNA, 617 bp, Cannabis indica
tgattatgctgttcagttgaagatcaaaaacatgtgtcctactgatgaagagaggcagaagcttcaacttgacggtttatttcttgatgagtctattgatgaccgtggtatatcgaagcaatcatttgagagtgggtcatcttcaaagaaatctgattcagaggatattgatttgatgaaatctaagttggagatggtcatttcgaatcaagcatcattggctgaagacttcatatccttgaggtgttttgttgatcttaatttcaagtccgtaatgactgtaattaaggatattcaggagaaggttaatgccattcatcgtcgtccttctgatgaggtatttattcatagtttattgtttctgttttttcatactttgtttttagtttctttactgtttcatttaagttgcatttgtgttgtttgaatcagggaaagtcatctgatgaattagtaactcaagattctgatgatgatggtgatgatgatgatgatgatgatgatgatgctgaggatgatgagaaggaactgcctgatcctgaaaatattgattccgactccgatgatggtcatgagttggttaaagatggtggtgatgctgatgatgctgataaggt

SEQ ID NO: 289532 - DNA, 655 bp, Cannabis indica
tcatgctcgtgccgagctgttcgcgcatatctttctcgagctttgcccgtgtctccagcgatgtgcgggcctccaatgatgacttgcaagtgtccatctattggcggaggcatcagatcctggttattctgaccttggttggccttgacgtacttctgtaagtgcgggttgtttttcttgatcagaagttctatttcccgcttcaagttgtaacattcgttggtgtcgtggccgtagtctccatggaaccgacaaaattttgtcatgtcccttttgctggtatcttttttcatgggcccgggcttcttgtacggaattaacgactgagttgctatgtacacactttctatatcttcagttaagatagtgaatgcagtgtgtttggcgtgatcacggggagtctgtccgggtttttcggtgaactttcccttcttcccgtttccttgcttgtggttgttgcctgaacgcttgccacttgaattgctggaataatggggaagttgggcggacgttccagtggaaggaaccttcgttttgctcggcttttgctcaccttctgctcgctgaatggcttcctcgagcttgatgaaaccttcggctcggtcaaggaaatcaatcattgagtcgaccggtccgtttttccttatatccttcc

SEQ ID NO: 289533 - DNA, 487 bp, Cannabis indica
ttgcttactctttcactgttttttattttatagttttaatcctttcttaatttttattcaaccaaatagaagtaaaagtttaattttaatgtacttaactacaatcctcgtgggattgacctcactcttggtgagtttactacttgttaacgatacgtacacttgcgtgtgtaaaatatcacaacaaaaagtaacaatattacaaaaatacttccagctagtcaaataaataaatatacagcctaaatacaaaaaattacacaaataccacttacacacaccttcaacttaagatccatgcttcctaggaaactatcgggcaaccatcgcgcaaccaacccaacgcaaccgaaaagaaaattcaactagaatgagaactaccattaattccggcgacttcacttgagaagacgactataatcaatcaaaataggggttgtttcgaattcaataaaaaaaagtgtaaaaaaaactaatactaaactaa

SEQ ID NO: 289534 - DNA, 552 bp, Cannabis indica
aaatggacccttaccaaaacttcaacccttttgaaacaagtcctcaaaaatccccaccgcatcctttttcttccacaagacccgtaggtacaccgtcacggagtccaagactccgttcagcctccatttcaggatgtcctaactgtgcaaggctcgagactgttctccacgaacacgaaaaacttataaggaaggcacatttaagagccacggaggccaagcaggagtcatacaaactggcggaacacctctaccattcagcccatgccatgcaagaagccaacacttcaagagaaaaattagagggtatcatggatgacattctcgactacaccgaggtgtccataccccactacccacttcatgtaaaacaagaatcaccaaacactactccaagacaaagtccttcacgaccaaagtccccgttcagagacaatagccctccgtctcaacggaagttccctcaagttatagaacttgattgaacatccgttcagtttcaatcgtggtattttatatatatatagtgtacttatgttacaactaatctca

SEQ ID NO: 289535 - DNA, 678 bp, Cannabis indica
aaggtcagaacaacaaggatctgatgcctccgccaatagatggacacttgcaagtcatcattggaggcccgcacatcgctggagacacgggcaaagctcgggaacgatatgcccgcacagctcagtacgagcaagaagaagtcatcctggccgtggaagaaaggaagcccaaagttccacgagcaggagagccaaccataacattcaacgacgaagatgctgtccaaataaggtttccgcacaacgacccgctggtcgtggaagtccagatagcaaacaaaatggtgtccagaaccatgattgataatggggcttcttcaaatattttgttcaagactgcctacgagaagatggggctccagctcaaggatttaactccatgccttcagcccgtctatggtttctccggtcaaggagttgcgcctctaggacaaatccgcctacccctcacagttggacaagctccaacgagcataactgtcatggcacagttcctggtattggatgttccttcagcctttaacgtaatgctaggccgaccagccttgtatgacttaaaagctgtcacatcaatattccactcgtgcatgaagtttccaaccaaaaacggggtagggtatcttagagggaaccagcaatctgctcgggaatgttacaaccttgcagtggccaaggcta

SEQ ID NO: 289536 - DNA, 514 bp, Cannabis indica
atttcgaccaccatttgtgacgtcttccttcataccaaggttcatgcttaactaagcattgggtcgcggttccacattcaaattttgcaaattcttagaggttgccctaattagtatctggtttcataacaactgttggtgtggttcatatcatttggtatgagagcttaggatcatcgggtttggctatctatcttttgtgtttttcttttcaattcatgttctataatcttgtttaacttgtgttctattttcctgtcaattcatgcttcatcacttctgtttttctttatgaaatccgaagactgttagaaccacattgggataattttcttgtgtcaaacatcttgtctttgcttttctttttcgtcttaaaaaaaactaaaattaaaagtcttaattttttggttaattttgttggaaatattttacaaggatctagatttactaccatgtatgtttcattaacttcctaatatgaattctaagaaaatgaaataaacacgtataaagt

SEQ ID NO: 289537 - DNA, 618 bp, Cannabis indica
tttcataaaataataaagtagtcgttttaattaattttttaaaaaataatttataatttttttttttcaaattattagttgtaattattatttccaattttataaaaaataaatatatatttttttttaagaaataatttttagaaactttccataaaaaggttattggattattaccttattaattttttttagtttcccatcaatgggtattacccattaagaagtgttccatatatatatgggcatgctcttaatgggtattacccatgaatggatattttattattagccattggatcaaatctaatggttgatatttatagctattaattaaaattttaaattaaatattttttattttaacctattacctgatgacatggaagtcattttttatatctattctttctatttttgtcctcattccatatatacattaatatattaatacattaatactttacaatttaattatggtaatttattaaattaattacacctttaaacctcactacaacaaatatttccattctaaaatatatatttttttttgaaaaggcataacatatattataaaatacataataatttatcaatataaaaaaatattaatta

SEQ ID NO: 289538 - DNA, 730 bp, Cannabis indica
caagtgaatcaaaaaatctaataacatgaacaagagttcatgatttctgagaatttaggctaatttaagctggtccttatagtaaagacaggctaattgcatgttggtcctgttatatataatctttcttatatacaatacttttaccaagatccaaactacatcaacaatctgaatcaaaatttctcgcaccgagtgacgtgcatcagtaaaacgtattagcaactgtttattatagttcctgaccattttattcacaacgtattatcttagttctcttgtaccgttacaatgtatgaatatgaatttcaatcttttttcaaatcttgtttattgctttcatttttcaatttttgttatttctttgttagtttaaaatctaatttttgattgccaaatagaaataagaatttaattaattggtacttagctacaaatctcgtggaaacaatcacactttattcgagttatttgtaaaaataatacgtgcacttgcgtgttatatcaatatttttcatattgttagacaaatatttaggatatttataaattttcttaaatttctgttgatattgaaaatacctctgacatatccatgaagttctagtaccaatatttccatatatatttttcattgcttaatattttttatttataaaatattgatatctgggaacaattttaagctatatattgatattggcttaatattattttgaagatatatttt

SEQ ID NO: 289539 - DNA, 832 bp, Cannabis indica
aacaacaggattcgtctccctattctctcatcttgattaatattcacttgtttctttaagtttcttgaatttctttcttcctttttcaatcataaatacttttgatttgccaaatagaattataagtatagtttagtagtaattaatccaattccctgtggttcgacctcacttgcgtgagtatactacttgattgcgtgcacttgcgtagtaattaataattttcgcaacaattaatctaatcggcataagtgcatatatttccactttacatattagattggattgaatcgtgcgggttggattagattaagtattttataaacacccctattcgctaataactccataattatcataattcattttttaaccaacttgtgtgctgaattgtagcgaaaaaagaattaattactttttccaaaaattttgacaaataaaaatatagtaaaggcaaactattaaataactaaaaataacttagggtgcttgataaattataaattttaaagtgttacgagttgttaagattatattacaataataactagggaactaagccgcgcgaagcgcggtcttcccaaatttttataatctttatatataaatatatattgtacttataataagtgatataatctaaaacataacatttttatgtttatattattattaattactataaaaaattgaattgtagatttattaatttaattatataattaaattcaattctatcattatttataatttattattttattataatttttttgtagtaagtatatcaaatatcacttagaagagaaataaataaaaaaataatggaaaa

SEQ ID NO: 289540 - DNA, 614 bp, Cannabis indica
acagctgtgatcagctaccaatcaaacggttggggaggcacacgattcgaattcccaagatccaacggttggattggatcgtcattgagacggtggaaacgcttgagtgtccgtctgacacccattaatgcgttgtatcagttaatggacaaaaaacgaatcgacgcctgcaaaatgtgaatcgctgtggtaatggtgatcattaaatgcgccatcatgcacccaaagcatgtgccaggaaactgaggagccagccggaggcacctaagcaaaccttgttcacttcacaattaaacaaggcttgggggtaaatgttgcccctaatttttcccaatatacgtggaccaaccggacagtgacacgtggatggaaagggtttagcgtttgagttaaatagctaagtctttataaagaaaagcattatttcggatatgcctcccgcagaaggcatgcagggtctcatatgctctcggagagcaagatagcatcaaagcacctccgggtggtgtcaggcttcctctgaacagtcatctcgcatttaatgccgcatgggaggaggcgtattggaactgccacacgcaaaaaagtctgacgacacaacccccgatctgtac

SEQ ID NO: 289541 - DNA, 543 bp, Cannabis indica
gaagctcataagatagaataggccttgactctcgccgaaacgggacaacgctggattctcatcttgatcgaataaaaggttgctagaatgtttatcattttagatgagctgacaactctattcaatggatggtatctttgactctcgcctaaacgggacactgatatcagtttgttgaaaaccttggaaattatttaggattgtatgttttagtatttttgcttgtcattcctacttgctaaatgctaataatttctgaatatgattttgtgttaaaccttatttgatttctatttattgttatttgtagtatccaacatgacaatgaccaaccccatggtgtcactgttgactgataataagctcaatggagctaactttatcaaatggagagagaacattaacattgctctcattggtgagaatgcactgtttgtgttgactgaagaggctcctgagcagccaaatgagaatgcaaccaaggcggtgaaagaaaagttcgagcgttggcagaatgccaacaacaaagctcgatacttcatg

SEQ ID NO: 289542 - DNA, 689 bp, Cannabis indica
actgcagcgtgcaggtgttgcaccctatgcgtgacaagggcaattcctgcgctagatacccgatctgtagctgacccatctacatttagtttccaggtcggcttatcttcattattactttactgaggtgtttgtaccggctcggggttgctttctggtatgcttacttttttgcctgtgcattctaccacaaattctgctaaggctttgcctttgattactgttcgtggtcggaaagtgatttcatactggcccaactctactgcccacttgagtagccgtccagaagcatctggcttttgcagtatttggcgtagtggctggtcagtgtatcctcgaacaggatgagcttgaaaataaggcctcaacttccttgttcctagaataaggcagtaagcgagtttctctatcaatgggtatcggcactcggcctcaatgagtcttttactgatgtaatagactgggtgttgtacggtgttctcttctctgattagcacggcactcacggcatgttccgtgacacctaagtatattccaagttcttctccgtccagaggttttgagagtacaggaggttttgcaagttctgcttttagctctgggaaagctttttcacactcctccgtccactcaaactgcttgtttcctcgcaggatgttgaagaatgggacacacttatctgttgattt

SEQ ID NO: 289543 - DNA, 648 bp, Cannabis indica
acccaagctattagaaatatcctcaaaaatacacatatatataatttatgaatttttttttttcatatttttcatcttcatcaaaaataaggaaataaatctttttggagaagaaacaaaattatcccatttttactagtcctataatgtaatattttcaaaagatattaagggattacattgtgttaagaacctgaattctactgatgtgtcctcttgatagctgctgtgcacctctcctcactcaatcctctctctccaacaaactgggaagattctctctactatgtaattgattccctttttattttgtacccttttctgttataaagcatcttttctttttcctttgtattgccacctgtcaaggtgtgattgaatgcttgtactctgttttgcctatataatgaaaagtctgtactcagactcatttgagctgagaaatacaattgtctactttcttcacttggtatcagagcaaggacggcccacgccatgtccactgacaattctcagactcccttcacacctcagcccaatcagcctcgccctgcccctactgcagcagctactcaaaattccaatggaacaggaactggtgctactcacagctctgccacttttaccacaaatttcacacagcctttc

SEQ ID NO: 289544 - DNA, 100 bp, Cannabis indica
gaagattgtataaataagattactttgactctcgctaatcggagcatcgttggattcttatttaaaaaacaaaattatcctaatttctcttagcttattc

SEQ ID NO: 289545 - DNA, 609 bp, Cannabis indica
aattctctttcaattgatatattatatgcataaaatcattatatatattatgagaattttaagtttaaagttttagggtttatatatatatttatttatttatttattttttttctttatgaaattaaatttaggttttttgattctattgtttatatactaaaattgatggtacaaatctcattaccaactaatttacaatgtttctacaacatttaatttgaattcggcgtgcaacaaatatcaaaatcggccattttttttgttcttagttttcggattgaacacaatccgatcgagacccttatcatctttaatacccgaaattaataccatagattgatgagaaatcgtgtcccgaacaaaacccatcaaaaattgcaagttttcgtggtgttttttggccggaattcgtccagacccgcctgcggccgaaccgggtcgcgcgacccgcctggagatccggctggagcttgaagatgactcccagccgcaatgcccactcgcacagcccgcgcgtgggggcgcgtgcggcactctcgggtgtcgtttttcgacgtttttttttccaacgtgcttaaaattaaatttctgatttttctatgattt

SEQ ID NO: 289546 - DNA, 350 bp, Cannabis indica
aaaaaatccaaattaggttctgtaaaagcctaaatttattaatttttcgtctactttccagaaaaaataattccagatcgaaataaaaaatatttcagtaacatatatgacgatttctaaactatcatcaaataagcacataaaccacatgaaaccatccaaatcaatgcaaaacatcattttaattcatacactcaaggatttcgaaatttagagaagaaaagaagagagaaggtgggggctagaaatttttctctgaaggaatgattttgtatcatcttttcctgaagccatcactacctatttataggtaaccacttaggtttatgttagatttatttggcattaaa

SEQ ID NO: 289547 - DNA, 776 bp, Cannabis indica
atcaaatttcccaatagaaattagagagaaagagatgaaaattggggattagggtaatcggtgaagaaagaaggagagagagagagagaactgatatttgtcattacttaaaattttatattaaataatcttaactttttttttatttattttgggtgtctatatatttaaaaattaacatttaatttgatacacactagtacacattaaatattatgtacactcaaaagtcatgtgaaggaagggttaagaaaaggtctccatgctataggaacaaaactagagtccatactatagaattattctatatattatatctataaagtaaatagacaaaaagaaagtttacctcttgaagagcctattcgggtatcctcgaatctcttcgtatgttgtatcattggttgatctcgaagtactcacaccgtagtcttcagaatcttccaccacacacaaagattagtgtgggcttgtaggataaagtgtataccaatattaatttctcaaaacatgagcaagaactattgtagagtgattatggagagaaaaaaaattaactagttaatcttttttaggctttcctaaaaataataccttgttaggttttggtttatacggtatatttaaataaaaatcaataaaagttttatttaattaattatttaaattcaaattatttattaaattatatttaattatttgaataaataatataatcgattgagagaatctctcaactaccttgagagaatatctcaattaatagaaatatctat

SEQ ID NO: 289548 - DNA, 426 bp, Cannabis indica
gcttccaatcagtagatcaagaacttctatcttaaattcactgacatattaattctttgttgaatccacgcatagaacttagaattgcagtctctgtatatagaacgctctatatgttccacgatatagatatgtcattagttatccattgttataatcctaatttgatcaacgatcctctatatagatgatctacactgtaatgggatttgattaccgaaacacactacaatgtattttatccttaaaacacttaaccccgtataaatgatatttcagctaagtgaaatgagtactccatcatttactttcgtttggtcaagctcaaaggaaatcatcctttaatttctatttgtcagatagaagctatagattccatatttatgttagcactcccactcaattatactatcatgtttccaaaat

SEQ ID NO: 289549 - DNA, 504 bp, Cannabis indica
tcccctagtaatataactaccggagggtaatgttcatagcttaaaaatggtaggattgaattattaccttccatcatattaatttgaataacatttttaaattaataaataaatttaaataccaataacattatcatttattataaataaaatattatgatatataaatttagtctgtgagataaattttttttaactgagttattttaaattattagcaataacatatatatatttattatacaaaaattttatgcggatggtgtacataaataacatatcgaacaaaaataaataacatagtgataaaatatatagaaatgatcattttaatttaaaaaaaatacaataaaatttaatgtttactaattaataaatatatttctttaataaataactattttaattttatatgtaattaacattaaatagatataataaaaaaatattttatttaattttttaaaataatatatataagattcctatactcaaccaaacagt

SEQ ID NO: 289550 - DNA, 502 bp, Cannabis indica
aggcgcttcgggaagaagggtaagctaagccctaggttcattgagccatttcagatacttgagaaggtcgggcaagtagcatatcggctagccttaccaccagcgttgtcggctgttcatgacgtatttaacatttctatgttgaggaaatacgtatcagacccgactcatatcttgagttatgaagcacttgaactgcaatcagacttatactatgaagagcaacctgtaaagattctaaatagaaaagaaaaagttcttcggaacaagactattgctctagttaaggtgctctggaagaacagtaaggtggaagaagccacctgggagttagaagtctgacatgaggacacaacatccagagctattcaggttagatttcgaggacgaaatccttttaacggggggataattgtaatgaccgctttagtaattcggattagtaaaggaaattagcactaattcctgttaatttataattatttatgaatttatttatttg

SEQ ID NO: 289551 - DNA, 500 bp, Cannabis indica
aagaatctttccagttcaattgttttttttactaccaaaagaggatgaaaggaaatggcttaaaattataatatccaaactcacacgagtaggagtaagattcttcaagaaaattgagttgttgaaatgacctgcaagtagagataaaaagttaataggatgacaacaaaataatataaaagaagactataacatttgtaagtaagaatgatcataaagttgccgaacattgccttggaacaccaatggtgcctaacacctactaaagtgcaatcaatgtgtgttgggcaacattggtatgatagcaatattcaagctggtaagtggaaattagttaatcaaatccataaactaccatgggagcctgtgaagtttatctggaccccaggcatgggtagtatgagatagcacatagagaggaaagggagtatttgggtcattgtatggcagggtaattattgagtgaggaatgagatagcatatatatatatatataaaga

SEQ ID NO: 289552 - DNA, 672 bp, Cannabis indica
aaagaaatcctcagaccagaaattcaaacacttacagatttctttgtttaacctttgttcgttactgtcagtccacttttcttcgtcgatcaacagcaacccccagttccaacacttcatgtaagtttttcgcatccctcactttactgtttgtgttcatggcatgctttactgttcatttgtttttctgggtctagtgtttgaagtttctgggaatgtttcaccttgagttttcacgtaatacgtttagatttctcttctctagtgtttgggtcactcttgttacacattattattattttttgtaaaggcccatttactctttgcgtgatggccttcaagggtatagagaagactttgtctttctcgattttctgcccctcctcttccttttccttttatgcgcaatgtcactatctgtgagattcttgcacccgacttttgtccaagaaatccttctaaggctttcttgttgcaaccgtccggagggggcctctttccagcggttaggggacccacattcccttttttgatttagggtttggtatggggcctaattgctggaattttaactcttttctgaaccaaaatgtctgcatccggttccaaatcttccaagaagggaggaaagcgtctggccaccttggaagaagttatggtgggtcccgttgc

SEQ ID NO: 289553 - DNA, 586 bp, Cannabis indica
tgagttagggcaaaaaagttcatgaagcttggaataagcaaaatggaaaacagacgcaatgcagttctaaaataagccttacggctgaaagctaacacaaggatatggaaaagaagagtcgcagaagtttcaaaccctagggtttcctaaagtgttctttctacaacgaagttacattcaaagcgtaagcatgcaaaggaaaagcataaagggaaccagaaacttactcaaagattcgaatgtccgggttcaagcaagccagcaatcgtctgtaggcactttggcaactctgaagccagaaaattttctcttttcgctctgaaagtttacttaacaacgaagggtgatgaaatgaggtaatgtgccagtactccaagtatttataggcaaaagggtaactgtacgtaaaggaaccttagacgcctcggcttcccgccttaaaagcgaatatgggaaatcaaaagtaattgagtgcaaccgtcagccgtggagagagaaatttagattttcaaaatattaattgtcagagcattaattagccgaaaaccgaagggacgcccagtcagcttcaaatcgagtctcgaaa

SEQ ID NO: 289554 - DNA, 622 bp, Cannabis indica
cctcgaacatacttctgtttctggtgaaatctttaggcaccagatcaccagcaaattttgataaccggtcaaactctagagtatactcggccagtcaacttcacaaaatcttcttgatgtgaagtcctcacagccacattatagaacttttcctcgaaaagtttcttaaactcttcccatgtcatcacactgacatctcgagtttgattcactatgtccctctaaacgcgggcgtgatcttgaaacataaaagccgcacaattcaccctctctgttcccgtcacccccatattatcgaggatataggtaacagtgctcatccactgatcggctttaataatattaatgcctcccaaaaaaactggaggttgcagcttcacaaaccgctcgaacaccgagtcccggtgctgcataacatacccttggttacccaccactggcacaggagctggtggtaacccttgattagctgggacagcttgttgcctcaaatgttgcaactcttcttcttgacgaagtatgacactccgcatttcatgaaacatctgctgccagtcaacaggaggattagcattaacagcccccgcattatcccctggattttgcggaggtggatgcggtg

SEQ ID NO: 289555 - DNA, 747 bp, Cannabis indica
aattgaaaaataaatgttatttgattttaattgttggctgaagtaaaatgaattaagtggcttttatttcatttagtcaaattttagaaagttagaaaattagaaagaaaagcaaaatttttctctcaaagctctctctcttttcggccctccttgagcagcaaggaagtggagtttttcttggtgattcaagctcattttgaccagatttagtgatctctaattgttggtaaagtttcttcatctttctcttatgtttcttgaaagtttttaaagagaaatggtaggttgcatgctagttttggggtggctgttgttgctgtgtttatatgttgttttcagggatttaagcatgttaaattaaggagatttgagctgtttgtgaagcatgatagttaggttgagtaaagctaaagtttttctatgcaaaagtttggttttcaacatgaaattgtgtgttttgttgctgtgtttgttgaggatgaattcttgtgttttcagaagcttttatatgcatgattaagtaggtttaatctgatctggatgcatgtttgttgattttaaccaagtttgagttttggaactcaaagcttgggctttaatggcacttttcatttctgtacattctgggtggatttaatgctttagaaatgttatttgggttatatggaataggtctggaaggtttgaggtgatttgggttggatttgtatgagttatgaaattttgaaattctgcctgcgagga

SEQ ID NO: 289556 - DNA, 512 bp, Cannabis indica
ttcatcttataaaatagtataaaagaaagctattttgtaaagtaatatagaagtggacaaggtttagaagtcccattttgcaaccccatcaaagcttaatgttcatacttgaggaagtgtaataagacattagtaagtactctagttagcaagtaaaacattagttgcattctcctttgaagaattatggagtttttgactatgttaggtatagggaaaaaatgtggaagggatagaaaataagtttaaaaaattgtggtagatccttattatttattcttctcagtgtatattttcatgttcctgctgcatctacactgagatgcctatttacccttgaacctttatactacaataaaatcttaatataattgtttctatattttatattacatatgttggcatcattgtatgttaaaagtgaatactgtataactgactttgctgggatggtattgtaatagtaaattatcttaggaaaatatgataacttggaagcaaagggagactat

SEQ ID NO: 289557 - DNA, 789 bp, Cannabis indica
atcatgttggactgtccatgtgtacatagtgtgttgtctaaatggacacagtatacacagtataattttattgtgttaactcaaacttttaggtctccttgttatgatgattaacaaatatttgattattatttgtcactaataaaatttgttgattttgtagcaaaatgaaataaatttttccaagacagattggtatttttaccaaacttcataaagtgactcaaaattgattcaataagcatatcaagagcaaaagattaatcaagggatcaacaactcaagaccctattcaaaagaggtcttcaaaagcccaaagtcaaaagtcaactcaaaagtcaaagtcaaagtcaactatcgaaaaaagtcaacttaggatcaaaacatgcaaatcaagataggaagctcatctacatcaagactacacaaaattaaatggtataaatttactttagtcttgttaaagtgacttgcatagcccactagagtttataagtacaaatttttttagcccactcactaacttgtgcaacaagttttctcacccgatggttcaaaacaaattttgattgaatttccaaatcacatttcatctaactaagagaataaaaaatgaaatttctaaaatcggataatcgagtaaaaagttatgcatgttttagtctgaaaaatgtaattttgccattgtaccgaaattttggttcacggcagaatttctcttggaatgcgtgctaatggctataacagttacttttcaccccaacactataaactcaattttctctcaaa

SEQ ID NO: 289558 - DNA, 707 bp, Cannabis indica
gttcttggtttatacctgatgtcgaactgactcaactccatcgcccacttcaacaacctccctgatgcttctggttttgccagaacttgccttaaggggtagttggttaaaacttcaatactgtgagcttggaaataaggtcgcaattttcttgacgatgttatcaagccaaatgccaacttttccatttggggatagcgcgtctcggcatccagtaatcgcttactgacataatacaccgggtattgtcgtccttggtcctcgcgtactagtaccgaactaatcgcatattccgacactgctaaatagatggacaggacttcaccggtcattggctttgacaagatcggaggttgccccaagtgtgtttttaaggtttgaaaagcctgctcgcatttttcggtccaatggaaccttttgttgccttttaaaatctgaaaaaactccttgcacttatcagaagatcttgatataaagcggtttaaggctgcgactttacctgtgaggctttgaacttcctttggcttggttggtgatggcatttccaccaatgccctgatcttcgcaggattggcctctattcctcgctgattaaccatgaacccaaggaatttcccagagccaactccaaagacacatttcagagggtttagccgcatcttataccgtcgtaatatatcgaacatggcctgtaagtgggcaatatg

SEQ ID NO: 289559 - DNA, 458 bp, Cannabis indica
cccaatgacattttgtctttttgtgattttagtaaatggaaaataaatgtttatttatgatatatttggctgaagttatattgatttatgttagatagttttagttcattttatcaaaaaaattacacttagtcaaaattaggaaaatttccaaaaaccaactctctcttttcctctctctctcggctgggtgtgtgtgtgcaaggagctggattctttctttgaatttcaagcaatttctcttccaatctaagcattcttcaagctaggttagctcctcttccttgtttctttaaaaattgttgaattttgatgaattaagtgttatgcatgcatgattatttggttgtggttgctgctgtgttttgtggttagattctgttaaattaagcatgttaaattaaggttattggagttgtttttgaagcatgattcttaggttgagcaagctatggttt

SEQ ID NO: 289560 - DNA, 786 bp, Cannabis indica
gccatagatttagaaaatatgtggttgtggtcttttgatgacttaggtctagttacaataaagagttcttagaatagttcaagtggatcctggtcacagaatattaaaatcatattccatattaacatacagtttgaatccattgatagaaaatggatattaatcacttgttaaagttgaactgtattgtattctggaaatagaaatataaaatttctatttggaatataaaatttaaagtcaaagacttaaatttataccaaatatacatgagtgttctttcttggaccaccactactaatctaactctatgtttgatttgcctaaagtaagcatatataagtaggagattctaagattgaggatttatatcatttcgggatagaatgtcgggaatataatcatgtgcgccattcaatttttttaagagaaaatagaatgacattataagcaaatgatttataaaccattcatccaatgatatattatttaagctaattcgaaatgaataagctaagaggaataattaaaggataatttcgattaaaataagaatccaacgatgtcccggtaggcgagagtcaaagttattcttattttgacacgaaatttacaactacaattaataacagaaaacaacatggttcaatataaattcacacacaattcagaaattatcaagcatttagcaaataacaaagacatgtgaaaatacaaaacaagcacatcttaagtaatttctaaggtttccaactaaactgatacaacgtcccggtaggcaagagt

SEQ ID NO: 289561 - DNA, 605 bp, Cannabis indica
caaggaggaccagtcaataaaaaccccccacagcaacagattcttctgtgtaagcacaattggaccaactcagggacgtaatctagggcatagctggcccgaagctataacaccctaactaattaggcatgttagcgtaaattttaacgtactgtgcagctcgctgctaatcaacgagattaacaaaagacgtgattaattaaaatttacttatttaattagaaacataaagtaatatatttataaaatctcgggctcgcgttaacaaaatacatttacaaaagtttaatattcatatacaaaagtttgtcgcctagcgactatacaacaaaagccttgatgtcccaaagatcgtacgctccaggcctaaccgccccgacatgtacaaccgctatctgctctctctcacggctgctcagccttagtcttgccctagcctacacatggaaatagcactgtgagtcaaaagactcaaaaaaaaaaagcataacatataacataataatatccccaagttataatcaggcgtccataaacctaccataacccctatcctcgtgtcgcacaacggtctgagtctagaacattcatacaactaaacattt

SEQ ID NO: 289562 - DNA, 445 bp, Cannabis indica
ttgtcttgttggagcatcttatcttttccaaatcaagtgttcaacataggtgataatttttgttgtaggtataatcttatcttttggtctgatttaacaaattaataaagttttatatttgctttaaaaaaaatgggtaaccttcgttttttccttttttttttttatttctatttcacatcaaattttgataaagaaaatgcaaaataaaatcccaatgattctaattcacttgcaaatatatgtaatgagtaaagaaatacatattcgcattcaagatattacatccactcattttttttttattggttcacaaaatctttcttccgtttacattaaatcattcatgacttgtttacattaaatcatacaagatttacttattcttaaccatatgttattcttactttttacatcttgccacccattgttgcagcaattatac

SEQ ID NO: 289563 - DNA, 556 bp, Cannabis indica
cataaagacgtgcagagcctaacaggggttgctgacccccgagccgtttcatctcccggtctacagacaagtgcatccccttcttcaacatactgaagaagtgtcaaaagtttgaatggtcggacgagtgcgaggaggcattcaaaaagctgaaagaacatatggccaatcctcctatcctatcaaaaccagttctcggagaggacctattcctatatttggccgtctccgagcacgcggtcagcgctgccctagtccaggaagaagagaaaactcaacatcccgtgtactatgttagcaagcgcatgataggagcggagacgcggtaccccatcatcgaaaaattggttttccgcctcctgatatttccaagcacacccgatcaagatactgaccaaccacccactccggcaagtcctccaaaaactggaagcgtccggaaggctcctcaaatgggcaatggagttaagtcagttcgaattacactacattccccgcatctccataaaaggccaggccttggcagacttcatcaccgaatgcaatgaagccgagg

SEQ ID NO: 289564 - DNA, 822 bp, Cannabis indica
tgcttgaatacttgtggtctttaggtgggagttggttacaatatttatatcatcttttggttgttgatcttatgtttaagagtatgttattatgggtggtattgtgagtgtaatattttaatctaagagttttctttggttttggatgcagttgggcaggcacctagttatgtttggcggagcataatttggggaaggtctctgttaattaaaggattgcgtaagcgagttggaacgggtgacacgatactagtttttaaggacccttggctaccacggccagccacttttaggccttattgttctactctagataatctaaatttgttggttcgtgatttgattaacgagtcaaggagtggttggaatatgcaaatggtgagggagttgtttaatgtggctgatcaacagagtatttgttctttaccaattagtaaatttccgaaagcggattcttggatgtggcactatacagctgacgggacttattcagtgaaaagtggatactttgtggcgtcgcagttggatcaatttgatccttccccttctaagagttggttcgcagtatggtggaaagggttttggaaaacttctttgcctaagaaagttttaatatttgcttggcgtgggtttcatgatgctctccctacgtatgtggggcttcagaaaaggaaagtggttgatcatactaattgtccaatatgtggtttcagtgtggattcaaacagtcatgctgtgttcctatgtcgtggttttaagaaatttggaaggattgcgtgttactatgttgataacctctctatggatatctcattcaaacaa

SEQ ID NO: 289565 - DNA, 629 bp, Cannabis indica
acttgttttgtttgttactttaggcacttttaaaattttgggaacgtccaattacagccgttatgctgccaaaatttcggtagaatttggatcaaattttattataaaaaacataaatgttaaaggaaaagtacataacataaataactaggttattactcgctagttgtaagaaattaggtgacataacacattcatataaacttgtcttgtataatctaattgatgtgtccatgcatttattatacttagtaggtctttatatttgactcaaaacatgttcgtgttagtagcatgattatcaatgtcaaagttcatatttgaaaggttctcaaattttgtttgttaatggtgtagatatggccaactcgggttcaggatctgattcagacctagaggcagagtgtccaacagtaatacctacaagagggcctactcaaatgaatgaaatatccaagctaatggatcaaggcaaaagagtggccctcgaggttaatgacaaaggacaatactacggcaaaagctatgccaagctcatatcaactttaggagccaatcctactctgaaaaataaagtttggacaaatatccaagtaagcagttatttgttagaattttgattttttttt

SEQ ID NO: 289566 - DNA, 498 bp, Cannabis indica
atggtgtctgaccggttgctattttttccgttgtacggtatgaccatagaatttcggggagttcttctggccagtttcctatggcatcttcgagtttcttttttagtgtatccttcaaggttttgttgaatgcttcaacttgaccgtttgcttgaggatgtgccactgcggagaaactttcgatgataccatagttcgcacagaaatcaatgaaagattggctgtcgaactgcttgccattgtcccagactattttgtacggtagttcgaaccggcatatgatgttcttcactataaagtcttgaaccttctttgatgtgatggttgcgaggggttcagcttcagtccactgagtaaagtagtcgactgctaccactgcgtactgcaccctgcctttacctttaggtaactgtccgattaggtcaattccctacatggcaaaggtccacagactctgcatgtaaagaccgcttagtttaatttgaaaattagaagtta

SEQ ID NO: 289567 - DNA, 749 bp, Cannabis indica
ataatagtcaaatgaaaaattatggctctttgtcaaagaaaattatgcataataaatagataaaaagttttgcaaaaaaaaaatctaaatgatctcgattaccgttgatctcattcaaattagatagtatatgataactgtaatgaccgcttaagatcaatattttggattattaaatgattagggttaattgcaatattgagttattaattatgatttacatgtttatggagatttatttaaattcaaaatgtattaattatgctatatatgtgaatttcgcgttttctgtgcttgtgttcggtaacggtggaaagcgacgtgggccattagagagtcacgttttgtatgatttagaatgtcaatagcggggtactattgttaggcattggagatattggggatttgtcgggagtggtaaatgactaaactacccttgttgcaattaaagagttttcaatcagaaataagaggtccaattcaaggtataatgtttagccttcttctttatggttttctttagctcaagataggttaattgcatgattttagtgatttgaggttctgtagtgtgcaactagtttgggtttgaattctgggggttaagataggtttattttagtttgatcttgtgctgagatagctagttgtgctacaaattactcacacttgaagttgaagagcttaagttggctctctaatggtgtttataatttctgagctatttgatgtgttctgttgcttgaaat

SEQ ID NO: 289568 - DNA, 782 bp, Cannabis indica
ggaggtggtcggggtggtagaaatccccaaaacccccgtggacgcggtagaggccgcggtcgagtcccgagaggtggacaggagaatccacctcaggccccggttgattgggaacaaaggtttgctgagatgcaaactagaattgagcaacaagaagaagagatccgacgactcaggcaacgggatgctcctgttgagcctcccccgcaaccgcctgctgcggttcctgcagcccctgcggtgccagctgagcaacatgttgctggtaaccgcatggagcctttatatgagaggttcagaaagcaagcacctccagtatttctgggaggccctgatgttttaaaggctgagcagtggttgactgttatcgaaagaatactgaatttcatgggagtggtcggaaatgatagagtggcatgtgccacgtttcaatttcaagaagatgccctgatttggtgggagatggtatccctcaccagggatgtgaccagaatgacctgggaagagttccgggaattgttcaacgccaaatattacaatgaggcggtccgcagtgcaaagcggaaggaatttgttgagttggtacaaggtgagggtatgtcagtaactgaatatacaaccaagtttgatcgcttggctaagttagcctccggaatcgtaccaacagatttcagcaagaaagaaaagtatttggctgggctgaatgccaagatcaggcatgacctggttattacaacaaatgataccacaacttatgcagaaatggttgataaggctcttcg

SEQ ID NO: 289569 - DNA, 637 bp, Cannabis indica
aagatttaaagtactttttcacccagagggagttaaacatgaggcagagaagatggttggagttggtcaaagactacgactgcgagataatgtaccatcccggtaaagccaatgtggtagcggatgcactcagccgtagaggtcccggactagtttccactttacaaggagtatcaagggaattagtggaagacatggaacgagctggtatagagtttattacagggcaacttgcaaaggtcacacttcaatccactttgttagaaagaattaaggagggacagacgacagatcaaaagctcagtgaactaaagcaagaaattttgaatagtaacgccaaagattatgaaatatcagacacgggattaattcggttcaagggacgaatttatgtgcccgataatgatgagctcaagaaggggatattggtagaagctcatactacaccttattcagttcaccccgggaccactaaaatgtaccatgacctgaaagcattgtattggtggcctggtatgaaaaaggatgtagttgaatttgtggccaaatgcttaacatgtcaacaagttaaagcagagcatcaaagaccagcaggattattacaaccactgaagctccctgaatggaagtgggaaga

SEQ ID NO: 289570 - DNA, 459 bp, Cannabis indica
ttattcaattctaatatcacctagttcgatcctagatcaaatgatcttattcctcgactagtggttaggttcgatctcaagagtattatacatgttctttgatttgttagttaagcctacgttttggtcaaggtgatacgtacattttgggaacatggtagtgcaattgagcaggagcgctaaacatggatatggaatctatatcttctatctagcacatacaagtgaaatgatgatttctttcgagcttggctaaatagagataagtggttgagtactcatttcagtgattatgtttagttcactgaaatatcatttataggtggctaagtgttttaaggataaaatgcattgaagggtgtaacggtaatataacccatatacaatgtaaatcgtctatagaggatcattgcttattgggattataaaaatggatagctgatagcgtatctatatcgt

SEQ ID NO: 289571 - DNA, 717 bp, Cannabis indica
tatcaatgctaattttacttcgagcatcaaaccttttccaattttgagcttcccggtcggaacatttgggtcgattccaatctcttctagttcttccactagcccaacatttttatttggttccctaagtcggggatccacatcttcgtccctgccttgggcggttccctatttggcaatgtcttttcccttgtccgaactctgactagaggatacctcctttctagccttggttagggcaaggttgtaacattcccatgcaacttgttgatttcctctcaggtactcgacgccattcttcattgaaaacttaaggcacgactgaaatatagatgtaacatcttttaggtcatataaggctggttgacccaacataacattaaaggctgatggaacatccaatatccaaaattgtgccattacaattatgctcttcgaagcttgcccaacagtgaggggtaggcaaatttgccctaaaggtgcaacactctggccggagaaactgtatacgggctaaaggcaaggagttaaatctttgagttggagccccattttttcatacgctgttttgaacaagatatttgtagaggctccattatctatcatagttcgggccactattttgctggctatctgtacttccacgaccaacagatcgttgtgcgagaagttaaccttgatagcatcctcttcactgaacgttatggtgggttccct

SEQ ID NO: 289572 - DNA, 967 bp, Cannabis indica
tttggggacatgaacgaagtcaggaaggtccttcaggatcttactgcggagaggcagctttaccaggaagctgctgaaccccgggacggctgctgccaaagccaatgaggaggaggctaagcggagggaagcccaggcggaggccatgatccgggatgaggccaagcggggggacaggctggaggccaagcaccaagaggagctgagggtggaaggtgaggccactgcaaagcccaagcgggagctccgggaggccagggaagccttggacgagatggttgccaaggtgagatccttagaggaaactcaccaggaaaacttagagtccagggccgctctagccgcggagctgaaggagctcagggacttcaaggaacaagcctcaaagaaggcaaaaagagctgagcttctttctcccgtttcctgcggccggtgccctaagcgcttcgatgatggagtcttcatggcttggtctaccaatgaccaaaatatcaagcttaccttctaccccaaacctgaagagatgatcgccaaatttcgggagaagaagaagaagcttgatgccatggtggaggcacgcatcggacctcgtcttcctccgcgcattgactaggccgctcgagattaacccagtacaaccaggatttcacccacttctcttattatttttttttatatttgtttacatacagctactttgagacaatacatttatgtagctgttttttatttaaaggggagacaatttctaaggcctgtccccgggccatttgtatatattttgacctgccctttgggctaggatatttatatgtgatctcttttgacgcacatatttctcttttttgacctgtcctttggatcaggatttttatacttatgctttttatttttgtgcatactttttttttttgacctgcccttttgggtcaggtatatttttacttagtttgctgtctgtctgtcc

SEQ ID NO: 289573 - DNA, 584 bp, Cannabis indica
tatggactcaaatgtaactcttacacacaccataactcctatagcattaagaatttcaaataaaggtgtgtaacatcttttacactcttaatgttggtgataatggtagaggttactcatagtaacaactccccaaatgttacaaaaagatgacaactaatataatcatatgttacatattattagtttattacacatatttaatctatatattatattattataaataatataacacttcctagctaaatcaattagttgtgattgaagtggaaaaagacaggttgggcttgtggattcaaagtggaaaattacttaaatgaatggaggtcattgtcattattgtcaatgtcattgtctttgtccaaagtcttagagaacgttgtgacaaattggtattaaaatggggaccaaactacactcgactctacttttacgcccatattcttaaaaccaaattaggtatactgaaaattacgttcatatttatgagctaaagtctacatgtagtacttatgcagatttatatgacagcggatatgtaacattcatttttataataataataataaattataaaaaaa

SEQ ID NO: 289574 - DNA, 562 bp, Cannabis indica
ctacgcagcaacctaacgcaaccaaagcgaaaagtcaatgagaaagagaaccaccattaattctggcgactttacctgggaagacgaccagaatcaatcaaaacaggggttgcttcgaattcatataaaaagtgtagaaaaactactacgaaactaaaattcaactagaaattcaatttaatttgcataaaactaatatcctaacttcaatttttagatccataaaagacagatctcaaaaagttgaaccggattcccaaacaatctaactaagtataatccaaaaaaattacatcaaaactatagtaaaatgtttatcctggtgtatttttgtggttttccaaatttctaatgatgaatttattcatattaaatcattaagagacatgtagatagagttacgtacgtggaaacactgttttgatttttaatgtttcacaatagttgcattacagttgcctaaacattttgctaacagttatttcgtctgattgaaacattcgtctgatgcaaccttcagccaaccacccagcaaccacctagaaactttcgtctgattgaa

SEQ ID NO: 289575 - DNA, 613 bp, Cannabis indica
attaaaagcctcaatcatacaaacttgtacaatatagtaaattaaaaacagtagatcgatcgttattattacatggcaaagctggtgagataaataaaatggtaaatactattttggaccctgtgttttgcaaaagttacagattggaccctgtgttttgttaaatgacaaaatggaccctgtattttctaaaatagtaaaaataggaccctgagcttaatttttgacaacttttttttaattacaaccaacttgaagacaatgcttaatacgaacagatacaaaaaatagtaaacagttttgtcatagcacttttagatcggattataattaaactttattttgacaaaaaatcaattcagggtcctatttgtactattttagaaaatacagggtccattttatcatttaacaaaacacagggtccaattagtaacttttgtaaaacagagggtccaaaatagtatttaccttaaataaaatatccctttattaacgatttttattcatgcctttataagaactaaacttagatagccacaaaacccaaagcttccacacgcatatttgttgtactattagctgtgaggtttggcttctgttattacagttt

SEQ ID NO: 289576 - DNA, 703 bp, Cannabis indica
tgctcagatatgctatcattttttctcctcgagcctcgtattcgccgaatacgtgatttaccaccagctatgaatcactgcagatctcaatgtgttcgaccttcatttccttggctagcttaagtccagcgattagggcctcgtattcggcttcattgttagaggccttgaatccgaacttgactgcagcgtgcaggtgttgccccccaggtgtgacaaggcaattcctgcaccgatagttgatttgtcgccgacccatccacatgtagtttccaggtcagtttgtgttcttcgttaattggctgtggtactggctcgggatcgctttctggtatgctttcttctttgcctgtgcattccacgacaaagtcagccagggcttggcctttgatagctgttcggggttggaagttgatttcgtactgacccaattctaccgcccacttgagtaaccgtccagaggcatctgacttttacagtatttgtcgtagtggttggtcggtatacactcgaacaggatgagcttgaaagtaatgcctcagcttccttgttgctagaatgaggcagcaggcgagcttttctatcaacggatatcggccttcggcctcgatgagtcttttactgatgtaatagactgggtgttgcacgctgttctcttctctgatcagcacggcacttatggcatgctccgtaaccgctaggt

SEQ ID NO: 289577 - DNA, 468 bp, Cannabis indica
taagagtcagaatagtataggtttcattaaccctaaaattatatcgttctattcttcccacctatctgagcaagactaaccctaaaagttttcaagtcatcgccaaatctatagcactcttcactctcatctttgatcaccatcatctcatgtctattaatccaagcagcttgaagtatttgaggtaagaaactctacatttactcatttattgatcacaataggagaatattcgtaggtctccttttcttatttttttcagaatgaaacatgtctcagtaaaactgtcatatctcttaaaatactcatccgattctcacaatcttggtgcctatagaaagcttattgaatttcccataattcttatgaagaaaggttttactgaatcgaaatttatctatgtcaaaaattagtatttctacgctgtttattgtaaatcatttttttttcatgttttctatataagtt

SEQ ID NO: 289578 - DNA, 558 bp, Cannabis indica
tgcaacatctagctgttcatcaatacgtgacaccttggacaagtatttacaatatgaaacaatgaagaagtttataaaaataagaataactttgactctcgccaatcaagacatcattggattcttattttaaatttgaaattatcctttagtttttcctcttagcttattcattttgaattagcttaaataatatattattggatgtggtttataaatcatttgcttatgatgtcattctgttttctcttaagaaattgaatggcgcatatgattatattcctaacattctatcccgaaatgatataaatcctcaatcttgaatctcctattacatatatgttcactataggcaatttaaatttagagttagattagtagtggtggtccaagagagaataattactcatgtatatttggttaaaatttaagtctttgactttaaattttaggttccaaatagaaattttatatttctatttcctggaacacattacacattacagtatgacattcacaagtttttttttaatatccattttctgtcaatggattcga

SEQ ID NO: 289579 - DNA, 914 bp, Cannabis indica
ctcaaaaattcttttcagtataagttgactgatgaatgaaaattccacattttaaatgctcaatttgtagaccaagacaaaattttgtttttcctaaatctttcatttcgaactctttctttagatattccacagcttctgaaagtttttcaggagttccaataatattcaaatcatcaacatatacagcaatgataacaaactcaggacttgaactttttataaaaacacatgggcaaataggatcatttttatatccttcttttaataaatattcactaagtcgattgtaccacatgcgtcctgattgttttaatccatacaatgatctttgtaatttaattgagcacatttctcgattgcttgaattatatgcatcaggcatcttaaatccttcagggatcttcatgtaaatatcactatctagtgatccatataaataagctgtgactacatccattaatcgcatatcgagtttttcactcacagccaggctaaccaaatatcttaatgttattgcatccaccacaggagaatatgtctcctcataatcaatacctggcctttgagaaaaaccttgagctacaagtcttgctttgtatctcacaacttcatttttctcatttcttttacgtaaacatacccatttgtatccaacgggtttcacaccttcaggtgtttggactataggtccaaatactttgcgtttagcaagtgaattcaattctgcttgaattgcttctttccattttggccaatcttttctattttgacattctttgatagatttaggttcaagatcctcgttttcattcataatttctagcgctacattataagcaaaaatattgtcgacaattacttcgagtcggttccattcttttcctgtattgacataatttattgagatctca

SEQ ID NO: 289580 - DNA, 611 bp, Cannabis indica
tttgcttattcctcgaccgaacccggtgttgacagtgtcagcttcagcaatcaccaactcagacttgaatgagcataccaaaaagtttgtgattgaatgcatgaaagacattcttcatttgtcatcttctcctctgaccacatcagacatttcaaaacatcgtgctgacgtgagtatgcaactcgacgtgttgagtaccctttgcgggcattataaatgtggtttagcagaggttgcatggttcactgactctgtcaatgatttgctcaaggcccaagaaaagtctctcgcttctgctcaagttgttgagaatgcccttagtcttgatgaatctcttatcatggatcttcttcgtcgtgataaggataatttggcagctatagatcatttgtccatatctgtcactaacaagacaaaggattttgaagattttaaagcaaaggaagcagagattattgcagcagaactagccatacaacaacgacgagctgagttcgaagccgataaagcatcgtttgaggtagatctttctagtctcaaagattccttgaaggagcaacaacatctcgctgaggagataagtcggtcaaaggaccaagctagtgtagaaa

SEQ ID NO: 289581 - DNA, 615 bp, Cannabis indica
aaaataattccaacacaatcttcacctgctcactctcacagctcatcagctttagccttgcccttacctacacatggaaataccactgtgagtcgacagactcagtaagaaaagcataacataaaacatactaatatcccgggttataacctggcgcccatacacccgatcataaccccaatccccgtgtcccacacggtactgagtctagaacgttcatacgacaatactatcaaccataatgtcagcctatactcaatatgttagtcatactctagccatattgatgtgataacatcgatcaatattttagccaacatacatttatcagtaatcagtacaactctaagtatattattactcatatcaatgtaatctaataggcataaacaacatgtatgctaaacatgtaataacatatgcatgacattatactaatcttacctcaattctgaattcaggtgtgccggttagctggagtggaacaactgctgggtaaattatagactcctaaatcacatcgacaacaacatggataagtgacacgctaaatcacaaccgggacttaggttttaaaccaaaaacctatctactgcaacttaatatggaaatacc

SEQ ID NO: 289582 - DNA, 540 bp, Cannabis indica
ctgttggagtggagccaggcattgatgcagcaggaggtggaactgccaatggaggaggagattcctttgaagattcagacgaggaagtccaggtgcgaatgggtcttaccgatttgcgagcaacttgcttgggtggacgttttggcttctcggtttgagattcacgctggggaagcgatgaatctccaggctttgcaacagcaggaggatgaactgaggcagcagggggtgcattggaaggagttgcaacggtttcttctaactttttagtgtgccctagattcttggttctcaccattttggatctgaaagagaagatgaacagagacaatacaagaaacaagaaaaagtgttcgggtaggtggtgagttaaatgacaaagattggtttatataaccttggaatcaaaacaagaaaaggaaaccaaatttgaaaatttaaatggtaaccgccagcccatgaacacataaaaggaaaccgcccactcctcaactcctttcccttttttttaaaaaaaaaataaaataaaataaaaaggaa

SEQ ID NO: 289583 - DNA, 549 bp, Cannabis indica
ggagtggaatgtaacgtacgggaagctgtggtaagctgtggtaagaaggagaggtggctggtgaggcgtatgttcccaaaccatacgctcgtgaggatgagggtcaaccacaaacatatactaaggagtttatttccctcaactagccagctctcctgtacaatttcgatgaccatgcgacccttgatcagcaagtatatctctgctctgacgacatcgacaacattatggcccgagcgtatctgtacgagcatgagggtgacatcactgttcactacacgccatacaatgtaacacatgctcgggttctgatttcaaaaatgctgcaagaggacgctgaaatcccaatctcgattgaagggtgcagatatgttagggacgtaccacacatgttccttccttggcctaaacactttattgtaacatccgaggtaacttctcttataaattaattattaatgattagtggaatttgaatatcttcaatattcaaccatagtgaagtaggttctgcgaatatatgtattgcggtgggatggatgaacaaac

SEQ ID NO: 289584 - DNA, 547 bp, Cannabis indica
aggaacgcgttataagcggtcgggcagtccaccaccataaaagtgcagtatttgaacgtgctttagggggtgtccgggcacaaagtgacgggaagcctcacttttcccatcgggataagcgtcgttccgttaaaccctgtgagtagggaaccgctgggtgagaggtctcgatccatcaggcctattgcaatgaaggcctccttgaaaagtaagttcacggaacttccattgtcaatcaagactctggccaccactttattggcaatgggggtctcaatgactaacatatcatgatgagggacgcgcaccgccttggcgtcttcttccgtgaacgtgatgggctgatccatcagccggggcctttgagctgggagttgagtaacctcccaaacctcattgtgctttacggcccccgcgtaccgctttagttctctgcgggtggttcctccaatatggggtcctccggagatcatggctaccctcccgttgggtctgggcggcagaccggggatgtgctgggcatcgcccgcgggagcaactggagcca

SEQ ID NO: 289585 - DNA, 619 bp, Cannabis indica
ctattttgacagacttaaatttcagtatcaatgaacgcttatttaaaaaaaatgtatatttttactgattgtgatataggatacttaagattcttccctataatttttttttttcatatgtttgattatttaatcaatgaaattaagacaagtgttattgagtaaaaaataaaataaaataataagctatgtgttggagtgtggtagtgataataagaaaagtctcgtggagctagctagagacttgaaacgtacgagtaagaaatgcaaaccaaaagtaacgactaataataacaagtctttttaactgttgaaattgttagactatatttatatttggtaagttattttgaatctcccatcatttattttatacaatctaaaaaaaaaaaaaaaattaatcttggagattctctatccaagttccaaacataaattctctttgttctaagtgaaatatattattatgaatctgagatgattcaactcaattttaacatgtattaaactaatcttattaacttttaagatttttttttttttaaatttatttgattttactaatacaattttactcttcgaactttaattcttgtctcattatcttttatctataata

SEQ ID NO: 289586 - DNA, 662 bp, Cannabis indica
ttgcaccaggtttcccaaaacctctcatttgttgctcaatcttccaccaattaccatgaaactttccagagcacctatacaatacataagcaacaaaatccaggcagtatttcacagaacaaaccaacaaatctcaacttgccattaaagctcaaagcttgagtttcaaaactcaaacttgcttagaactaacaccaagcatcaaaaccagctgctaggaacttaatttaactcaaataaactataaaattcgaaccctaatcatttcaaaacctaacagcccccaacaccaagaatcacatattcaacctaaataaaaagcttaaaaacaaataatcaatggtctagggttttacctcacttgtaatagccttgaatccttgcttaatcccaaagaaaagagaaggaaaatctggtcttagcccttggtttgtcccagccgaaagcaagagagagagagttcaagaggatttgttattttcttctaatttcttttcttttgattttcctaacttgaaaaaaggatttacttaaatcctttgctgcccaaaatgactaggtgtcatccatacaatcagccacctaatccccccataaaagactaaaatgccctttacatcaaacttaggtattttcaaaagctaggggtaaaatggtcaatt

SEQ ID NO: 289587 - DNA, 674 bp, Cannabis indica
tgaagttgttcaataaattccatagaaaaaatattgtaatagtacagaaagataaactaagtaaaagaaagaaattcgtaataaaaaaacatgttgatgaattgatattattttgcatattgtaattaggtcaataatttgtttattttctgttgttttgtacttatctttgtgttgttttatagtttatttttattttgtttgttaagttattctagtagtttattttttagctgtctgtattttgttttaattttttttttttttttgtattttactgtaagacattatttctgtaatttttaaattttaatacaatatttttaaaaacttgatatagtaaaaaatttaaaaaaaaatataataaaaataaaataataacaaaaaaaatatttttgtaaaattcccttaattataattttttttgtaaggcccttaattataattataattataattacataaaaaaaaactttaacacagtcttaattgttttattttcataaaaataagaaatagaaccttctttaaattctacttttgccttccccacaataattcgagcccccctccaattattatcaccaactattttatttatttatttatttattttcattcaactttatgagcaataaaaacaaaatggcatgtcccattttgttgtacattat

SEQ ID NO: 289588 - DNA, 426 bp, Cannabis indica
attaagcaaaaaagatagatattgactatttcaaattcaaattacactaatatcatgaattaaatttaaaaaatattaaattaattcattatgataattagagttgaattaggaatagtaaatatataaatacagaactacacaaaaaatcggaagttaattccatgaaaaaacatgaaaaaacgaagaaaaaaaaaaaaatagcaagctgtacggacagtatgccaagcatactgtcttggcatactgtccgcgcgcacatgggaggctgcatggacgaggatggccggcgcaggaggctgcaagcagcctgtccgcgcgcggagcccaggatttcagacaaaatccctgtctgggcgcgtgctgtctgagggacaagcctcgtgcgcgcgcacgtgtgaagttgcatgactccgatatttttcg

SEQ ID NO: 289589 - DNA, 445 bp, Cannabis indica
ggggtaaaaattaagaaaatatgtaacttatgagatagacaattggcttttatagagaaaactagtagttgggaaggtgggataataaatgtaaaaattgaattacacaattgtacacatgtttgtcatgcacaaagcaatctgggcaattttcgcgacatgtcacgacacagggcgacatgttatcgacatagtgaagtagttggttaggcgggataataaatgtcacacattaattaccatttaatgtggaaacgtctttcgtatcgacgtttcgcgacataattgcgacatgttgacgacatcaactcaagagtcaaaacatgattttactatcgacattttaacgacatgttcgcggtgctttaagcgacatgaaaccaaacactcagaaactaaaatttttttcgacattacacgacatgtttaacgattttgtagcgac

SEQ ID NO: 289590 - DNA, 528 bp, Cannabis indica
cctaataaaaagtctagtgcaggaatggaagatactaaccctgcaagtacaaacctagaagttaaaacaggttctaatcaggtggaacaaaatgaagacacaccgggaatggttcaggtggaacctaaccaaagccagcagcccatgaacaatggtcaagggggaggaactgatgctcaacaagagatcagggatgaagacaccgaagaggaccttacaaactatcagttgacaagggatagatctaagaggactccgaagcctaatcagaaattcagctacaacatttggagtgaagaattggcttatgctcttctaacagatttggaaatggatgatatggaacccaagacttataatgaggcagtaaatggaaagaattctaaggagtggaataaggccatggatgatgagatgggatctctcaagaagaataagacttgggttgtggtaccaagacccgagggtaaaagtattgtgtcttgtaaatggttgttcaagcacaaggaaggaagatctaaagatgag

SEQ ID NO: 289591 - DNA, 1260 bp, Cannabis indica
ttacttattaagcatacaaattcaaatttcccttttatttttagtatggatcaccctaatggtggcgactattagtaagacttacaaaagtatgaaacaatggtggaagctcataagatagaatggccttgactctcgcctaaacgggacaacgctggattctgatcttgatcgaataaaaggttgctagaatgtttatcattttagatgagctgacaactctattcaatggatggtatctttgactctcgcctaaacgggacactgatatcagtttgttgaagaccttggaaattatttaggattgtatgttttagtattttcgcttgtcattcctacttgctatatgcttaataatttctgaattgtgtgtgaatttatattgaaccatgttattttctgttattaattgtagtttaatttcgaatcttcattgttggtctaacttggcttgttgtttttaatgggacaaatccaaatgaattgtcatccattagacaaacataatagtattagatctcgatagataaatatttgtaaatgcaatatctagctgttcatcaatagatgacaccttagacaaggatttacaatatgaaacaaatgaagaagtttataaaaataagaataaattttgactctcgctaatcggagcatcgttggattcttatttaaatacgaattatcgttattcctcttagcttattcatttcgaattagctcaataatatatcattggataaatggtttataaatcatacaatgtcattctattttctcttcagaaattgaatgaccaatatgattatattccctatattctatcccaaaatgatataaatcctcaatcttagaatctcatacttgtatatatatatatatatgcttctttaggaaaattaaacttagagttagattagtagcggtggtccaagaggaagaatactcatatatatttggtataaatttaagtccttaactttaaattcagattccaaatagaaattacttatatttctatttccagaatacaatgcagttaaactttcacaagtgtttaatatccactttctatcaatggatttaaactgtatgttaagtatgaaatatgagtttagtattctgtgaccaggatccacttacactattctaagaactctattgtgtaactaaacctaagtcatcaaaagaccacacccacatattttataaatatatggcatttgtatcttattcatagtggttttgacaagatcattc

SEQ ID NO: 289592 - DNA, 618 bp, Cannabis indica
tatatagttcattttgatgccatatctgtatttcaactccccttttatgtccatcggtgttgcctttgtctttatgttcaagaacttcggttttatgcattcccctatcagtttcgatgttgcttgcctttggtcttcatgcctaatatttatggggcatgtgtggatatttgagaacctattaaaacaaaaacaacattaaaaaacttttaaaacaaaaacaacaaaaacaacattaaaaaactattaaaacaaacctgttgcagatcaaacatgtgtatttcagtacaaattgtggaaaaagggcatttgttcaggctgacaacaaaaacaacattaaaaaactattaaaacaaacctcctgattatgaatgtgtttgttgggccatttctcgatgctcttagtgaccaattgcagctttcgtaaacacatttcagactgtactcttgagagcaggacttccacactttgtactgaaagttgtttttgattgcgtagtagctgaggacattttttagagtttctttgtctttgtatgcctgtcctttttccacttcggggtgttgcttgtctgttattaactttgcattgttgatgtcgatttctggatccagttt

SEQ ID NO: 289593 - DNA, 523 bp, Cannabis indica
gtcgtcccgttaaaccctgtgagctgggacccactgggtgagaggtcccggtctgtcaagcctatcgcggtgaaggcttctttgaagagtaagttcacggaacttccattgtcaattaagactctggccaccactttattcgcgatgggggtctctatgaccaacgggtcatgatgagggaagcgcaccgtcttggcgtcttcttccgtgaacgtgatgggttggtccatcaaccggggcctttgagctgggagttgagtaacttcccacacctcattgtgtttcgcggccccggcgtatcgcttaagctccttgcgagtagtccctccgatatggggacctccggagatcatggctaccctcccattaggccggggcggcagaccggggatatgctgggcgtcgcccgtgggagcagctggagccaatactcctgctgtaccccccggtgttccctgaggcatacccacagtcgcctgacccggattgaggtggggcaacctattcttgatccactcgtaga

SEQ ID NO: 289594 - DNA, 526 bp, Cannabis indica
ggagtatgtgattggtaccttgatcgtacgtcaaccttttgtgggaaggtgactcgagttcgacgggcagcatagcttcataaccgtacgccattgcaaatggtgtctgtccggtcaccgttttttccgttgtacggtatgaccatataacttcaggaagctcttctggccagtttcctttggcatcttcaagttttttcttcagtgtatccttcaaggttttgttgactgcttcaacttgaccatttgcctaaggatgcgccactgcggagaaacttttgatgataccatggttcgcacagaaattagtgaaggattggctgctgaattacttgccattgtctgagactattttgtacggtagtccaaaccggaatatgatgttcttcacaataaagtcttgaactttctttgatgtaatggttgcgagtggtttggcttcagtccacttagtaaagtagtcaacagctaccattgcatactgcactccgcctttacccttaggtaattgtccaatcaggtcaat

SEQ ID NO: 289595 - DNA, 582 bp, Cannabis indica
aaagatgctgacgtaatccaagtcgaccagaatgccgagcaggttagcccagccgacaggcccaacttgacgaattgaaaatatgtttcatggcatggctggaagcgtaataatgatcttgagttagaccgagctcgcggaactcccttctcaccatagatcaatctcctgccactgcctcacaagtactttgagatgcaaatggatttacaaggagtacggggggatgtatgctgcagaatcttccctgccactctgtcggaagccgcacaacaatggtatttcaagttggctcctggaaagtttagttcatggaaaatcttttcttcgaaattccatgtgcaattctcttcctcgcgtcagctcccattgcatttgggagatttggtcaaagtaaagaaacgaccaggcgagccactccgggtatacatcagcagattcatgacggaagcgaccaaagtttcgcgggtaaccgaggatggaaagttctctgcgatactggggggcattgaagtccttggtgaatttcggaaagacataaggaagaacgggccggtagactcgatgagtgatttccttgac

SEQ ID NO: 289596 - DNA, 608 bp, Cannabis indica
atcgatccagcggctcgagctcgtcatgtgctgtaccttcaggagaggtttgtcagcgatgagtttttgtcgaagattgacaagtcatcttcagaagagtttcttcctcgtgctgtggagttagcttcgcagttcatggctacgtttgcaaaggcttttgctgtagggcccaacgaagttgaaatcgcgaagaagcatattgctcagcttcaagaagacgttaagaagttgaagcaggatgcgtcttccaaagccaaggaactagaggaacttcgtaaggccaaggagcaggtcgagcttgaggccaaggcgaagattgaagagatgtctcgcgacctggaaactgagaaggagaacggcaagaaacagtacgaccaggcgatttcggactacatctatactactctatccaagattccagacttcgacttctcgattcttggggcagaagccgcagaaatggccgaggcttttcgcgctatgtcacccacaccaactcaaggtggtggagggaacatgctcgaggagactgaagccgcggaggtggaggaggtcgagaacgaggtggccagtaaaggcgcggatgaatctgttcctgctgctcccaa

SEQ ID NO: 289597 - DNA, 719 bp, Cannabis indica
agggtttttcttttggttcccttaagcgggataccttatagggctaggttccctagacttctgctgttgggtactaggcgaggattcctctggttccttgccaagtccagcagtcattgccttgggatgcacgtggatgccagccgcctccatggctttttgcatggccagcattacctcttgcattttttggttttgtgctttttgggctgcgatctcagcttcatgatcgacagccttttgtcttagaagcaccaactctgagtagctaccttcatcgtaggcatactcatcgaggtttccctcgtaatcatcatcaggaattccttcttcttcctcggagccctcagctgctcttgaggcaacgtcttcctcattcgggtcttgagcatcttctagagggcgaggttgacgagtgcttctagtttccaccattgttgtaacgtaaagtatgtttacagaagctttcttcagctctcaatgaaagcaccaaaatgttgaccgaggttttcggcaaccaataaaataatagaagattagagagctgtaagaaattaagagaaggatttttacgtggttggggcgttaatgagccttagtccacgagtctgtgtatttatgagtgtattaaatacagagaatgttcttggtgagtatttactcttcttgcacttatgcaacccaaaattctcgatactattaatgagctttgagggggt

SEQ ID NO: 289598 - DNA, 803 bp, Cannabis indica
aactaggaactaaaagtttccctatcgataaaaagcatggcaataccccaaaaaacataaaaacgaggaaaactagggtttctgaaaattccccaaccggtagaccggttgcccaaccggaattccggttctgagaattcctggaccctcatccggaattccggttgcacaaccggaattccggttcctcgcaggaacttttcaaaaattcacacaatgctcaaatcaattccaaaccaccccaaaacttccagacctgttctaaacaacctatagaacaattccaaagcaacgaaactacccagaactcacagaatcaaaaatcaccattaaagcccaagctttgagttccaaactcaaacttggttaaacctagataacatgcatccaaactagctcaaatcttcctaaacatgcatataataacttcagaaaacaacaacaagcatcaacaaccactgcagcaacagatttcattaattcactttgaaaagcatagtttttgaaccaaaactctaaattagtttcaaaccaacccaacatgcatcaaaacagtttcattcctactcaattaaacaagattaaacctctgaaaacactacataaacacagcagcaacaatgatcaaaaactaagcatgcaacacaccaaacttttcttacaactcaagaaaacacaaagagaagttactagagatcaaaccttgacttggattacacaaagagctgctgaaaatcacaagaatcaagcaagaacacccagccctagcagctcctagacttggccgaaaagagagagagaga

SEQ ID NO: 289599 - DNA, 526 bp, Cannabis indica
acaaagctgatgtaatatctgtagccatttactgaattgatgggtgcaggtccccataaatcagagtggagaagctgtagtggttcactataagtggtagtagagttagaaaaaggtaacttatgtgattttccaagacaacaagattggcaaacatcagaaacatttttattagacagagagatattacattttgagatagccatttttacaattttggcagcagtgtggccaagcctgctatgccataaggaaaaatcagaaataaaactagacaaatgatgagtgtgacactaaggtgtaggctgtgatgcagggacagaggccaatgaggatgaaagaatacccagctgacttgagtcaaatttgtacattccattctcaaggttcccaaccaacaaagtcttctagctcggtccttgacacaataaaagaaagggtgaaactcaaacataacattgttatcttaagcaaatttagacacactgagtaaattttttgttatggaaggcacatgtaaaagatt

SEQ ID NO: 289600 - DNA, 481 bp, Cannabis indica
tcgcttatcaaaaagactcattgtcgttggctaaaagcgaagtcaacaaattagaccacacaaagtctcttaattaataaataaaccccaaaaccttttttcttcacaattaagcccttgcttagtaaaaattcataaataatacataatctaattttagaattataaatgattaattaaaaccaattaactgagtttggaagcagtattatctcaactagtatttggaccatgggcctatataattaaacttccaataagtagatctagaattgactaagtaaattctctaacttattaattcctccttgtgccactatagattcgaaatttcaatcttaattatatagaacactctatatttaccaagatatagattcgttgtgaatagacccttgttacaattcaaatagtcaaagatcctctacagatgatctacatcgaatagagacaaatttctgttctacccttcaatgtattt

SEQ ID NO: 289601 - DNA, 604 bp, Cannabis indica
acttagcacatatatacactcagatattcatattacacattatacacagttcttaccttctttccagattcaagtgtgctggccgacctgaacggaaagtctcgtgctagatggatgccctaatcacataatgaaactgagtaaatcacatgatcgaaaccctaatctcggaaaatccaaacctacgactctaggttttgttatatcctctagagatcacactaactcaggaaatagggaaacacccaactacggtactggaatacacgagaattgagaaaatggagcatttggggaaccctgcaaaaaccggctaaccgttttacaggtactggtaaaaccggttacccggtttgcaccagttcacccaaaaaattccatttcttgctccatcctccaccaaatgcagccaaaccttccagaatacctaattagggtatacacaatattttccaaccagtaattcatagaaaaactcaatgaaactcaacatgccattagagatcaaagctttgagctcaaagctcaaacttgcacaaaaccaatcccaaacatcaaaaccaactacaagaagctataatcaactcaaatgaacctaaaaatt

SEQ ID NO: 289602 - DNA, 702 bp, Cannabis indica
tttctttattttggctctaggtactgtaatgaaatcccgaaagttaacttgtcatttgaatttcaaaatatttttggttagcctatctatgggtcaataattgtttacattgttcgtcctaaaaatctttatccatttgagcgtcaattaatatatctttccagctccaagagtgacaacccttcctcttttcaaatatttcaatacctgtgaggatttggagttgagactttttactttaaagatttttcaatattatctgtgttatggattaaagcaaagaatatgatttgaaacacacacacacaaaatctggaattatatctattgtaattttttttatatagtattttctagagtttacaccaatattttattttgtttcgattagtcagagtttgttttgatttgttcattttggtaatattttgttatccgcttgaattgctagggactagcaataagctagttgggggttgtgttaagtagtcaaaaatgcatatttattagtgtaaaaatacaaaataaaattaattctatataatattttcatgaaattaatgtaatatatttttatttgaaaatattgtagtgttgagttaattttgtaagaaaataacattttatgacacaaataagagaaagaaataaataaaaaaagaaattaagaaaatgcattgtttttatttaaagaaatacaaa

SEQ ID NO: 289603 - DNA, 495 bp, Cannabis indica
acatataaatgtgttaaccttattgagctcataactttgtcatcataaccataggcatgtgcaatctcgtccattaactatatcaacataggatcaaagcgattttcgttgtatcaatcacaactaaacccatcaatggtcacatatatcaacatagccaaatgacatagatcaatcatgataatgtggtatgaaaattacatgcatggtgatctattcatgtcaattttcaattggtcctactttactttatggagatcaaaactttagcttaaatgtacaaagtgaaataaactgaataacataatttctgatcagaaaaatatccaaatacacatgtttcatgaaacaaataaaacacactaaagacaaactcccactgaatctagatatcctcataatctaaaacacccatacgagcagtgtgctcatgaaagaccttgggtggcaaacccttagtaagggggtctgcaatcatggagtttgtacctaagt

SEQ ID NO: 289604 - DNA, 772 bp, Cannabis indica
atatactaacctattttattatatatttatgatatatatttaattatataggatatattattttatttaattattttttatttttttttaatgtgaatcattcattttttattaatttgtttattattatatattatatatttttattttaatttaagttttttttttctaaaaggaaataaataaaatagtccagtctattcttaagccaaacacaggattactttcagcataatccaatcttgtccagtctagtccaatcctcttcagtccaatccagttcaatcctgcgtaccaaacgggccctaatgggatattggcggctaaaccacctgaactttacgttttgtaacacttgaccacaaaaatcgatttttcgggggtaaattgaactacataaactcctattccgttttgctttgtacctctccgtccaaaaagcacagttaaatgccacggtggactgtccacgtgtacacacttgtacgcgtggcaaatttttaatggtccacgtaatattgttttaaaaaaatattaatttaaaactataaaaataaataaattaaaaaaaatttaaaaattataaaatgacaaatatttaaaaaaaattataaaaaatacagaaaaaaaattaaacaataattttttttttctttttctttcttctttttctttcttcttctttcttcttctttttctactgaaccgaagcaccaccggagccaagcctaagcacccaggccctctctttctctctctcgtctctctctct

SEQ ID NO: 289605 - DNA, 670 bp, Cannabis indica
acaacaaggccatcagcaaaatagggaattttgttaatgattacttcatggtgaaggatccaaacattacccggactcggtttcaacagattctgacatatcaccatcctcccctcacccttactcttagggatagggctcaaaagcttgcccggttgccggtggaagacagggatatcatccagttgacctccgatgaaaatctggtgcagtacgggctttacccagaggacttttcttctaagtccgtgacgaggaagaaggggaaatctgctgctgcccggcctgaacgagctcattcggaggatgagttgattcaactgaagcgtgaagctaagttgaagggaggtggtcgggcaaagaagtatgctcaggagtctatgaatcctgaagatgaagtcgaggctgaggctgaggctgagcaggtggctcctttgaagaggaagaagaaactcccagccacgcccaggcccgttgaacatgccattcgcataagggagcccatttcacctgttcagtcatcccatccttatgctggaaaagggaaggccgttatggattagacaaagtcgatgtcaggttatgatggacttctgactttctgggcgagcagtcactctgcgttttaattctttttcagcttcttggctttcatactttgtattttttg

SEQ ID NO: 289606 - DNA, 505 bp, Cannabis indica
aagacccaggacgcgaacccacacccagagcctgatcaagacctagactaaaatctgggcccgaacccaaacttagacaaggacgcgaactccgacccgaactcaaacccaaactcgaacttaaaatcgctaatgggactagaaccgaactaggactacgacgaggaataggacctaaacccaaacccgaacccaaatcaaaacccagacagagacttaaacccgaatcgagactaggactccaaccgaaacttagaccgggacccaaacccacacaataactgggaactggatccagaattaggatattgacatgggaaacagagctaggattaggacctagtacccgaccctgacccgaacttgaacctaggacctagctcgtgatgcgacaccagaaatggaaccagactgggacagagattgggatccagatctggaccaagggcttggaaaaaacccataatcggtgtttggatttgggacccagccctggacccgaacc

SEQ ID NO: 289607 - DNA, 570 bp, Cannabis indica
caattggactatgattaaaatcagatcattagatatgtcaacaagttaatcacagcaatttagatcaaataaaaaaaaggtttgttaaaaaaaagttttgaataaacaatataaatataacaaacaatgtctctgtaacaaattgtgaattaagatatttatataattaaattattattttaactaaccaactattttgaaaatttaaggttgttaaaaataacttaaaatatcttttcaaaatttaaaattcaaacttatttaaaacatctaagtttatttaaattatcttattaaattaaattaaatatctaataagataaatgatttgaaaataaccaaatagatattttcaatatcattttctaatcttataatttaataaaattaaaatgacaaaataaactaattttaaaatagatatggttaggaaattattattttaagaataaaataataaacaaattgttgacctcgcttttagccaacaacagtgagtctaatttaaaaagcaataagtagtttataacgattgaaatataataaagcaatataaagacacaggaattt

SEQ ID NO: 289608 - DNA, 830 bp, Cannabis indica
aaaaggccaatttaccaaaatgccccctagggccaaataacacataaaagcgttccaaggataacatagtcatttccaacataaatatacccaattaaatttcagattaatcacactttattaaaatgccaataaataatcccaaaattatatttcggccccgaacccgatttggcccgaaatacccggttgtgactatacctcgtcgacttgtcagaacacacctgaagaaggacaaaataggcatactatataataatatagtccataagcacatataaaattaatttcactgttttacccttctcctgtcaaaattactaaaatgcccctagctcacctacggggtcttaacatgtcatatctcatattaattcacatataataaattatataataatataattccacaataatactcaattaacaagttagggttttgctaatctatttccttaattctagggtattataattaccctcttgttatagaaattttgtcccgaaatttacctaaacaactccggatatttgtgctgcatatccgtcttgagttcccaggttgcctcttctactttactgttcctccataacactttcaccagtgcaattgtcttgtttctcaagactttctcccttctgccaagtatttgcaccggttgttcctcatatgataaatctagttccagttccaatgtttcataactcaggatatgggacaaatctaagacatacttctgaagcattgaaacatggaacacatcatgtacagctgccaacgctgggggcatagccaacttgtacgctacttgccctatcctctcaaggat

SEQ ID NO: 289609 - DNA, 605 bp, Cannabis indica
agagagttttgttagtatccaaagagagaaaaaaatagagagaaatacaaacagttgtaaatcaaaagtgtaacctttgtttgatgattagtggaatcaagctgagggcttgacggagaagtagccggttgttttgggcgaactccgagatcaaatttggtatctccatatttaccatttctgtttgtatttctcaccttaatctctatattgtttatatttgtatttgtgtgtgtttggtgttcttggtatttttcggatttggtatagtgagtttcggccaagagattgtgagtgttttttctagggacaagtcacatgatcatcactagtatcatatatcaaatcacaaaattaacatatatatatcataaaattatataatgagagaaattaattaataaaataaacttacatattgagttgttgcatgaaatttgagatgccaagttgatgaggattgttattattaggagaagtactagagtctttaaatgtgtgttgcatagtatcaccaacaggctcctcatcataaaaaatagttcctttaagaataatggtacatattaaatcatcttctggtattggcaataattggaagttta

SEQ ID NO: 289610 - DNA, 575 bp, Cannabis indica
attgatgaataaaagaaaaagaaattttccaacaaaaaaacggaaaaatagataaaaagaaaaaaaaaaaaagaaacacactagtttaatatatcgagtgagaataaaaattagaataacaataatattagtgtggaaactgtcaagatttacatgagagttaaacttaaaaaaaaataataattcaaattaatacttaataattttttaaattattatattattttatttttaaataatatataattaatattattatagtatgtataaagttttaattgtatacaagcagtcctattgtaagagtataaaccttatatcttaataaccacacgatctaaaatcaatggttaaaaaaagttccctaccggtagggaacttttgttaggtcctaccatagtcttgcctatatgtatatatatatatatatttatatatatatatatatatttatatcagtataggtacatcgcagagtcacataattctcgttaaaatttataggttaattataaagactacagtgtgataaaattctttttagagataaagttttattgcctttcatattgtta

SEQ ID NO: 289611 - DNA, 423 bp, Cannabis indica
aaagttcatgtaatcaaatgaattaattggtacaaattagtaaggggagtcaaaattgatatgaggtattttattaatcatcaaaaatgaaagttctcatgttatattattcacaatattataatggttttttattttgttatttttttagataattaatcatatatattataatgtattgttgttgcaataattatcaaaaagttgaagtgatatatctttgaattgatccaattatgaaattttgtgtatatgtaaagtttatggcaatttggttcatgactagaaaacttttatgtgatataattaattttaaatttcaggatagtatggaatgcttcactttctaattatatatttgtccaaaatgtgttatttgaattttttgtatgtgatatctgctctaaatctcatgatcatgac

SEQ ID NO: 289612 - DNA, 1149 bp, Cannabis indica
ttcatgttcaacgaccgtggaaactcgaaggattggccaaggatgtcacggcggtaataggttgagttttggattggaccagaatgttttagaggtttgagttgtcaaaatttttggggtagatgaatttgaaaaaaaatacccctaagttgaaaaggtttcataagtgttgtattagggttacaatagtaattttagtaagatttatctttttgttttatttattttctagaaaactctaggctgaactaatgattaacttaagtaatttgcttcttttcttttcattttaagattattaagtagataaatcaaacaatagaattattacacaaaaaactcaatatctactcattctctctcttcatttcggcttaagaaaaatcaagagaaaaaatagagttttcatccccaaatctaatcatttccttgctgttgatccactctaggagctaatcaaacttgaggtaagcttttcttggtgttcttgaagattttagggttttaaagagggtttttgataaatttggttgtttgtatgcttattttgtaaaagcttatttttagatgtaaattaaggttatttaagctttaatttcatgattttagggttgttatattttgagttgggtgagttgagtttaagagctcagaaactcactcaataatggtgattttgtaattttaagtaaatggtttgttttaaatattgggatatggtatttatatattgataaactgttctcgaatgtttcattagatttagaagagttttggaggggttagaagtgaaaaatccaagtttgggatattctgtaagaaaaacggcttaccccaaactgttaaaaacaagtaaaaatttatgttagtttatatatatatgtatattatatatttgttattataatgaatactataatcaataattaaaacttacaactttttgatcttgtatgtaacggttggggtttgcacatgcgacgatgtcagtcatatatttcaaaacataaaaaccacattcttggcttttaggttgtcgtggacaagttgctagtgaaattccttgccacgggccaagatactcatgtgtgtcccctatatatctgaatgcactgtttgaaaaaattatattagcatttcaattcatta

SEQ ID NO: 289613 - DNA, 550 bp, Cannabis indica
ttttaaaagaaattagaaaattagaaaaataagtatttgaaaaaagaagaaggttaagcatgccacataaactccttaaaaccttcctttatatatatatatattgataataaaaggatttataatttatctaacaaactaataacaattaataagtattttattagttgttaatttcaaaaactattcaccttctcacgttatcataataaatgatatgtttagtacattctaattaacaaaaataataatttatagatcaacttttctatggaacccaatgttccaatcttaatacaatgaatctatattacatatattttatataatatgaaaacaatttaatgtaatatatatcaataactattaatataattacactttattatagaaacttcaaaacgcgtcaggtttaaaaacatatagtaactattatgaattttaatatattaattattaattattatttaatatatataattatactttattcttaaaaggtcagaaaaaattaaaatagtagatctatatatagatagtaggttgaatg

SEQ ID NO: 289614 - DNA, 612 bp, Cannabis indica
agatatataaaataacaaaacatctcaacctagtcttaaatttatttcatagactagaattatattgcaacattatattgacagttcccaagcaatgaacacaatttttaatatttactctatctaaaacccaattaaatcattatttagtcacaaataattataataaatacctaaagaaactaataaattataaaaacccttttaattcgtaccataggtagtaaatagcattacaaaaatatattttactgttttagcatcacttaactatttttcataattattttaagtattaactaaataaattcatgaaaaatacaaaaatgattgaaaacccaatctaaccattctaacacagtttatactctagactaagccctaaataattaacttttaattttctgaataaactagctatttttcataattaactttagaaataacacaaataattcatgaaaaatacaaaatcgaccgaaaacctaatctatcaattttgtaaaagtttataatccataaacaatcatagaaaataaacttagatttttctgagcaagctaagtatttttcataattaatttaataaataaaataataaattcatgaaaa

SEQ ID NO: 289615 - DNA, 645 bp, Cannabis indica
  modified_base (575)..(575): a, c, t, g, unknown or other
tttttttttagtttgtttagcctttacactttataattgttgagatttatgaatgatttagtttgtatgaatgactttgtttgtaagcatgactttgtttgtaagcatgactttgtttgtatgacattgtttgtatgaatgacttgttagttatttactttagctatctccttttatttacaatcttattattattttttattatatattttgtctccaaatgtctccaggataatgtctacaaatggtgcaccattcaacaaaaataatctacttcttgacgattcagacgatgagtttggaatggaagtgttgcatggtcacgagagtaggtgttatgatttattcagaatggataacgacgtcttcaaactatttgtggtgttctaaaggaaaaaaatctactgaagaactctcgctgtctttctgttgaggagcaagttgctatgtttttatatgtcattggacataatgaatgacatcgtgtagttgctgaacgatttcaacactccacctcaattacatatgaatactttaggaaagtattaaaggcgggtatgtcatttatctaaagngttaatactccacctttgtttgatgtagttccttcagaaattcgattcaatccaaaatattatccatttt

SEQ ID NO: 289616 - DNA, 586 bp, Cannabis indica
cttaaggatggtttttacggcttctgggcccacccttcgaatgatggcgtggtcccttataaccagcaaaaacacgtcaaggagtatcgccatcgctttttcttctcctctgggttccgagctggggagcacccggagctccttacggagtgggttaggatccctccgtacgagcggaccgcgcctactcagatctttcttcagcgggcccagatcttcgcgacttatgataaggcagatctcgacgtcaggggatcggtcacgacagagaactaccggaaggccaagctgatcttggcgcaccagtcggtggaggactccaacctttctaagtcatctgtccgaacgtgagggttccggccgcggagaagaccttccgggatgagattattgccaccgcgggaagaagtaccaagattacctctaccggaaggcccaggaaaaggcttatactaaggcccaggcggcttccgggaggccctttcgcgttgggagcccggttgagagaagaagccagacggctgcagggagatcttttcgcattgggagtccggttgagagagggctcccaggccaaggcctatcg

SEQ ID NO: 289617 - DNA, 702 bp, Cannabis indica
gacccgaacttggacctagacccgaaccaagaccctgatcggggtccagacctggacacaaacctggaaacagactcggacccgaactcaaacccactcctagaatcagacccaaagctagacccggacccagacccaaactcgaaccaagaccaggatcagagccaaggacttcgaccaagaactgaatctagactcatatcggggtaggaacttgggactcggacccaacctagacaaggaccaaggacacgaacccacacccggagcctcatctggacctagattgaaatccagacacgaacccacaattcagaccaggactcgaactccgacccgaactcaagcccaaactcgaagttagaatcgcaaatggaactacaacggaactaggactacgactacgactaggacctaaatcgaaacccgaacccagatcaaaacccaaacagcgacttgaacccgaactgagattaggactcaaacccgaacctagatcaggacccaaacccacacaataaccgagacctgaacctagaatcaagatagggacctgggaaacaaaactaggaccgggacctaattcgggtccatggcttggacaaaactcgtagtaagtgtttaggtatgggacccagccctggacccgaaccctgacaaggactcgaacctacacccagacctgaaccagtcccaacccta

SEQ ID NO: 289618 - DNA, 591 bp, Cannabis indica
agttaatggtgagataaatttgtaattaaaataggaaaagatgaaattacaattactacgggattttaaaatttttatgttaaatatgacatttttaagtttgaccaatttatatgatatttttttgtttttaggtcttattatagtatttgatatgccatatatatgtaaatgaagaaattacactctataccctttttatattgtcctcttttatttttacttcttttttaaagtctatcatttttacttctttttttaaacattgtactaattttgcccctgtcacttcaagatactctccatatgactctcttatgtcagggtattttgggtacaatacatataaaaagaggtatgtttcaattaaatataaaattagaggtaaatttgattaattgattaataaaagtggtacttttcaacatacccctatgtaaattaggttttcaaattccatatttaatgtttttatatgtttaggtagttttatttgtcactgatgctgaaaaaatcgtcggtgcttgttgtcagtgtcggaaaaatcactggagtaactgtcggtgctagaaaaagtcgtcggagttgctg

SEQ ID NO: 289619 - DNA, 554 bp, Cannabis indica
ctataaatgatctacactgagtattaatttactgttacaccattcaatgtattttatccttaaaatacttaggtacttataaatgataacccagtgaaccaatataatcactaaaatgagtactcaactatttatctttgttaaaccaagctcaaaggaaatcatcgtttgacttttatatccagatagaagctatagattccgtatctgtgaacgctcccactcaattgaactaccatgtccttaacctatatgtcatgagaagaaccatttggtcgactttaatgaacagatttaagaacacaaataatgcaactgaactagaacctaattatctcaggattaagatcacttgatctaagatcaactaggtgatattgaattaaatagatattacggtaagtttatcatatctgattcaagttcaatatcggtcccttccgatgcatactccatacatccaacccaagcttactttaaccaatgccctagaaagacataacacttatcaaggtacaagtaaacttcattgtagattatcctatcagttaaac

SEQ ID NO: 289620 - DNA, 83 bp, Cannabis indica
cgctaacataaacatgaaatctatagcttctatctggcgaatagtaagcaaatgatgatcttataattcacaagttagactat

SEQ ID NO: 289621 - DNA, 543 bp, Cannabis indica
ctgctgtagttctaggttgttttctgtgattttatatgcttgaactaattggatttgagtaggtttgatgcatgctagatggtttaaccaatttggatctttttaactcaaaaattatagttttcaaagagaaaatgtgaaattggttgttgtgtttgttgcatgagtttgagaatgatttctgcagttttattatgcatgattatgtagtttaaatctagttttgaggcttgtaggtgagctttagccaagtttgagttttgaactcaaagcttggagctcacatggtgatttttgattctgtgctttctgggttgtgttgatgctttagaaatgtttagaggggtatttagaacaggtctggaagttttggtgtggtttgggtttgatttgaatgagttgtggaattttgattgcttcctgcgaggaaccggaattccggacgtgcaaccgaaattccagatggggttcaggaattcccagaactggaattccagttgggaaatttttaggaaccctaatttttctcgtttttatgttatt

SEQ ID NO: 289622 - DNA, 57 bp, Cannabis indica
atagagggtcattgattattgggattataacaatggataactgatagcgtatctata

SEQ ID NO: 289623 - DNA, 675 bp, Cannabis indica
agtttttcggttgtctagcattgtaatctgttggatacttttctatataaataagatgtttctggccaactgtattcagttgagctttcccatttcacttcatcttcttcctccattgtttctccattttttgctcaatcttgagtactgagtttcagtactcttacatggtatcagagccatgtcgaaccatggcattcgagttgaacctccagcaggtgaaagagttgagccacaccaagctcgagctgcagatccagcccctgaagctcaaaatccaattcccttccctaacaatcatctcctccccctaaacatccgtcttgatcgttcgaactacactatatggcgatctctggttcttgctgcggtcagagcttacgatcttgatggctatgttcttggtcatcatcctcaaccaccagaatttcttgcaggtaacattctcaatcttgcatttcaaaattggatgcgttttgaccatttcttgatgcattggctcatgaattctgtcactgaacatatgcttggtcatgttatcaactgtaacacatcccatgagatctggaccacctttccttagctttttgcaaccagatctcgtgcaaggctactgcaattacgaaatctactacaaacaaccaagaaaggctctctctcgatcgaagaattcat

SEQ ID NO: 289624 - DNA, 491 bp, Cannabis indica
agttcggtaatagcctaatccttgttatttgtattgacttaagaacaaggaaaatggttccttttcatagagctcttacaacaatatctctgaatatgaattcttagacaaaatctctcgacccttttcccagtgagtatgagtcactatttatagggctataagcttggagaggaagtatttcccttctagttacaattgacataagcagaaagattgcataataaatacagaatacactaatcgtgggatttggacagcttgtcatatctctataatctgatcccaaagttataggaatttctttgatgactcacgatgcgaaagctgaattttctaaatgttagcgttatgcgcggaatgctcactgctcggtctagaggactttgtccgaggaaatgtgtgagatgccttgttcggcctatgtcttgcgagcaggtacccagagtcgattccacatgtcaccattgtgtgataccacgtcagagtgc

SEQ ID NO: 289625 - DNA, 703 bp, Cannabis indica
aattttgggtctcaggtctaggtctggattcgggtttagatcttcgtctgggtcatggtcctagtctgagtgcacgatctagacaccgactactggtctgctccaagcactgctacctgaatcccgagtcaagatctggatcactgtcacgggtctcggtctggttcttgttcaggtcccaggtcccatttctgagtttgggttcgggatcgagattggggtgcggttctaggtcccgaccctagttctgtgttctaattcgggttcaatgtttgggtctgagttcaagtttgggttcgggtcccgagtccaggtttcggttgggatccgagtccggctcccaattcgggtctagctcttatttggagtccggttcctggtccggttacggttctcgatcaatgtccaatttcagttatgattccaagtccaagtcctagttccagtcccggtcaacttccaattttggttccaattttgggtcatagggtacgagttcgggacaacttttgggtttgggacttggtttaggtctgggtgtgggttttggtccttgttagggttcgggtcccaaatccagacaccggctacgtgttttgtccaagcccttggtctagatctggatcccaatcttgggtcccaatttggttccatttctggtgccgggtcacgagctaggtcctaggttcaagttcgggtctgg

SEQ ID NO: 289626 - DNA, 703 bp, Cannabis indica
tcaagaactcaagaacaaaataaagtaaaatgcaaggtgaccgcccgcacaagactcagaagtccatattcacctgacatcgatcttatctcagacatgacggcttttccttttccgaacacgggaggagatggccgaacaggtgaaatgggctcccttatgcgaattgcatgttcaacaggcctggatgaggtcgggagtttcttcttcctctttagtggtgtaacctgctcttccttgggctcatcttcaggattaaaggctcctgagcatactatttggccctggcacctcctttcaacttagcctcgcgcttaagttgaataagctcatcctccttatgagctcgttcaagccggctaccaccagatttcctcttcttctccgtcacggacttaggagtaaagtcctcgggataaagcccgtacctcacaagattatcatcggaggtcaactagatagtatggcgatcttcccccggcaaccgggtaggtttttgagctctatccctaagagaaaaagtgaggggaggatagtgatatgtcgaaatctgctaaaaccgagtccgggtaatgctcggatccttcaccatgaagtactcatcaggaacacgccctattttgctgatggccttgtcatcagtgccagtcaaccacttgaagcctggctgagagaaatagaagtaccccaacctgccttgttt

SEQ ID NO: 289627 - DNA, 392 bp, Cannabis indica
aatcgagcttccaataagcagacctagaatttaccaagtaagtccactaacttattaattcctcattgcatccactcatagaactcggaattgcactctcagtcatatagaacgctccatatgttccacgatatagatacgctattaattatctattgttattgttatcccaaaattggcactctgatgtggcatcacaagaacggtgacacgtagcatctacttaaagcacttggtcagatcaacataccgagcaggatgcctcgctggcatgtccataatggaatactcaatgagccgtgcagaatgagcaacacttgcgaattcaaccaagcgcatcgtgagtcaccagcgtaatccctataattcagggatcaacttgcatggatgtg

SEQ ID NO: 289628 - DNA, 861 bp, Cannabis indica
gcaaaaattactaattggacattctgttttgttaaataataaaatgaattctgtattttttaaaattgtacaaataggacctaaactcaatttttaacaattttattatataatatttatattaaagcttctctgatatttatatatatttatttttttagtgtagcgtaatagtatttgagaaccatatattagtttaatagtttaaaagtccattaaactagccttagtgattttatatatatttatttcatatttattatccattaaaaatatcataaaacatgctataatatttatattatagcttctctaatagatattacattacggtttacaccacatcacatttatcaattaaataatgaatttaattctacatcattggagccatcacatactaaaccctaaggaatgaacttttatcattgaaaaaattatggaacataattttttttaggaaaattctacaatgcaccccttaaaatagatatattgatacacccttatttgttttagcacctgaaataattttttaatcaaattttttctcatggtcatgtacgttatagttatttaagatatcctgcaaaattttaagaaattcaaaaaagtttaacacgccgaaaactacattcaaatagtgtgttgcacacatgactattttattttatacgcgtgtaaaatagactgtttgaacattattttttatatttataaattattctgaatttctcaaaaatttgtaggttatcttaaatagcttataacgtacatgaatatgaaaaataattagactaaattttttctggatgccgaaaagggtcaaggatacatcagtacattccttttaagggggtg

SEQ ID NO: 289629 - DNA, 621 bp, Cannabis indica
atataattgagagtgctctaaatctatagtggtgcaataagaaatttacaagttagggaatttacttgataaagtctagatctgcttattggaagctcggttatataggtccatggtccccatactagttgagacaatactgcttgtaagactcagttaattgattttaattaatcaattataattctaaaattagactatgtcttatttatgaattttcactaagctagggcttaattgtgaagaaaagagatttaagggtttatttgttaattaagagactttattaagtctaattaataaataatttaaatggtacgacgacacgaaaattttgctactatttgtattttatcatttttttatgttacgggtcatgttcgtgtctaccatctaaaataaatttcaaaattcaacataacacgaacatgacatgatgacattaaaatcaacaatttagtttacaacccgccaacacaatatgtgattttgtgggtttgacacgacatgaacttattcgagtcgtgttcgtgtctgtgttttttaatttcttcgtgtcacgtgtcgtgttcgtgtcagcaacttattgtaaatttagacctcaacacaacacgaacacga

SEQ ID NO: 289630 - DNA, 695 bp, Cannabis indica
cttgtaaacatgatgttcgcagatcttattgggaacaccatggaagtatatgttgatgatatgctcgtaaaatctcaacatgcgaaggatcatattgcccatttacgggcaatgttcgatatattgcgtcgatataagatgcggctaaaccctctgaagtgcgtctttggagttggttccgggaaattccttagattcatggtaaaccagcgaggaatagaagccaaccccgcgaagatcagggcgttggtggaaatgccatcaccaactaagccaaaagaggtccaaagcctcacaggtaaggtcgctgccttaaattgctttatatcgcgatcttctgataagtgcaaagagttttttcagattttaaaaggcaataagaagttccaatggaccgaaaaatgcgaggaggcctttcaagccttaaaaacgcatttggggcaacctccaatcttatcaaagcccatgaccggcgaagtcctatccatctacttagcagtgtcagaatacgcgattagttcggtactaatacgcagagatcaaggacgacaatacccggtgtattatgtcagtaaacgattactggatgctgagacccgctatccccaaatggaaaagttggcgttcgccttggtaatatcgttgagaaaattgcgaccttatttccaggctcacagtatcgaggtcttgacaaa

SEQ ID NO: 289631 - DNA, 812 bp, Cannabis indica
gtagtctattgaaaatataaaatcagaagatataatgttgaacttattagctttctagtttttttgaggaaataaaatctttggacattttgttattaactcgtaggagaaatgaaagtttgaagatgacgcccgtccctaaagatgagggaagagtagaggatgggttgattaagagcaacaatgattgtgttttaggcaataataatgtgtaattaatttatcatgtcaataaattttatttttctctatttgttatttgttatgtgataaaagtttgattttaaaaaaaatgaaagttatttgatttatttgggagatgtgaagctagaattgacaagatgatataccataaaaaatttgttcatgataaggtggaagttgctttatttttgcaatacctagttttaaataccatattttaattttttataaacctttagtaatcagattgaatttatacaaagatatgatatttttgtcaatgtctttgtaatttttatttttatgatgtttttattggcttgtacttttttttttctatcctcatcccttctctagttgcatattgttagaaaaattgaaaaaaaatcattctaaatcattctaaattcttccttttttaataacagtatcatatatttaatttagtaactttttttttttgagaacaagtaacttttcttatattgataaaaggaattaattaaatattagtattaaatatgagagtgacacataatgaaaaaaaaaaaaaaaaaaccagtatgtacattgtacagacgttttttctgactctacctaagcattat

SEQ ID NO: 289632 - DNA, 609 bp, Cannabis indica
atgactatgactgaatatgctaccaagtttgacaggctggccaagtttgcttatgatgaagtggtcagtgatgctgcaagaaaagctaagttcatcagaggtcttgaagagtatattgctagagatgtgattatggcagccaaacaatcaggggtcgtgaagacttatcctcagattgtggacttagctctcactactgagggggctaaaagcatgattcgtaaaaagagtactcagaggaaggacgtgtggaaaacctcatctagtactggagtgagtaaaagctttagccccaatgaccgaaaaaggaaaccagatggaccacttgggtccaaacagaaagtttcaaggtaactagggctttcgtaatgaggtttcgcagcattaccctgaatgcccaaaattcaagagacaccacttgggtgaatgccggtctagagtttgctaccaatgtggagtagcaggccatttccagaacaactgcccgcagctacaaaagccctcggtaagaaagaaagtcctatggttcctgctagggtgtttgtttgacccaagcagatgcaagctggcccttcgactgttacacgtaagatatctattggtggtatt

SEQ ID NO: 289633 - DNA, 539 bp, Cannabis indica
ccatcttcgaatccctctagccaaacaagtggatttgttacctcctcctattcctatctctctcctctcctctcctcttcatccaccgaagtcttcctcctaccaaacatattatacttggttcacgcaaatattatttgcaaacatgcaaagatgtttacaaaataaaaaatctgtaataattatttaaaatttgtaaatatttttaaaattcatactatgattgttattttttttcacatgcattattttaaaaaaattctgctttttctaaattttcattgttttttatgttgattttataaagttcttttttggcaagttagttgacaaaatattttttcctttatggtaagattgttttgcattcatacccgatttcttaccttgtatattcggtttttagttgctcttttctttgttaggaaagatgcacttttcagctggactttcctttgtttggaaacttcttgtaagagaagcaattctcttatggaaagttgcttttttaaggaaactttgattattgccttttcctt

SEQ ID NO: 289634 - DNA, 659 bp, Cannabis indica
tatcccaattcttgcactctgacgtgggatcacatgaatggggacacgtggaatccacttcgagcatctgctcgggaagcatagtccgagcatgatgtctcgctagcttacccagagtgatgtttacagcaatctgcaaaaagcaaccaacacttagcgaattcagctttcgcatcgtgagtcatcaacgcaatccctataacttagggatcagactacatggatacggaatacacacgatcccactattagtgtattcatcatcaatcccatgatctttgtactcagcattgatcccacgatctttctgtttatacacattgtaacgagaggggaaactcttcctctccaagcttactagccttataaatatagatgcatgttcactgggcaaagggtcgcaaacagattagttgagagtgtaccctaaagatattatctaagaattatatattgagagatactgttgtaagagctataagaaaaggaatctttctccttgttcttaagtcaatacaagtaacgaggattaggctattaccgaactgctcgaagctgaacctctataaaattttcgtgtctttatattactttattatatatcaattgctataaatcacttatctcttattaaattagagtcattgtcgttggctaaa

SEQ ID NO: 289635 - DNA, 495 bp, Cannabis indica
gctccgcccgacgagctgacgcagatgcaaagtctgtggcccttttgccatctggggaattgaactaatttggcaattacctaaaggtaaaggcggagtgctgtacgcggcggtagcagtcgactactttacaaagtggactgaagtcgaaccactcgcaactatcacatcatagaaggttcaagactttatagtgaagaacatcatatgccggttcggactaccgtacaaaatagtctcggacaacggcaagcagttcgacagtcaatctttcattgatttctgcgcaaaccatggcatcatcaaaagtgtaacgcccgcattttataatgataaactcggaaattaattttaataatttatatattaataaccatatagattgggatcccaggtatcaaaattcaggttaaaagtactttactattacatatatattttttttttaaactttgcggacttgcattttcaaattcggattcaaaatagtaaaag

SEQ ID NO: 289636 - DNA, 769 bp, Cannabis indica
gatgaggcgagacaggagctccggatagctaaacacaactacgccatggatgaatactcccgggggtatgctgaagtggaggctctgaagaggattttacgagttgagatgcaaaatactctcaacaacccggaataccagaatccgtgggatttaaatttggatcccttgtcggattggtttggtcgtttcctcgggcccacactagctccctttgccgcggagatgaccggcgagtttgcgtcccagcttacccggtgtgcacccaggcggttcgctgcttgtgcatccttgaactccatcttccaagtccaggatctcagccactccctcactgtggtaagtattttgtaatttacttttttcattattttttcttggagattcttacttatacttgtatcctttcccagcttgctgctgaggccggccgcctttccaagaacataattaatcatggcttcgtcctgtccgattttggggacatggacgaagttaagaagatccttcaggacctgactgctgaaaggcggctttatcaggaggatgctgagcgccgggaggcccttgccaaggccagtgaggaagaggccaagcggagggaagcgcaagcggaggcaatgatccgggaggagacccttcggagagataggctggaggccaggcaccaagaggagctgagggcggagggcgaagccactgctaaagccaggcgagagcttcaggaggccagggaagccttggatgaaatggttgccaaggtgaagtc

SEQ ID NO: 289637 - DNA, 558 bp, Cannabis indica
tttgctaatcaaagaattttctcaaaaaacgtgtcaaattaaaactttttatattaattaataaactttataatataataaaatatttacaagtgtcgggatcccgttttcaaaatttttaaagttaacattccaaaatacatatattacaggtcgcacagcgactatcaaaatataatccccagatgtcccgagaccgaacactctaggtcgcgctgctttgacatgtacaatctcatccgaacactcatgtacaagcagaactgtgagtcgacagactcagtaagaaatgcacataacataccatataatttttgacctgtaattaggcgcccatacacctatttacaagacttaacagatgagcatgaacgttcaacactagggtacagccactataccacatacactacatacctcactctacgagtgttcgtagggtttgtttcgtaccctgagtaccactgagtgatataccacacacctcagcactttcccgtacttgtgttgataccactgtactgtactcacaaataacactcactataccaatgcact

SEQ ID NO: 289638 - DNA, 640 bp, Cannabis indica
ctctttctttttgttcttcttcttctcctcttctcctcacccaagtcactccttcttcttgctaataagactaaaaagaccatgaatgctcacaagtgaaccattcttcttcttctcttcctcttcttatcctttttcttcttcttgctggtaagaccaaaaagaccactcattattcatgaatggtggcaagtggtggcagccatagacaaaagaatttgaaattcattctaacaaaggtaaaccctaataatttccttgtctcttctcattttgtttcttttctttaattttttttttcagttgtagccattaatatttttcttctctcaatctcttattgcaataactaatcattcagaattataatggaatcaacaagtgatgcatcaaccacaatacccacaccacccaatgaacatgaacaggtaacatatatattttattacagtcttttgggttataattttgatttttgtaatttatggataaaagaccttgaatttgctctgaataaccataaacgaccttaaatttacactatgcgaccatcatggtcttttatgttctttaactaactttaaagaacttgaattttctctgaacgaccataaacaaccttaaatttacattatgcgac

SEQ ID NO: 289639 - DNA, 525 bp, Cannabis indica
tcttctaaagagtgtagatgtacacccttcttcctgaactttttgaaaagagggattcactgattcctgcatggcacgagctctcgatcgagttacagggcccgtgtaggaggtaagcttagcagttgaggtgacccttgttggtcggtagccctggagaaacatccagtcaccatgttctcttcggaatgagttagggcttgctttgggaacccttacactatcgcttctagccttctttgggaaggagaaaggcgtcctacacccttcatctaataaagggcgttcattgatctcagcaggtaccccctgttgaccttggcggttgacagagattacgatcggaggcctaatcggggtgcctcctactaattccctcatttcaagagggtttggtgaaggtgaagtgtttgtccccctcctcccttttgttgccttcctacctctccgaggttgagaagtcggtgttgcctcagtttcctccgcagagggaaccatcactgagacgacagtgggcaagaaaat

SEQ ID NO: 289640 - DNA, 557 bp, Cannabis indica
ttccaagattttcaacaaactgatacagtgtcccgtttaagagagagtcaaagatatcattcattgaatagattagtcaactcaagtaaaatagataccattttagcaaccttttattcgatcaagactaaaatacagcgttgtcccgtttaggcgagagtcaaggccattctatcttataagcttccaccactgtttcataccttgtaagtcttactcttagcagccactattggggtggaccttactaaaaataaaacacttacaaataatacttatcttttgagattctacggtgttaacttgctaatgaacgtttatacattagggatgattactcactaaaataagaactgtgtagaaccaacaatagagatcgaatatccttataactaaagctcattattttaaagagttgtatttttatttgatatttattttaatctatttattttaacatataattatttaattaaaattactaatttagataactctaatataaattttgatttcatatttataaaattatatcctaggaagatctgaaaaataaa

SEQ ID NO: 289641 - DNA, 508 bp, Cannabis indica
aactcaaaaatcctcttaaacaagcatattataacctctgaaaacaattaaaaacattaacaacaacacagcaacagattcacaacatttccttcaaaaatcacatttttgagctagaaattccaaacttgaaacaaagtaatttacatgcatttctaacaacttaattaacttcaaattaacatgcttacatctcagaaattaacaaccaattcacagcagcaacaatatccaacaatcatgcatgcatcaactattttcatcatatttttccaagaaaataaaggaagaaaattaggaaacacataccacaatcaagagttcacaaatttatgttgaatctagcttgaaaattgatgaaaatcccagccctagaatcccatgcaaccagccgaaaagagagagggaaaagagagagtgtttctttgaaatttttctctaatttttttttttctaagtgttgattttgtaaaaagaataaaagccacctagcatataactcatttca

SEQ ID NO: 289642 - DNA, 667 bp, Cannabis indica
taacaggtaaattttgtaattttttttcatctgtgataaacctagttacacgatagggcccatcaaaatcatttgtcctgtgtgagcctatatgtttcctattaggcttagattcgtatcggaagcccatttaattatgaatatttcaatagactaggttgctaaaatataatatcaccttggtagttttatttaggcccaattagcattaagcttattcaattaataataattatttaactaaagattaaattcctctcttttgagccttgtgtgagagttaggggaccatagtagtgggtatgatatactgaacccaaccctccctcacatgaatcatcccaattgtgaaagcacatttaccttatgaaataattgtattaggataattatattagtttaacctaatttaaattgattagcaacataattaatttacaaataaattaattaaatttttattagattattttaaaattaatttagaaaaatacatttagtttaatgaaatatattctagatagttatttctagtaactaattatatttctaatatttaattaagtagaaaaatatatttaagttgaaaattaattttaaatcaacttaaattagaataattttgttagatattaaattagaattaataattaagttgattttattc

SEQ ID NO: 289643 - DNA, 584 bp, Cannabis indica
caagagaagaaattctctatttgaaaagttacctattttttgaaaaattgactttcgcttttttaattaatgatttcagttttgccttaattagaataggtcaaataaacttgtttggttggtttgaagttaaattcgtgatcttggttcaatttagaaagtttgctttctagtcctgatctgctactgcagagcccgattttgatgctacaatttaggaaattttttttaaaaaattttatacagctggaaaatcatttttgtggctctctcgagggttgctatgttctataaataagacctagagagtagccaaacgattttatctcttctagtctcataattttatatctttttttgtgagaagagagtttcatttgtaaaaatctagagtattcaactaggttttagttttcttattatgatctcatactactattcatagaataggttgaagagaagctttgaacaagtgtgagtctttgggagaagacttttccaaatctcatttcatgaggaagtgagcatatatctttggaagaagatttgtttaagccttacttcgggaggaagtaagcacacat

SEQ ID NO: 289644 - DNA, 595 bp, Cannabis indica
ttggtgattggtgatttgagaggataataatagtaattgatattaaatttcataaattatatgttattaatttaaaaagattttactgaatattatatattaatagtatatttgcatacaaagtagagtatatagtatatacatacaagcagatatcttatatattgttttcactttttcagtttctcttacagtctaaactaaaattcctctcgcatagattgaggttgtggtgtgtgtgatactgatagtggctctgaaatggaaggaaatatgatgttagtagtactctattttacttttaggtaaatttttttttttgaataatattctgaaactgattttttttattattattattaagatagaatgtacataaatttataatatacatacacgattcacatgaatataaagatagattataatagtaagaacaaaaatattattttgtattttattcctaataagatgtatggaatgtatataagtatatgttgtaactgttttacttgtaaagacttttgtcatgtttatatttgtgtagtcttacatatgttatttatgtttatatctacatgtaaagttgtaattc

SEQ ID NO: 289645 - DNA, 502 bp, Cannabis indica
tcccagaaaactaatggtcagccacccaatccccggttacgagttcagcttgtgggccaagaggtagacgggcataccttgtctggtaattcatcaagaggagccatacttgacggttccaaccagaataatggtgttattccacctgtcaaccaagcgaatcaatcgctaaggaaaccaagttcctttgtgttcgacaggttgggaacaacccatgacctaaggaacgatctaaacagaagaaggggaacagacgagcagaatgttaaacgatcgtgcagcttggagcccatactcaaatccccgctcagaaagacgttgacgtattccaagtcgaccagaatgtcgagcaggtcagcccagccatacaggccaagcttgacgagttgaaaaatatgtttcatggcatggccagacagcgtaacaatcttgagttagaccgtgctcgcagaactcccttctcaccagagatcaatctcctgccactgcctcacaagttcaa

SEQ ID NO: 289646 - DNA, 578 bp, Cannabis indica
aaggtttgacgggtaaccgaggatggaaagttatcgtggtactgggaggcattgaagtccttggtgaactatggaaggatataacggagaacgggccggtagactcaatgagtgatttccttgaccgagccgaaggcttcatcaagctcgaagaagccattcaacgagcagaaggtgaacaaaagctgggaaaaacgaaggctccttccactggaacatccacccaacttccccattattccaacaattcaagtggcaagcgttcaagcaacaaccacaagcaaggaaacaagaagaaaggaaagttcaccgacaaatccagacagactccccgtgatcatgccaaacacactgcattcactattctaactgaagatatagagagtgtgtatatggcaactcagtcgttaattccgtacagaaagcccgggcccatgaagaaagataccaacaaaagggacatgacaaaattttgtcgattccaccggagactacggccacgaccccaacgaatgttataatctgaagcgggaaattgaatttctgatcaagaaaaacaacccgcacctgcagaagta

SEQ ID NO: 289647 - DNA, 782 bp, Cannabis indica
cgggttttttccgaacttaaaggttctcatcggcggcgtcgtcctcaattttctccggcgataatttctctgaatcgaatcggagcttttctcagtgatttccttcatcgaatgaattgtttctttctttcttcaaatttttccctcctatttataggagtcgaagttgatcacagaacaatatcaaaatgatctgagccgttgatttcttagaaggtccgttaagatgggtcctgtagtcatattggaaaagttgaaagtattcggatgacgtggacagttgggattggggaaatggacacgtggcgtgaagattgagggttgaagttattagttttggcgggaactgtgacatggcaaaggtgggtgagaatcttagtgtgacatgtgggttatttatataatacaacgtggcggctcttattaccgcggtgctagccttgcacttgcttgcctcttcgttttatttttgctttattacaaatttaattaaaattgttttaattactttgtttatatactattttatttttacatattttgtttaaattccaacttatatttttagtgatttttttattaccaaattatactcatttttcactaaaatgtataaaatacccttcaagatatttatttccaccgtttaatttttttttttgtaacttaatgacaccgttcaaaatttatgtatgattttgtaatgcttatctatacatagaatatgattgatatatatatatatatatatatatatatatatatatatgtagtaattaatt

SEQ ID NO: 289648 - DNA, 559 bp, Cannabis indica
cccattagtgttttgtcttttagtgacttgattatttgaaaataaatgttatttatttgattatttggctgaaatggttatatgctaggtgtcctttactcattttctcattttacaacaaattacacttagaaaaaagatagaaaattgcaaaactctctcaagctctctctccttttttcggcccttcttgagcagcaaggaagtgagattttccttggtgattcaagctcatcttgtgtagattttgtgatccctagttgctagtaagttttcctcaacctttcttaatgttcttgaagtttttgaggtgaaaatggtaggttgcatgttagtttgtatggctgattgttgctgtgtttaattgttgtttacagaagcttaattaggtttaaaatgaatggattatctaggttttaatgcatgcttgctaccttgtttaaagctatgatttttctaagcaaaatatatgatttttgaaagaaatggtttaatctgttgctgtgatgttgctggatgtttttatttgttttcagaggttatattatgctagtttaag

SEQ ID NO: 289649 - DNA, 885 bp, Cannabis indica
gataaataaactctgtatttttcaaaattgtataaatagaaccctaaattaatttttttgtcaaaataaaacttaataataatttgatctagagatactataataaaactggttacattttctgtatatgttcgtattagaaattatcttaaagctcgttattttaaaaaataaaattattgaaaattgagctcgagctcagagtcttatttttaccatttcgaaaaatataaagtctattttatcatttaacaaaacagaatgtccaattaataacttttgcaatatacagaatacagtatttacccattttattatagcataattcacaagatataatccgcttattcatacgacaagtctctaaattatataaattttactaaattggtttttaaattttattttttaacaaattaattcccaaattatatatattttaataaatttatccccaaattttgtattttagtaaattagtctccacttttatttaattaacaatattaaggctccactcttaatattcatatttttattattttttattcattttgcttgctttaatatattttttttgtaaatttcaaataattttatctattgttttattttttttattttaacacttttgataaagtaattatagtaatacattttatttttttatttttacttttaagtattcatataatatttaatgttttactaaaatatttaaatatactttatttatagagaaactttacaaaaatattgacttttttccctatatatcttttacaaaaatactgtcacacggcaaaaatttcttttttactatcttggtccaattttgttttttctttttatactgtaaactcaaaaaaaaaaaaaaaactagag

SEQ ID NO: 289650 - DNA, 578 bp, Cannabis indica
aggatcttctctcccagtatacatcttccacgttggcattttgaacttgtgaggcagtggcaggagattaatctctggtgagaagggagttccgcgagctcggtctaactcaagatcattattacgctgtccagccatgccatgaaacatatttttcaattcgtcaagctgggcctgtacggctgggctgacctgctcggcattctggtcgatttggattacgtcagtgtctttctgagcggggatttgagtatggactccaggctgcacgatcgttgtagtattctgttcgtctattccctttcttctgtttagatcgttccttaggtcatgggttgctcccaacctttcgaacacagaagagcctggttgccttagcgattgatttgcttggttgacaggtggaatagcgccattagtctggttggaaccgtcaggtgtgactcctcctgatgaattaccggataaggtctgctcgcctaccgcttggcccatgagcggaactcgtaaccaggattgggtggctgaccattagtagtctgagaagtattcatcgttgggtcatcttccgtttctcc

SEQ ID NO: 289651 - DNA, 607 bp, Cannabis indica
aacaagactaggactgtgaccaagacccggaccaacaacctagaacagaacacaaacctagcctcagaccaaaactaagactgaaactcgggcctagacacaatcgtgtacccagacctggacctaaatttgggacacgatcccaaacagagacttggacctagatagggatccagatatgaagctggactcagaccaagacccagactgggatcaaaatgctagacctagatttggacggagatcctgacccagacccaaacttgacccgcactcaggaccccaacttggacctggacccgaacctcgacccagatcggggttcagacctcgacacaaacccagacaccgactcggacccgaactaaaacccacacctagaatcagacctaaagctagaccacgacccggacccaaactcaaaccagaccaggatcagaaccaaggacttacacccagaactgaatccagactcagatcgggattggaatttaggactcggaccaaacctagaccaagacccaggacgcaaacccacacccggagcctgatctgatcctagactgaaattcgaacctgaactcaaactcagaccaggactcgagct

SEQ ID NO: 289652 - DNA, 1216 bp, Cannabis indica
aaaaaaatgaataagcaaaaggaaattcaaaagttattgtttcataataggaaatttaaacaaccatgtgtataccctttaaaatatatatatatatttatttacatatgtgttcatataatatatatatatatatatgtttagatcatgtataaataatgcaaaaaataaaaaaaaaaatagaataaaaaaagaaatgagtaggaacatcgtgttttcttctctttttttttaagtaaaaaaacaaaataaataaaactcataacattaatttaattatcaaaccttattattatgggattacaatttgatagctatagtgaaaaagaacatgatatatgacaatacatattaagaaattataattcaatttttgtatatatatgacaatacattatagtttttttttttgttttttttttatgagatataatacatagttatatattagacatatttcgcccattttaaaaaaaaaaaaaatttactatatcaaaaagtcagtttcacaaataattttgtatacattttcaagtagtattcatttttttaatggtgcaagtacttattttaaactttatattttatgctataaattattcataattttttttaaaaaaaatatgtgaaatgtgtgtatatctacaatataccataataataataataataataataatagatttttttttaacactttaaaacaaattttttagtatttttaaagaatttcacataaaattcttatagcaattaacattaacgaagcaacctaaattacaattaaaatttacataacaatacacataaaattaccagaataacccaaactgtaaattaaaaaaaaaacccttaaaaagtagtatataagatagtttcttctaataataattgattaaatcatgttaagcaagttggacatttcaatcacaaaacttgtcaacttcattgaaaaaaaaatggcaaaacttgtcaagtcattgttttttaccaagaaaactgtgtcacatttagttaatatatatataagtacatgaatagagaaatcttacaaacccaatcacacttatcacatggactagtcgtaaattcgcaatgtaatatatattttgtacactgataagatgaaatcaaattccaagtataaagaattatgaaaaactcaaaggggggtgtcttggatagaggtcattatcattatgacttttatttgtta

SEQ ID NO: 289653 - DNA, 578 bp, Cannabis indica
ttttagttattgtgtgttatttatttgtgttaatttattttgttatggagttggttcttttcatatttatgccttcagtattttttcaaattgatcctcacattttaaaaaaaaattataatcggttttatgaggtattatgtgttaagaggttttttttattgtagaactagttttgtttttaatttatgtttaagtgttttaggaactaatttcctctttattttttaattgtaatcggtttaaattattgtgtgttacttgtttatattcattatattttataaccggttctattgtagttataatcggttttgagttatttcgtgttattgatttttattcattataacactattatagaaccagttctattttaattataactggtttgagttattttgtgttttttgttttcattgtgttacagaaccggttatattttaattataaccggtttgagttattgtgtgtcatttatttttattcattatgttatagaaccggttctatttttattacatccgagacatttgatccccacatttttttaaaaaaaaaattataaccggttttat

SEQ ID NO: 289654 - DNA, 659 bp, Cannabis indica
atgtatgcccggagtggctcgcctagtcgctattttactttagaccaaatctccaagatgcaatgggagttggcatgaggaagagaattgtgcatggaattccgaagagaaagttttccatgaactaaactttcctggagccaacttgaaataccattcctgtgcggcctccgacagagttgcggggaagattctgcaacatacgtctcctcgcactccttgtaaatccatctgcatctcgaaatacttgagatgagagagaggatcttctctcccagtgtacatcttccacattggcatcttgaatttgtgaggtcgtggcaggaggttgatttctggcgagaaaggagttccgcgtgcgcggttctaactcaagatcattgctacgctgcccggccatgccatgaaaacatattcttcagttcgtcaaagctgggcttgtacggctgggctgacttcattggcattctggtcgggttgtgctacgtcagcgtctttctaagtggggatttgagtatggggctccggactgcacattagttgtagtattctgctcgtctgctccccttcttctgtttaggtcgtccctttagggtcacaggggtgttcccaaccttttcgaacatagaagaacctggctgccttagcgatggttcgct

SEQ ID NO: 289655 - DNA, 551 bp, Cannabis indica
gatatgacttgaaagaagattcgtgaccttgacggtcacctcaatttccccgatactttctattactccctgatacttcgaaagcctcagcctttcgtttgtaatcagggttgccactgtcggtccccttactgacgttaccactaacaggcagattcaatgtcatgacgacatcctttacggtctgctcatttattacagattattcagcctccgcaacaattaaggctagctctatcacttttttgtacaaagtgtacatatgaagtggtaaccttcaagtcccgactgattgtggcattcagtcctctcttcatccactgcttggccttaattatgtcaatacctcctagaaaagtcagaggttgcagctttacgaaccgctcaaacactgagtctcaatgcggcataacaaacccctggttacccaccattcggcacaggtgctggtggtaacacttgatcaacaggggcagccggttacattaatcgtcgcaactcttctcttgacgaactatgacacttcgcatttcttgaaacatctgctgcca

SEQ ID NO: 289656 - DNA, 194 bp, Cannabis indica
atagatacgctataaattatctattgttataatcctaatttgatcaaggatcctctaatagatgatctacataatatagggactaaattaccgttacacccttcaatgtattttatccttaaaacagttagctccgtataaatgatatttcagcgaagtgaaatgaatactcaaccatttatctctgtttagcc

SEQ ID NO: 289657 - DNA, 665 bp, Cannabis indica
ataaataaaaaaattatttataaattttaattactaaaaaatatcttgttaaatatttatttaattatttaaaaaatagttaattataattaattgattctaaaaaagaaagttttacctattagtaacctgctataataggtaggggtgttcatcaaaccgtccaaaccgcttaaaccgctcgcactgcaccacaccgcaaaaaaaatacggtttaaaattctttgcagtgcggtcgcggtttgaatttttcctaaactgggcggtgcggtttgcggttttgaattgttaatatgcggttcaaaccgcaccacaccgcacattataaaaatataaatttttatatttatttaggtccaatatgtgaacgttcaactcaaagtccactaattattgtattgttgacacttaattttttttttcatatttattttcaaaccttatggtattttgacaaattttgctcaaagtttgttgtatttgtgatagtttaattatttagtgatagtccaaacagcataaaccacaaaaactacaccgcaccacactacttttgcggtgcagtttttgtgggttttagtttcgcggttgcgggtgcagtttgggaaattggaaaaaccgcatgcgcgggttggtttgaaaaaatagtcaaaaatcgcaccacc

SEQ ID NO: 289658 - DNA, 509 bp, Cannabis indica
ctaaatatttattggttaaagtaacattaattttagaaattatgaagtgtggcctatatttttgatattatgataaattatagacattgttcttttctcttaagcaaggctttcccgtctttctttaatttttaaagttttagagcatatttcttcttaatttttagaattggaaacaagtttttttaaaacattttcaaaatataattgcttttaactcatgttgtaaatattttgcaactaatttactatttttaaaaatttttgtattttcatttaattttttcaaattaaatatataactaagtatacgtgcattgcacgtatcttctgcctagtatatatatatataaaagctaataaaaaaattaaaaaaaactaaagagaattaaagaaaagaacaaataaatattaattaaagagattttagagttttatgtcacgtctcatatctctcctttatatatatatatagatttatagatatagataagtgtataggttaaata

SEQ ID NO: 289659 - DNA, 660 bp, Cannabis indica
aagattttttttcggtgagatttttgttgtaaattataactgtgttttttttaaatgtatgtgacaggttcaactgttaatgcgtgtgttatgtataatggtgtttgggagcttgatggtagagattgggtttataaacggggcgacaatttgacatttgacattgatccgaacctaagctactcaggtttggttgatgttttgtacgaagaactggatgttgacaaagtggagtatgacttgaaattggaagtaaattacaagtacaggaaaggctatgagtatcgccctgaagttattggaaatgataagcgtgcaaggtactttttatctacacttgcgaagaagccagatgaatttactcctttgtttgtgactttgttaaagaagaatgtttgcgtcgatcctagtcccacaccaagttctgttaaggataatcgtagcgaggttgggagttttgttccagaaacaaatccagaggtgttggttgcggatgtattacctgaattaaacaatatgatgccgagtgctgatattgtagcacaaatgccgttcatcgatggtttttttaatggtccagaccctgaatgttatgttgagggcaatgatggcgtaagagacgaccaaggtacagaggcccctgctgctgtacctttgaac

SEQ ID NO: 289660 - DNA, 545 bp, Cannabis indica
cgtagattccaccgtgtacttctcagggtatataatctcattcaatcccgacgatacacttaagtaatggctgactaaatcttctgcgacagagcttgtcatcataaatgacatatcgagcagctcgatattgtagttttttggcctcagttttatcctcagaaagtgttcctattttcatgtagtcaattatcggggtcatccaggtcacctttttgaccgtatcaatcgccatcatctcatctcgattgatagttggatgagtcaatatgtctacaggaattacatcgagtaattctgcttctcttgtcaaggctactcgggccagagcatctgcatgagaattataagcacgaggtattctacaaatgactagctttttaaacttttgtaataactcacaagtataagaaagatatttggccaagcgacctcctctagccaggtactctccgttgacttgccaatccacgatctgcaagtcactaaatgcttgaaggtactcgactttcatctcaagagcgagctttaatcctgtgattaaa

SEQ ID NO: 289661 - DNA, 644 bp, Cannabis indica
cttttggcttcttttaatctttataagttctaataataaaataaaagccttactccttactacttttaatttagggattatatatatcataacttgtggccaatatatatatgtattgatttgcaacaagcacgaaatttattaaaattgctctcccaacacaggagagattccatacatactcgtgcaatcatcaacatctcacattaaaataatcaatcattgtttacctcaaaattaaaatataaaaaattcactatgaaattatatatagtggtaaatatatcgatctttgtgctcaatgttatatataaaatattagagaaattgtaaatgtaaatgtaagcttatatatcccatgatgatgatgatgatgatgatgatgacgtgcgccgactagagagagtacatatataaatttataggtatagggtttactttattttatatatgtatatgatatcccatgcccatgctcttcttcttaaatttctttcacaaaaatatacagtcttcaagttttacaggttatgtttttgtttggtccccaaaatgtctattaataatttttctaggattatatgaatatatattaaagaaagtgtgttgtgttgtgtaagtgttatgatcatgaatgcactttg

SEQ ID NO: 289662 - DNA, 735 bp, Cannabis indica
gtagccacatttactatcaagggcttcgtttgaaatccattttacaacaaaaatgaaatcaaaagcatcactgtacagaactaacaccatcatctttttttcttcaacaacatcaaaagcatcactgtacaaccctgtaactgataaaatttataacaattagaaacgataaaaaaaatactccaagcaaactctaaaaccctataccctaaatatctttcttgaaaaaaaaaacactaagaatacaacagcaaggggaagaacatatgaaaataacaacttccatggcaagtgtataaatgtacaaagagaagaacctcaagaccgaggcctttgatgtgggtatgagtggctatacgctgcttcttggtggtggactgaacttcttctattcgcactttgtctgtcattctccctctccaaaaccctatttcttcactttgcagcaccgcaccagaggatcgacgggaaagagagccgcaccggagatggaaggcttgagtggactgacggagaaggaaggctgcgatttgagaagagggaggcgcgatagaaggagagaggagagacctgagtgagattttttagggagctggggatgagattggttggctgtgcgtggagatggaatggggagtcggctgggtttgatgaggctgatttgggggcaagggtttcaaagatgaagaagatagagagagaagaagaaggaggcgtgaagaaagaaaagagaaa

SEQ ID NO: 289663 - DNA, 591 bp, Cannabis indica
tcacgggtcttgggttacgggatttgggtcgcaggtccaggcgcaagtctaggtttgggttcgggtctgggtctgggtattgatcccagcttgggtccggctcattgttcggttctgcgtctagatctggtttaggtccaggtctaattctgattccacgatccttattccagttcttattcttatttcgattctcggatcctagtttgggtttgggtccttgtttggaagtggttccaagttcggctcttggtacgattccaagatctagacgcccactagcggttgggtccaagccttgggtcgtgggtcaagatccgtatcccaatcttaggtcacggtctcgttccgattcggatcttgggtcccagtccgtgtccgggtccaggtctgggaccgagaccggggtcggggcttgggtcacagtcctagtcctgggtcccgattctggttctaatttttagtttgggaccccaatctaggtctgggtcttgagttaaggtccgagtctctaatcccgagccaggtccagggtccgggtcttggtccaagtccatgtttgggtttgggctcgtgtcccgagtcccgatt

SEQ ID NO: 289664 - DNA, 609 bp, Cannabis indica
atatgtggaaatgcaaattaagattggcgttagatgtaggattgggttgcacaacaataataggctaaatggctcaaacttgggtgactagggaaaaattgaatttatagggaaggttagaaaggctcaaacgtccaaagatggcctaaatcatttctaagttataaagctcgctaggatttcgcctcaaggattacactagctaattctagatgcttaaactctctcaaagtgttagctattctaaaaactcaaggtatggtgggataacacaagcacacaattgttgaaagcattcctcataggctagcatttagacaaaaataacacttaaaattagcattttcacacacaaaccaaggcactccacaaatggaggaaaatggatatttttcatcatcgagcgctaccctaaaccaagctgaaaatacaagcagtatttttctcatttgcaagctaaaacataacatcacaaacatgacaaaacaacatgattaatacacatctaatccacataatatttattactcacacaactaaagacaacaataaaagtaaactaagtaaacaatcaaacacaaccagcaataacaatttaactaaggaaaa

SEQ ID NO: 289665 - DNA, 571 bp, Cannabis indica
gtggagtcgaggtcacacactgatacctcctgacatcctccatcagttctacaattttctcggatcccacgccgggatccaactcgtcttcttcagccatttctagctcaatggtttcccggaccatcagcacgggcaggtgggtcacaacgttgtagcattgcctcgcctccccctgatttcctctcaccgtccctatcccagcttcctaggctgggaactttaaacacaagtgtcgtatggatgtgactccaccgaaatctaccaaggccggtcgaccaaggattgcgttgtatgcggtcgggcagtctaccaccacgaaagtgcagtacttgaacgtgctctggggggtgtccgggcacaaggtgattggaagtcttactttccccattgggataagtgttgttccgttgaaccctgtgagttgggaaccacttggtgagaggtcacggtccgtcaggcctattgcagtgaaggcctctttgaaaagttgattcacggaacttccgttatcgatcaagactcgggccaccactttattggcgatgggggtctctataaccaacgggtc

SEQ ID NO: 289666 - DNA, 455 bp, Cannabis indica
taaaaatgtttaaaattccgtaaaatcgtattgttgtaatttttttgttgtttttgtgtattcatgaaataattcttttctttttagtttattttacatttacattttagagtttctttctatttagaaaatttacaccaaatactaactttttttcaaacattacatatatagggatatgattttgtcccatgatgtactttcacggaatgtattccgtggtacattagatgggtctcagggtacattaaatgagtgtcagggtacgtttctactttttaaccctaattacccctagatcaatttcagccgttagatcaaataactccctcatctaacggctgtcgtacatcacggattacaatccgtgaaagtacaataacggggcaaaatcatatccctatatatataatttgacaaggaaatttttacatttatacttttttaattttttt

SEQ ID NO: 289667 - DNA, 749 bp, Cannabis indica
gtttatatggagatatgtgagaagttgaattgggtgttgttttaagtgtgttagatgaggttaaatgatgtgagtcattgattaatgagaactgtaaacttgattgtgtttaaagtgtttcaatcaatagggaatgtgtttgagatagagtatgttttttttaaaaaaaaaaaaaaaaaaaaaagagaaagcttggggtagctccaaggactaatgactatagagacttcatcttatgtttgattatggagaggagattatatgaagcaaaagagtgggtaattatttgtggaaactttccaattgaggatgatgtctaaatttgcatattaaagaggagttgttatcatgttgtttgtttgttgttatatagttgttcaagcatgtattaagattgtttgtgtgttgttcaattttaatcacacattatttatttatgtccaaaagataatattttcaattaatttgatttgtgacaatatattaattaagaaatttatttttgttgttttaaatttttattttaagtttgacgctatattttgatgggagttgttatccttttgtttgtttgttgttacttagttgttcaagcatgtattaatgttgtttgtctgttgtgtttatgttgttagttagcaattaaaaaaaaatccaaatgcaagttagcgattttaatcccacgttatatatttatgtattcaaaagataatattttaaattcatttgatttgtggcaatatatttaa

SEQ ID NO: 289668 - DNA, 559 bp, Cannabis indica
ctgtagcaagagtttcgtaggtttcattttatggtggatcactcctttatatacaaagcaagtgtccgtttggttatacaaagattgcattcattgtcaatccgtttacacattgaattacaataactaaactaaataacataaacatcaataaatgaatagtagttactaaattcagcaacgtatgcgccctctaacatgcgagttgactgttcatattctaatgttaagctcgcgggcctaacacttaattgcgtttaggatgtctgcgttcttatgtagtcacctctttggacattgtatgacgagctgatagaacctagacatacgagtatatatcggcttatcaaggctgttgggtcatcaggaccaactcgcattataaagaatcgatatctatgcttacgcaggaatacagagaggatactcgcacatatcctgatatatgcgagttagatccattctcatatcctgcataatacgagttatacttatgcgatcagacttaggtcatactcgcagtatctcgctgactctatcttgggcgaggtttaaactt

SEQ ID NO: 289669 - DNA, 1087 bp, Cannabis indica
tttagaagtaatatttttcttttttttttctttatttatatttaatttaagatttcaattaatttaatgatttcaaaattttatcatattatattaatcattttacttttcaagattataatgttcaatataattaaaaaaattagatataaaattaattatttattttaattattttattaatataatcatgcataaaatagtaaataatacatattcataatatgcttattcttcaacttagttcaagataaatattcaacatatttaaaatttctaaatattgaattaattatttattttaattacactatttatataaatcatgaactagtttgtaatacacatatatagttggaaagagtaaatgcatattattacattggaaaacacatatgtatatatttatatttcatacacaataaaatataaatgttgcccctaattttgcccaatatacgtggaccaaccagacagggacacgtggatcaagcaattcacaatatttgctaagtctttatgccataaggtaacgtcccggacgtaggtcccggagaaggcacatggaactcaatatgctcccggaagctcacataacgctaaggcatctccgcgaggtgtcaggtttctcctgagcaatcaagtcgcattaaatgccgcatgggaggaagcgtgttgggactgctacacgcaataaagtctgacggcacaacctccaaccagcagcgccacagtaatgatcatttaagtctagcgacggctacactgtgaagagtcacgtcaatcaaaaggcaataaggacattccacataaaaaccctacagcacctagggatttgaccatgcattacccatggtatattcattgggaatacccaactttatggatacttacagatacacttgtaaggacaattctagggattaccccaccaaaaacactataaataccccctcaaagctcattaaatgggatcgagaatcttgggctgcatatgagcaagtagagtaaatactcaccaagaacattctctgtatttataagggtgaaattctcccaagtataatctctgtattaaatacatcca

SEQ ID NO: 289670 - DNA, 607 bp, Cannabis indica
atttttgttaataggacagggaagagagtatagtcttacagaacttgaaatgtgaacctgagcttgtcagtatctacataaacctcaattttggcttctttaaccagctgccacacacaagttacttactctgaatttataaccattttataattttttaacactcaaaaagttgccaagtttgttttctatagctctacttattaaggtagaaaaatatttttagaattgattcctcgtattccgtttattaaatgaattattttcaagttgacacattaacttaaaaatgacacaataatgacgatactacaaagtatacacttatattcattctatttattgagaattcaaaactttaatcttcttcactagattagccagacacatacaatatttggacattaaacacaggacacatattataactcaaactcagaaacacttagtcaaaacttgtaatgaataatgccaactcttttaagttttaagatttgaattaggacaaggcaattttggttaattgtattatcattgttgctacatagttgatcatttgtagatttttgatgtgaaaattttgtattgtgagctttttagagttttt

SEQ ID NO: 289671 - DNA, 518 bp, Cannabis indica
ctgggaattcctgaaccccatccagaattccggttgcagatccggaattccggttcctcgcaggaatcattcaaaaattcataactccctcaaatcaaatccaaaccaaaccaaaccttccagacctgttctatataccccaaagaacataaccaaaacatcaaaacaacccaaaacacacagatactaaaaatgccatgtgagctccaaactttgagttcaaactcaaacttggctaaagctcacctacaagcatcaaaactagaatcaaactacacaatcatgcatataaaaactgcagaaatcattctcaaacttaaacaacaagcacagcaaccaatttcacattttcactttgaaaaaccaaatctttcgaaccaaaactctaaaccaatttaaaaccaaccaaacatgcatcaaaacagtttcaatccactcaatccaacatgcttaaatctctgaaaacaacatataaacacagcaacaacaaccaactccaaaactagcatgcaacctac

SEQ ID NO: 289672 - DNA, 344 bp, Cannabis indica
cgtaacttttaaggggaaatcctattcttcactatgaagaactctttgagcccaagcctactgttaaagctttccaaaacttgaggaggactaaatgagaaaacaattatggtcttgagaatattatggcggtgtaagagtgatggtgatgttgagatgataaaaatgttgagagcatatttgtggcgtggtgtagtgtagtatctttcactcttgaggaaacaagtgaataaatggaagaagataactacaactttgtagtatataatggacgagagatacaatgttgagagtttttggcttctagtgagttgagagttgttgggttatatgccctaaataaa

SEQ ID NO: 289673 - DNA, 657 bp, Cannabis indica
tgtttctactgcaatgagaaaggccattggaaaccttaatgtcctaaacttcttgcaaagaaacaaggtatttcttttattataaactgatgagttttagtgaattattatccatttggattattaattctggacctactaaccatgtttatttgtttttcttcttattatagcccaagctgcttgaactcagttgctatgttagcgagttgaatcggaaagctggacaaggggtggagttcgtccaagataaagatgaagctcattttattttttttttgaattaattgtttcagttttagaacaatttggattttaattattagtttgggattttattccctatttcctttcatattattgcaaacatttttttttaagattttataataaagttttttattttcaaaataaattgcaatttaagaattgagcttcatcttctttatcttatgcatcaattaccaattatatttatatgtttgtatgtgtatgtgttttttatcgatacaaattatatagtatcttaaacttttcatagagttattactacataaacactagaaattattttctacgtttatgaataattgttaattctaaaaacaattattaagattttgttccataaaaagatcttttgatctgataggggtg

SEQ ID NO: 289674 - DNA, 736 bp, Cannabis indica
atttgtagcttattaaattttttattttttttaaaaaaataaaataccaaattaaaaaaaattaacaaccaatcaaaattaatatttttattcaaaaaaaaaatcatattatatttgaccaaataataactttccacgtgtttacataagtattatttcatgtaaatttttcaaattttcttttttggtaattttattacaaatcttcttctaaacatatatttctctcatctaaattgttttctttgaccaaaatatttaagattaattagttattttgttgaaataattaattcgtgaaaattcatcatcccaaaacataaaaataaaaaaggacaataattagaagtgacactaagataccatgactttttacaaagaataatgtcattagtacttttcatcaaacctcaccaattatatattaattaattaattaattaattaatgatatatatgtagacaacactaaaaaaatgtaaaaaatataaatgaacaatttttaaatatggcaattgtctgttttctttgacaatttaattttgtaagtagattttccataaattaagtgaacaacaaagtgaaagtgtagcagcaagtatgcttagattgttcttacacaattaaattttaagcaatttgtaataaaattttcaaaaaagaaattgtaataattagagagagagagagagagagagagagagagagagagagagagagagagagagagagagag

SEQ ID NO: 289675 - DNA, 628 bp, Cannabis indica
tttaaagacgttttatggcctgcccaccctttgaacgagggcccaatccctttcaaccatcagaagcatgtgaaggagtaccgtcaccgcttcttcttttcctccggcttccaggccatggaccgctcggagcttcttacaaagtgggtcaggatcccaccttacatgcggaccgcgcctacccgagtgttcctccagcgggccaagactttctccacttacgacaagaaggccctcgacattggggagttggtcacgacggagaactgtcggaaggccaagctgatatcggggaatcagtcggtggatgacttcaatctttccaaggtcatctgcccgaacgtgagggctccggctgcggaaagggcattccgggaagacattatcgccacggcggaggaccggtaccagaagtacatttttaagagggaacaggagctggcttatatcaaggctcaggcagctgccgggaggacccttcgtttggaagctcctccggagtggaggccccccaagcccaagcccaagcctgtggtcccggtccccaatactggtgctcccgacgccagcacttcaggttctggtaagtctcctttaataatacgttatgttcctcccgtccgagagt

SEQ ID NO: 289676 - DNA, 540 bp, Cannabis indica
ttccaatcccgatctgagtctggatttagttctgggtctgagtcctttgttctgatcctggtctggtttggtccgattctaggtgtgggtttgagttcgggtccgagtctgtgtcagggtttgtgtccaggtgtggaccccgatttaggtctaggttcgggtctaggtccaagttggggtcctgagtgcgggtccaagtttgggtcggggtcaggatctcggtccagatctaggtccagcatttcgatcccagtctgggtcttggtccgagtccaggttcttatccggatccctatctaggtacaagtcggtgtttgggatcatgtccaagatttaggtccaggtttgggtctcagttccggtctgggtacacgaccgtgctgagcccgagttctaatctcaatttgtgtcagaggctaggtctatgttttgttctacgtctgggtgcaggtcatgctcatgatcctagtcttgttctagggtcctagttcggcgattcttattcagtttctaattttgggtcccaggtctaggtctggg

SEQ ID NO: 289677 - DNA, 562 bp, Cannabis indica
cctggacacaaacccggacacagactcagactcgaactcaaacccacacctagaatcagacccaaagctagacttggaaccagacccaaactcgaacccagactaggatcaaaacaaaggactttgaccacaaactgaatccacactcagatcgggattggaacttgttactcggacccaatctggacctagacttaatccggacccaggacacgaacccacacccggtgcctaatctggacctagacttaatccggacccgaacccaaactcaaaagaggactcgaacttcgacccgaactcaaacccaaactcgaacacaaaattgcaaatggaactataatcgaactaggatcaggaccagtaccaagacctaaacaaaaactcgaacccatatcaaaacctagacagagacctaaacccgaaccgagactagcactcgaacctgaacgttgaccgagacctaaaccaacacaataacttggacctggacccagaatcagcatagggacctgtgaaactaaactaggaccgcaacctagtacccgacccagacccgaac

SEQ ID NO: 289678 - DNA, 617 bp, Cannabis indica
ccatttacattcaaacaatgtcactgtatatgcaccagtataagatatagtgattacatcttcaagtgtcccgtagtaattaaacccttcaattccagcaacagtaacaccactattttgtgtcttccgcgtttgatctcgcttagacgcaataaaccgaacaccattcactacacaaccttcgtaaaaggttgctaagtaatcggagccagaagctagagcgagtaactcatcaccattttgtaaagttccaagcttgtgcaactcatatatctaaacacataaaatgtattaatatgagaggaatataaatggttgaattaaacttaaatattgtcattataccttctatgaaaccacggacggaaatttgcctatgcaagacatcgtgattaccattaggatattcatgcctggtcttgtgcaaatgttaactgtgaagtatgataatgtcaagatacgatagaggcagatagagaataaaaactaaaaatttaataaaataatttataaaaattgttgtcgagtgaatttcgcaacaccaaaatgtaatatttaattaatataaaatgagaattttcagggaagtgacaagtgcgagtattcgacctagaatg

SEQ ID NO: 289679 - DNA, 520 bp, Cannabis indica
tccgggtgtgggttcgggtccttgtaagggttcgggtccagggcagggtcccaaatccagacaccgactacgggttttgtccaagctctgggtccagatccagataccaatctcaggtccccgtcttgttccatttctggtgccgggtcacgagctgggtccttggttcaagtttgggtctgggtcgggtactaggtcccggtcctagttttgtttcccaggtccctatcctgattttggtccaggtcccggttattgtgtgggtttgggtcccggtctagcttcgggtttaggtctctgtctaggttatgatctgggttagctcctggtcctactcctagttcggttcaagttccatttgcgattctgagttcgagtttgggtttgagttcgggtcggagttcgagtcctggtctgagtttgggtacgggtcaggatttcagtctaggtccagatcaggctccgtgtgtgggttcgcgtcctggttttctgtctaggttgggtccgagtcccaagttcc

SEQ ID NO: 289680 - DNA, 78 bp, Cannabis indica
tgttagatttagtatttttataacatatgtgattattcgttattttctgaacatgtgtatgaatttatagaaccaaaa

SEQ ID NO: 289681 - DNA, 322 bp, Cannabis indica
ataaccagccatatgcatagaaatagatatgctcatatatttgcattacctaatcaggtaagcccgtgtcataatgcaacatcatatataatatcattgcaccacctaatcaggtgagcccatgccacaacttggcactaatatatcacatcgtctaatcaggtgagcccatacattatgtccatagtatcatcatattatcattgcctaattagacaatcgataattttaggaactagcaaacaacactttcaattcatagtcacgactttataacggttgtcccacaggtacaacctaaatgtcagtatccatatattac

SEQ ID NO: 289682 - DNA, 442 bp, Cannabis indica
tttatgacctaaataaaaccctttacaatctaatctgatttgtcaacaataaaagattaaaaatcatttatccttacatgctgtattcatgtttatggtttaatttatatatatatatatacacaaaatctgttaagtccagaacatatagtcattcgcaattacagtgatgtcaacacagtagaatgtgattgtggttatatgtttcgaaagacaaagttcctgtttcatcaatgcattggatttacactgatatgataatcaccgatgaagtgtacttacactttgtataagtgttatgttctttctagaacattggcatagtatactagtctcgaatgtatggagtatacattggactggaccgatattgatcttagtaaagatattataatgcttaccattatatctttccaagtcaaatatcactagttgatcttag

SEQ ID NO: 289683 - DNA, 649 bp, Cannabis indica
tcaatactaaaaaaaaaaaattccaaaatattaacatgcaattaaaaaattatttttatgattagaattatttttatttacaaaaattagtattttagtaaattgtttgataattcaattggctgtgtatttaatttctatgatttgatagatggttatttttattttgttattcgttttttctagagtaatggtttctcatgttagaggggaagctaataaaattgatcatgatttagctagatttatttttcgataataattgtatttggttggaggaaatttcttcttcaatctactcttttgttgttttggattcattaataataacagtgtttttaaaaaaaaatagttgttataagattgaattttttgttatgctttgtttggtttatataatttatagttattgtgagattaattttattattattttttttaattattttctttttttttgacagttgtatttcataatttgaatttttttaaataaaatttaagagtaatttgcggcaaaactccctcaactatcaatttacttacaaaaaaccacccaacctcatattttggtgggaaaaccctccaaagtactatttcgtttacatttttaaggtaccgtctactcacgtggcaatgacaggtcact

SEQ ID NO: 289684 - DNA, 908 bp, Cannabis indica
ttgttaatacgggacttagaaattgtataactaattacaatttagaggttattcttatgggctattttcaaaaatatgggaaaaattattaaggttatgataaatatggcataaaaagtaaatgccactaaatatggcattatctaaccaatcaaactaaaaatatggtttttttttctaaaaaaaccatataaaacattaaaaagaaatctgaatttaaaattcataaaaaataaaaacttaattaaattaccataaaaaatattaaaattcccttcatatttatttttttaaaaaaataaaacaaataaaactatagtgattgccgaagttgtcactcgtgctggaaaagtcaccggagtttactgtcggcaccggaaaagtcgtcggagtagccgccggtgccggaaaagtcgccggagttgctgccggcgccgaaaaagtcgtcagaattagcattgtcgctggaaaaatcaccaagaaactggtttcttgatgttagaaaccggtttcttggtgatttttccggtaattttaccggtgacaatgccaagtccgacgactattctggagtttgatgtcggtgccgaaaaagttgccggagtagttcctggtgttggaaaaatcgccagagttattgccggcgtaaaaaaagtcgtcagaattggcattgtcgccagcaaaatcattagaaaaatcaccaagaaagtggttttttcatcaagaaactggtttcttcaccaagaaagtggtttcttcatcaaggaactaattttgttacacaacaataataaagattatgaaaacaaaacaaaaatgatatacactgaaaataattgaaaccagtttcatcaatcaaccaaatagagaaaaaaaatacaaaaaaaattaccaagaaaccgaaaaaa

SEQ ID NO: 289685 - DNA, 716 bp, Cannabis indica
ttttttctgagtcaattgggtgaattctttctcttagcacttctaactgcttcattgtaatactttacgttgaaaagttcctggaacttttcccaggtcattgtcgtaacatcgtgaatcatggacaccatgtcccaccagaccagtgcgtcttcttgaaattgaaaagtggcacagaccaccctatcattaccggtgacgcccataaaattcagaattctggtaatccctattagccattgctcggctttcatgaaatcaggacctcccagaaaaataggaggtccttgcttgcggaacctttcatacaggggttccatccgattcactgctgccactagttcggcctggacagcaggggcagatgccactggaatttctggggcaggcattgcaggagcaccctgctgtctcaactgtcgaatctcattatcttgttcattgatcctggcttgcattgctgcaaacctattttcccaattttgggcattctgagcaccttaggcagcttgggcaacctatggtgggttaacatcaccctggccacgtgccctgcccctgggacctctacctcggccacgaacatttaggggaatctgagctcccttaccatcattagatccaaccgaattgccctggctcctggtatttcgcctagcgtccatactaatctgaacagcctgcgtaaccaagagctagtctggtcagattgtgat

SEQ ID NO: 289686 - DNA, 602 bp, Cannabis indica
cacaaattctggaatattattggtccgagggtctcagctgtttgtcttgctattttgaatggacaccaatcagttaggaagtttaacaaatcgaatgtggtgttgattccgaaagtcacaaaaccttctttcgttaaggagtatcggcctattagcctctgtagtgtcatgtataagattgttgcgaaggctgtgtctttgaggctgaagggtacgttatcaccgttaatctcatcatttcaaagtgcgtttgttccgggtagagctattcatgataatgttatggtggggtttgagctattacattctctctttaagaagaataatggagtcagggggtttatggcgttgaagttggacatgagcaaggcgtatgatagagtggagtggtgcttcttacgcgctattatgatgaagtttgggtttcctggccgttgggtggagcttgttatggattgtgttactacgccggaatattgttttttagtgaatggtaagcctaaggggtgtgtggtgccttcaagggggctgcggcaagggtgcccactttcgccttatctatttcttttttgtgctgaagcgttgtcatccatgattcggca

SEQ ID NO: 289687 - DNA, 630 bp, Cannabis indica
tgtagatcatctatagaggatcattcattattaggattataacaaatggataatctcatagggtatctatatcgtggaacatgtagagaattctatataattgagtgtgcaattccaaatctacagtggtgcaaggaggaattaataagttaggaaatttacttggtaaattttagaactgcttattggaagttcggttatataggctcatcgtccccatactagttgagataaactgcttgtaagactcagttaattgattttaattaattaattatatttctaaaattacactatgtctagtttatgaatttttactaagttatggcttgattgtgaagaaataggattttaaagtttatttgttaattaagagactttgtagagtctaattaataaaaaatataaatgacaattttatttgataattaattttaattattaaataatagttttggcatttataggattagaattggaaaatgttgcatctgtgaaatgatagataaatggttgagaaaaagagcaaaaatataattagtgtagggtccactatgtggccgaccactatgcccttatttttactattatttaatcattttttattctatataattcaatcctaaccct

SEQ ID NO: 289688 - DNA, 793 bp, Cannabis indica
gggcagagggaaacaatcctatgagcaagctttgtttagatcaataaagtctatacaaactcgtcaggtccccttaggctttggcaccagcaccggattggctagccattccgggtagtagacatctcgaatcatgccactcgttaatagtttgtccacctctttgtctaaggcttcgaccttcactgagtcgaggggacgtcgattctgctggaccggtggcatgtccgggttgacattgaggacatggggacttatgccagtcctgtcttcttggcaccatgcgaaaacgtcgatggcacccctcaacgtctttattattttttctttttcctccggttctaggctctttcctagccggagtacattgatggagtcgaggtcgcacaccgacacttcctcgacgtcctccattggttctacaattttttcggatcccacacggggatccaactcatcttcttcagccatttctggctcaataatttttcggaccatcagcacgggtaggtggtcagcaacgttatagcactgcctagcctccccttgatttcctctcacagtccctatcacagcctcctgggttgggaatttcaggcataagtgccgtattgacgtgactgcaccaaagtccaccaagccggtcggctgaggattgcgttataagctgttgggcagtccaccaccacaaacgtgtagtacttgaaagtgctctggggtgtgtccgggcacaaggtgactagaagcctcacttttcccatagggataagtgttgttccattgaaccctgtga

SEQ ID NO: 289689 - DNA, 548 bp, Cannabis indica
tctctgacgcctagcttctttaaatcatgtcttgcattggtagtgtccttggatttctcattgtccaatattgtgcccaataaactatcacaaacattcttctcaacatgcatgacatcaatattgtgtttaagaatatttgaacaccaatagtcaagctcgtagaagatgctttttttccgccaattatgattttctgcaactcgcctacgtttcacaccaccaaagagctcatgatttccagggaggtggggtgggagtttgtttacttgttctaatacttcttcacaagtaaaacgtcttggaggaggtcttctctcaatttgtccgtcaaattgagtatcccttctcattcgatggttatttggcagaaatcttctatgacccacgtaagatgtcttaccaattactcgaatagaagatgtatcttcattgcaagtaggacaagctttatatccctgaccactccaaccagacaaataactacgagcaggaaaatcattcactgtccacaaaagagctgcacgcaacttgaagacagtgttggt

SEQ ID NO: 289690 - DNA, 612 bp, Cannabis indica
taagtataattataaatattaatgaggctgctcaggtgagaatgcgaccaagacagttaaggaaaagttggagcgttgacagaatgctaacaacaaagcttgatactttatgctgactaacatggtcgacaccttgaaaataaggtttgccaatactctcacggatgcagatatcatgaaccagttaacttaactgtttgggatggcgtcagatcaagctcgttttgaggcgaccaagaattttatcaatgcacagatgaaacctcatcagaacgtgtgtgatcacctactccagatgactagttacttctaggaagctgagaatcatggagctattatagatcagacaactcaagtgagtttgatcttaaatagtttgactctagtctttttttaccgtttacatcaaattatgtcatgaacaagttgacttttgacttccacgagttaatcaaaaaccttcagacatttgaaaatttgattggaggaccatagaaaggaggaagtaaagctcctagtcttgactcaatggtacagctaaggttggggcaaacgattgcctcaacttcgaaacccagcaaaaagaagaagtggatgaatgcaagaagccta

SEQ ID NO: 289691 - DNA, 746 bp, Cannabis indica
atttcggtatccaaacagatttttatttattttattttttcataattgacattgtgtactaaatttaatatataggaacacttataaatttttaaaaaatttgaaataatagtttataatataagaaataagttttaaatagttatttacgatacttataagaaaaaacattatgttttttaataaaatatttaaatcttattttctatactgtaaataagtgattttatttacaaatgatcttaaataattacaacgtataaattatatatagaataatttgtggcataaatacttacgtttaattttttgcggtaataatacttaagttatatttttggaactctgaaggtacttggtacttaaatatcaagtcattatttacgtgtcatttttttattggtatattaaaatttaaaattaatttttttaaaaacaaaatataaaaattcatgacatgggctaatcaggaattatcacgtggcaatttacttaacaattaacagtcagatacatacagaagttccacaattataacttaagtattattaccgtcaaatattaaacttatgtatttatttacaactgagatttaacttttaatatttatgccacaaattacttttatatataaaaaaaaaaacttaactcaatattgacaaatgatcctaatctagtttgttgagataagaaggtaccatatataatagggcattttacaattttgtatacattattttaattaa

SEQ ID NO: 289692 - DNA, 766 bp, Cannabis indica
acctaggagcgaatcttagcaatgacaagaaacaacacattgatccaggtccagcactgaagcagatacagaagcctagcaatcactgttgctgagattgcttggctacattccctattttcagagttgcacatcaaactttctaaacttctagtggttttgtgcgacaacttcagcacgattatgcttacactcaattcgaatttacatgctagaactaaatatatagagttggatctctattttgtttgagaaaaggttcagcaaaagtagttggaagtcaagcatgtgcctgccattgatcaagtggctgatggtttaactaaggctatctccagctctcgatttgctctgtttagaaacacacttacaattgacaatagtaccaattgtaagtttaagggggcctgttagagtgaattagttgcttgagttagttaatgtttgttatgaattagttggtttgttaattgtccaactgttagtttccaactaacttgtaacaattttcagttagttcttgcttgagtgtaagattgtatataagtcttgcttcgtgactttgttaattaatgaatcacttcattctctttcaactcctttctctctatctttctttttctttctctttactgtttctggattattttctctgattcaacaatgtcaagaagatctaatacttttattatgttaaattatattcaaacgcataaatatttaatatttagatttcatacacttatataccacatatttttttttt

SEQ ID NO: 289693 - DNA, 733 bp, Cannabis indica
gcagttctcggactattgttacgtacgcggccatccgctcgccgcgggtttggtattctccggatacctggtttacgaccagttgggagtcactgtagacttccactcttttggctcctacagcttttgccaatttcagccctgctatcagggcttcatattcggcctcattgtttgaagctgcgaagtcgaatcggagggccgcctggagtcgcagtccagttggtgatatcatagccactccggctccagaaccgttctcattagaagctccgtctacaaataccctccacgtggggattggcggtaccggcgtatttgctgttgcctcggcttcgttgcattcagtaatgaagtctgccaaggcttggccttttatggaaatcagtagtgcaagtcgaattgacttagttccattgcccacttgaggagccttccggacgcttcaggcttttggagaacttgccggagcgggtgattggtcagaatcttgatcggatgggcttggaagtatggccttaacttccttgacgccatcaggaggcaaaataccagtttttcaatgaccgggtatctcgtttcggcccctatcatgcgcttactgacatagtacacgggatgctgagttttttcttcttcccggccagggcagcgctgccgcgtgttcggagcggccaaataaagaacaagtctctccgaggacgggttttgataggatggaggcttggccatg

SEQ ID NO: 289694 - DNA, 961 bp, Cannabis indica
ttccttttcgtgcacctccgcccgacccagatttcttctccggcgcacctctgcctgacctccgtgagccattccaccacaaccgatggacgagattcccaccaccctcaggatcgcaagcgtcagaccacactgaagcttgttctccctctcgatctcgcttaagttctctccactctctcagtccctctctttctcgatccactctctcagtccctctctttctcgatttctctttgctcagagccggacggagacgaggttgagatatggacatcaacgacatctggatctgggaagcttgagtgctggggttgtaatcgcacaagaggacgacgatgatgttgcaatcgcacaagaggaagacgatgatgtttctgtgcactcaagaaaatcgcacaaggcttctaggatttttttttaccttttttattttttttctagatattatagatgaggatttttgtgggttaaatttactgggttttttttttcagttttggggagaagacgatttgaggttatgggttttgttcttttctgtaattttagcgtgatttatacatgatagtgagatatggtatgtgaaatagggctgttgttggtgaggaggaagaagatgatgacgatggggggtgttctctggtttgcacctctggttctcagaagacgatgagggagaagaagttgaccccctgaatcgcagaagagaagggggagaagaacaggattttagtgttctcagattttctaggtttggaatttaattttgtatttaatttaatttaagtgtttatgtttaattattttgtaggaattagattgttatatgatttttattattaatcgattttgtaggaattagattttaagttttatgtgtttgttaattttgtaatttttttaatttaaaaaaataagttttatttaatgttaaatatataagaattaatatttaatt

SEQ ID NO: 289695 - DNA, 560 bp, Cannabis indica
acatccttaagcctggaacacagctagtagcaatcttgtagataacattacaacaggctatcgggcgaaaatctttcacagtgtttggacattttactttggggacaagggtgatgacagttgagtttatctcttttagtatctcgccagattcgagaaaagaaatcacagcttgtgagattagatccccaatggtatcccagttatcttggtaaaaataactagagtagccatcaggacccggagctttcgatccagcaatactaaaaacagccttcttcaccttttcatgactaaattccttctccagcatctcagattgtactttggataccattgggcctctcctcaatatccctggaagcacacatcgtctattctccattttagtaccaagaagttgtttatagtagtcaataaaagcatcttgcaccagcttgggatcatggattctcttcccatcatgatgtcaatagatagtattctattctgtctgagcctttgccttatacttgcatgaaaaagtgatgtattgctatcaccatctcggatccaagcca

SEQ ID NO: 289696 - DNA, 518 bp, Cannabis indica
ggtgggggagggaaccttcttgatgaggtcgagggcgcacaagctgaagaagtcgagaacgaggtcatcagcaaagtcgcggatgagactgctccggatgagactactcctgctgctccagatgcttagttatcctctaatttatgttgttttttaattttacttctctctttttttttttatatgcggtacaagggtactcgcgcttttgtacttggacaaatttcttttcgttttggacaaatttatatcctcgcggggatagctatcctttaacatttacgcagtacatgggtactcgcgttttttttatatatatatttgcgacttcaattacagcttggtgtaataagtaggaatatttacaaagctggtaaatagtacattcgggcatatatatccccctatacttaggatttttccctgttgaatgaaaaatatctaagtataagtacaatagtgaacataatcgaataatgcgagtactattgataataaaatttcaagctctcgctatt

SEQ ID NO: 289697 - DNA, 570 bp, Cannabis indica
ttcaacttgaccatttgcttgaggatgcgctactgcggagaaacttttgatgataccatggttcgtacaaaaattagtgaaggattggctgtcgaattgctttccattgcctgagactattttttacggcaatctgaactggcagattatgttcttcacaataaagtcttgaactttctttgatgtaatggttgcgagtggttcggcttctgtccacttggtgaattagtcaaccgctaccactgcgtactacactcctcctttgcccttgggtaattgtccgatcaggtcaattccccaaatggcaaagggccacgaactttgcatctgtgttaactcgtagggtggagctcgtattatctttaaaaatctctggcacttgtcacacttcttaacataggattttgaatcttcaatcatcgttggccagaagtaaccttaccttagaattttcttggataagctttgcctggcggcatgatttccacagaatctatcctaaacctcagataggagccgtgcagcttcttcttgagtgacacattagagcaatggcattgagaatcctct

SEQ ID NO: 289698 - DNA, 660 bp, Cannabis indica
ttcgaggactttgagccagaagcagacatgatatgctctgagaaaaacgaaaagaaaaaacccagcagttaggccccatatcaaaccctaaaccagaaaaaagggagtgggggtcccctaaccgctggaaagaggccccctccggacacgtgtcacctgggaaactcgaaagagaatccctgaacaagtatcgggtgcagtaaaatcacagtaaaaaggaaaagaaaaaggtcttcctatgccctaaagcaaatgctaaacgaaggatacacggccttcttcaaacaaaactgtacgactacaactaatacagtgaaacgtaagagcagaactcaaagagctcaaacactcacactccagaaatctctgagtacgaacccagaaaacaaacaaaataaatgtaagcatgctagagtctaaagattcgaagaacttacagttgattgttgaactgggggtactgggtatgattgagcgagagttgagaagcactggtgaaatcgaacactggaagattacagaaaatgttcaagtgttaaggcggtttgtgctactttgaggaaattttctctctgagaaattcaagcaaaaatggtaaggaatggaaagtaaccaaaatgaaggaaaggtggtggcttttataggcaaaaatgcatgagg

SEQ ID NO: 289699 - DNA, 712 bp, Cannabis indica
ttagaatcaatacctcaatgacaattcttcctttaatcatcctccattgttgacatcttgaagcttttgagaaagaaaaggatgaataaggttttttatattttgggtgaggttttagggatttggggttgattttgagtgggaattagtgtttaatgagagaaataagggtttaggatgattattgatgaaagtttatggttagaattggtggaaaggagttttgaatgggattagatgaagaaaaaatggtgaaaagtggtgttttcggcgtggagaagagagggtttgaatggggtgtgagttttgaaatgttagggatttggggttttttaaacaaaatctgaccattctcgccgcggccacatgtatcctcgccgcggcgagatttcgtgaaattagccccctctctgtaaggcttatctggccgcggcggtgtataccctcgccgcggctagaaatcgtgaaaaatagcccctttctgtaaggccaatctggccgcggccatacatcccatggccgcggccactgacaaattttttttttttttttttttcagtaacgaaaaagaatgaacaaaaagaaaaataaacagtaaacttaaaagaagttcaactaaatcaaaagaacacttggttgctcccaattagcgctaacttatcgtcgctcagctagacgttgatcgagatcttcaaagtggcgccagaatcat

SEQ ID NO: 289700 - DNA, 571 bp, Cannabis indica
gtcaaagaagccatttggctcaagaactggggtttaacacagatgatgtcactgtgtactgtgataaccagagtgctctgcacttaatgagaaaccccatgtttcatgagagatccaaacacatagacatcaaacttcattttatcagggatgttgttgcaaggaaagaagtaaccatgaagaaaatcaatatggcacacaaccctgctgacatgctaaccaagtgtgtcactcaagccaagttcagacattgtctaaacttgctgaatgttaatggctactgaacacttgtattctcaagcctttaacctatactgagttttaacttatctctcttctcaaagtggtcaaaacaaggtggaattgttggtgttttaactactttgaagagccaaacaaaattaactgtttttctttgacaactcagcatacgattggtgacttgtccaactgtcacaactatataaacctcctctctccaactcgacatgacacgaaaagagaacaatatctacaccagtctaagttagttgtgtcttggttttgagaaagagagagattctgtgtaagg

SEQ ID NO: 289701 - DNA, 568 bp, Cannabis indica
tttatttttttaaaaactaaatttaatagttattttattttattttttagtacacttaaattacttaattagtatttttttatattcttttaaagatatttttttttaatatgttactttcaaaaattatttattttaataagcttgttgatgactcttttcaaaatttattttctaaaaattatattttatgtatttcttagatttgttttctttataataaaattagtttttgagcaatacaactttctggttcataaaaaaaaaatctaataagtacaataattcataataaaatataaattaatatgtatacatcaacgtatatttaaataagtatataatcaagtaactcatattaaaataaatgagtaatttgcggtataaatatctaagtttaactttcgattgcagataaatattttaagtttaatttttgacagtaataatacgtaactaagttaaaattctggaacttccctaggtacctggccattaagtgttaagttaatggccacatggcagaccctaattagtctagatcattaaattttattttttatttaaa

SEQ ID NO: 289702 - DNA, 943 bp, Cannabis indica
ggggcacagtggcaggcgttgggggcacagtggcagatgtggaggcgtctggtgtttctttgggtggggatggtggaataatttggaccttttcacatatccgcacccgttcggcttgggctggaatgcggtcgaatcttgcacccgacttgcgttcttcgacctcatccaaccccatttccaccgtggggacctcaccctcacaattgctcttctaatagtccacctcccaagggttccaggatacaaaatttgaagaacaaccatctgaaaaaagaaacgaaaaaaaattaattatcgcacaaacatcgcatatacgtcgcataaaatcgcagaaaagaacaggttggtatacagcataataaagtcgcacaaacatcgcatatatgtcgcataaaatcgcagaaaatagcagacccgtatacagcatagtaaaatcgcacaaaaatcgcatgaaaatcgcaaaataaaacagaggcaaatgaaaaaacatgtctaaatcgcacaaaaatcgcattgaaatcgcataaactcgcaaaatgaaacagaggcaaatgaaaaaacatgtttaaatcgcacaaaaatcgcattgaaatcgcataaaatcgttgaaaatcacagtttagcaaaacaaataccaaaacaacaaagaaagtcagattgacatacccttttctcaaatagggtagcgacatcaggttgcttcacatcatgtttcgtaaccgtgttgggggtgctccaattcaacattcgagggaatctagtccctctgcactgcccgtacttcttccccaaatcttgcatcacctcaaaggcccagtattgtagcgccggtgcatatccgtagacattgtacttcgcctctggttgagtaatttttttctccttcttccctttcttcttatccttagtagatttatcaatgtagttcttcctcaggtca

SEQ ID NO: 289703 - DNA, 737 bp, Cannabis indica
ataaggtctcgatggtttcctcaaagcgatcagcagcctcaaggtcctttattagcacggagatattcttctcagtggcaaacagcttcttgttggcctcacccaactcatgacgaacagctccagtctctgccctggcctcctcagcttccttcttggccaagtccacctccgccctcaaggtgtcggacagagccgcactcttggaagtagcagatttagcccgggagtaagtgtaagccaacttcaaaccggcctgcataaaggaaaaagtcagcatatggagctaagtgtgaaaagttaaaagggaagtatcaaaaaagactaaccctggtgagctccttcaagactccgcccaccaacacatccagagatgagtcgttgtcagcaccagccagttgctcactgacctcaggaaccagccggttcatgtagtgagccagcatctccttgcccttcttggcctcaggcagcacgggcacgggtggagttggtgcctgcacccgctcagggatcctcctgaccagttcggacccagttgttggtggcccaaactccttagacttggcagatttgggagtagaaggagttgcagcagtcagctcctcggcaaggtcaataacctctccagaaggtctcttctctgaagacccctcttcgccctaagactctggcccgaggtaggggctagaacttccgcccatcctcttcctcaaagcgtcgagcatctgcccaga

SEQ ID NO: 289704 - DNA, 602 bp, Cannabis indica
actcattcaactcaagcatgaagctaagttgaagggaggtgcgggagccaagcaatgtgctcaggagcatcttgagcaggaagacgaggttgaggaagagcaagtgactccgctcaaaaggaagaagaaactttcagccgagcataggcctatcaaacatacgattcagattagggagcccagtctacctactcggccatccactcctgtagtaggaaaggggaaagtcatcctagaggagcgaagagactcattagatgatgatgacccatctggtcttgtctcgggaaaacgcctcttccgaagtgcaagatactccatcttgcctttaacttcttgattattgtgctttcatacttctagtgctttttcctaactatgttgcctttatttggtgcagacatgtctcaaaaatagctcgaagctctgaagaagaggtggggggaagctcgggcttatctcctggaccaagaagtctagggacggtgagacaaccccgtccagagagaaggcacagataaaagcagttattgatctttttgaggagccaaccttcgtggacccttttgcctcaaaaataactaagtccaaagactcgagga

SEQ ID NO: 289705 - DNA, 629 bp, Cannabis indica
ttcgtgctcctgattcatatatactacttttaccggcgcatccaattgcgccggtaaaagtggtttttaaaatctgacctaagtagccaaaaacgagcgtttaagtaaatacttttaccggcgcaataaatacttttaccggcgcacaattgcgccgctaaaagtattctcacttatcacatcaaaatccacacgtttcctttaacacttttaccggcgcaatggtgcgccggtaaaagtattcccacctaccaaggaaatccacgcgggaagtttccctctctttttttgagacttttaccggcgcaattatgcgccggtaaaagtaaacaagcgccacaataaatgaaatgaaaggcggcaaacttctcgcgcctgttggcgcttcatttggtaacttttaccggcgcatattcagtattgcgccggtaaaaccttttaacaccggcgcaataatgcgccggcaaaagtgaagcctaaatgcaagtgggatttcagattttgctctatctcgacaacctttaccggcgcatttgacgaactgcgccggtaaaaatgccttttcttgtagtgaaccaacaataatccataattattaaacccaaaatctagtatttatttagagcatc

SEQ ID NO: 289706 - DNA, 912 bp, Cannabis indica
gaacaattcgcaaaccggtttccaagtctcggtattcaagtagtcaggagggaatttgagaactgtctcccaatcttctggttttttgtaatgttgtttaaaatgcctgtgtctgagtgtctttcgctcactatacctctccgccatcaccgaatataaagtccccataagtaggtctcggtggggattcccatcgatatcaaaatagtactatgtaataaaataatttaaaattatattaatttacaaataaggatataaaattattacaaccatgaataattaaaaatcactcactcttattcgattgagcacttgatccttatattgttggggtacatcagaaaaatttagatgaccacccgggcacaacatgcttacttgctggccaataaatcgaacataattgcttgcttcagtgccaacaactttgccagtttcaagatctacctccaccgttaagggcttaccagcttctctccttttttttttcaaggttagtgtttgctgcaaccccacgaccctttctgaccggaggtggaactttatttattcgagagaaaaataattttattagtaaattgaacattcaccatttatattcagaacaatgttagatctgaaaaaatatgaaaacctgattcgcaggacgagggtaccctagaaggatcagggggatccctgccatcaccatccccaccgtggtatgtcgctaaagtagctgacattgtactttactttgaagacgaaaaaaaatgtaaaaattcacaaaatgtgaaacacataattgaaagttgacacaaatattaatgcgaaagaaattaaaaagtcatttaattgtaaaaagttttagtaacaaacatttacaaaataaaagttacaccgacgaatcactatcatttccatcattca

SEQ ID NO: 289707 - DNA, 585 bp, Cannabis indica
tgcaattcctctaagtttaccttggcagccatctcgtccatggcttccctaacctcccgaagctcacgcctagccttggcgacggcctgaccctctgccttcagtgcctccccgtgcctcgcctccaactcagcctccctccgtttggcttcctcttggagcttcgcctccgcttggggttccctctgtttagcttcctccttgagcttcgcatccgcgagggcctcccgtctatcagcctcctcctggatcgcccgcctttcaacagacaggtcccgcaggatcctcacggcctcgtctatgcccccaaattcggacatgacgaagccatgattaataaaggtcttggaaaggcggctggtctccgcagtaatctgaaaaaggagacaagagtaagatcgaatgccttggacaaaatatcaagggaagaaataaaccacaagtacctatcgcagccatggcgttgctgatatcttgaacttggtagacggagttcaaggaggcacaagcagcatatcgtttaggcgagaactgagtcagatgggagacaaactcgctggtaatctccgtggcaaagggagccaa

SEQ ID NO: 289708 - DNA, 531 bp, Cannabis indica
aagcattgaatggggaatatagtgaatataccattaataagaataaaaaacccacatctctaatgcagcacatagattaagatcactcaacaaaaatcaaacttgctactatgaaactgcaagctatgactttaaacaactaaactccaaaacatttgtctactacaactgatttactataaaatcaagagtaaacccaagattgaaattgacgactttgaactaaatacagcctagaatgaacctcccgtaaccacacccctgaaacatcttttgggctaccaaacttgagtagagaacacaagattttataggctcttttcgtgaagaaattaagaggaatatctgttccaattaattaagattttatatcttagcactaaaatatttgaatgaaagtgaaacttgaattagaacataagatcaagcaatcaagaaactcttcttcgacgtaggtgtatatatttatttaattacatctcattttgaaacattacaattaaaaaacaatggaagcatgaatatcagaaa

SEQ ID NO: 289709 - DNA, 162 bp, Cannabis indica
gggtgtgggttattcattttggcactacaaatatcaataaacagaagtaaattacttggttcaataaattcatagacaaaattcagaaatttattcgatcgaaaagggaatccgacgttgtccatttaggcaagagtcaaggtcattcctatttcatgagcc

SEQ ID NO: 289710 - DNA, 643 bp, Cannabis indica
gaatttcgggccgaaccgggttcggcccgaaatgtaaattgaattgattatttggcattttatttgataatatgataatctgaaatttatttggcaatatttgagtgtgaaatggcatttatgcccttaaaaaggaatatgtatgtgttataggcctatgggcaaaatggtcatttgaccattattgagtaaatggaatttattggattttagagaaaatgaattgtattttctgattttctctctctctctcaccgaaccctctttctctctttcaccccttttcattttcaaagttcaatttgtggaaagaactagttgatttgaagttggttgtttgaaagaaaggtgttgggaggcttgaggcttggttgtgcaagtatttgaggtagttttcttgatttttaattcatgttttttggctgaatattgtgatagaaacatgtttaagtttcttaattttggttatgcatgggttaggttgttcttgcttcatgattgggtaatttggaactatcttggattggatttgagtttagaattgttgtatgcttgttaatgagttgggctgagattattggtaattctaggttgaaatttcaggtgtgaaattaatgtctaattgctggttttgacttgaaga

SEQ ID NO: 289711 - DNA, 326 bp, Cannabis indica
taaacattagaagaaaatacactttaaataatgagctttattattaggacattcgatctccattgttggtgctacatagttcttgttttagtgagtaatcttccctaatggaagaacgttcattagcaatttaacgccgtagatctcgaaagataagtatttttgtaagtgttttatttttagtatggatcaccctaatggtggcgactattagtaagacttacaaaagtatgaaacaatggtggaagctcataagatagaatggccttgactctcgcctaaacgagacaacgctggattcttatcttgatcgaataaaggttgct

SEQ ID NO: 289712 - DNA, 535 bp, Cannabis indica
tagattggtctttcggagtctctgaggataaggtatcttcacaaatgatcaatactgactggtggagactgttgttgtggtgcaagactatcagtagtcttcttctctgttgaatttggagttggtgtcggttgatctttaatttcttcatccactggttgtaccacatcaggcccatcatatttctttccacttcatagggttattgccttgcagctttctttaggattaacctcagttgtactaggcaagtttccctgaggacgggttgctatctgagttgccagttgccccatttgagtctgcaaatctttaatggaagatctagtttcagtcataaattgtaacaataaatctgtctgcaaaccagaatttccactagagctttgttgctgagtatactgttggttctgtgtctggttctgatttctctgttgatagaacccactgttccttcgattacctccttgattagaacccatagttgttgttgttctgagataatttccaatggcttttgcttcatccattggca

SEQ ID NO: 289713 - DNA, 634 bp, Cannabis indica
tttcaaaaggtcgttaattgttatcgctgctgaaaatttatttagaaccatttttaaaactttgctattatctacaggatctataggtacctcaatggtgtcttccgcggcttgggctgcggcggcatgatcgaggattcttggatccaaatcgggtttgtctatgtgcggcacctcctcgattctgaggacctcctggcgaggaggtggtgcctccaacaggtagataacatttactgcccttttctccgcgagcttgactgctgtgttgtagcattctcgtgaatctgcttaaactcctcgtacagaacctacttcagcaggagtagggaacttcattgtgagatgatagatcgaggttatgatcttcatctctttcaggatcggtcgaccaatcatggcattgtatgcagaatactggtcgattactgcgaagtcagccattgacttggctgttaccggggcagttcccaaggtgattgggagtttgatcattccttttaacgctataacatcgccagtaaagccatagatgcttgacgtcataggacgcaggtccttctcctgcaatcccatttgtttgaaggcttggaagttcaacagatttactgaacttccattgtcgacgagtatg

SEQ ID NO: 289714 - DNA, 501 bp, Cannabis indica
gcggggttatggattttgaccattttacccctagctttagaaatgcccaagttatagccttaagggtatttttgtcatttgaaagaaataaaagataggtggctgccctaggtttttgacacctagctaggttgatttcagcaagggaaggggctgtgattttcttggatttcagccaaagattcaaggggaaattcaactaaggtaagctctagcaactcctagccctaattcttgaatttaaacttaggttgagtatgtgaaattgagtttcaggggctgttaggttttgaaaggtttagggtttgaattctagagttagtttgagttaatctaagtccctagcaactggttttgatgcttgatgttagttctaagcaagcttgagttttgaaactcaagctttgagctttaatggcataatttgatttattggtttgttctgtgaattactgcctggattttattgtttatgcattgtataggtgtactggagagttt

SEQ ID NO: 289715 - DNA, 526 bp, Cannabis indica
cacttcaagctcaaagatcttggtagtctacaattctttctaggccttgaaatagcacgatgcaataaaggaatttctgtaatgaccgcattttataatatgaattagtaaaggcaattagcactaattattgatattttatggttatttgtgaatttaattaattgtgagtcccattattagaaatgggtattagagttataattttttaattctggagattttatttaactttaggagtattatttgtattatatatgaattatgttatttttataatttttacttggcgacaacgaaaaatgtgatggatgactagtttaatcatatggataagtctagaatcttatttcttagtgggatgtatattggaggaaatagaataccgagtttaagcggggttatgatttttgaccattttacccctaagcttaagttagcctaagtttaagcaaaaagggcattttggtcattttgtcaaggggcttaggtatttgtttgggagaatggcaactggccattatgt

SEQ ID NO: 289716 - DNA, 504 bp, Cannabis indica
cacacaaattcaattacattgtagctttccaaacgcactcttaatttattatggtgtttagaagtatttggaattacaaaggaaaaagtttagttcaagatttatttaatcgtacaatttacttgtattattagcttagaaatagaattacatgaataatgttaggaacccaacaaatgcattaaccttttagtacaaactaatggagtgggtgatttgtcattttcctctggataaatgtctatagaaaataccatcgtaccaaatgcttcaataatagcataattatattagaacatttgtaatggtttggtattataaattataaatacactttattattaaaaaaaatataaacttaaataatttttaaaacttttcctcaaattctatgttaattttaatacttattttaatttcattttcatatattttttaactctacatatatatatattttttgggatttttacactagatgtcaaatttagcatcttttttaca

SEQ ID NO: 289717 - DNA, 718 bp, Cannabis indica
attttaaatttaatttttaggtatcggatgctttgtgttgattgaaaagtacacaagtagctaactttattggagaaaggtataatcactaaaactttaaaatttttaatttagtgtagtttgaatatctctgttattcatccgtagtgaagtaggttctgtgaatatacatgtactgcggtcggatgggtggatagttttaatattgttttgttagttttttattattttgtatgtttgtgttttgttttttgcatgtttaaaatttttgggaacgtccaattgcagtcgttatgctgcaaaaattttagtagaattaggataatatttgattttagtttctcttaaacttggttgttagaattttatcggaagtgactttatcggaagtcaagtgcataatttttggtataaggtatgctttcttggttgttagggtttgacgcgtaagtctcacaaattatattgaataatattttagaatacctaaggatgaataaaatgtcacataaaattaatttaaacataccaataatgtatcataaaacttaaactaaagtaaagataattatgtttctagaactagaaccctaaattattctattatccaagaaaacacttgactcataaaactcgaattaaatattaatgggaaatacaatgataattagatcaaataatctaagtcatcatcacatgttttagattattttttgtt

SEQ ID NO: 289718 - DNA, 616 bp, Cannabis indica
cttggaaaattattttcatactcactcatctttaatcttaagtattttagttacttgtcttttattttattttgtgaaaccaaaattctatcaaatatttgtgaaatagtttcttttgatgttagtcaactcccatgggttcgaccttgcacttacatgaacactatattctaaaacgattcgtgaacttgcgagtataaatattaaaacactcacttttgaggacaatattttttttttttcaaatttttatgattttagtaatatgagagtcacttcacaacagtcctacattgtttagaacttataattataggtgatatatttttacattaaatagatcaatattcttctattttggtttgtcacaaagttattataatttattttctatatgggtgatagatgaacttaattttatccaattagttataatttttttttaaaatagaattaaaattatatttttgtatttttcaatctttatcaagtttgaaataattataaaaaaagcatttaaatatttttttcttataaaaactattttttttttataattctttgtgttaatttgtatttaaataattaaaaatatagtaatttattgatgtcatat

SEQ ID NO: 289719 - DNA, 400 bp, Cannabis indica
gcctataggatatcctagaaacatgcctttgacaaatctagcatctagcttatcatcagattgatgtacatatgctgcacatccaaacactctcaagtgtttcaggtttggtatcttctcataccacatctcataaggtgtcttcaagtccatgactctattaggactcctattaacaaggtaacaagcagtagctaaagcctctccccaataaggctttcccaaccccgaattgagaagtaaacatctcactttgttcaaaagggttctattcatacgctcaacaactccattctgttgtggagttttcataactgtcctatgtctagttatcccatgctcattatgttggaatttattttaccaggatcttagatctactcacaagtatgttgtttaa

SEQ ID NO: 289720 - DNA, 501 bp, Cannabis indica
gttgctcgaccttcaccttttaactccacagctccatagggaaataccttgaccacggtaaatggtcctgaccaccttgacttcaactttccaggaaacaacttcaaccttgaattaaataataacacttgctgcccaggttgaaactccttccttactaagccttggtcatgccacttctttgttctccccttgtagatttttgcattctcataggcctcattacgaaactcctctagttcattcaattgtagtagccttttctctcctccaactttcaattccatgttgagagtcttcatggcccaaaaagcttatgttctaactccaccggaagatgacaagcctttccaaacaccaaccgatatggagacatgccaatcagtgttttaaaagcagttctgtatgcccacaatgcatcatctaattttcttgcccaatctttccttgatctctgcactgttttctctagaatcacctttatctcccgattagaaattt

SEQ ID NO: 289721 - DNA, 829 bp, Cannabis indica
ggtgtttgcagtgtgggtagtgtagtttttaacgtttttttttaaaccaatccatacatgcagtttttccaatttctcaaaccgcactcgcaccgcgaaactaaaaatcgcagaaatcgcaccgcaaaaaatggtgcgatgcggtacagtttttacgatttggactattaccaataattaaactatcacaaatacaacaaaacttgagcaacatttgtcaaaaataccataaggattgaaaataaatataaaaaaaaaattaaatttcaataaatgtaaattaaaatatttaatatttactaatattatttaatggatttaacaaatatttagtattaaaatattcttattatattaataaaataatagaataataaagaatataatatttggtgtaatttttagtgttgtggttggaattgaaaaaaaaaattagtgttgaaatattagatttttggtgttaatatgggacgtacactgttcactcgagggaccttgtcaattcacacaacactaaaatattattttaaaagaaaggactgcttgtgacatgacatgatacgcttcccaacgaaacaatcagccatgccctattatgttgtacgaattaggttttgaaattggggtttattttggcaccaagattgatcaagttaaaggtgaatgtgagaaagttttaaaaaatatattcattttcccaccactaactcatttggaacagcctatatataaacaggtgccccctttccttgtgagtaacacacattatctccaccatagttagaaaaaaaaaaattgtatacctcacaaattatagtacatcgaacat

SEQ ID NO: 289722 - DNA, 529 bp, Cannabis indica
aaagctgaagcaagaagtggcgaggatggagaaggagctcgaggaactcagcaaggccaaggagaaggagctcgaagaactcagcaaggcgaaggaacaggcggagcttgaggtcaagaaatcgcaggcgacgatcgtggagatggcccgcgatttggagactgagaaagagaatgggaagaagcagtatgatcaggcagtgtctgattatatctataccactctttccaaagtcccagatttcgacttttctcttctcggaacagaagccgctgagatggctgaggcttttcgtgccatgtcgcctactcagactcaaggtgggggagggaaccttcttgatgaggtcgagggcgcacaagctgaagaagtcgagaacgaggtcatcagcaaagtcgcggatgagactgctccggatgagactactcctgctgctccagatgcttagttatcctctaatttatgttgtttttaattttaattctctcttttttatatgcggtacaagggtactcgcgcttttgtactt

SEQ ID NO: 289723 - DNA, 509 bp, Cannabis indica
tttttttttgaataataatcataagatctattaattaataaattcgtttaaaacaatagaacacactccatctgaagcacacgacctgtagaaaaacaagagtctcttgccaagcaatgaacaaacttatttgcagatcgttttacaaaacacaaattgtgaaggcataaaataccgctctgaatcgcttggacacactgcaagctatctatttccaacatgactcaatctcacgaatgagttgcaatccaactcaatgcttctttaatgcctattatctcagcaattttgggttgaacacatccaatcttccccttcttgaatgcttctaccataacaccatgatgattctaagctacacaacccatgccaaaagacaagactcgaaccagaaaaaactaaaaggaaaagactaaaaattcatgtcaaaagacaagactaaagaaccatgttaaaagacaagactaatgaaaaaactaaattagtttcaacacataaatacgatcaca

SEQ ID NO: 289724 - DNA, 787 bp, Cannabis indica
gttttaaaaaggccatccttcgaacgctttttgaagcaaattcatcaaccaactcttcatatttatcgtctccaaacctcattttcaatcgctatcgatgctaatccattaagcctttcttgtaacatggtagaccgcaagtaggacttcaacaactttaactttgaaaaacttctttctgcagaagcaactgtcacaggaatagtcaacaaaattctatatgcaataattgtattaggaaaacaatctacgcctttcaaaaactttaatatgtcgatagctctcattttctctctaggcaatatttgccttaatagcttcaactccacacataattcattcccatcaatatcagattgttcattatgtttcaatgcattttcaaaatgacaacaacaagactttaaatttgcattgtctaatgattgtaacttgtcagaagtaaacaagaaaccaaaaatattttcatactcttgatattgttcaaatctcttagtaagagaagcaatggcttgatcaacaaggtaaagaaaataattaattctaaaagattcctctccagataactcaacagatggggtatttaaattttcatcaaattgtctttttcttcgaattgtgcgcctttgaggaaatactggatcgatattcatttcaatagcaatttccttagcattagccaaggcgttataaaaacctgtttctctatatcccacgaaaaaagaaattaacccctttattttgtccatagcaatatcaataagcatatcctttgattgtaaaagct

SEQ ID NO: 289725 - DNA, 550 bp, Cannabis indica
gaaaggcccggggaaccctgccaaaaccggctagccggtttttgtggccctgcaaaccggctagccggtttgcaccagtttccccaaagcatttcattccatgctcaatcttccaccaaatgccatgaaaccttccagagtacctaattagggcataaacaataatttccagccagtaattcacagaacaatccatcaaaacccaagttgccattaaagcccaaagctttgaactcaaagctcaaagtgatatcaaaccaacctaataaactcaaaaccagctgctataggttaaattcaactcaacctaatcataaaattcgaactccaaataaccctaactctaacagctcctaaaactcaaaatcaacacttgaaactaaataaaacttgagaaaaaccataactaaagagcaactagggtttaccttgaatgttctcctttgaatccttagctgaaaactccagaattcatcaacaatttcctttggccttgctggtttcgaagagagaagaaggaaggaagggattcttcttattttggtatttt

SEQ ID NO: 289726 - DNA, 746 bp, Cannabis indica
aaccacggccctgtacccagaactcgaacttaaataaaaatcaaaaaaaataaaataaaaaattatataacactacttttattttctgttttacaaatttaaaaaacaaaagtgattatagaacacgtttctattttttaaaatacacatttttacttttatttttgtgaattaaaaaaaattaaaaaaaaaatgttactaaaacgtccccttacaaattttagagaaaaaaatcaattattagagttgaatcataaaatcaactgtttaataattaaggacaacaaagcttgattagcaaataaactaataaacattgataaaaaaaatcaccttaatttaatcctttacaaaaagaataattaatctcaattcagtttctttttacaagaaatctaatttcagttttaatcttttattgaaggcctaaattaagttctttcaaacattaattaagtcaaattatagccagagagatcagttaattcaaatatgggaaattttatttacaccccaaaaatatctaaagacaccccattttaataatttttattttctatgaaatttatatcttttaattgtagttaagtttttttaaacttttttcttcccattcatattcttaaaaaatatacctatcaaacaaaaataaattatattttaaatactatgacaaaaaattaaaataaaaattatacgaaagttttttaaaaaaaataaaaagtatatatacatgagttagaaaa

SEQ ID NO: 289727 - DNA, 708 bp, Cannabis indica
agcagatctctttctaacttcttatcttggattctattcggcacacatttctataacagattcatctctaaagtcttcacatacatacttcccatctaccttaggagtgtgtaacttataaaacatccatcatgatagtacttttccttaaagatctattctttcatccttcttaataagcgagttttgtgaaatgccctgtcccagtctagtatagcatcaactatcctaagccattacctacttcctataggttcggcttcctttcataactaggtgtggggactgcttctttaaccatttatagataggtacaatcctatgcattagtatttagttagctattggtacattttattatgtgccttaagttgcactactagtgttggtgatctatggcgctgagcctgtgaaaactcttcaacaaatcgtctcagtcatgctcgcattccttccaatacctctattagatcattagccttaactactattgggtttttttggaacatcaaccatttgtgggtcagcagaacatacatccttagcccccacctctattggtctttcctttcacattgattctaattgatcttttagttgcaattgtgatctctcacaatctaagcctaaacattgaaaagattgatttaataaagacaaaagagtttaattctaggaagagaagattccatgcacatatctaaactt

SEQ ID NO: 289728 - DNA, 766 bp, Cannabis indica
agttgcaggttgtgagcgtcgtcctgatgattggcctttcaacttgcgacccactcctcgttgatggccacgcctctctccaagtgttttccgaagaatctcaagttctgaaacttgtgaagattcaggggcactattccgagttgtcaacatctcttcctataatacaaaataagttagaaatcaagcaaaattacaattatttgaaaatatttaaaagttattattttatatatcttacatatttatttttggcagcctcattgatgaaggtgttggtgtctttcttagtatgacattctttttgtctattccatgaaagcataatcaatacttatttttttagattttgtattgaaatcatgacatataattggtgatcaaacaattctaaacattaattactccaatggagaaagattcacaaatgaaattgaggaaaactagaatttcactaaaccataagctattctcaaataatattcataaaaaaacccctccaaataagtttagatcacagtcatcatcttaaacataaaaatttaaaaaacaaagaaaataaattctccgaagatcaattgatgaagctccatggtgtccggccttttgctcttaaaaattgcctcccaaaaagttatggctttcctttttagaattaggtctaaacacctatttttctttcaataaggagcaagcacaacatggaaaactataatccaaaaatttttggtaaaaaaatagtcaacgcaatagctaaagatacatg

SEQ ID NO: 289729 - DNA, 684 bp, Cannabis indica
atataagattgctacaaaactgatttgttttaggcccaagaacattcttcctgatgtagtttctttaaatcaaggaggtttcataaatgttaggtatatagcatataatatcatgatgtgtcaggacttaattagaaattattgaaagaaggtagctaaggccaattgtttgattaagcttgatctacgaaaggcctatgacacattggattgggatttccttgaggaaatgatggatgctttgcaatttcctaggaagtttactgaattagttatgacttgtgttagaacactaaagttatctcttatgtttaatggatccatgcatggtttttttgaaactaagagaggggttaggcagggagacccaatgtcgcaattgttctttgtgataggaattaaatacttaagtagaataatgaagaaggttcgtgctgggaatggagtaccttagcagaataatgaagaaaataggtgatacagaagactttcagtttcatgaaagatgtggggagttaaaataaaccatttgagttttgtcggatgatgtcttgttattttgcaggggtgatttcaaaagtgtctatttcatgctaaagggtcttaaactgttctcaatgacttcgggcttacacctaaaagaagtaaaacacaatattgtagtgggatgcatgagaatgagat

SEQ ID NO: 289730 - DNA, 944 bp, Cannabis indica
ggccaagcggtatacctccagaaacggctgggagtttcccagtgactcaaggagtatgcgttttcgagcataaccctgaagttactgggaaacccccaccgttccgagactacctatcaaccaaagagtacgctcatttgaatattaacgcatgtcgcaaatggctgggtgtatcacagtatctcaaggggcatataaccgcatatatggccattagaatactgtgacacacccaccatttggaatagcgattaataccctcgcaactcagcccgcgacatataaaaatcctaaaagatctagctaacagtcaaatggaagtaaatcttggcaatatgcgagtattcaagttgttcatctgaacaccagcgaatattcaagttgttcatccgaatatccgcgagtattcaagacgtgaaacagtgcctatgtgtcgtgtgcggttatgtcagtttacaggtcatattctatgaatttacccaggttttcttacctaaaacacatagcctcataagcacatacaagcatacattcctaaaaagcctttaaaatacccgaacccagaaggtaaagcatattttctccaaacagaaaacgaaaatgcaatgacttgaaaactaacctttagttctgatttctgcgattgctctcgaccacttctgagattgagaatattgtagaaaaagtggtagaaaatctggaaatgggtttttgaagtttctgtaatggagggaaagaggaagttaagagcaagagggaaaaatgggagtttttgattcgtatcaaagggtttaaatacccatatcccttattaattgggattacgacacgtggcagccagaatgcctaaggtcgcccaatctaacggccaacgatggccacgcctacacaaaaaccgaggagttttgtgacgtggcaccataaatgtaataaaaagtaataat

SEQ ID NO: 289731 - DNA, 403 bp, Cannabis indica
tttagatcaaattattattaaattttattttgacaaaaaatcagttaagggtcctatttgtaccattttagaaaaatacaggatctattttgttatttaacaaaatagagggtccaatcggtaatttttgcaaaatacaaggtccaaaatggtatttacccttcatggtcatttaaattatagttagttaagacatcctgcaaaattttaagaaattcagaaaagtttaacacgccgaaaaatacgttcaaacagtgtgttgcacacgtgactattttattttagggatattctaaactacttgaactttacggtttgtaacagttaactacaaaatttaaaattttggcagcataactacctaaacctggttccgttttgctctgtacacctccgtccaaaa

SEQ ID NO: 289732 - DNA, 680 bp, Cannabis indica
ctcgtgtaaaacttcgaaatcacatctccatgcgtcattctcgccgtggcgagatgcaatagtttcttgtgttgatgttttttatcgtcacgccttcggctttttgaatcttgatgcaattgacatttgaaaaccacggaacctgaaacacagaaaataagcatattatgtcctaaaagtattaacaaagactaaaaacgactctaaacatcgaccaaaacttagctaaaaatagcctaaaaattcccccaactagatctttactctcccttagagatggaaattgggcagttaatgtacggggaatgaaatccccgctacctatttatacccccatccccgccccatccccgtctaataaccaacggattcggggtaggggaatacccatcgggtatccattaaggtaaaatgaaaaaaaattaatttaaaataattgaaaaaaataaattaaaccaatattttcacaaatatttattatacattcataattcatagaagatgaaagataaacctacctaaaaaaagcataacctagtagaaaataaaaactaaatatgtctcaaagtttgaaaaaaaaaaaaaaaaaatcataacccaataagtataggatcatagtcgcatacctctcaagcctcccaacaaattaaaaagtaaacaaagatgaaattaagaatcga

SEQ ID NO: 289733 - DNA, 862 bp, Cannabis indica
cattacaaatcaacacccaaacataaaatatcaaatcagacacttaatagaaatttaccaaatttgaaaaagaaaaaaaaaattaccaacccatatgacaaatattgtcaaacccaaatctaaaattaatttacaaactcagctctgaaaaaatttttgccaaactcataggttcagggttttcaaggtttgggttttggaaaagagatccgaggtccaactgaggtgagaggagaagagaggagatcgagagagatagaaacaaacaaagaaaaaaaaaaaaagaaaaagaaaaagagaaaacaaaattccaaggaaaaaaaaaagaatttttctttttcagatttttgttttattttgaaatgaaaaaaaaaaaactgaaaagaaaaaaaatgatttttttaatttataattgttttaatttcaaattattatttttaaataattttatatgtggactaataaaattttgtcatgtatacactgtgtccacgtagatgaacacatggacagtccaacatggcacttagcacctaaaatagataaaaactgtaaattgctaacgatttactagttttgggaggtttaccgctaaaatttgagttttggagattaagtgcaaataaagtgaaagtatttgaagttatgccccaatcaactaaaaaaagcaaagcaaatgtattctttacttattaattttaatattttaatgtactttatgtatttttttttttaaaacagaatgtatttttatgtaaatatataataattacaaaatatattatcacatgacctacccaacttatcagttactgtggctgccacgtaagaataagtggccttagagtcaaacaaaatagag

SEQ ID NO: 289734 - DNA, 562 bp, Cannabis indica
aaaagtgagaggcttgtttccatattgttatggccggccactttgcttcccttttctcattttatttttcatttttaaatgccagtgtggtattctataaatagaaggtaaaggcttcaggtttcacacacacattactgcattattttctttcactcaaacactctgaagccgccactccctctctctctttcttctctgttttcaaaattcccttgagtgatagagtagtgcccacacacatcaagtggtacctcaatcatagaatgtaagactacggaaaattagcatcaaagaaggagagacggagatcctgatttagatcttgattatgctctgctacagaaaggaatcaagggctagagatctgaatggaaggagtcattatattccgctgcacccaatgtaaggttttcttaaattcttatgtgtttattttcattgttttataattcatattaggatgttaagaaaacatagttggtagtaaatttagatcctggtaaaatatttccaacacgatcatgttcccaaaatgtatgtatcacccagacgaaaaggt

SEQ ID NO: 289735 - DNA, 446 bp, Cannabis indica
gaggttgcatacacttcgacggtacaaattctttaaacaaagcctaagtttacatatttggactattggtaataatttcagagataatcggcgttccaagcccttggcacaatggtttcgtccatcctttttagcttataggttccggagccgatctcatcgtcaatctcatatggaccttcccaatttggcccaagtacccccactctgggttcttgagtggctgggaagactcttcttaagaccatatccccaatagtgaattttctatttttaactttagagttaaaatacttagtcaccttcttttgataagctgccattcgtatttgagactcgtcacagagctcttcaacctgatccaacgcttcctgtaataaagcttggtttgtagctggatcataagttgttctcttgtgggacgggaataacgtttccaccgggac

SEQ ID NO: 289736 - DNA, 518 bp, Cannabis indica
ctcgaacccacaactggagatgtatttacagcacgttttgctgattgtcattttgatgagacaagtttcccagctttagggggaggggaaaagaaacagctggaaaaagaaattatatggaatgcacaatcattatctcaatttgatcctcgtacaaatcaatgtgaacttgaagttcaaagaataattcatttgcaaaatattgcaaatcaattaccaaatgcattcactgacccaaagaaaattacaaaatcacatattccagctgaaaatgctccaattcgaattgaagtcccagaaggacaattaattaatgattctaaagcacgtttgaaacgtggtagaccagtcggttccaaagataaaaatcctcgaaaaagaaagggagcaaataatcaagatggccctaatgaagaggctgaaaatttcgaggaagatgttgacataaacaaatctcttgaagagattcaggtacctgaaaatattagcaataatgagatctcaataaattatgtcaa

SEQ ID NO: 289737 - DNA, 564 bp, Cannabis indica
accgtttcccgtctggtgataaaaaaggatctgtacctcgaaactgcagccgctgtggcagttcaggccacaacagagcaacatgcaaagcccgcatttgaggcgtagtatacttattcgttgtaataacatgttttctatttcaggttcgaaactgctttaaaataatgttgaggttgaatattttttgttgtgaatcaaagacaatgttaaatatttttacaagactaagaataagtatgataaatctactatgaagaactgagacaccgttagactttacaagactaaataaacagaatacataactgtaattttaattacacaaaatatacaatgtcaccataattacacatataatcagccgacattctggtaaaacaaatcaacacaccaccgttcacgaaacaacttgatccggccttgcgtgacatcggttaatccacgttgcatcatgagatgctccacatactcaatgcaataaacgccacaatcaccactaaatgcaacataaaatataaagttagtacaatgtaaaacatattttaatactatagtactttt

SEQ ID NO: 289738 - DNA, 683 bp, Cannabis indica
aaaatagtatccacttctccaaggtctttcattttaaaggttgaagaaagaaacctcttagtttcttctattcctttcatgttatcactaaggattaacatgtcatccacatataggcaaacaattatcacataatttttacaagtttttgaatacaaacacttgtctccattgttatgcctaaagccatttgaaagaatagcattgtcaaacttgacatgccattgtttcggagcttgctttaatccatataaggatttcttcaacttacacactttatgttcattgtttggtaggacaaacccctcgggttgttccatatagacttcctcatcaaggtcaccatttaggaatgtcgtttttacatccatttggtgcacatacaagttgtgtaatgaagtcaatgcaaacaacacccttatggtagctgttctagcaacaggagcataagtatcaaaataatcaataccctccttttgcctaaaacctttagctactaacctagctttaaaggtttgtataaagccatcagtgtgatatttctttctaaatatccacttacaccttgttgctttgcatccttgcggaagatccacaacatcataggtgtcattggagagaattgagcccatctcatcatcaaatgcttctctccaaaatgcactatctctagattgcatggc

SEQ ID NO: 289739 - DNA, 361 bp, Cannabis indica
gggttcgccccattggaataaacaactgagaaattctcattcacttctctgtctcttcttcttcttctttcttctcatctattttacattattttataacaatatgtgtattaatttataattatataaattcagaatcacctaacgtaatatatctaagaaaaaataaataaataaataaataaacttattttaaattaaaaataaaaataaatgataaacctcgggactacaggctagaaacgggtttctaacaaagatgatcgtgaaatgaacaacctgtttctgttagaatttggggaataaggtgaatagggttccatctcaaaaccaattggcaatgggaggagtagcccattca

SEQ ID NO: 289740 - DNA, 850 bp, Cannabis indica
gtaaaggccaacaattaagaggcccagatatatgaggaccttttatcccagttcttagataaaagctgagataaaaagtctcacttaaaatgttaaggttgtgtttggcaaatgcataaaatagccttttcaacactattttttgtttgtttgccaaacaaggcctttgttttaaggttccgaatgtaaaagtgggaccaaagttttatcccacttttagttttttcaagtgtaaaaagtaggataaaaagtcttttttgttgtagtgatgactaagaagagtaagacattgttgctgaaagaatagagaaccaatcagcaaaagaatccccatcaatacttttaatagagccattgaactaatcccaacatagcttgacaaaagagaagtctacaagtacataagccacgatttcactttcaatttgactgaagaggtttcgttcttttgctatggcaggagtcggcagcttcacgggatgagacaatgagaaaagaaactttctttaatctttgtttggtatgggtggaagaaaatatgaaggagagaaacagtgaaagaaaagaaaagcattttctttcttggtaaaaaaaaaaagaaataaaatcatgtgtacattgtttcatgaaaattgattggaaatgaactaatattgttttttacctttatatattttaatattttttgtaatagactatttgaactatattttcggcatattaattttttttttcaaattttttaaaattttacaaatattttaaataattacaatgtacacgactataagaaaatgttaaaaaaatactcctaaattatattatctaaaaaaataatattatgttatct

SEQ ID NO: 289741 - DNA, 235 bp, Cannabis indica
tctaattttagaattagaattgattaactaaaatcaattaactgagtcttacaagcagtttgtctcaactagtatggggaccatgggcctacataacttattaattcctcattgaaccactataaaacttagaattgcactctcagttacatagaacactctatatattccacaatatagatacgttattgagcgctctatcatttatttctatttagctaagctcgaaagaaat

SEQ ID NO: 289742 - DNA, 752 bp, Cannabis indica
ccaaagtcactctacccccctgacagaaatgccttaaaccaatcggcgaaggtagatttcgtagaaaactgtaaccccacacccgacctatgccaacagattgagcaaaatggcagccaaccaaaacatgaaaaatggtttcttcatcaaaattacaaaacacacaacgtggatcaacaggaacatgctttgtacgcaattgggtacgggttgggagacaccccgagatagctttccaagcgaagtgaagaaccttgggggggactttaactttccagagaaccttccacaagtcagactccaactgaataccccattcacctttcaattcttgaagatagcggtaggagctcttaaccgagtaaaacccattcgactctttaccccaaaaccaagaatcaacattaacattatcacttagaggaacttgcattatcaactcgatatctagaaatgacacaagggttcacattagaaaacagccaagggacattaagcataggggtagacacaccagacccgattctctttctagcaccatcatgaaccagtcgttgtgattcaaacacactccgccaaataaaacttggatttggacctatctcagccgtaagaaaattaccatttagaaagtagcgggccttgtaaatacgtcccacaaggaaatcttcatacagaagtagacgccatccctgctttcctaacaggaaagattgtaatcccgcaaattacgaaagccaatcccatctgaa

SEQ ID NO: 289743 - DNA, 590 bp, Cannabis indica
attaattaacccatccgagtagaataattaatatcacatatctaaataattgaccgcactatattttcccttgaaaaattctaactagcaagaggaatgaacagtcatattaggaaattattaattgttaattgtcatcatgcatgaagccaagaataaattggggaacatatatatatataaatagaacaggaaatatatataattttatataaccacagaattagttgaaattattattgcttataattaattatagaagtatctaaggtgtcatatacacaactagctagaaaagaaaaaaaaaaaattgagaaaaaaatgaatcttaataaattgttattactatagtgaaaataaagatgaggggtactataatgtgtatatatatacatatatataatgaaatttagccaatagaagaaagggagtataagaattaaaagaatgcagaggccagtatggggggaattacagcatgagagttagtaatagaacgaagaagctgcagcttctcatgcagagttgcggctgatctcttgtgctccctagaaaccatttttactattgataaatgacgatgatatata

SEQ ID NO: 289744 - DNA, 592 bp, Cannabis indica
cacttgctcagttggcctctgaactgtcttggttacaggaattactcaaagaaatgaaaatcttcctcactgctcaaccagtgatctggtgtgacaacttgaacgcgagtgcacttgcttctaaccctgtataccatgctagaaccaagcacatagagttagatgttcattttatcagagataaagtaatgaacaaaaggctggagattcgatacataccctctcatgaccaaattgcagactgtctaaccaagggactgtcaccttccagattccagtttttgatcgacaaacttcaagtgaaagaatccccctttcgtttgaggggtggtgtgaagaaataaaggtgacatggctgctgtgttggctgatgatttggcaatccttttctccaatatactgggaaaatatcattgctgaatattcactaaagtacaaattctgttatgcctttttagtgtattgttagcattgttttcagcaatattccttttgtataatctgctgccatctgtcccttgtatccaatggctgtaatcatttgtaaaaaccttaaatagcaatgaattcactcatgctcattgagctgaga

SEQ ID NO: 289745 - DNA, 584 bp, Cannabis indica
attagaatggaaacttaccttcatgtaacgcccgtacttttcataaattactaatttagttacaagcgttaaaatgcggaaaatctataatgtcgcttttatttataaacataaaatatttcatatttgagctcagtttggacttaaaagacataataattaataaataaaaataactgcgacattaatttaataacactaaataaaataaatggagcgtgccctagaccaccctcagttatatggtcctcagcgagtacacacacaagcctccaaggtctcacttgccaccggctctctaagttttagaaccttaatctgcacatggtaagtttgataagggtgagctactaaactcagtaaggaaatgcttgtcacgtagtcacataaaataaaagaaaaaaacatataactaaaacttagatgcacatatttagacaaatagcaatacatataagcttaatcttatcactattaactaatcactagtttctaagctaagtcacataataatggttatgccggagttcgactttggcaaataaactcgaactattagactaaatggcggagggctgggttca

SEQ ID NO: 289746 - DNA, 986 bp, Cannabis indica
ttttttttttgcagcatttttttaaaagaaagttaagggcgcgtttggaaagccacctgggaattggaattggatgtaattggaggtaattacacagtttgacgtgtttgtgtggccacgtaattacatagtaactgtgtaattagaggtaattgggaggcctcaattactctctccaattctcatacccccatgagaattgggtgtaattacactgtgtaattacataccaaaaataaattcaaattattttaattaattgatatgatattttaattatttttaatgtattgactttccctttttctatcaatcatcaaaaaacaaggttggattgtattagcatgttgtgtacttcacaactttattcgcaagtggaattgggatgatgaatttttcgaagaggacatggaaaatgaaataggaaattgtgaaagtttgaacaatattgattttgattcagattcagatgaagaacttggtgacgggccaacagatgatgacaagcaatatatgtttaattttagagatataatagctcaaaatatatggaacgcaagagcaattagatagtcttaaaaaaaattattttaaatatttgctactaaattgttatagtttttgactttattttatgaagagattattatttatttattatattattaattgattgaaatttatttttaaatattataatattaatttactgtgtaattactaactatcatgtcaaacatgatattaggaattcacatataattaccacttgacatccaaacacacccttgtaatttttaaaatactaatgtaaatactatacagtgtaaatactaagggctaccctagtaaattgcaatgcatagtaattatgcactgcatagtaattacacatttgtttccaaacagaccctaaatattagcgataagatctgacaagcaactctactagtttcatgtgttggcgaagatttaagagttctatt

SEQ ID NO: 289747 - DNA, 839 bp, Cannabis indica
attagatatcgattctcatgtaatttaaaatgtcgtattaggtcgtattgtattatattgtattatattgaattggattatatatcatattttatagaataatttgcggcataacctccttaagtggtcaggtttttacaactaacccccaattctaaaatttggtggtaaaactccctaaactcgtgttctgttagcagtttaacacttccatccatttttagctgttaactgtcatggtggaatgtccacgtagtacacagtgtacacgtgacacaattttattggtccacgtaaataaatatttaaaaaaataaaaaattaaaaaaataattttaaaaaaataaaaattaaaaaaaaaccgttaaattctttttctttttcttttccccctccaattggcatcagacagaagcaatctctccctaccaatatcaatgtaaaagaaaagttcacaattcaaaaaatttataataacccatgtcattattcactaaaatactttagggtgattaccatatatcatcatcatcatcatgttacaaatactacagtagagaaaaacatatatatgggtttcaaaaattccacaataaataggtcaatgataagcacacatttgaatgagcttgaatggcgtccaattgcttgcctctaaaattcgcatactcgaaatgccagcgcaagagcttcaccagagcttctttgctgtaaatatggttgtcgttcctgcgactcgatgagctctgcaatggcaacggagacttcttcatcatctttcaacgatagcttcgaagattctctcgtctcttttggtcactctgctaattcgcccccct

SEQ ID NO: 289748 - DNA, 861 bp, Cannabis indica
ttaacattcattgtataatttgatcgaatctagatatttacatgcatacatttatgcaatttatgtgcaaatgattctatggaggctacgttaaataataaaattaaataaatttgcacgcaacaaagtaaaaatttactacaaacataaaatctaaatttaaatgtctaatgaaataaattaatactaaaattgtattgttacatttggatttagatttttccagtcatatggtcatcattggataatccttgttctatgagcatgatatgagatttgtggttgtttatatagagcatgaaaatctatgtatataattaatacaatatcctattatttaacagaatattctttattaattttgtaatattattatatatatttaaagataaaaattatataaatatttaatataagaaaattttaataataaatattttatattagtcttctggtcatacttagtgtgcttatattgtttttttttttcttttcgatcaatatattagtagagcgaaacttataacgattttatatcaatcgatacatttcacataatttttaaaggcacataatcttaaaatataatttatataaattattttctaatatcaaaattgaaagtattttaagttaaactatatttgtaaggtaagtcaaacttaaaatatcatgattatataaagtactaattattgataggagacatatatatacacttatgttgcctcaatatttaataaaaatctcaaaaattataatctcacatctcatttcaaaaattttaaaaaatatatattatttaattaaaaaaatttaaatataacactcaatatttcttaattaaacttaattaaaaac

SEQ ID NO: 289749 - DNA, 503 bp, Cannabis indica
gaggcatggcaggaagaccctgccgtcttaaccttagaatttcttcatcttgttggcggattcgatcttgcatttctgcaaacctctgctcccaatctggaggagcttgtggtggatctacagaatgaccaccctgagctctaccacggccgcgaccacagggattctggggaatttgatttccctgactgcctccaatcttaaccatattaccctgacttcttgtattttgctgggaatccattttataggacttagcctgcgaacccataagccaagcaggttagacagcaatcataaaacttaataccgctcttatggacttaaaggaaacacacttaaaataaataattataatctaatatgcttcctatcatgctttaataatcatttaaattactaaacatgtacgtgcttactcaaccgtgaaccgagctttctctgatgaagattgtacatgtcttggcaagcttcagtagagaaacctggcggctctgatacca

SEQ ID NO: 289750 - DNA, 507 bp, Cannabis indica
caaactcagtttgaaggaacttctgatgttaagcgttctaggtttattatgcttcagaccaaatttgatgatcttagaatgtctgaatctaaaaccttgtctgagttttatgaaagactatctgatatagctaatgaatattttgctcttggtgaaaagcttgatgaatctgttcttgtcagaaaaattgttagagttcttccaaacaggtttgacactaaactcttggctatggaggaagcaaaagattttagcaagatgaaggtggaggagttaatgggttctttgcgtacttttgaattgaatcaacaaatcaagcagaaggacaaacccaggtccattgctgatagaggtaaaggtattgcttttaatgttgctgaaaaagaaatttcagatgatgaagaagatgatgagatggatgctttaactaaaaactttcaaaaaagataagtgacaaaagaattttccaaaattctccaaaggtaatactttttcaaaaccttcaat

SEQ ID NO: 289751 - DNA, 460 bp, Cannabis indica
ataaatatgatcaaacgtaactcaattatgtctaattttgaatttaattacttaattatacatggtaaaagcacatttgatcatattgataaaattaattactaaattagtttaaataaacattacaaaatatagagtagagtaattaacaattaactcttaacaaattactctttgtaaattatcttgcttaatagtatgaccaacctgtgatattattattattattattattattattattattattattattggtggagccttaattttactgatatgatgatgaaactcaaaaccaactcagaatttttcttttcttttctttctaatctttatcaatttatacttttctaaaaaaaaaacttagttcataatcacaaatttactccattaaatcatagcaattttgtagctatacagattattattaatattatatatatatatatattaattt

SEQ ID NO: 289752 - DNA, 931 bp, Cannabis indica
agtctcatccgcgactttgctgatgacctcgttctcggcttcctcagcatccgcaccctcgacctcttcaagaaggttccctccaccaccttgggtttgagtaggcgacatagcacgagaagcctcggccatctcagcggcctctgctccgaggattgagaagtcgaagtctgggactttggaaagagtggtgtaaatataatcagaaactgtctgatcatattgtttcttcccattctctttctcggcctccaagtcgcgagtcatctcctcgatcttcgcccgcgagttcttggcctcgagctcagcctgctccttagccttgcaaagtgcttcaagctctttatcctttctagccgcctcttgcttcagcctcttcatgttctcctgaagctgggcattgtgcctcttcagcaagtcggcttccttcgaaccagcggcagcagcttttaggaacagggtcatcgactgcgaggccaactccacagagcgaggaacaagctcctcagaagggatcttctccgccttggccatgaactcctcgcccacgaacttctcctgcatggccagaaagtcgcgagctcggacagttggctcgatcaggactttcttccccttgtcctgcgtggtcttggccagcttcttggaagaatctgcgacaagagtagccaccacgtcgctctttctcttctgggcaacaacgggtgaggtcgtcgttgctccaccctttggcttgatcttaaggacgggcgcagacttcaaaaaagtcatctctgcgaggataaatgaaagataagtgtaaataaaattcaagacatcagtttataataagagataaattacctgagattggtcgagaagtttgcttggagaggcgtttgtctatccgctcttgttgcctctcagacggttctttgtatactggctctct

SEQ ID NO: 289753 - DNA, 542 bp, Cannabis indica
aaatcttctcacctgttgtcaagcaagcctcaataagaatgatactgtcaaaggctgctaaatttgatcttgaggtggatcaaatggatgtaagaacagcctttctacatggaaatctagaagaagagatctatatgcaattacctgaaggatttgaaaccaaagacaaagatcaagtctgtctcttgaagaaatctctatatggccttaaacaagcacctagacaatggaacttgaaattcgatgaatacatgagtaagattggctactgtaagagcaactatgatccttgtgtatattttgctaacaaaatctacttgcttttgtatgttgatgatatactggttgttgggaaggaaaggacagaaattgacaagttaaagcacctgctatgtgaagagttcgagatgaaggatctgggaacagcaaagaggatactgggaattgatataaaaagagaaagacctcacaagattactctatctcaaagcaattacctcaagaaggttcttgacaagtttggaatgcaagattccaaagct

SEQ ID NO: 289754 - DNA, 859 bp, Cannabis indica
atatatatatatatatactacttgtgtacactgttacatttagttacagttggtgtatatatatatactcatattcatataatcccaaatatatatattttcaatacgtatatacatatatatatatctttattcatactgttcatatatatatattatatacttatacacgtatggtatatatatatattttcatttttcagtatattacgtgtatatatgtttatatatattattgtacattatatatatgttttatcgtcataataatatttataatatcactttcatttatttataatattttatgtgatatatacatgcatatatatatataaacatgaagttcatcggtccattgtttggttttatccgttttttcattttttttggtgtttatttcgaattctaaatatattactatattcgtatagtattataaatcgatctaagcattgaaaatcccttgaaaaacttaaagatgaaaattttttcagttaaagctttttaaggacccaattaacttcgtgttattaaagtttatattttttcgtgttttcgtacataaaatctatgtggatctctttattatttgatttagaacattttagatttgaaaacacgcaatttcgtcgtcggaattgtctattccgatcggatttgggtcgggttcgtcggacccgcatgcacaaaaacgggtcaaaacgacccaggttggttgtaggagacgactccgtacgacatgttcgtttttcttatgtgaaaaacgacatgtcgtttttaagtagagtagtttttttggccactccgtacgacgtgtcgtttttcccttatgcagaaaacaacatgtcgttttttc

SEQ ID NO: 289755 - DNA, 515 bp, Cannabis indica
ttatgatatcatctagaggagtgcgggatgcgccaataaggattgcagacaaggaacttagtggagatctgatagagctggagatgagggattacgatcttatcttgggtatggattggctatcacgacatggagcaacaatagactgccgaaagaggacagtgactttcacccctgaatctggagaggcattcatatttgaaggaatcaaagtcaagtcaagcttaccgctagttacagccctgaaggcacaaaagatgatacgtgcgggatgtcaagcatacttggccagcatagtagacaagtcaagagaaaccaccctcaagccagagaatgtccacatagtatgtgaattccaagaagtttttccggaagacctaccagggctacccccagatagagagatagaatttgtgattgagttagcgccaggcacagcaccaatctcgagggctccataccgcatggctcccaatgaattgaaggaattgaaggctcaactacaagatctttta

SEQ ID NO: 289756 - DNA, 659 bp, Cannabis indica
aatttactttcctatagtcaataaaattttcaagaataggacacatatggtatgtgcatccagaatcaagaatccattcttttgtgattctttgatctgaaaccatgtacaagtcaccatcagatgagcaacgatctgattcttcaacattagaagcagaatcatgcttcttttctctgtcttctttgagtttgttcttgaactcaatgcagaacctcttgatgtgacctactttcccacagaaataacattttctgtccttatggtattttcctcttgatttcgatcttgactgggatctatgttggcctttgaaatgatcctttctgtagtgatctctgcctctattgttgtctcttcctctagccaggtaagcttcatccttgaccttgtctttctccttatacatttcttgttctttggacttcaaggctccaagagcatcatcaagggtgagagtatctcttccatacttgatcacagccttcaattcttggtatgcaggtggcaatgatctgagaagaatgacagcttggctttcttcatcaacagtgtgcttcaagttagccaaccctataatgatttggttaaatacatcaaggttatcatctaaagacaaatgagaagacattttaaaaccatataaagattctaacaaa

SEQ ID NO: 289757 - DNA, 670 bp, Cannabis indica
ttgtattttttctttttggacctgccctttgggtcaggatattttacatatatatatgttcactttgatacatattttttttgactttgcttttacttttagcctattttacatctgtccgtgtggtatgccttagtacccccctgagtggcatgaaaactttgttttgaaggcactcgttttatttgaaacttagaggttacatacacttttacggtacaaactcttttaacaaggcctaagtttacattttggactattggtaatacttccagagatgatcggcgttccaagcccttggcacaatggttccgtccatcctttttagcttataggttccggagccgatctcatcctcaatttcatatggcccttcccaatttggcccaagtacccccactccgggttcttgagtggctgggaagactcttcttaagaccatatccccaatagtgaattttctatttttaactttagagttaaagtacttagtcaccttcttttgataagctgccattcgtatttgagactcgtcccagagctcttcaacctgatccaacgcttcctgtaataaagcttggtttgtagctggatcataggttgttctcctgtgggacgggaataacgtttccaccgggaccattgcttcacaatcgtacgccattgaaaa

SEQ ID NO: 289758 - DNA, 869 bp, Cannabis indica
caaaatcaagtggggcccactacaacaccatggccggccacttattgtggtttttcaaattaatattttcattattttaatgccaaataattcctaacctaaacctagtagttgcctataaatagaaagtgatggctcagtcaaatcacaagttttcataagcttttctgacagaaatttctctcttcagaaaaactgagccttccccactttctatacctggccgaaatccctcttctcttttctccttcatcaatttcgaaccctagtgaaagagtaagtgcccacacacagcaagcagtaactcaatcatagattggaagactgtgaaggatcaaacttgaagaagaaggacattcgggctcagatcttgattatactctgctacagaaaggatacaagggttagagatctgagtggaaggagacattaattccgctgcatcaatgtaaggttttcttaactttatatgtgtttaatttatcgttttagaaagttcatatttagggtgtttaaacaacatacttgtgagtagatctaagatcctggtaaaattaaattccaacaatttcctgtgtagatgagatcatcaacacataaagagacaattggtgtattcttcataccttgtgtttttatgtatagtgttggctcactttttgctcctcctgtatccttattcagtgaaatagaggttgattctactataccagactcgtggagcttgcttaagtcatacaggttttttttaagaactttatcttcctattcttgcaccacaaacccttgaggctgctccacataaatttctccttcaagataaccatttaggaatgccgagttcacatcgggttgaaaaatcttctatt

SEQ ID NO: 289759 - DNA, 475 bp, Cannabis indica
attgacccagatgaggttgatagaggattaagggggaaagggacaatggtgacagtgtccaaacttgaactagatcaagctcaattagtcgtgatgaccaataatgcagaggttcaaccatatataacgtaagtagcttttctttgattaacattacttaagtcacgatgaacaataacttggtttaccttacttgtttgacagtgaccatatggagctgttacaatcaatggttccaagaaatcataaaaataaacaaaaatgggttgcagacaaacatcgtaaaactttctttgggttgttaaggaataccattatagcaaagttgaacgaaccgaatcatggagtatctgatgtgttgagtcgtattgcccttggaccaacttttgtggtagcaaagcatgaagcgtaaattgtaagggagaaacgtttccatacaaagtcaggagatgatgctcgagaggttcaaaaaagt

SEQ ID NO: 289760 - DNA, 535 bp, Cannabis indica
ctgaacaagaatcgtcgaatcagaaccttagaacaagactagaaccgcgaccaggacccggaccgagacctagaaccgaacactgacctagcctcagacccaaactgagactggaactcaagcccggacacggttgtgtacccagaccggaactgagacccgtacctggacctaaatctgggaccgatcccaaacacagactgggatcgaaacgcttgacctagatctggaccgagatcctgacccaaacccaaacttggagccgcactcggaacccgaacttggacctggacccgaacctagacccagatcggggtccagacctggacacaaacccggacgcagactcggacccgaactcaaacccacacctataatcagacccaaagctagacccggaccaggacccaaactcgaaccaagacaaggatcaaaaccaaggacttagaccaagaactgaatccagacttagatcgggattggaaattgggactcggacccaacctagaccaagacccaggacgcgaacccacac

SEQ ID NO: 289761 - DNA, 1072 bp, Cannabis indica
gaagaagcggaaaagggaaaatcgttagggtttactcaccattatatttgaatgattcgatatgagtttgggccgctgctttgactggctagcccgattcaagcccagcccatatgttgggaaatcaagtacaaaattatctctttcagaagaaaaaaaagtacaaaattatctatttatcaaaaaataaaagtacaagaagtttttattttatttttacggtagtaaagtaaagtgtttgatgaatgagtgtacttttgactgacattgtgaaattaccataccttttcctttttttttaggaagacacgtcacatgcatagtacgttttctttttttttttttgtgcttaaaggcaaaatctatatttgtgttggttaatttttttctattacaatcctaatactaaaaaattatattatagagaaggtggccacgaggctcgctgacgggctcactaaaaggcttgtctttgtgtttaaactatagtcccattttgtcaaatttcagattccggaaatcttataattgtggtatgggtatattaaaaaaaaagggtggagaatcaaaatggcctaaatttgataattaagttagttaaatctctactttttaaaaaaagttaagaaaatagtcaaaatgtaataaattaactaataaaaattataaaaaatacatttatcacatatttttttaaaaaatatatatataaataataaaattaagttacataatttttttttagtattgcatattattatattgtaacaaaaataaataaatatattagatcatttaaatatatacaacagtattagatatatcgtagtacagaaaaattaatataccgtagtaataaaattatataccacaaaaaaattataacaatgctaaattaatacttaaaaaatatatatatcatgctaacaaaattatatataccaccattaaaatatgaatacataccaaaaaattaatttatatataataaaatagaaactaaatatcatattaaataaataatatattatagacaacaaaaatcacataccatacaataaaacgtatatac

SEQ ID NO: 289762 - DNA, 715 bp, Cannabis indica
cacttattaagggcgaaactgtagagaaagagtttatagggtatatttgttaaataagagaatttggttagtctaattaataaatataataaatgacaatattatttaataattaattatagttattaaataattaaaattttcatttaaatggttgaatgtgaaaattggcaattttgagaaaatgggatacagaaatgataaaacaggaaagttgcaaaagtgaggcccatatccacaagccatggccgaccacatgcataggttttatcatttaatattttcattattttaatgccaagtaattcaaccctaaccctatgtggtattctataaatagaaagtaatggcttcaggaaagtatcacaattgcatctcattcctttcagagacaatcctaagccattgccgccacctctcactctctttcttcatcttctttgttttgaaatccctaagtgatagagtagtgcccacacagagcaagtagtacgtcaatcatagtgtggaagattgtgaagaatctagatacaacaaagaaggacattcggggtcagatcttgataatactctgcaatagaaaggatacaacggttagagatctgagtggaaggaggcatattattccgctgcacccaatgtaaggtttctcatactttatatgtgtttacttataatcgttttagaagttcatatttaggatattaatcaacat

SEQ ID NO: 289763 - DNA, 519 bp, Cannabis indica
tgatgaaactggtttcaattatttttcagtgtatatcatttttgtttcttgatgtaaaaaccactttcttggtgatttttctagtaattttgctggcgacaatgccaattttgacgattttttttacgccggtaataactacggcgattttttcgacaacggtaactactccggcgactttttcggcaccgacatcaaactccagaatagtcgtcggacttggcattttcaccggtaaaattactggaaaaatcaccaagaaaccggtttccaagaaaccagtttcttagtgacttttccagcgaagatactaattctgacgactttttcagcgctggcagcaactccagtgactttctcggcaccggcggctactccgacgatttttctggtgccgacagtaaactctggtgactttttccacacgaatgacaacttcggcgatcactatagttttatttattttatttaaaaaaaaaatatgaaaggaatttttatattttttatggtaatttaatt

SEQ ID NO: 289764 - DNA, 620 bp, Cannabis indica
agatgaaccaaaacatacacaaatgaatgaaaaatacttctgtttctttattgttgttgaataaaatggattacattcaaatggagttttatttagggcataaaacccaacagaacaccctagttggagtgggtctcgctggagcccttggtgcttctgttctaagttgagggcaatccctcttgtagtgtctgggcatgccacactgaaagcacccttgccctctacactcacccagatggtgccttttacaactggagcactctgggtaggaatatcgggtctcagcactaccttgacgaccacctcgactctgattccctcggaacctcttgttctgtcccgagccaacggttgcagtggatgctttcctcttctggaccatggccgaaccactacctcccctgcaaagcctgatgtaggaggggtaggagccccgccactcactggagtcctaaccgactcagtcatacacccaactacgccctcagctcgcagtgctttttccaccatctcagcataggtggtcttgtcgtctgtagtaatcatcaggtcatgcttgatcttcacattcactccatcaaggtatttttccttcttactgaaatcggttggcacaa

SEQ ID NO: 289765 - DNA, 601 bp, Cannabis indica
acgaaaatgggtagaaagaggaaatggtaccaccaatttctaccaattatcaatcgatgaagcctattggatgttggaagacatggcggagtacaatgagtggtgttgtaattgtccaaacaatgatcatgtttgggaggacaactacaacaatttggagccaaattttgacacttacactcaagtaccaaatgatgagaaattgaaggattttcaagagttcaacataaaagaagagcctcatcaaatggttcaaccaagctcacttgaggcattgatgatggagttcatggcgaaaaatgatgccttaattcaaagccaagcttcatccttgaagaaattggagaatcaatttgagcttttggtcaatgagttgtatgctaaaccccatgaaactttgggtattgatatggaaaattcaagggaggaagaagaaaatgaaaatgtcattttgaggagtggtgatgagttggagatacttggggaaaattttgagcaattacaagagctcacttcaatccaaagtagtgaaataaaagataaggaagcaagcattccaagttggtcaacatttattgctgctcataatgctgtagcatta

SEQ ID NO: 289766 - DNA, 555 bp, Cannabis indica
catgcaaaaatgtcgatggcgcccttcagtatttttattattttttctttttcccccggatctaggctctttcctagccggagtactttggtggagtcgaggttgcacactgatatctcctcgacatcctccattggttctacaattttttcggaccccactcggggatctaactcatcttcttcaaccatttctggctcaatggtttccctgaccatcagtacgggcaggtgggttgcaacattgtaacattgccttgcctccccttgatttcctctcactgttcctattccagcttcctgggtagggaactttaagcacatgtgtcgtatggacgtgactgcgccgaaatcaaccagggccgatcggccgaggatcgcgttgtaagcggtcgggcagtctaccaccacaaaagtgcagtatttgaacgtgctttggggggtgtccgggcaaaagctgacaggaagtctcactttccccatagggatgagcgtcattccgttaaaccccgcgagttggaaaccactgggttagaggtctcggtccgtcaggcct

SEQ ID NO: 289767 - DNA, 561 bp, Cannabis indica
tgcgagtatgcatcgatatcatgcattagagaatgcattctgttctgactttttctttagttttattattattattattttattaaaatatataataattttaaagtaataataataataattcagtaacaattaaattcaaattttggtttaaaatttattaaggatatttaatatttagttaaattaattgaaacaaaatatcaccaaagtgatctcttttgtgtagattaatttaataaaaatattatgataattgtgtgtatgtaattcataaatttattaactaacccaaaggtgagttaatatttggatgaatttcatgcatgtttgtggtgataaatgtgtgacaattataaggtattttgtgtgaacaatgtgttagtccaaagattgcatattgtttgacataatttattgtcaatgtttgatcactacaacaagagtaccgcttacattaatattactgtccaaaagcttaaatattaatgttgtgtttggtatcttgagatgggattaaccattatttgaatttttgttttatttggattcttatatgag

SEQ ID NO: 289768 - DNA, 635 bp, Cannabis indica
aagaagaagagattcagaggttgaaacagcagaggtctcctgtagtatctttaccacatatgccaatcatttttgattcggtattaccagcaaagcatggaatggctggtaatcaagtggaaccattacatggaaagatttggatccaagaaccttcagactttcagggaggttcaaatatgaagaatgcttcttgggttggaagccctgaggaaattattatgagacctcacgagattatggtagagggtcagaatattacctgcctgaattcagattatggtgaaagtggcaggagctccatgattgagcaaaagaggaaacctacgtcatcagtggtgggtttaagacagaacaagcggttccgaaggtttcaaggcaagggaggacgccagggttattcttaccctgaatgcccacgttgcatgaaacaccatcccggagaatgcaaccgaaaggtatgttttcaatgtggcaaggttgggcattttaagaaagattgcccacaggtggagaaagaagaacaagagcagaaagcggtatttgttcctaccacggtgaatgctaatgctcaagctgatgatgcagaagcccttctgtagtggcaggttagctccctgtaaacgacttctttt

SEQ ID NO: 289769 - DNA, 777 bp, Cannabis indica
gcaggttgtgttgcatgtaggtgagctttggccaagcttgagttttgaactcaaagcttggagctcacatggtgatttgtgtatttttgcatgaagctcggttttgatgctttgaaaatgtttagtgaggtatttagaataggtttggagagttatgcatagtttgggatcgaattgaatgagatatgaatttttgattgtttcctgcactgaaccaaaattctggttcagtgaagcctgcagcatccggtctaccagttggggcttccaggaattcctagaaccgaaattccggttgttgaaccggtctacgggttggggaaaatttgggaaccgtagttcttcccatttttatgttgtttagggtattgccatgctttttatcgatagggaaacttctagtttctagtttaagtcccctggaagtgatttagtgtatcacttatcagtgttgtgattgttatggtttaggagcctgtaaatcgccgtgcagttcgttccactcaagttgaccggcacacttgaattcagattcgaggtaagattaatataacagtatgcatatgtattacatgtttagcgtgcatgttaggaagcctgttagattacattagatatgtatgttggcttcgtaccatccgactgtatcacagtgttaaggctagagtatgactagcagctggagtataccagtgtatcgagtataggctgaatcgtatggtgggtggtattggtactgttttgactgtatgacatcagtaaggctagagtatgact

SEQ ID NO: 289770 - DNA, 677 bp, Cannabis indica
tcataagtaatggtcttgcgattaactggaggcgcttaataaatgattctgctagaccattttgtgtatgtacatgagcaacaggatgttcaacatttatccctattgacatacaataatcattaaaagcctgtgatgtaaattcaccagcattatcaaggcggattgtcttgattgcatagtctgggaattgtgctcgtaatcggattatttgagcaagcaatcttgcaaatgctacattacgagtagataataagcaaacatgtgaccatctagttgatgcatctatcaataccataaaatatctgaatggtccacatggtgggcaaataggcccacatatgtcgccctgaattcgttcaagaaatccaggggattcaattccaacctttaccggtgagggcttaatgattaactttccttgagaacaagcagcacatgagaactcactggataaaagaatcttttggttcttcaatggatgaccatgtgagttctctattattctacgcatcataattgaaccgggatggcctaaccggtcatgccaaataacaaataaatttttctggtttgcgaacttctcgttcacaataacatgagtttctattgtacttatacgtgtaacgtacaaacctgaagacaaaccaggtaatttttctatcatgcattttttt

SEQ ID NO: 289771 - DNA, 574 bp, Cannabis indica
atatctaatctggacaagtcatttgtccagcttccggaaggcttgacttcgctaatagatccaatccattatcttggttgggattgcgattgggcatggagcaacttaactgatattatgttggaattatacgtgtcctccattcgaaaacacagatcacacatacactaatatattacacgtttttttcgacggattaatacatctcaattgattaatttatccactttcaataatttttttattaactcaaaaaaatttaaataattatttaattacaaaaactaaataaataaaaatatattctaattttttggatatttcaatttgtattattatttattttaagattatttaataatttttaaaagtaaacaatgagttggacatctaatatattgacatgtagcattttacttaatcaaatcaacacttaatgaaatttattgtaaaactgtaatatattttttttttgttcatgatatattattatttttttggaaacaacatatagtatttaatcaattacaaaaaaaatatataatatataattgtataaaattaaaaatattag

SEQ ID NO: 289772 - DNA, 54 bp, Cannabis indica
gcctacttttagggcaggctgatacatacatttttggggaacacggtagtgcaa

SEQ ID NO: 289773 - DNA, 527 bp, Cannabis indica
cactatctgaagctaacttagccagacagtccgcgtgagcattcttttcccaggggattctttctactttgtagtccgtgaactcgcggagcagctcccggactattgttacatacgcggccattcgctcgccgcgtgtttggtactctcccgatatctgatttacgaccagctgggagtcactgtagacttccactcttttggcccctacggctttcgctagcctcagccctgctatcaaggcctcgtattcggcctcgttgtttgaagctgagaagtcgaaccgtagggctgcctggagtcgcagtccggtcggggatatcattgccacccccgctccggatccattttcattggaggctccgtccacaaatactctccatgtggggaccgatggtgttggcgcatttgcggttgcctcggcttcattacattcggtaatgaagtctgccaaggcttggccttttatggagattcggggaacgtagtgtaagtcgaactgacttaactccattgcccacttgagg

SEQ ID NO: 289774 - DNA, 551 bp, Cannabis indica
aaagggataagatggccgaacaggtgaaatgggctcccttatgcgaattgcatgttcaacaggcctgggcgtggccgggagtttcttcttcctcttcaatggggtcacctgctcagcctcagcctcagcctcgacttcatcttcaggattcaaaggctcctgagcatactgcttgaccctagcacctcccttcaacttggcttcacgcttaagttgaatgagctcatcctccttatgagctcattcaggccggccagcatcagacctctccttcttccctgccacggacttaggagaaaagtcctctaggtaaagcccatacttcaccaaattatcatcggaggacaaccggatgatattcctgtcttcctcccgcaaccgggcaagtttttgacctctatccctaagagcaagggtgaggggaggacggtgatatgtcggaatctgctaaaaccgagtccgggtgatgctcggatccttcaccatgaaatactcatcaacaaaatgccctattttgctgatggcctcgtcatccgtgccgctcaaccact

SEQ ID NO: 289775 - DNA, 765 bp, Cannabis indica
ctaatgctatcatgtttatggattgccatttgatgctcactaaacttactggtgcacgggttgaatggaaatctggggagagtctttgatttacaaatctcacatatgcttatgcatcactcatgaggtttgctcttagcaattggctcccaaattccaaaaaatccgtggtgtctcaagatttggcatcctttcttttttgaatcacctcgagggcatctattgatctggcttcttcaatcttagaccagattgtttcatttcagagaggtaaaaagcaaacttttaagcttgtggttcctaatttaatctataaatttttgtcctctcagaaaaatgtggctcaatctcatgaaacacttgagcctcccctgactggaaccattttccaaccctcagaatattttgatgttgcttttccaaagcgtcctaaagcttgtgctgctgctgctgctggtgcaaattcgagttctgctcttgcagatgtccaggaagtcaagaatgaggttcaactggtgaacaatcgacttgctgtcatggaggaggttcaacaagagatgtccaagcagttgtcctctttgatcaagctatatggggcataagtcttctttcttttttatgtttttgttggacatatttctaatattttcattgtctttttgtctttggcccttagataaccaaaatgggaagtaatggtttgttttaactgcttgattgtttcaactctggaccctttttccagggggtagttgtgtttggtac

SEQ ID NO: 289776 - DNA, 577 bp, Cannabis indica
aaacaacattttcagtggatcagtacgcagatttgtacgacaaagaaatagtaagattgcatggtctaccaaaatcaatagtttcagatagagatccgaagtttacctctaagttttggcagagtttgcaacaggctatgggtactaaactgatgttcagtatagctttccatcctcagacagatggacagtccgaaaggataattcagatactggaagatacgttacaagcctgtgttatggattttgaaggctcctggagtaagtacctaccgttgattgcattttcgtacaataacagttaccagagtacgatagggatggcttatatggttgaaagtgtagatctcccatccactgggatgagacggtggagaagaaatacctaggtccaggatcaatacaacggaccaatgaggtaattgagaagattaaagctagaatgcttgcctctcaaagtagacaaaacagttatgcagatccgaaatgcagaaatattgagttccaagtaggggatcacggcatttttacgagtatctccagtgaaggggatcaagcgtttcgggaaaagagacaa

SEQ ID NO: 289777 - DNA, 628 bp, Cannabis indica
acattgatgtcattacagtggaaggtaattgtgattatatgtttcaaagcttatgtcccatgattcatcagtgcattggatttatactgatgtgataatcagcgataaaatttacttacaccttagataactgttatgtcctttttagggcattggtaaagtatgctagtattggatgtatggagtatacatcagacagatcgatactgaacttgggtaaagacatcataaacttactattgtatctttctaagtcaatatcacttagttaatcttagatcaatagatcttaatcctgagatggttaggtttgatcttaactatgttatttatgttcttagagttgttcattaaagttgcccaattggatcggcccaatacttacatcttgggaacatgatagtacgattgagtgggagcactaatcatagatacggagcttctatctagacatagaagtgaaatgatgatttcattcaagcttggcttaatagagattaatgggagatctcttatttcagtaattatattagtttactaaaatatcatttatatgaagctaagtgttttaagtaaaaaatattgagggatagaacggtaaatttatccctactcgatgtaaatcatc

SEQ ID NO: 289778 - DNA, 659 bp, Cannabis indica
tgtttgggtctgagttcaggttcgggtttgggtcccgagtcaatgtttgggttcggatccgggtccggttcccaattcgggtctatgtttgatttggagttcgggtccgtgtccagttatggttgtggatcgaggtccaatttccgttatgattccaagtgtaagtcctagttccagtcccgaccaacttcctattttggttcaaattttgggtcacagggtacgggttcgggtccactttggtgtttgggactgggttcatgtccgagtgtgggttctggtcccttttagggttcgggtcctgggctgggtcccaaatccaaacccccactacgagttctgtccaagccctgggtcgagatccgaatcccaatctcaagtcgcagtctggttccattctggtgcctggtcacgagctaggtcctaggttcaagtttgggtatgggtcgggtactaggtctcggtcctagttctgtttcccaggtccctatcttgattctgggtacaggtcctggttgtagtgtggttttgggtcacggtctaggttcgggtttgagtcctagtgtcggttcgggtttaggtctctgtctgggttttgatctaggtttgggttcgggtttaggtcgtgatcctggtcctagtcctagttcggttctagt

SEQ ID NO: 289779 - DNA, 497 bp, Cannabis indica
ccagattaagctcgttgaacatagggttacatactctcttattgcttgggctccatcagtccggaccaaagcaagtaggattagcatcattatgagcaccaccaacttcaaacccatcggccatattgcagcgttttttagccttttgttccttcctcctttttctgaaagtgcgttcaatttcggggtcaataggagcaagttcaaggtcttcttcttgctcgttcatacactagattacacctgaaaaagaaaaattcagcgcaccaaataggattaaaaccttaaaccagaaaataaattgcaaaatagttgataatacacaatttttagtttcaatccccggcaacggcgccaaaaacttgttgtgaaaattatatacgcaagtatacgcagtcacacaagtaataaagtgataagtaagatcgtctccacagggattgcaaacaaaaatatcttgtaaaaccaactaattacaacttaaagtaaaaaagaaa

SEQ ID NO: 289780 - DNA, 339 bp, Cannabis indica
ttgttgaatccacttttagaacttggaattgcattctcagttatatagaacgctctatatgttccaccatatagatacgctatcacatttaaccatcgttataatctcaatgatcaaagatcctctatatcaatgtattttatccttaaaacacttagcttcctgtaaatgatatttcagtgaatataatcactaaaacaagagctcttccatttacttctatttagctaagctcgaaggaaatcatcacttaacttctaaacacctataaaagctatagatttcatatttatgtttagcgctcccactcaatcatactatcatgttcccaaaatgtac

SEQ ID NO: 289781 - DNA, 543 bp, Cannabis indica
ttagtttctttttggtttcgcctttatttgaaatttgtttgtatttgccatttgtgtgtcttgtgtttttcgattttactattctaggtttttcattttaacatttcattttggttttgtttggttttttagggcttcttattttttttagtttaatttatttgttctttttatgggtttttcattttcatttgtttagtcttaaaaactgtttcattttgttgtctttttttttctttttctgtttttgtttttccagatgttttattctttttcatttcagtttcttcatttgatctattctcagtttgtattagttttttcatagttttttaatagtgtaaacacgttctgtatgtattatttttgggaatatgtttttgtctagttgtttcctgtccatttttatatcatcaatgggtaacaatttgatttatcatggatgttgatgttcaaagagttttttctgtattttagtttgtttacagttattttgtagttttattatggttttgctacttgcataatatataaactatcata

SEQ ID NO: 289782 - DNA, 613 bp, Cannabis indica
aactcggcaacaaaaaccaaagaagtgcaaagattgactggtcggatagccgcgctcaggaaatttgtttcaaaatcaatagataagtgtgtcccattcttcaatatcctgcgaggaaacaagcagttcgagtggacggaggagtgtgaaaagctttccaagagctaaaagcacaacttgcaaaacctcccgtactctcaaaacctgtggaaggagaagaacctggaatatacttagctgtcacggaacatgctgtaagtgccgtgctaatcagagaagagaacaacgtacaacacccagtctattacatcattaaaagactcattgaggctgagggccgatacccgttgatagaaaaactcgcttactgccttattctagcaacaagaaagttaaggccttatttttcaagctcatcctgctcgggtatacactgaccagccattacgccaaatattgcaaaagccagatgcttctggacggctacttaagtgggcggtagagttgggccaatataaaattactttccaaccccgaacagcaatcaaagcccaagccttatcaaactttgtggtagaatgcacaggcaagaaagaaagcataccagaatgca

SEQ ID NO: 289783 - DNA, 729 bp, Cannabis indica
tatatggctcaattctctaccatttatttcatgtggaacattgtccacaatagaaaccctccaactaatgtgtttgaaggttttgtaagaagaatttggaagtttaatgctctcatatagagtgtttatagtgaggttacagtttatataaagcagagattatgttctcgcaagtatttttgttttcttcgataagaagcctttgattgtgaaaccatggaatatgtgcaaataaatttcaagaaagacgatatatgaagccagtgcttatttggatataattggcaagttttgatatcaaatattagggagaaagagctttactcgagatcgtgggacagttggataggcttcttgcaatggatcagataacacagatgtaatatccagattaaaatagtatttaatttttttttttttggatattaattgagcgaggataattatcttgtttctttgtgttgttagtgagttgatattattgcttagagtagttgtaccaattttctagagagagttaaagttgtattaactacgaaagtaaaatattatggtatttttacagagtaagtaatcgtttaattaaagcccaatatgaaggtccattagggttttataatatatttagtgagtttaattaattaatgttaaaaattcgtaggtttggataaattcgcaggattaaaaactgttttactaaaatgatcatatctggagttctagagctcg

SEQ ID NO: 289784 - DNA, 276 bp, Cannabis indica
tagtttacttgcaccttcgataagtgctatgtcctttctaggacattagttagagtaagcttaggttggatgtatggagtatgcatcgtaagggaccgatattgaacttgaattagatatgataaacttaccataatatatattcaattcaatatcacctaattgatcttagatcaatgatctcaatcctagagatggttaggttctagttcagttgcattatttatgttcttaaatctgttcattaatgtcaaccaaatgcttcttctcgtgaca

SEQ ID NO: 289785 - DNA, 471 bp, Cannabis indica
ttttacctcttgctaaagtctgtcggtacaattccagaggctagcttagccaggcgatcaaacttggttgtgtattcagtcactgacaaaccctcgccttgtaccaactcaacgaattccttctgctttgcactgcggaccgcctcattataatatttggaattgaataaatcccggaattcctcccaggtgattctggcaacttcctttgtaagggatatcatttcccaccaaatcaatgcatcttcctgaaattgaaacgtggcacatgccactctgtcatttccgaccactcccatgaaatttaatattctttcgataacagtcaaccactgctcagctttcacaacatcaagacctcccagaaacactggaggtgcctgcttcctgaatctctcatgtaaaggctccatacggttaccagcaacatgttgctcagctggcaccgcaggggctgcaggaaccgtagca

SEQ ID NO: 289786 - DNA, 841 bp, Cannabis indica
ccttgttctcttctcttgtatgcatgataagccacgaaattcaagagagaaaaagagagaaaatttcgaaatccttgtgagatgagtagtgcccacacacatcaagtggtatctcaatcatagtatggaagactatggaatttctgcatcaaagaaggagaaaagaagatccaggttcagatcttggtgatgctctgctacagaaaggaatcaagggctagagatctgaacggaaggagtcatattattccgctgcacccactgtaaggttttctaactttatatgtgtttattttcattgttttagaattcatattaggttgttaatccaacatacttgttagtaaatctagatcctggtaaaataatttccaacacccacgcccatgaagaaatatgttagcaagagagacatgacccagttttgtcgatttcacggagactacggccacgacaccaatgaatacaacaatctgaagcgagaaatggaattcttgataaggaaaaataacctgcacttacagaggtatgtcaaaaacgatcagagtcagaggaatgacaataaccaagagtttctacctccaccggtagacggacatttgcaagttatcattggagatccgcacatagctagagattcaggcaaagctcgggagaggtatgcccgaacagcacagtacgagcaagaagaagttatcctggccgtagaagaaaggaaacccaaaatcccatgggcaggagggcctaccataaccttcaacgacaaagatgttgtcaaaatcaaattctcgcacaatgacccgttggtcgttgaggtatagatagcaaacaagatggtggc

SEQ ID NO: 289787 - DNA, 1027 bp, Cannabis indica
gaccacctctggtatcaaccaactcaccctgccttcaaacgtttcgctggtcgtccattaattaggacttagcctgcgaacccacaaggcacgtaggttagacaaggggcaaaaaaatttggaagaccacaattaggatttagaacatcttatttaatcatatatacaaaaacaacatatcttaaaacagtttgcaaaaagaaataaagcttacggaaccgtgagttgaactcgacactggccttgattgtacatatcttgacggtcttcagtggacaacctggtggctctgataccaaactgtaacgcccgtattttataataataaactcgaaaattaattttaataatttatatcttaataaccatatggatcgggatcccgagtatcaaaatacaagttaaaagtactttactaatatgtacatataattttttttttaaaactaactcgctaaaatgcaaccccaaaatacagactccaaaatactaagagatcgaaaccctccaggttgcactgccgcgatatgtacaatcatgccgagctctgcctcactgttcctccagctttgcttttcccttacctacacaaggtagcaaactgatgagtcaacagactcagtaagatatgcaagaaaatataaaagtaatgtaatgtcggctttatgattaagccgccctgagctcaataaccaagctcaccaaatggttaagaacgttcttaagggaagtacgactactataccaaatgcactaaagtaccaaaacttgtacttgtgttggtagagccttaactgtactcccgggaattactaagtgttgtaccacgaacacgacgtacccttggtactcgtgttggtaacaccgtaaccacaattataacaacactatactaacactccataaatcatatttaaactagtgttagtagtgcaacaaataaacaaacatatattcttatatatattcttacgctatcttacctcgttccgtgctcaagtgtgccggtcagcctgagtggaaacgc

SEQ ID NO: 289788 - DNA, 392 bp, Cannabis indica
ataagattacaatgaaattggattttagggtataaaatcctaacactaaagatagatatcaaatcattcaagcatctcaaaaaatacctaaatccaaataaaccaagtattgggtacttaggttttcatttatgtcaacctggccccaaaaagtcaagttgttcttgcagtcacttttctacagcgcacaccatatcaaaatgatcataactctctcaatttgtatctaaataaaacgttccaatagcaaattaaagttatttttgttaggttttgtgccctaactaaaatcttatttcaatgtaatcttgaatttcatcatcaataaaagaacataaattattttattacttgtttagtgtaatgcttgattcacatgtttatttcatgat

SEQ ID NO: 289789 - DNA, 522 bp, Cannabis indica
ttattgctttattatatatatctgttactacatatcgttatcgcttataaaatagactcattgtcgttggctaaaagtgaagtcaacacgtggaatcaaccttaagtatctgtacagagggtatagtccgaacaggatgcctcgtaggcctatttggagcaaactgatctgcaatcagcgcagagccatcaacacttagtgaatttagcttccacatcgtgagttagcaaagaaatccctataacttggggatcaaatcatagagatatggcaagctgtccaaatcccacgatcagtgtactgcaatctttctgcttatatccattgtaacgagaagggaaacacttcctctccaagtttatagtcctatacacagtgatgcatgttcactgggcaaaggacgagagattttaccctagagatactatctaagaattcatattcagagatattgttgtaagagctataagaaaaggaacctttcttgtaacaccctaactaacataggcgtattacgtgatt

SEQ ID NO: 289790 - DNA, 101 bp, Cannabis indica
tgagattttcactatttcgattaaaatgactattatgcatggaaactattttttctctcaacgcatccaatagaaaagtgatgcacaacgtcttggctttt

SEQ ID NO: 289791 - DNA, 602 bp, Cannabis indica
tatcttttccaacgccactggaatcacctcaatcggagctctaaaactctagatatgatcattttagtaaaacagtttttaatcctgcgaatttatcaaaacctacgaatttttgtgacattaattccattataatgttatttaatgcacttcatacaatagattaaacccactaaataatctataaaactctaatagactttcatattgggctttaattgagtaattatcctaattcgtaaaaacaccataattttaccttgacacttactataatttcaactatgtttagaaatctatcaatactattctaagcaatagtctctattcactattagtagaaataaatgaatatttattctcacacaaattgtataacaaataaaatttaaaatatatgtatatttttaccgggtattacattctaccctccttaaagaaatttcgtcctcgaaatttaactaccaaatacacgagggacttcatgtttgtcaccacttattacatgacctccttatctaccttatggacccaacaaatatgtacttaacttttatcttattggtcaaactacaacacatataacatatacagcctaattt

SEQ ID NO: 289792 - DNA, 577 bp, Cannabis indica
catgagtcagcagtagtaatgtattatctgatagcgtagttaggtagttttttctttatcttactcgaggggcgagtaagaatctaatttgggggaattttgttaggttatatttagcctatgtttcgagtctgaaaagtaagcattttctcatctattggtgtcttttggagcggttttacgcttgattttccttgtctcaggttcccggggtatcaaaagtcaaattcagtcaattgatgaaaagacgggacaaactggtgaaaaattggagaaatctgctcttcgggtgtcagtagtcgcgaccatggaacacgattggaggcacacatttcattcctatataaggaacacgattcagaaggtcaaaccaagcgaaaatagaccgaaaaaagtggatgaaagtggagaggaagctatcttgaagacccagagcaatatcaccttctagtttctttcttttacccttattctttcttttatgtctagttttgtttcagatttaatcatggatgttattattgtttttatgagctaaatttcccattaaaggaggatgatgaatgttgtttaagtt

SEQ ID NO: 289793 - DNA, 720 bp, Cannabis indica
acctcagaacagaccaaagcaagattaatacctttctttacacgccatgcgtgatatttggcacaatctttcttcacatgtccaggttggttacaaaagaaacaacccttagaatcctgttgttgtttcttttgaactggacccttagcagcttcattctcaaatttccttttcttgcccttatccttaggggtagtggccaaatgagcactttcattttgtcctttttcaacctttcttcctcttgcacacaatgagaaataagctcgttgagagtccatttctccttttgacagttgtaactaattttaaattggttaaactgtggaggaagcgttaacaaaaccatgagtacaagtacatcatccgaaagctcaatcttaagtgtccttaatcttgagacaatatgatgcatttccataatgtactcccttacatttccttgacccttatacttcatgttcattaaagaaccaagaagtgttgtcatttcaaccttatcgtttttagcaaaacgttcctcaatttgttcaaggaaattcttagccatagtaaccccttcggattctgtgccccaaaaggcttctggaatgctgtgtttcataatcattagactcatgcgatttgaacgatcccacctctcaaattcccttttatcatcatgggaactttccttagtgagaggtgcaggttgttcattccttagtgcatggtctaaat

SEQ ID NO: 289794 - DNA, 532 bp, Cannabis indica
gcccccagcgctggcagctgtacatgatgtgttccatgtttctatgatttagaaatatgtctcagactcgtcccatgttctgagttatgaaccattggaacttcagccaaacttgtcatatgagaaacaaccagtgcagatactcgatagaagagagaaagtcttgagaagtaagatagtggcactggtaaaagtactgtggagaaacaaaaagagtggaagaggaaacctgggaactctagacagatatgcagtaaaaatatctagagttgttcaggtaaattttaggacgaaatttctataaggagggagtaattgtaataccctagaattaagaaatggattagcaaaaccctaattagatagttatgaataaatgaggcattatattattatatagttcaatatatgtgaattaatatgatttataacatggtaagaccccgttggtgagctaggggcattttagtaattatgatagaaaatagatgaaaataattaatatacgtgcttaatggaactatattattat

SEQ ID NO: 289795 - DNA, 517 bp, Cannabis indica
gctagtcatactctagtcgtaacgatgtgatactgtcggatagtacaaaagccaacatacatatctaatgtaatctaacaggcttactaacatgcacactaaacatgtaaatacatatggatactgttatactaatcttacctctattccgaattcaggtgtgcctgccaacctgagtggaacaactgctcggcgaattacaggctcctaaatcacatgaatcgtaacataggtaagtgacacgctaaatcacttttcggggacttaaacttgaaactaaaagtttccctacggataaataacatggcaataccccaaacaacacaaaaatgggaaaaactagggttcttaaaactgccccaactggtagacgagttccccaaccagaattccggctttgggggattcctgggagccaaccggaatttcggctcctacaggcccctctgagccggaattctggttcagtgcaggaaagactaaaaatttcctagctcactcaaatcaaccccaatcc

SEQ ID NO: 289796 - DNA, 558 bp, Cannabis indica
ataatcatattttattagttgccgaaaacctcggtcaacagcgccttatttaagcatgaaggcggggttgggtggggttatgtggctcgcgactgccatggcaatgtcgtggaggctttcaatcggggtcatttggggagggttcaacctgaagttgcaaagatggttggcatcaaagaagctttaagttggattgattggcacaatcggggacaagtgattttggaatcaaacaacttggtatgcatacaagctattcaaagtaaaatttctatgtcatcttcttttggtcttttagtgtgcatgatgttcgtgcgttgcttttatctttaaaaaaatattgatttgtgttttgtcaaacgatctacaaacaagttgcctcactgcttagccagagactcttatttctctccaggtcgtgtgcttcagttggaggattgttccttttgaagcatgttttattattcttaacggtttgattagttaatgaagatacctattttaattcaaaaaaaaaaaaaaatggtgttaaaaaaagttttcaaaaaaaaaaaaaac

SEQ ID NO: 289797 - DNA, 553 bp, Cannabis indica
tttcatttgagaaaataggaaaaacatagaaaatcatctcaaccttttcctctctctcttttgctttcggctggggcaaatcaaaggcaaaaccagattgtagctttcatttctttggattttcagcaaggtttcaaggggggaactcaacctaaggtaagccctaatggtcccttctctaatttttcaagttttgaattggttaaagtagtgaaattgtgttgtaggagctgttagagtttgatgttggtttggttcgaattctagggttaggttgagttgaatttagcccatagcagctggttttgaggttattggttggttttatgcaactttgaacattgagttcaaagctttgagctttaatggcaaattgattttgaatagtttgttctgtgaaatactgcctggattttgttgcttatgcattgtataggagctctggaaggtttcatggcaattggtggagagttgagcaacaaatgaaaagctttggggaaactggtgcaaaccggctagccggtttgcagagccacaaaaaccggctagccgg

SEQ ID NO: 289798 - DNA, 504 bp, Cannabis indica
acaccattgacttctacagtataagccttctcaaaagagaaactatggaatttcgttactaactcctgtatcaatattgtgtacctagttgtctcctcaacattctttgtggtattatgccaaatttcatcgatatgataaagtaattcggggacgtgagataatgccacccttaatactaaaaatttctcttgtgaccagatcaaggctccccgttttcttacaattttattaatctctccattgatagcgataatctccctcagagctctaagtattttatcttccttgcccaaaacatggtcaatcttaagcgataagatgctcttgatttctctaagtaccacttcacgcgactttcttattctaggaggcatatttatcaaatatctgcgtatcacatatacaacaattaatggcaataccaagcatactaaaagtaacacttacgttatagtgagagggatctttttcagtcttctgtatgtatactatgagtatcct

SEQ ID NO: 289799 - DNA, 534 bp, Cannabis indica
tagtgataaggttctcgacgattgtcttcttctcttggatttgtattgtaccacttgcacttaaataatgtgacagagtaaacaccagtgaaggttaactttagcacttcagtgagtgtgccgtaataattaaaaccttctgttcctgccacaaacactccactattttgtgtgctcctcttctcatctcttttggtagccataaatcgaactccattcacaatacaaccttcatagtaagtgcctaagtgatcagacccggatgctaaagctagcaactctttgccattgtctaatgatccggacttgtgcaagtcatatatctataaaaataaatacatcattagaaaatgacaaacaccacttagataataaatgtttacaacacttatgcattcaccttcttgtgaaaccacggacgaaaatattttttgtgtaggacattatgatctccattcgggtaattttgtcggatcacttccaagtgttcactgtaaaataaaatagatttgaattgattgattgaaatttaag

SEQ ID NO: 289800 - DNA, 287 bp, Cannabis indica
aatatttccaacactgggtacctccacgattgagatcttcatccctcctcccagggttctggccactcctacgctgagttctcctcgagcttgttgtccgcgtactaggaccaacgtcgggttgggtcctccgggaacgtgtggttcgtgtgctggggccaccatcaggttgagtcctcctagaacggggggtccgtctggatcgcgggttggtagaccttctagagcccatgggctctttcctagaacaatgattagtttcctcatgtggggtattaacatttttt

SEQ ID NO: 289801 - DNA, 518 bp, Cannabis indica
actcccttactcctacgccaccacttaacgtacgacttgctaactacattcaactttttcttttcttcttcttctctctcaaactccttatcttgatctatccaactctccctctccctctccctctctctcttcagatttgacctgctctctctctcttcctgatctgcccaactctctctcaatctcgatctacgtcgaaggagctgtgccgttcgaagatgaagtagagggaaaagggaggaagaatagaaaggtcattttggctcagtctcaatctcaatctgcgttagatttgctcatttgttttttaatactttttttttgtgtttgaatatgagattgagattgattatggttattattattattttgggtattttcgatctaaactgtttagaagattttatacctaagttgttgtttgagatccagtttttaaatttcgtagatttttgttttaattttttgggtgtaatttgaatatgaaaacaggtttggatagtgatggtggtggt

SEQ ID NO: 289802 - DNA, 513 bp, Cannabis indica
ttttcagatttcgaaaaagatcaatcattgaaaaattcttctccaatggatactttgcagcaaaattattaggtaattttttctcttgctatgaaagattatattacttttatttttatttggtttttaattacaaatttttttgttaaagtttttaattacaaattaagtattaagtttttctctaatagattttttggtaacaaagtccactcatagttttgaagtttttgttatattaattttatttctttttaattcttgatgttgattattttcactacttagtaatgtatgttcattttttaagtttttattatgttttttcttattttttgatgttttatattttcagattacttggaaaagactattcattcatatattattccccaatagatattttgtaataaaattattggacaattttttctctttctttgaaaaattatattactttgatatatatatatatatatactagcaaaaaaattaacgtgcgaggcacgtata

SEQ ID NO: 289803 - DNA, 663 bp, Cannabis indica
aaaatgtgataaacggtcactaaatttatatatttaaataaaaagtgaaagcctcgaagttcagctcacgtggtctgcattaatgttaccaagactcactactagaagatagacatgttaagaagaactatatcgtctatatatagttatattattattgttattgacacaaatgtattggatcttatataatatattaacttttacacaatattgctaacattcacacaagctaccacttttaggaagctgccacctttaggtgatgctatactaatccttttttataccaatgctatataaagttgttacattttttttaaattctatctatattgcataataataaaaattatcttaatctttattacatctcatataattaatagctgtcaagagagtaaatgtaacttaatgcaatctcttaattaataagagaaatactaaagggtatcagtagtgcctagtgtcgcgggctcacctttttagagagcagaacatccatacgacactttgacttctctaagccaaggccagccttctaaccatctaagtaacaatgggcttatttttcgcgcgaccgtgtgcctcgtgcacactttcgtctcttaaacagctctcgccgagttatgctcgcaaacatccatgcatcgaggctttcta

SEQ ID NO: 289804 - DNA, 522 bp, Cannabis indica
ggaaactaagtcccagatatgttggtccattttagatattggatagagtgggcagtgtagcttatagaatagctttaccgccatcattatatggggtgcacaatgtatttcatgtatctcaactctggaaatatgtgtcagacccatcacatgttttgagctatgaaacactgggtttgcaggaagatttgtcctacaatgaacgtcccgtaaagattcttgatcaaaaggataggattttgagaaataagacaattaccctggtgaaagtcctatggacaaacatcgtggttgaggaagctacttgggagctagagtctgatatgcgagaacaatatctagaattatttcagtaaaatttcgggacgaaattttcttttagagggggataattgtaatatccgctaactccgaaagggtatttttgtaattttatttagctgagagtatttttattatgttacatatttatggatttaaatatgtatgggattatttttatgatgatataatatttaattt

SEQ ID NO: 289805 - DNA, 610 bp, Cannabis indica
agttctaaattttttgttttatcaactaattgacattctaagaatttttgtgcttttaatcttgctggtttgtctttgaaatctcaggtatctatagtgtatgaaccaacaagaggactttgaacttgctcctattgatcccgagattgaacgcacattccgaagaagaagaagggttcaaaaggctaagggccgagacatcatggctgagaattttgatgatgatgggattgctcaacaaattgttaatcccatcatattggcagatgatcgagcaagggctataagggagtatgcagcccccatgtttaatgagctcaatccaggcattgtgaggcctgaaatacaagcaccgcagtttgagctcaagccagtgatgtttcaaatgctccaaaccgtggggcaattcagcgggatgccaactgaagatcctcacctccatctccgttcattcttggaggtgagtgattctttcaagatccaaggagtgagtgaagaggtgttaaggttgaagctattcccattctcactacgagaccgagctagatcatggctcaacactttgccgcctgattctgtgaccaattggaatgaccttgctgagaagttt

SEQ ID NO: 289806 - DNA, 730 bp, Cannabis indica
agggggtatactgttacctagtcatgcctttcggactgaaaaacgccggagcaacctatcaaagaatggttaaccggatgtttaaaagcctcctgggacgaaacatggaagtatatgtagacgacatgctcgtcaaatccaaagcatgcaatagccatgcaaacgacttagaagaatgtttcgaagtcgtccggagatacggcatgaagctcaatccgaaaaagtgtaccttcggggtcaagtcgggaaaattcctgggcttcatagtcagccaaagggggatcgaggcgaacccggagaaaatccaagctctcttggacatgccatcccccaagaaacataaggacgtgcaaagtttgaccggaaaggtggccgcattgagccgttttatctcacgatccacggacaagtgcatacccttcttcaacatactgaagaaatgccaaaagttcgaatggacggacgaatgcgaggaggcattcaaaaggttaaaagaccatatggccaaacctcctatcctatcaaagcccgtccttggagaagacttgttcctttacttggccgtctccgaacatgcggtcagtgctgcattggtccgggaggaagaaaagattcagcaccccgtgtactatgttagtaaacgcatgataggggccgagacaaggtacccggtcattgaaaagctagtattctgcctcctgatggcatcacggaagttgagaccatactt

SEQ ID NO: 289807 - DNA, 595 bp, Cannabis indica
ttagaagtgccttcatttctttgttcactcttgctttttcccatcagcagtatgtcatcaacatacaggagaagaaagagtgtatcattgaaataaacacaggggtcataggcacttttagtgaaaccacttttcagcatgaaatcatcaaacatgagattccattgcctaggagcttgtttcaacccatacaaggacttctgtagcaagcatactttgtccttgtcttcatcaaagccctctggcatcttcatgtagatggtttcatctaattttccattgagaaaagcagtcttcacatccatttgctcgatttctagatcttcagatgcagccttggccattattgctctaattgaggcttgtttcacaacaggtgagaaaatttcattgaaatctaccccttctctttgggtaaacccctttgccacaagtctagccttatatctcttgcaatcaacacttgacagaccctccttttccctaaaaatccatttgcaactaaccagtttgcatccttctggttttctgacaacagtccatgttttattctttaacagggattgtttttcttcatcaatggcctgcagccatt

SEQ ID NO: 289808 - DNA, 559 bp, Cannabis indica
ccaaccggaattccggttcagggaattttcagaaccccatccggaattccggatgcacaaccggaattctggttcctcgcaggaagcattcaaaaattcataacttgctccaatctaatccaattcaaacaaaaccttccagacctgttctaaataccccaaagaacatttctaaagcatctacacagcccagaactcacagataacaaaaatgccattaaagctccaagctttgagttcaaaactcaaacttggttaaatctaactaacatgcatccaaatcagttcaaacttacttaaacaagcatattaaaacctctgaaacacaggaaatcgacctcaataaacacagcaacaaaactcacaaattcatttgaaaaaccatagcttttgaactaaaaattgacaaactagagtaagggtaactatcatgcaacaacatcaaaaccatacatgcattactcataatcaaatatcatacataaatcccgagttatgatcagacgcccatacccctgaccataaccctaactgccgtatcccacacgatactgagtct

SEQ ID NO: 289809 - DNA, 490 bp, Cannabis indica
ctccgttaagggtacaacaatctttgagaaaccccaatgaatcaacgataatacccagctaagcccagaaagcttctgacttcagtagccaattttggtgttggccattcccgaacagcttcaatcttggccgaatccaccattatcctatctttatctactatgtgccctaagaaagtgacacgagataaccagaattcacactttttgaatttagcatacagcttgtggtctcgtaaccgttgcaatacagatctaagatgcaactcatgttcctcttctgattctgaataaaccaaggtctcatcaataaaaacgatcacacatctatccaggtaatccttgaatacccgattcataagatccatgaatgccgccggggcattggtgagtccaaaagacatcactagaaattcataatatccataccgagtacagaaagcagttttcgagacatcttcctctcgaattctcagctgatgatagcctg

SEQ ID NO: 289810 - DNA, 694 bp, Cannabis indica
cctttgtgctagtaaatctttttgataagacactactacaaaaagtataattcccgtcggtttttaagtgtcatttaaagaatttacgtcggttttttaaaccgacgtatataccgtagtcgcaaatagttttttattagcgtcatttttgaaacgacgcaaaaaacaattttctacatttacaaaccgacgcaaaatatttacttttctcttttatcttttgcgtcggtttagaaatgacgctaaattatttatggcattttaaaactgtcacaaaaaacttattacgtcggtttaaaaatgtcatatctattacgaaaatacttttttttacctattgcaaatttttcctgtcaattttactccacctgcattataaaattttagaataattctatataatagtaaatacatgatacaaaaaagttaaaataacatttttaaaacttatataaaagttagtaatcgattctgttaactaatcacacaataccaaattttttaatagaattgatcctaaaacttaaattccatatatatcgtacgtaaactaaatataaactaattaatatatacaaaagattacaataatcataaaacttgttactcatgtattataacaaaagtagtaaccttgtacttaatctataatcaaaggcttcgacaaattcggtccactcatccccgtaccgca

SEQ ID NO: 289811 - DNA, 517 bp, Cannabis indica
agatcctggtaaaataatatccaacaatatgaccattagaatactgagatacacccaccatttggaacggcgattgataccctcgcaactcagcccgagacatataaaaattctaaaagatctagctaacagtcaaatgaaagtaaatcttggaaatacgcgagtattcaaattgttcatctgaataccagcgaatattcgagttgttcatctgaatatccgcgagtattcaagacgtaaaacagtgcctatatattgtgtgcagttatgtcagtttacaagtcatattttatgaatttacccaggtttcttacctaaaacacatagcctcataaacacatacaagcatacattcctaaaaaagcctctaaaataccagaacccaaaaagtaaagcattctttctttaaacagaaaacgaaaatgcaatgacttgaaaactaacctttagttttgatttctgcgattgctctcgatcacttctgagattgagaatattgtagaaagagtggtagaaa

SEQ ID NO: 289812 - DNA, 629 bp, Cannabis indica
ctttctttcttctcttcttcttcttctttattcttttgcttagttatttaattatgaacatgattatttttgttattatgtttgtgattatgaactaaacactcattctagagtgttgatggaactattttagattatgaatttaagtttttagattattcccatatttgttcttgttatttgtttgtgcaattttgtgctaattatcatcttcttaatgcttgatcaccattaattagtatagagaatttaggttttacacttgagagaggtaatctaaaatcggacttagaattgcatgacataggaaaagtgtgagattgagagattccactaattctatgagtttcatttaaagagaatcatattgctttacgagtgcttatttgattaacattgaatagagatatcgtgttagttattctaagttaaatctatcatcgctcgagagaggttaataggttacattaggattcttgaaactaaaaattataggataaattgggataatcgataaatggagattcatagtttgaaatagggaaatcaatgctctaggttttttactttctgattaaaaatcgttgtttgtctatttatttttctatttaacttattatttgtttctt

SEQ ID NO: 289813 - DNA, 594 bp, Cannabis indica
atctaggtccagagtcagtgcagcggaccaaagagtcagagtcagtgaggcaattgagaaaattaaagctagaatgcttgcctctcagagtagacaaaagagttatgcaaattcgaaacgcagaaatgttgagttctaagtaggggatcatgtgtttttacgagtgtctccaatgaaggggaataaacgtttcgggaaaagaggcaagttatgccctagattcacaggacctttcgagattctcgagaaggttggacaagtagcgtatcgattagctttgcctccagctcttgcagcagtttacaacgtatttcatgtctctatgttgagaaaatacgtttcagatcctactcatatacttagttatgagaaccttgagctgcagtcagacatgtcatatgaggaacagccagtacagatccttgatagaaaggataaaatccttcggaataagaccatagccttggtcaaagtactccagagaaacagcaaggtggatgaagccacctgggaattagaatcagacatgataacccaatatccaaagttattcaggttagatttcgaggacgaaatccttttaagggggggata

SEQ ID NO: 289814 - DNA, 558 bp, Cannabis indica
aaacttattgtaaggcttatgataccattcaaaatgtaatgaggacaaaaaaaaaacagtgtggatacatcttttagttcaatgggtgaagaaacgaaacaggtttaggctcaaaagggttcactaaggatattcattttatggtaggcttgaaaggctcaaactatccaaacaaactacctaaatcatgttcctattaaatgatgtcaaggatttcgcctcaagagaataaggcatgcaagttctaagctattcaatcaatcttaccacaaaccacagtaaaacaattataacatatttcacagatcgtcaaattgcattcatacacaggttttacaagcatccaaactaatccaaagagttaaaagaattaagcacacagtttcaaaatttcaggacatatcacaattaacagcagcacacaactatcttcagtttatttaatcgactaacaaccaaataaaaagactaaaaacccaaaataactaaaaagaacggaataactaaaacaattaatttttttgtcccctcccccaaacttagaatacacattgtccc

SEQ ID NO: 289815 - DNA, 656 bp, Cannabis indica
aaaattaccaaggggctattcactgcttttattgctgacaatcttaaggataacgacgatcttgcagtcaagttggctgtattgtattttgtgcagtgttatttgttaggtggtcccccgggtaaagttgtttcgtctgaggaaatagatgttgtcgatagtggtcgatataatgaatttgggtggggcaagcattgttttgatatcactatgcattctttgaagggtaagatagattctggttataagagggtagttcgtagtgacgaggatggtgggtattacaggttattgggttttcctttggctattcaattctggtttttcgagtgttgcccgtatgttattgggaaactatccttgtactcaaatgttggcattccaaggattttgaattggcctaaattacccaaggacaaggagggtatggtgaaaatggatgtcatgaacaccctcattttcgatcggtctttgaaagaggtaatcctgttgttttttattatttttccactgttgttttaatgttgtttttgtatacattatttatactttatgtttttattgttgttgttattttataatttcagtttcatgtgcatattgttttttttggtttttgttgtttcagttaaaattaagaaacatcactccaactt

SEQ ID NO: 289816 - DNA, 446 bp, Cannabis indica
ttgcttttaaagactttatctaactcttttttatttaatctctgacatatttaattttcatgttttagcatttggatgcggcattccatttgatgaggaggcggcaacacttttatcccgaggcctacccaaatagatgtgtcataatgccgtgtattttcccagtaggagttattgctcagtgggaagctgcgggtgatgagcaggctaactatcagtgggacgagagcatattagatttgattcgaggggatgaaagtaatttcttggccagttggaagaacaaggagagaatctatatggccctgtacttcgatggagcaaagcattgggtggcactagaggtagatctggatcattggttgttgaacatatttgactcgagcctcggatcgatttccccgaacgaattgaagcgtcacctggaaatgtgggaaaaattacta

SEQ ID NO: 289817 - DNA, 618 bp, Cannabis indica
ctttgtatataaagaggtgatccaccatgaaatggcacctacgaatcccttgctacagtggactaagcagatcataatctgactgaaccactataattctctattttattgttattttccagctttcgttgattgttttcccattcccagtcgagtactcgccattttaggttgaatactcccacttgtctttacacataaaattctctttgatattaacaaaataatataatttggtgttgcgaaattcactcgacaacatttggcgccgtctgtgggaatcgactaagatttcattcaaagaaaaatatcatcatggctggaaatcacaccaacggaggagctaacaacgggtccatcaacattgggatgatgaacgtaccattatctggagctggagccccacctgtggacgtcattaacggcggagtaggaaggagcaatatcagacctctcaacctattcccagaaacgattgaccctcaggtcggggacgcatccctcgccaccatcaaccatgcattttccccctgtcactccggcagtggcatccgagggaatgatccagctcaccactaatcaatatgctacgattcaggatcaactgcgcgcgctaca

SEQ ID NO: 289818 - DNA, 455 bp, Cannabis indica
ttaaaattccaataccatgacacaagtaaacagcagtagttcaatcaatattccagctcagatatcaatacatgacactaacaataacaaagactaactaaactaaaaacgggaaaacaaaaaaaaattaaatctctccccccaaactaaagatgcacattgtccccaatgtgttaaaataaaattgtggttgagagagacttacctgagccccatcagaaggggtttggtggaccctttgcatccaaaagagccctcatagaaaatcgaccaccaatagtgttaatttcagagttttgcacaagagtaagttcaccttcagaactaccacacatcaatcttttccaacgacgccgaatcgttcgaaatcgctctttaggctttgctctcttattatcagttttaacaaaagaaccctttaccatctcaatcttgcaacaggtaggaatgtcggt

SEQ ID NO: 289819 - DNA, 503 bp, Cannabis indica
taccttcatttggccattgaaaataacccagtgtggacctgaactcatacttgatatattgtaatgctaataactaaattacaagttaatttctctataaacttgatgctggattggaaaacgtctcaagtgtgttatataagtcgtggaggataagttatagtacgttttttagttagctgtactccattgggcacatatgatgtgtcaaaagaggggtggttaaatctctgaattacacaattaaatacacgtgtaggcgtacggagtatggtcaaatgtcaacattattcatcaatcccgtttttcccaaaaacctaatgtactacggtactgttctaacgtacgacgatggtttaattcataagaagatgtaggtgaagggcccattaatatcagcccaacatatataaatgggagaaactacccattctactaaaaaatgtcatcactttaaccaaaaaaaaaaatccttacttttcaatctttattttccacaaata

SEQ ID NO: 289820 - DNA, 865 bp, Cannabis indica
aaatattttagtttctttgtatttttttaatttcaaaattcatttaagaaaaaagaggagagtcatgtgacttgacttacatgggctaaaaaaattggtcatttgtctttcttttggtaagtatcaacatgtgctttgatttgtaaatttttgatgagtttcctcttaaaatttgatttcttattcttcatatatttttttaattgttgatcattattgatttttcaaatcttaatttttttggggaaattttggtttctttttgtttttgacccttatagataaacaaaaaggaggaggactggttttaatttaatttttatggttcgtatactcaacataggatcatttttccaaggagagttgagtttggtgtttgtgtaaaacttttgttagagttagctttttatttcagtttaatgttgtgcttctcaagggggattatttgtttgtttttgctaactttgttttgtaggtgtttgttaattaaaaatattttgattatctaaagtgccaaagtgggagcttgttaagtcttttttggcaaattagtttgacaaaacatttttttaattaatgtacatttttattgagaaatttaattgattttattgtgttaatttgatgccaattgctcctttattttatggaaattattttctcagtttgttgcatttgtttgggaaacttggctttcctttttttttttaaattgtatgaattcagttttggtatgtttttatcagatcaaataaactttatttgacaaggtttgaataaagtctaaattcgtgatttggtttcaatttgtaaaagttacttttttggttcttgatctcctgctgcaaagtccgattctgatgtt

SEQ ID NO: 289821 - DNA, 626 bp, Cannabis indica
gacgacatccttgtgtactctcaatccgaagaggagcatgagctacatcttcgaatggttctgcaacggcttcgagaacacaagctttatgccaagttcaaaaagtgtgaattttggttgtctcaggtgtcctttctagggctaattgttagcaaggatgggatcaaggtggatccaggaaagatagaatccgtcaaggattggccaagaccgaaaatagtgacagaagtcagaagcttcttgggtttagccggttattatcgtcggtttgtagaaggggttctctaaaatctcaacacccttaaccaagcttaccaaaatgaatcagcgttttgtatggtcagacaaatgtgaggctagttttcaagagctgaaaagagattgattacagctccagtgctagctttgcgttctgacaaagaaaagttcgtgtttaattgtgatgcatccaaacagggtttggatgcgtgctgatgcaagctgatcgggttatcgcttatgcgtctcgtcagttaaaaagattataaaacagcgatatcccgactcatgacctagaactggccgcggtagtgtttgcttttgaaaaatttggcggcattatctttatggagaaagatgtgaaattt

SEQ ID NO: 289822 - DNA, 222 bp, Cannabis indica
caaattctgacaacatcatggaccatttggcaagtcgtccagacaacacgggcttggataggatatatcttagagggtcagcttttgacactaaagtcacaagatgtgagagcaaatagtgtcatagttttgtgacagcaaagattaaagccaaacacactttctcaattggagggtagttttgttctgcccctactaaagttctacttaaatagtaaagag

SEQ ID NO: 289823 - DNA, 698 bp, Cannabis indica
cctcgaaaaccagaaagttgatgacggacaacagcttgcacttctccaagcaggcatccgtactgggactcctttctggaatgagctgcagcaagaaggagctgctagcctccaggacttccagaagagagtccaaaaatatatcaacctcgaagaagcccaaatcgtggcttatgggggctactatcccaccggaatagcagggtacatgcccggagtatcgccctcgggtactgccccgaccgcaactccacgagtaagtggcatacaattctctgctacccccggatatagccggggccaagccttggcaccagcatcatcccattttggcaacccgtccgaagtgaacggacaagctccttcgcactttgctccgggtactagcctaacaggcccttcccagggttcgaggagtaaaagatcctccaaaggcagcacccggacgggagagaagcgccagaaaaaggggtacaccacccaatatactcaatacacggagctgtcggactcccaagagcgtgtgtactttgctactaggaaacatacacactaccggagaccacaaccgttgtacaaagatagctcccggagagatccgagcaagaggtgcgagtaccacaacgacatcggtcatagtaccaatgaatgtaagaatctcaaggacgagatcgaaaatctaatccgattgggccacc

SEQ ID NO: 289824 - DNA, 464 bp, Cannabis indica
ttccttctcatttttcgagcttcattctgattatctgggagtttcccaaagttgaggtaggctgctaattgtgtcatccagtttggggaagtatcaatcatttcaatttcttctatgccagtgatgctaggctcttcgaggaactggataggaaccaagtttgccttgtcacttacattgctgcttgccaatcgagctaacacgtctgcagttgtgttttcttcccttgggatttgtctgagaccgtagcttttgagttgtgcgagcaaatcatgtattttgctcagatatgctatcatcttttctcctcgagcctcgtattctccggatacatggtttaccaccagctgtgaatcactgcagatttcaattgttgggatttgtgtcgtaaataaaacccatttcaatataatcagatttactagttaataaagatcagaaattacattttatgttgcatggtt

SEQ ID NO: 289825 - DNA, 125 bp, Cannabis indica
cttatcaattatttctctatttgatttataaatgcatccaaacccttttcacatacttgatcctgtttattgtgttgtcaacacagtgaaaagtaaacatgactatgtgattaaagattcctaga

SEQ ID NO: 289826 - DNA, 577 bp, Cannabis indica
atatgttttacatgttattcatctttaattttgttttttgtgtagtatataaaattaataggcctgtatatatgttgggaggccatcgccactcttgctatggttgtggttccgcccctagacacgcatgatacaataataagttttatcactcttaaattaaaaagtatattattagtaaacgggtaaatatatatttataaaaattgtttgggtacttctatttataaaaaaaattaaatatttataaattaaattgtgtttcaattataaattataataaccgtgcgaggattacgttaactagtgtatatataaacaactatataggtagttaactttaataatttatagggattttttttatttttacacttcaaaactagtttttttttttttttttatttttttttgcatttttacaaaattctacatagagacccttattgcaactagcgcaacaacctaaattgtaacaaaaaatcgtacagaaacccctattgcaactagtgttgcaaccacttcagaaacacaaaccgtaaaatttgaaaaaaagttaaaaaaaaaactagtatat

SEQ ID NO: 289827 - DNA, 599 bp, Cannabis indica
agggttagtatcttccattcctgcactagacttttcattaggtaaacaagaaaaatattttcttggaatataacatctctactattcatagttttaaatccccctttttcctttacccaaagtctatacccttttaccccttcagggtaccctaagaaaacacactttaaagccctaggttcaagttttcctatgctttgatgtgcataagcagcacatccaaaaacttttaaatgagaaaggtttggaggtttacctgaccatttctcctcgggagttttaccttcagttgctcttgatgggcttctattgattaggtgaactgctgtcaaggcagcttctccccaaaatccttgagataatcctgactgaagtagcatacatcttactttgtttagtatggtgcggttcattctttcagccaccccgttttgctgaggtgtaatcctcactgttctatgtcgctgcaagccattttctttacaatagaggtcaaattcattgttacaaaattccaaaccattatcagttcttaaagttttcagcttttcattagttaagttctcaaccaataatttccaatgtttgaattttgtaaa

SEQ ID NO: 289828 - DNA, 582 bp, Cannabis indica
atgtactaaatcatgcccccttaagctttcatccatattagattttttttattaaaattggacaaaagttcttaaatccaacaatgtcaatagttcatgggacatttttaacgaccttaaaagttcatgaagcatgatttggtacattcatgcgagaaaaatcttaattagcctaaacattaattatactctaatttgcatagtgtgtctaactatcattttacattatgcattaaaaatgtcgtgatactgtgaaattgaagtgtacgtagtatttttgatataaataaatgaaaaaatgtgagtattcttaaattaacgcttcatggaatcaaaataaatataaaaacaaacattaataaaaatgaaaagtttttttgttttaaatttttacaaaaaaataagatttttagttaattggagaagtgattaatttgaaataattattggcttaatataattaacattaagaggatatcttgaagtgatgattcttagttaaaataattaagatgtcctcttatttatttcaacttgcatgtatatatatatatatatatatatatatatatatactaggta

SEQ ID NO: 289829 - DNA, 96 bp, Cannabis indica
cattgttttagaattcatattaggatgtacatgatgaaatatgaattcaaacgatgatttatgttgatgtggctggtttcatgtggtttatgtgct

SEQ ID NO: 289830 - DNA, 678 bp, Cannabis indica
ttcgacactcgtgaatgcggacccacttagagtggttgatcggaagctactcaagacttttcacaattgggtactcagccagattgggaacaagtacccgagagagtgcttcaccggtcgataccattcgtcttggttcctcgaactacatactccgaagttttggcttgggaacgatgtaagtttttaagacttttttactgcttttgcttttaaagactttatctaactctattttatttaatctctgacatatttaattttcatgttttagcatttggatgcggcattccatttgatgaggaggcgacaacactttttatccagaggtctacccaaatagatgtgtcatcatgccgtgtattttcccagcaggagttattgctcggtgggaagttgcgggtgatgaccaagctaactatcagtgggacgagagcatattagatttgattcgaggggatgaaagtcaattcttggccagttggaagaataaggagagaatatatattgccctctacttcgatggagcaaagcattgggtggcactagaggtagatctggatcattggtgttgaatatatttgactcgagcctcggatcgatttccccgaacctactgaagagtcacctggaaatgtgggaaaaaattctaaccaaatttgctgctgcaggctggcc

SEQ ID NO: 289831 - DNA, 603 bp, Cannabis indica
attaagaagaagttagacgctgccaaaggcagatgggttgacgagctacctcaggtactctgggcccacagaactaccgagatgacagcaacgagacacactcctttctcgctagcatttggctcataagcaatgctgcctgttgtggtgaacgtattgactcataggagagagttttaaaatcaagaagaaaaccaggaacttttgaaattgtcctaggatctacttgaggaaaaataaactgagtcgcaaatcaccagcgcagcataccaacatcgagttacaatatacttcaacaaaaaagtcaagaaaaaactattcaatgttggagacttggtgctaagacgagtctttgcaaatacgagagatgcatctgcaagagtgttcaacccgaattgggagggtccatatgtcatcgaagcaatagttggagttggagtttataaattggctcgactcaacggctcgctaataaagaactactggaacgtggaacatttgcgaccctactaccaataaataaatgatgtaaccttaaacttcagttatgaataaagagaatcatttatattaagtaattacaaagttttattctttaaaaat

SEQ ID NO: 289832 - DNA, 503 bp, Cannabis indica
ttttcctcgagtgttgccgcaagaatgtggcattttgcaagctgcagtacctgatccacttccattatagtattgaattttttaagataatctattgggttagaagtacctttatacttaagggattcggatagacgaaaccccttctgtagttgagcttgtcgcacttctgtagtgaagggcaaggtaccatgcaacttgtatatgggcttccgttgctgctcgagcattttcaaagcctgcagaagcatgctctggtcgatccctccaatcgcaggagtcggggctgctacgactgcgggagtcacaactactgcggcgagatttgctaggacattgatcccagtggtcgcgatcagtgcggtaggcgggttattatcagtgttgacatcctgatcgtcagcatggggatcacggagtgtctcagtattacgaggggcacgggaacgtgccctaaaaactgcgttgaggtgatcacgcagatcaccccgatgtacctggta

SEQ ID NO: 289833 - DNA, 594 bp, Cannabis indica
aaaatctaatttttagaataaaactaattttattttttttaattaatgaaaattagttttagatattagtaggctttgatttttgaaaatttgatttctcacaaaaatagccttatggttaatttttgaaattttagattattttatttattttaattataagataagatattttttttattattaaatttgaatgatcttactttgatattaaaatatattttttaaaaataatcttgttcgaatttcaaagtttgctacccatatcatatctttttgaaatttgttattttctgaaatatatattttaattaaaattataagattaggaatttgttaggtttaacattctatcttattagataatttttttttttattaaaaattatattttagcaaaaataatatgaaatttgaaaatttggttagtttaggtttgaatagaaatttagggtttcaaaaaaccataaattttcagacttattttattttattattttattattctaaccatactaaaatatctatttttttttctaattagtttatttatgtaatatttaaatttattaaattataagacttagaatataa

SEQ ID NO: 289834 - DNA, 609 bp, Cannabis indica
aaaataattgggttgatgatacaattcttgattttgcgatggatatgattctaggaaaaagatagactctacatgatttgtgtgcttaactttgaattaattactgctcaagcttgatttttaaatttttttacagaaaattgaatcatcatatttgctaatgtttacagatataaatgcatatttgattgttgatctttttttatctcaaacttgtttgataatcatttaaggagaaatgtataaattacacataattttgagataggatatatgcaatttctttgatacgattgagctttaaagcctaccctatttgttgaatcacttgttatccaatttgagaattaaatgatgaaattttattatttttctttttaaccttgtacaaccttttgagcaaaaaaagaaattgttctttatcattttttgacactatagtatattgatattttatgtttataaaagtgagagttttgttgaggggagaatattgatgatcgtctaagctaagatgatgagaaaaaaattaatattctcttagaatgaatgctcagtaagttgcaagtattttattaaaaaaaatataatagaaaatgaaaaatatat

SEQ ID NO: 289835 - DNA, 639 bp, Cannabis indica
taccattataacatttgattcaatttaaaaaaaattatatttttaatagcttttaattattataaataactttattcgaaatgtgcttttagttttattgtactatgattaatatttgtgctaatcacaaacaaaagaaattttacataaatatattatataattttatattattcataaaaaatataaaatagtatcagactgaattgagattttattcgtaactaaaaattaatttttttaaacgaaaattttaaacaaattattaaaaccgcgcgaagcgcggatctattccctagtttcacaataaaagaaatgtaaactacaataaataatgaaaacgacgcagaaataacatttatagttgattcaatatattttaattaataattgtagagggtgaaatctacaatacggaatttgggcaccagcaacctgtcaagaacaaagagagagacaaaagttcaattgggagcaccggtggggtgtcagccaaagggactccgacgctcaagtcagtacgattatagtaaaaaaattataataacggaaaataaatgtaatataaatggtagccggacggatgagtggacaagcggacagacggactaaaagagtaactccgatggtgaggcttaa

SEQ ID NO: 289836 - DNA, 544 bp, Cannabis indica
caaattaacatgcttacatctcaaaaattatcaataaaacacagcagtaacaacaactaagaattcatgcatgcatcatcatcttttcatcaaaattcaacaatttaaagaaagaaacaagagaagctaacctagcttggattaaacacacaaaatccttgaatccacaagaaaagaagagcaagaatccagctgctcctagggccgaaaaagagaggaaaaagagagagtgtttctttgaaatttttctctaatttttttctaagtgttgattttgtaaaaagaataaaagccacctagcatataactcatttcagccaaataaacaataaaataaacatttattttcaattactaaaatcactaaagacaaaatactaatggggcaaaaagaccattttgcccctccacactaaaaccacataaataacactaaaggggtatttttgggaaattctaaattcccggccattcccgacattcccaatgtctactaacccgtcccaaactactaacatgctaagttgtgatttctactgagcca

SEQ ID NO: 289837 - DNA, 165 bp, Cannabis indica
agtctaatttgagatttataattgattaatcaaaccaattaaatgagtcttacaagtaatattgtctcaactagtggggggaccatgggtctaatagaattgcactctcagaatatagaacgctctatatgttccaccatatagacaagtcattagttatccatt

SEQ ID NO: 289838 - DNA, 525 bp, Cannabis indica
cttcgtcctgtccgactttgggggtatggacgaagtcaagaagatccttcaggatctgactgctgaaaggcggctttatcaggaggatgccgagcgccgggaggcccttgccaaagccagtgcggaagaagccagggggagggaggcaaaagcggaggcaatgatccgggaggaggcccttcggagggataggctggaggccaggcaccaagaggagctgagagcggaaggcgaagctactgctaaggccaggcgagagcttcgggaggccagggaagccttggatgaaatggctgccaaggtgaggtccttagaggaagctcaccaggaaaacttggagtctagggccaacctggctgtggagctgaatgagctcaaggacttcaaagaccaagccttgaagaaggccaaaagagatgagcacctttctcccgtctcctgcagccggtgcgtcaagcgtttcgatgatggcgtctacatggcctggtctacaaatgaccagaatatcaagcttaccttctaccc

SEQ ID NO: 289839 - DNA, 238 bp, Cannabis indica
gtcctatatgtcaaaacaaaacaaggtatcaatgactgctgcatcaattatttctatccaaacaaaaagaagagtttcctgttttccaatctcattagcagattaaaaacttaaaaccctaagtacagtacatgttttccaatgagtgaatatacataaaacttcaaagtgaacagtgcaaactccaaatctaatgaattgagtaacattttgttcttgaaaattggtaatgcattag

SEQ ID NO: 289840 - DNA, 633 bp, Cannabis indica
tcaattatttatttatttccttaaatagaaaaatcatttccataattaaaatattctaatacatgacgcatgctatactgaattaaaaactcaaccttgacagaaagtggagttggagtcagattgcttagtagcagtacaagctattaaggaaaaatcttatcttttaactgatttagcacattaataaaaattttatatttacttccaaaaagattacacgtgcgtagcacgtgttgttgcaactagttcatcaaaaaaataaaaaaacaaattgtcttagatattaacatttttcaagattaatcatctttatttactaaaaggaaaacagaaaactatggtctattattgtactctctatttttttttttttttaagactattttttagaaaagacaaagttgccaaaaagattttgaagaacctgtttataaaattaaaataccacttaatttactcataatatatatgggcttacttttaataggtattacccatgaatgggtaatattagaaaaaattgagtttttatgattaatttttctatttaattaaaaaaatttcttatttttacattatatgggctgcaggggttgttccattagctaaaaaaaaataaataaaaaaaaa

SEQ ID NO: 289841 - DNA, 905 bp, Cannabis indica
aaactctaccaaattttccagacctgttatttagaccataaagaacatatcccatgtaataaaacaactacagaacgttaaaatcaaatttcaccatagagaccaaagtttgagttctaactcaaaccttgtctaaactccaaaccaaacaatcaaaacatgctaaaaccaacaaatgaaacctatttcaactaaagaaaacataatccacaactcagaatcctaatactcaatccatgcaataaataattacttaaagcttaagaaaactatggaaaacaaaatgctaaagaggattaccttcaatggaaacaccaaaagctaactactaatcacaaaaccagctgaagaactccactaagctgctggttcttctagggctcgagagaaagaacgagtgaagagagagaagagagcttgtttcttgatttttgatttttatgaaaaataaatgataaaggtaatagcttaagtattaactactaaattatctaaagaataaaatgaaataaacttaaaataaatcttgctaaaagacaaaagaaacccttggcaaaagattattttgccattcccacactaataggcataaagggcacttaaggatattttcgccaattctacattctcgactattcttgacaattctaatgtctaagtatactaccccgctatactaaaaaaaactaagatctgattctaatagccaaacaccgcgttccaatgttgtcgggcactgaatatgcaaaattatgaaatctctatatgtgacataaaaatgcattctgaattcaaataaatcatcataaattaataatttagaataaatgaataacttccataattaaaccctaattatcttttaatttccaaatttaagctaagcggtctttacaactatcccc

SEQ ID NO: 289842 - DNA, 817 bp, Cannabis indica
tctaaacaagaccccagcccacaagacaattccctaaaacaaatcttcaatcatccaaggaatttccattactgtacctacaaaattgtgaacagtaagtgcgacttttcttttatagaaaaggaaagtttagctctggttttctcctcaaaaaatctaatcaaacaaaatgggaaactcacacaagatcagaatataccagactagttagataaaaaagaaatgagtaaccaaacttaccatttttacctttttccaaaaataggaaagctagacaactttctttctaagtttggatacacacaataaggaaaccaaattaaacataccagccgaaaataataataaataataaaatatttttgtcaactaaatatgccaaaaatggaattagcaatctccccctttgacactttgattgacaaaatattttattatgacaaaacataaaaaccaaagcaaatagctttttaaagataaaagagtatagaaaatactccccctgcatgaaagcactctaacacataaaacaaagaactttttttggacggaaaagcttacaaaccgaaaacaaaacaaacaactccccctgagttgaatacaaatactccccctgagtagttgacaacgagacacataaacacttctccccctttttgtctatcaaagaagccaaggacaaaagtaaagaaacttctcacattaaaagatcattcacactcgagaaatcaataagagtgagagagtgagatagtgaagaacatgggtgaatatattatcaaggggaagagatgtgggtagcaagaaaaaaaaagaa

SEQ ID NO: 289843 - DNA, 546 bp, Cannabis indica
tccaaaggtaatactttttcaaaaccttcaatgactaacaaaaagggaattcagtgcagggaatgtgatggttttggacatattcaatctgaatgtgcaaatacactgaaaaagaataagaaaagtttcaatgtcacatggagtgacgatgaaactgatagtgatgaagatatttctaaaaatgttgcactaacctcagtttcttctaagtttgtttgtgattcacaggtgaaagaaagattggtatgtttgaataataccattgaaaaagaaaattctgattctgattctgatgaatctgacatctgtgaggagtcactggctgagtcttacaaggttatgtatgaaaagtggatacaggttacttctgaaaatagatcattgtcaaaaataaataaacaattgtctcatcaaactgaatctcttgaattgaaaattaaagaatttgagactgatttttgtttaaaagatgaagaaattattctattaaagaaggaacttgaaaatttcaagaaaatattcaaatgcttaaccctggatcttcta

SEQ ID NO: 289844 - DNA, 709 bp, Cannabis indica
aatcaatattgaaatagggtccaagtttggagagaatctgttcgtgagtataaatagccctgtgagaggccttttcttttgctgaccttttggatttagaaaggatgagctttgcatctcggggaaatgagcagggaaatgagcaattcttttgcgatgatgatgatgtatgtatggaatggtatgggacgagttgtggctgattaaagggatggttttgagtgggtgtgaggagaccatatttatagacttaggtctagataggaggtcggccaagatattttcttttccgggaaggtgttttatttcaaaagagtaatgatcaaaccatgttgccaatctcaaaagttgagtattggttgtcttattcttttttaggtctatcattccctttgatgcagcaaaatcggtttccactaaaaaatgatggccgatgaggtggaactcaaattttgttattcccatcttgattgcaatcagttctttgagtgttgaatgataatggagctgggaatctttgaagtgtccactcttgtatccacatattcgtctttttccctgttcatcttgctctagaaggacagcaccccaatgttggtcactggcgtctgtttgaagacacgttttccgtcagaggaatctgtagaggtggtaaattttgcatgatttctttcagttttttgactgccaccgtttggtcatgtgacca

SEQ ID NO: 289845 - DNA, 547 bp, Cannabis indica
atctactccagatttacatgattcagttgagctcaaatatatgtttttatgacttcaaataataaactgagtgctcttttagaatttaaagaaactatagccatggaccatggtcatatatatcacatcatttggttacccttcatcttaacggcttgaagaaaatgctagaacttattaatggtgtttagcatcacccaaagtcttaattatattgtaatattattatgagtataattaaatattaaattttacatataaatagaatttttataattagataaataatgtaattggtatgattaaatttattaaaataaaaatatcaaggaagataatttaatttaataattttataaaatattattaattagccatacacaaggcacctacttctagtggtgctaaacattaacaagtacacttaatacttactctatatttttatttttttttgtaaagataattcatgccatatatattgtcggcgtaaatattattttagaaattgtgttttacaaaagttacaaattagactttttatttt

SEQ ID NO: 289846 - DNA, 603 bp, Cannabis indica
aaaaaaggctgaaaatcgacagattgaagtggtgagcaacatcaaatcaataaaagtggaaatcgatcaagagaatccagtccaggaccgaaaaggtaagagaaaattggaagacaactcacaagaggaaaacgcaaatggccaaaaaaaaaaatagttacggctgatgataatggtcataccatcttcttgaataaggtaattgatttagtaccggacgacacatctcgtaaggatgaagaaatatctataacagaaaagttctccaaaaagaggcaagaaattaatcaacgcttaagtgacctacgagttagaaagattaagcttaaccaactttttgaatcgcgatgcatcccaaagctaaatttgaaagaagcgatcgacattcaaaagcaacaacatgtcaccattcaaagcttctccatgtagtcgagaaggaggagcactactgggttgtagcacttattaagcttgttgacgaggagaaagaagagaaagaaaatcttcgcaaaatcaatcattgaaagatactattttgctataataaatatgtcctacaagcattaagtaaaaaaatagccagttgagctcgtttataattaa

SEQ ID NO: 289847 - DNA, 1171 bp, Cannabis indica
aattctgctacagaaatcaaatagatcacttcagttctttctgaacttcatgtcaagctacctactgctccaataactgggtaatctagcagctaatccagagttccacgcattgctaagcaaattgaaatcaattttcactttaaagttcgtgatcaaattttggctaaacaaattgaagttaaatatgttccttctattgaccaagtagctgatgagagatttacttatctcaagtctaaactaaaggtgtattctagaccctttcacttgagggcatgatcgataatgaataactaattttgtttatttttcagtttccatttttactgttgagagttagttatagtcagtttgttgtaacaactaacaaccctctctatctcttttcctttctactactatctctgtaaaacatttctctataaataaaggcctagagctcaaaggtatggccaagttttgcaagttttttagctgatagtcttgtattgataaacttctttacatgtatatatagtataataatctcgataaattaatattctataaatcaataactttgattaaattatactttaattttgattagtccgcacttagaagaaacagtaaaaaataacactagattaataacataaaaatgtattcttgtagtatggtcgtacatcccaccttgttaatttatatagtctgatttagtaattaattaggatctggtttgattgaaaggaataaaaaaatataagaataataataggaatataataaaattaaatttaaaatgacaatttaaaaaaattgaataaaaaattaatttaaaaaatttctcatattacattgaaataatcattcatgtcatttcaaaatgtaatagtcattccaataaaataatacaaaaatcattctaatattttaaaatataaccaaacaaaaataaattaaatattattttctttccatttcatttcattacctctaactaaactccacctaccaatttaagagtactgcaattagaaagttttactaaatatatttttatatatattatttgcaacataggtttttcatttttgtttttgtgttgtttgtataatatcatgttactcaattattaaacttagcagacaaatttatttttcaacaatcatataacatatgtattacc

SEQ ID NO: 289848 - DNA, 702 bp, Cannabis indica
gaagggtgtttcaccagtcgtggatcgaggagttgtattgtaagaccaaagaacttgcgagagctcgtctggccaggtccccttacgttcttctagtttccctttgatggtgtgctttattattttgttaacagcttcagtctgtccgttgctttgtgggtaagcaactgcggagaatgctttcttaattcccagatcgtcacataattgtcgcatctctttacaatcgaactgctttccattgtctgagatgagtttgtaagggataccaaatcgacaaattatggagttgtagacaaactcgcgcaacttagtcgctgtaatggttgcgagtgctttggcttcggcccattttgtaaaatagtctactgcgactactgcatatttgactccaccttttcctttgggtagctcgcctattaagtcgatcccccatactgcgaaaggccatggacttgtgatagaatgtaggttactcggaggttggtgggtatatgtggctattcgctgacacttgtcgcatttcttcgcaaaagcgaaagcatcctgtcgcaaggttggccagtaatacccttgtcgcatgatttttaatgcaagggagttaccccctgtatgattgccacaaattcccccatgtacctcacgtagtatgtagtcgcaatcttcaccgtcgatgcatttgagtagcggttgactaaaact

SEQ ID NO: 289849 - DNA, 779 bp, Cannabis indica
agaattaaaaattcaactccaggggtcgcttgacatagggttatctcagccttgtgtgtcaccctagggagctccggtattgtgtgtcacctagaatcgatgatctttttgatcaacttcagaggaagacgctcttctcaaagattgatctccgatcaggttatcattagttgagaatccgagaagaagaaaattccacaaacggctttccgtactaggtatggacattatgaatttcggttatgtcgtttggattaaccaatgctccggcagctttcatggatctgatgaatagggtattcaaagatttcctcgatatttttgttattgtgtttatcgacggcatccttgtatattcttaatcggaagaggagcatgagttacatcttcaaatggttatgtagtggcttcgagaacacaagctttatgccaagttcaagaagtgtgaattttggttatctcaggtctcctttctagggcaaattgttagcaaagatgggatcaaggtggatccaggaaagatagaatccgtcaggcattggccaagaccgaaaacaatgacagaagttagaagtttcttgggtctggccgattattatcgttggtttgttgaagggttttctaaaatttcaacacccttaaccgagcttactaaaaaaaaatcagtgttttgtatggtcagacaagtgtgaggctagtttttaggagctgaaacagaggttgattacaactacagtgctagctttgccttctgacaaagaaaagttcgtagtttattg

SEQ ID NO: 289850 - DNA, 510 bp, Cannabis indica
atttgtttttgtgttgttttagatttattttagtagtttttttattctgatttttcatgactgggcttgtaaatatagtcgctactgtatatgtctgtgggtgtggaagatgaaggcctctttttttttttttttgtgtttacagcataaaagaaaaaaaaaagacaagtataaatgtaatttctgctgtgtggcaattaaaatcgtaaacgtttacccaaaatctagtatttttgttaaaattcgttttttttttttatccttttaaatatatagatatatcatataagtaacaactattgatagaaattatgtatagattaaatatggggcggatagtatcatatctccgtactcgtcctgacactacttttggatattgaaatcatctcccataaccacttcattacccatgaagtcaaaaaattcccgcccgattaaaggcggatcttcacgagtatccatcctcgtggatgaaatttccatatctaataataaatactttaaaag

SEQ ID NO: 289851 - DNA, 527 bp, Cannabis indica
tgataataaactaattagttactattacgtaaaaaaatttatttttaaataatataatttgagatacaatttggttacctctaagaccttatttgtaaacatcttaataatcaattagctattttttaagttatattctgttattttattatttaaaatataattgggtaactttaaagtttattttcaaaactaatgagttgtcatataatataataagctactatttttatttaccaattattttatatacatttttattactttgaaacttatgtgtttatttttaaattatatgaaattaatttgttattttaaatacttttacgttacttattttttattttgtaaatataaaaatatttatgttactttcatgtatatttaaaactgataagttacaagaatatttatttttttttaaaaaaaaactcacagaacttattggcaaaattgataagaaattgctaattagttattttaaagttatatttttagttactttttaagtttacagtagaaactaa

SEQ ID NO: 289852 - DNA, 539 bp, Cannabis indica
tcttcaatggtgaattagaaaaatagatttaaatggatcaacctaaaggtttgttgttcctggtcaagaacataaagtgtgtaaattagataaatctttgtatggtttgaaacaggcacctaagcaatggcatgaaaaatttgataatcttgtcatctcacatggttttaaagtaaatgaaagtgacaaatgcatttactataaatctgaaaataatgtgtgtaccattatttgtttatatgtggatgacttgctaatttttggatcaaatattcatgtcgtgaacaatgtgaaatctttgttatgtgaaaattttgacatgaaagatctaggtgaagcgaatgtaatccttggtatacagatcactaggtctgaaaagggaatttctttggatcaatctcactacattgagaagatcttaaagaaatataattactttaactgtaaacctgcttgtacaccatatgatcccagtgtaaaaatttttaagaacactggtgatggtgtaaggcaatctgaatatgcgagcatcattggca

SEQ ID NO: 289853 - DNA, 246 bp, Cannabis indica
gtttattttctatgattggttatggattataaactgttacaaaattgatagattaggttttcggtcgattttgtatttttcatgaattatttgtgtcatttctaaagttaattaggaaaaatacctagattattcagaaaattaaaagttaattatttagggcttagtatagagtataaactgtgttagaatggttagattggattttcaatcatttttgtatttttcatgaatttatttagttaa

SEQ ID NO: 289854 - DNA, 623 bp, Cannabis indica
agtcaagtattctaatcctcataacatttttatggtatcttaatttgattgcttaatctctagcaagtattttacacttcaaatactagactgctatgttgatgacttagtcttaaagaaacttacagtttcagactaagataataagtcacaacgagatatccctcaattaaggaacattagaagatactcaagaaaggtttatgaaagtgacctatatgttagatattaaggaactgtacattagtaatccttatatctacaccaactcattaagaatttgagatggtggttactctaggggtggaggagttattctaaaagagtgtaaaaacccttctataataattcaagctccaccagagaagatatataactttgtaaatatgaaattaccaaaaagttattctactgaagaaaattctacactgtattatctcagttccaaattttaaagtatgagagatatgtcttctgtttatttagatgtacttaataagaagtaatgatttcattatcccttgatgactaaagtatatagtcaaggatgtttcataatattttatgaacttggttccagaaatttaggttgagtcaaatatactacacttgatctgaagatc

SEQ ID NO: 289855 - DNA, 617 bp, Cannabis indica
gttgagcaacatgttgctggtaaccgtatggaacctttgtatgagagactcagaaagcaagcacctccagtattcctgggaggtcctgatgttcttaaagctgaacagtggttgactgttattgaaaaaatactgaactttatgggtgtgatcgggaatgatagggtggcatgtgccacgtttcaatttcaagaggatgccctgatttggtgggagatggtatccctcaccagggatgttgccagaatgacctgggaggaattccgggatttattcaatgccaaatattataatgaggcggtccgcagtgcaaagcggaaggaatttgttgagttggtacaaggcgagggtatgtcagtgactgaatacacaaccaagtttgatcgcctggccaagttagcctccggaattgtaccaacagactttagcaagaaagaaaagtatttggctagactgaatgccaagatcaggcatgacctggttattacaacgaatgataccacaacttatgcagaaatggttgacaaggctcttcgagctgaaggagcagttaagtttttgcaagaaactggagagcctcctggtgtcggtgagaccactactatccctgttttggg

SEQ ID NO: 289856 - DNA, 386 bp, Cannabis indica
aattgaccattttacccctagctttggaattaccctagttttgggtcaaagggcaattttgtcatttggtaaaataatgggttaggtggctgccttgtatagtgacacctagcatgttaagttagaaagagttaagttgattaactcatttcattttggaagaaataaaggaaattaaaaaggaaaaaagtcaaaatcctcttgaactctctctctctctcttgctttcggctgggacaaaccaaggggctaggaccagaattttcttctcttttctttgggattaagcaaggattcaaggcaatttcaagtgaggtaaaaccctagacctttgattgttgtttttaagctttttatttaggttgaatatatgaaattgagtttta

SEQ ID NO: 289857 - DNA, 711 bp, Cannabis indica
acggagtgggtcaggattcctctatacgagcggaccgcgcctactgagatctttcttcggcgggctcgaggtctttgcgacttatgaccgagcggatctcgacgtcgggggcctggtcacgacggagaacttccggaaggccaagctgatcctgctgcaccagtcagtggaggactctaacctttctaaggttatctgtccaaacgtgagggttcctgccgcggagaagaccttccgggatgagcttattgccaccgcggagaagaagtaccaggagtatctctaccggaaggcccaggagaaggcttataccaaggcccaggcagcttccgggaggccccttcacgtggggagcctggtcgagaggagaagccaaacgattgccgggaagtcccttcgcattgggagcccggttgagaggagggctccaaggccaaagccttcggttcaggtgccgaatacaggggctcctgacgccagtacttccggctccggtaagtctcctttagcagtacattacgttccctctgttagcgaatatgccagccttaggcccgtagggttcgatgaacgtctccttaggtttaggatgccctcgacccggtggggagatcacgccaagaattattattttgccaacttaggagatttcctaggtcggtcccggatgggttctggacctccggagcccgttcccttggacacttcggt

SEQ ID NO: 289858 - DNA, 450 bp, Cannabis indica
aaaaaaaaaaaaagagaaaaaccattctatgccctaagcaactgttgaacgaagaacacgtggctctcttcaacaaagctgtacgattataacagaggcatgacaatggcgattctacaactaaagcagtaaacataaagcagaatactcaaagaacttaaaaactcacacactcagaactcgaagtacgaacccagaaaacgaacgaagtaaatgaaagcatgttattatctaaggatgcaagaaacttacagtagatcgttgaactgggggtactggatgtggttgagtaaaagttgagaagaactgacgaaggcaaacactggaaaactgaaagaaacttctaagtgctaagtcagttcgtgctactttgaagaattttctctctgagaaattcgagcaaaaatggcaagaaatggaaagtaactgaaatgaaggaaaggtggtggc

SEQ ID NO: 289859 - DNA, 615 bp, Cannabis indica
gagtattttcctgtctcttggttagtgagccacgaggtccgcctcgaggttttctcactccaggtttaagttgattttgagtgttattcccctgtgccgccctagttgcagctgcatcacgctctaatgcagtgttatgccagtttacctcctccaggcgatgcctaagatggcagttttccatttcgtaagtaccctcacccctaggctgagcacctccacgactgggtccttcatctctcattctaggattttggctctccctatgttgagctcttgtcgaacgtgtcgttcgcgtattgggaccaacctcaggttgggtcctcctggaacgagtggtccgagtgctggggccaccctcaggttgggtcctcctgaaacgagtggtccgtttagactgtgagttggaaggcttttggagcccatgggctcttttccaggacagtgatgagtttcttcatgtggtgtgttaatgttctctatgttgtctgccatgaagaagattgttttttatatgtaaggagggttttttctgagctttttcacgaaggctcccaatgaaagcaccaagctgttaacgcagatttttgttaaccagatatgagccttaacggt

SEQ ID NO: 289860 - DNA, 445 bp, Cannabis indica
gttcaatatgcatccttaagaattcatccaaattttgatcaagagatttggatgaactcattttaaacccaaaaatcctttccttcaagaaaatcttgttggttagggatttctgttgaaactgttcttccagtttcttccaaatctgggcaggggtttcttccttgtcaattagtctgataatggcatctgataagttaaatatcatgataccagttgcagtttccaagtattcttcttgttgaatcttggtagtcccttctggccattcaataggatcattaagcactctcaacagtttctgttgagccaagagtgacttaattttccttctccaaatcctgtaatcaccagagccatcaaacttgtcaatgtcaacctttaaattgctcatattaatgaagctaaataatgtaaaataaagataagtgttaataggcaattt

SEQ ID NO: 289861 - DNA, 601 bp, Cannabis indica
tttttgttagttatcttttcactatttttgaatccacaatgattcatttactttgagtctaaaattgctctttcaatttatgactcatttcacaagtttggatccactatgatcttaattgttcttgcttatgatcacaatgcaagtccaataaaagtgtaactctcatagtccacttttccttatctcataatatgagatgattatctcttataatccaataaaagatgtaacttctcaaaatccatcttttattatctcataaagtgagatgttcaccaccaaattgaataagaattcaaatctattctttattcacaaaatagatgataataattttcacatcaatagtaataaacactattatattactatcaacattattatcatactatataactcatacattaatataatatgtatgttactaatcaacatcttatatgtaacatacacataatgtcaatattaaattcacaatatatatgttacatatctcttatatatatataacatatatactataatatacatatatatcatatacacataatatatatattaattacacaactatatatgttacatacctcacacatat

SEQ ID NO: 289862 - DNA, 578 bp, Cannabis indica
tttttttttcttttcttttattttgcttgtttgaaaaaaaaaaaaatttgaggcatatgtgctttggtttggtgattttccacattctaatacatgattgatagtgtgcatagcttgttgaaaaatgtaaatattgcttgagcttgtgactaattcttgtgctagtttcattttgattgagatatgtccaattttgagcataaatgccttgatcatttaattgtgtgtgatttggtgaaagtttgtgtaaatatgtgattttgtgatctcacaagtcttagaatttgtttgattctctcttgaggcgaaatcctagactacacttaaccaaagacatgatttaggccatttttggaccgtttgagccttttgagccaaccatgatattattttatccctagccaccctctttgagcataattgatccctttattttttttaccacatgtaagcctagccaaatacaaatatctttaccatatacccattgagcaccttattattctaagatatttgttgggtcatgaaagggatgagaggagtgtaattttggttgagtggtaattgggtgagtgttt

SEQ ID NO: 289863 - DNA, 833 bp, Cannabis indica
atctttaagaaaaataaaacctggattgtggtgcctaaacataaagacaagagtatagttgattgcaaatggctattcaaagaaaaagaaggcagaactaaggatgaacctataagatataaggccaggttagtggccaagggatttacacagaaggaaggcattgatttcaatgaagtatttgcaccagttgcaaaatacaagactataaggataatgctaagtctagcaactcaatacaacctggaaatagaccaaatggatgttacaacaacatttctacatggtgaattagaggaagaaatctacatgaggcaacctaaaggttacacagaaaaagggaaggaaaaccatgtttgcaagctagttaaatcactatatgggttgaaacagtcacctagacaatggaataaaaggtttgatggatttatgctaaaactgggattttctagaagctactatgatcattgtctatactacaaaggaactgatatcaacaaagtcatatatctacttctgtatgtagatgatatgcttataatcagtaaggaaagagcaagagtaaacacaatgaagggcctactcaagactgagtttgaaatgaaagacctaggggaagcaactaagattctaggcattactattaaaagaaacagagcagaaggaacacttagcctaactcaggaagactacattcataagataattgagaaattctcaatgaagggatctaaaattgctagccaacctataactacacagttcactttatctaagaagcaatgccctgaaagcaaagcagaaaaagaggaaatgagtaagataccctatgc

SEQ ID NO: 289864 - DNA, 626 bp, Cannabis indica
gataacaaccaagatttactaccaccaccagtagatggacacctgcaagtcattattggaggtctgcacatagctggagattcaggcaaagccttggaaaggtatgcccgaatagtacagcatgagcaagaagaagtagttctggccgtcgaagaaaggaaaccgaaaataccacgggcaaaggagccttccataacatttagtgatgaagatgctatcaagattagtttcctgcacaacgactcgttggtcatggaagtccagatagccaacaagatggtggcctgaaccatgatagataatggagcctctacgaacatcttattcaaaacaccgtatgaaaagatagggctctaactcaaagacttaacccctatctccagcccgtgtatggtttctccggccaaagtattgcacctctagggaaaatttgcctacccctcagtgttgggcaagcttcgaggagcataactataatggcataatttttagtgttcgacgttccatcagcatttaatgtcatgttaggccgaccatctttatatgacttaaaggctgttacgtcgatattccattcgtgacttaagtttccaacaaagaatggggtggggtgcctgagaggaaat

SEQ ID NO: 289865 - DNA, 512 bp, Cannabis indica
gaagtattcatcggtggatcttcgtccatctcacctagggggatgacactcggaggttgctgtcctacagtttggtaggcttttcgtatcatcacagtagcttgccgactacgattttcaatctcagtatgatgagcccttaacgcttccatctctttgtctctccactcggcaaacatgcatctttgttcctcgaacgtgagatttaccgcaacgcggagttcctcctgatcatgatgtagggtattggtatgaccttgcatgagtccaagagcagcgcggaggttttggatctcagtatcatctccaatggtcgttcgaacgttggtagtaggtgggacgactgtgttatgaatgccctggctgggtgctaaactggtattcccagtctcttgcacaccaagcgtgatttcatctacaggagtcgtcacaccatgacctacgttcgacggttgttcaagattaacagcttgcggaacccttgcgatttttcaatttaaccacttaaatgc

SEQ ID NO: 289866 - DNA, 501 bp, Cannabis indica
gcatattaaatacataatacactgatcgtgggatttggacagcttgccatatctctgcaatctgatccccaaattatagggatttctttgatgactcacgatgcgaaagttgaattcgctaagtgttggtcgctctgcgcggattgctgatcgctttgctttgagcatgcatacgaggcatcctgttcgaactatattctccgggcagatactcagagtcaattccacgtgtcaccatcacgcgatgcaacgtcagagtgcaaaaattgggataacaaatataattttatcttataaacaaatataaaagagaagaatatagaaaatataatttaaatattttctatgtgcaaatatatgcacattcttcttttgagccttataaattaacaatgagaagaatcttctggttcttcaacaaaatttagtcaaattctttgacaatttattgcatatgattgatcatgtcaaaataattcaattcatgaacttcaggttcac

SEQ ID NO: 289867 - DNA, 704 bp, Cannabis indica
aaacttgcaataaaccattcataatcttaacaatacattcctacatcagattagatcacaaatagttcaataaagcatcaaatccttagttatgcatggtagcaaaatatgcctatttcactactaattaatacctaaaaaaaaggtaaaaatcatgcatcaattagatgggttcaactaggtcttacttttccaagtaagatctagcttgctaaatgttaaagctggccaaaaattaacattcaatcaacatttcatcacaactaattgaacaaagacaagattacttaatcattgcaaaatcaaagtactagtccatacaagggtttataaccacccaaatctcaaatattttagttcatagctgaaattaaaaacatcaaaccagaaaatgaaatgttcatggagttaaagagaaaactagagagtagaaaatgatacaaaatgaagaggagagcaagagaaatgagtttgaagctcaaatcctctctttgtaggttgccttcttctccttcttcttagtcttcttctttgtactctcttcttcttctttctttctctgtacttagatttctttttctgctgtaattttcgtaccagcccttttctcaaagtgcagccacctttctattctctcctccttcccttttgctccccaattagggtactaaagtttaccctaattggaaatccaagtcatggtc

SEQ ID NO: 289868 - DNA, 350 bp, Cannabis indica
gctagaaaattttctctgaaggaatgagatgcatcatctttttcctgaagccatcactacctatttataggtaaccacctaggtttaggttagaattatttggcattaaaataatagaaaaataaatgataaattccattaagtgtggccggccatgggctttggatattgggcctcacttatgcaattttgttgttttatcatttctgttggaatttattttaccaagatcttagatctactcacaagtatccgttcagatatctagcccattatcaatatctgaacctaaatctctttctctgaatctttgatgctgaaacctccttcttgctgaaagtctttcttca

SEQ ID NO: 289869 - DNA, 244 bp, Cannabis indica
gttggtaactcatcaacaaaaagtaggctcggtatttcaacaaacaagtgaaagctcggaaattctattgaacatttgcttctaagtgaatggcctcttgggcggactacgcgcaaaggcttcagaaacaaaagtactcaggtcgggtagaccactttaaagtacagtttcttatttgttttatgtcatgttaagctaaaaagatccattggatcactagctctgatgtaagttactacggtaa

SEQ ID NO: 289870 - DNA, 563 bp, Cannabis indica
ccctctctctcttcgaaaccagcagatgcaaagggattttgtggctggaattctgtgttttcatcaaggaattcaaagagaaataaaaccaaggtaagctttagtcatatccctctttgtttcttgaaatttatggatgatggagtatgagatttttaggtttagtggctgttaggttttcatatgcttagggttcgaattttagggtccttttgagttgattttagttcctagatgctggtttggttgattggattaggttttatgcaactttgaatgttgagttcaaagctttgagctttaatggaaatttgagatttagtgatttgttctgtgaaatactggcagggttttattgtttatgcattgaataggagctctggaaggtttcattgcatttggaggaaaattgagcaagaaatgaaggttttgggaaacctggtgcaaaccggctagccggtttgcagtgccacaaaaactggctagccggttttggcagggttccctgggcctttcattttctcaatttttgccatttcgatgcctcggttgggtgtttcccc

SEQ ID NO: 289871 - DNA, 635 bp, Cannabis indica
ttgaggtctgtgaaatcaatacaaactccccatttcttgttcggcttgggcaccaatatgggatttgtgacccaagctgggtagaaagcttcaattataaaattgttgttgcgtagcttttctacttcttcctttaggactactgctcgttctttgtctagtagcttttgctttggatgtactggacggtatttgggatatatattcagaacgtgcgaaatgatagaaggatcaattccgacaatatccgcatgttaccaggcaaaaacgtctaggtttgctctcagaaattttaccaattctgattttactttgagcaacaaaccctttccaatctttagcttcctggtcaggatatctggatcgatatcgatctcttctatctcttccacaggccaaacattgctgcttgggtccccaagtcgaggatccacatcttcatccccgcctttggaagttccctacatggaaatgttttttccgttgtctgtgctctggctggaggatacttccttcttagccttgcccactgcaaggttataacattcccgagcagtctgctggtttcctctcagacaccctaccacattctttgttggaaactttaggcacgagtggaatatcaatgtgacagc

SEQ ID NO: 289872 - DNA, 499 bp, Cannabis indica
ataaagaacaagagaacacaccaagacacaaaaagcactaatcaccacttaagagcaaaaattgtgtctaagaacataatgaaacataacaaaaaaataacaaaaatttttaacaaagctcacttgacaactcgatcacgaaacccttttttttttttttttttttttttttttatttttttagtaaaaagtaaaacgaacgaaaaaagtaaaaaaaattaaaaaacctttaaccgttagtaattttttagtttttcgaacctaaacgtaaagttaacttaccaaactaagttccgtacctttagttttcgttttcgttttcccgttcccgtagtagtaaaaaagtaaaaaactaaacctaaacctactaaaagtaaaagtaaaattaactacgaaaagtttaaaattttttaattttactaaacctaaaaacttaagtaaggtaaaagttaaagtaaagtaagtagggtacggtactaacccggtttacccggttacc

SEQ ID NO: 289873 - DNA, 672 bp, Cannabis indica
aatgtggtactataatttgctattattttccatgattttctttatctagtagcttttcttgctgagtcactgtgactcacgggtacttcatggtgcaggtaagaagattagcagttctgttcggccatgggtcaaaggtcttccagcagtgtacatatcaaccgtgttgtcttggcttttgtgaagcaggatcaacccttttctatgatttgatgtataacctattcttgttcaaatggatttgtaattagttgtaaaagaattttcttagcagcggatccccaaattacaacagtatttaaaatgaaagtctttatgttgaatttaattaaaggttttaattaaaccacactttttctaaaaatttatagattagtaataataataagtttataaaagcacacacgtggcgtccctgagagtcagggcgttacagcaagcgtaaaggcaaaataattgcctaggaggagcccaagcgacctcggagggctgatactcctgcccacggtcttgatggtggggtctctcccatggaagagcatactgcccctcccaacattgtgctgactctggttcctggagacgaggcgaggcaagagctccggatagctaggcataactatgccatggatgaatactcccgggggtttgctgaggtggaagcccttagga

SEQ ID NO: 289874 - DNA, 699 bp, Cannabis indica
aaaaacaaaaatgtgttctataaccacttatgttttttgtaatttaaaacactaaaacaaaattgtgttctgtaaattttatttttatttttacttgttaattttatttaagtaaagtttgggtctggggccaggaccgtggctagtgtctggagccggggttcggggcgggaccatggctggggtccggggttgagtctggcacccggatcgggtccagtcggggttcgggtttgcgtccaaggtccgggttcggtgtcgagactgtggccgagtctggcacaagatcgagtttggggttcgagaccgagttccgaattcgagttcaagtctgggtccgaggtctgggaccaagtttcgaattcaggttcgagtctgggttcgggtcagggttcgagttcgggttcgggtccaggttcaggtcggggttggggttggggtcggggtctgggttgaggtcggatccgggttcgggttcgagtcgagatctgggtccaaatccagggtcagggttggggtcggggttcaactccagggttggggttggggttggggtcggggttggggctgagtccggattctggtccgggtcgagattcaagtctgggttcagattctaagatgtaggttggagccagatctaaaatattaattaattaagaaaaaaaaaactattaaaaaattttgaaagtgacattt

SEQ ID NO: 289875 - DNA, 577 bp, Cannabis indica
ttttatccttaaaacacttagcatcctataaatgatgtttcagtgaactaatataattagtaaaatgagcgctctatcatttatctctatttagccaagctcgaaggaaatcatcgtttcacttctatatccggatagaagctatatctctgtatctatgattagcgctcccactcaattgaactaccatgttcttaacctatacgtcatgggaagaacgctcatcaaagaggtttggccagggagttatagcagttcgactccactttcatcaaagaggtttagtcgaggacctttgaatttcaaaaaataatttgaaatggcgggtttgcattataccatgtatttccaaatgaatttctgttaattataaataaatgtccctgaagtaatttttttaaagaataaacctttgtaattacttaatataaatgattctctttattcataactgaagtttaaattttacatcagtagtgtgagtacatcatttatttattggtaatagggtcgcaaatgttctacgttccagtatttctttattagcgagctattgagtcaagtcaatttataaact

SEQ ID NO: 289876 - DNA, 1084 bp, Cannabis indica
aaggtctaggtgccagacaacgttgtggtctgggttttggtccaggttttggtccaggttcaggtcctgagtttgtgtctaggttcaggactagatctgggtctgggtctgggtcttgggttccgatctcggtatgggtatttagggttttaggttttgggtttagtgtttagggatttagggtttaaggtttagaggttagggtttagggataagtgtaaagagtttaggattagggtttaaggtttacggtttagggtttaaggttacgatttaagttgggtgtggggttgggtctgagtcctggtctgggtctaggtccgtgtttgggttcaggtccgagtctttgtcccaaatccaaacaccaaccacatgttgagtctagtttgagttctggttctggtccgggtctgggtccgggttaaggtccaattcccagatttagacaccgactatgggtcgggtccaagcctcgagccttgggtcctgtccagagtccaaatctagatcctaatctagttctagctcatgtctaaggtcctggttcgggtctcaggtccaggtttgggtctaggtttgggtcttgggtcctgagtcatgggtttggatccccaattcaggtcagggtgctaggtctcggtctgggttagcgtcccacccaagtgcaggttccggtccttgttcggtaccggtccttctctcgagtcatggcctggtctgggtctgggtcacggtttggttcttaggtcccaggtccaagtatcgggtcctggtcccgttcccagttcccaatcgcggtgctagtctgggttctagtcctagtccaagttcaggtctcggtttttgtccaggtctgggtcccagtcctaatcttggttcgggtctgagtcccggtttcaagtcagagttctggtatgagtctgggtctgggtctgggttacagtcagtgtttgggttcgggttttggtttgagtctggatctgagtttgagtttgggttcttgtacgggtctggcatctggtccaggtcccgagtcacggttcttgggtcgcaggtcctttcgcaagtcttggtccgggttcgc

SEQ ID NO: 289877 - DNA, 734 bp, Cannabis indica
gaataattagtatttagtgtaaatgtccgtaaattttaaattttcatttgagatgagctaaaatatgcatatacaccatacttttagctctctatttgagatgttttttatatgtacacatccttattcaatttaattagaattttgatttttttttttcaattatatataattttgtaagtttttttttttttttctacttcttgcgcatatagtctttgatctttcgtattttttcaaacttattaagattatcttaataatttgtatttttgttttcatatttggagttgtgtgttttgttttatttgtactaaatattaatatttttgtcatttttttaatttttcttcttattagtaaatatataatagtgtagaaaattattcggacatacatatgatattaatcttttttgtattgttattgttattttttaataaatttttgttaattattattttattttattttttcttaaactttgtcttattagtggatattattagagcaaattacaagtgcttatatttaaacaaaatagaagaatgatcttagcttcaataagtaaacttattatttttttaatattgttattgttatttttgaataaatttttgttatttattattttattttttttctaaactttgcttattagtggatattattagagcaaattacaagtgattatatttaaacaaaatgaagaatgatcttagcttcaataagta

SEQ ID NO: 289878 - DNA, 649 bp, Cannabis indica
tattcatcatataaaaactgcagaaaccaatctctaactcatgcaacaactacagccaccaatttctcaactttcactttgaaaaccatagttttgaactaaaaattccacaactctaaacaacctaactatcatgcatcacaagcagcttaattaacctcaattaatcatgcttaaacctctgcaaacaacaacaaaatcacagcaacaacaacaacctaaactaagcatgcaaaccaattctttttcatcaaaaaaattcaagaaactaaaagaaagagctacaaggatcttaccaacaacttgaggtcaaaatctatgctaaaaccaaggaaaacaccactttttcttgcttctcaaagggccgaaatagagagagagaagctttgaaatttctaattttctaactttttccaattttgaaataaatgaaagaaatgtaacttaacaaccttttatttcagccaaccattaacttaataaataacataattccaccataaaagtccacaaaaggacaaaacaataatggggcaaaatgaccattttgccccccacactaaaatgacataaataacactaaaggggtaatttgggaaattctaaattcccggccaatcccgacattcccaatgtctaataaaccgtc

SEQ ID NO: 289879 - DNA, 754 bp, Cannabis indica
aataatttaaatataattaatcaagttataaatattataatttaactctaataaaatttattaataatttaaaaatatttcaaaataaattattttagcgttaattctattataatattgcctcataattaaactaaattattaaaaacataaataaattagggtgcacttttaatgggtattacccatgaataggtaatataaaaaaaatttgagtttttatacttaatttttcttatttaattagaaaaatctctcattttttcattatatgggctgaggttgtttcatcgactgaaagaaaataataataataaaaattcggcaaaaaaataataaaaaaatattgagttttacttaaatatttttcatataaacttgtttttgatatagtgtaaaaatatatatattttttgatattttgtttaattaagtagctaatttaagcgtggaaatttaaatttctcttttattattttctatcggatcaaaatctaatggcttaatatttttaaaattaatatttatagttaaatttatttagtacccatcaatggataatacccattaagaagtgttccaaacaaattattccataaaatcttaattaaggtctcgagttataaagtcttgatccgcattattatgattacgagttcccgatggccgtggcggagaaggaacatatggttgatctgatgataaacccagtgttagattccccagctcaacttggttgagaataggagttgaa

SEQ ID NO: 289880 - DNA, 549 bp, Cannabis indica
agtagtaattaatccaattccctgtggttcgacctcacttgcgtgagtatactacttgattgtgtgcacttgcgtagtaattaataattttcgcaacaagtttttggcgccgtttctggggaattgtataaagattaatattacacaaaattatactaacttctactttggtctatttctcttgctgaatttctaacatgtttcttgtagtactgcttttatctatttcaggtattttgagtgcatgcgccgccaagggcaagcagttgtattgcccgttgatcttgaaatcgagaagacttgtaggagaaacaggaggaacaaaaggcaagagagagtttcagcacttgctgaaacaccagatctcatggctgacaacgctaatgttgtgaataatggaggaaacaacggtaataacggaggtgccgttgaagatcaagctaagggccgtagcttgagagattacatactcccaactcttacgggagttcagtcatatatcaggccaccggcagtggattgtaacaacttcgaaatcaagcctgccat

SEQ ID NO: 289881 - DNA, 1063 bp, Cannabis indica
ccaaaaagattcttccaatgtatcatttctgggtccaatgaaattcataggtataggaagaagccctgtcaaatagagattttttctttcgaccatctttcgattgttaatacgatatataaggaccgctactacaaatagtactacacccttgatcgtgaaatatcgattgctcgttgaaccctgtaaatgtgaattgcgtgaaagtaggatactccaaattcgggagtccaagagttttataaaacgttcttgatggaaaaagatgtgaatgaaagatatcactgaattcaattgggtccatgaatctaagaaatagtgagaattcttgatctctctcaatatctctctcaattcgaaaatccaggatttgaattgatgtcctttcattaagattaagtcctcctaaattgcattgatttaccctaaagatttcatttcaattggaatttggttattcaccatgtacgaggatccccgctaagcatccatggctgaatggttaaagcgcccaactcataattggcgaattcgtaggttcaattcctactggatgcacgccaatgggaccctccaataagtctattggaattggctctgtatcaatggaatctcatcatccatacataacgaattggtgtggtatattcatatcataacatatgaacagtaagacctaacagtcttattgagactagaactcatagggaataaaatttatggatggaatcaaatatttcgtagttacagacaaaagtattcggttattgctgaaaaatcaatatacttctaatgtcgaatcaggatcaactaggacagaaataaagcattgggtcgaactcttctttggtgtcaaggtaatagctatgaatagtcatcgactaccgggaaagggtagaagaatgggacctattatgggacatacaatgcattacaaacgtatgatcattacgcttcaaccgggttattctattccacctcttataacgaaaagaacttaaatcaaaatacttaatagcatggcgatacatttatacaaaacttctaccccgagcacacgcaa

SEQ ID NO: 289882 - DNA, 510 bp, Cannabis indica
tgggtcttagtctaggttgggtgtgagtcccaagttcgtagtcctagttcggttgtagttccatttgcgattctaagttcgagtttgggtttgagttcgggtcagagttcgagtcctggtctaaattttgggttcgggtctggatttcaatctacgtccagataaggctccgggtgtgggttcgtgtcgtgggtccttgtcaaggttgggtccgagtcccaagttcctatcccgatatgagtctggattaagttctgggtctaagtccttggttctgatcctggtctgggtttgagtttgagtccgggtccgggtctatttttgggtctgattctaggtgtgggtttgagttcgggtccgagtctgtgtccgagtttgtgtccaggtctggacctcgatcagggtctaggttcgggtctaggtccaagttcgggtcccgagtgcgggttcaagtttgggtctgggtcaagatctcggtccacatttggtccagcatttcgatcccagtct

SEQ ID NO: 289883 - DNA, 801 bp, Cannabis indica
caagctgcgtcattataaaaacttcaattttattgataaatgaaattggcgacaacgccttattacatcactacgtagtagtatgtgattaaaactaaagcaaatctaaaagaaaagactaaatactaataaagattctaagttgcttacgggcacacccttagcatgaattgttgctgaaaagcaattgttattgataatatttgcggaggtgttggccgttccaatatcggggtactggtataaggttcatgttagagtcataccggccgagcctatacgtgccggggggtacaacttctgtaacctcgtatggaccttcccatttggccccaatactcctgctgttgggtctttagtgttggccaagactctgcgtagtactagatctcctaccttgaagcttctttccttaactttggaattaaagtatctggctactttttgttggtatgctgctaaccgtatttgtgaggcttccctacgactttccaataggtccaacgattcattcatcatctggtgattactgacttggttgtatgtcactcgtcggtgggagggtgggtctagctcgaccggtatcatcgcatcatacccataagcaagggcaaagggggtatcaccagtagctgttctttccgtcgtcctatatgaccacaaaacttcgggtaattgctctggccagcttcctttcgcttcttcgagtcttttcttcaaggtgtcttttaaggtcttattcaccgcctctacctgcccgtttgactgggggtgcgagccgccgagaagctctttactatg

SEQ ID NO: 289884 - DNA, 459 bp, Cannabis indica
ttcctttctgagcaaagcatgaccgagatctgaacctggatctttttctctccttcctttgatgctgattctccttcttgttgattggattcttcacaatcttgcacacaatgattgagatacaacttgatgtctatgggcactcactcattcactcaaggatcgaaattgaagaggaaaagagaagggaagtggcggctatagagaaagaataggaggctcaaattaagatagtctaactttagaagagaagggaagtggcggctatagagaaagaataggaggctcaaattaagatagtctaactttagaagagtagggaagtggcggctatagagaaagaataggaggctcaaagaggagaagggaagggaagtggaggaaaattcacaaagtagacatagtctaactttagaattataattgattaattaagatcaattaactaagtcttacaag

SEQ ID NO: 289885 - DNA, 427 bp, Cannabis indica
cgaaaattcttcgtgggagatatggtcctgagaagggtattcctaaacaccgaagacagtatggcaggtgttcttggacctaactgggaaggaccatatcaagtggtcgaagttctcgactccggagcatacaaattaagtaagtatgtctaaaaaatgcaactcgttttagtaccaaggtattggaatggggaacatttaagaaaatactaccaataaagtaccaggtcgagggaccactaaaagtactgaatgaacatttacttttaagtgaatggcctactgggcggactacgctcaaaggtttcgataaaacaaacaaagtacttaggtcaggtgacaattttaaagtacagtttcttatttatgcaatttgttttatttcatgttaagctaaaagatcggattggatcaaatagctttgatg

SEQ ID NO: 289886 - DNA, 899 bp, Cannabis indica
tttgcagcaatcagctcctcagaaagatcaatgaccctctccagaaggtctcttttccgtaaaagaggacccctcaccgcgcttggacttcttggcagaaggagaggcgctagagcttccgcccattctcttcctcagagcattgagcatctgccgagacatgtctgcacagaacaaaaacatatggttagaaaacagcattcagaaacacatggcatgaaaatcatgaagctcaagaataaaataaagtgaaatgcaaggtgatcgcccgcacaagactcagaagtccatcatcacctcacatcaatcttatctcagacatgacagctttcccttttccgcaaaggggggagatggctgaacaggtgaaatgggctcccttatgcgaattgcatgttcaacaggcctgggcgaggccaggagtttcttcttcctctttagtggggtcacctactcgtcctcggcctcatcttcatgattcaaagactcctaagcataatgtttggccctgacacctcctttcaacttagcttcacgcttcagttgaatcaactcattctctggatgagctcgttcaggccggccagcaccagacttcctcttcttctccgccacggacttaggagaaaactcctcgggatagagcctgtacttcacaagattttcatcggaggtcaactggataatattcatatcttcccccggcaaccgggcaactttctgagctctatccctaagagcaagagtgaggggaggacggtgatacgtcaaaatctgatgaaaccgagtccgggtaatgctcggatccttcaccatgaagtactcatcaacaaaacacccaatttgctgatggccttggcatccgtgccagtcaaccacttgaaacctgactgagagaa

SEQ ID NO: 289887 - DNA, 752 bp, Cannabis indica
caaatgctcattctcttgttagtcgggtatataaggcccgatattatcctcagggttcttttttgagtgcttctcttgggccgaatcctagtttcatatggaagagtatttttgaaacgcaagctttgattaaggagggagctcgtcggggggttggtccaggtacgaatgttagtgttcaatttgacccgtggcttgcggatgagtctcaaccgtgggttacttctagagctactggtatggagacgtggacggttaataatctcatggtggtaggagaacgggcttgggatttagaggtggtttcagatatattcaatgaccgagataaagagatcatcattcgtactaacattgatcaggagactcctatggatacttggtattggcataaggatctttatggattctatactgtgagggaggcatatcggttgctgcaccattcagagatcactaatactagtgaggctgagattaagatatggaaaattgcatggaagcttcatgtccctcccaaagtgcaccaacttatgtggcgtgctttatctggttgcttggctactaaggttcaacttaccaccaaacatattcctctagaccaagcttgtcctatgtgtaaccaggtgcctgagaccatttaccatttgttggtgcaatgttcttttgcacggtcttgttggcatctttcggttctaaattggagtcatacgcctatggagtctttttgggattggtttagccacattctg

SEQ ID NO: 289888 - DNA, 507 bp, Cannabis indica
aagtcttatgtcttttaattttttagtttttattgttttgagtcaattttcttaatatgagtcaatctgaaagtaggtagataacatgatttgaaaattttatttatttatttatttatttattgaaaaatccctgtgcttggtgatgttatactcttgactaatttcaattttgtgctttaaaagaacatagaatcatattaagtaattttctaattgatttatgtatgctaactctgaaatgtggaaagttgtttggaaaattccagaacttgcttgcttgctatttgaggcgaaataataaattatgcatgactaggaaagtgatttaggcaattttttggatcgattgtgcctttcaagccatccttgtaatttttatcctagttaccttcttttgagccttaacctattctttgttttacacatattgagcataaaaagataaacccatgaatatctacaatttgaccctaatcgtaccataagtagatctttagtttgggg

SEQ ID NO: 289889 - DNA, 646 bp, Cannabis indica
aacaccatggttgagtgtccttgatcatgaagtgtggacgttaccagggtaacgtataaaagaacgtcaggaagagtagtggtatcactaaagtaaagaagattacctaaattacttaaggtgatacagtaatgatggagaatactttataattgactggatagtcaatatggtatataaggagaccattgaaattctgggaaaagattactatattaagcaattatagaaaggcatactcacccagtatggggaaaagcttatgaattgagatgaaatttaatagacaagtatttgagtgattggtgaatattggatcacaaagtaggttgttgattaaacaacgagctatataattgagtgtagaataagttttaaagtggttaaccaagtataaagatagtgatgattgcaagggagcaatggtgtgttgaccaaaagtcattcactcatttattttgatgataaacaaatatttgattattatttgttactaatcttttcttgatcattttgcaaacaagttcacagagtatctatatttgctcggtaaagtcaaacataatcaaagaagtagattcaacaagtatataaactacgtcatacttcataagagcaaaagattcatcaagggatcaacaactca

SEQ ID NO: 289890 - DNA, 624 bp, Cannabis indica
aaacttatttgtacggtagtccgaacccgcatatgacgttcttcactataacgtcttgaaccttcttcaatgtgatagttgcgagtggttcggcttcagtccacttagtaaagtagtcgactaatacaaccgcgtactgcactccgcctttacctttaggtaactgtccgattaggtcaattccccagacagcaaagggccacggaatttgcatttgtgtcagctcgttgggcggagctcttggtatctttgaaaatctctggcatttgtcgcacttcttgacttaagctttcaaatcttcaatcatcgtcggccagaagtagccttgccttagaattttctttgataagctctgtccggctgcatgatttccacagaatttgtcgtgaactatatatagaagccgtgcaacttcattttgtgtgacgcatctgagtaatggcattgagaatcctcttctgtacatgatcctgtctacgatgatgtaccgtgctgcctttcttctcatttctgagcttcatttcggttatttgggagttccccagagttgagataggctgctattggcgtcatccagttcggagatgtgtcgatcatttcgatttcttccgtgctggtgatgct

SEQ ID NO: 289891 - DNA, 599 bp, Cannabis indica
ttaaaaatacttaaataaaattaaatatatgacaaagcatgcgtgcattgcactaatatgactctagtctcataataaatgtaaattctacaaatttatatgcagatcaagtaaaaaaacctccattgatatcaccatatccatatattttgcttgactatccaatgagaaatcatttaaactaattaagaactaaacaataccaacttaacaattccctttaattaattcatgtaatgataaaaaaaaacatgtatctcaggtagaattccaaatctccatctctgcaaaagaacaatttttcaacacttttggatcagtcaagttttgatgtactatgaaaattataccaacttaataaaagagtattgctattccgcattgaggtccttagcactatctagaaattatactttatgatttgttagggatatttttttataaaattattatgttaagttatatgaaattcaaattcttaattaacaaaacaattaatgcatagcataacaaaactcgacagtaacaaatacaaataagagaaatgctaaagggcaccactggtgcctagcaccttcctacgtatcaatatcgctatt

SEQ ID NO: 289892 - DNA, 564 bp, Cannabis indica
actgtacttataatataattttatacgtgcaaataaaagtcccttatataaaataactaggaaacatgccgcgcttcgcgagtcggctaattttaaaataattcttaattttttcacagataacattaataaaaattcaataatgaacaataaatgaaacacattaatatatcattaataactattcagttattatttttactatcaattcattataatttttattaattttttttcttagtttttgaaattttgtaaagaatcatatattagactaatttagatttttgcaccctaaactttgacatgtaccaaatcatagcccctaaacttttaagttgttaaaaattctcctcgaactattaagatcattgaatttaagtttatctaattttactaaaaaaaaaatcttgacgtagataaaatttagggggcacaatttattacatgttaaagtttcaaggcatcatttagtagatattatggggcatgatttgatacatgtcaaagttcaaaggataaaatgttagactatatatatagtgtatgtaatatagcatatac

SEQ ID NO: 289893 - DNA, 740 bp, Cannabis indica
agctttgagttccaaactcaaacttggttaaacctagctaacatgcattcaattcagcccaaatcaacttaatcatgcataaaataacctcagaaaacaaaagcaaccatctacagcaagcaattaacagattcaacacatttctttgaaaatcatatttttgagctaaaaattccaagcttgaaacaaagcaaatatcatgcattactaacagcttaaataacttcaaattatcatgcttacatctctgaaaatatcaacaaaataaaggagcaacaacatccaaaatatcaagcatgcaacacactaaattcatcaaaattcaacaaatttttaagaagaagagatgaggagctaacctagcttagattgaacacaaaagaggatgaaatcacaagaaaaaatccaattcctttgctgcaccaagaggccgaaagagagaggaaaagagagagagagttttccaaatttttctattttctctaactttgaaattttgaaaagtaaaatgaaataaaatatgggattctaactatccttttcagccaacaaataattaaaataaacacataaaattcatttactaagtccactaaaggacaaattatcattggggcaaaagaccattttgcccctcctcattaaaataacataaataacactaaaggggtatttttgggaaattctaaattcccggccattcccgacattcccaatgtctaataaaccgtcccaaacta

SEQ ID NO: 289894 - DNA, 713 bp, Cannabis indica
agagttgcattctgtaactacagaaaactgttttcagtaccagttttattattccgcatttaattaatcatttaattaaataatcaaactgggaatattaaaatacggaatttcacattatttgtttttcattatttttgagctctctctcctgttcatcttctttttcatttttttggcccaatttaatttcttattcagttcttcttcttcatcttcttctcattttttgtctttagtttttgaagttttcagtcacattttttagaaagataagtagttttttatctaattttttagaactgagcttacaatatagcctctattgcatcatgtgttgaggttgtgcagaagatggttagttctttttaattatttttttattcttttgttttttttttttgattttagtttagtgttattttacggttatttttctatatttcttgacgttcaatttccattgttcttgctccatcttgctagattaatgattatttttgggtgttctcattgttctgtggtggttctatctgtgtgtgtggaagatggaggctataaactcatttcttcttccttctctatggttattttggggttttttattatggttctcctataaatacatttgtacgagctcactagaaaaaaggttttgaggtgtgtggttcttttatgtttttctaagtggttatatttgcttattgttttac

SEQ ID NO: 289895 - DNA, 793 bp, Cannabis indica
agggctgggtcccaaatttagacatcgactacaggttttgtccaagccccggggtctagatccagatcccaatctcgagtcctagtttggttccatttctggtgccggtcacgagctggagcctaggttcaagtttgggtctgggttgggtactatgtcccggtcccagttatgtttcccaggtcccaatcttgattatgggtctaggtcccggttattgtgtgggtttgggtctcggtctaggttcgggttcgagtcctagtctcgtttcgggtttaggtctccgtatgggtttttatcttcgttcgagtttgggtttaggtcctggtcctggtcctagttctagttcgcttctagttccatttgcaattttgagttcgagtttgggtttgagttcgggttggagttcgagtcctggtctgagtttgggttgaggtccaaatttcagtataggtccaaatgagactccagtgtgggttcgtgtcctgggtgttagtctaggttgggtccatgtcctaagttccaatcacgatatgagtctggattcagttctcggtctaagtccttggttctgatcctggtctgtgttcgagtatgggtccgggtccgggtcttgttttgggtctgattctaggtgtgggttcgagttcgtgtccgagtctgtgtctgggtttatttccaggtctagaccacgatctgggtctaggttggggtccaggtccaagttcgggtcccgaatgcgggtccaagtttgggtctgggtcaggatctcggtccagatctaggtccagca

SEQ ID NO: 289896 - DNA, 536 bp, Cannabis indica
cccattgccaataaagtggtggccagagtcttgattgacaacggaagttccgtgaacttacttttcaaggaggccttcactgcaataggcctaacagaccgagacctctcacccagcggttcccaactcacagggtttaacggaacaacgcttatcccaatgggaaaagtgaggcttcccgtcactctgtgcccggacaccccccaaagcacgttcaaatactgcacttttgtggtggtggactgcccgacagcttataacgcgatcctcggccgaccggccttggtagattttggcgcggtcacgtccattcggcacctgtgcttaaagttccctacccaggaagctggaatagggacggtgagaggaaaccagggggaagcaaggcaatgttacaatgttgcaacccacctgcccgtactgatggtccgggaaaacattgagccagaaatggctgaagaagatgaattggatcccgagtgggtccgaaaaaagttgtaggaccaagtggaggatgtacgaggaatatcagtgtg

SEQ ID NO: 289897 - DNA, 652 bp, Cannabis indica
aaaataaaaactaaacatgcattatctaaaataaaatgataaactatacaataaaacttatataccatataacagaaaatatataccttacaatagaaatatatataataataacaacaaataaaaataaaattatataggatgttaataaaattatatatcatgtcaacaaaagtacaatagaaaagagaatttaaatattatttaagaaaaaattatataccgtataataaaaaatacatataccattcaccaaaacatatatacaaaaaataataataataaaaatatatattactaatatatatatgtatactatactaaccaaattatataccacaattaaaatatacaatgataacaaaattatatattaccattgtatataaaaaataaaaactaattaaatatatttaaaaataaataatcatacaattaaaatatataaagataataattaaatatatgtagtgttgactgaggttttcggcaaccaattaaataatatataagaaaagttgtaggaagtttaatgcatgaaatttttacgtggttggggctttaacgagccttagtccacgagtctttgttattaatgagagtatttattacagagtatgttcttggtgaacttcactcctgttttctctct

SEQ ID NO: 289898 - DNA, 812 bp, Cannabis indica
aaaaagtcttcatctcactttcttacagctcattattataattatatttcaacagttgctgaaaacctcggtcaacaaccatcaattgtgcccagtaagagtggacatcaattaacacagaattaataaggacacatctccctacataagataaattttttagagctctacatacggatttgttggagtttatatcggaaaagtaagtatttaatggatagtatattatggaatatataaaatataagtataagataaatgaatcgaatacattaattatagaagtataattaataaatatttaaaaattccttacatatgaagacggtataatcttgtaaggtcgtacaagagaattaagattatataatatgaataaaacaagtcggtaatgtattaaagtaagagatctttaatatggaattaccaagtacagtttactatacactatactctagtctatgtgtgattttaattcggatcgcatgtgtagatagacatatagtaaaagtattatgtataatttgattatacatgattggaccgatttgtaatagcatctttcattaacatgtcatttaccatgaaagaattatttatatcacaatgatgattcactacaagaattttgtatagtaccggcggagacatccgccggtattaattgtctaaaccgccggtaataattattaccggcggaatccgccggtaattatccgccgatattaattggtcgctattaatgactattagcgaccaaaagggacttccgccggtaataatattaataccagcggattaatagcggtggg

SEQ ID NO: 289899 - DNA, 699 bp, Cannabis indica
agtgaaaattcataaataagacatagtctaattttagaattattattgattgattaaaatcaattaactgagtttgcaagtagtattatctcaactactgaggggaccatgggcctatataaccgagctttcaataagatgatttagaattcaccaagtaaatttcctaacttaataatttcgccttgcgtcactatagatttggaattgaatatcactctcaattatatagaacactctataagtaccacgatatagatacgttatgattatccattgttacaatcttaatagtcaaagatcatctatagatgatctacactgaacagggacaaatttaccattctacccttcaatgtattttatccttaaaacacttagccatctataaatgatatttcaacaaactactataattactgaaatgagggctcaatcatttatttttattcagccaagctcgaaggaaatcatcgtttcatttctaaatacttatagaagctatagagtttatatctataatcagcgctcccactcaattgaactaccatattcccaagatctaaatattcgccagaaacataggttagcatccactaacaacttgaagaacataaataatacagctaagttgaacctaactatatcatgattaagatccataggcctaaaatcaaccattgatattgacttagaaag

SEQ ID NO: 289900 - DNA, 506 bp, Cannabis indica
gttcttgaccaactaccccagcagggacttcgtggttgcccccaccttgacctggttgttgtccatttacaggggcattttgattctcctggatcaccgcctcggcagggacatggtggtttcccctgcctcgaccgcgacctcgaccgcgagcacttcctcgccctcgacctctagctcggtctcttacagccgctctttcattcaaccgggttgatcttctgggttcaccgttttccatcaaatcccttaacttgttcttcaaaagaaaggagatggtagcgataagaaaaataaccaaagatcttctgggttcaccgttttccatcaaatcccttaacttgttcttcaaaagaaaggagatgtagcgataagaaaaataaccaaagatgtatcccgctcaaaaaggaaaaatctatacactaaaaacaacataaatcatcaagcaacaattcaccatgtaaaataaataaataaataaataaataaaataatcttcactcata

SEQ ID NO: 289901 - DNA, 504 bp, Cannabis indica
attaaatctagaggctcggtttctttttctaacacagatttatgtggtgttttagtaatcttggcttggctacaaaattcgcatttttcaaagtcatttaaagataatttaggaattaggcctaaactactcatgttcttgattatgcgtttatttacgtgacaaagtctagcatgccaagtattaaaagaacacaacatataagcagaagcattaactttattgacttgaacattcaatttaaacattccctcagttgcataccccttccccacaaatatcccattcttagttaaagtaaacaaatcagctcctatagtctgagtgaaccccgccttgttgagaaggtagcccgagaccaaattcttcctcatctctggagtgtgcatcacatcttttagaatcacagttcttccagaggtgaagttcaattccacatttccagtaccagcaactatagtggtgtgggagtcacccaacaacactttctgatcctcagtagca

SEQ ID NO: 289902 - DNA, 343 bp, Cannabis indica
tgactccctaccccaacaatactcatcccatcgaccgctgtcaatgacatctaaatcaaacctagaaacttccttatctggagtattggtaagaaggaacattcgatgaaatacaacacagagagttttaatcctagggattcatcctgtccccacctactgcccaagaaagcatcctctatagccttatgatcaatcatttttatgccagggaaacatacctcaattaaagggtttgattcttgggaaaacaacagtttattgcaatccccaaaacaatcaagaccagtgatcaagtaaaattctttggcattgaaccgtatacaacgaccagcaaccttag

SEQ ID NO: 289903 - DNA, 651 bp, Cannabis indica
gacatccttgtgtactctcaatcagaataggagcatgagcaacatctttaaatggttctgcaatagctttgagaacataagttatacgccaaattcaagaagtgcgaattttggctatctcaggtgtcctttcttgggcacattgttagcaaagacgggatcaaggtggatccgggaaagatagaatctgtcagagattggccaagaccgaaatcagtcacagaagttagaagtttcttgggtttggctggttattatcgtcggttcgtagaagggttttccaaaatttcaacacccttaaccgagcttactaaaaagaatcagcgttttgtatggacgaataagtgcgaaacaagttttcaagagctgaaacaaagattaatcacagctttagtgttagccctaccttctgataaagagaaatttgtggtttattgtgatgcatccagacagggtctggggtgcgtactgatgcaggccaatcgggttattgactatgcctcccgtcagttgaaagattatgagcaacgatacctgactcatgacttagaacttaccgcggtagtacttgctttgaagatttggcggcattacctctatggagagagctgtgaaatttatactgccataagagcctcaaatatttcttta

SEQ ID NO: 289904 - DNA, 275 bp, Cannabis indica
gaaaaaaaaaactattcaagtggccggccatggtgttaatgggccccacttggaattttgaagttttcacaattttcatttcaattttctcaaaaacgccaattttccaattctaaccatttaaatgccaaaactaattatttaataactaaaatagattattaaataatattgtcatttaacataattcttaattagacatatagagtctcttaactaataaacaaacctagaatctcttttctttacaattacgcccttgcttagtgaaaatt

SEQ ID NO: 289905 - DNA, 94 bp, Cannabis indica
aaatttcaatgaagaagaaagaggagaagtggtcggccaaagatagggagagagagaggctcagttttttctgaatgaaaaagtcagaagaaaa

SEQ ID NO: 289906 - DNA, 620 bp, Cannabis indica
aaagtgaagaagagcaagaagttgctctgattcgcaaacgcaagggcaaaatggttgcccaggaggagcccaaacggcaacggagagctgacactccaacccacagtcttgatggcgggatctcccccatggaggaacacactgcccctcccaatattgtgttgactctagttcctggagatgaggcgagacaggagctccggatagctaaacacaactacgccatggacaaatactccgggggtatgctgaggtggaggcccccaagaggatcttacgagttgagatgcaaaatactctcaacaacccggaataccagaatccgtgggatctaaatttggatcccctgtcggactggttcggtcgtttcctcgagcccacattagctcccttcgccgcggagatgactggcgagtttgcgtcccaacttacccggtgtgtgttgtgttaaaattagatacgcaagtgcacgtagtcacaaacaagtaatacaatggtaagtaaaagagtatcgtctccacagggactgtgaaaataaaatttctattgcaaaaattaattaccaagcaacaagcctaaaaactaaaattaaatgattaatgaatcaactaaaggagtaa

SEQ ID NO: 289907 - DNA, 732 bp, Cannabis indica
gctttttggaaaaaggagttaccaatcttcattacatttctgtcttgtagagatctggaaactggctcatttcgaagttgatgtccctcaagactgcttaaaccgatggaacttgcactacgaagaatacaggaaagaaatgaccaatgccatgaagatcgatgaccgtgatgtcaaaaaccagacttcaaatcaaatcaaaagaaagtataagatggtaatttttttcaactaataaaattaagttgcttttagtcttcctgccctattaactaactcatgctctcctttctttagatactttatgaggctgaagaatttgaaaacagtaaaaggaatatagatgacatacacaatgaggcactagcgatataccatttgatttatgactacgccaaaagtaaaggtggtgccagttattgttcatttgcatggaacatagctggtccagctctcttcaacattctcatctccaaacaaactggtgagagggtcattcattgccttccgtctattttacgtgagctaatttaatgattaaatgtgggtaatttcattttaagtagaaagtactaattatataggtgacttggttgtatgataatgtgtatggtttctccgtttaagcatgccatatcaattctcacggggccacttatgttttcaaatgcttctaaacttctcttttcatttgtcaaaatctagtccaatttttactatcaagatgcaatg

SEQ ID NO: 289908 - DNA, 510 bp, Cannabis indica
agaaccctcttctgtacataattccctctactatgatataccgtgcagctttccttctcatttttcgagcttctttttgataatctgggagtttcccagagttgaggtaggctgctattggtgtcatccagtttggggaagtatcaatcatttcgatttcttccatgccagtgatgctaggctcttcgaggaactggataggaaccaggttggccttgtcacttacattgctgcttgccaatcgagctaacgcgtctgcagttgtgttttcttcccttggaatttgtctgagaccgtcgcttttgaattgtgcaagcagatcatgtattttgctcagacatgttatcatcctttctccccgagcctcatattctccggatacatggtttaccaccagctgtgaatcactgtagatttcaatgtgttcggccttcatctcatgggctagctttagcccagcaattagagcttcatactcagcttcgttgttagatgctttgaatccaaact

SEQ ID NO: 289909 - DNA, 663 bp, Cannabis indica
tgaagtccacccccaagcaaggcaggttggggtacttctacttctctcaaccatgcttcaagtggttgacgggcatggacgatacgaccatcagcaagattgggcgttttgctgatgagtacttcatggtggatggctcgggcatcactctgtaatatcccaataagccttatggtaagtaattaggatttataattatattatggattaatcaggttataagtgggattatgatcctactaatctagttcaacataaattttaaattttgctataagtgagtaaataagcgtaatttataaactacggagatttatatagtatgtctgaatgtaatataagataaatgtggaataaaaatatttgcaggtttggcgaccttggagactcgatcgggggccaaaaatatcataacaggtttaattattagttttaatgggaatattgtgattagttgatagtgtatgtattggggtaataaggagtatgtagaatttaacttagcgccctagaagtatagatttcttaatggctaagaaataataaaataattattaataataaagtttttattaatattattattattattatctttttttttattattattattatattaaaatttaaagttatctgtatatatattaaaactttgaaaaa

SEQ ID NO: 289910 - DNA, 520 bp, Cannabis indica
accctagaataagactaggagcgtgaccaggacacagacccgtagtcggtgtctggatttatgacccagccttggacccaaagcctgaaaaggacccgaacccacacccgaacctggacccggtcccaaacccaaaagtggacgcgaacccgtaccttgtgacccaaaattggaagttgatcggggctagaactaggacttggacttggaatcataattgaaattggacctagatccagaaccgtaaccggaccaggacccaaactccaaattaaacctagacccgaattgggagctggacctggatcccaaccccaacttggactccggactcgaacccgaacctgaactcaaacccaaacatggaaccagactagggacacagaaccagggccgggacatagaaccgcaccccaatctcaatcccaaacccaaactaagaaatgggacctgggacctgaaccagaacaagaccgagacccgtgatagtgatccagatcttgactcgagattcgggtaa

SEQ ID NO: 289911 - DNA, 699 bp, Cannabis indica
ttcttcttcgacaagttacggtaaattcaaggagaaaatgtatacaagagaagacatcgaggatcatagtcattatatatctatgggtggcacaccaggcggggagttacatgtaggaaagttttttagagacaaagagcatttaaagatggttgttggcttgtatgcaatgaagaaagggtttgactactacgttaggaagtccggtactgatatttggtacgtcacatgtaaggatacagattgtgggtggagattaagagcgaagaagaacgtactttctaacatgtttgaggtgagtacatttcataatgtacatacatgttcccttgatcttcgaggaaaagataaccgtcaagcatcacctttgatagttgcccatctaattaaggataagttcgcaactgacggctcggatcacttggcctctgatataagaaaaagtatgcacaaggattacgggatccaaatgagttatgaaaaggcatggaggtgcagagagaaggcactacacctagctcggggtacacctgaagattcgtactcgaaattacctagttacttgcacatgctacagttgagaaatccaggtaccatcacggattttgtggtagaagatggtcgcttcaagtattgtttcttctctctgggtccttgtattcgggggtttaggttttgtcgacctgttgtatgcgttga

SEQ ID NO: 289912 - DNA, 627 bp, Cannabis indica
tattaatttttgactatggtatatctgcttatgattgtgatagtttttgtatgctactgtatattgtggaaaacaattcatttagtagtatattagtttaagtttgtgatatacgtatattggtttaaggtgtattgtttgtatatcatacgatatattaataaaaaattaattatatggttaaataacatattagacaacaacaacaacagcaaaatctaaaagaatatatataataccttttctataatgaaaaaatagttgacaaaaattcactagagaggttttgatttatttttcataatttctattaaaggaataaaacatataatacctttttgttgaccgaggttttcgacaaccaataaaataataataatttagagagctgtaagaaattaggaaggagattttctacgtggttggggcgttaatgagccttagtccacgagtctgtgtatttatgatagtgtttaatacagagaatgttcttggtgagtttttactcttctagcacttatgcaacccagaattttgactcctctttaatgagctttggggggtatttatagtgtttttgtggggtgatccccagaattaaggcacatgcctttctgtaactatcag

SEQ ID NO: 289913 - DNA, 655 bp, Cannabis indica
tttcatatgtccagttatatgcctgctacccttattctttataattttattattaccggctcgagttaagtgtccatagtaagtgtgtagcgttattattttttaaatatatttcaagctaaactccattttcctcttctctttctgcaaattttaaatttgacttttagtattgatttttaaataaccccctacactaattaaaattagtttttaaattattttaaattatatgattatttattgaatctttctcaattaaattatagaacacctaacataaaactaaatatacgtgccttgcacgtaacttttatatatatatataatttagaatcaaaataacatattttgtaaaacgacaataccagtcaattgatagcatagcatacttgaaaaacgacaatatcatgtatataaaaatgtaataataaaaaaaagcatcttttgtaacaactcgttaaaatatagtatttatatataaattgtactaatttaattttagtcacaataaatattatgattaaaaacacatttagtcacaataaattataatttttataactaatatatttattatttggctaattagtaatttttctccctgaatttttgacatgtactaaatcgtacccctgaacttttttggtcgtta

SEQ ID NO: 289914 - DNA, 412 bp, Cannabis indica
tcctcgttttcattcataatttctagcgctacattataagcaaaaatattgtcgacaattacttcgagtcggttccattcttttcttgtattgacataatttattgagatctcattattgctaatattttcaggtacctgaatctcttcaagagatttgtgtatgtcaacatcttcctcgaaattttcaacctcttcattagggccatcttgataatttgctccctttctttttcgaggatttttatctttggaaccgaccggtctaccacgtttcaaacgtgctttagaatcattaattaattgtccttctgggacttcaattcgaattggaacattttcagctggaatatgtgattaggttattttctttgggtcagtgaatgcatctggtaattgattcgcaatatttt

SEQ ID NO: 289915 - DNA, 597 bp, Cannabis indica
ttcgtctctacgcttcccagtggggtactccttctcctcacaaagttgcctggttcttcgatttgaagtccacccccaaataaggcaggtcggggtacttctatttctctcaaccaggcttcaagtggttgaccggcacggatgacaaggccatcagcagaatagggcattttactgatgagtacttcatggtgaaggatgcgagcattacccggactcggtttcagcagattctgacatatcaccgtcctcccctcactcttgctcttagggatagagctcaaaaacttgctcggttgccgggggaagactggaatattatccagttgacctccgatgataaccttgtgaggtacgggctctatcccgaggactttactcctaagtccgtggcggggaagaagaggaaatctgatgctggccggaccgaacgagctcataaggaggatgaactcattcaacttaagcgcgaggctaagttgaagggaggtgcaagggccaagcaatatgctcaggagcctttgaatcctgaagatgaagctgaggaagagcaggtgactccactgaagaggaagaagaaactcctggcctcgccca

SEQ ID NO: 289916 - DNA, 516 bp, Cannabis indica
atttagaggcggttgggtaaatacatttttttttttttaggttttagccctatgccgtcggttcctttataggaaccgacggcatagggtacacgtgtttgctgacacgtgtaccctatgccgtcggttattctataataaccgacggcatagggttatatatacaaaccctatgtcgtcttcctcattcacctcacgcgaaccaaaccagagagcacagccaccaccagagagaagagaaaaccctcgccaaccacccctccaccagcccttttctcccccatttctcaaccatttcagcccatttttgttgcaaaatcttctattttcgatacttaatcctatacacccaaaaagttttaatttttttccctatttcactgtcatccgaacctatacaaaaatagtgggtataactccggccaccattttttgttgagaaaacattgaatctcaacctcttttaaggtataaatatagtttctattcatttttataatgtacattgttttattt

SEQ ID NO: 289917 - DNA, 556 bp, Cannabis indica
aagcttcatggatgcttattcggggtacaatcagatcaaaatgaatccaccagaccaagaacatacaagtttccgaacatatatgggtctatattgctacaaagtaataccgtttggtctaaaaaacgctggagcaacataccaaagattggtaaacaaaatgtttgaagaccagatcaggtgaaatatggaagtgtatgtggatgaaatgctcgtcaaatccaggaaggctggggtgcacatagatgacctggacgaatgcttcaaggtcctcagaaagtacaacatgaaactaaatcccttaaagtgctcctttggagtcagctcgggaaagtttctgggctacattgtcaatgcccgaggaattgaagccaatccatagaagattcaagccttcctagatatgaagtcgccaattaaaaccaaggaagtgcaatgtttgactggtctgattgccacacttagcagatttgtttcaaaatcaacagacaagtgtgtcaaattctttaacatcctgcgaggaaacaaacaactcgagtggacagaggaatgtgaa

SEQ ID NO: 289918 - DNA, 669 bp, Cannabis indica
tgagaaataaatgaacccttatagttgcaggtgtgtgaaaattcacattcaaacaccgcatgcatgggcatcgagctaatccgtcagcgttcacgtggttcgttgctaccgcaacgaactcgtcaacgccacttcgaaactctgcagagcgccggtgcgccttcatccaacttcggttggcaggcatcttccactacgaagtatttaacaaaaacaatttaaaaacaaacaaaaaaatgtgcaagtgtcctaatccaccttctcactccattactaaaagggtaaagaacctatcccattcaggtttgtaatatacatatagtgcaatctacgctcttaagattatttcatttttgtaaaaatttcggcagcacctccccacagttcttataagttagcaaacttgtagtaattaagtttgccgacttacaagaacgtgtaagaagacgttgtaccaaaatatctactaatgaaataatcaaataagcaatagatcatactataagtataaaacaagcccaaactatccatgcggacaaacagtcctggataatttggagaagcgtatttaagagtccttactgactcagcctctccaaacgggtctaaggtatttcgtgcatgtgtaaaattgaaaaaaaattaaattatcactatgtgataatacaa

SEQ ID NO: 289919 - DNA, 518 bp, Cannabis indica
ccaggtgagttttgggagagcgagcatcgaatcgaccaggacttgcttcaactcttacacgaggaccatcctcgtctctgttctagcccaccttcttccagtgaaggacattctccctcaaatcttttatccagccatagaatgatggctcgtaccaagaaaacaacgcgtatggccgacgcgtctgatcctcaagtggctcggcacgccactttgcccagcgccgaacaggatccagatgtccaggaggagggagatcatgaagggggcactgaggtccaagagattgaggagtaggacgacgttcgtcctagcagttcctctaaggcggaggaagaggaggaggttgaaccctaaaactacgggggatacaacgaggttggggagcaagtcgatgctgacggagacatcctggttaagggcgtggactacgtcagtgaggagcttactgctgcggttcctcatagaaggcaaggtgccttgggcgctaggtgtgtgagttctccgtccagggttac

SEQ ID NO: 289920 - DNA, 795 bp, Cannabis indica
gacactctttataagagagtggtagacttggccttaattgctgaggagatcgagcagcaagtaatgaaagagcaggctgcaaaggatgccgtcacggcatcaaaccctcccgctagtggtaatatcagtaaggggaccgacagtagcaaccctgagcacaaacggaaggctgaggcttccagagcatcagggggtaatagaaagcttcggggaaactaaggtggtcgtcaaggtcacagatcctcaatttcgatcatatctagagtattcaaaatgcaagaataccatcagggtgaatgacgggccaaggatgcatactatatttgatatggactatatgaatcagatgttccaggattacttgaacagatgagtaatcatgtttatcaatgacatcttggtgtattttgaattagaagaaaagtatgaattgcatctcagagcggttttgcaaaggttacaggatcacaagctttatgctaaattcaaaaagtgtgaattctggttatctcgtgtctcattttggggcacaaagtggataaagatgggatcatggtggatccagccaaaattgaagctgttcgggattggcgagcaccgaaatcggctacagaggttagaagttttctgggtttagttggttattaccgtcggttcgttgagggtttttcaaagatagttgtacccttaatggagctgacttgaaagaaccaaaagtttgtttggactgatcggtgcgagaaaagtttcctggagttaaagcaatgcttgattaccgctcctgtactaactctt

SEQ ID NO: 289921 - DNA, 553 bp, Cannabis indica
aaggagtctaactaaagtcgcagcctacaaacaagtcacgcatcctgggccaagcgatatacctctagaaacggctgggagaaactcagtgactcaaagggcatgcgttctcaagcataaccctgaagttactgaggtactcccaccgtttccagaatatctaccagccaaagagtacgctcattagaacattaacgcatgtcgcaaatggctgggtgtatcacagtatctcaaggggcatataactgcgtatatgaccattagaatactgtgacacatccaccatttggaaactcagttaatgttctcgcgactaacttcacagcatgtagaaccctaaaatatctaggcatcaatcagaagtaaataagtctcgcaaatatgcgaatattcgaagtgttcattcgaatacccgtgagtattcaaaacataaaacagtgcatattcaagtatttcttgcaccgtatgcggttatgccaatttacaggtcattctctatgaaactacccaggtttttacctaaaaacatagcctcatacataccatctataaa

SEQ ID NO: 289922 - DNA, 372 bp, Cannabis indica
gacatagaagtgaaacgattatttccttcgagcttgcctgaatagagataaatgattgagatcttatttcagtaattatattagtttactgaaatatcattgataggttgctaagtgttttaaggataaaatacattgaaggatagaatggtaaatttgtccctattcagtgtagattatctatagatgatcgttgactattaggattgtaataatggataatcataacgtatctatgttgtggtacatatagaaggttctatataactgagagtgcattcaattccaagttctatagtggttcaatgaagaattaatgagttgagaatttacctggaaaattctagatctacttattgaaagctcggttat

SEQ ID NO: 289923 - DNA, 565 bp, Cannabis indica
aatttgaagtgtaaggaagaaagtattggaattattttaccaggatctagaattactaacaagtatgtttcattaatatcctaatatgaatttctaaaataatgaaataaacacatataaagtttagcaaaccatacattgggtgcagcggaatataatgactccttccgttcagatctcttgccctttattcctttctgtagcagagcattatcaagatctgaacctggatctctttctctccttcctgagctcgattctccttcttgttgattggattcttcacagtcttcgacactatgattgagataccacttgatgtgtgtgggcactcactctatccctaatggcagaaattatttagtgttaagaaaggcttagtgttttgaattgaagaagaaagaataaggaaggggtctcatctaggtttttagctttggaggcattagtggcattagttggatgatgagaccatagccttccttttatactattcttcaatagggttagggttgaataatatggattaaaaaagataaaatattgggcaaaaattcaaccttgg

SEQ ID NO: 289924 - DNA, 505 bp, Cannabis indica
gagattcatttcgattatctgggagttcaccagtgttgaggtagggttctattggcgccatccagtttggggaagtatcaatcatttcaatctcttccgtgccagtgatgctaggttcttcgaggaactggataggaaccaaattcgctctatcacttacattactactcgcaagccgagctaatgcgtcagcagtcgtgttttcttcccatggaatttgtctgagagcgtagcttttgaactgtgcgagcaaatcatgtattttgctcaaatatgctatcatcttttttcctcgagcctcatattctccaaatacgtgatttactaccacctgtgaatcactgcagatttcaatatgttcggccttcatctcccgggctagttttagtccagcgatgaaagcttcatattcggccacgttattggatgctttaaatccaaacttgactgtagcgtgcaggtgttgccccccaggtgtgacaagggcgattcctgtgccgaacag

SEQ ID NO: 289925 - DNA, 509 bp, Cannabis indica
accgccttgtggagaaatcatgggagctttccccttcgacgcatcacgtcttgaaggcggttgagcgagtggaccctacacaaaacacaccataatatatcaaatttgatccaaattttaccgaaatttcggcagcacaacgactgtaattgaataacccaaaaaattttaaacatgcctatataattacaaataacacagatataaaagtagtttattcatccatcccaccgcaccacatatatttgcaaaacctacttcactatgattgaatattgaagatattcaaacgttactaatcattgataattaatttataacaaaagttacctcgggtgttacaattaggtatttaggctaaggaaggaacatgtttggtactgatattaaatgcataaatagacattatgtatttagcatgaacaaacacaatataaattaaattatatatcaagttaccaattagacacgttttatttattttttgtttatgtttgcctgaatcacaa

SEQ ID NO: 289926 - DNA, 964 bp, Cannabis indica
attgattgaaaacatcaaaagagaatatattttgttaaaacttacagccggagaaggagaagagagactgtgagaaaccactgcgacacacagtcgccgattgtcgaccaagacaaagggaaagactgatgtctcatcaattattagggttttaatcattatttttaaaaaaattaatcataatacaatcaaaatataaacatttatttataatattataaaagattaaaaatataaatttattttaaatgaggtgaatattagtaatgacattaaattttttttgtagtattaaaaaaatataatttttttagattggattttttattattcatttataataaaatttaattttaatagtaaattatattaacgaggaaggaaaacataattttggtagaattatctgaaattactgtggacgctggacgggttgtggctggctggaatttctgggttgcgatatgggtgtttgccaaaagttattgatattgtagctctcaagaaaatgttttcgtggttgaagtatgatttctcgagtattattattatcgaatctaatggtttggtgttagtacaaaacaagcagggccggccctaagttaaaatgggtcataagcaagaaaaaaaaaattggcccttactatatagataaatagcatttttaaaaattattttaaaaaaatatgtataatttttaaaatgtatatttttatttgggctcctcaaatgagtgagctctaggcacgagcctagcccgcctatacttagagtcggccctgggtacaagttgttcgagaattgaatgtgtgaaaatccacttttggtggtgtcgttgaggattgtaaacagcttctactttcttttagtaatgtttttttatattttgtcaaacgatctactaatcgagtcgctcaccttgtggctagagcatctcagttaaatgctattgctgattatattt

SEQ ID NO: 289927 - DNA, 682 bp, Cannabis indica
ccaactacctccaaaaatcaaggagacggttgagatagctcagcgttggtcgcgtctcttgaagcgagaagcaccgaccccctccactatataaggggtcacccatgacctgggagggggatccgcaatccgaaacacttagaaaaataaacacttctcattctttgcaatcaagagcttgttcttgacttttggaactaagattaataaaactcaaggggagtaggctattaccgacattcggggtcaaacctctttaaattctggtgtcttttatttacatttatttcgaatttcggtgttattaactgcatttattattgtgattttggtttaaatctcatttattacgactccgcgtcagttggctaaaaatccagtcaataataataatgcaagggtattcacacaagatattcccaagccgattgggaaggttgccaaggtaccacttcgtcccacacttttactagaactccctggggttgctagaaagtgtagagggtactctaccacgaacctttaaagccaatctttcttagacagaataatctcagcttataccaacttttactattacacaattgggtttacactaaaaagtttatgaaaatattttatgcacaacttttttttttagcctaaagaataaaagtctacaactaacctaaaataaaaaaaa

SEQ ID NO: 289928 - DNA, 676 bp, Cannabis indica
  modified_base (616)..(616): a, c, t, g, unknown or other
atatataataaagaaaaaaaaagatttatagaagctttaataaattaaaaaagaaaaaaagaaaaaaaaatggataggcaaagtataaatataaaaattctcttgttaaagtataaatgtaaactttggagaaagttaatatatggtgtaaatattcttaaaattattgcacggaatggcaccagccgtatttttctatggcacggcacgacacgacacgatctatatttttatagctcgatacaacacgacccatattttaagaaccccaaaaaatatggatcgaattagcatgacacacacatttttacaactccactccaaaataatagttttaataggtataatagtcttttactataattattttcttaacggggcattatttttacaacccaaaatttaattaatgtatcctatttttattaaaaatttaatatgaaatattttaagacttacttacttttattttttttccttcattgtattatcctagtaaatcaaaaatttacactttaagaaaaagtaattaaaattatttattattttctcaaaaaaaattataaagcaaaataataaaattaaattaaataataataaaaatattaagaatacntttaaaataaattaatttaatatatattttttttaagaatttaggatgtaaatataaatc

SEQ ID NO: 289929 - DNA, 928 bp, Cannabis indica
tttttgttttgttattatttgtaaccatggttttcttccaccacaagggaggcttttaatatttatcggggaggatcctgttgaagacaaaatgatcttttctctttttcaaaaaaaaaattaatatagctcagagaagagttacaaaactcaaatttgagttttttgaaaactattattttatggctgataacgtgttgttttataattgtaatcacttagaattttaaaataacgccggtggatgtacatggatttattgagcacgttttcagctttttttcctagcatttttatcctattaaacaccaattgaaatgttggcaacaaccatgaggtgaagagaatttaattttctaaagtaatcctcaaacactttaaatagaagtttaaagtactcattttgtgacaatcagtattttatcaagaagtactttagaaaacacaagatttgataattttcaaaactattttttagagagttccttagtgcttagagataaggacaaataataagcttttggaataaaaatgtaatatcttgttcaagtcatggtgatctctactaatctacactcaaaattgtgagtgagtgtttctatttatattctttctactttttatatatctattctatataaagtgtgcctatataactaaattcttggtttatgagaaattcatgggtgtgactttttatttatatttaataaaataataaaatattatttatatataataaaataataaaacaaatcccatttaaactgatatttaatatttgaactgatattatttatatatatacaatattatatattgttctcatgtgatattatttaaacctataaatttactatcctattttgaatttaattaaaccaacaaaactatatatacctaatcttgtatgtatatctctcatttt

SEQ ID NO: 289930 - DNA, 1042 bp, Cannabis indica
ttatttttttgatattttgaggtttaaatttaaaaattgattattttatttttttaaattatggtcagatttaaaaatttgttaatttcattaatatttatatattatttatttttgaggttagatattttaatattatagatattttaaaattaaagatatcattatctttttaatttgaaatattatattaaaatcaccttatatgataaattaaataattaataaatttgaaattaacctagatatttttatagatattctaaccataatattttcaaattcaaaaatttgttattttgttaaatatttaattgtttataaattataagtttaaaaaaatgatattttactattttatatcattttacttattagaaatttataaattatattttaaatatttaaataacttagatatttttgtagaaatttgaataatgcttaatttgagatattttgacatataattaggataattattatttatttattattttattcttaaaataataattatctaaccacatctattttaaaattggtttattttattattttaattttattaaattataagattagaaaatgatattgaaaatattatttttcaaatcatttatcttatttgatatttaatttaatttgataaaataattcaaataaacctagatattttaaattagtttttcatttttgaattttaaattttgatgagatttttaaggttggttttaacaaccctaaattttcaaaatttagttagttagtttaaaataataatttaactatattaatatcttatttcacaatctgttacatggacaatgtttgtttacttatattgtttattcaaaacttttttttaactaaacctaactatttatttgtatctaaattagtctatgatttaacttagtttgtacagatccaatgatgtaatttaatcataatccaattgtcaatagatcttataaataatttttttttgtatcaagaaggaatgaaatcttcattaaccacaagctctttacaccaacat

SEQ ID NO: 289931 - DNA, 625 bp, Cannabis indica
gagggcgacaggaaaacgagcaatatggtgtacattagatcaatgtcgatgccggttagtccagtgacaccagtcacaccaacgactcctctttcggcgtgtgtatctcggcattcttttggatctgaatatttttaaaatgttttttattacaataattttgggtctgtattcaagtttttggtgtgtatttttgttattgttatgtgggtttaaaatttatgttcataatacccattgtttgatgactaattttagtattttgtttaaatattgtattttattccatgcaagtataaatatgaatataatatttaagctatatagtattattttcattttttttttttgaatgattgatttgttttttagtatataacttataaaaatagtaatattaaaatatagtatattagttttagtttagaataaatataaaaatatgatattgctttcctataaaaaaaaattattaatttttaaaaaaattataaaattatttgaaaaattatataattttttaaaaaattataaaaattattttgaaaaattatataatttttttagaaaaatatttaatatagtggcactttttgtgtgtcactatacctctaaaaataataat

SEQ ID NO: 289932 - DNA, 620 bp, Cannabis indica
gttgttgtaaggcactctcgatttttccttggtcgtagcattttcgagcataatatttgggctaatttaaaagctctcttgtatttcagaatggtaataattcaatgaagttgttatttcatcttaaaaaaaaatgaatagaattaaacggaaattcttaaaattaacaatttaaatagttcagagataatttttaacagcttaaaagttcattaaagtcattagtgcatcttttttagaaaatacattgtagaattttcccatcttatataaatttattatttctttgtagccttttctctctgtcaaagaaaaaaataagttcacataaaagaaacaaaaacacacacactctcacattttaagctataaatttattaatattctttttttttttaacaccacatgaaacaatatcactaatacacttgggcaaggagaagggccttcaaagttttgtttttgtgaggaagggaaaatttaggcatgcacttggctaggggtgttcattggatcacatccaatatttttaggcctattcagatctgatccaatcatatattgaatgttagatttttaccatccgatccgatccattaattccggtcatccaatcgatc

SEQ ID NO: 289933 - DNA, 689 bp, Cannabis indica
  modified_base (14)..(14): a, c, t, g, unknown or other
aaataaaaaaaatntatagttttgttgtgtttgtggctactaaataattattaattataaatattaaaataactggtataccttaaacccttttattattttgtttttttatatacgattctttttattagacgcccccaacaaatataaatttgaggtgccaaataaaatataactgtttaaatactaagttggatgatctttgtgcatatttgtgtatacgtaatagtaaagcctacgaaatcaatataataataattcagttgatatttaacggtgataactaactgatatcttaaatatgacaaaaaaaaaataaaataaaataagcataaggtggttttgttaaaaaaataaaataaaagaattaagtgtataaaaatcaaaatataaaaatatttcgctactaattatcctaaaaataataaaaataaaaattatataataaatttatttacataaactgaaataagaaactaattcataccctacatagcaattagcaaatatataccaaaataaaatagtagtatttatacatataaaaatactctctagagactaagagcatgtttggtattgttttctgttttttgttttaaaaaattgtttttagaaatgagaacaaaaaatagtttttgaagtttttaaaacacaagtcacgtttggttagtgatttttaaaaacaa

SEQ ID NO: 289934 - DNA, 630 bp, Cannabis indica
tatcagcgttatccaaaatcgaaaattatagataacttttacgtctatgaaagcatcccagttccctgcgtaaacgagtcccttggataccctgcccatccccacgccccaataatctgcatatagtatagatagaactcataccatgcatcatatataattttaaaacatatatatttttttttaataaataaaaatgacaagggaatagtagtgatatttgaaatcatagaaactgaacctcaaaactaacaaccatttggtttccaaaaggatcgtctttacaatttcattgtagaagacttgtgggaattgaacaaaggcagagtcacgagggttgagaccaaggaaagaacacatggcgtaaaggattacattttggaattgtttacaaacatgtcacaatccacattcagcataaatggagcatttgtcaatacactccagacactctagtctgtaattattataaattaattatcatataattttcttataatttaatggatgtatgtacataagaagtaataataagtgggttgttaccaaaacattcatagcaccagctttgtagtgatgtggtgtagcgggacgcttctctctacttacataaactagatgaggcaagct

SEQ ID NO: 289935 - DNA, 562 bp, Cannabis indica
cacttaagagcaaatgttcttttgtttagcacttgatatggtcatccgacctagtacttctattggtagtatttccttaaatgttccccattccaataccgtggtaccagaacgtgttgcattttttcatcatacttacccaatttgtatgcccctgattctagaacttcgactacctaatatggtccttcctaattaggtccgagcacacctgctgtactgtctttggtgtttaaaaatatccttcttaggaccatatctcccacaaagaatttatgagccttcacttgtttgttaaaataccgagctacttttcactgatgggccatcagttttacgtttgttgtggttcgtttctcttcaatttcatcaagtgattcagcaaggagtacatgattggcctcttggctatatgttagtcttttgtgggacggtggttcgagttctaagggcagcatagcttcatatccatatgccatggcaaatggagtctgtccggttgccattttctcagttgttcggtaagaccataggactttaggaagttcctccagccagtttc

SEQ ID NO: 289936 - DNA, 143 bp, Cannabis indica
gatacttactatatggggtttgggtcaggatgatctccttccaacttgaccaaacgaaaataagtagggtgtaacggtaatctaatccctttgcagtgttgatcattcatataggggatcattgatactttgtatggttcaat

SEQ ID NO: 289937 - DNA, 577 bp, Cannabis indica
attgataatgaatgcactccttgtgtaaatgataggacacttactttgtatataaatgagtgatctgccatgaaatggacaagacagaatccttgcaatagtggactaagaagaccgtgatctgactgaaccactatactctcttgtgttcattatatttctagttttttctaaatgtttttgtgttcttaatttgaatactcacaattctgggtcgagtactcgcatatattcttcataccatattattattattattttttgttgtaaaaattctttcgacaacatacataaataattatatgtcaccttttatgcttggtagtttaagatgcctttagaatttattttaagagtaaggtgccttacgcatttcttaattttaaagctcttgaaaaaaatgaggagatattcttattttatgacaagttttatattaagtgattatgttaaacaaataaagcatattatttataaacaaataatgcatattatttattgtatcaaccacatattataaattactagctagtcttcagccaatgatattctctacatactttttaataatataata

SEQ ID NO: 289938 - DNA, 476 bp, Cannabis indica
tctaggctcttatgagaaaagtcgtaggtttgttggcgataacttaaaacccaattgtatagttggtcccaaatgacctttccatgacatggaccttgtaagggaaagcataggcttcttgcggcgtggcaggcttttggtttcccggagggaaagctcgacctacgcccttgtgtgaataacttttcttacgatgaggtctgtttcaacgagcgagagttatgtcaaaattttgtaaatggcaaacttttgaccttcactaggaaaggtctaaaggtgcttcaaaaaaattcgaacactaactttctgaagggtgaaacaatacaaggcatgcgagagtcattttaaattttatgtatcaagcttcagcttcctggaagtaaggctgaagttacataaaattcaagctttgactttactgaagaatcaacgggtgaaagcatcacagggagtaaagcagacttcaaagcagtcgt

SEQ ID NO: 289939 - DNA, 473 bp, Cannabis indica
attggttttgagccaaagcatgaaactcctgaaacttttcaaatgtttcagatttcttttgcattaggtaaatgaaactgtatctagagaaatcgtcaatgaaagtgacaaaatactcataaccacctcgagctttgacattcaggagtccacagacatcttaatgtactaacccaaggggttgtttggcacgctctccctttccagagaaagaacgtttgcttatttttccttctaggaaagattcatatagtggtaattcacccaagacgacatttttcaatggaccgtctctggttaacctatgaagtctatcatagcctatatgacctaatcgtaaatgccatagataagtttcatcatgattatcaatctcttttcttttatggtttctaggtttaacaatattaaaaagttcattgttaagtgtgatttgtatttctagtcttaaaacataaagcccttgttcctat

SEQ ID NO: 289940 - DNA, 1087 bp, Cannabis indica
ggtgtgccggtcaacctgactggaactatctgcgcggcggattacaggctcctaaaccataaaaatcacaacactataagtgatacgctaaatcacttcccggggacttaactaggaactaaaagttaccctatcgataaaaagcatggcaataccccaaataacataaaaacgaggaaaactagggtttctgaaatttccccaaccggtagaccggttgcccaaccggaattccggttctgggaattttcgaagcccatccggaattccgcatgcacaaccggaattccggttcctcgcaggcagaaattcaaaaattcatatttcaaccaaatcacacccaaacaacctcaaaccttccagacctgttctataggacctaaataacatatttaaagcaataacacaacccagaatgcacagaattgaaaaacaccatgtgagctccaagctttgagtttcaaactcaaacttggctaaagctctccaacaagcatcaaaccatgattcaaactcataatcaagcatataacaactgcagaaactaaaacctaactcatgcaacaaccacagcaacaattcacacaatttcactttgaaaactcaagctttagcatagaaaattcataactttaaacaacctaactatcaagcaccacaagtagcttaattaacctcaaataaacatgtttaaatctcagaaattaacaacaaaatcacagcagcaacaacatcaatttatcatgcatgcattacactattttcatcaaaattcaacaatctttaagaagaaaagatgaggagctaacctagcttgaattgaaccttaaagagagatgaaatcacaagaaaaatcccaagaaaatggccagcttcttgctgctccaagagggccgaaatagagagagagcgttgagagaaaaagttttgcttttcttttcaaattttctaattattttccaactttgtaaaaaagaaaataacaaggtttatttattcacttcagccaacaattaatattaaattacatttattttttcaattattaagtcacaaaaagacaaactaacaatggggcaaaatgacc

SEQ ID NO: 289941 - DNA, 644 bp, Cannabis indica
tctactttgttagatcaataaagcgaaaaaggttagtaatgcttagagaaatattatgtatgcgattcttgctcatcttgtctattatatttggagagtaagaaatgatgttctttagtcacacaaactttgacttatcaaacatattgtacaaagagtagaaaatgaaattaatttagaattagtcttgtaataccaagaaaggctagtgatagagaatgttttgcttcaatttctaaaaattagaagagattttgcatttattgttgtaaagggattgtaagtgggaggttgtaacaagttttggttgagcaagatcttattcataaaataaataaatgaattattgtatgcttatgaaaaattcctatattaatataaaatattttatttaatttttctttatgttttaaacatttttttatatacattttcaataataaaataaaaataattttatagattttaaattaatttaaatcaaccctaataaatattacttttcttatatattatgttgtcactgattactcttatttattcaagttactcttataataatttaaaattatttttcaattttttgtaatttatttaatagtatttatatataggggtgttcatccgatccaatccgcactttt

SEQ ID NO: 289942 - DNA, 640 bp, Cannabis indica
ctaataagattgttcatgaattagctgtgcatggactcagggtggatggtgagctaatttgaatgaaattttttccatcttttgggttatgtactcaacactgatattttccaataaaaatttgttgttaaaaaaaaataattaacactttgacaatttttaagtaactaattctcattaagataaggatgattattatccaaatatgtatagtatatatattttcattgaatgtaattatggcattatgcaaaaagaatcacatccatatatattgttgttgtctaatagctagtgcttttacttttgagctagactatcctaactatctttattataattagttttttgtgagagaaagaaaaaaaatcaagttgggcccccaaaccctaattaattactaaatagatatatatttgaaagttcttaatctacaactttatccactaataatacttcttttgttctacataatttaattcaaataatttagatgatgatcattgattggaataaacaccatatatctctttctcatatacaattaccacgacaactttttttaattaaaatatatatattttatatatactaagtattactattagatatataaaacaataataataaaattaatttt

SEQ ID NO: 289943 - DNA, 686 bp, Cannabis indica
agatttattagtcgaaataaaataattatttggttgaggtatgatttaaagaatattttaaactgaaataaagtttaagagggtttactttaaacgctaattcctattagatatattttggtttatattttttaggaattttcgtgtttagaatttagtattcagattctaatattataattaattaaataaattgaagaataagaattttgaggatcttgtaataaagggaggtgggaacattaatggtctaatgagaatatattgcttcagatatatttgggaagtcaaattattatagaattttgatttgttctcaatattatgggaatgtaccaaaattattacattatttgtatttttaaataatttctggatgagtggtattagttttttatggaagtacaaatttgatggatgagctgcgccattgtttatggctttggtgccttttaaggtttctccgcctgatttatggatggtccctaattatttagggtaattttgttaaaattacaagatatcattaattataaaatattataaaatttaatagctaacaattatggtatgtaattatgaaattattgccttattagtttattatggataacataacaataattttaggtatataaattataaatatgagtttattatagataacataatattacaaataacgt

SEQ ID NO: 289944 - DNA, 402 bp, Cannabis indica
ggaagttgagcgggactggaactaggacttggacttggaatcataactgaaattggacaaagatcaagaaccacaaccggaccagcacccaaactccaaatcagacctacacccgaattcggaaccggagccggatcccaacccaaaccttgactcgggacccgaacttgaacctgaactcagacccaaacatggaaccagactagggacaaagaaccagggtcggaacctagaaccgcaccccaatctcgatcccgaacccaaactaagaaatggaacctgaaccagaaccacaccgagactcgtgacagtgatccagatttgactcgggtttcaggtaacggggcctggaacagaccagtagtcggtgtctagttctgggactcagactaggaccagaac

SEQ ID NO: 289945 - DNA, 662 bp, Cannabis indica
aacatgcccattttattagcttatcataatactttttgaaaaaagttataattttgtgttaacgaaagggttttttgttgtagtgtattttattgaattaattaggttaagttgaaatagaattattttattgtattaattaggttaattaaattgttgttttgttgttttgttagaagtttcgaaatggatagagattggatgagtgcgaataggttaacggtaaaatatagggaaggtgttgatttctttttggagttttctgcaaagaatgcggataatcctgatttggttcattgcccatgtctcaaatgtggtaacatggagcgtatgaaaattgtccaaataagagaacatttgtttaagaacggtatagacaggagttataaggtttggtatcaccacggagaaaaaattagaagatcgggcgagggaccctctagaaaggataagattgttaataatgtggagtatgaagatgatcacatcgcagagatgattaacgaagcagagtttgaatctcaagttcgtcctgaaacatttcaaactatgttagaagatgctgaaaagccgatttaccctaattgtagtaggtttactaaattatcgacgcttattaggctatacaatttgaaagcaaaacacgggtggagtgataagag

SEQ ID NO: 289946 - DNA, 521 bp, Cannabis indica
gggatgtgcgcctggtcgggtgcaaatgcccaacaaggggcgttgatgcctttgcatcaatacttcaagaatgtggcggacttcttcggcctttgcccgacccagttcactcctaagggcattaaatatctatctgccctctttgtcttctacgcttctcagaagtggggtatgccttctcctcacgaagtcagctagttttttgatttgaagtccacccctaagcaaggcaggtcggggtacttctatttctctcaactagactttaagtggttgacgggcaccgatgattcagccttcagcaaaattgggcattttgctgatgagtacttcatggtggatggcacggggatcactcacactcggttccagcatattccgacatatcatcgccctcttctcactgttgctctccgggatagagctcaaaagcttgctcgactttcaggggaatatcggaatatcatctagttaacctctgaggataactttgtgaagtacgagctctatcccaaggactt

SEQ ID NO: 289947 - DNA, 682 bp, Cannabis indica
gcttatttattttttactctgctcggggatggggctctcccagtccggcagagattttacacttttatgaacttgtttctgtccccaagaagggggacaaacttaaggatggtttttacggcttccgggcccaccctttgaatgagggcgtggtccctttcaatcagcaaaaacacgtcaaggagtatcgccatcgcttcttcttctcctccgggttccgagccgcgaaacacccggagcttcttacggagtgggttaggatccctccgtacgagcggaccgcgcctactcagctcttccttcagcgggccaataccttcgcgacttaggacaggcaggatctcgacgtcgggggtttggtcacgacggagaattgccggaaggccaagctgatcttggggcaccagtcagtggaggactctaacctttccaaggttatctgcccgaacgtaagggttctggccgcggagaagaccttccgtgatgagattattgccaccgcggaagagaagtaccgggagtacctctaccggaaggcccaggagaaggcttacactaaggcccaggcggctgctggaaggccccttcgcgttgggagcccggttgagaagagggctctcaggccaaggcctaccgtccaggtgccgaatacgggggctcctgatgccagcacttccggctc

SEQ ID NO: 289948 - DNA, 631 bp, Cannabis indica
caaaatggagtccctgtacggatgcctgcctggagaagggcaagctgttgtccgtcatcaactttcttggttttcgaggcttcctcccggaacctctttatgtagttctttagggtctccgtaggcagctgcttgatgttagtcaaggcgctgacctccagattgacctttcttgcggcgacaaactatctccggaagttggtctgtaacttattccagcagcccacggatcctggctccaatttcttgaaccactcctccgcggacccgcttagagtaagcggaaagcacagacatttagcgtcattgctgactctcatgaccgtcatgacccggttgaaccgtgacagatgatcgcttggatcagagttcccggtataagctgccatttcgggcatcttaaagttcttggggagctctgcttccaggatgtgcttggcacacggctcccggtcctcacagtttgagtcggagtcgtcgcctttctgtctccgggagactcgggcgatatcttttcgaagtatggcgagttctgccatgattccttcgtttaatgttcccgtggagaccgcgggtccgtatttcttttggtcaaggtgatctcagaggtcaccttggttcccattgatct

SEQ ID NO: 289949 - DNA, 469 bp, Cannabis indica
aggacatatgaaggaacaattatgccagttggtgacgaggatgattgggaattgcctgatgacatcaagaacatgacagttggagtgcctgttgagaagcaaccagtagggcgacccaagaagcaaaaggttggaagaattaagaacaaccgaactgcttgtaacggtgaaaggattatcaaatcacgaaattgtagcaagtgcggtgccaaggggcacaacagaagcactggcaactaccgaggttaaaaatattattttagtttatttgtatcgtgatgtgttggactattatgtattgttattgaattaatgttggactattttaaatattcgaatttgtgatattttatgtttacataattattataatttgttgcatgaaagaaaggcgtaaaatttgtatgaactcttaaaaaaaacataaacataccaataaaaaaaaccagttacattgttatcttaataa

SEQ ID NO: 289950 - DNA, 560 bp, Cannabis indica
ggtattttttattttttactgttatttttttataagtttcatactgcagtatactgtgttaagtattcactggtattctactagtgttttactagtgttctactgttattttgagttgttctgttttgtgttttactggtgttttataaaaatacagtatttttgaaaagatttccgtgtgacaatatttttgtaaaagttaacccaaattccagtatttttgtaagtttccccaaatatattactaagtgaagttttataaaagattataactaactatgaacctagctagctaatgtcttttcaatatctttatataacctatattgtaaggaattaaatatttcacattttttttatgctttttacacgtttgattgcgttattgcatctttagttgaggctgttattagagttttcttcatttattttgtaaactgtttatttatagcctattattgttgattatcatctttaagcgacttatcattctctgaaagattaattagagtattcatccaatttaatatgcattattttgttcatagtgcatccgatcc

SEQ ID NO: 289951 - DNA, 842 bp, Cannabis indica
ttgaaattgaaagaactttttctatttgggttggtgactgaaaacttctatgctggggattataaggaatggtggttaagagtgttcatgtgatgagggaacttttataatttgttttgctgtgatgagtgagttgatgttttcatatgaaagacttgttgtttttttttatgcaaatgcaaaggtttggctatcatgattgtggttgctcaaaatatatggagtagtactctttatgaatttaatgaaagtctcattatttatattctcttatctaacattactaaccttatgttgtggaatatggaccctttcaatataaaagaaataaataaaaaaaaaaaaacctaagtaatggtttacctatcttctcaacaacctttttaggtttttatttaatatttctttaataggatttggtgtatatacttgccacacaaaataattgagggcgtcatgtgcttggaaaaaggggtcgatactagttgctgttttaaattggatcttttgtttatttttggtaagttgtaactgtaacaatgacccctttaattgtaaaagcaggttacaaattatagaaaaatctatatgtacagacaatttatacaaactgagcaatattgattttcagaagttttaggctaaagtggttttagggtgcatttgggatcagccgtgtaattcttaggtattttaattactaaagtagtaatttcaccctatttgtattgtaattactaaagtagtaattttcaccctattttaaaaatgtatgttgggatactaagtagtattttggatataaattgttatttttatgttttgataaatttagagcatct

SEQ ID NO: 289952 - DNA, 574 bp, Cannabis indica
tattaattagactccataaagtctccttaattaacaaataaaccccaaaacactatttctcacaatcaagccatatcttagtgaaaaattcataaactagacatagtctaattttggaactataattgattatctaaaatcagttaactgagtcttacaagtagtttgtctcaactaatatggggaccatgggcctatataaccgagcttccaataagaaaacctagaatatacaaagtaaatccactaacttattaattcctcattgctatccactcagagaacttggaattgcactctcagtcatatagaacgctctatctgttccacgatatagatacgctattaattatccattgttataatcccaataatcaatgatcctctatagatgatttacattgcatagggataaaattaccgttacacctttctaatgtatttatcctaaacacttgccacctataaatgatattatagtgaattaatagaatcactaaaatgagcgctctatcctttatctctattagtcaagctcgtaggaaatcagcgtttcacttctatgtctgtatag

SEQ ID NO: 289953 - DNA, 583 bp, Cannabis indica
taaattttatgctagatattttttattatattaaaaggtaatacacttaaaaatgtttatctcatcttggttcaactcaattttatgttgttctcataggattgtgtattagatatgagcttagaagaatagtattcgttagaatgggtaccagcaatggcggtactgatgtgagttttatcttctgggaaaaatctagctactccgacattacaattacacctagcctttcaaaatgagcatcatcaaaaattcaaggattataaattgaaaaggatatcttgttacttttggtgtgcccaacaaactctctaacggatgacattatatttcgcatatcccaaagctgtttaaaagtaaagcaatatagcaagggaatagaagacttactcaaataaataattacttgagcaacaaaggataactcgctaatagaacactgaatattacacccaaataaacaaaaagtgaggaatcgcagcagagaggccatgaatcacggcatagaagatgaggcaataattcaatagcaatatagggtttgagggtttgagatttagaaaaagaaattataaatgattat

SEQ ID NO: 289954 - DNA, 410 bp, Cannabis indica
ttaatagtgtatctatatttagaatatatagagcattttatataattaggagtgcgattctgaatctatagtggagtcaggaggaactaataagatagagaatttacttggtaaattctagaactaattattggaagcttgattatataggtccatggtccccgcactagttgagataatattagcttgtagactcaatctatgagcatggttatgaattattttaattaaaatgatgattgtttgatttggatgtgttcatgttagtttatgtgtttaattgatgattgattgtgaattacaaaattttttataaaaaataatatgatttttgatctagaattattttatttggatagtttgggaaaaattaagcaaattacttttttttacagaacttaaattcgatt

SEQ ID NO: 289955 - DNA, 745 bp, Cannabis indica
ctcaacatcttgatatccagatcaagtgtagtatgtagtattctctccgtaataggatttgacaagctaacaaactttcctccaccattacatttccttaatcacaaaatccttaatattgtgaaattcctctctatatgtctactcctctagggatattggattctttactttttggcaactacttctgtgttaatcaggaagtaacactagtagttaataaattgttggtacaatgccaaaactgtatagaactttccataggctgaataagtatctttcctgcaactttaacattcagtctcactggtagattagagatttcgaatcagtttttacacttctgcaaaatcactactccaccccaaagtaatcaccatctcatcagcagactttcaagcactacggcaagtctagaaacttgatttggtgtagtctaggagtattaaaataccacatttatagttcctcttcttgatcttaaattacacttgattatcttccaatgttcctttcctggattaatctgataccaactcatttctcccactcagcaacatgtgtctggtctaatgcatatgaaagcatatttgagacctctcactgttgctcataaggaattatttcattggcctttatcttttttggaatagttgaaacatttccttagataaataaaatctatgtctagaagttgaaaagcttctatagattgccaatagaaaaatgctccagcatcttacta

SEQ ID NO: 289956 - DNA, 597 bp, Cannabis indica
aatataaagcagcagcccagtgaaacactcttaaggtgtacttaagtcattttagcacggctaccgctagggttggaaatttggatgacagtacgcaacttgcagccgttcaggcggggatctctactgatccattaaccatagggggcgagttgtgggatgacttacaaggacgtctggtaagaaacatcactgagttcaacaaaagggctcaggtgtttgtccagaaggaagaagcccgaaaggaaatgaacttggttaaaacgggctcgggaggtaaacccaacaatgtttcaataggtactgcttccacgagaaaagacgaaattaaggaaccgtcgaagaatagaaagaaacaaaagaagcatgacaaatacgtgccagtgtataccatttataccgaggttaatgaaacttggaagaatatttacctcgcacatgagtagaaggtagccttcgataaacccgagccggaggaatttgaggagacaaaagagatcctaacaagtattgcaaattccataaggatattgagcatacgaccgacgaatgtcaccaattgaaagatgagatagagagtctcatcgctcgaggcca

SEQ ID NO: 289957 - DNA, 507 bp, Cannabis indica
aatcaacttaatgatctttgaactgcatatccaccaaatatttctccacccctatcagttcacaagatctttaaccacttaccttaatgtttttaaacattgatagaaattcatgaaatttcttaaacatatcaaatttttttgcataaggtaaaatctagagtagtcgtctaaagaatataacgaaaactcatatccacccctgaatgtacatccatgtataattatagatgatcttactttcaagtagatataggcatgtttaactctttggaaagagtgatcttgtcaaaatcattatgaacaagattcaaatgacatagatatataagaatgtggttgtggtcttttgatgacttaggtctagttacaataaagagttcatagaatagtccaagtggatcctggtcacagaatactaaactcaaattccatacataaacataaagtttgaattcatttatagaaaatggatattaaaaacttgtgaaagtcatactgtagtgt

SEQ ID NO: 289958 - DNA, 719 bp, Cannabis indica
atggagtatacattggaaggggccgatattgatcttagacaagattacataaacttaccattatatctttctaagttaatatcactggttgatctcaggtttaaggatcataatcctgatatggttaggttcaacttagttgtattatttatgttcttcaagttgttcgtagaaactaacaaatagttctggcgaatacctacatcttaggaacatggtagttcaattgagtgggagcactgatcatagatatgaaatctatagcttctctaagtatttagaagtgaaacgataatttccttcgagcttggctgaatagaaataaatgattgaggcctcatttctgtaattatattagtttactgaaatatcatttatagatagctaagtgttttaaggataaaatacattaaagagtagaacgttaaatttgtccctattcgatgtagatcatctatagaggatcctcgactattaggattgtaataatggataatcataacgtatctatatcttggtatatatagagcgttctatataattgagagtgctattcaattccaaatctatagtggcacaaggcagaatttataagttaggaaatttacttggtaaattctagttctgcttattgaaatctcagttatataggcccatggtcccctcactagttaaaataatactgcttgcagactcaattaattgattttaattaatca

SEQ ID NO: 289959 - DNA, 603 bp, Cannabis indica
aattaattctttttaattaattcataaatcaatttttatatactttaataaaaaaaataaatacgattttttaatttaattttatgaaaaaaaataattaaattagttaaattagtaagatttttttaatttaattttctaaaaaaaaataatttaaccttttaaagttaatttaatgtatttaaaataatttactaagtttactaaaatatactaaataggttaaaaaaaaatacttttacaactaaaatatatttttttagttatacttaataaagtaattttaatatacttaaatataacttcaactatttgtttaattaaaaaaaataacaattaaaaataaggaagaaaacattaaataatatggtaatatataaaacttgaaataataataatgcaaattaaatataaaatacataaaagacaaagtaaaattgaaatagcataaaatattcataaaatagcataaacttctccgggtcaatttttctactctgatttttttggtaggatcacagtctcaacagcccggatgttggggccaatttggggagtttcgatctcagcagcccgatgttttttgggggtccaatgcagcaa

SEQ ID NO: 289960 - DNA, 501 bp, Cannabis indica
tatttatttgtgtatgtttgtgtatgtatatatatatatgtatatgtgtatgtgggtgtatgtatatatatgtatatgtgtatgtgtatgtgggtgtatgtatatatgtatatgtgtatgtgggtgtatgtatatatatatgtatatgtgtatgtgtatgtgggtgtatgtatatatgtatatgtgtatatatgtgtatgtgagagtatatgtaaatatgtgtatatacgtatgtgtttatgtgtgtgtatatatgtgtatgtgtttatgtgtgtgtgtatgtatgtgtatgagtatatatgtaagtttaagtgtaagtgtaagtgtatgtatatatatttatgtgtgtataggtatgttcatattttaattgggttttacttttatgaaattaggtcccttttaccggcccgaaacaccgcttgctgcttgttgttgtcacttttgcactgcttcaaggtttgtttttttttctttctttatattagtattgtaaattta

SEQ ID NO: 289961 - DNA, 635 bp, Cannabis indica
tcagggaataaactttcgaaacactacaagaaaggggaccttttatcccacttttttagttaacaaaaataaaaaatgggataaaagatatataaagactttttatcccacttttagatttggcgcctcaaatatgcagcaaatatttttttagacaagggctctgtttggtagaaagttaaaaaaaaaatattaaaggcaaaaaaataatttcaagattcgatttttatgagtttgccaaacaggggataaattttttagggaaaccttttatcccggttattagttaaaaaccgggataaaagggtttagtgtgaaacccttttatcccggttttaactaaataaccgggataaaaagtcatccctaaaatcccaaacgacctcaacctctcgatcgacatatcagacgtacaacccccaagtcccaacccagaaaccctctcgcccaaacccagaaaccctcgcccaaaccctcacgcaaaccctctcgcccaaaccctctcgtctaaatcctcgcccaaacccagaaattaaccccagcccaaaccgacattggcggcaccgtagaagctgataacgcctcccgtttggtctttattcccaggtttgctctttctttttatttctttctat

SEQ ID NO: 289962 - DNA, 489 bp, Cannabis indica
agatttactttctctcagctgtattctaaagttcatatcatgatcataacatagtaatctatctcaagtgtcatccaaaaaaaaagatgggcttagaattataaaatttctcccactcaaataaggtattgtgatactatgtccaagaactttattggtatcattttctattacaacaggaataaaaaacaagatcaagaataagttcttataatttgttaatttgttcattatattacatccatgtttattcaaaatatgtgtgttatagagatactgtggtgtattgagtatagtctattgttcaaaataaactacatatgtaaatagcttcttccacccctaagtgttgtagagatcttgtggagttatgaatatagcctagagttcaatagatataaaagatcgttgaactacatatatattacttcttaacttcttccacccctaagtgttatagagatcttgtggagttatgaatatagtcta

SEQ ID NO: 289963 - DNA, 458 bp, Cannabis indica
aacttcaaaaatcgaatttaacaaaaaaaaaaactcaaaaacaacaaaagataaatagtaaaataccttaacagatacaggcgacttaagaaattcagattccaactcaaaatctgagtctgagttttcaaccacagttcgaggtctttttcctcgagtgttcttcgaaggtccaccatgagtttttcttttagcagaaggggaagtggggctaggagggttgtctttaatattttttttacccatttttgatttgggtctggttttctgggattgttttgtgggttttgtagctttagccggagatggagatgaacgagtaacggccattataaggaattatgaaggtatttatagacaaaaataataaaaatgggggggaaaatgagagggaagtttaagaaagtgggatgagatttgaaattttttcaaatgcaaaaaccacccactactcgaaa

SEQ ID NO: 289964 - DNA, 531 bp, Cannabis indica
attgtattacatacaacgtactatgaagtacaatatacttttcttacctttaatctaggttcatacattttggccaacccaagtggagaactatccctgataatctcggccctatgtcacaacaacgataaaccaataagtgtttatcctaaaacactgtttatattcacataaggcaatctagggttttctaccaaacctcgcggtataaatgcactaaaataaaacttatattttgcctctaaaacatacaccatattgtagagctcgttgcaagcttcgaaacggtatatagaatgtcaaaagttatgaccaaaatatgatttctgatattctaggaatttttaaaaactacgaaactcgaaaatcccaatttttgcactcaccgaaacactatcaaaacttatgcaaatcactccaaacttcacagggcttatatataccataaatattaccattcttacgtaacagaaataaaaattaggcctttaaatgaaaaacgccattaacgttcagactaagctttaaaaa

SEQ ID NO: 289965 - DNA, 760 bp, Cannabis indica
ggatcctgttcggcgctggcaaagtggcaagccgagccacttgaggatcagttgcatcagccagacacattgttttctttgtaggagccataattctatggctgggtacagggctagaagaatttccttcactagaggaaggaggactagaacaaagacgaggatgatactcgtgcagaagttgaagcaaatcttggtcgatccgatgtccgagttcccaagactcacctgagttcatcaacaaaagacaacacacaagatgagtgtttggtcggaatatcgaacaataaacaagcaaatatgccgaccaggagtactcaacagattaaaaagaatgactatgttcaaagaaaagtcagaactcaagaagtcaaaaaaatttcttgagttagggccaaaaagttcatgaagcttagaataagcaagatgtaagaccggcgttatgcagttcagaaacaagcatgatggctgcaaacccgcatgaagacatgataaagaagaatcgtagaggtttctaagcctagggtttcctaaacatttttctacagcacagtagaaggagcattcaaaatgtaaacatgcaaagataagcataaaggaaatcagaaacttactcaagattcaaatgtctgagttcgagcaacgtctatccaacaagtagcttgtacgaaggcacttcggcgactttgaagccaagaaattttcttttcgctctaaagcttacttagcaaagaaggtgatgaaatgagtttatgtgcca

SEQ ID NO: 289966 - DNA, 596 bp, Cannabis indica
tttattcttcactgttagcttgtttaactctcgatagtcgatgcacattctcatagatccatctttcttcttgacgaataaaaccggagctccccagggtgacacactaggccggataaaccctatgtcaagtaacccttgaagctgaatctttaattctttaagctcagctggagccattctatacggagccttggaaaccggttccactccgggtgccaaatctataacaaaatcaatctcccgctgaggtggtaaacctggaagttcttcgggaaaaacatctagaaattcccgaaccaccttgatgtcctctggccgaatggtatctggccgagtggtgtccatcaccacggccagaaaccctaaacaaccgccatgcagtaactccctagctgacatggccgaaatcaccgggatccgagatccccgaaccgaaccaacaaatacaaatggttcttcactttccggttggaagatcaccatcttcctcttgcagtcaatactggctgagtatttaggctcatttctatcaagtcagcactttactctcttccatctattctgatcagcatagacctaatccaccttttgga

SEQ ID NO: 289967 - DNA, 824 bp, Cannabis indica
attcgataattcattaaaatattttaacctcctttattttattttatactttggaatgatatatacattttggaaatcccacaattatttttttatattagttttttctcatcatattgatctttttgtctcttataccaaacaacattctcattttcattatatctttaattttctgttttaattaaattttatttagtctcacttttcaggccacacaaataaaaaaaatgtaagtggcaagtaattataattcaagctattttattaataagaattataaataggtagtaccttaacaaaaaaaaaaaacaatacaattgtgagtaaacttatatatgtatatatatatatttaattttgtacgtagattaatatataataattatatacattttttaaatattagaaaatatatcatttcaaatatatattcgtaatttatcttcgttataatttttgttaaaaaaaaaatatcattttcctgaaaattcatcattttagttttactccataaaaaaaatgcaattaatattatctttactaatatattatgatctattacattgacgttcaaaaataagattaaaataaaaattatctattactgaaacagcaaaacaacctctaaattctagattttttttaagtaaaaaaattaataatggtaataattatattttacgtggtgtacatatttatttatttatttttctgaattgattagagtattatattattacattccatttaaattgaaattaattagtaaaatagaaattaaaataaaatggaattcaacacgaatgagtgtccgtacggac

SEQ ID NO: 289968 - DNA, 674 bp, Cannabis indica
agcatgtacactatatcaatatacatttaattttaaaaaaaaaatataaaaagaataaaacagttacaatgttttcttggaaaggtaaatagctgtaaaataatatatttaataaataaaaaaaataaaatgtggatataattagagtttacacaatgatttgacaagaaaaaacgtctctttcttctcccctctcgactgcctctacttcttctccagcgaatggcgaggaggtctcctccagctaatggcgtcctctagagcaggtttcctccagcgattggcatcctccagagctagggttcctccagtgtagggatcttcataatcggtcatctctctcgctcgtcatgtcctcatttctcgtcgaggaccgaagatcccaagaaacccaaggtaatctgtcgaatctctgttttattttttttttgtttctttctctctctcttttgtgcagagatccaaaattttgtatgtgtttgaaaaatagattcaaaaattttagttctctctcataatatttttcatcaaattttttttctgaacaaacaaacaaatttcttaaatcttgttctctttctttctttatgtatagatcaatatctcaaaccacaaatggtacaaccaaatcgtgtccacagattcttcaaattcagattattaaccccaatact

SEQ ID NO: 289969 - DNA, 521 bp, Cannabis indica
gttaaagagatagtaaggcttcacggggttaccaaagcttatagtttcggataagatccgaagttcaccgtccaaattttggcagagtttgcaacgagcaatgggtacgaactaaagttcagacagcattccatcctcagacagatggacagtccgaaaggacgattcagatattggaggacatgttacaagcctatgttatgaattttgaaggctcttggagtaaatatctaccgttaatagaattttcatacaacaacagttatcagagtacgatagggatggctccctatgagttattatacggtaggaagtgtaggtctcccatccactgggatgagactggggagagaaaatacttaggtccagagtcagtgcagcggaccaatgaggcaattgagaaaattaaggctagattgcttgcctctcaaagtagacagaaaagttatgcagatccgcgttggaaattactttaccaagatcttagatctactcacgagtatgttgattaacaccctaaa

SEQ ID NO: 289970 - DNA, 695 bp, Cannabis indica
tagaatttcccaaaaatacccctttagtgttatttatgtgattttagtgtgaaggggcaaaatggtcattttgccccattgttagtttatctttttgtggcttaatatttggaaaatatatgtttatttatgctttattttggctgatgtaataaaggggttaagtggcattttaatttcattttcatttcaaaaaacttgaaaaaaaaaatagaaaaaatttcaaagctctctctctctctctctctcttttcggccaagtctaggagctgctagggctgggttttcttgtttgattctagtgattttcagcagctctttgtgtaatccaagtcaaggtttgatctctagtaacttttctttgtgttttcttgagttgtaagaaaagtttgatagttgcatgcttgatattatgttgttgttgctgctgtgtttatgtgatgttttcagaggtttaatcttgtggttttaagtagattagagctagtgtaatgcatgataattgttttgatttcaagattgaaagtttttagcttaaagtttagttttcaaagggaaaattcgaaatctgttgctgtgattattgcatgagttagagtttgttttctgcagtgtttttatgcatgattatgtggtttcaatctagttttgagggttgtaagtgagctttagccaagtttgagtttgaaactcaa

SEQ ID NO: 289971 - DNA, 717 bp, Cannabis indica
aacagcaaaattgcaaaagtggggcccaatatccaaagcccaggccggccactattgtaggcttttatcatttattttttcattattttaatgccaaataattctaacctaaacctaggtggttacctataaatagatagtgatggctcacattcacacttaactctgtcagatgaaagttgagcctcctattctatactatagccgccaccctcttcttctctaaattttcgaaccttgagtgaatgagtgagtgcccacacacatcaagtggtatctcaatcatagtgtggaagattgtgaagaatccaatcaacaagaaggagaatcagcatcaaggaaggagagaaagagatccaggttcagatcttgataatgctctgctacagaaaggaatcaagggctagagatctgaacggaaggagtcattatattccgctgcacccaatgtaaggtttcctaaactttatatgtgtttatttcattgttttagaattcatattaggatgttaatgaaacatacatggtagtaaatctagatcctggtaaaatatttccaacagttgttcctgatgttttttgtggtactaaatgaggtgtgcagtagaaccataatgatgtattatcattgtaccacattcaagtatcttcatatctatatacattaaatctgaaataaatagatgaatgaaacatttacctcttgtagcctatcat

SEQ ID NO: 289972 - DNA, 501 bp, Cannabis indica
ccaaagctagacccggacctcgacccaaactcgaacctagacaaggatcagaaccaaggacctagacaaggacccaggacgcgaacccacactcggagcctgatctggaccttcactgaaatcctgacccgaacccgtaccttgttacccaaaattggaacctaaatcgaaagttgaccaggactggaactaggacttggactttgaatcataactaaaatttgacctagatccagaactgtaaccggatcaggacccggactccaaatctgacctataaccgaattgggagccggacctggatcccaacccaaacttgaactcgggacccaaacccgaacttgaactcagacccaaacatggaaccagactagggacatagaaccagggtcgggacctagaatcgcaccccagtctctatcccgaacccaaactcagaaatgggacttgggacctgaacaagaaccaaaccgaaacccgtgacagtgatctagatcttga

SEQ ID NO: 289973 - DNA, 601 bp, Cannabis indica
gactcgatgtgagactgactgggcgtcccttcaatttttggctaattaatgctctgacaattaatatttcaaaattcgattttctctcaccacggttgacggttgcacttgattattttttatttcccatattcacttttaagggggaaccgaggcgtctgaggtttctttgaaatgattacctctttttgtgacttgcctataaatatcaaccagcattggcacataaactcattttcaccatccttctttgctaagtgagttcagagcgaaaagagaggttttttgcttcaagttttactgaagtgccttcatcgaaactgctcgttggattgacgttgcttgaacctagatatctgagtcttgagttagtttttgatttcctttatgcttattcttgcatgtttattttttgaatgcaccttcgactttgctgtagaacattcataggaaaccctaggttcaaaaactctgggattcttctttgtcatggtttcatgcgattttacaatccataatgcttgctttctgaactgcataatgcctgtctttcatcttgcttattctaagcttcatgaaattttttgccctaactcgagaa

SEQ ID NO: 289974 - DNA, 631 bp, Cannabis indica
gagaaattgactttgtgattgatctagcacctggagccgaacctgtttgtaaagctccatatagaatggctccagcagaactcaaggagcttaagttacaacttcacgggatgcttgatattgggtttacccaacccagtgtatcgccctggggagctctagttctgtttgtgaaaagaaagatggttccctcagaatgtgtattgattatcgggagctaaacaagttgacaattaagaacaagtacccgttacccagaaccgatgatttgttcgatcaacttcagggaaagacagtgttttcgaagattgatctacgatctagttatcatcaactcagaatccgggaagaggacataccaaagactgcttttcgaatcagatatgggcactacgagtttctggtaatgtcattcaaattgactaatactcctgcaaccttaatggatctcatgaatagggtattcaaggatttgctcgataactgcgttatagtgtttatcgatgacatccttgtatactctcaatgagaaagaagcatgagcatcatcttcgaatggtattgcagtgacttagagatcataagttgtatgcaaagtttaaaaagtacaaattctagttgtctgaggtat

SEQ ID NO: 289975 - DNA, 611 bp, Cannabis indica
gtatacaacaaacatattttctatactataattttatattaatatttttagatattaataaattaatatatatatattaaaactataaaggttaaacttcttaatatacattattattatttttcttatttgctgaagttttatttttttaataaataaaattattaataataacaagtaattagataatataattttattatagctatattttaatttagaatgactttctaattagtaattttttatatattattttaatagtaactttttattaataattattatttattaacccaataattaaacccaaaaaattaaacaatcttttaaatattaataatctctttttaaattaaaaaaatcttaaccacatatctctctaacaaatgtagttaagaaattgcataatgtgaagaaattgcataatgtgatgttattctttttaattgctttattaatttcttttctattctaatgtgaagaaatttttggcaatagagagtcatcaaatgtagtccaagtgtttacactccataatctatatatctatctataatataggtcatgattactcttttttttaacctattaattatacaggtataatt

SEQ ID NO: 289976 - DNA, 903 bp, Cannabis indica
tagtcaaagatgaagatgaagctcgaaatcttcttttattatttttgaattaattgttttagtttcagaacaatttggatttcaattattagttttggatttttattccctaattttcatattgttgcagacaattccttttattttggagaattttataataaagttttctattttgaaaaatgaattgcatttatgaattgagcttcatttactttatcttgtgtatgccagtaccaattatatttatatgtttaatgtttgtatgtgtatttgttttattattgatacaaattctatagtatctttaactctgcaaagagttaatactacataaacacttagaatttcatttctatgtttatgaatagttgttaattctaaaacaattattaagaatttgtttaatagatgatctgataggggtagaaaaagttaagaataatatacaattcaacgatcttttatatctattgaactctggactatattcacaactccacatgatccctataacacttagggatggaccatgatctctatatcccttaggggtggatcataatctctatatacttaggggtggactatactattgaaatatgtagttcattttgaactctagactatattcaatacaccacagtactctttgtcacacatattttaaacatggatgtaatataatgaattagcaaattatcagaatatattcttgatcttgatttatgttccaattaatatttactgttgtaatagaaattgataccaataaagttctttgacattgtatcacactaccttatttgagtgggagaattttaaaattctaaacccatcttcatttggttgacacttgtgataggaactttagaacactactgagaaagtaaatctaaccat

SEQ ID NO: 289977 - DNA, 314 bp, Cannabis indica
aatcacagaacaaaccaataattcaatttatgccataatcaaagcttgagtttcaaaactcaagcttgcttaaaaccattctcaagcatcaaaaacaatagctagggactcaaaacaactcaacctaaccccagaattcaaaccctaagcaattcaaaacccaacagccactaaacctaaaaattcaaagtgaaactaaactaaactttcaaaaacttaaggggagaagaagtagagttaccttgccttgattctgttggaaattattttctttctctgaatcttttatgctgaaactcctttgctgatgatct

SEQ ID NO: 289978 - DNA, 489 bp, Cannabis indica
tataccccccttatacttaggatttttttccttgcatgaaaaatatctaagtataagtacaagagtgatcatagtcaaataatgcgagtactattgataataaaatttcaaactctcgccattccatgctcgtggaattgcagttccatcgagtgttgcgagtcggtacgtggcatcactaattctttcttcgatgaggtatggtccttcccaattatccccaaagacccccatgcgatgggtttttggtatttggcattactcttctaaggaccaagtctcctgctcgcagggcttttactttcactttggagttaaagtatcttgcagttcggtgctggtaagccgcattttttaagtgtgcttggtcacgcttttcctccaaaagatcaaggcagaatagctgcttctcgtcgttctgcgagatgttgaaaatatctctgcgtagggaacctgccccaatctcaactggcaacatggcctcgcacc

SEQ ID NO: 289979 - DNA, 398 bp, Cannabis indica
attaatcacgttttccataaacctcgttgattagcaacgagctgcacaacatgtgatattgaacttggacaagatataataaacttactgtaatatctatctaattcaatatcacctagttgatcttagatcaaattatctcaatcctgagatggttaggttctagttcaattgtattatttatgttcttcaatttgttcgttaaagtcgaccaatggatcttcttgtgacatacagattaaggatatggtagttcaattgagtgagagtgctaatcatagatacagaatctatagcttctataaatgcatagaagtgaaatgatgatttcttcgagcttggcttaataaagataaatgtcggagtactcatttcggtaattatattagtttactgaa

SEQ ID NO: 289980 - DNA, 605 bp, Cannabis indica
tacgacttgagatcgatagtcaagagtagctagatttacagagtttatatacctcaacatttattaacttctaaaaaataacctagattacgaaccacaagactactaactaaaaaaaaaaaaaaaaaaaattaacttagaaagataagcactatttgccactatatatagactcctctaggttagccatgatgcattactttggcacttttggcctcatcaaacttaacatatattctttccagaacaaagcaaatgccaaatctgaataatatcatgcatattgctttgtattcaacttttgcttttctctattttcatctctctcaataataataataataataataataataataataataataataataatactgttagggtgaaagttccctataacaatatataggctcttcacatacgtgttgccatatttataaatatataatagaataataattaagcagttcctatatagtcatgctttgaccagaatatatgtatacttatccatatatatccaagctaaagaatattagagtaaggattagtaaaaaaatgtttcaatatatatatatatatatatatatatatatatatgt

SEQ ID NO: 289981 - DNA, 670 bp, Cannabis indica
ataaaacaaaatgaaattattttacgtactgaaaatacgataggaacataaattgtgtaaccaattattttggtgtattcagagcttctctttatatattatgtgagtagggatagttttgccttacagattaatgatttttcataataattattaaattaaattatatgagatccagtaatcatattaatagtggtataatacattacaatatcgttaagtattatcaatacttttaacatttcttatattaatatagtcataaatatttcacgtgcacgtgtgacttttcactaggaataattaaaaagtacaaaatataataacaaatattatataataagttctcaatcgatttatagattcaacattggatagtgagtttctttacaaattttttaatatttttagatctattttatataactaaatatttcaaaaaattatgtataaattacgtagttataactcattgtttaatttttattatgtgttaaataaatttattagaaataacaatagtgacaaagtatacaatgataataacgattttaaataatcatgacataaaaagagaaatgtttacttaaataatttttaacaaataaatcaatcatttttggatcaagagcatcccaatttcttggatcaaatgtgtcaagtaaatttt

SEQ ID NO: 289982 - DNA, 724 bp, Cannabis indica
tttcgactcaatagaattggaaatactatctttattcttttattgatcgaaaatgtatttgttaccgtagtaacttacatcagagctagtgatctaatctgatcttttagcttaacatgacataaaacaaataagaaactgtactttaaagtggtctacccgacctgagtactttgtttctgaagcctttgcgcgtagtccgcccaagaggccattcacttagaagcgaatgttcaatagtactttaatgtggtctacccgacctgagtactttgaagtggtctatccaacctgagtactttgaagtggtctacccgacctgagtactctattggtagtatttccttaaatgttctccattccagtaccgtggtactagaatgagttgcattttttagtcatacttacccagtttgtatgctccggagtcgagaacttcgaccacctggtatggtccttcccaacttggatcatagtacacctgatgtgctatctttggtgtttaggtaagtacccttccttaggtaccgactatctcccaccgaacgaattttacgtagctttcacttgtttgtttgaataccgagctacttttgtttgtatgagctaccaactttaacgtttagtcagttgtctcgtttttctttcgtattctatcaagtgatcctgcaggagtgtgtgattggtaccgttgatcgtacgtcaaccgttctgtggacggtgg

SEQ ID NO: 289983 - DNA, 760 bp, Cannabis indica
atatgtgaagatcatagaacaattaggagatatttttacaaaggctttgaatggggtgcaagtttattatctttgtaacaagctgggcttgattaacatctatgttccagcttaagggggagttagggacagctctgaggtgagacaaaggaggcagccaccttaggtcccccactggttagggcccccattttgaaaaaaataaagtatagtaagtaataaaataaataatactcttaatactaaatatgtgtcgcatgctattggtgatttgattaatttaacaactaagaggttaagagttcaaatcctagcaacttcacaatttcaaaaccctaattttattttgcctaaggcccaaattaacatagggctgtccctgggtggagtgttagaatattagttgtatattaattgtaagaattagggtccttgtatttaatagtttcctatttttatttagtcgtttccattagtctcctagcttcgtatattaatatacactattctatgaaatatcatatcaattcgattcaccattcactataaatataatataattttttataagcataaatattgttttaaaaataatttctaagtaaatttgaaaattaaaaatatatgattagaattaaaattaaatagacattaagtaaaagtaaaaaaaataaggtctggagtttgttagttgagcttataatttataatattcaagattaatgataaataaaaaatatattaattatgatgttatttt

SEQ ID NO: 289984 - DNA, 695 bp, Cannabis indica
tttattttcggtactgtaaactattaaaaattttttgaaaattttatatatggtcctaaataagtacatcgtatgcgattatgaaaaaaaaaaaagaccaaaaatttttgggtgattctacaatgcacccccttaaaaggggtgcagtaatgcacccttacctatttcgacattgagaaaaaatttgaagtgtaattttttttcatattcatattcgtttacgttatagttaattaagatattctataaaattgtgacaaattcggaataatttacaatatagaaagtagtgttcaaacaatctatttcacacgcttataaaataaaatagtcacgtgtgcaacacactttttgaatcctatttttcggcgtgttaaattttttcaaatttcttaaaattttataggatatcttaaatagaaataacgtacacgaccataagaaaaaatttgactagaaaattatttagattctaaaacaaatatggtgcatcaatatattcatttaaaaaggagtggtgtattgtaaaattttccaaaacttttttagatgccgaaatagatagcacgtctaccagaacgatattgatacaattctaaacaaaattgttttagtataaaagcataaataatcattggcccatttatgagcttttgagttttgaaatagtcaattttctatcaagaaatatatat

SEQ ID NO: 289985 - DNA, 652 bp, Cannabis indica
ccctcggggatgagtggacaagccctgttgcactccgttccgcccgcaagcttagcaggtccttctcaaggctctcagagcaagagatcctcaaaaggtagcaatcggtcggaggataagcggcagaaaagggggtacactccccagtatacccagtacacggagctaacggactcccaagagcgtgtgtattttgtaccaggcaaaatacgcactaccggagaccgcctcctctgtacaaggacagctgccggagggaccccaataaaagatgcgagtaccacaacgacattgggcacaacaccaatgaatgcaaaaatctcaaggatgagatcgaaaacttgatccgattgggacatctttacgagtggatcaagaactggttgcctcacctcaatccggtccaggcagcaggagctttgcctcaaggaccaccagggggtgtagccggagcattggccccagttgctcccctcggagatgcacaacatatccctggcctgccaccaagacccaacgggagagtggctatgatctcaggaggacctcacatcgggggaactacccggaaggagctgaaacgttacgcggggtcgtgaagcacaaagaggttgggagtcgactcaactcccagctcaaaggccccggctaa

SEQ ID NO: 289986 - DNA, 620 bp, Cannabis indica
aatgatgaaatggactctcttgagtcaaatggaacttggcatttagttgtgttaccaccaggttgtaagacaataggttgtaagtggattcttaaaaagaaattaagacccgatggtactgttgaaaagtacaaggcacgacttgttgccaaagggtttagacaaagagaaaatgtagatttctttgatacattttcacctgttactagaattacatctattcgtgtgctttttgctcttgctgctattcataatcttgttgtgcaccaaatggatgttaaaactgctttcttgaatggtgaattagaagaagagatttacatggaccaacctgaaggttttgttgttcctggtcaagaacataaagtgtgtaaattagataaatctttgtatggtttgaaacaggcacctaagcaatggcatgaaaaatttgataatcttgtcatctcacatggctttaaagtaaatgaaagtgacaaatgcatttactataaatctgaaaataatgtgtgtaccattatttgtttatatgtggatgacttgctaatttttggatctaatattcatgtcgtgaacaatgtgaaatctttgttatgtgaaaattttgacatgaaagatct

SEQ ID NO: 289987 - DNA, 111 bp, Cannabis indica
ttataggtaaccacctaggtttaggttagatttatttgacattaaaataatagaaaaataaatggtaaattcttagtgtggccggccataggatgttattaggccccactt

SEQ ID NO: 289988 - DNA, 649 bp, Cannabis indica
tgacgtactcgtgtataagagccattcattctgtgggtgtaaggacccaatggaggcttgaagcgggaacgttacaaatggtatcagagccttgacccagccagaagtgtggtcgatgaggacgtcggaccccgtaaggggggtgattgtgacagtcagtagtcccgtgatccgtaaggggaaataccgggtaagctgtgcaatcccacatcgcctggggaaggtcaagtgggatgattttgagactgtgtaggtatgggactacacagttgaagagggcttaaatggattgattggtactacctatatcaacaaggtgcatcttgtttttcggtagcccatctcgaaagaactccacagttaagcgagcttgacttgggagtaatttcaggatgggtgacctcctgggaagttttcccaggaagcgtgcgagtgaggacaaagcatgctggaaacactcttgtgttggaaattattttaccaggatcttagatctactcacaagtatgttgattaacaccctaaatatgaactttctaaaacgatgaaataaacacatataaagttcaggaaaccttacattgggtgcagcggaataatatgactccttccgttcagatatctagcccttgactcctttctgtagcag

SEQ ID NO: 289989 - DNA, 667 bp, Cannabis indica
attcataaacatagaaagaaattctaagtgcttatgtagtattaactctttgaagagtttaaaaatactatagaatttgtgtcaataataaaaacacatacccatacaatcattaaagcatacatatataattggtactagcatacacaagataaagtgaatgaagctcaattcataaatgcaatttatttccaaaatagaaaactttattataaaattctacaaaattaaaggaattgtctacaacaatatgaaaaatagggaataaaaaccaaaactaataattgaaatccaaattgttctgaaactaaaacaattaattaaaaaataataaaaaaatgagcttcatctgcatcttggacgaactccaccgcttctgtccaaccatccgattcaactcgctaagatagcatccgacttcaagcagctggagctgtaataagaagaaaaaaaaataaacatggttagtaggtcgagaattaataatccaagtggataataattcactaaaacacatcagtttacaggaaaagaaataccttgtttctttgctagaaatttaggacattggggtttccagtgtcccttttcattgcaatagaagcattttccttttagtgtatcacaaggagtagcaacctttttctttttaactgttttcacagct

SEQ ID NO: 289990 - DNA, 640 bp, Cannabis indica
gcgcatgataggagcagaaacgaggtaccccatcatcgaaaaactagttttttgcctcttaatggcctcgagaaaattgaggccatacttccaagcacatccgatcaaggtgctaaccaaccacccgctccggcaagtcctccaaaaacctgaagcatccggaaggctccttaagtgggcaatggagttgatttaattcgacttgcactgcattccccgaatctccataaaaggccaagccttagcagacttcattaccgaatgcaacgaagtcgaggcaaccgcaaatatgccagtaccatcggtccccacatggagagtgtttgtggacggagcctccaatgaaaatgggtctggagcaggagtggcaatgatatccccgaccggactacgactccaggcagccctacagttcgacttcccagcttcgaacaatgaggtcgaatatgaagccttaatagcagggctgaaattagcaaaagtcctagaagccaaaagagtggaagtctatagtgattcccagctggtcgtaaatcaaatatcgggagagtaccaaacacgcggcgagcgaatggccgcgtatgtaacaatagtccgggagctgctccacgagttcacggactacaaaatagaaagaatc

SEQ ID NO: 289991 - DNA, 760 bp, Cannabis indica
tctctgtctgggttttgatctgggttcgggtttgggtttagatccttgttcttatcctagtcctagtttggttctagttccgttcgcgattcttagttctagtttgggttttagtttgggtaggagttcgagtcctcgtctgagtttgcgttagggttcggatttcagtctagttccagatccagctttgggtgtgggttcgcgtcctggttctcggtctaggtttggtctgagtccaaagttccaatcccaatctgagtctggattcagttttgggtctatgtccttgcttcggatcctggtctgtgttcgagtttgtgtccggcaccgggtctagctttgggtctgattctatgtgtgggtgtttgagttggggtccgagtctgtgtccaggtttgtgtcctggtctacaccccgatttgggtctaggttcgggtccaggtccaagtttgggtctcgagtgccggtccaagtttgcgtctgggtcaggatctcggtttagatctaggtgcagcatttccatccctgtctgggtcttggttcgagtccaggttcgtattcggatccctatctaggtccaattctgtgtttgggatcaggtcctagatttaggtcaaggtccgggtctcagttctgatttgggtacacgaccatgtccaggcacgagttccagtctcagtgtgggtctgaagctaagtctgtgtttggttctaggtttaggtctgggtcctgcgcacggtcctagtcttgttctagggtc

SEQ ID NO: 289992 - DNA, 1015 bp, Cannabis indica
ttaacctgtaaaaagtttgaaagcagttggaacactcctcctttgtgtaacccaaaaaacatcctctttctttgtcatatacaacccaggatccacaattattggtttcgctcgttggtacctgaaaaaataacattataaaatcaaacaaaacaaatttacccaaaaaaataattgaaaagaacagatctttttttccacatactctttccacccaatgttgctggtatgatcaatgaaattaagatcgcggggcaagtaagaaaacgtgtgtaacagatctgataaagccaaagaaaccaaattaatcaaccaatcaaaattcaaaaagtcaaaataaaaaaaacccaaattcaaaaaatcaatacccaccgtcctgagtaacgagcgggtaatcagaagcactaagattaataaaccaatcccaatcgccaccttccttcaacaaaatcgcagcagcatgaagagtattagcaaccatagtaggtccccgataggtcacgagattcgccttagtaatcatcctcacattcccaaatttcttaaaagtcggatggtcgttaacataattctgcagatccaatctctcctgaggcggagactcaaggtcaagatgcacaacataactattccgagggtggtatagggcttcaagtgtccgtttaagcattttcccatctccattagaaccagaaacgagataagcaaagcgcggcggtggaggaagattagataccggaacaggtttaagctttgattcaacgaatacagaactgtaagccgtaaacgatcgataaaagggaagcaaaggcgtaccgtccgatgaagttaaagtggtaaggaatagaaggaagagagagacaattgaacctatcgctaatggaaagatccattttcgttcaatgctttgtggttgcctcagatgcatgtaatagctcttcagcttcttcatcttctctctctttctctctctaaatctcttccactatagactgaactcttctttccttatcat

SEQ ID NO: 289993 - DNA, 532 bp, Cannabis indica
cttaataaaaggggtctccgagttgaagacgtgttcctttatgcctcgatagttgtggacaatatatggagaatgcgcaatgacgtagtacataacaactgtccccctaatattcataattgtattgaccttatttgctcttcttatgctgaggcacattcttctctcttgcctggtccttcgcctcccgggaaggacatctggacgcctccacctctggattggataaagttaaattgtgatgttcgtgtgggcttggagagtatgtgcacagctgttgttgcgaggaatcacctagggagggtgatcgctattcacacatcccgattggacttctcggaagctctggtcggagaagcggcggcttgttgtctggcggtatcagtagctctagatttgaagcttaattatgttattgtggagagtgactcgaggctagtaatcaacgctctcaatgggaaggcgtcccactgggctctagagaactatgtctccttttgttctaagtcttctccttctttcatgtgttgta

SEQ ID NO: 289994 - DNA, 535 bp, Cannabis indica
aaggtattagaataatataaaatcaaataagaactaaccaataatcggcatggaagataccaaatggtggagcaaccaccactccttctcctttcttcctccgtcaagaatagagaaatcatagtaataacctactaaaaaactaattattgttcattccatactattgtctgagttatcacatttaaagatgtatttatttttaccgatgattcaacccaagtctctagtccaaggtatcgaaagtctgaacgttgtagataattgcctccaaacactactataagatcactatatataaaaagaatatcaaaataaaaaatcagataattaaggattcgattttttgaaaaaaaaataaagaattaattataacctttgttttgagtcaaaaaatatgtactctaacacttgtctatctttcaaccttacctgattggtaactttgaattctttaaacaacacaaccttatgagctaatgtggatgatgaagttttacaatttaatgatgcatttgttgttttacattttttt

SEQ ID NO: 289995 - DNA, 605 bp, Cannabis indica
tagcttcctataaatgatatttcagtaaactaatgtaattactgaaagaagagctcttccatttatctttattaagccaagcttgaaggaaattatcctatcagttaaaccctgtgtactgataaatcataggaatacatttaattacacaatcttaattatttttcattgtgctgacgacacaataaacaagaatatcaatgtgataagggtttggatgaatttattaatcaaataaataaataaatgatcacatgaaccaaataacacactaaacaagtaataaaaaataaatctgtttatttattgataattgaatagaaaagattacattgtaatagagttttatttagggcacaaagcccaacacttctctagatgacatgtggaatatttacaagacttggttggaggataccatctttggaaggtcgcttaggggaaatgaccttttaaataactgctgcttgatgactaaagtaagcgtgcgtgcaggatgaatggtgttaccttaccaacctcaacgattcagccctcgtgtgttccgtcaaggggagacatcatgtaacaaagataaaatataagtgataatcatattgtctaaa

SEQ ID NO: 289996 - DNA, 489 bp, Cannabis indica
aactgtgaaggcccatttgcctgatttgaataactgtactaggttaattaaactagtttaacctaataaaattaattagcaacataattaatttcgaaatatatgaaattaatttttcatttgattattttgaaattaatttagaaaaacacacttagtttaatgaaattcaaattcaagataaactagatgtatttttctgtatttaattaaataaaagaagttataactaattagattcttctagaaacttaattatttgaattttcaaaatatatttaagttgaaaattagtttattttcaaactaattttagatcaacttaaatttgaatattttgaaattaataattaagtagcaccttctagaaattagttattcagatattctttaaaatattatttaagttaaaatttgttaattttagatcaacttaaatagggatatttttcaaatgaagttgattagctcaagatacttaatttgata

SEQ ID NO: 289997 - DNA, 657 bp, Cannabis indica
gctgggcttggctcacgggtgctcttcggtgcaggaaagggtaagactgtcgttgatcagccatgagtgcagaagctggacgaagaatgtacatgttcgggccacactagaccaagcgggttggggtctaccagtgatgtattttgagactctattttgccgcttaggtcggccaaaggaaaagaacttgtaatagtgttttgtaaatacttttgggatcccaacttttgtaacttttaaattataagatttaagattatcacaagttattttcattccgtttattaataaaatttaatttctgcgcttattttactagtaatcccgattaggggattagggtttcataagtttatttggtagcgtgcctaattatttagggcgttacacgtgacgtaatccaacccgaccagaatgccaatcaagtcagccgagccgtacaggcccagctcaacgaactgaagaatatgtttcatggcaaggccgggtagcataacaacgatcttgagttagaccgtgcacgcggaactcccttctcaccagaaatcaatctcctgccactacctcacaagttcaagatgccaacgtggaagatgtacactgggagagaagatcctctctcccatctcaagtatttcgagatgcaaatggatttac

SEQ ID NO: 289998 - DNA, 572 bp, Cannabis indica
aaatgcaatttgaattgaattgattggcattttatttgatgataagaaatcttaatttatttggaaataaatgagtgaattaacattatgcccttgtatgtttgaatatgtgagaattggcccttggggcattttggtcttttgaccttatttgatttattttggtaaaagcaaattttgaggaatgaattaaaaaattctgggttctctttccctctaacctgaccctctctccctctctaaccctcttgagtttttcaagttaaatttcaagaaattggtcaggaattgcttgaattgagcttggaaacttggtgtatttgtgcttaattctagcttgagacttgaggtaatctttacatctgtgattttagttgtgtctactgaattttgattgttagaaatgcatggttatggtgttgatgaagatgataattatatgttgcttgagatgatgttctttttttaagttgagttttgcttgaattcttggtgtgttggttgcttgaactctagatggaattctagggtttcttccttatcttgaattcaaagtatttgatgatgattgt

SEQ ID NO: 289999 - DNA, 1029 bp, Cannabis indica
tcccccgcaaccagcctgctgcggttcctgcagcccctgcggtgccagctgagcaacatgttgctggtaaccgtatggagcctttatatgagagattcagaaagcaagcacctccagtgtttctgggaggccctgatgttttaaaagctgaacagtggttgaccgttattgaaagaatattgaattttatgggagtggtcggaaatgacagagtggcatgtgccacgtttcaatttcaagaggatgccctgatttggtgggagatggtatccctcaccagagatgttaccagaatgacctgggaggaattccgggatttattcaatgccaaatattataatgaggcggtccgcagtgcaaagcggaaggaatttgttgagttggtacaaggcgagggtatgtcagtgactgaatatacaaccaagtttgatcgcttggccaagctagcctccggaattgtaccaacagacttcagcaagaaggaaaagtatttggctggactgaatgccaagatcaggcatgacctggttattacaacgaatgataccacaacttatgcagaaatggttgacaaggctcttcgagctgaaggagcagttaagtttttgcaagaaacccgagagcctcctggtgtcggtgggaccactactatccctgtttcgggtccaggaaaggaaagtggagattccacttttgagcaaaagaaaagaacttttccatcttcgggaagttcagggcaaagtaaaaggtttcgaggaaaccagaacaaaggaggacgtcagacttactcctatcctgagtgcccgcgttgcaagaagcatcaccccgggacttgtaaccggagagcctgctttcagtgtggttcggtgggacatctcaggaaagactgtcctcagttgaagaaagaggaaccaaagcctgaggtcaaacctgtgcctgcacctgctcgtgtatttgctataactcaggctgatgctgctgccagcccttcagtagttacaggtcagcttctaatcaacgattttgttt

SEQ ID NO: 290000 - DNA, 707 bp, Cannabis indica
tttgtgtagttttgtatttagatatttactattcctatttcaattctaattatcagaattaaattaattggattttttaaaattaatttatgatattagtgtaatttgaacttgaaataggtaaatatctatacttttttgcttaattatctatcttatttttaaatttgattattttatcttaattttaaatttaaggtcagatattccttttttaaattattctatttttaaattatttgaccttatttaaatttaaaataagattactataatcatgatattttaaatagaaataagatatttttgctaacttttaaattttgttatttttttatttaaattaaattataaaatcagaaaagatatttattatcattctattttattgaatatttaatttataaaataacatgaaaatttaaaagatggttagcaaatttttgaaatgatatttaggttagttgaaacctaatttttcaaaattgtaggtttaattttaaatttttatttttttttaaaaaccgaaattttttttttatttaatttaaatattatttttagttttttttattaattaatttaaaattaaataaatcctacatccaactatccaaagtcaacttgttgcaggagtatgtgttttagctttgtttataagctttactaaacctaattatggctcgatctaaattgtcatggttaac

SEQ ID NO: 290001 - DNA, 819 bp, Cannabis indica
cattgtcttcaagtttgttgtattaaaaaaaaaattatcaacaattaagctcagggtcctatttttactattttagaaaatacagggtccattttatcacttaacaaaacataggatctaatctgtaacttttggaaaacacagggtctaaaatagtatttaccctatttattattatattatcaactttgttattttgaatttctttttttcttttttttttttttggcttaaccttgttattttaaatttcgaaaaccacaaactacaacctatataattttcgtaaactaaaatacgttgtgggatgcatgtgaaaaaaaatactttttaaacagtccaaaagagttcatagtggattgcaatcaatgtataaacaaagaaataaaaggagagaaaaactcaactataatttctctttaaaatatttaatcagaaacttgttgcgattttcttaaagctttaatttaagactgaagaacctgaaatgaatcttttgacttattgtataaagcactggatgagtcacacaaaggaaaatataaacaaaggatgtatatttatttctatttttattttcaattgaaaagtatggtttatttatttggcctattttaaatcaattcttatccatttatattaaaaaataaaaagctaaaaacatatataatagttctgaaaagtgaaaagtcaagtccaatgagcagaggctaaaatagggatttcaacatttaaatattttctaatctttcaattttgtcgacatcaaattatagccaggacttaaccaaaaaaaaaaaaaaaaaactaaaataatac

SEQ ID NO: 290002 - DNA, 667 bp, Cannabis indica
cccccggagatgcccaacatattcctggcctaccaccaagacccaacgggagagtggctatgatctcaagaggacctcacatcggggaaaccacccgtaaggagctgaaacgttacgcaagggccgtgaagcatagtgaggtctgggaggtcactcaactcccagcttaaaggccccggctaatggaccagcccattacattcacagaagaggacgctaagacagtgcatttttcctcatcatgaccccttgttcatagagactcccattgccaataagattgtggccagagtcctaatcgacaacgggagttctgtgaatttattattcaaagaggccttcactgaaataggcctgacggaccgagatctttcaccaagcggttcccagctcacagggttttaaatggaactaacacttatcccaaatgggaaaagtgaggctcccagtcaccttgtgcccagacacaccccaaagcactttcaaaatattgtcacatttgtggtggtggactgcccaatagtcttataatgctatcgtcggccgaccggccctggtagattttggtgcagtcacgtcaattaggcacttgtgtcctgaaattccctactcaagaggctgggataaggaaccgtaagagggaaccaaggggaggccaggcagtgtt

SEQ ID NO: 290003 - DNA, 556 bp, Cannabis indica
cttgctgcaggaacggatgactgggccatgacacttgaaatactctgttcacctgaacgggctgtagtttgttctgccatgaagctgagacaacggagggcaccaccggtgcgatcaacggctctgataccaagtttaaaaaccagagtaaacagagaaaggaaataatgcggaaaaatgagaaaactcagcctgaaacttttaggctggtgtgctaccttttatatattcaatgattggtttgtacaggaaaattctagaatcaattgtacaatatacacacgttttaaataaaagagaatattctaacagaaagttgttagcctagggaatggtacagaatcagatagtacacctcagagaattacaccagagaatttacagcagtaaaaaatcatttcttaacatatagcacaatttttacatctctcattggagagatatcagccgatagcgtatcactctaaaatctctataattagctttaattattttctctttaattctctcattttgttttaattttttattagcttcataaatattaaatgatata

SEQ ID NO: 290004 - DNA, 699 bp, Cannabis indica
ctagtacaagaagtgccatttttcaatgtaatagaattgtttatttccttggttgagcatcattttccattggaatgtaaagacattccaagaatagtactttagaatgtgtacttaattaatagccaataaacactttgaatgagtatggtagtatttttaacccttgttgaatgagtatggtagtacacaaagaactgagtttatagctagagtgaaactgaatataacagacaatgatctacataaaatgaaaaaaaaaaaacacaataaatgataatctacattagatgctatccaacaaaatcccagataaaataaccactcatttttttttaacattaacaaattaactctaaatatcttatataggttttactacatatgttttaggttggaaataaattaaattattttccactttgtatgaatggtatgaagggataaatggtccaccagactgaagcttttatttctctttctttacaataagagagcttccatataacacgtaaaagttgatgaaaatgcttagctaactcgtttaatcaagtcaagtctctctctctcttataatttcttttatgatatatatatatttaagtgaagccagtccttttaagtcctaccaacttttttattatttactatttttaaaagagtacacttgacaaaacaaaaaaacaacaacccaccact

SEQ ID NO: 290005 - DNA, 567 bp, Cannabis indica
gatattccttaaacagtagagcttatcgtgcttacaacatgagaactcaaactattttggaatcagctaatgtggttgttgatgattttaaagatttttcagaattttccacagaagttgagatagatagctttatggatactcctccagaagcaacaaaagtaaattctaatgcagcagaactcagttctgccgatgcaaatgacgagtctgccgctgcaactgatgcaggagaactagaacaacctatctcgactcatccaaacatcatcactgattctatccagaaggaaccaagcaccagagttaaactgaatcatcccaaagatctcattcttggaaatcttgaagaaagcatggtaacatgaagaaggtatgttaatttgattagctttctttgttttgtctcacaatttgaaccaaaaaatataaaggaagccatgacatttaaagaatggctcaatgcaatgcaagaagaactcaaccaatttgttcacaacaaggtatggattttggttcgaaaccaaaaggtatcaatgtgattaacaaaatggatttttaaaaata

SEQ ID NO: 290006 - DNA, 106 bp, Cannabis indica
gtttaaataataacagctgtgatacaaatactcaatacaaagttgttgcctagcgactatacaaatactgcgtgctattgaaaagatcgtacgctctagggctaac

SEQ ID NO: 290007 - DNA, 268 bp, Cannabis indica
aaaatatattgtttttaattagaaaattagtgagtttatgaattatctagatagatattttctagatagactttttggtatttttctagatatatttaattaaataagaaaattaatatttaagttgattatgttcaagacacttaaatatttgatatttttcttaagagatttaattaaatagaaaaattatatttatgttgaaaattaatttatttaattttagaccaacataaattagaataatttttccagttttattttattt

SEQ ID NO: 290008 - DNA, 1152 bp, Cannabis indica
agctactaaataagttctaaaaatataaattattactattcaaaattaaatttaagtattcatctacaaccaaaataattgtaaagttaattaaattttaaaaagtatacacgcgaattacttaaaacaaaatccaaaaacatggtaaaaaagtctaccctagctatatattttttaaaaaatagatgtaactaaatccaaaggtagttggtaaataagttttgtatgtgcaataaaagatcatgaataaaccaacaactaaacccattaaataaagagaaatgctaaaatgtactagtggtgtcaaacaccttcttacgtgtcaatatcgctattggtctaattaagtgtcgggtcccatattgtttaataaaataacttttagggagtattgctagccaatcacaagacaataagtcttaagggtactaggcacaccactagtcagtgacggatccaggatttttactttgtggggacttatttatcgtaaaaaaatatttatagctacattataatcactcttactaaatttatctaatttagtgggggctttttctactattttggcctataattattaaattaaaaaatttatatttaattttttaaaaaacaatatttttgttcgtgggggctatagctcccacatcactcttaatgagtctatccctgccactagtaccctaatagcaaatgttcttgaataaaatgtttattttgttttggtaaatgtcaacaatgttatggtataaataatgtaactaaaaagtgttccatcactaccttttcccactttataaaattatagtattgtagatgtacttacttttgattttgttaatcggtgtgattatgcaatcaattaattaatctataatgcgtctccaaaaaggactatatcttcagttaaaaaaagaaaattattgatgttatagtcaatattagaaataaaattaaaatagattaatattaattagtaagatgaggactcttatatatttatacatcaatatacaaattatagataaaaaaactgcaaattaattagctcaagtgaactaaacattaattgttttaacattttgctctccttaacttattgaacaatatttggttatacatagagaaacacaaagtaattttcttccg

SEQ ID NO: 290009 - DNA, 557 bp, Cannabis indica
gtataataattagtatattatcctaatatttttgtattttttttagcttactatatctatccttaacactcaataatatctatcctatgtattaatattattcgaaaattactctaagtatttaaggattatctaaatatatataaaaaatattcttataaaagtacgtgaaagaaaacatagcttataccgaaaattatgtacttgacttccgataaagtcacttccaataaaatcctaacaaccaagtttaagcgaaactaaaatcaaatattatcctaattctaccaaaatttcggcagcataacggctataattgaacgtttccaaaaaatttaaacctattaataacattttcctaacaccattaataaacaaaatttgagaacctttcaaatatgaactttgacattgataatcatgctactaacacgaacatgttttgagtcaaatataaagacctactaagtataataaatgcatagacacatcaattagattatacaagacaagtgcctaaagtaacaagcaaaacaaatagtcacctaactttcacg

SEQ ID NO: 290010 - DNA, 1008 bp, Cannabis indica
agagttacattaagaaaaaaaaaattaaaaaaccaaaaaatatcaatgtaacaataataacaataaataatcattaatactatatcataatagaaatattttagagtaaatataatttcatacatgtattataatttacaataaaattattaattttacataaataaatttctaaaatacatgtatatattttattaagatgtaattattcttatatagaggtatactttgttaatacgggacttagaaaatgtataactaattacaatttagaggttattcttatttataactggcccaaatcgggacttgatttttctataacaaattagaggttattcttgaatagagtattcttaaatagaggttctactgtagtaaccttggtgtaatggttaaggtagttgttaaataagttagagggtaaaagttcaaatcccactaactacactttatattttctttttaactttatttacgccccctcactttaaattctgggttcgccactgattagtcttacaggcaagatacctgatttaatttcataggaagttagtcaaatcttactaccttgtaaggcaaaatgaacaaatatctgtatattgatgatgttgcaatatctatatccttattaacaatagctaactacttgtttgtcttgatgcaaggttttctaagggaactctttctaatacccataccattctttactacaactgtgagagttaacatgactcaacagaaatttaactatatattttcaaagctaataattttacctgtgaactatatatataaaaatatttatataggcagttgaaagatgtatttactgcaagctcttctctttgatttatcattaatatgaagtctctttcaatcttctaagtgtaacatgttttaatcataatcataagtacagtttataagtacttttaatattaccaattttttagtattattaataacaatatacaattatgacattcttaacaagtctatttt

SEQ ID NO: 290011 - DNA, 533 bp, Cannabis indica
aaatatagttcaacataagcaaatataaaagggaaaagtcaagcgttgggagcagcaggaacagattcatccgcgactttgctggccacctcgttctcaatttcctccacctccgcgacttccgtctcctcgagaaggttccctccaccaccttgagttggtgtgggtgacatggcgcgaaaagcctcggccatttctgcggcttctgctccaaggatcgagaagtcgaagtctggaactttggaaagagtagtataaatgtaatccgagaccgcctggtcatactgctttttgccgttctccttctcagtttccaagtcgcgagacatctcttcgatttttgccttggcctcaagctcgacttgctccttggccttacaaagttcctctagctctttgaccttagaagacgcatcttgcttcagcttcttaatgtcttattgaagttgagcaatatgtttcttcgcaagttcaacctctttgggccctacagcaaaagccttcgcaaacgtggccatgaactgcgaagctaa

SEQ ID NO: 290012 - DNA, 537 bp, Cannabis indica
ataattttttcatttaatgattaatttaaaataaatgaaaaaaaatatattataattagaaaataaattaattagtcaatgaaagtctagatagattttatttatttttgcttgaggtatttttctagtagtatttaattaaatagaaaattaatatttgagttgattttcatcatgatacttaaatatctgaatttttgtttatatttaattaaataggaaaattatattttagtagaaaattaacttttattaattaattttggaccaacataaaactagaatatttttttcaggatttatttttattttattttagagcatttcaaaaattgtattatatactttaatttttcaaaatgtaatatatatatttatagaaaattatatttgagttgcagattaatttaaattaatacaacttaaattgaataattttctaaatatttattgaaaaattattactaagatggaaataattcatttattttcatatccatctaagtataattttataaatattaaattaaaatttta

SEQ ID NO: 290013 - DNA, 659 bp, Cannabis indica
aaaaagatagaaaaatgcacatgttaaatgcctattcgaattaggaaaccaccaaaatccacgtgagacaaaaaatatgatttttgtgctgtttaggggggtgggccgcgactcagctttatcatgtcgcccgtgttggaatttcacgtttcgacgatgatttttttactgcgttgactaatagtattttggtcataactctctctatattgctcataattggacgattcaagatgttctagaaagataaaagagagatctagaaattttatgttttgacttcttccaaaatataaccagaagatagtcgaattcaggcttgaagtttcagctttattttttttttttgcgtaattttctctattttaaatatcatctttttgtgagatatttttatctttttttcttctgtatatttttctaatcttcttttattttaaatctacaaaaataaaagataacaagcataaaatcctccaaacacgattaaaactcaattagaaatatactaaacttaatctaaaattaatactaaaaataacctaacagtggagacactaattagtttatggtatagtagaatataattcagttattaaattctaaaataaatattaactaaaatagaaaaaaaataatatagtaactaatcaatatag

SEQ ID NO: 290014 - DNA, 678 bp, Cannabis indica
taataattatatatatatatatagagagagagagaagggtgatatggtgagagtaataagaagggtgaaaattatggtgagtgggcaaattaataaagatatgtgacacttgtgttttgggcccggcaaccaccaacaggaggccacatttctggtgtctaacttctcctttttttattatgagattctttttcaccacagacacatatatgattcaatgatgcttccatgcatcatatcatcatctttccaatttgggtctcccttctttatcttttatgtatgtagtagatcaaatttctaactttattcatcaatttttaaattcctgctgctttatattatcacattttacatatatgtacatacatacaaatatatattcaaatatatagctagctaccatatacataaatgtacgttaattgacgtagttacagtgatatagttttgaaccattaatttggagaataattgtttaaagattaaagatttgaattccacaaacaattttcttcttttatattaaataatatattgttttccgagagggagagacatacataattacagggacggagggactttatgccatatgtgggctaaagccctcactcaaatatatacatcaaattttgtatatgtacatatatacatatattaattcactttgctcaa

SEQ ID NO: 290015 - DNA, 724 bp, Cannabis indica
atatataacatatatatttatataattaatattatgtatgttacatacataatatattagttggcataaaattattatttgagagttataattcatgcatgagagttatacattaattttgtacattaatatacaaattatataatgtatatgataataatattgatagtgtttattactattgatgtggagattattatcatatatattgtgaataaagagaatttaaaattctttttcaatagtgattttgagagaaaaaaaaattgtaacttgtgagaagttacattctttgagaataaaaagtaataattatctcatattataagataagaaaagtgaactatatgagagttacacttatgaaaatagtcttgtcatagcaagaacaaatggatcaaaagtggatccaaacttatgaaatgagtcataaattggaagagcatattttagactaaaaaaaatgtcaaatggtattttttaaagtggccttaaagagtcatttgaagaggaaaatacacaaaagtgatattttatatacactttatggtaaaaatgtgggggtgagccacaaatttaatcaaaatgtgttgagacattattgattaatttatttgattttgaattcaaattctaaatcaaatttggctatgtgtatatgtaaaattttgacatattttggtgtcaaagttaagtgaaaataatttcaagaaggaaattaatt

SEQ ID NO: 290016 - DNA, 592 bp, Cannabis indica
atcccgcttctaccaacaacttttagttgacattttcctcacatctttttgtttcccaaggcgatcgaagacattagccctgttggccatctcttaactaggcgacctgggtggtagcccgggggatttctcctgaatgatgatagagtcttctcttgagtaaccacttccagcgtgctcactcctggcgttgtagcgactatttcattcaaaatagtcttttacggggtcgcaagtgcggagggagttgaactattactcgagttcaacttttctccatgcacttacaaaaagtattcccattgttgggctttgtgccttaaataaacccatttcaatttaattagatttactttttaataaagatcagaaatcattctatgttgcatagttcacatgatttatttcataattatgtttaatgtataaattttattaagtccatagcatatataaatatagtatatatttgttcatgattatagtgtcgttagcacagtggaatgtaatcatgattatatgtttaaaagtttaattccaatgatttgtcagttcactggatttagactggcatgataatcagcgataaggt

SEQ ID NO: 290017 - DNA, 515 bp, Cannabis indica
attctagtaactaattatattttctaatatttacctaattagcaattttttttaagtggaaaattaattatttattaattaattttggaccaacttaaattagaatatttttcctagtattaaattagaatttataattaagttgattttatacttaattatttaattcttatatttaatacatttaattaaattgaaaattaaatatttaagttgatttaattcttaatacctaaatattagttattttcagaatttttaattaaatagaaaattattttaaattggaaattttaattccagaacaacttaactttgaataattttcaaaatatattttatcttattaaacattttttcaaaaattttcgaaaattgcattatttaaatattgataattttgatttttttttttgaaaaattagattaaagttgaaaattaatattttaattaattttagatcaacttaaatcaattagaaaataaagagattagttagtgaaaatctagatag

SEQ ID NO: 290018 - DNA, 675 bp, Cannabis indica
atatggaaatggtgaatacacactactacaaaaggtttatgaaggaaacgtttgatcctgtggacttggcagaaacagttggttttccgggtttaagattgcatgaggtggatgatgggaaccaaatgctttatcgctgtgaattgaatcaagttgctcgcgcttggatgttttttgtgagtgctaggcttatgcctagtaagcatttatcagattttccattggagagactcaaaattgtttatgcaataatgaaagggattatggtgccggctgggggtatcattctgaatagtttagataacatggttgcaggatcaacacatgcagggattggcctagcgggaattataactgaattgtgtgaagctcataaggtgccacaatatccttatgataatctagtgcagccacaacgaaatattgattggacaatggtgcgaaaccttaaacccccgcatccctatggccaaccgcctcctccacgtcgtactccgcagcagaaattcatgtccccgaggaagagaacattccaaatgaagaaatgcctcaagcggttcccacttccactccccttgatgcggggatgcaacatatcaatgctcaactcaactacatcatccagcaaaacaatcatatccagagttacatggcgcaaagaagtgaatttgatga

SEQ ID NO: 290019 - DNA, 339 bp, Cannabis indica
caatgttaaacaatatctatctaaccctaataaagtgtttagctacacatgttcttgattgacatcaactccaattcaccctttatataggctttcagggactaaaaagatagaaaaatgcacatgttaaatgcacattcgaactaggaaacccccaacacccacgtgagagaaaaatatgatttttgtgttgtttaggggggtgggacgcggcatgctaaagccatgctgcgacccgtgttggagttcgacagtgatttttctgctgcgttgactgatagtattttggccataactctcttgatattgcttggaattggacaattcaagatgttccag

SEQ ID NO: 290020 - DNA, 602 bp, Cannabis indica
gtcctagtcctagttcggttctagttccatttgcaattcttagttcgcgtttgggtttgagttcggatcggagttcgagtcctggtctgagttttggttcgggtttggatttcagtctaggtccagatcaggctccggttgtgggttcgcgtcctgggtcttggtataggtcgggtccgagtcccaagttccaatccagatctgagtgtggattcagttctgggtctaagtctttgggtctgattcaaggtgtgggtttgagttcgggtccgagtctgtgtccaggtttgtgtccaggtctggaccccgatctgtgtctaggttcgggtccacgtccaagtttgggtcctgagtgcgggttcaagtttgggtctgggtcaggatctcggtccagatgtaggtccagcatttcgatcccgggtctcaaatttaggtgcaggtccgggtctcaattccggtctgggtacatgatcgtgtccgggaccaagttccagtcccaatttgggtctgaggataggtctgtgttcggttctacgtctgggtccgggtcctcgtcctggtcacggtcttagtcttgttctagggtcctggttcggcgattc

SEQ ID NO: 290021 - DNA, 510 bp, Cannabis indica
atcaaccaacataaccaccaggtgatggttgtgacgccggatgattttatgtcccccatccttctgactatgaaatcggtcaagatggctttcaaacatcctcaatcacccaacgtgaacgcctggcgaaatcccatcgaagggtggtgatgccggatgatttcaaatgagtgtcagcaatacatcactccgacagtgaactcggttcagacagctttcaaacatcctcaatcaaccaacgtaaccacccagtttatggttgtgacgccggatgattttagacgagtgtcccccatccttctgacaatgaagtcagtcaagatggctttcagacatcctcaatcacccaacgtgaacgcccgccgaaatcccatcggagggtggtgacaccggatgatttcaaatgagtgtcagcaatacatcactccgacagtgaagtcggttcggacagctttcaaacatcctcaatcaaccaacgtaaccacccagttgatggttgtgatgccgaat

SEQ ID NO: 290022 - DNA, 517 bp, Cannabis indica
ttttgtatagattacttgttatatatatcgctaacttttgtttgttaatggtgtagatatggccaactcgggttcaggatcagattcagacccagaggtagagtgtccaacaataatgcctacacgaggacctactcaaatgaataaaatatccaagctaatggatcaaggcaaaagattggtcctcgaggttaatgacaaaggacaatactgcgacaaaagctactccaagctcgtatcgactttggaagttagatgccgtcaggcgatagggttgtcctataaaaattggaaagaagtcaaccctacgctgaaaaataaagcttggacaaatatacaggtaaggagttatttgttagaattttgatttgttttttattaattcagatgttaactctaactgtgtttgttttctttcaaactagacgggtttcattgtgccggattccttcaaacatgattgtctcatccttgctgggaagttaatgaaatacttcaagaataggatgacaaaaga

SEQ ID NO: 290023 - DNA, 515 bp, Cannabis indica
ctttgtaatgctcctgcaacatttcaaagatgtatgatgcaatattttctgatatggttgaaagaaatcttgaagtgtttatggatgatttttctgtgtttggaaattcttttgatgattgtttgcaccatctttctcttgttttaattcgttgcaaagaaatgaatttagttcttaattgggaaaaatgtcatttcatggttaaaaagggaattgtcttaggtcatgtgatttcatctcaaggaatagaagttgataaagcaaaagtagatcttatttcaaaacttcctccacctaagacagtaaaagaaattagatcattcttaggccatgccggtttttatagaagattcataaaagactttagcaaaatttcacgccctttatgtcatttacttggaaaagaaaatgcttttgtctttgataatgaatgccatgttgcctttgaaaaattgaaatcccttttgactagtgcacccattattcgccctcctgattggaatgttccttttgaa

SEQ ID NO: 290024 - DNA, 741 bp, Cannabis indica
gtgtgtctctacggttcggtacagagttgtttataatggccatgttcttgatcctatctctccgtctagaggaattcgtcaaagtgatcccctctccacttacctgttcattataggtgctgaaggcctctctgctctaattcaaaaatttgaagctaatagactcattcaaggatgcaaggttgctcaacgtgcgcctccgataactcatatgttcttcgctaacgacagttatttgtttagtcaagccacacaaggggctgctgatagcatcaccaaccttcttcaactctttgaaaatgcatccggtcagaaggttaattactccaagtcatcaatatttttcagtcctaatactactactactacccgtgcacatatctgctctatacttcacatgtcagaagctcttgaaggcagcttttatttaggccttctaaatattatcggccgtaataaaaatgttgtgcttggttttataaaaaacaaagtcatctctcgtatcaacagctgagatggtaaatttttgtctcgtgcagggaaagaaattttactcaagacagtggttcaatccatgcccacttatgctatgagtgtatttcttctcccgattggtacttgtaatgagattgagaaattaatggctagcttctggtggaagacaaaatcaagtaatgggcgaggtattatctggatgtcataggactgtctagcaactcctaaagaagaaggtggaatggg

SEQ ID NO: 290025 - DNA, 675 bp, Cannabis indica
cctagttcggttctagttccatttgtgattctgagttcgagtttgggtttaaattcgggtcggagtttgagtcctggtctgattttgggttcgggtccgaattttagtctaggtccaaatcaggctccgggtgtgggttcgcgtcctgggccttggtctaggttgggtgcgagtcctaagttccactcccgatttgagtctggattcagttctaggtctaagtccttggttctgatcctagtctgtgttcgagtttgggtccgggtctgggtctagctttaggtctgattctaggtgtgtgtttaagttcgggtccgagtctgtgtccgagttagtgtccaggtctggatcccgatctggttctaggttcgggtctaggtccaagttggggtcccaagtgcgggtccaagtttgggtctgggtcaggatctcgatccacatctaggtccagcatttcgggtcccagatttaggtcaagggccgggtctcagttccggtcttggtacacgaccttgtccgggcccgagttctagtcttaattttggtttgaggctaggtctgtgttcagttataggtgtgggtccgtgtcttggttaatcgattcttgttcaggttttaattttggctcccaggttgaggtttgggcttgggtttggttcttcgtctgggttctgg

SEQ ID NO: 290026 - DNA, 522 bp, Cannabis indica
catttgaattggatcctgcaaactgagatgaatttatttaaaaagtttagatatcaattaaagttctatcatattattggagatagttcatattcttctatgggtactcgtggttgaggtaaatgcaatagtatttgatattttcacattaatggaatcgggaatcatacctacctataacccaagacaagtaacatatactttgaattggatatgcacattttgatttctatttaccattagttgctttcgatgtttgatatgcacattttgtttcattctcatttatatataattattaaccaaaatattgttttttttatatagtatttaatttttgaaaaatgctattaatttggctgaggtgatttaatacttctatttgcatgtttaagattgtcaataccttttcctgataaactctatttcagtcttttttcctaaaaacgtttgtatgcatcgagatgctggatgttgatggcgagatgggttatgataatccttctagaattgagccaaaac

SEQ ID NO: 290027 - DNA, 489 bp, Cannabis indica
tagtggctttgtttatattacctaaaaaacttttatatactggtttattaatattttctggtctttagttttgtgtgttagtcattgaacataacctgtcaagggggagaatgttagtgttattattttgtgacagtgtttgttctgttcaatgtctagtcgtatctggatttttagtctgttatatctgcactaacgtttgtttacgagagtctcatttaagtgttagttagtgccagctggacttattttgtggatatatatatagtcagtttctgttagtaaagtggttatccattaaatcgttcagacagttatttcggttgtttttagagagatagtcgtatcttgtttcttgtggttgtgattacaggttagatcttggagcttgagagtgttcatcaatggcggaatgatctgaatctggaattgttgagttcaaactgaagggatttcagtgtcatcttcatcatcagatctgaagggatt

SEQ ID NO: 290028 - DNA, 112 bp, Cannabis indica
tttttcgtttttcatcagaatcgagttccgtaaaaacaaaaattgctcaatttttcacaaggaatccaaattcatcgttttaattcatatttcatgtaagtaaatcattacc

SEQ ID NO: 290029 - DNA, 563 bp, Cannabis indica
ttgggattttatgtacctaaataaaactcattctaatacaatcttatttgttattaatataagattagaagtcatttatgtttacatgtatttttcatgtttatggtttaatatatacaaattttgttaaatccaaaacatatagtgttattcacaattacagtgatgtcaacacagtagaaggtaattgtgattatatgtttcaaaagataatgcctcatgattcatcagtacactggatttacactgaagtgatagtcagcgataaagcttaattacacattcgataagtgttatgttcttttcaagatattggcaaagtatgctagtatcggatatatggagtatacattggactgggatcgatattgatcttaataaaaaatattataatcttaccgttgtatctgtctaagtcaatatcactggtcgatcttagatcaaaagatctaattaaccctaacatggttagtagggatgtacatcggtcagtttggacggtttatcctatatattttctaacccaatctaaagttcgggttgctaaaatttaagtgcaaccc

SEQ ID NO: 290030 - DNA, 607 bp, Cannabis indica
cttgtggatgtgattgttgagtgtagtcttgtcaaaaattacaaaataataattaatataaccctaggtacggctaaaaaaggggtggtataaccccaagataaatttgattttgtcaatcccttgaaaaacgtaatttgaacaaacccaaccccctattaacttttccttggaagacgtaattcgaaccaacgaaattatcgattttgttctggtttggttgactgtggttagaaaaattatttatttaaataaggtaaatgttgttcccattgttcccattgttcccatacgttatgaacaacaatggccacataaaattttcacatgtagcaacaaatatcctaatattatgtcgaaataaacatgtgtggcgaaatgaataagaaattaaattaggatgtttactaataatgagaactcaatattttttttaaacgatttaaatatttcattaaaatattattcgttggaataaatattgcaataatttttgtaagattacattaacgtattaatcgttgtaatcaagattgtaataattttttgaatactatacaaatatagatatttaataaaaaaacagtttattgttatgaatacaata

SEQ ID NO: 290031 - DNA, 552 bp, Cannabis indica
ttagatctcaaacctttgcctgatacactttgaaatatgcatttctaggagagtctaacacttatcctgctatcattgcatctaatttagatgaaaaataagaagtaaagttgttagatatccttagaaagcataaagaggccataggttggaccataggagacattaagggaattagcccagctgtttgcatgcatagaattcatttagaaaaaaatgcaaagacctcccgagaaagccaaagaatattaaatccaaacatgaaagaggtagtaagagatgaggtaattcaaatgttagatgtagggatcatttaccctattttgacactccatgggttagtctagttcaagttgttccaaaaaagtctgggatcactgttgttaaaaacgaacaaaatgagttaatccctactagagtccaaacatggtggtgagtgtgtatagactatagaaagttgaacagtggcactaggaaagaccacttaccattacccttcattgaccaaatgcttgaaaggttactggccatgcttattattgctttcttgat

SEQ ID NO: 290032 - DNA, 657 bp, Cannabis indica
aaaaaaatatacaaaaaatatctctttttacactataatcaaaaacatgttcatacaaaaatatttaactcaaacttcaactttttcttttcttatttttcttgcttaattttttttaaagtttttttttttaccgatggaacaatctcagcctatatgatataaaaattagagattttttaaattagatagaaaaattaagtataaaaactcaaaattttctaattttacccattcatgggtaatacccattaagagtgcacccatttatgtttatatattaagtctataattaattattaaaattatttatattcttttattaaaaaaaaactctttgtattctaactcttattcctttgtctatatatataagttaaaattttgtggacattcataattttgaagcttttctttttttttttttttgtctttctaactttttatgtcttatttttatattccttgacatggctattaatatttgaagattttgttatgtttttcttttcatcttttttctaattcttaatgttctattttcagattattcattggcaaatctctcaaatagatattttgcaccaaaactattaggtaattttttttcttactttgaaagattatcactaatctttattgtttttattttcatca

SEQ ID NO: 290033 - DNA, 516 bp, Cannabis indica
ggctcttcgagctgaaggagcagttaagtttttgcaagaaacccgagagcctcctggtgttggtgggatcactattctccctatgtctggtcctggaaaagagagtggggttctacctttgagcagaagaaaagaactttcccatcttcgggaagttcagggcaaggtaaaaggtttcgaggaaaccagaacaaaggaggacgtcagacttactcctatcctgagtgcccgcgttgcaagaagcatcacccctggacttgtaaccagagagcctgctttcaatgtggttcggtgggacatctcaggaaagactgtcctctattgaagaaagaggaaccaaagcctcaggtcaaacctgtgcctgcacctgctcgtgtatttgctataactcaggctgatgctactgccagcccttcagtagttacaggccagcttctaatcaatggttttgtttatactgttttatttgactcgggtgctactcggtcttatgtgtcatcaagacttcttgaccag

SEQ ID NO: 290034 - DNA, 401 bp, Cannabis indica
aatctttacaaatatgaaaaacttaaatagatctattaccattgttgttgtcgttgcttagttactgaatttttaaacaaaaactactaaaacttatataaaactaaaatttacgtggctcgacacgtaagtctcatctagtttatataaatgcgtcaaaaataatttccaagtggatcatatcaccttatcttaactttctcaatcagtcttgatatccaaaaccttaattcaaattaaatcaaatactacagctaattgttttgatgttgaactctctctctctctctctactaaaaacttaaaaaatgtgacttaattattctatatatatatatattaataaattacttatttggtgatcatgatcttatataaacatatataatataattagctaa

SEQ ID NO: 290035 - DNA, 582 bp, Cannabis indica
atgcactcaatcactaatggctggattttattttgtgaagaaaagctatggtattttcgaattagaagaagaagaaggaagaggtatcaacaaacctagagagaaaacaaggtttttagctttggaggtattagttggataatgagaccatatttattttatactaatttcaactagggttagggttgaattatttggaataaaaaaatgataaaaaagagcaaaattagcacatagtggccgaccacttaatgggcccaacactagtttggtttttgtcatttttctcaactattttatctattttttacaaataccatttttgtaacttcaaccctataaatgccaaaactatttatttaataattaaaataattataaaataaaattgtcatttataaaatttattaattagactccacaacgtctcttatttaataaattaaacctaaaatacaatttcttcataatcaagtcatatcttagtgaaaattcacaaactagacatagtctaattttagaattgaaattgattaactaaaatctattaattgagtcttacaagcagtttgtctcaactag

SEQ ID NO: 290036 - DNA, 727 bp, Cannabis indica
gagttcccaagactcacttgagttcatctacaaaagacaacacacgagatgagtgttggtcggaatatcgaacaataaataagaaaatatgccgactaggagtactcaacagactaaagaacgactatgtttaaagaaaagtcagaactcaagaagttaaaaaaaattcttgagttagggcaaaaaagttcatgaagcttagaacaagcaagatgaaagatggacgttatgcagttcagaaacaagcattatggctgtaaacccgtatgaagacatgataaagaagaatcgcagaggtttctaagcctagggtttcctaagcatttttctacagcacagtagaagttgcatacaaatgtaaacatgcgaagataagcataaaggaaatcagaaacttactcaaagattcaagtgtctgggttcaagcaacacctattcaaccagcagttgtacgaaggcacttcgacgactttgaagccaagaaattttcttttcgctctgaagcttacttagcaaagaagggtgatgaaatgagtttatgtgctaatgctgtggatatttataggcaaatcacaaaaagaggtaattgtctcaaagaaacctcagacgcctcagcttcggaagtaaattggatttcgaaatattaattgtcagagcatttattagccgaaaaccgaagggacactcagtcagcttcacatcgagtctcgaacggtcacgctcgaca

SEQ ID NO: 290037 - DNA, 594 bp, Cannabis indica
agtttgctgacagagatctctgtcattacgatgtaactatagctttggagttacatcggagaaagtagcggatgccattaaaaaccagttaagaagcctctaccggaatggtgattatcttgctggaagcccgagcctttacttcaaaagccacagtaagtgccttgcaatccactggaaaagacagatttccccagagatcttggagcaaaccaggttgcacgcgtctcttgggcctcccagagcccgggagacgcatacagtttttcgtgcgtgaaagatcactgggggtgtgataggtcttcaacctttcttctcggaatggaaggattgcttgaggtctgtcacacacccagcgatgctttcaccctttgatcttttaagtgaagtcatcggttgaattttatgcaactttagccttcctcgaggaagctgaagcttacttcataaaaaatcaacttgactctcacatgcacgttgctttttgtgcatgaaagatcactgggggcatgacacgtcttcaaccctccttctcagaatggaaggactgcttgaagtctgtcttactccccgtgatgctttcaccctttgatc

SEQ ID NO: 290038 - DNA, 397 bp, Cannabis indica
tttctgatattaagactattaagttttaaaataaaataaaaaataaatgtaatgcatctgaaccctccacgtgtctataaatgtaatgtaacgaaaataaatgtaagagaattgtaacattaggtatttttgcctctaaaaataaacattaggtatttaagtgtataaaatttaaaacattaagtatttataccgcaatttatcccctaataatttatttccttataaaattttaatgaaaattaattaaattttaaaattaaattaattataattattaattaattttttaaaatttattattaaataagaatcttttagtaatttttttactcttaaatattaaaaattttatagcaaaactctttataatttaaaattatacacatataatttc

SEQ ID NO: 290039 - DNA, 530 bp, Cannabis indica
gaagcggccgagcttcgatcgaccctgacctgccctcaccagctggagaacatcattaatgtggctgggatcaaaccctctacctcagggaccttccaccggcctcctcgtgactcggagacgcccaacctcaactatgatggcttcggggcttgataatctttttggctgaaatggatttaataaaatggtatattatgcttgaaaaatccttttcctctcttttccaacacttagtcaaatttaagaaaaaaatagaaaactctttttctctcttttcctctctttttcggctgagcttggggggttcaaagctgggattttggttggtgatttctagtgattttgctagatcaaagtgtattttctttaaggtaattcttggctttaatctcttacttgttttcttggaaaaaattgatgaaaatgggtggttgcatgcttgattctttggagtgttgttgctgctgattattattgttgttgttccttgtttaaatgttgaaataattaggtttaatgagattgta

SEQ ID NO: 290040 - DNA, 932 bp, Cannabis indica
aaaacccctaatccgctcaaagtgcctattggaaacacgttttaccggtgcaataatgcgccaagtaaaagttattagtgccaatttatgtcaatgacgcgaatatctttaccggcgtaccatatgtgttggtaaaagtgttcgcgccattgagatgaattggcgccaatgaattttaccgtcgcatgattacgccaagaaaaagtgaaattgggattaattttgatcttcctgtttagtttgcgggcaaaaaattgcaccagcaaagctttgtttttttttttttttaaaaaaatatattttaataatttataaaaatataataaaattaattttaaatatataattacattttaaaggattataattaaaagaaaatgtatttacaatgtatttcgatcgaactaatatatagacatgttcgatttgttatgaaattagtaagtaataataaaaatttctaaagttaataataaacaaataaaataataaaagatgttcgaaaaaaaaggtaaagttttaaagttaattataaaatatatattgttctaaagacaggtaatatcatcgtcattgttctgagtttggggaggatgcgatgatgacgatccagcaccaagaaaagtggggaatggtggaagatccatctgaggtaagttgaaaccaggcacagcccgagagagatactcaaattgatctgggaatcgcttgaggtagacttgttgtgtttcatactgctgcctcgaatactgactttcctgctgtgcctcctccactttcttctgtaaggccttatactgttccatagtaatagtctgtgaggcaggagaagttatggtatgtgctcttttgcccccaactgccttgagtctcgagagatggctaaaacctctcacatgtcgagatcgctcaccgagtacttgcgtcataac

SEQ ID NO: 290041 - DNA, 539 bp, Cannabis indica
ggggtggagcagtggtttggagaagtgctaaacaaactgcaatttcagactctaccatggaggcagaatacatagctgctgtagaggctgctaaagaacttgtctggcttagaaagttcttcacaggactcggtgtcgttcctggaatggaaaaaccactagttttgctttgtgataacactggagccataaccaacagtaaagagcctcgaagccacaagagaagcaaacatatagaaaggaaataccatatcatcagagagtatgtggcaagaggggatgtactggtggagaaagtggacacagaggacaacctagctgatccattcaccaaagttttggcaggaactgcatttgaaaagcaccgtcagaatctaggattaattgaaatgtactgattgttttatattagtgcaagtgggagtatgttgggctttatgccctaaataaaactctatttcaatgtaatctctattatttaaatatcaataaagagacagaagtattttcatcacttatttaatgtgtcatttggttca

SEQ ID NO: 290042 - DNA, 652 bp, Cannabis indica
cttatctaatgactatgggatggtccacccccaatcacttagaatagctatcaaacatgcaaaccttagttaacagttctagcttttcttaagattacgattaggtcatccatgaatctagtaatggtttacactaagtacacaaccattccatcattctgaaattttcctatcactagggtatttccttagaaggacttaggcaacgactagtaactaatcatagaccttatactatcatcaatatgcaaatcaaatttctggggaggtaagtttggatataattcaaaaaaatcaacttaatgatctttgaactgcatatctaccaaatatttctccacccctatcagttcacaagatctttgaccacttaccttaatggttttccaccattactagaaattcatgaaatttttcaaacatttcaaatttctttgcataaggtaaaatctagagtgattgttttaagaatataacgaaaactcatatccacctctgaatgtacatctacttcgaatgggggaagctcccatgctttctccacaaggcagtcatgatgaagaagataaattattctcacgaaaggtcatggatttgatccctaaatcgctaaaatagatggttgttgaatttctgaacctcaaagataaac

SEQ ID NO: 290043 - DNA, 570 bp, Cannabis indica
aattaaaatgcagaaattaaagtgcagaaattttaaaattttaagcctctccccccaaactaaatattacattgtccccaatgtatacagtaaaatgcagagagaagaaacttacctgagaccctttcagaaagggttgggtggtggcggctggtcatagggatagaaccgaggaggttgtgccaagtagttcgggtcatcaatcccaatgttcattctgttgatgagagagttgagttgctgaacttgtccctcatcatagatactcctctgcaccatgtattgttgcatgtggttgttctgctgaattatgtaactcagctgtgcatgagtgtattgtgttgtaggatcgatgggcccaggcaattgaagtgtttgctcctcttcttcttcttcaacactaggctcacgttgccgcctacgcccttgcggtgcatcaggtggtggctgcccataggggtgtggctctttcagcctgttgacaaaggcgatgtccatcttacgaagtggcaacaccgtgttgtcaaactctaactggggaacttcatatgccccgcagagttctgtgat

SEQ ID NO: 290044 - DNA, 606 bp, Cannabis indica
acagatcaactatctggcgtaggaattgcccttgtcacacctggggacaacacctgcacgctgcggtcaaattcagattcaaagcctctaacaacgaagccgaatatgaagtcctaatcgctagacttaaactagcgaaggaaaggaagcccgaacacattgagatctgcaatgattcacagctggtggtaaatcatgtatccggccaatacgaggctcggggagagaaaatgatagcatatctgagcaaaatacatgatctgctcgcacaattcaaaagctacggtctcagaaaaattcaaagagaagaaaatacaacggcagatgcgttagctcgattggcaagcaacaatataagtgacaaggcaaacctagtccctatccagttccttgaagagcctatcatcactggcacagaagaaatcaaaatgatcgacacatctccaaactggatgacgccaatagcagcctatctcaactctagggaactcccaaataaccaaaatgaagctcaaaaaatgacaagaaaggcagtagggtacatcatagtagaaggggtcttgtacggaagaggatctcgatgccattactcagatgtatcacacc

SEQ ID NO: 290045 - DNA, 518 bp, Cannabis indica
tttgattgttgcagttcgtagtaaaaatgagttcataaattgatgatcgcaactccctattaaatccaaaaatattcaggaaagaagtatgaaaaacagagtaatgaaacacaccattaacagacaaatatttatactaaaaaacataaacttgtttttaaattgttgcagatcatataaggatgagttgaaaattgttgatcggagctcccaatcaaatccaaacatacaataacaaggtattgcattacttctgatgattgcatgataatgattgaaacatttgattcaaaaaaaaattaaaaaaatcaaaataaataacagtgaataattattgttgtttttttgtttaatttatgtaaatcatttaaataatcaaaatgttgaagaataaaacaaaaaaaaaaaaaataaatagttacatttaccttgaaattaaaagaaaaatagttgattaatgtagcactattattaattattagtcttgtctctattgtacatgttctctgtaacctttg

SEQ ID NO: 290046 - DNA, 1561 bp, Cannabis indica
atatattaattaagagactttgtggagtctaattaatatatattataaatgacaattttatttgataattattttaattattaaattaatagttttggcatttatagggtttaagttgcaaaaagttgtatttgtgaaaagtagataaaatagttgagaaaaatggcaaaaactaaactaatgttgggcccattaagtggccggccattatgtgtcatttttactctatttttatcaattttttgttctaaataattcaaccctaaccctattggaaattagtataaaaggaaggctattgtctcattatccaattaatgcctccaaagctaaaaaacctagttttctctttaggtttatgagacctcttccttttattctcttaattttgaaaacaccatagtcttcttcacaaaccaaaattcagccattagcgattgagtgcatgcccacacataacaagtgagtcctccatcatagtattaagactgtgaagaatccaaacaacaagaaggagaatcaggctcagatcctggtgatactctactacaaaaaggatataagggttagagatctgagcggaaggagtcatttaattccgctgcaaccactgtaaggtttctcataccttttatgtgtttattttcatcgttttagaaattcatattaggatgttaaaaaaatacttgtttgtaaatctagatcctggtagatcctggtaaaaatattcccaaacaatgtcaacatagtggaaggtaatgtcattatatgcttcaaaagattatgtcccatgattcatcagtgcagtggatttacactgatgtgataatcaacgataaagcttacttacaccttggataagtgttatgttcttttcaagacattggcaaagtatgctagtatcggatgtaaggagtatacattggactgggaccgatactgatcttggtaatgatactataatcttaccgttgtatcttgctaactcaatatcattagttgatcttagatcaaaagaacttaatcttaatattgttaggttcgatctcatgagtgttatttatgttctttgatttggtcattgaaaatcatacgagtgaacacttacatcttgggaacatgatagtacaattgagtgggtgcgctaatcatagataaggaatctatagcttctatctggacatagaattaaaatgatgatttcgttcgagcttggcttaatagagataaatggaagagctcttattttagtaattatattagtttactgaaatattatttatagaaagctaagtgttttaaggataaaatacattgaggggtgaaacggtaaatttgtctctactcgatgtaaatcatctatagaggatctttgattattaggattataacgatggataagttcatagcatatctatatcatggaacatatagggcgctctatattattgagagtgcaattctaaatgtatagtggtgcaaggaggaaattaataaagctagaggatttacttggtaaaattctagatctactattggaagctcagttatataggctcat

SEQ ID NO: 290047 - DNA, 592 bp, Cannabis indica
acaatagtgacatatacagctcgtggctaacgagtggtaggggtactttatgaagtacctaaattatgtggttatgaagttgtggaacgatcaagcgtgttattatgtgatgagttgtaactaaattattgtgttatggtatgattgaatgaacgttatattatttatgaaattagtctctgtaactgtcgggggtaaaaatacatgttgtagggatgtaagatttgagtgctttatgaagcaataagattatgtgtttgagtgctttattaagcactgagattatgtggttactgtaatatatgaattagagtgatttatgaggtactgaaagtgagtgtttataatgatgtgtgattaaggtacttaataaaccactgagatggttgattatgaatagctataaatattctttattatgtattaaatttgcttacataagcattatgttattttgtatatgtagattgacatatgtaagacctaccggtatgtatattatattattatgaaatctgcctgcactttccataaagtctaattagtagcttttcttgctgagtcattgtgactcacgggtgcttcgtggtgc

SEQ ID NO: 290048 - DNA, 693 bp, Cannabis indica
tattaataactggtttctcctctcactatttttttgttattcttttatggtttttattgcatttttgtctctttaacataaaatttatatgttcgaaactggtttttaaatttagtatcgtttttaaaagtttagttattaggcattgtgtatttttcattgtgttgtcgatgaaactgtttttttttttttttgcttcttttaatgaaataattagtttcttttaatattgatgaaactggtttttaaagttagtatcgtttttagattatattttttttttcattattttattgatgaaactattttttttgcttcttttaatgaaattattaattttttttaatgttgatgaaactggtttttaagtttatatcatttttagattataattttttatattgtgtttttttttgttcattatggtgttgatgaattgatttttttctactacttttattgaaataattagttcattttaatatatagaattaattagtttattaatttattaccttgataaaattattttggtattgcatcaatttctataaaaaacaaaaaaaacaaaaacaaaaaacaaaaaaaatagtagtttaaaaaaattgcttcagtaaaaaaaaaatagcttcaactgagaattttttttagtgtttcattttttaaaaaatataaaaaaaaagaaaaagaaaa

SEQ ID NO: 290049 - DNA, 511 bp, Cannabis indica
tcggtgatatatgatgagtaccgagcgtaggtacaggctcacctgattaggtgatgcaattttcttgacgatgtactgagcgtaagtacggacgtcagtgacatatgataagtaccgggcgtaggtacgggctcgttttattagacgatgcgatattgttgccagattatggcatgagcccgcctgattaggtgatgtaattatatgatatatgggtgcaggtttttggcacaggctcacctgattaggtgatgcaattatataatacatgggtgcaggtttttgacactgactcatctgattaggtgatgcagttatgcgatatatgagtgccagactatggcacgggcttgcctgattaggcaatgcaatacaggattatcagattaaagcatcgacttgcttgattaggcaacgtgatgttacgaagatggttactttatgaggtagcatatatctattatttatatgattaaatgaatataaattctattattggtataatggtttt

SEQ ID NO: 290050 - DNA, 531 bp, Cannabis indica
catcccggagaatgtaaccgaaaagtatgttttcaatgtggtatggttgggaattttaagaaaaattacccacaggtggagaaagaagagcaagagcaggaagcgatatttgttcctactccggtgtatgctaatgttcaagctgatgacgcagcgagctcttctgtagtggcaggtcagctccctgtaaacgacttcttttatatcgtgttgtttgatttgggagctacacgttcatatgtagctatgtgaataattaatctttttgggtaaggccttgtgatattttagaaagagagtttggaaccctaatgcctagtggggcgttggttatctctaataggcgctttaggtctatgccggttaggatcgaagatagggagttgagcgctgaccttatagaattggaattaactgagtttgacattatactgggaatggattttctgttcaagtgttcggccagtatagattgtaagcagaaaatggtgacttttcagcccgaaggtgaagatccatttgtttaggatg

SEQ ID NO: 290051 - DNA, 527 bp, Cannabis indica
gtttattttctgcatttttaattttttctgctttaattttctgtttttagttaggaattggcaataagctaaaagataattgtgtgctgctgtttaatgtaatgtgctctgaaattgcaaaataactgtgtgcttaattctgttaactctttggattagtttggatgcttgtataacatgtgtaagaatgcaatttgatgatctgtgaaatatgttataattgttttactatggtttgtggtaagattgactggatagcttagaacttgcatgtcttattcttttgaggcgaaatccttgacaacattcaataggaatatgatttaggcatttgttggatagtttgagcctttcaagcctaccatgaaatgattatccttagttaaccctcttgagcctaaacttgttttgttcttcacctgttgaaccgaaatatgtatccacactgttaattttgtcctcactattttatcaatgatatcataagctatataattagtttgggggagcaaaatgcatggtgtgag

SEQ ID NO: 290052 - DNA, 597 bp, Cannabis indica
cgggtcggggttcgagtcctagttcgagtttgtgtttgggtccagatctcagtctaggtccgaatcaggcactgggtgtgggttggggtcctaggtctgggtcaaggttctggtccgagtcctaggttttgatctcaatctgagtctgaggttagttctgggtcaaagtcctgggttctgatcctggtctgggttcgagtttgggtcctggttcaggtctatgtttgggtctgattctgggtctgtgtctgagttttggtccgggtttgggttttatcctggtatgtgttcgtgtccaggttcctctcctagttgaggtccagggcaggtttcatgtctgggtctgggtttgacttcagattcccaggtccaggtcaggtcctagttcaggttcaagtctagaatttacatcatggtctgggttccggggcctaggtccctggtctaggtgccccatccaagtccgcttcctaggtcctagtctggttccaatttcgggttcaggtcatgagtcttggttttattcctggtcgcggtccgtgttcaggtccaggtctcgatccctatctttgtcggggtttaggttcgggtcctttt

SEQ ID NO: 290053 - DNA, 674 bp, Cannabis indica
ttttttcccacttgatgtggcatgcttatgtggacaaaatcaacaccatgtggcaatccaactcaccaacaagaaggtaagttagcaccttggccaacaagggtcctgactttcaaacgggacaacaggtgacatactagctacctcaagggagctcaccgaccacctctagccagcctatggcaagttagcctctaaaaaacacaagaccgaccggcttgctccttgcaggtgcctagccagcaaggaatgggcttggtagggttctatgcataactctttatgtagactacgagttggactgcgaattgggtcttaacatccctctctctctctctctctcatctacacgcccaccattgcattctcatcattaagattttccatctttgattcctactttgtaaccttaagagagctatatcaggtcccacctatagtgatctgaaagtattatcccccggtatcaatacaactaaaaggggagtaggtcattacttgctaactaggggggctaaacctctataaaattctttgtgttctttactttagagttctaattgtgtaacacaaggcaaacatcaaattcatacgaccccgctatcggttggccacttttcgaggtcaatagtttggtgctttcatttagagcgagtggatatcgtatcaattca

SEQ ID NO: 290054 - DNA, 670 bp, Cannabis indica
ctagtccggtgtaattccaatataacacaatttcaaccatcgtgacatttctgaccactccgtcgagttccatagttgtcaggcccgaaaatattttattcgaattatggtatctacgaaacccacatatttcaatacaatctctgtaattaataaattacgatttattattcatttactcatatttccctaatataactcgtaattagtttaagtaggattataatcctactctaatacccacttaatcacatatttaataaactacgtctaattaaaatatcaatatattttctgggatattacagatttagtcaaagaaatatggcaacctgctttagtttcctatttcatatatcgtaattatgcaatcattttaatttcctattttatgcattgtaagcaaaatggaaaccatcctcctgcattaagcccctataaatagaaaaaatattgaactaagagaattactcagagatcagttgtaagagctttcaaagaggaagaacactttgttccttctcttaagtcaatacaatacaaggggagtaggctattaccacactcacggggccgaacctctttaaaatttggtgttcactttaccttattatttttgttctcttttaattatattattcaatcacttattatttaactcactatcgtt

SEQ ID NO: 290055 - DNA, 521 bp, Cannabis indica
tttcagtagattccaacatatcaccgtcctcccctcacccttgctcttagggatagagctcaaaaacttgcccggttactggaggaagacaagaatctcatccagctaacctctgctgataatctggtgaagtatgggctttaccctgaggacttttctcctaagttcatggcggggaagaagaggaagtctggtgctggccggcctaaacgagctcatcaggaggatgagctcattcaacttaagcgagaggctaagttgaaggaaggtgtcagggccaagcaatatgctcaagagcctttggatcctgaggatgaggctaaggctgaggctgaggctgagcaggtgaccccattgaagaggaagaagaaactctcggccacgccaaggcctgttgaacatgcaattcgcataagggagcccacttcacctgttcggccatctcctccctttgctggaaaagggaaggctgtcatgtctgagataaaatcgatgtcaggtgatgatggacttctgaatct

SEQ ID NO: 290056 - DNA, 520 bp, Cannabis indica
aattgtagataagtggaaattaagatttttaaaaatcagttaataatgatattggacatagttaatcaaaaaattatgattatatatgttttgaattttaaaaatatatcaatttatgttgttgacgtgatttgtatgataaatacaaattttactgtttattattagcattttattatgttttgtaattattaatttacaattttatgtaattagtaggcttactcattaatatatatataaattagtcataaaaatagttatacaaatctaaatatagtaagttgactcattaatatatctattataatttaattaagaatttgtatgaatttttgtaaatatgttttcaaatgtgtatatttttaaaattgtattttcttgctacattttttgtaaattatttaaaaaaaaatgtatacatttatataaaatgccctttagaaaacttacaaacaagctaaaacacgtactcctgcaacaagttgaatttggatagttcgatgtaggatttatataa

SEQ ID NO: 290057 - DNA, 837 bp, Cannabis indica
gctcgtaaaatctcaacatgcgaaggatcatattgcccacttacaggccatgttcgatatattacgacggtataagatgcggctaaaccctctaaaatgtgtctttggagttggctccgggaaattccttgggttcatggttaatcagcgaggaatagaggccaatcctgcgaagatcagggcattggtggaaatgccatcaccaaccaagccaaaagaagttcaaagcctcacaggtaaagtcgcagccttaaaccgctttatatcaagatcttctgataagtgcaaggagttttttcagattttaaaaggcaacaaaaggttccattggaccgaaaaatgcgagcaggcttttcaaaccttaaaaacacacttggggcaacctccgatcttgtcaaagccaatgaccggtgaagtcctgtccatctatttagcagtgtcggaatatgcgattagttcggtactagtacgcgaggatcaaggacggcaatacccggtgtattatgtcagtaagcgattactggatgccgagacgcgctatccccaaatggaaaagttggcatttgccttgataacatcgtcaagaaaattgcgaccttatttccaagctcacagtattgaagttttgacaaactaccccttaaggcaagttctggcaaaaccagaaacatcggggaggttgttgaagtgggcgatggagttgagtcagttcgacatcaagtataaaccaagaactgcgatcaaggggcaagccttggcagattttatccttgaattccccagcaccgaggtagcactcatagaagacaaaagcgacattgctatagcgaatagaga

SEQ ID NO: 290058 - DNA, 383 bp, Cannabis indica
actcgtcctcaagggaatttgcctagcacaactgaagtaaaccccaaagaaaactgcaaagcaattaccctgagaagcggtaaaaattatgatggtcctgaactgccacaatcagctgatggagaaaaggagaatgaagctcaaccaaagccaaccccaacaccaacatcagagaaggctactgacagcccaacacaaccacaacagtctccaccaattagcattgatcaccatgtgaaaataccctatcctcagaggctcagaaagtcaagtctagacaagcagttcaccaaattcctagaggtcttcaaaagactacacatcaacattccttttgctgaagccttggaacaaatgccccgttatgtgaagttcatgaagga

SEQ ID NO: 290059 - DNA, 547 bp, Cannabis indica
actcagtccatttaattaaccgagctgcctacataccttctttctgaaggatcaagccacttgtagttcagaatgcggtattttagaattttagatataaggattcatgtagataaccactttttaggaatcctgtgctattttgagaatttggaaaaattcctaggtgtatgaccttttatggaattttgagagttgtgttttataccaatttgcggtatcggggactgcacttagtcttagcaactaagttgcctacgtatccttttgtaagaatcaagtcaaacgtagttccgaattttaatttttttatgaggtaaatgactctttttctttggaatgccatttaatttgttatggctttgaattttagtgcacttttttaatttttaggtaaaattaccactcttgagatttttgtgaggtaaagacctctttgaaatttggtgaggtgaatgacctctttaatattccaagattaattttagtgagctcatttggaatttgtgccattttgtatggatttagaaatttaccactttttggt

SEQ ID NO: 290060 - DNA, 580 bp, Cannabis indica
acaaggatttaggaaggttagagttgctactaagcataactccgcaccatagtccattaatgttcggtttcttctttctgcaacaccatttttgctcgggtagttaccgggcaaggtgtaatgggcaacaatcccattttcttcaagaaacttcgcaaatgcaccaggtgcttgtccatcttctgtgttatcttaccataatactcacctcctctatctgatctcactatcttaaatttgcttgttgcattgtttctcttacttcagctttaaatatcttaaaagacatctaatagcttcactttttattatagaagtaagttagtatatacatgtagcgtgagtaatcatctatgaatgagtatgaagtatttctgaccatgtgactccatatctggactaacatatatcagtatgaatgattttctaatatttcagaactcctatggacaccagttttgacagacttggaggtttgctttcccttaatgtcaatccacacaagtatcaaagtcagtaaaatctaaggtattgagtaccccatcttttaccacctttaattctatcaatggagatatgt

SEQ ID NO: 290061 - DNA, 591 bp, Cannabis indica
taaaaaattatcctacgtggcaatatttttcaaaataaaaataaaaaataaaaaatttaagagtaatttgcagcaaaactctcccaactatcaatttacttgcaaaataccatccaaccttaaagttttttggatagttttttgcaagtaaattgatagttggggagttttgccgcaaattactcttaaagtttttattttattttgtaaaatatggccacataggataattttttagtgacctatcattgtcacgtggacaaaattaagacttaacgaggttggacagacgacaccttaaaaatgtaaacgaaacagaactttggagggttttcccaccaaaatatgaggttggatggttttttgggggttttgccgcaaattactccaactaaagtaaattacaaactcctcaagtcaagtcaactaatttggttcacttagatacaacgtcaacgtaattaatatatagttttggttttatattttataatagttttaattatagaattataatattattatatttaaattttattactattttaatttatttataattgacaaatatatattattattataattatt

SEQ ID NO: 290062 - DNA, 576 bp, Cannabis indica
ggaaatcaaaagatgatggggtgttgcgacacccggtcgatggtttagcttggaaagactttgatgcaaaacatcccgagtttgcaagggacccaagaaatgttcgacttgggttagctgctgatggatttaatccatttggcaacatgagtcttgcatacagcatgtggccagtggtgttggctaactataatctaccaccttggttatgtatgaaagataattattttttgctatctaccctaattcctggtgcaaaatctccaggtaaagacatggatatatttttaagacctttggtggatgaattaaaggagttgtggaataatggggtagcaacgagagatagttcgaccaactcgatgttcaccatgcgtgctgcgcttttgtggacagtgaatgattttcctgctcgtagtagcttgtctgggtggagtggtcaaggttataaagcttgccctacttgtaatgaagacacgacgtccattcgagtgatcgggaagacatcatatgttggtcatcgaaggttcttgccaagtaaccatgcaatgagaagggatactcgatttgatggta

SEQ ID NO: 290063 - DNA, 677 bp, Cannabis indica
tttgttccttcccactctgagggctgttagggctataccactgcaactgtaatggcagagggtttgtgggttgactctgaaatttcctcctcagagaaatgctgggctgcctctgattgcagtgatgaggtgggggcagggtggttgtgctggagttccaggttgggtggccctgccaatgaggagaaatgaggactgagatctatgttgagaacagtctggtcatttttctgagaggcggctgctctgtgctgggggtctggaccaacctctggtccctgcagactctcttgagcttggagacaggaagggcaagggctgcaagacagagaagatagcaacctgcccctccactgggagctgtgtccaggcagttgcagaacttctactggctccatagccctgcctgggagtggctggaggcctagctctggagaacctgcctggtgaggagatatggcattgggcacgtcacatcacagtctgaccacttttctttcagggctgctgtggtatgctaggtgtccactccagtccctggtcaccttggattttccagtacctgagggtattaatagccctctgtcactgccataacagtgaagactgcaaaacagcaagatgtgctgcctcctctggagttccatcccaggaggtatggacctgttgcaagctgg

SEQ ID NO: 290064 - DNA, 618 bp, Cannabis indica
atgaaaagcatgaaaaatcgaagaaaacgaaaaaaatggcaggtggtacggacagtatgcaaagcatactgtccgcgcgcgtggaaggggaacactgccgagaaaactcggcgcaagcatccctgggcatgatttccgcgcgcgtagggaagggtgctcaccacctcgattttttccgattttcaaaaattcataactaattcaaattaaatcgaaatcgagttctgtaaaaaagtaaattgcttagaattttccaaactatccaataaaaataatttcagatacagataatcaattatttttcccagaattcacaaacatcaatcaaacatcaatatgacacaccatgaaaccatccaaatcacaaacaaatcgttttaagtccaaatttcttgcaagcaaatcaattaccatggctctggtgccagttgttgaaattaattttaccaggatcttagatctactcacaagtatgttgattatttaacaacctaaatatgaacttctaaaacgataaacaaaaacacataaaagttaagaaaccttacagtgatggcagcgaaattaagtgtctccttccactcagatctctaacccttgcttcctgtctgtagcaga

SEQ ID NO: 290065 - DNA, 696 bp, Cannabis indica
acgagatggggctgcttccactaattggcattctcagttgctcgccacagttactgatctggccacctcctatgctcgtgaccaactcaggcaacgtcgtttgaaaaatcggtcattgatgttctcactgctatggccaatgtactcaaggaatctgaagcttctccagctgttcatactcaggggattgtgtctagctcttctgcagatgaatctgaccagcatcagcctgctcctggtctctctccatctcctgccgccatagacccatctgctggacaaagtcagccacaaatgtctgcagccactcccgtccctttctctgctgatgttcaaggtgctcagggtgtctcttcatcagctggcattgacaaagagattgattcctggtttcaacaaggcgaggatattgggactggtattcagggggagtcgtcacacactgctgtagtccagggggagccctcaaatgtggcagctgttcagggggagccttccaatgtggctccggtctctgctccagatggtggtgactcaaggattcttggtgctcctctggtctcatattccagcagtgattgattatgatcatcgagggggagttattttaccttttgatataaactttgttcttaccttttgatataaacattgtacacagttttttttggggtttgtgttaatattgtggatact

SEQ ID NO: 290066 - DNA, 530 bp, Cannabis indica
gacccgaatgaggaagatgtagcctcaagagcagcagaggggtccgaggaagaggaaataatccccgatgatgactacgagggaaacctcgatgagtatgcctacgacgaaggtagttactcggaactggtgcttctcagacaaaaagctatcgatcacgaagccgagatcgaagctcagaaagcgcaaaaccagaaaatgcaagaagtgatgctggccatgcaaaaagccatggaggcagctggcattcacgtgcaccccaaggcaatgaccgctggacttggcaaggagccagcgacgtcttcgcctagttcccaacagcagaaatctagggagcctagccctataaggtaccctgctgaagggaaccaaacaaagaaccctacctctaccccagggcgaaagaaaaaggcgcaggatccgcgaaaggtccgctcagatttccctaaagggaaaggtccgcagaggggcaagccccaaaaagggagctttggccctcaggatcgagaggaccgaaaaagcgtttccgt

SEQ ID NO: 290067 - DNA, 734 bp, Cannabis indica
gcacggtgatcttcttctcggcgcaaacaacttcttgttggcctcacccaactcatggcgaacagctgcagtctctgccctggcctcctcagcttccttcttggccaagtccgcctccgccctcaacgtgtcggacagagccgtactcttggaagtagcagatttagcccgggagtaggtataagccaacttcaaaccggcctgcataaaggaaaaggtcagcatatgaagctaagtatgaaaagctaaaagggaagtgtcgaaaagaaaagactaaccctggtaagctcctgcaagactccgcccaccaacacatccagagatgagtcgtcagcaccagccagttgctcaccgacctcaggaaccagccggttcatgtgatgagccatcacctccctgccttcttgacctcaggcagcacgggcatgggtggagttggtgcctgcatccgctcaggaatcctcctgaccagttcggacccagatgttggtggcccagactccttagacttggcagacttgggagtggaaggatttgcagcagccagctcctcagaaaggtcaatgacctctccagaaggcctcttctctgaagacccctctccgcccttagacttcttggccggaggggaggcgctagagcttccgctcatcctcttccttaaggcatccatcatctgccaagacatgtctgcacaagagaaaaaacagtgtggttagcaaaaacaagcaaaa

SEQ ID NO: 290068 - DNA, 1051 bp, Cannabis indica
tttcggttatctgggagttccccagagttgagataggctgctattggcgtcatccagtttggagatgtgtcgatcatttcgatttcttccgtgccagtgatgctaggctcttcaaggaactggatagggaccaggtttgccttgtcacttatattgctgctcgccaatcgagctaacgcatctgccgttgtattttcttctcttggaatttgtctgaggctgtagcttttgaattgtgcgagcagatcatgtattttgctcagatatgctatcattttttctccccgagcctcgtattcgccggatacatgatttaccaccagctgtgaatcactgcagatctcaatgtgttcggccttcatttccttcgctagtttaagtccagcgattagggcttcgtattcggcttcgttgttagaggctttgaatccgaatttgaccgctgcgtgcaggtgttgcccccaggtgtgacaagggcaattcctgcaccagatagttgatctgttgccgacccatccacatgtagcttccaggtcggtttgtcttcaatattacttggctgtggtattggctcgagatcgctttctggtatgctttcagttttgcctgtgcattccaccacaaagtcggccaaggcttggcctttgatagctgttcggggttggaagttgatttcgtactgacccaattctaccgcccacttgagtaaccgtccagaggcatctggcttctgcagtatttgtcgtagtggttggtcggtatacacccgaacaggatgagcttgaaagtaaggcctcagctttcttgttgctagaatgaggcagtaggcgagcttttctatcaacggatatcggccttcggcctcgacgagtcttttactgatgtaatagactggatgctgcacgctgtcctcttctctgatcagtacggcactcacggcatgctccgttactgctaggtatatccccagttcctcaccgtccaaaggtttaggaaggacgggaggtgtgacagtcagtagtcccgtgatccgtaaggggaaacaccgggt

SEQ ID NO: 290069 - DNA, 523 bp, Cannabis indica
cacacaaaacagtaaagctttagagttagaaaacaccaaaaattttcccgaagttcaccaacgaattggctacgtctccgtttgagctgctcctcgaatttgagagctcgattccactatcaagatgtttcaatcatacaacaatgaagattccaagtcacaggtaacaatttcagactggtaatcttattttaatacatgtatttagtgtttaatccctctctctctctagatctaactctctgtgtgtttctgtgcatgtacgagcttggattcttccttcttcaagtcttcttacccaggatcttgaagaacacactcaaccacacagatctggttgttgcttgaggtatatatagatctagggtttttaattttgcttctgaatgtattagttagttagttacagaacgtagttagaagtggatttaaccaaatccactctaactactttctgttaggattattagagaccgaaggtcaacttagggattttgcatgtatttccttttctgtcctttgt

SEQ ID NO: 290070 - DNA, 532 bp, Cannabis indica
ccagcaagacagtataaatcataacagtgataatatgctcatcatactatttaaatagtaatgccatttatgtatgtctgtgtgacacagacctggacgttgcactcacatgcctatatatatgtctacgtggcgtagacctacgtgttgctcgcacacgtctatttatgtctatgtggcgtagacctatgtgttgctctcacacgtctaaatacaataaggccttagaacggttcatctcggttatggttaccgagtccaacttgattattccttgagcgtataatccttaaatctcattacatttaacatggcatggcatttacacacatatatcactagggtaataaccctaggctaccagactgttcttattagggtaataaccctaatcgcggttactaaataatcatacatatcattttcaatataagcgtcactgcgcatactctacgtgctaaccactgtcttacatgttgtcctgcaaaagcagagattctaaatccccgggtgctcctgatcaggtgccggt

SEQ ID NO: 290071 - DNA, 690 bp, Cannabis indica
tataattaattatgcatttatgatcatataatatcttaaatatttgcactaataattaatttgtataaataaggtaaatatacaaattagtacaattaattatatgaaatgaattaaatgcaaaattaaagaatgtacttaatggcagatttttcaaattttattaatttaaacaataaattacataaatttggtaataaataattagatgcacaattatacaaattgcacaattattacatgcctaaataaatcatgtaattaattaccaaattaaaacaaatttctattttcaatttatactagatatatgtattaaacaaaaatagaaaattgactaaatgcaatttatggactaaattaacacaaaataggaaactaattaatattccaaataaataaaaaatttataaaaaattacggaatattcctttttttttttttagaaaaatgcactgcctataaacgacatgtcgtttttgacaaaagcaaaacgacacgttcgtttaacaaacgtaagggctgatctacaaattagaaaacgacatgtcgttttcaataaggaaaaaacgacatgtcgtttgaaaaaacgacagcaacacgttctagaaaacgacacgttcgttttaacaaaacaaaaacgaacatgtcgtttgatcaaacgacagcagaccaaaacactagaaaatg

SEQ ID NO: 290072 - DNA, 576 bp, Cannabis indica
tgtcaacccacgaaaatagcgggatattatcctaaatatcagactcccaccgcctccgaaaatcaaggagacggttgagatagctccgcgttggtcgcgtctcctgaagagagaagcaccaaccccctcccctatataaggggtcacccatgacctgggaaagggatccgcaatctgaaacacttagaaaaacaaacacttctcattctttgcaatcaagagcctgttcttgactattgcaactcagatcaataaaactcaaggggagtaggctattaccgacatccggggccgaacctctttaaattatgttgtcttttatttacatttattacgaattccagcgttattaagtgcatttattattgtgattttggtttaaatctcatttgttacgactccgcgtcggttggctaaaactccaatcaacattttggtgctttcattgagagcttaggccaaaatcttcaagtttttcgcctgaaaaaatggtgttaacccgaagatctcaagagcgacctgacgaagagatggaaaatgcccaccaagttccatcagcgagcaacctcgccggaa

SEQ ID NO: 290073 - DNA, 732 bp, Cannabis indica
acatgctcaaccactatgtgagccggttgatcccagaggtgaacaaacagttggctggggcggataacttgtctttggtgctggtcttagaaggagtcttgaaggagcttttgcgggtaagtcctttctaacatttttcttttattcctctttgactatttcagattttaatgcctttttttgcacagactgctttgaagatggcctacgcctattcccgagctaattcggctgctgtcaagaatcttgccacttcaaacacactgcaaagggatgcaaacttggccaaaaaggaggataaagatgcacagactcagcttaagactatgtgggcgaaacttggagaagtcaacaagaaactccttgttgctaagaccaaagttgccgagctgaccagggaattgcaggagatgtcgtcgactgagcagctcgagccagattatgcttctttgtctcaggacgttgccagtcttcaagacgaaagagagggtctccagactcttctccgcaggttggaggatgagaagaagactaaggaggaggaacttgaggctgagattaaaagccagaagttcgaggtggtgaggcttggggaaaaggtgaattccttagagacagctggtctcgagatttttttatgaaatttcggaaggccgaatcctaaaggcaaaaactttgaaatatctcggcacttccaaaagacatgtttctcgactactgcactgctcaggc

SEQ ID NO: 290074 - DNA, 598 bp, Cannabis indica
tccttatgttttggtgcatttttaggtttctaagctaggttttgttattctttttggaagttttcagggctgtaggtttagatgaggtttaggtatgttatcttagttgaattaggtctgttggtgtatgtttaaattgaattcatggctgttggaattggtttgtgagtgaggaagctaaaagaatttagttttcttcacttgagtgtatgattttaagctagagattgaactactgtgttttgcagcttgggttatgccatatttatgttattatactgttctggaaagtttggttaggtttggaggagttttggttcgaatttggtgaagaggaacttttgttcctggtctgccagaaccggtcgaccggattggttctggtgtaccagaaccggtcgaccggttgcttgcaggggaaatttttcgggtttgctttatgttcagttttgacccggggagttgtgtactatctgttttaaattaaatatgggatgcttgacctaatttggggttgttgggagttaggttatgtttgatttctaaactagggttttaatccggaattttgagttaaggtatttattgtgtttcaatt

SEQ ID NO: 290075 - DNA, 877 bp, Cannabis indica
ggatcacatccaatggatttggacccatccgatccaatccaattatttattggatattggattttgccatccgatccaatccaattgaattgagtcatccgatccgatccgatccaatggatgtattggattggatcggttccatccattggatgctttaactggttttttattggattggattggatccatccaatggatccaatggatgaatccaatccattttagccactatttaggctgatttcattaaaaagaaaaaatatatgaaaaaatataatttaaaacctaataatccaataataaacaatagtttaatccaaatccaacctaattttcatgatcccataataaaaatataacacaaatctaacttaataagcaaaagtcttaataaacctattaataattaatatatattattttaaaaaaataattaaatatataaaattataaatattaaatatgattggatgaacattggatgatattggattggatcggttcggttatccattggatcggatgtctcatccaacatccgatccgatccaattggatttttaaaatttgcatccgatccgattcaattatgattggatatccgattctattggatcggttgggattagatcgatcggttggaatgactttctccacacccctaatagattgtataaatagtattaacacactctaatatagatttgttatagccagttgttatagaatgtatcagttctaaagttttatattatttaatggatggacaatttagtaaaatcttaaattttgtgtagaacccaaaatgtaaatttaatataactattatgaaatattagtattatgtaacattataatttagagaaagaaaata

SEQ ID NO: 290076 - DNA, 756 bp, Cannabis indica
ggtttgatcttttgttcttcaaattctgcaagttttcaacagttctaagtgttatccaagctaaggtaacctttgagcaactttctcttaatttccttaagttgtaagaaaagaaatttttgcatgaatgatagttttgctgctatagttgttgttgttgcttgattttgtttttagaggtttaaatatggtttattatgttgatttatgcttgaattagaggttgtttgaagggttagtcaagttttgagtttttgaactcaatcttgaagctttaatggtgaaattcgtttctgtgaatggatgattgttttatcacttggaatatgttcattgtggtctatatagcaggtctggagagtttggtttgaattggggttgatttgcatgagttatagaattttaagtaattcctgtactgaactggaattccggttcaggcaggcctgtaggaaccggaattccggttggctttggcttccaggaattttcccagaactggaattccggttgaggaactggtctaccggttggggcagttttgggaagcctagttttttccatttttgtattatttagggtattgccatgttattcatcgatagggaaacttttagtttcaagtttaagtccccagaaagtgatttagcgtgtcgcttagcagtgttgtgattgatgtgatttaggagcctgtaattcaccgagcagattgttctactcaggttgaccggacacctgaattcggaatcaaggtaa

SEQ ID NO: 290077 - DNA, 480 bp, Cannabis indica
caaaataatttttttctatggcccactaaaagtcagggccgaccctactaggtcatttgtagtcatttaataatgagcttatcttgatttagttagtttatagtttatctagagcttcatgttcttttttagagtgagttttcagtagaagtaattttcttactgagtttatatttatgttgttagacgatttatctctttattaattaagttctatttcctttctaaagtttttctttatttatttaatagaaaatatagtcaactgcactatttcctctaattgacatatacctacatttattttcttaaaaattatacggctacaatacaaaaacttaatattactctcacacaaatacgcttaattaaaagctataataaaatattaaaggactcatattatcttagtaacggacccagaaatttttctttgtgggaattttttattattaaaaaatatttatacatatattataa

SEQ ID NO: 290078 - DNA, 642 bp, Cannabis indica
ttctctctcctaagttcggcctatacgctagcttcttcttcttcttttttttttcttttctttttctagacacatcattgtagctttttttttttttttttttttttttttttttttaactaataaaaaaaaaaagtaagaaactaaaaaattttaaaagtaccttcaaataagataattaagtattattattcttttctttccccttcctcatagatatttaggtattacgaatctcttcttcttctctcattcatatctattacataagcgcaatgaccaactaaaagactgctcaagctacaaataattgctcatttacttgagattgataaactagatagtgggaaagggacgtcaattaaattaggttctttactaaagagcaggtgatactcgttggagttctcatttgaaatctatttctagtttgtataaagatatttagtgcaacattgaagttttattgaatattacatattgaagatggtactacttttgctcaacaaggagatgcggatgcagcttatgagtcattaacttctttttgaattttgtttttcatttttgctatcttatgaaaaaaaattctggagatttttaatatactttgtcaagttttgcaacttcagtctcaagata

SEQ ID NO: 290079 - DNA, 553 bp, Cannabis indica
aaaaaacccactccagttgcctctacagattcatctcccaaacagtcgtctagaggttctaaaaagtccaaacttcccaaagcacctatatcaactgtcgacccagcaacagtacaatgttttgttgatgcctctaaagcctctgtttatcaacggtggtttggtagtcgtgagctttggttcgaacaagtggttatcttagatgattttcctgaactgcatgagtttttaaaacttaggaaatgggtaaacacggtcaccaacttgtctgctcctcatcccatcttagttcgagaattctatgccaacctagataggactgttattgctgagggtcatccagggtgtgtgagtgcctttgttaggggtcatagagttccttttggtccatccactattgcatctttattgaaagttgagtccatcaggaaaccaacatatgggaaacacttcaatccagatcaaactttgatgggtagagtgctaactggcagggatgactatatttgggagaaacaggaaatcctggtcactcatctgactccattctata

SEQ ID NO: 290080 - DNA, 123 bp, Cannabis indica
atagcatggctgagattagcaaaagcgataggggccaaaagagtggaagtctacagtgattcccagctggtcgtaaatcagatatcgggagagtaccaaacacgcggcaagcgaatggccgcg

SEQ ID NO: 290081 - DNA, 608 bp, Cannabis indica
aataatttacaatataaaaaactatgttcaaactctattttacacgcgtataaaacaaaatattcactctgcactatttgaaagcaatttttagtaggttaaactttttcgaatttcttaaaattttgacaaatgttttaaataactataatttacatgaccataagataaaaatggaataaaaaattatttcatatacttaaatatataaagattatcaatgcatccctttcagatactatccaatcctctgatcatgcgcctattgtgttggacttgttctttgatagggataattttcatacaccctttaggttcttgtatgcttggactcgagatccttcttgtaaagaggttattcgagaggcttggagtattgacgttagagggaccaaaagctttcagctggtgatgaagttgaatcgcacaaggaagaagctgatgctatggagcacaactaattttgagttttgcaaggagaaggggaaaatacttgacaaatttctcatggatattcagaatagactgccatcccgtgaaaaatattgagctggaggcggcaatctccttgaaaattgaagaggtctatcaagacgaatgtgaaaaat

SEQ ID NO: 290082 - DNA, 560 bp, Cannabis indica
ctaatgtatcacggaatacattccgtaaaagtacatcacaaaatcgtgtccctatatatatctttaatcatttttttttaacaatatcattaatcatttttaaaacaaaaaaattgtattgaaattaaggtttatatatattttatatatagatgtgattatatatagatataatttttataattaaatatataataaaattaatttttttatataaaaaatttacataatttttatttttaactatatataataatattgtaaaattaataaaaaaaaattgtaattaagatattctgttaaagttaacgtagaaaatttaaaaataccgttaaatcaatagacacattttatataaaataaatatttatgttttaaataatattatttttttaccttttttaaaaaaataatatgatttttttatatataagaatttatgtttaatatttatcctttactaaaatgccacatcatcaattatattaaagaatatttttaacaaaccatttgatagtgtcataaatttaagagacaaaaatattaattattctattaat

SEQ ID NO: 290083 - DNA, 677 bp, Cannabis indica
atctagaaattcccgaaccaccttgatatcttctggccgaacaaagtctggccgagtggtgtctaacaccacgactagaaaccctaggcatccatcacacaataattctctagctgacagggccgtaatcaccgggatccgagatccctaaaccgaaccgacaaaaacaaacggttcttcaccttctggttggaagattaccatcttcctcttgcagtcaatactggctggagtatttagataggaaatccatccccagtatgatatcaaaatcggctaagctcatttctataaggtcagcacttaactccctatagccaattctgatcggcatagacccaatccaccttttagagataactaactctctgtcatgtaatagggttccaaaccctttatcataactatcatgcggtctatccaatttactaaagattctggcagccacataagagtgtgtggccccagagtcaaataatacagagaagtaaaggttgttgaccgagagctgacctgtcaccactgaaggactggcttctgcatcagcctgagtaatggcgaagacccgagctggagtggttttcgccggagcccttggtgcttcaattctgagttgagggcaatccctcttgtagtgtcctggcatgccacacggaaagcaccccagccctctacac

SEQ ID NO: 290084 - DNA, 794 bp, Cannabis indica
cataggtcgcagatccttctcctgcaaccccattttgtttgtttgaatgcttggaaattcagcagattcactgaactcccattgtcgacgagtatgcgatggacattatccccgccaatattggcgactatgactagtgcatcggaatgcgggtgatggacccatctcgcatcactctccataaaggtgatgtcgtcgcattccttcttaaacagcttctcgggccgctcactaagattattcacattggtaagcggcttctccttggcttctctggcatatcgctcttgtgacttgcgagagtcccctgcgatatgaggtcctccaattatagttaggatgttgcgaggtgttctggagccactcgcattctggttttctcctttgtcatccgcttggggacgactttcctcgctcttcttatacttgtcgaatttccctctccggattagctcctcgatttcatcctgcaagacccaacattctaaggtagtgtgaccaatatccttgtggtacttacagaattttttagggtctctcctgtcgcgatttcccctgatggggggcggcttcttgaagactccgtttctttcttcgattgcgtagatatggtctcgggggactgcgagttcagtatagttgacgaagcgaggtccacctttccttttcggcgaggattccttctttggaggagacttggccaacttcggacttcgctgtctccgcgggctgcgtcttcttgggcttcggcccctggagttcttccctcgtggactgcgagatcgtgaacgcgg

SEQ ID NO: 290085 - DNA, 748 bp, Cannabis indica
cttgttggcctcacccaactcatgacgaacagctgcagtctccgccctggcctcctcggcttcctttttggccaagtccgcctccgccctcaaggtgtcggacagagccgcactcttggaagtagcagatttagcccgggagtaggtgtaggccaacttcaaaccggcatgcataaaggaaaaagttatggagctaagtgtgaaaagttaaaaggggaagtgtcaaaaaagactaaccctggtgagctccttcaaagctccgcccaccaacacatccagagatgagtcgtcagcaccagccatttgctcaccgacctcaggaaccagccggttcatgtagtgagccatcacctccttgcccttcttggcctcaggcagcacaggcacgggtggagttggtgcccgctcagggaccctcctaaccagttcggacccagttgttggtggcccagactccttagacttggcagatttgggagtggaaggattcgcagtagtcagctcctcagaaaggtcaataacctctccagaaggcctcttctctgaagacccctctccgcccttagacttcttggccggaggggaggcgctagagcttccgctcatcctcttccttaaagcgtcaatcatctgccgagacatgtctgcacagaacaaaaacagcgtggttagcaaaaaccagcagaaaatacaagcatgaaagtcaagaagcttaaaaagaagtaaagcgcagagtgactgcccgccc

SEQ ID NO: 290086 - DNA, 1077 bp, Cannabis indica
attgcccttgtcacgcctgaggggcaacacctgcaccctgtagtcaagttcggattcaaagcatctaacaacgaagtcgagtacgaagctctaatcgctgggctaagactagcccaggagatgaaggtcgaacacattaaaatttgcagtgattcagaattggtggtaaatcatgtatctggagaatatgaggctcaaggagaaaagatgatagcatatctgctcgcacaattcaaaagctatggtctcagaaaaattccaagggaagaaaatacaactgcggacgcgttagctcgattggcaagcaacaatgtaagtgacaaggcaaacttggttcctatccagttcttcgaagagcctaacatcactagcacagaagaaatcaaaatgattgatacatccccaaactggatgacaccaataccagcctacctcaactctgggaaactcctcgataaccgaaaagaagctcaaaaaatgagaaggaaagctgcacggtatatcatagtggagggatttatgtacagaagaggattctcgatgccattgctgagatgtgtcactcaagaagaagctgcacgacttctatctgaagttcacgacggattctgtgaaaatcatgccgccaggaagatcttacccaagaaaattctaaggcaaggttacttctgcccaacgatgattgaagattcaaaagcctatgttaaaaagtgcaacaaaagccagagattttcaaagatgccacgagctcaacccaacgagttaacacagatgcaaattccgtggccctttgccatttgggggattgacctgatcggacaattaaccaaaggtaaaggcgaagtgtagtgtgcagtggtaggggttgattactttacgaagtggattgaagccaaaccactcgcaaccattacatcaaagaaagttcaagactttatgtgaagaacataatatgccggtttggattaccgtacaaaatagtctcagataatggcaagcagtttgacagccaaatccttcactaaatttctgtgcgaactatggtatcatcaaaagtttctccgcagtgcggatcct

SEQ ID NO: 290087 - DNA, 627 bp, Cannabis indica
tgaaggaattcataaccactcggcatcattcttgggactagcaattgcctccacccactttgacacataatccaccgccactagaatgtagagattcccaaaggattgtgggaaaggtcccataaagtcgataccccaaacgtcaaacaactccacctccaaaatacaattaagaggcatctcattcctggcggagatatttcccactcgctggcagcgatcacattgttgaacaaaagcatgagcatctttaaaaatagaaggccaataatacccggattgaaaaaccttggccgccgtgcgttgtccaccaaaatggccaccataaggagctgaatgacaatgctccaagatgcttctaacttcacccattggcacacatctccgcataatacgatctgggcactgcttgtacaagtatggctcatcccaaaaataaaacttgctatcatgaaggaactttttgagctgctgcttggtaaaatcaggtggataggcacctccaactaagtaattgacaatgtctgcataccatggtacccgtgtttgctctaccactagcagttgctcatctgggaaggagtcttgaatttgtaattctccctctaagtggctgctgtgattgtt

SEQ ID NO: 290088 - DNA, 648 bp, Cannabis indica
tctccatgtggggatcgatggtatcggcgcattcgcggttgcctcggcttcattgcattcagtgatgaagtccgccaaggcttggccttttatggagatgcgggggatgtagtgtaagtcaaattgacttaaatccattgcccatttgaggagccttccggacgcttctggcttttgtaggacttgccggagtgggtgattggtcaacaccttaattgggtgcgcttgaaaatatggccttaattttcttgaggccattaggaggcagaaaactagtttttcgatgatggggtaccgcgtctccgctcctatcatgcgcttgttgacgtaatacacgggatgctgagttttctcttcttcccggactagggcagcgctgaccgcgtgctcggagacagccatatataggaataggtccactctaagaacgggttttgacaggatcggaggcttggccatatgttctttcaactttttgaatgcctcctcgcactcgtctgaccattcaaatttttggcacttcttccatatgttgaagaaggggatgcacttgtctgtggaccgggagacaaaacggctcagggcagcgacctttccgattaggctctgcacgtctttatgcttcttgggggatggcatgctcaggag

SEQ ID NO: 290089 - DNA, 575 bp, Cannabis indica
taactaagattgatactttttttatgcagtggccgactggtttgtctaccgaaacaaatatggtgttaggtgaggtgaatttatttgtagatattaaaattcatattgatgattgaaaaatggggatggggttgtgactgttagaatactgtaaactctgaatatagccctaattaattcaagagaatcaaacaataagattaaggaatagcggaagcgtaccggagtccatagaatcgatctttgattggtatgatcttccaattttgcatcaaaacctttgaaaccttattttcttgatgatggggattcaagaactctggaaaaatactgatacgatgcaaaatggggaccattacccgttatattaccaacagacaaacctgttggcaatatttttgactatttctatttggcccctcatcaatatagaaattgtctaattggtatccacatattaaaatcataacaatcatgcccttaagtcataaactttattccaaaatagaccacataaatttgacttatttatttgatgacccaacacacattttatatatacaattgtgacccca

SEQ ID NO: 290090 - DNA, 414 bp, Cannabis indica
agctttgggtccgattctaggtgtgtgtttgagttcgcgtccgagtctgtgtccgagtttgtgtctacgtccgaaccccgatctgggtctaggttcgggtccaggtcaaagttggagtcctgagtgcgggtcaagtttgggtttgggtcaggatctctgtccaaatgtctatgtcatggtcctagtcaaggttcgtatctagatccctatctaggtgcaagtctgtgtttgggatcgactcccagatttaggtccaggtacgggtctcagttccgtcctaggtacacgaccatgtccagtcccgagtttcagtctcagtttgggtttgaggctaggtctgtgtttggttctaagtcagggtgcgggtcctcgtcacggtcctagtctttttctagggtcctggttcggcgattc

SEQ ID NO: 290091 - DNA, 509 bp, Cannabis indica
tagaaagattccctgaacaagtgtcgggtgcagtaaaatcgcagaaggtggttttacacaataaggggaacagaaagaaaaagaccctattctatgccctaaacaaccattgaacgaagagcgtatggtcttctacaatgaaaatgcacaataataacagaggcatgataatggcaatcctacaactaaagcagtaaatgcaaaacataatgcatgaaggacttaaacacttgcatgcccagaaatctcaaatgcgaacccagaaaagaacaaacagaacgagtaaaagcatgtcactaccaaaggatgcaagaaacttacagtgaagtgttgaactgggggtcctgatgtgagtcgagtaaagacgagaaggactgatagcagcaagcaaggaagaactgggaaaatggcaaagtgttcaaaggtttcgtgctggttttgagaattttctctctaggaaattcaagcaaagttggcaagaaatggaaagtaaccgaaatgaaggaaag

SEQ ID NO: 290092 - DNA, 1238 bp, Cannabis indica
aggccttttgaaagatatttaacatttctatcatgttaatagcactatcctcagaggctttacagaacccataatagtcatcaacaaagacatgtgagataacacaggagcccctcgagcaaccttgcacccctgaatctcccaaccattcatagcctcttatcaaagccgagaatccttctacacacagaaggaaaagataaggtgaaaggggatcaccctgtcgaagacctcttgtaggaattataggcccaatttcatgaccccccgatgtgattgtgtaggagacagaactaacacactgcattaacaacttcaccacatgctcatcaaatcccaatctcctcaacatagcctgtaaaaagccccactccacccgatcataagccttgctcatgtccaacttaagtgacataaacccctccctccccatttgcttccttttcaaataatgcatcacctcgaaagagattaaaatattatcagttatcagtcttccgggtaaaaaggtgctttgagtgtcagaaataacactaggaagaacaactttcaaccgattggccagcaccttagaaacaattttataagccacattacaaattggtcttagatcactcatgctttcgggtttagacttcttcgggataagcacaatattagtttcttttaaatgatcaggaaattcaccaaaagtaaagaagtgttgaactaaccgaatgatatccttactaacgatatcccacaacttctgataaaacccaggattaaagccatcaggaccaggagatttatcaagatgcatttgaaagagtgctttccgaacctcctcagcgtcaaccgaaatagtaagagactcattcatagcagtcgacacccgattatgcacacaagccgtgaccctaccccaatcaatctctgaagctgtgaacaactctctaaaataatcttcaacgacacccggtaagccattttcccaatccacccaaatcccacttctatttttaagagacaaaatctgattatttttctgcctagtactcgcacaagcatgaaagtacttagtgttttggtcaccagattgcagccacatttgtttggatctctgcttccagaagacctccttctgggcgaggacttcgaacaaacgatttggagcctccctgtacctgttaaccgaatcaacatccctctatttttcaaaaagcttcaggattttatgacaactatttattcgctgc

SEQ ID NO: 290093 - DNA, 673 bp, Cannabis indica
ggaatttcacctacagtaggatcttttctttttcactttaattcacacattatactctttgataaataattatgtttgtgtaaaaccaaagtttcaaattcgattcataatatactagttattattattattttatctactactcaaattactgtggcaatcatcgtccagtgttgcgagccttttaacgtcgttataatatcatatacctttgttagtttgtgttaattttgattatggtagagtgagtgattataaaactttaaaacaaaaatttattattgtgggtctgccataggaaaacaatcctgtgaaatctataatcaggttattctcaaacttatttttattttgcccatcatatatgcatgtgtgtatatgaaaaataaatgcacaaaagcttctgtttagatatactttctatacatatcattttttttttttagtaagtaatagtcgatatcattaaaattaatacttatttaacttaacctcctatatatgcttatttaaattaatactagttaaaagttaacgttgccgacgacacgtaaataattaattttaattttaaattttaaattttagtttgtttttatttttagtagtgttatactaatagtatgtatctatgtcgaagtagtgtttagttttttagttttaaaaattaaaa

SEQ ID NO: 290094 - DNA, 502 bp, Cannabis indica
aacctctctactgaatttttgtcaactattttttcattatataaaaggtattatatattttattcttttagattttgctgctgttgttgttgtctaatatgttatttaaccatataattaattttttattaatatatcgtatgatatacaaacaatataccttaaaccaatatacatatatcacaaacttaaactaatatactattaaatgaattgttttccacaatatacagtagcatacaaaaactatatatcacaatcataagcagatataccatagtcaaaaattaatataccaccagcatagtaaaaaaaaaattatacaaaaaacttaatttaatattccacaagtttttttttcttgttctttccttcatgaaataccaatgaacataaaatcaatatacctcagtcaaatataactatacctcatacttaaattaatatttaatagttttttttttctttatatccttcacgatatacatatcacatacaaacg

SEQ ID NO: 290095 - DNA, 607 bp, Cannabis indica
aggctaggtctgtgttcggttctacgtctgggtctgggtcttggtcacagtcacgatcctagtcttgttctacggtcctggttcggcgattcttgttcaggttctaattttgggtcccatgtctaggtctgggttcgggtttggttcttcgtctgggttcacgtcctagtctgagtgccaaatctagacaccgcctactggtctgttccaggccccgttacccagatcctgagtcaagatctggatcactgtcacgggtctcgttctggttctggttcaggtctcagttcccatttttgagtttgggttcggaatcgagactggggtgcggttctaggtcccgaccctggttctgtgtccctagtctggttccatgtttgggtcttagttcaggttcgggttcgattcccgagtccaggtttgggttggtatccgggtcaggctcccaattcgggtctaggttttatttggagtctgggtcctggtccggttacggttcttgatctaggtccaatttcaattatgattcaaggtccaaatccttgttccagtcccggtcaacttccggtttggttccaattttgggtcccagtctggttccatttct

SEQ ID NO: 290096 - DNA, 674 bp, Cannabis indica
taagaaagttttgtacagctgggtaatcatttttgtgactgtctttaaggttgatatattctataaataggacttagagagcaatcaaaagattctcacatcttctagctttatttttcatattttcatctttctgaggagagagtttattttgtgaaaacttagggtgttcaggtaggttttagtgtttgttttgttcttaactgttcgtagaatcggatgaagaacttgtttgaacaagcatgggtcttcgagagaagatttttttaagcctcatttctagagggagtctacatttatttaagtcaattgcttttgtaatctttaatactttactaattgatttcattctctgggcgtggccccgtggactaggagtgtttgaacgaacactgataccacgtataattctcttgtgttaagttattttaaattctacatttatttatttctggtactggtttgattttgcaaatttgtatcctgcaaagacagaattgtaatatgttattgcaaactgttacagttttgtttttattgaaacttagtaaaattattggcatttgtaaaaatacattttttcaattggtatcagagcgggatactaaactcttagtgtgatcctttaacattttcttgtattttttgcaatatgattccctatgcatatggaa

SEQ ID NO: 290097 - DNA, 500 bp, Cannabis indica
aactttagcttaaatgtacaaagtgaaataaactgaataacataattttcgattagaaaaatatccaaaatacacatgtttcatgaaacaaattaaacacactaaggataataaagacaaactcccactgaatctagatatcctcataatctaaaatacctatacgagctgtgtgctcatgaaagaccttgggtggcaaacccttagtaagggggtcagcaatcatggagtttgtacctaagtgttctatacaaatatgtccactttgtcaatgtgttttgacttcgtcgagctcctattattgttggaatacaatacaactgacttattgtcacaatacaacttaagtggtctttcaattccatccacaatgcgcagcccagtgacaaagttcctcagccatctaccatggttggatgcctcataacacgcaacaaattctgctgccatggtggatgaagctatgagtgtttgtttttgcactcctccatgatatagct

SEQ ID NO: 290098 - DNA, 686 bp, Cannabis indica
tccatagttctcgaactgtcttcatattctgaaccttccttctcactgtattggacaagtacattatgatagtgtaatatgccaattcctccatatcttcaagttcttccttctgcaacttgtcagtgagttcttccttgggtttcaatgccttggcaactttttgatgaacaagaattcccttcaaactttccctccataggccaaagtcccctgtcccattgaacttctcaagttcaaatcttgctgatcctgtcataactggttgcagatgagtcttgattgaatcttgattcttgacttcctcaattggatcttgaacctaagctctgattttgttgtaattccagcggaaataactttgaggattcaatcataaacctgcaataatctcaacacttgaacagtaataatgaacataaaccaattaatcaacacaatgaatcaaacccgaaatcaaacaaagaacaacacaagattttatcctggttccggtcctagagatcaacatgatccctggccatactccagctgagaaacatcaccaattcttcattaatatgtgaataagagagcagcaatacaattacaataaccagagcaatcacagctcagatggcactcgacacacaccagagaaaacagtcacagttttctctctagcaacccgagtacaccccttgttc

SEQ ID NO: 290099 - DNA, 487 bp, Cannabis indica
ttgggattcaattccaagttcaattaaatgatctttgtgtgggcacatagaaagtaaaggataacaaagttcacgatctttacttatttgtgtgggcacatcctttactttcaattccaagttcacgatcttcctcactatgattgaggtactacttgctgtgtatgggcactactctatcactaagtggttcaaaatatttaatgaagaagaagagaggaaggtggcggctaggttagagtgaaaggctgaggtttttctctgaagaaaacaagatgtgaaagtcactttttcctatctatttatagcatgccacatagagttaggtttgaattatttggcattaaaataatgaaaatattaaatgataaagcctacaaaggtggccggccatggctagtggatttgcgcctttttgcaattttgctgttttatcatttctgcatctcattttctcaaaaacgtcaattttcaaattcaaccattt

SEQ ID NO: 290100 - DNA, 1110 bp, Cannabis indica
cattgatgaaggtgttggtgtctttcttagtatgacattctttccaagtctcaatgtaaccctttccttgctgataaatataacttgttagaaaattatatataaagtaaactttgtaaaatagaaatttaatatattaacttactttttgacgaagaatctcagccatagttaccgaccctgttgttgaagagaatttcatcttctgtcgattgatagagttttgcttcgaccgatgaatgaaatcaggagttgtgaacaattcacatattagtcgccattggtcttcattaagttcattgggagggttcttcactgcattttcaaagtcttctgggtttttgtaatattctctgaagtgttgcaatctaatatatatattcatgtgttgaactaagttgacctttgaccctgcattaatttcggaacacaaacactattctatatataaataatataataagagaaaattcccatgaccaaccttagggttttattcttatgaccatctaaaggctgaaaaaacaaattattaacttttgaataaaagaataatataattgtaaatatgcatatttaatttatatatataataaataaaaagaataatataattgtaaaaacttttctaaaaaattaaacttaaaatatttaatgtataactaagaataaacttaaatatcatttaacataacatttaactttgtcccatctatttaaatgtttttttctttctttttttttaactacacacaaatattattgaattagttatgagatggtgacaatatatattgagaatttttcatggtgcaaaaacttattcaaagtaccacggctactcatatttttcaatagtaataattatgtatctagtggaggaatagtactaagcaatatatataaatatatatataatacaattggtaagctaaaagtttgaatatttgagagctgtttttgacatctttaaaaggtcaaaacaactatatataaaaatagtgtggaccataatataattgcttctctctttaagcactaagtagtatgtatgggcaaccattgtggctttaatttatttggcattttttataaacaaatgcacgatgc

SEQ ID NO: 290101 - DNA, 564 bp, Cannabis indica
ctcaacccgactcaaatcttattttctttaaatatctatgtaactacattctatacatgttcattttttttatacaggctttcggtttcggttttaagttaattatttatttaattaaaataatagaataattaattttgatcaatagctaagatttatcaatcttactcaaaatctaattcaagtcaatttttaaattcttattacaaccatgtaattaaataaaatattattattgattaattatataacattaatataatatagggtaaatagcggtataagtacacaaaattttaagcttacaagtagcataaactcaatgtttatttttagtagcataggtatccaatttttctaaaacattaattttcttctagtttcgtcagtacaaattctgttttgaatttattaaaaaaatattagaattcaggtcttatatgtgccatatttaatataataacagagttagtactgacacaattagagaaaaattatagttttacaaacattaggtacttataccgctaaaaataaatatagagtttatgctgcttacaaact

SEQ ID NO: 290102 - DNA, 714 bp, Cannabis indica
tcataataatattatcctgcgattagttagtgattatatgagacacgatacacttaattaaattagtgattgatatgggggcactaagcactacaaaaaatagctactttagtgacaactttttagcacaacataatttatgtgattaaatatgattttaatttagtacacaaacaaaattattacttgtagactaaaacataacatttagttataagttgtcactaattttagttttagtcacaactaaaaacatatttagtcacaacaaattataatttttgtgactaatacatttaaccacgaacattttagtcacaacataagaatgatgttttataattagtcacaattttttttttacttttagtcacaaattttattgtgactaaaagtaaaaaattttgtagtaaaagtatctataacactattatgaggtggcaccttataactgattattgatttttcataatctttattaaagtaaaataagtgagattcgatattaaattatacaaataacgatactatacctcacaaatagtgttagacacgagtgtcctttaacaattcttaatagtaaattggaaggatctctaatgacatttcttttaattgattttaaataatcacatcttcctctttacctaagttattaataagaaaaaaagttcaaaaagaaaaaaaaaggaaaaagaagaaaaagaaagttct

SEQ ID NO: 290103 - DNA, 810 bp, Cannabis indica
cctgatctcaacaaatatcttgtttctattgatgttacttttgtagaaaatacaccttatttttcatcttccactacttctactagtcagggggaggatgatgatttgttggtttattctgtcacatcctatgcgcctgctccatgttctggcgggtctcttgttccttcacctgcctcggtcgtcacccccacaatgtctacacctccaccacctccaccacctctaccacctccaccactccctcggcctcctatagtgtacaccaggcgcccccctcctccacctcctgtttcatgtcctgcacctgcatcttcgtcatcagatctggacatctcagatgatcttgcactacgtaaaggtaaacgtcaatgtacttttctattacttcttttgtgtcttataatcatctctcctcttcttcttgttcttttattgcttctcttgattctatcactattcctaaaactgttcgagaagcgatgtctcatcctggttggcttgctgcaatgatagaagagatgaatgctttggttgcgaatggtacttgggtcttggttgatttaccttccggaaaacaggccatcgggtgtaaatgggtgttcacggttaaattcaatccagacggcacagttgctcgcttaaaggcccgtcttgttgccaagggttatgctcaaacctatggagtggactattgtgatactttttctcctgttgctaaactcacatctgttcgactgttcatttccatggcagctactcatcattggcctttgcatcagcttgatattaaaaatgcttttcttcatg

SEQ ID NO: 290104 - DNA, 779 bp, Cannabis indica
ggtaaaaaatcatgcatcaattagaggggttcaactaggtcttgcttttccaagtaagatctagcttgctaaatgttaaagctgcccaaaaattaacattcaatcaacatttcatcacaactaattgaacaaagacaagattacttaatcattgcaaaatcaaagtactagtccatacaagggttcataaccacccaaatctcaaagattctagttcatagctgaaactaaaaactcaaaaccagaaaatgacatgctcatggagtttaagagagtattaaagagtagaaaatgatacaaaatggaagaggagagcaagagaaatgagttggaagctcaaatcttttctttgtaggttgccttcttctccttcttcttagtcttcttcttctcttctttctcttttttctgtacttagagttttttctctgaaatttcgtactagccttctcttttcaaagtgcagccacctttttctatttatccccttctcttttgctccccaattagggtactaaagtttaccctaattggaaatccaagtcatgatccacttgcccttcattttccacctattagttgagtcattggccacattttcgccaccttaggtccttttttcttcattaatgccagctggacttttgccaaaatacacttactgggctgacaaattgctacgcgatgattgctatagcaatgccagtcagcaataagcctttttctgctcattttcctccttgtcccaaacatttccaaatacctattcttgcattttt

SEQ ID NO: 290105 - DNA, 605 bp, Cannabis indica
tgaactctaaacttaaaattgcacaaaacttaatccaatcaacaaaaccagcagctaggacttaaaaccaactcaaaaggaccctaaaattcgaaccctaggcatatgaaaacctaacagcccctattactcaaaaacacaagcttaaaccaaagaaaaagcttaaaatcacatcttcaaaagttctagggctttacctttgatgaaacctccttgaattctagctaaatcccagaaaaacaagatgaaaaagttgatccttgccctggttgcctcagccgaaggaaagagagagagaaagttcaagagataatacaattttccaatttttcttcttttcttaattttctacaaatgaaaaagagttttttccaataactcttgctgaaaataattctaggctaggtgtcaaacacctaggcagccacctattccccatttgcccaaatgacaaaaatgcccttaaagttataacttaggtatttctaaagctaggggtaaaatggtcaaaatccataaccccgctcaatcccgataatttatttcctctaaaatatttcccactaagaaataaggttctaaacttacccatgtgatcaatctag

SEQ ID NO: 290106 - DNA, 512 bp, Cannabis indica
gttaatcaaacatacttggtagtaaatcttgatcctggtaaaatatttccaacagttcgctgctgagaagaagatctccatgctgactaaggatctcgaggctgctgatcgttttgaggagaccatcgagatcttatctgctgaggtcaacaatcttcaagttgagaggacttctctacgaggaattcttcttcggatgaaggaggagaaggacgccaaggtgggggagcttacggccgaggtggacaggctaatggagaaggtcaatgccttggagacagccggtctccagcttttcttcgatttctggaaggctgatccctgggccaactttgactacttgggcgaggctaaggacatgtaccttgagtactgcgcggcccaagtggcttatggtgggaacgaggcggctgcttcaacctccggccaagctgcttcaacctccggttaggctgctgatgcttctcctgttcaaacaacaaatcctcatgctccagttggccaagaagaac

SEQ ID NO: 290107 - DNA, 972 bp, Cannabis indica
caattccaccgcccacttgagtaaccgtccagaagcatctggcttttgcagtatttgttgtagtggttggtcagtgtatacccgaaaaggatgagcttgtaaataaggccttagcttccttgttgctagaataaggcagtaggcgagcttttctatcaacggatatcggccctcggcctcgatgagtcttttactaatgtaatagactgggtgatgtacgctattcacttctctgatcagcacggcactcacggaatgctccgtgacagctaggtatatccccagctcctcaccgtccagagatttagaaagtacaggaggttttgcaagttgcgcctttatatcttgaaaagctctttcacattcttctgtccacttgaactttttgtttcctcgcaggatgttgaagaatggaacacatttgtctgttgattttgacacgaatctgctaagtgcggcgattctactagttaggttttgcacctctttggtttttgttggcgagttcatatccaggagggcttggattttttcttgattggcttcaattcctcgggcattgacgatgaagcctagaaactttcccgagctgactctaaaggttttggatttgatgagcatgtcatccacgtacacttccatattacgcccgatctagtctttaaacatcttgtttaccaatctttggtacgtagctccaatattttttagactaaacgacatgactttgtagcagtagagacccatatctgttcggaaacttgtatgttcttggtctggcggatgcattttgatatgattgtagcctgaataagcgtccatgaagcctaaaatttcgtgccctgctgttgcatcaatacagacttgccatttctcattcggcttgggcacgagtacaggattcacgacccaagccgggtaaaaagattcaattatgaagttgttgttgtgcagcttttcaacttcatcttt

SEQ ID NO: 290108 - DNA, 250 bp, Cannabis indica
ggggtggcgatgatatctcccaccggtcttcggctccaggcagccctacggttcgacttctcagcttcaaataatgaggccgaatatgaggccttgatagcagggctgagagtaacattagtccgggagctactccacgagttcacggactacaaagtagaaagaatccccccgggaaaagaacgctcacgcagactgtctggctaagttagctttagatagtgaaatcgaagggctggggtagtaccag

SEQ ID NO: 290109 - DNA, 365 bp, Cannabis indica
taaaataatttccaacatgatcctcatttaaactaatcatattatccaaattggaacctattgttttaaaataatagtatcattcaactctgtaatattttagtacaatttgttattacacatattattactaaacttgacatcctgccatcgattaaaataaaagaaagccaaactagcaattacaattttttaatcattttttacttcatatcatatgcaattttgtattttattttatgcgaattttgcttattttattataaggctaattaggatttttatctcctgaattttgacatatatcaaatcatgctccctgtacttttaaggtcgttaaaaataccctttgaactattgagatt

SEQ ID NO: 290110 - DNA, 916 bp, Cannabis indica
tatctttcagatgagcgatctatcggatagccaacagctcggctcgggaggccatgcatttgacggtgagactgaccaggagagggacagttttctccccacggacatttccgaagtggaggccgctcaaatagaattaggtccgatgtcttctgtggacatcgagaggatggtgcaggaactcgcagaacctgggaccatcgatatccgggacagcgagtccacagtgtcggcacgcgactaccttatacatacgaggcatgctcctgacgtcgaggtcgaggagatggacgaggaatggacgactccagctcgcgagtcaggtggggaagaggaggaggcggaagggagtgggacagattcggtcgacgattcccagctgaacgagcccttcgcgtgcgaggatttaatctcgagggttgccaaatcagacttcaccacctttgtgaggttgaatttgctgcgactcgcgtttcaacgtcctaaaccgtctcagagagcgcaccttccatttactaaccctgcgatcattcccacagaggatgtggtagtctcaatacccatccttcggtgtggtgtatcgatcccctttcaccccttcgtcgcagccattctcaggcgatatgatgtatcgccctttcagctaactcccaacagttatcgcactgtcctagccttctatgcgatgtacatggagtacgtccatagggctccctcagtagaagagttcagttatttctacgacataaaaagcgtaggtcttcataacggcttctactgctttagcaaatgggcgacttctgaaatcaacggagttgagggaatggtgtcgaacatgggtgattggaaatcgaagtggttttatgtctttaaggttcctgggattaggactgactttaatcgcagacccagtatg

SEQ ID NO: 290111 - DNA, 518 bp, Cannabis indica
gttagggttggtttctttcatggtttgtttaattgctttattgttgttaaataggtgaacacatctaatgatattgatgaccctatttctgattatgttgatgatgagaaaggattaccattattagagaatattgaaaatgagtctaatgatggtgatgagtcgggtgaagattgtggtgatggttctgatgatgatgatgagtttgatgataaggttggtgttgatacctctgctattggtgagaaacaaggtgatgttgttgtcgtgactgaaggtgataagtctaatgatgttgataatgtcaagggcaaagaaattgatttaaagggagatgtatttttttttttaaaaggcttaagctagcttgagattaatgaatataaagttattttggctggtttggaggctattaggaaaatcaaggtatgttgtcttttttgttatttttaatttttgtagattgtgttttagagtagttaattgatagttgtaatagagttttattcttagttttt

SEQ ID NO: 290112 - DNA, 802 bp, Cannabis indica
accgcccggccagattggacttacagaaagagccttattttcacgaattctcgccgcggcgaggctacaggtcgccgcggcgagaatggtcagtttccctttttaaatcccaaatccctaacatttcaaatcaaacaccacattcaaaccctctcttctccacgccgaaaacactccttctcaccattttttcttcatctaatcccattcaaaactccttttcaccaaatctaaccataaactttcatcaacaatcatcctaaacccttatttctctcattaaacactaattcccactcaaaatcaaccccaaatccctcaaacctcacccaaaatattaaaaaaccttattcatccttttctttctcaaaagcttcaagatgtcaacaatggaggatgattaaaggaagaattgtcattgaggtattgattctaagacttccactccaatttttattgaagaatttgtgaatttgttggatagttttggattatttggtggatatttgggatttttgctatatacattgttgaaattgattgtgtgaatagaattgggttaaattgaaagggatttaaatcccgggaagtcaatttttaaggggaagtgctgtcgaaattttgaaaaatcttgggagttaggatataattttttggtgagatgggtccaaagaggtcaagagttaatgaggagggagcttcatcatccaacccacctaggggacgctctaatcttgatagagttaggtttaccaacatggatgctcaagagcggtttttgaaattgaaagatagggcattc

SEQ ID NO: 290113 - DNA, 1064 bp, Cannabis indica
tttttctttctttttttcttttctttcttgcaaacagtctttctcgatccccctctctctcagcactcgatccccacctctctcaatctcagccatcactctcgctctatcactctgcccagaccaccgcccacaccacaaccacccttactccgcccagaccacccttcctccacccagaccaccactgcccaccacaaccgaactgcccacaccaccaaaaccacatctacacaccaaaaccatcaccgaaacctctttttcagatccaaacaaaaccccacatccagatctaaacacatcaaagagacctcagattaaagagaaataaaatcgcaactaacggagaaagaaaatcgcaagggcgagagagagggcttactgaacacgaggctcgtgaggtgtggggttctgcgatggggctcgtgagatcggagatctgtcgatctcctccttggtgtcaggcgaggcttgtgagggtggagaactgtggtggccgcccaaggggtttgaaaaccctagattgaaaacgagaaagagagaggagatcgagagagagtgatgtagagagagagagggtttgtgtttgtttcaaacgaaagaaaaagaaaaaaacagaaaaaaacagagaggagatcgagagagagagtgatgtaaagagagagggtttgtttcagacgaaagaaaaagaaaaaaccagaaagaaaaagaaaaagaaagaaaggaaaaaaaaaaagaaaaaaaaattatttaattttttatttataattttttttaattttaaataattattttttttatttttttaattaattttttaggtggaccaataaaattgtgccacgtgtacactgtgtacacgtggacattccaacctggcacttaacagccaaaaatggatggaaagggctaattgttaacggactagtggtttaggtagttttaccaccaaaattttagattagggggttagttgcaaaaacctatccacttttaggaggttttgccgcaaataatccaattcaaattagtggacttgaatcgaatatgccatgtctgatagg

SEQ ID NO: 290114 - DNA, 669 bp, Cannabis indica
ttatatacgtatatactctagaaccctagcagccagatagtatcgtattcctttattctcaccatctctcaattttttttatcctctctattgcaccaaatcaattgttttaatcttaagagctttggggtcagcaatcaaccgatcatcgttccgtgtcttcgaaatcttcaggtaaaattcgtagttgtttttattttcgttttcagagaaataggctttcataaaactaccatatccctctccccataggtccgttttcagtgatctaggtacccttttaaagataatttaataatctatatttttttatgaagaaactcttccctaattctgattatttcgatgtcaaaaaatttatgttttacactgactgtcgatttacagtttttttaaatttctttccgatattgccttagtaaatgtaagatatctctctcgatatctattattttccagcgattcttttactgttagaaagataattcaataatccatattttctttgaagaaacctttattactaaatgtaagatatctctctcgatattgccttagtaaatgtaagatatctctctcgatatctagtcaaaagttagtatctttactcggtaaggatatttcattttaagttttgttttagaaaaagtgtcttcagtaaaaattcaa

SEQ ID NO: 290115 - DNA, 730 bp, Cannabis indica
ataggaagcccatttaagtttttactaagtaaatggactaggttgctaaaataaattttgacataaggaaatttatttaggcccaattagatttgggcttattcaatgaataacaattgtttattttaaggttaaattcctctcttttgggccttgtgtgagagttgggggccaatagaagtgggtacgacatactgaacccagctcccctccctacactagtacgtaaacccctaacccttaagtttggtaagggaacccggaccctttagtttccgttacctttttaaaattttaaaaatttaagtttagtttaaggttttaaaggttttaaatttaatttaagttaccgtccgtaccgtaaacctttaaaaaattttaaaagttaagttaaagttacgaaccaaactaaatttaaaactttttaaaaactttttaaaattaattagtaaagtttaaaattttttttacttttactagttaagttaaatttttaaaagttttttaaaaagttttttaaagttttaaaaaacgaaaaaaccttaacgtttaagtaactaagtagtaattaatttactttacgtaacgaacgtttaagtttttacttttacgttaacgttaaactttaaattttaatttttacttttaacttaaatttaaaatttaaaaggtaaaaaggtaaaaattactactaagtaagttagtttggtaaagttaaaatttaagtttt

SEQ ID NO: 290116 - DNA, 564 bp, Cannabis indica
gcataaaacccaacaggtagtgcctatttcttgtttattgttgatgattattctcggaaggtttgggtttatctgttaaagcataaaaatgaggcttttcaaaaatttgtacattgaaaattacttgttgaaaacataactaactggaaattgaaaaccctaaggacagataatggcctagaattttgtaatgatgagtttacaggttactatcaagaaaatggaatccaaaggcataggatagtgaggaaaactgctcagcaaaatggtgttgctgaaaggatgaatagaaccatattgaacaaagcaaggtgcatgcttttcaatgccaggctcgcaaatggattttggggagaagtagtattaactgcaacatacctaatcaacagaagtccctctagtgcaattgaaagtaaaacccttgaagaaaggtggactggtaaaccacctgacttgtctaatttgaaagtttttggatgtgcagcttatgcacatcaaagtgtaggcaagttagagcctagggctctaaaatgtgtgtttctgggttaccccgagggagtaaaa

SEQ ID NO: 290117 - DNA, 507 bp, Cannabis indica
tctcagtgcagatgaagcttgtaaattgatgtgtgatttacagcttgacttttaattcatgttcataattcatatcttgaaatcaatcaatctaaagatgtacaacttggtaacttgaatcattaaaatctactagttgcactttcagcttcaacttctgcacgaagtccaccctcgtattcgtgctaactctccttctagtgaaggaaattcttctgactccgtactcagccataggatgatggctcatacgaagaaaaccacgcgtctggttgacgcttctgaccctcaagttgctcggctcaccactttgcctgacgccgaacaggatttggcggtcccgatggaggaggaccgtgagggggacgctgaagtccaagaggttgaggagctggacgagccacgtccgggcagtcctcccgctacagagggagaggaagaggttggaccccctaatttcggggagtacaatgaggctggacaaccagtcgatgctgacggagacgt

SEQ ID NO: 290118 - DNA, 621 bp, Cannabis indica
agaggagctcatggaccaaggagaagctcatttgccaaagaggagcttattggccaaagaggagcattgtgggcgcactaagctcccaactccgtcagatgccaaggtgcaaccgtcaggtgctaaggtgtaaagggctcctcagctgtcaaattatctcaaggacctgatgggcacgaaccgacccaattagctcccctcaggtacccatgaccatccgggtccgctaaatacgagggacgcgtgctgttagagctgctccgaaaatatagtcaaaaagtgataagtgaagagatatttattttttaaataattattttattattattttgtatcttgaacctaaccgaactatagttacgggagggcatacctatgtttaagggattttaaatcctagatgaatatctatataaggggggtgaaatcacttgtaaagggaccctgaaattgatactcacgagatcatactcttgagctccctctctcaaattctaaaaactcacttgaggagtgaactcttggagaacataactctggagaactcacctcaagcattgagatcaataacactccaagtggactagcctattaccgatgaaagggggtgaaccactataa

SEQ ID NO: 290119 - DNA, 564 bp, Cannabis indica
accaaaaccctaggttctgttatatccttaatgggttattctaactctggaaatggggaaacacccaaccaaggcaccgcaaaggcaaaaattgagaaaatgaaaggcccggggaaccctgccaaaaccggctagccggtttgcaccaggtttcccaaaaccttcatttcttgctcaattctcctccaaatgcaatgaaaccttccagagctcctattcaatgcataaacaataaaaccgagccagtaattcacagaacgaatcaacaaatctcaaattgccattaaagctcaaagctttgaactctaaacttaaaattgcacaaaacttaatccaatcaacaaaaccagcagctaggacttaaaaccaactcaaaaggaccctaaaattcgaaccttaggcatatgaaaacctaacagcccctattactcaaaaacacaagcttaaaccaaagaaaaagcttaaaatcacatcttcaaaagttctagggctttacctttgatgaaacctccttgaattctagctaaatcccagaaaaacaagatgaaaaagttgatccttgcc

SEQ ID NO: 290120 - DNA, 526 bp, Cannabis indica
accggcacctgatcaggagcacccaggggtttggaatctctgttattgcgggacaacaggtaagacagtagtttacacgtagagaatgtgtggtggcgcttatgttgaatatgatatatgtgagtaattgtaactgggattagggttattaccctaatatgagcggttaatagcctagagttattaccctagtgatataagtgagtaaatgatatgccatgtcaagtgtatgattatattgaaatttaagggttatgcgttcaaggcataatcaggttggactcggtaatcataaccgatatgaaccattctaaggccttattgtatgtagacgtgtgagagcaacatgtaggtcaacgccacgtagacataaatagacgtgtgagagtaacacttaggtttacgtcacgtaaacataaacaggcatgtgagcccaacatgcaggtttgtgtcatacagatagatttgaatggcattactgtttatattatatgatgagcatattattgatatactagtaaaaagt

SEQ ID NO: 290121 - DNA, 724 bp, Cannabis indica
tgtaatttcagctcctgaggcttggattaggttgctctatatcttcatgattcaaagtactgaaaactagtgagctgaattcaagttatcgaagtccgaactttcatcctagagatcctgaagtctacttaattaggcgcaaggttagggtcccctcccaaatcgactgctatgactcgggtctactcaactccgtgatatcatccttcatgccacgtgtcaaatattgatgtccacgtcaccgaaaaaatttccaggttaacactttccaaataataataataataataataataataataataataataataataataataataattcacagctaattttttaattttacttaaattaaagtattaaatgaaataaaatgaccattttaattttttagtcttatcggttgtattttaatattgagaaatgctaaaaggcatcagtggtacctaataccttcttacgtgtcaatatcgttattggtgtaattaaatatcgggtcttattgtgacagtcagtagtcccgtgattggtaaggggacataccaggtaagttgtgcaatcccacatcgcctggggaaggtcaagtgggatgattctaagactgtgtaggtatgagactacacagttgaagagagcataaatggattgattgatactacctatatcaacaaggtgcatcttgttttcggtagcccatcacgaaagaactccacagtta

SEQ ID NO: 290122 - DNA, 651 bp, Cannabis indica
gtctgctcgcctaccgctctggcccacgagtggaactcgtgactggggatttggcggctgaccattagttgtctaggaagtattcatcgttgggtcatcctccgtttctcccgggggaatgacgtctagcgattgctggcctatagtttggtaggctcttcgtatcagcacggtggcttgccaactacgatcttcgatctctgcatggtgagcgcttaatgcctccatctctttatctctccattcagcgaacatacacctttgttcgtcaaacacgagatttactgatgcacgcagttcatcctgatcatgatgcagggtgttgctatgactttgcatgagtctgagcgtgtcaagaagattttgcaattcgattgcatcttcaatggtcgtctgggcgttggttccaagtggaacagtcgtattatggatgccctggttctgtgcggaactgttattcccagtctcttgcacaccaggcgcaactccagtaacaagagttgtttcaccattcaccacgcttcccgtctgtctgggattgacagcaggcgaaacccttgaactccttgggtcctataatgccggatccagcgtctgtgaatttgctgggtccgacaggccgtctacgagtttgcaccatcgtgttggtgg

SEQ ID NO: 290123 - DNA, 329 bp, Cannabis indica
ggggctcctacccctcctgcatcaggctttagcagggggagtagtggttcggccatggaccagaagaggagagcatccactgcatccggaggctcgagtcagaacaagaggttccgagaatagaggtagtcgtcctggtggtgcagagacccggttctcctatcccgagtgccccagctgcaaaaggcaccatcggggtgaatgcaaaggtcagggatgctttcactgtggcatgcccggacacttcaagagagattgtccccagctccgctcagaggcaccgagagctccggcgaagatgccagcccatcagttgtaacaggtcagct

SEQ ID NO: 290124 - DNA, 734 bp, Cannabis indica
agatgagctgactactctattcagtgaatgatatctttgactctcgcctaaacgagacactagtattagtttgttggaaaccttagaaattatttaggattgtatgtttttgtattttcacttgtcattcctatttgctaagtgctaataattttttaggcgaccaaaatttttatcaatgcacggatgaaacctcatcagaacgtgcgtgatcacctgctctaaatgactagttacttccaggaggctgagaataatggagctattatagatctgacaactcaagtgaatttgatcttgaatagtttaactccagcttttctgccctttacatcaaattatgtcatgaaaaagttggattttgacttccatgagttaatcaacaaccttcaaacatttgaaaatttgattggaggaccacagaaaggaggaactaaagctcctagttctggcactgctaatggtacggccaaaattgaggcaaacattgtctctgcttcgaaacccagcaaaaaaaagaagtggaagaatagcaagaagcctcttaaagctattaacacaacgaataagaaaaaggctgctaatcccaattcaaagcaaaaaggaaagtgcttctattccaacgaaaagggccactggaaatcccagcatcctaagtttctaataaagaaacaaggtatttctatctatgctataaactcatgtgtttttagagaattattatccccttgggt

SEQ ID NO: 290125 - DNA, 643 bp, Cannabis indica
tcaggcaaatgggccttcacagttggcatttttgagaaaatagaaatgaaaattgtcaaaattgcaaaataccaaagtggggcccactaacccttggccggccacttatttgggtttttccaattaatattttcattattttaatgcccaataattcctaacctaaacctagtggttacctataaatagatagtgatggctcacacttattaagagattgaaaataaaaaaatttagcctttagaaaaatttgagacatcatctatccttctatagctaacccctctctctctcttttattcttcaattttcgaaaccttgagtgatagagtgagtgcccacacacatcaagtggtatctcaatcatagtccggaagattgtgaagaatccaaactgaagagaaggacattcaggcttagatcttggtgatactctacaacagaaaggatacaagggttagagatctgagcagaatgagacattatattccgctgcaaccactttaaggtttctcgtactttatatgtgtttatttcatatcgttttagaagttcatatttaggatattaaacaacatacttgttagtaggtctaagatcctggtaaaataatttccaacaactggtatcagagccatggtaa

SEQ ID NO: 290126 - DNA, 596 bp, Cannabis indica
aaaacaaacaccttagtgaaaagttatggcaaaaatacgattttccagttcccgaggctgcccgaaacgataaaccaattggccagaaccggttgaccggttccaaactggttgatcagtttttcaagggtaagaaatgtgatttttcaactttacgcactcaccgaaatgctaccgaacctgtccaaaccaccccaaacttcatagggcacatatataccatacatactaccatacttgcataatagaaattaaaattgagcccttaattggcaaatgccactaatatttagacttaagctataaaaaactctaaactcaatttctaacccaaaatcacctcaatttcagcaagaaaacatcagaactagccccatgactacccaataacaattctataaggtcagaactttcataactattctaattcacaaaacccttatacgaaactaattgttttaaacttaaacaaaattaaaccttatcttaaattttcctataacccatttcaacttaggtcggccctgcataacatgtgtacactgtattcatatagatgtataggtgaacaatctaacatgacacttaacacctaa

SEQ ID NO: 290127 - DNA, 645 bp, Cannabis indica
aagctgaacaagaaatggcgagtgtgtattgatttcacagacctcaacaaagcatgccacaaagactattttccacttccaagaatcgatcagctcgtggatgcaacaacaggacatgaaatattaagctccatggatgcttattcggggtacaatcaaatcaaaatgcatccaccagactaagaacatacaagtttccgaacatatatgagtctatattgctacaaagtaatgccatttggtctaaaaaatgctagagcaacatagcgaagattggtaaacaaaatgtttaaagaccagatcgggcgacatatggaagtgtatgtggatgacatgctcgtcaaatccaggaaggcttgtgggcaaatagatgacctggacgaatgcttcaaagtcctcagaaagtacaacatgaaactaaatcccttaaagtgctcctttggagtcagctcgggaaagtttccgggcttcatggtcaatgcccaaagaattgaagccaatgcagagaagattcaagccttcctggatatgaagtttccaactaaaaccaaggaagtgcaaagtttgatgagtcagatcaccgcactcagcagatttctttcgaaatcaacagacaagtgtgtcccattcttcaatatcctgcga

SEQ ID NO: 290128 - DNA, 665 bp, Cannabis indica
gtaagccgcattttttaagtatgcctgatcgcatttttcttccagaagatcgaggtagagtgactatttttcttcattctgcgagatgttgaaaacatctcttcgtagggaacctgccccaatctcgactggtaccatggcctcgcacccgtaggaaagcgagaagggtgtttcgccagtcgtggatcgaggagttgtattgtaagaccaaagaacttgagagagctcgtctggccaagtccccttgcgttcttctagtttccctttaatggtgtgctttattattttgttaacagcttcagtctgtccgttgctttgcggttaagcaactgcggagaatgccttcttaattcccatatcgtcacataattgtcggatctctttacaatcgaattgctttccattgtctgagatgagtttgtatgggataccaaatcgacaaattatggagttatagacaaactcgtgcaccttagttgctgtaatggttgcgagtgctttggcttcagcccatttcgtgaaatagtctactgcgactactgcatatttgactccaccttttcctttaggtagctcgcctattaagtcgatcccccatactgcgaagggccatggacttgtgatagaatgtaggttactcggaggttggtgggtatatgtggcta

SEQ ID NO: 290129 - DNA, 545 bp, Cannabis indica
aagaacattcaaaactcaaagaacatgcttttacccacaatatttcagcaattaaaacaaggttaagatcataaaaactaccttgattctcaacaaaacaagagcaatgatcttcctccaaaatcaagcttcaatcaaaccaaaaaccaagctttttcttcaataattcaagttttgaaaaacaagagggtaagagagggagagggttcgggtgagagagagaattaaccagaaattatcaatctattttcctcaaaattcatttttaacaaacttagaaaataaaggtctaatgaccaaaatgcccccatggcttaaatccacacacactcacccacacaagggtaattttgccatttcacactcaattatatccaaataaatttcagattatcactcatcaaataaaatgccaattaaatcaatccaatttacatttcgggcccgaacccggttcggcccgaaattcccgattgtgactataccgcgccaacctgtcagaacacacctgaaaagacaacacaggcatactatataataatata

SEQ ID NO: 290130 - DNA, 615 bp, Cannabis indica
tagaggcgaagccacataggattgattctgttttatttgtatttcttctcttttctataaaactgtaataataagtattacaggggggatctaatttaacaatttccaccttagatctctcctggaatacttattcttatagtgcgtctttcttcaagggtcctagctcactgtggtaatggtcatccaccattaccaacccctaacaagtccaagcagtgcttgaacttagttaagggtagcaccttagtaccgatatcagaaggattctcttcagtgggaactttctctatctgtacaaccttctgtgtcactaaagtggtacttgatttccacatgtttggttctgtcgtgaaagacatgattcttacacaagtggatacaactctggctatctgagtagattataggttcttcatctaataatttcagctcttctagtaatcccttaagcaaaatggcttctttaatagcctctgtaacagctacatactcagattctgttgtagataatgctacaacaggctgcagttgtactttccagcttatacagtttccccatagtttaaagaaataggcagaggtagattttctactatctctgtctcctgcata

SEQ ID NO: 290131 - DNA, 536 bp, Cannabis indica
ataaatatatattatatttttcaatatttcttattatataaataatttttaatatatataaatgtaattagattggatcggtttttaattggattttgagattgacatccaataaccgatccaatccaattagaatccaacttttagcatccaatccaatccaattataattggatatccaactttttgtaattggattggattggatcggttcggttcaattggattggattggatgatgcccacccctagccactaccatcttcttccattacttcaattgtaggcccattaatatgttagaattattttaccaggatcttagatttactaacaagtatgttattaacatcataaatatgaacttctaaaacgatatgaaacataaacacatataaagtataagaaaccttacagtggttgcagcggaatataatgtctccttccactcagatctctaactcttgtatcctttctgtagcagagtatcacctagatctgagtccgagtctccttctcttgaaactggattcttc

SEQ ID NO: 290132 - DNA, 785 bp, Cannabis indica
atggcaataccctaaataactcaaaattggccaaaactagggttctggaaaatcccccaacaggtagaccggttcccaaccggcatcccggttctgggtcaccaaccggtcgaccggttggtacagaccacccagaaccggaattccggttctgctgcagggaaccaaaaaattatcccccttgattcaattcaatcccaatctttaccaaactctccagtatacctaaacaatgcatacacaatgatttccaggcagtaattcacagaataaaccaatacaactcaagttgccattaatgaacaaagcttgagtttcaaagctcaagcttgcttaaaaccattcacaagcatcaaaaccagtagctagggacttagataaactcaatttaaccccagaaattgaaccccaaacatttcaaaacctaacagccactaaacctaaacattcatagtgaaactaaactaaaacttcaaaaacttaaaggggagaagaactagggttaccttgctttgattcctcttgaatccttagctgaaaacacaaacttttagctcccaaaccccttgccccttgctgccttcgaagagagaaagagagaagagagagcttctcttgatttttctttgtttttttcctttattttccaaatgaaaatgagttaattacttaactccttctaacttagatgctaggtgtcaactacatgggcagccacctcactcaccttaaccaaaagactaaaatgcccttagacttaaaactagggtatttctaaagctagg

SEQ ID NO: 290133 - DNA, 450 bp, Cannabis indica
tatgaaaactactacatgacataaaaatgcaatctctgaattcaataataacagtataaataattatttaaatagatataaataatttcataattaatcgtgattaactgctaatttccaaattaaactaagcagtctttacagataatgtgatgatattatgcatgtgatatatgatgagtaccgggcgtaggtacgagctctcctgattaggtgacgcaattttcctggcgacgtactgggcgtaagtacgggcatcggtgatatatgatgagtaccgagtgtaggtacgagctcacctaattaggtgatgcaattttcctggcaatgtactgtgcgtaagtacgggcgtcagtgacatatgataagtaccacgcgtatgtatgggctcgtctaattagacgatgtgacatatgataactattgttggatattattttaccaggatct

SEQ ID NO: 290134 - DNA, 621 bp, Cannabis indica
ttatgttttaatccattgcacaagtgaataacagtggctcaatcaatcttccaacttagctatcaacacatgacactaaaaaaaaaactaattaacgaaaacaaatgaactgaaaaaaaaaattaagtctctccccccaaactaaagatgcacattgtccccaatgtgtgaaaataaaccaggatgagagaaacttacctgagccccttagaaggggtttggcggaggtggctgatcataggggttgaagcggggtggcatggcaaaataattaggatcgtccacaccgacattcatcctcgtgacaagtgtgttcaattgggccacctgctgctcatcaaaaacactccgttgggccatgtaattctgcatgtgcatgttttgctgaatcagataattcagctgatcgtgagtgtactgcatggctgggtcaagaggcccggcaagacgtggtggttcaatgtcgtcatgctcctcttgttctctcgcaggaggatctccccgagctggcggttgaccatgagggtgaggaggtttgagtcgaataacagtggctaagttaatgctacgttgtggcggctaccttggtatcataagagtactgtggtactccatgtttct

SEQ ID NO: 290135 - DNA, 544 bp, Cannabis indica
atttcttcattattttattcttaaaataatatttgtttaactaaatctactctaaaattggtttattttgttattataattttattaaattataagattagaaattgatatgaaaaatatctaattaattattttcatatcatttatcttattaaatatttaatttaatttgataaaataattcaaataaaatctagatattttaaaattcgtttgaattttaaattttaaaaagatattttagattgtttcaacaaccctaaattttcaaaatagttggttttttaaatgataatttaattatattattaataaatatctcaattcatatttgttacaagtattgtttgtttatttaaattgtttcttcaattttttttaaacaaacctattatttatttgatctaaattgctatgattaacttattgataaatccaatgatctaattttaatcatagtctgattgtcattagatcttataaataatttgtaataggtaaattttgtaatatcttttatctatgataaacctagtaacatgat

SEQ ID NO: 290136 - DNA, 245 bp, Cannabis indica
taggtatcagattaatccaggagaggaacattggaagacaatcaacaaaatcttaagattaagaagaggaactatatgttagtcaataagggtatgtttaaaactcttagactacaccacatcagattttcgaaaacttgcctatctgctagaaagtctactgttaaaatggtgtattactctgggggtggaatagtgattttggagaagtgtaaaacctatctgaagtctcttagtctaccaga

SEQ ID NO: 290137 - DNA, 548 bp, Cannabis indica
tggctgcaacagaggctgtgaaaaaagctatttggttgaagggtttgacatctgaactgggcattaattctgacaatttattcatacattgtgacaaccaaagtgccattcacctcatgaagaatcccatgtaccatgagaggtcaaaacacattgacatcaaacttcacttcattagagacattattgctagtaaattagtcaaagtaaagaagatatgtactcatgaaaaccctgctgatatgttcaccaaggcagtcactagtgagaaattcaggctatgcctgaaattgttgaacattggagattgccgatccttcacttgtgaaggaaaactttattgatggaacggttttgcctatgttatttttagctcagtttccttacttgcaaatgtatataaaccaggtggaatttgtggggtttatgtacagttgcgagtattagttaagtcagttatttttttcagttgtaaacttagacagttatttctgttatttttgtttgtttgtttgtactctcagcctatgtatataaaggcttgtgtt

SEQ ID NO: 290138 - DNA, 602 bp, Cannabis indica
tgcagcacgcagttcgtcctgatcatgatgcaaggtgttgttatgaccctgcatgagtccaagcgcgtcacggagattttggaattcggtggcatctccgatagtcctctggccattggttccaggcgaaacaatcgtattatggacgccctggttgggtgcagaactgttattcccagtctcttgcacaccaggcgcaattccacctataggaactgtctcaccattccccacgcttgccggctgtccaggattcacaacaggcggcacccttgtgctccttgggttctgcgatgtaggatccagcgtctgtgaatttgtcggatcagccaggcctctacgagtttgcactatcgtattggcggttagatgttgaataaagagcgattcgtgatcctcctctcaatgaaaacactaaaatattgacttcgcttttcgccaacgacaatgaatctattttataagcgataaaagatttataataacagatatacgataaagtaataaaaagacacatggattttatagaggttcagccccgagcagttcggtaatagcctaaatctcgttatttgtattgacttaagatcaaggagaaagat

SEQ ID NO: 290139 - DNA, 681 bp, Cannabis indica
tattatgtctttctgatctagttcttgcacccccagcaataagggttagctcaaccatctgagcataaaaccagacaacttttagttgcttagccattatatctacattctgaacgatatactctttccaccttcaattagatttaacccttctagcagccttagcaactactccatcaaaacaaaactttgccaatcggtccagcttagtgtcagtttccatcaccgcgctgcccgagaccaactatgtaaattctactacctggccactcaggtaatctcttgcctcatagcattcatttgctctcagccctgtggtagtggaagattaatacccacaccacctatcccgagcctaacaggctctcaattttacttactagatcaccccaggtacacctactagtacattcgtgatcattcctttctcatagttaaaatctttctaactagaattaatgctaataagcattaccacacgtgcatagacataattagcaactttatatcaaaaacttatgacacttctctaataactttacacatatcaaatatgaagacaattcgaataattagtaaataaaccactaatcaactaacaattagcacttactagaccatgagtcgaacgagtcttcgcagccaatgtacatatcaaccagtcttcaggatctttaaacc

SEQ ID NO: 290140 - DNA, 654 bp, Cannabis indica
acttttcactataactcaggctgacgctgatgctagtccgtcagttgtgacaggtcagttgtctattaatggttgttcatatactgtgttatttgattcgggagctactcattcatatgtatcgagtagagtgatagaaagttttcataagccatgtgatatttatgcttcggggtttggaaccctgttaccctcgggagacctgatagtatccacaaggtggattcggtccttgtctttttggattgacggttgtgagttgaccgccaatctaattgagttacaattatctgattttgacataatcctgggaatggattttctgtctaagtatggagcgatgattgactgtaaacggaagatggtagtgtttgagcccgatagtgctaacccagcggtgttcgtgggtaaggttcagggggcacgcataccgagaatatcactgttgaaagctaaggacctgatgggtagaggttgtctggggttcatagtcactgcagtggataccagccaacctgtgacatcagggcctgaaaatacgagattggtatgcgagttccttgatgtctttccagaagacttgccgggattgccacctacccgggaattgaatttgttattgaattggttccgggagtggatccagtatctaag

SEQ ID NO: 290141 - DNA, 911 bp, Cannabis indica
gcgagttggaaatatctccgccaggaatgaaatgcctcttaattgtatcttggaggtggagttgtttgacgtgtggggtatcgactttatgggacctttcccacaatcctttgggaatctctacattctagtggcggtggattatgtgtcaaagtgggtggaggcaattgctagtcccaagaatgatgctcgagtggttatgaagttccttcataaacatgtttttacaaggtttgggactcctagagctttgataagtgatgagggaacacactttgtgaacaaagtgttggctgccctcttggcaaaatatagtgtaaaacacaaaattgctactgcctatcacccacagactaacgggcaagctgaaatatctaatcgggaaattaaaggcatattggagaaggttgtaaatcccaacagaaaagattggtcccaacgcctcgatgatgcactttgggcgtataggacagcatataaaactcctctaggcatgtctccatatcgcctagtttatgggaaagcatgccatcttcccgtggagttagaacacaaggcgttttgggcactaaaaaatctcaatatggatatttcagcagctggagaagcaagaaagttacagctgaacgagttggatgaattgcgtttgttttcctatgagaatgctaaattgtataaggagaagacaaagagatggcatgatgatagaatcaaggaaagagtttttgcaaaaggacaagaagtgttactctttaattcaaggctcaaactctttcctggaaaattaaagtcccgttggtctggcccgtttactgtgcaagaagtgactccttttggtgcgattacagtgaaagtcaacaatccgggagggaatttaaagtgaacgggcagcggttgaaacactattggag

SEQ ID NO: 290142 - DNA, 560 bp, Cannabis indica
aagatatggcttgattgtgaagaaatatgattttagggtttatttgttaattaagagactttattaagtttaattaataaatatgttaaatggtaattttatttgataattaattttaattattaaataaataattttggcatttatagggttgaaagtgtaaaaagtggtatttgaaaaagataaagtagttgagaaaaataaaaaaaaaatctaactagtgtagggcacattacatggccggccactagtgctatttttactctatttttatcaattttttattccaaataaatcaaccctaaacctaggtgaaattagtataaaaggaaagctataatctcattatccaactaatgcttctaaagctaagaacctagttttctctctttggcaactaggtttgtgagacttcatcttcttccttcttcttctaatttcaaaatcatatagccatcttcacaaattaaattcaagccttagtgattgagtgcatgcccacacataacaagtgagtcctcaatcatagtgtgtaaaactgtgaagaattcaattcaatt

SEQ ID NO: 290143 - DNA, 644 bp, Cannabis indica
agtcgagaagcttcatagattgccattagaaaaatgcaccagcatcttacaaaagtaagttgcttgcaccaaagtaagtaaatcaccaggcataccacaagccataagtttagataaactcaaacctataatactaggaacaggaagttttgttaagtccattgaatacttattttaaaattccttttgttatcctaatttttgcactctgacgtggcatcgcataaatggtgacacgtggaatccacttggagcatctgctcgggaagcatagtccgagcaggatgtctcactagcatgcccaaagcaaatttttcagtaatccgcgcagagcaaccaacacttatcgaattcagctttcgcatcgtgagtcatcaacgaaatccctgtaacttagggatcagacttcagggatatggcatacacacgatcccacgatcagtgtattcaacatcaatcccacgatctttgtactcagcattgatcccatgatctttctatttatatacattataacgagaggggaaactcttcctttccaagtttactagccctataaatagtgatgcatgttcactgggaaaggttcgcaaacagtttagttgagactataccctaaagatattatctaagaattatagatt

SEQ ID NO: 290144 - DNA, 524 bp, Cannabis indica
tccttgtagatctgcctttttcaatgttgaaaaccttatgatctgttattatttgtctttcttcttcttgtcttttccttttgtgttcttgtgttttctcaatgatacaatcagcaacactatcagctacttgaaatatgtttggtaaggcaagtacctcgcttatttctgaggtttcatcatcgtattccatatagtcgtatgttggctggttggttatttgtaaaaccagtttctgaacatctgtatcttgtcttacagattcactttctggtttttgttgagcaatgatctggagtcttgtctcgtctactgttgtgatgcagagtggagactcactaactgcattttgtgtctttctcagttgtaagtagaacatcagtgagttgtcactaattattttcattggtggtgagtctgggcataactggtaatgcatttctattgttgtgttgcatttgatttcagcctttactaattccaacaaactttttagatcacagtttgttggtattagtagtcca

SEQ ID NO: 290145 - DNA, 482 bp, Cannabis indica
tctgaaaatcaagtagcaaataaaggagatattttttcttgattccaaaagtgttctatcatcttatataacatatgatgatcccactgcctctgttgtcttgtcacaaccgaagaggtcaataccatttagttttcttagacataattcacggtaccttgtcgtagtgggagagtttctaggaactcaccttcttatgacttgggagacactagtgattaaaatccattgtgagtttaaacaagtaatggattgtcaagataagaaactaagaagaaagccaatagaactatggtttaatccattcacatggagtaacctaaagttttctattacaaggacataaaaggaaattttcgtttataagtctattcaatggacttaacaaaacttcctgttcctagtattataggtttgagtttatctaaacctatggcttgtggtatacctggtaattacttactctaatgcaagcaacttat

SEQ ID NO: 290146 - DNA, 612 bp, Cannabis indica
cctagacctgggacccaaaattagaacctaaacaagaatcgccgaaccaagacccgagaacaagactaggaccgtgaccaggacccggacccagacctagaaccgaatacagacctcccctcagaccctaactgagactggaactcgggctcgtacatggtcgtgtacccagaccggaactcagactcggacctagacctaaatttgggacccgatcccaaacactgacttggaccttgatagggatccgaatacgaacttggactcagaccaggacccagacttggatcgaaatgctggaccttgatttggaccgagatccggacccaaacccaaacatggacccgcactcaagaccccaacttggacccagaaccaagacctagatcggggaccagacctggacacaaactcgaacatagactcagacccgaactcaaacccacacctagaatcagaccgaaagctagacccggatccagacccaaactcgaacccatacaaggaacagaacaaaggacttagaaccagacccaggacgcgaacgcacacccggagcttgatctggggtcggacccaacctagaccaagacccaggacgcgaacccacac

SEQ ID NO: 290147 - DNA, 720 bp, Cannabis indica
gccacacagaaagcatgtcttctagttgcactcccccggatgatctttcttacaatgtggacactcaggataggaatgaccctggcgtctacctctgccttggttcccacgaaaccgcttactctgtcccgagcaaccagatgccagggtaactttcctgttctgataactggtgcaatcaccaacatccctaccaaataaaggagtaggaaaggtgggggtcccacgaacactcggagtcactcggggctcttgaaggaattttacagcaccctcgactcgcagggctttctcaaccatttctgcataagatgttgctttgttggtagtgatcaccaaatcatgtctaatcttcacattcaaacccgccaagtacttttcatccttactaaaatccgttggcacaatacccacgacgaccttggccaggcattcaaactttgtagtatacttagtaactgacatcccctcggtttgtactaactcagtgaactctttcagcttagcattgcagacaacttcattgtaatatttggaattgaacaacttccggaattcttcccaggtcataattgtgacgtcctgagtgaaggttatcaactcccaccacacaagagcatgctcttggaactgaaatgaggcgcaggtcacccgatcattaccaaccacccccataaaattcaaaattccctcaattactgtgagccactgctcaacctt

SEQ ID NO: 290148 - DNA, 515 bp, Cannabis indica
cttattgggatattttggcgtgttctgctcttgttttaatatttgatatggtatgagctagggttttcaaagtagatcgtacaccctactgatgtgaccttatacggattgatggtaaaatattagtaaaataattacatataactatgaagtaattagtaataccttggaaattattaattattattttttaatatttcatttgaaatttgaactcacatcaccatttggttgggtttatccaaatgcctttttccaatgcattcacaaagtcatcttcattgataggttgtacagtctagtcaaatcaggttttaaatgtaaatatttaatattaatttgaccaacacggattcataacatcttcatggtaatggtagttggttgttcacttttattattggaaaattgtaatgttgaatactttattgtaatcaagatgtgaaaaattgtaatgtggttcctacaaattaattagcaaatataaaagatttctttattctaataacgtattt

SEQ ID NO: 290149 - DNA, 454 bp, Cannabis indica
gtgagatttatactgatcataaaagtctcaaatactttttcacccagaaagatctgaatatgaggcagagaaggtggttggagttagttaaagactacgattgtgaaatattgtatcaccctgggaaagccaatgttgtggccgatgctttaagcagaaaaggtcccgggcaagtttatactacaattatgatagcccctcaactagcctcggaaatggttagtgcagggattgagttcgtggtcgggaaattacataatttagcactcaaatctgatctgttggagagaatcagaaaggcacagctggaagatcccgaactagttaaggttcgagacgaggtaatggctggtcggcctagaagcttttcagtctcgaacagtggaatgttgttatacaaagctcgagtttgtgttcctagtgttgatgagcttaagaaagaaatactggatga

SEQ ID NO: 290150 - DNA, 520 bp, Cannabis indica
agttgtaaccacttaatttgaaaaatattccattttaagttgatgtaaattttaaaaaaatatcaacttaaaaaatatcttaagaatctttaataaccaattcctagaattcctcaacttaattttgaaattcaaaagatattcaaatttaagttgataaataaaattagttagaaataactaatttacaacttaaataggaatatttaatgaaataattaaaataagcttcagaaagaatctagttagttataattctatatttaattaaatacaagaaaaatacagatagtttatctagaaataatttcattaaactaagagtgtttttctaacaattaactttaaaatattaaaatgaaaaataaatttcatatattttaaaagttaattatgttgcaaatcaattttattaggttaaactaatttaattaacctagtacagttatccaaatcaggcaaatgggccttcacagttggggtagttcatgtgagggggagctgggttcagtatgtcgta

SEQ ID NO: 290151 - DNA, 526 bp, Cannabis indica
ggatttaaaaacccccacgtctcgtcatattatgggaccaccgatccagtctcacatttgaataacttcaacactattatgcaagctaccaatgttacaaacaatctacgttgtattttgtttcccacgtcactagttggagcagcaagcagctggttcaataaatttactcatcattccatcacttcttgggaacagctgtctaaggacttcaaactgcagttccaggctacaagggataggtgacctgaagcgtcctcactcaccaacataaagcaacagcctggcgagacgcttaaggcatacttaagtcattttagcacggctgctgcaagagtaagaaatttggatgatagtacccagcttactgcccttcaggcggggatcactgttgatctctccactgccagaggtgaattgtgggacgacctacagggtcgtccagtgaaaaacatcactgagttcaacgagagggctcaggtgtttgttcgaaaggaagaagctcaaaaagagatgaacttgttaa

SEQ ID NO: 290152 - DNA, 743 bp, Cannabis indica
acaaatacgacaatcccaacaattatgccctaatacaataatctcaaaaactattattaaaaattaaattattttttgttgctctaaattgtaatttaattggatccatatgatctatgatatgtgaaatgaaagagatggtgaaagtttatatatatttacttatttaagagtattagtattaggcacatgtttttttgcatttggggagggactttaaatttgaaacttcttttttgtgaagagaaatgtaatttttaagatatgattaggcacatataattaagacgtgaaacactacaaacaagaacttagttagaatttgttttatattatttattataaattataaggttcaattttaataaattacacttacatcagtgttacagaaacatcaaaaaaaaattgaatatttctctaaataaaattgccaaatagcattaatattgatgacttaacttttcaatgtactatatttttttttctggcacaaaaaatgcatattaaatgctaataatcacttcttaggctaatcttttttatgtccaatgttgtgaaaagaaattgactgtattccaaaaaaaaaacttaaaagaaactaaaactaaaaattagactgtatcccaccaagtagaggttagacaatgaatattttgtttgtctggtaaaggttatgtcattgcttaatttggtaggtcattttaactaatcagccaagtcatcaaaagtaacaaacaagc

SEQ ID NO: 290153 - DNA, 650 bp, Cannabis indica
ctactactaaagctcctattcagaaggtcaccgctcctcgtcgtagtggtcgttggtgacggtattaatgacgatccattaacctataaataggcagtggcaagtcccaaacagaaacaattgtcagccggcatggagtagaaatggattccatgaaaaagaacaaagtctcggaatacgtagacgcacctgatgattatcatcctattggatgtaaatgggtgtcaagaagaaaagtggtgctggtggcgaagtccaaactaataaggctggactggtcgctaatggttatacccaaagagaaggtgtggactatgaggatacttttagtccagttgccatgcgcaaatccattagaattcttctctctatagctgccactttcgattatgaaattcggcaaatggatgtcaagatagctttccttaacagaattctttaagaaaccatctatatggagccactagaagcctatgttcttccaaggcaggaagagaaagtttgcaaactcaataggtccatttatggacttaagcaagcttctcgctcttggaataaaaggtttgattaaatagccaagacctacagctttcaccaaaacaatgatgaaccttgtgtttaacaactcaaggataatcaagtggtagtat

SEQ ID NO: 290154 - DNA, 546 bp, Cannabis indica
tttatactgatcataagagtctcaaatactttttcacccaaaaaaatttgaacatgaggcagaggaggtggctggagttggttaaagattatgattgtgagattctgtatcaccccgggaaggccaatgttgtagccgatgctttgagcagaaagggtcccgggcaagtttgtactatggttctgatagccccttagctagcctctgaaatggttagtgcagggattgagtttgtagttgggaaattatacaatttaacacttcaatctgatctgttagaaaaagtcagaaaagctcaactagaagaacccgagctagttaaggttcgagacgaggtaatggctggtcggcctagagactttctagtctcaaatagtggaatgttgttgtataaagctcgagtttgtgttcctgatgttgatgagctcaagaaagagatacttgatgaggctcacaccacaccttattcactgcatccgggaaccaccaaaatgtactaggatttgaaaccctacttttggtggtatgggatgaaaaaagatgtgg

SEQ ID NO: 290155 - DNA, 485 bp, Cannabis indica
attattataaaaatatgaaaaattttatttatattccacaaattaactacaaaaaatgttatttttgccagcacatttttgtgctaacaaaagtttagtattacgctggtaaaataaaatttactttagatgtattggcaaaagagattggcaaatcaacgttggtattagaatttttaccagcacaaaatgaaaagcgctggcaaaaatgacttttcccagtgcgtaaatgcactgaaaaaagttagattttagtcactacaaatatgcgctggtaaaactttgacctttttgccagtatagtttgcgaaatgcgctggtaaaagtaaaagttactattaccagcgcagtagcgaattgtgttggtaaaagtgacatttcttataatgtataataagtatataaaaaataaacttaaaataatttttaaaaatcactcttaatatttttttgatttatttttctcacattattttgtgttaatt

SEQ ID NO: 290156 - DNA, 654 bp, Cannabis indica
ccagactcaccagtaaggcgaacaagaccactatcagaaatctacgagacatgcaacttagtacttatggagccagaaagctttgaagcagctcataaacaagaagtatggagaaaagctatgaatgaagagataaagatgattgtgaagaatgagacttgggagcttgtagatcgtccacaagacaaaaatactataggagtcaagtgggtctacaagacaaagctcaacgcagatggctctatccaaaagcacaaagcaaggttagtagcgaaaggatactcacaacaatacggagtcgactacaacgaaacatttgctccagttgcacgccttgacactattagggctttaatagctatagccggacagaagaaatggaagatttttcaactcgatgtgaagtcggcattcctaaatggttatcttgaagaagaaatttatgtggagcaacctcaagggtttgtggcacaaggacaagaagataaagtccttagattgaaaaaggctttatatggcctaaagcaagctccgcgagcctggtatagcagaattgacagctactttaccgagcaaggattcaggaggagcaagagtgagccaactctttacatcaaaactcaaggtacgaatgatacactaattgtctcttta

SEQ ID NO: 290157 - DNA, 522 bp, Cannabis indica
aaaatatgacatttgtgaaataatagataaatggttgaaaaaatgacaaaaatataattagtggggcccactatcatggccgaccactataggtttattttagctattattttatcattttttattccatataattcaatcctaactctaagtgaattagtataaaaagaataggatagtctcataatcaaactaatgactctaaatccttcagtgctcttcattaaattttcgagccttagtgattgagtgcatgtccactcataacaagtctagtactcaatcatagtgtgttagactatgaaaaatccaaacaactgaaggagaatttggctcaaatcttgataatactctactacataaaggaacaagggttagagatctgagtgggaggagtaattatattctgctgcaaccaatgtaaggtttctcacactttatatgtgtttaagtttcattgttttagaaattcatatttaggatgttaaaaacatacttattaaatttagatcttggtaaaat

SEQ ID NO: 290158 - DNA, 617 bp, Cannabis indica
aaatatcacgtacagagtacattcatttttgtttcgtagtacattgttaagaataatttgttataaattatgaaattatgtgttggtatatattgagttttacgttggtgtattatttttatttttattattgtgtataaaaaaaattaattactatggaaattttgaccttataagattgaattttcttgggtaaaataatttatttgttcattaattataaatttgagatttgttgagataaataccttaaacacggcaaacataacatgaagtatataaatgtagagtttttgaagcaataactagagtcataaaccttaaaacatcaacggttaaaaatagctagttatatatatgaatgaccatagtatgattcttgtgtggaggaaggcggttcagggaaatacgcgttggagtgttcattgaatgagtcagttgttggttgattgtgtgctgactgttgcccctgagatccagtattctgttgacggtttgggcaccgccgataatcatggcctgatgagcgacaaatgcgacaatgtcttgagtttcttgggatctgctccccgttcggtccttcccttggatttcccgtaccctttgttctcacaact

SEQ ID NO: 290159 - DNA, 653 bp, Cannabis indica
aagccgggtagaaagcttcaatgatgaaattgttgttccgcagcttttcaacttcgtctttcagggctactgctcgttctttatccagcagtcttcgtttttgctgaactggccatatattaggatcgatattcaggacgtgcaaaatgatagaaggatcgattccgaccatatccgcatgtgaccaggcgaaaatgtctaggtttgctctctgaaattttatcaatttcgattttactttgagcaacaaaccctttccgattttcagctttctggccgggatatctggatcgaccttgatctcttctaattcttccacgggtccaacattgctgcttgggtcctcaagctgaggatccacatcttcatcctcgccttggcagtttcctactcgggaatatttattctcttctccgggctctggctagaggatatttccttcttagccttggccactacaaggttgtaacattcccgagcagattgctggttccctctaacacaccctaccccatttttggttgggaactagaggcatgagtggaatattgaagtgacagcttttaagtaatacaaggctggtcggcctagcattacgttaaaggctgaaggaaaatccaatatcaggaattgtgccatgatagttatgctcg

SEQ ID NO: 290160 - DNA, 791 bp, Cannabis indica
aactctttctaacaacaacatttgcagataacattttgatctggacgactattttaatctgtcaaatcaactattaaacaactattttaaagcattcagtaattaataagaatagattcatcatttctcgtttgcagatcccaaacaaccattattttactggaaaacaacttataaacaactgtttgcagattaaaactctgtagcatataattatatgcattaatatttgttttatgcaaaccgttgttgttttttgttcaaattcaccaatattttattattatttcaatttattccagttttcctcaattaataacaaattctcatttatgtagaataaaagattggaagatgttcatgaagaaattgtattaccttcaattatttctctgattcaatcatgggtgagtttcaatgattacagatctccttctcttcgattcttctcctctgaacgcgttgggcttttgactgaatgttgtttttgagttttttttttttgttacaacaatggaggttggataattttttttcccttttttgtatttggattttcgggtagtctgagtagtttttcttttgagatctacatttttttagtatatgattttcctagttttgaaatgaaaatggttgaaaatggttgtttggggttcgtacagctgggtcacgaagaaggaggattccctccgtgttttttttggttcgaggtattttggtaaatacaaaactttagtttcttattttggtttattttccctctatgtaggtcataaatgtaaattttt

SEQ ID NO: 290161 - DNA, 567 bp, Cannabis indica
atgttggctgaatatatgtgactgagcatgttttttcaaaaagttagaaaaaatcaaagaaaaaacaaaacctctctttctctctttctttgtctctttcggttttgagcagctgggattggggggaattcttgtgtgtttctagctaaattcatcaaggtttttgtgatctctaagtgttggtaaggtttctatatctttccctcttgaaattgttgaaaatgatgaaaaagatgagtgttgcatgttggttttgttgtgatacttgctgctgtatgttgttgttgatttctgtagttagaacttgatttaaaatgttgattcaagcatgatagggtcggtgattagttggttttatcaagagatgaaaattttactcaaagctatggtttttcaaagtgaaattgtgagttttgttgctgtgtttgttggggtcgatttcctgtgttttcagatgttatattatgcatgtttaagtaggtttgaactgatttgaatgcatgatagtgttgtgattgttatggtttaggagcctgtaaaccgctgtgcagttcgttccactcaggt

SEQ ID NO: 290162 - DNA, 604 bp, Cannabis indica
gcttcaggccgtagagatgagtgtaacaaggtgcggtggccggaagacgagatagaccattcagaacccgggtgagcgaacagcacgaagcacggcgtcatatggaatagaagctgggttaatcctccaaagagcaaactcatcctcaagcggagctctcaatccatataagtcgttaatcacatcaggagaaaaggggacactctgacccctcactctaacgacatcaggatactttggatcaagagcagcataaaatgcaggggcaaccgaggccacagcgggcttaggaattgcacaaaatttctcccacttgtgctccgcaatcaaattggtaatatatgcaggtaaagcttccggggcagggagaaagccgcgctcggccaactggctgcgggttcgtaatatctcaaaccgctcttgatgacggacggggtcggctttggctctaggacgagtagtggggttctgtttaggtggtggagatgtggaagtggtgcgcttaggcttgggttggcccttggaggttgagggagcggctttggcgggtggagctttgggtttaggtgaggaggccttacggggacgagtacggggtggtgag

SEQ ID NO: 290163 - DNA, 457 bp, Cannabis indica
ttctaccataaagtgtatataaaatatcacttttgtgtatttttctcttgagatgaccttttaaggccacttttaaaaaaatactatttgacattcttatttttctcaacaaaactaaaatatcaaactcacatcacctcttacaaaataatgtgattatttatccattattttaaagttatctcctcaatgagattaacccaaatattacactaaagttaacaaaattctcataaattttgttcactactttgataatttaagattcaaaattgcttcttcaattttgaaatcttttcataatttttgaatccacattgattcactttatttgagtctaaaattactctttcaatttatgactcatttcataagtttagatccacttttgattcatttgttcttgctatgacaagacaattctcataagtgtaactctcatagttcacttttctta

SEQ ID NO: 290164 - DNA, 416 bp, Cannabis indica
actattatttgtaaaatatttacatttttacgttcaaaagaatgtgttttttttacattattacggttttccaaaaaataacacgaaaacaacataaaattaacaagaaaacaacataaaagtaacatgaaaataacaacaaaaaaacaacaaaaaataacatacaaataacaaaaaattaacaacaaataaacaaaatttcaacataaaaagaccgtattttatgtaaataaaatcaaaaaaatcgtaagaatatttaaaattccgtaaaaccgtatttttgttgtttttgtgcatttgtgaaattatccttattttttttttggaccttttaggtaggatccattagcaaattcatgagagtttaggcaaaaaaaaaaaacaaacaacattataccaatgccatcatagataat

SEQ ID NO: 290165 - DNA, 783 bp, Cannabis indica
tctttgaatcgctcccacggttcataaagttgctatgaatcaaactatctgaattgcacaatctcactcctcaactatgcagacttcgatggagggaagaatttcaccatgaactttctagcaatttcatcccatgtagttatagaacctaactgcagagattgcaaccaacttcttgctctatgccttaaagagaaaggaaagagtcgtagtcttatggcgtcatcagtaacaccattcatcttcacagtagcacatacctcaataaatatgactagatggatagtaggatcttcagtagccaacccaccaaactgattatgttgcaccatattgattaaagtaggcttcaattcaaaattattagcagcaatgattgaattagcaataccagtcagattttcattcaccaaagataagcaataatcacgaacaacccgtagttgtacatcagctgcagcaggtgttggttgattgttattaaggccattgttgttattattgctaatggctacatggtgaagtctaactttttttttagctttcaactgctttaaagttctttcaatctcaggattcagcggtgtgagtgtgatttcttcgcataaactgaactacaaagcaacaaacaaaataaggatcaaaataaaaatctaatttaaagcaaaaaactttttagtaaataatattagtcaataattttaagactttttcgtccttgacaaacggtgcaaaaacttagatacacaatttttacttacaagagtacaacgttgtattagc

SEQ ID NO: 290166 - DNA, 617 bp, Cannabis indica
agagaatcactttaaaaccactacaatccactcaacttgaaatttatgatactattactagtggagcgtatatattctcccaaatgtatatatgcatatatatagaatttatttttttttgctaaattttctccgttacaaaaaataaaaggaagaaacttcatatcgaattgggaaagaaatacactgcatcaaaaacacaaaaaaagaattgggaaatatatatagcttcattaataaatatattttaacagttcacatgcttgaacaaataataatgagattagccaatttcgcaagcacacatatacaatacataaataacatctaaattagcccccaccattaatagctatatatgcattaatttgacatattttaatattatatatatatatataaaaaaaatagtaatggagaaacgtacatcgttttggtagtaataatcggtggccgacaaggctgggagggtggtaagtttactagatttggcagaggcgatgggagtcttgctgacgtggcagctgagttagaggcatgagctgcttcttctttgtccattttctcatcgtggttaatctgctgttgcctgcactctaggctgcagtatgcactaa

SEQ ID NO: 290167 - DNA, 557 bp, Cannabis indica
attaacttaaaaatgacacaataatgacctactacaaagtatacttatattcattctatttattgagaatcaaaatttcaatcttcttcactagattagccagacacacacaatatttggacataaacacatgacacaatattataactcaaactcagaaacacttagtcgaaacttgaatgaataatgccactcttttaagttttaagactgtatatgactaggcaattttggttattgtattatcattcctgctacatagttgatcatttttagatttttgatgtgaaatttcgtattgtgagctttttagagtttcttatagacttcaatgagtaatagatttatataattatacttggaataaattttcataatgttgtttggtggattcctattttgttattaggtaacataatattattattcgttaggtctgtcacaattattattaagtgagaatgaatcaatttaaaaacctttcactatattgaaaggtgagattgattttaatatgagcttagttatatttaattttattttgtatatctattatt

SEQ ID NO: 290168 - DNA, 1003 bp, Cannabis indica
cagttagctcgttccactgttaagtaagcttttattgctttagtagtttattttaatagtatgatttaagaaaagcctgttaggaagcatgttagtagcctgatagtagaataggcgcatgtttttaatttccaaataagcggcattagtaagttctctttgatcatgatctgaccatgctagctcttggttacgcaggctgttcagactagatggacgccaggcgaaataccaggagccagggcaactcggttggatcaaatgaaggtcagggagctcagtttcccctaaattctcggggctgaggtagaggtcccaggggcagggcacgtggtcggggtggatctaacccgccacaggctgcctaggctgcctaagctactgaggaagcccagaattgggaaacaggttgcagaatgcaagccagaatcgaggaacaagataatgtaatccagcgattgagacagcagggtgctcctgcagtgcctgcactagaaattccagtggcacctgaccctgctgtccaggccgaaccagtgatagcggtgaatcggagggaacctttgtatgaaaggttccgtaagcaggcacctccagtttttctgggaggtccggacgttatgaaagccgagcagtggctaacagtgattacaaagattttgaatttcatgggcgtcaccgggaatgatagagtggtctgtgccacttttcaatttcaagaagatgcattggtctggtgggacatggtgtccatgatacacgatgtcacaacaatgacctggtaaaagttctaggaacttttcaatgccaagtactacaatgaggccgtcagaagtgccaaaaggaaagagttcagccacctgacccagaaagagaatttgagcgttactcagtatacaacacagtttgaccggttggcgaggttggcctcgggaattgtgcctaccgatttcagtaaaaggaaaaatacttggatgggatgagtgcgaaaattcgacatgac

SEQ ID NO: 290169 - DNA, 538 bp, Cannabis indica
atatgcgccattcaattttataaaaaaaaaagaatgacatttataaacagatgatttataaaccattcatccaataatatactatgtaagaaaattcgaaatgaataagctaagaggaataagtaaaggataattttgatttaaaataagaatccaatgatgtcccggtaggcgagagtgaaagttattattatatgtataatcttcttgtttcatattgtaaatacttgtctaaggtgtcatcaattgatgaacaactagatgttgcatttataaatatttatctatcaagatctaacactattatgtttgtctaatggatgacaattcactaggatttgtcccattaaaaacaacaagcttagtttgaccaacaatgaagattcgaattaaactacaattaataatagaaaacaacatggttcaatataaattcacacacaattcagaagttatcaagcatttagcaaataacaaagacatgtgaaaatacaaaaataaggcacatccaaaaaaaatttccaaaggtttccaacaa

SEQ ID NO: 290170 - DNA, 795 bp, Cannabis indica
ttggtaaggtttcaacctttcccttttctaatttatggaaaatgttttaaaagatgattgttgcatgttgatttgtggtgatgctcgctgctgtggtttgttgtggtttttagaagtttagtcttgttattttatgtaggttagagctagttaatgcatcgtatttgctttgattcaagattggaagtttttagctcaaaaatatggttttcaaagaaatgtgttgaatctgttgcttgcttgctgtagatgtttgctgctattttcagaggttaaattatgcttgtttatgtagatttgggctgaattgaatgcatgttagtagtgtttgatcaagtttgagtttagaactcaaagcttgatgctttaatggtggttttggtttggttgcatgaagcttggtttttatgctttggaattgttccttagggtctaaatagcaggtctggaagttttggtattgtttgggttggatttgagctatgtgtgaatttttgaaaaattcctgcgaggaaccggaattccggttgtgcatccggaattctggatgggttttgaaaatttctagaaccggaattccagttggacaaccggtctaccggttgggtgattttcagaaaccctagttttcctcgtttttatgttatttggggtattgccatgctttttatcgatgggaaacttttagttcctagtttaagtccccgggaagtgatttagcgtatccgttatagtgttgtgatttttatggtttaggagcctgtatccgccacgcagtcgttccagtcaggttga

SEQ ID NO: 290171 - DNA, 298 bp, Cannabis indica
ctagaacaagggtaactagcatgaatttcaacctcttcaatctcatttaattcaacattttaatcacaaaaacaacaacaacaattaacagcagcaacaacaccaaaaactagcacgcaacctatccacttttctcaaaaattcaagaaaataacaagacaagtttcatgaaccataccaacaacttgatgatcaccaaatctttctaaaatgagccttaaaatccaagaaaaatggtcagcttcttgctgctccaagagggccgaatagagagagagagagagagaaggtaaaattt

SEQ ID NO: 290172 - DNA, 485 bp, Cannabis indica
cacgtagattacgcacgtagatataaatagatgtgtgagcgcaacacataggtctacgccacgtagacataaataggcatgtgagtgcaacatgcaggtctgtgtcacacagacatatatgaatggcattactgtttaaataagcatgatgaacatattgttattgttatgatttatactgtcttgctgggcttggctcacgggtgctctactgtgcaggaaagggtaaggctttagctgatcagccatgagttcaggagctgggcgaagaatgtacatgtccgagccacatcagaccaagcgggttaagggtctaccagtgatatattttgaaactctattttgtcgtttaggccggctgaaagaaaaagacttgtaataaagtttgtaaatatttttgggatcccaactgttgtaaagtttaaattattacaagttttattttcattccgtttaatacaaaagtttaaattctgcaccttttt

SEQ ID NO: 290173 - DNA, 390 bp, Cannabis indica
tcctttctgtagcagaacataataaagatctgaacctggatctctttctctccttcctttgatgcttattctccttcttgattggattctacacaatcttccacactattattgagataccacttgatttgtgtgggcactactctatcactcaaggttcgaaattcaagagaagaagaagaagagaggggcggctatggcttttctctgaaaggaacaatatgcaagtcatagtttcttgaagccaaccctttctatttatagaaagccatctaggtttaggttagaattgtatgaatataaatggtaaaatgcttgcatagtgggcgtccatgatagggataatgggcctcactttcctattttgccattttgtcattttcaatcaaa

SEQ ID NO: 290174 - DNA, 654 bp, Cannabis indica
cttaaactagaaactagaagttttcctatcgataaaaagcatgacaataccctaaacagcataaaaatgggaagaactacggttcccaatttttccccaaccggtagaccggttctacaaccggaattgcggttatgggaattcctggaacccaaccggtagaccggttgctgaaacggaattccagatcagagcaggaaacttcaaaaatacgtttctcactcaaatcaaacccaaactctttcaaagcttccagacctgctctacatacccccataaacatttccaaagcatcataacaacccagaaatcacagatatgaaaaatgccatgtgagctccaagctttgagttcaaaactcaaacttggctaaagctcacctacatgcattaaaacctgattaaaactactccaatatgcatataataacagcagaaaacaacactaaacaaatcccacatgtacaacaagctaattgaacaatccaccattaaaatcaagatttagctcaaaacttcatacttgtttaaaatcaactaaacaccaacaaaaacttgcttgaatccacatattgaaacctaattaagctacagaaaataaaattaaaacctagcaataactacagccacaaattctcaagcatgcaatactcaa

SEQ ID NO: 290175 - DNA, 496 bp, Cannabis indica
acccagactgggatcgaaattctggacctagatctggactgagatcctgacccaaacccaatttttgaccagcactcaggaccacaacatggttcttgacctgaacctagacccagatcggggtccagacttggacacaaacccagacacagactcgaacccgaactcaaacctgcacctagaataagaccgaaagctagacccggacccgaacccaaactcgaacccagaccaggatcagaatcaagaacttagaccctaaactaactccatacacagatcgagattggaacatgggactcgcacccaaccttgacaagcacccaggacgcgaacccacaaccagagcctgatctggacctagacttaaatctggacccaaacccaaactcagacaaggactcgaactccgccccgaactcatacaaaaactcaaactcagaatcgcaaatggaactagcaccgaactaggactaggaccaggacaaggacctaa

SEQ ID NO: 290176 - DNA, 610 bp, Cannabis indica
gaaagtcagaagtccatcatcacatgacatcaactttatctcatccataacggccttcccttttccagcatagggatgggatggccgaacaggtgaaatgggctcccttatgcgaatggcatgttcaatgggcctgggcgtggccgggagtttcttcttcctcctcaaaggagccacctgctcagcctcagcctcagcctcagcttcatcttcaggattcatagactcctgagcatactgctttgcccgagcacctcccttcaacttagcctctcgcttaagttgaatgagctcatcctccttatgagctcattcaggccgagcagcagcagatttccccttcttccccatcacggacttagaagaaaagtcctctgggtaaagcccgtactgcaccagattttcgtcggaggtcaactagatgatatccctgtcttccgccgacagtcgggcaagtttttgagccctatccctaagggtaagggtgaggggaggacggtgatatgttggaatctactgaaatcgagtccgggtgatgttcggatccttcaccatgaagtactcatcaacaaaatgccctattttgctgatggccttgtggtccatcccg

SEQ ID NO: 290177 - DNA, 462 bp, Cannabis indica
gactgtaataacatattatacaaaaaattaaagtacaatttttcataagtgcccaaaatagaataataaaatcggaactgttgggagaaaagtaataaataatgtccttatatttcaatttttttttcatagggtgcagttctataatatttttttaatcagtttttgtattattttaattagtaaagtaaaaatatttttagaaaatatgttctataaaattatttttacttttaatttaaaaaataataatcaaaatttaaaaaaaaaatcaccttcaaaaatttttaaacaattttttaattataatttattttatttctttcatcaatatttagaacccgactccgaccctgatcccgtaccccaaaactcgaccccgaacccgacacctgaccccgaccttgcatatccccaacccttgacccttgaccctttacccaaattcgttaccagacccaa

SEQ ID NO: 290178 - DNA, 518 bp, Cannabis indica
gcagctcagtcagcgcgcggaggaaggcgaggtccgatacgtgcctctaacacggcatcaagcttcttcttcttttcccgaaatttggcaatcatttcctcgggtttgggataaaaagtaagcttgatattttggtcgttggtggaccaagccatgtagactccatcgtcaaagcgcttcggacaccgggcgcaggaaacaggagagaggagctcggctcttttggccttcttgatggattgttctttgaagtccctaagctccttcagctccgcagctagagcggccttggactctatgttcgcctggtgagtttcctctaaagatctcaccttggcgaccatttcatccaaagcctccctggcctcccggaggtctcgcctggccttatcagcagcctcgctttgagccctcagttcctcctggtgttgggcctccatcctgtccctccgctgggcctcgtcccggatcatggcttccgcctgagcctccctccgtttggcctcctcttccttggc

SEQ ID NO: 290179 - DNA, 531 bp, Cannabis indica
gtgtaaaaaccgtggaaatcatgaaaactagtcaatttaattagtttttaggagtttaaaagaaaaaaaaaaaaatctttaatctttaaccctgcaggagaactacatgtcgtacaacatgcaggaagcacacgggccgcgacatgctaaaacacgtgccgcggcatgccctttttagaagatgcctgcaaagagacacgggccgcggcatgctccaccctttattaagcatgccgcggcacgctaagcccaaatcaggggaaaagagcttcgtccccagtgaaaatttcaaattttcatttttcttctttttccagcaacgaaccagccacgagaaacaccttaaaaatcctattttttgccatttttttttcccccaaaacaccaattttgttcaccaatcattatcattatcatccacaaccaaaacccaaccaccagtttcagagaagctcattggaaattcggggtgcaaccagattttattcttcaagtaagtttttttttcttcttcataacagtggtgtttta

SEQ ID NO: 290180 - DNA, 766 bp, Cannabis indica
tccagaagatccttatgaaagagccaaagtacggttttgggctaattatattcaacaacaggtaagacatacttcttttctcagctaatcacactgccatatgtgtttttctatgcataataaatgttttgtttacagatgatcgagagcaagtctcgagtaataatgagtgatggggaaacacaagtgaaagaatccaaagaatacatagagaaacagaaagtactggaggaaggagtcaaggatttcttcaaaggagatggtccttacacaaatggccagaatttaggggtgctggacattttgacagttgcaacattgggtttctacgaagttcaagaacaagtatttggtgtgaaattcatggacccagaaatgacaccgtttctctactcatgggtcacagcagtgaacgaacatccggtggtgaaagaggtgtcacctcctcttgacaagatcatgggattccttttgtatttcaaacagaataggcctatatattcaaacaaatgaagacatacacatgtgtgtgaaagtctggtagaagtggttgtgtgtggtaatgaaggcattactggggtaatttgtctaatacctcttttgcttaaccacccaaattgcagatgaattggcctggttcggtttaatgtaaaaatacataaataaaaattgtttggactcactaaatggaggaaatgtttccaaagtgaaaaatggaatatgaatgcatgtttcacctgcaaggtttcagtcgacaaaagtccct

SEQ ID NO: 290181 - DNA, 542 bp, Cannabis indica
acttaaaaaatgcggcttaccagcagcgaactgcaagatactttaactctaaggtaaaagtaaaagtcctgcgagcaggagacttggtccttagaagagtaatgccaaataccaagaacccaacgcatggggtctttggagataattgggaaggaccatatctcatcgcggaaaaaataggtgacgccacataccgactcgcagcactcgatggtactgcgattccacgagcttggaatggcgaaagtttaaaattatattatcaatagtactcgcattattaaactatgttcgctcttgtacttatacttagacattttttaaataaaaaaaaaatcctaagtatagggggtatatatgccataatgtactattgattatataaaggaaatgcctcatatttgttaattcttcaagtttaaacaaattttgtcaagtcttgtaagattttctacttattacaccaagctgtaattaaagtcgaatatatatatatataaaaaaacgcgagtacccgtgtactgcgaaaatgttaaacatta

SEQ ID NO: 290182 - DNA, 686 bp, Cannabis indica
tggttcttcgtctgggttctggtcctagtctgagtcccagatctagacactgactactggtcttatccaggccccgttaccaaaatcccaagtcaaaatctggataactttcacgggtctcggtctgtatctggttcaggtcccaagtcccatttctgagtttgggttcgggatcgagattggggtggggttctaggtcctgaccctagttctgtgtccctagtttggttccatgtttgggtctgagttctagttcgtgttcgggtcccgagtcgaggtttgggttgggatccgggtcgggctcccaattcgggtctaggtcggatttggagtccgggtcctggtccggttacggttctggatctacgtataatttcaattatgattccaattccatgtcctagttccagtcccggtcaatttctggttttggttccaatttttggtcacagggtacgggttcgggtccacatttgggtttgggactgggttcaggtttggatgtgggttcgggtccttgtcagtgttcgggtccagggctgggccccaaatccagacaccgactacgagttttgtccaagccctgggtccagatctggatcccaatctcaggtcccagtctggttccatttctggtgccgggtcacgagctgcactttaggttcaagttcgggtctgggtcgggt

SEQ ID NO: 290183 - DNA, 514 bp, Cannabis indica
cccgaacccaaactcagaccaggactcgaactccgacccgaactcaaacccatactcgaactcagaatcgcaaaaggaactagaaccgaactaggactaggaccaggacaaggaactaaagccaagcccgaacccagatcaaaacccagacagaggcctaaacccgaaccgagactaggactcgaacctgaacctagaccaggtcccaaacccacagaataaccgtgacctggacccagaatcaggatagggaccttggaaacagaactaggaccgggacctagtacctgaccctgacccaaactttaacctaggacccagctcgtgacccagaacgagaaatggaaccagactgggactcgagattgggatccagatctggacctagggcttggacaaaacctgttgtcggtgtctagatttgggacccagccctggacccgaaccctgacaaggacccaaacccacacccggacctgaacccagtcccaaacccaaaagtggacccgaaccc

SEQ ID NO: 290184 - DNA, 822 bp, Cannabis indica
gaaatgattatttggaatgcaaaaggctgttttgggtcgatcatctggtttgatgcctaattgccaaaatcctgcttttaggtcaaattttgaaaaaatatgggctttggataaactggcaaacaatgaattcttatttggtattgggaatttatcatctgctaagaactcattcaggggcttgtaatttatgaccaacctttgctttcctcgagcttgctctgatcgattattgacataaaatgcatgacatgcccatggagaggaagttgactctattaaaccctgctgctctagctctttgcactcattggacgccatatgttggtgttctggattcatgcctgggtgactagcctttgtagggttgatatcttcattaagcttaaaaggaaggcttatgaagaactgttgatttttccaaagaggatggtcacatttcttcaggaattctgcatgattattggcacatgagacttcgatgagctctttccttatctgatgaaatgggtcatggggcattaagaaatagtttggtattgtttcccatggagcaaaatgtcgtttgtaaccaagtccactagggagaatacgcaaacccttcttctttgtataaagatcgaatccaacaattaagtcttttccgggcaattttgatccaatgactctgtgagtaacagaacaccctgggaagaactgcaaccgaatcggtttgctgatgagttctgtgcaaaaaatacctccatttgcagcatggaagtattgtttctctttcttccaatattctttcggaagaatatcagggttcattattgtgtatga

SEQ ID NO: 290185 - DNA, 515 bp, Cannabis indica
ctacaatatacataatactgaaaaaaaaataaaaactaaaagaattacttttaaattaacccaaaactaattatatatatatatatatatatttatataaagaatacataaaaatgggtaggccgaatttttttaagagaatatagaaaaagagagtagtgtagtattgcaatgtatacatttctatggtagcttatttatgatgtactaaatgtacatgtatttatatttggaattataatttatatcccagttgttaaacttttaaatttaattattgtatttttttttatataaattaattattgagtttttcaaaaggagttattgattatcatggtaggtcttatttcccttaaattaattttgtatttgttccccgatttaattggatcggacccctttaagcaaaacaaaataataataagggttatttgcggcataacctcctaaagtggtcaggtatttgcaaataatccccaattctaaaattttggtggtaaaacctcttaaac

SEQ ID NO: 290186 - DNA, 665 bp, Cannabis indica
tattttattttattaccaaaaacctcactatttttggaactaggttagagttgtaatagcttagattaaataagtattttcttcgatctcacgcaatttccatgggttcgacctcgttctttacaatctccatactacaaataaaaattcgtgcgcttgcgagttgataaatgtaaaacataccgcttttagtacacaacaagattttggcattgttgtcgagaaactgcaagaagaagaaactactttaatccagattggcataattcttctactagttatatcttttatatatatctattacatattattaactattataataattagtatatatacatttacatataaaaaagtgttacttttaagaaaataaaaaaaaaagagaaaatttttataaataattattattatataagttaattattattatattatattatacatattacattacctaataataaagtaacttttatatatatatatataaattagtatatcatcattattattactatcacaccaatataaaattacttttgtaatttaatatattataattataaataattattattattattattatattatacatattactagtcataaagtaacctttatatatatataaattagtatatcatcattattattattat

SEQ ID NO: 290187 - DNA, 524 bp, Cannabis indica
tcctttagtggacttagtaatatttttattcagcttttattattgatttgtggctgaggaaattaaataaagactatgttattcattttaccaaaatttaaagaaaaaggaaatatttcaaaatcacccatttttctctcaaactctctctctttcggcccctctttgagcaacaaagatttggtattttccttggtaattcaagctggttttaacaaagatttagtgatctcaagttgttggtaagattattgtagcttcctctttgttttcttgagttttaagaaaaagatgatagttgcatgcttggtaaattatgatgttgttgctgctgtgtttatgtcatgtttatgcagcttaaatatgtttaattaagtggattgaaataggttttgatgcatgctagttgattttgttcaagtgtggaattttgaactcaaaacttaggattttttatggtgaaatgataaatcagttgctattcttgttgtagttgattgctattgttttcagaggcttaatta

SEQ ID NO: 290188 - DNA, 304 bp, Cannabis indica
acccttgttagcttgctttatgttgctcggtccttctttctatgttgagtcgcaccctctcatggatttgcttcaaaaattctgctttctttttgccatctacattcaaatgctcagaaataggtaaaggtgatagatctaaaggagtgaaaggattaaaaccataaacaatttcaaatggtgaaaatttagtagcagaatacatagaacgattgtaagcaaattcaacatgtggtaaacaatcctcctaagtcttaatatttttacttatgatagccctaataaaagtggataaagttctatt

SEQ ID NO: 290189 - DNA, 800 bp, Cannabis indica
aactttatgcatgtgattatttatattgtgaataaaatgcaagcaaacattcacataataaagtttacacttaaaagtgtgaggcattaaaagcaaagttgccgtccaaccttgcagatttgctttacaaaaaaaagtgccactaggggcaaaaccattgtctcggccaaagggccatttcctaaaagaaaaaaggcagataaacaaaccaagtctacatgctgggagacttggaaagatcttcttcttcttcctcgacctcgccgtcttcttcctccatcttggtcttctcgcaaagagctagagtttcctcttccttctcctccaagaacctagtatccatgtgttagggttcaaaagccaggcccaatatacagcgtgaaaaccaactttatcgcaccgttctacggtctcgatttctttcttagcaagcttctcctcaaactcatcggcttggaatttgatggtcttctcggcctcctccttcgtcttctcggcttcctcttttgccttcttgacttccttctttgctttctctgcttcctctttcgctttctcggcttcttgcttgaggcaggtaatctcctgttgggcattgtctcgttgctcgcatgcaaccttgcattgggatactaatttgtgagtcttgccctccaaatactcgagccgctcagagagtagtcgattggaagcaaaagaaccaaaagaaatctggagaattgcaaacagatgagtataaaagaggtatgaaaagataatataattatagtaacaaagtcgatattgttgggttttgtgcc

SEQ ID NO: 290190 - DNA, 612 bp, Cannabis indica
atactaatctttagtggtaattttcctccctgtggatacgacatatagcccgtttactaccgcgaccgcagtgtaactaattgggcgacatcaatttttggcgccgttgccggggaggtttctgcgctacaagaggttagtatagtagtttatttttttttttattatctttcattatttgtttctctctttgtttgtttattaaaaaaaaaaaaatagttaatatagtgtatgtatattttttttaattagttttaaaaaaaaaccatatgttgcatatataatttggatttttttttctttattcgatgcacttatcttgaacaaaaaaaatagcgttagctttttttttcgttagttttttttttattttagtattactacaatttatataattaggattagtttttttttatttatcattattctgtataatttttttttgtttagtaaaaaaaaataatcatctagttaattttatatatatattattttttttatatcatatatatatatattatttgttttagtttttattacactttattattttttttagaacactttcagatttaggattagactttttttttctctttattattttaattt

SEQ ID NO: 290191 - DNA, 617 bp, Cannabis indica
accaacgctcctgcaacttttatggatctgatgaatagggtattcaaggatttcctcgatatttgtgttattatgtttatgaacgacatccgtatgcactctcaatcagaagaggagcatgagcaacatctccaaatgattctgcaatggcttcgagaacataagttatacgccaaatgcaagaagtgcaaattttggctatctcaggtgtccttcctttggcacattattagcaaagacgggattaaggtggatttaggaaagatagaatctgtcagggattggtcgagaccaaaaatcgttacagaagttagaagcttcttgggtctggctggttattatcgtcggttcattgaagggttttccaaaatttcaaaacccttaaccgagctcactaaaaagaatcagcgatttgtgtggacagataagtgtgaagcaaattttcaggagctgaaatagagattaatcacacctctagtgttatccctaccttttgataaagagaagttcgtggcttattgtgatgcatccagactgggtctggggtgtgtattgatgcaggtcgattcggttattgcctatgcctcccgttagttgaaagattatgaacaacggta

SEQ ID NO: 290192 - DNA, 742 bp, Cannabis indica
atccaaacacatgaaagtgacttacatttggtttcttacctttccagatttcatatggtgttttgtgagtacctggacgtaagaatactctgttgatggtatagcaagcagtgttaatggcttcggcccaaagacgctttgtgagcttcttgctattcaacattactctagccatttctgttagagtacgattctttctttcaaccactccattttgttgaggagttttaggagcagaaaattcatgagaaataccgttagctttacaaaattcatcatatatggtattttcaaattccttaccatgatcactcctaatcctaacaattttaccaatgttacaatctttttcaactcgtaatttcaaacacaaagattggaaagcttcaaaagtatcagatttttctctcaaaaaatccacccatgaaaatcgagaaaaatcatcaacacaaacaaaaatatacctcttaccatttaagctttctacctggattggacccattaagtccatgtgcaagagttcgagaactctagaagtattcacatccgggacactcttgtgagaaattttcagttgcttacctaactggcatggtccacattttcccaatgactctttacctaatttaggtaatcctcgaacaatccctgaaacagacaattttttcagattttaaaattgaaatgtgaccaaagtttttctaatgccatagatcagtaacattttcaatgacagaatgac

SEQ ID NO: 290193 - DNA, 601 bp, Cannabis indica
atttttaaatctctccccccaaactaaatatgacattgtccccaatgtatacaataaaatgcagagagaagagatttacctgagaccctctcagaaagggttgggtggcggcggctgatcatatgggtagaaccgaggaggttacaccaaataattcgggtcatcaatcccgatgttcattctattgatgagagagttaagttgttgaacttgtccctcatcatggatactgctttgtaccatgtagttttgcatgtggttgttctgctgaattatataactcagatgtgcatgagtgtattgcatcattggatcgataggcccaagcaattgtgggggctgctcctcttcttgttcaacactaggctctcgttgccgcctgcgtccttgcggtgcatcgggtggaggctggccataaggatgtggctcttttagcctgttgacaaatgtgatgtccatcttgcgaagtggcaacaccatgttgtcatactccaattggggaaacttgatatgcccccgcagagttctgttataaccacccgccaaaccaaaccacctcccgtggctccttgtacatctggtcaatgctatgccggatgac

SEQ ID NO: 290194 - DNA, 532 bp, Cannabis indica
ctgaagaagagttaccacagtacatacaagtccttcgcgagaacaaagatgtatttgcttggttataccgagacatgccggggttgaaccgaaaggttgctgtgcacaggttggcagtatcaaaagacgctacccctgttaaacaatctcaaagaaggattcgaccagaattacttcccaaagtcgaggcagaaattgacaagttaagagactgccggtttattcgggaagttcagtatcctacctggcttgcaaacatcgtcatagtgatgaagaaaaatgggcaactccgcatatgcgtggattatcgagatcttaatcgggcttgcccaaaagatgaattcccactccccatcactgagttattgatagacgctaccactggttttgatgccttatcattcatggatggattttctgggtacaaccaaatcaaaatggcacacgaggacgaagagctcactgcttttcggacaccaaaggcatattttgttatacagttatgccatttggcctcaagaatgcaggggca

SEQ ID NO: 290195 - DNA, 525 bp, Cannabis indica
tcatcaaaattgtacaggagaggtggctcattgagggaaacaaactcctcattataaatgagtggtccaccctcatcctcacgagcgtatgctgtggaacatacgcctgatcagccacctctgcttctcctcttgttggcaatgttttctctattagggatttgattttggcttttaatttctcaatctccctctatttctgagccacgtatcagaaacttccctcttcttcctgtcaaacagtttagatgccttggcaaggaacctgcaaatcaataaataaaattatctatgatttattttgtataactaagaaaacaatatttcttagttactagcatacccaacaacactgacatgtccaggatgctctggtgtcctaagggccttcgtcaggatgtcattttagccatggacctgaacttgtccctgagtaacttgctcctctaattgagcctaatgcacatattcaagcaattagtatatgatttccttttcatcactaactagggagaaagattgtac

SEQ ID NO: 290196 - DNA, 589 bp, Cannabis indica
aatctatgagtaagacgaggtcttccaaaattactcccaatcggatctgcgagagcaattggaagaaacctgacgttcgccaacatcttggtccaaagcaagaggatcccatccaattgtggataaacgagctggaagacaagttcaggagatatcaagtgggggaactagagaaacaatctggatacgactcagacgaggagcttgagccatatcatccagatttaatgaataccccttttccttcaggattcaaaaacccgcatgtcacgtcatatgacggaaccactgatccagtctcgcatttgaataactttaacacaataatgcgagcgagtaatgtgacaattaatttatgttgtattctgttcccaacctcgcttgttggagcagtgagtagctggtttaacaagtttactcatcattcaataacctcctaggagcaactatctaaggatttcaagaaacagttccacgctgctatggatagacgacccgaagcagcctcgctaacaaatataaagcagcagcccggtgagacacttaaggcgtacataagtcattttagcacggctgcggctagggttag

SEQ ID NO: 290197 - DNA, 739 bp, Cannabis indica
ctctattagactctcccctacggtgactacttaaagataaattttggaagtatgaaacaatggtggaagctcataaaataagaataacctcgacgctcgcctactgggacaacgttagattattattttgatcgaataaaaggttgctagaatggtatccattttagatgagccgataactctattcaacgaatgatatctttgactctcgcctactaggacactgtatcagtttgttggaaatcttagaaattatttaagatatgatagttttgtattttcacacgtctttgttacttgctaaatgcttaataatttatgaattgtgtgtgaatttatattaaactatggtttttttttgctattaatcgtagttgtaaatttcctgtaaaataagaataactttgactctcgcctactgggacattgttggattcttattttaatcgaaattatcctaatttttcctcttagtttattcatttcgaattttcttacatagtatatcattgaatgaatggtttataaatcatctgcttatgatgtcactcgaacttctcttatgaaattgaatggcgcagatgactatattcccaacattctatcccgaaaagatataaatcctcgatcttggaaatctcctacttgtatatgcttactataggcaatgtaagctagaataattactcattgtacatttggtataaatttaagtctttgactttaaattttagattcc

SEQ ID NO: 290198 - DNA, 449 bp, Cannabis indica
actaagcaatggtttaattgtgaagaaaagagattttggggttaattggttaattaagagactttgcatggtctaattaataaatagttttggcatttataggattgaattggaaaatatagtattattgaaaaaagaataagcggttgaaataaagtggcaaaattataactagagaatggtcattttaagtggccggctttagtgtgaatttttgcccaatattttattcttttttaatccatataattcagccctaagccctaactaaaacactataaaaggaacatgatgcccttactcatccacttgatgccttcaaccaaatcaaacctagttttctctgtcaaacaactagtacatgagagagttccttctatagtgatttcagcctccttcattgttcttcaccgtattcgaaccttaagtgaaagagtgacatgcccaca

SEQ ID NO: 290199 - DNA, 575 bp, Cannabis indica
aaaggtagaacccccactctctttctcaggacccgacatagggagagtagtagccccaccaacaccagaagactctcgggtttcttgtaaaaatttaactgctccttcagctcgaagagccttatcaaccatttctgcataggttgtggtatcacttgttgtaataaccaagtcatgtctgattttggcattcagcccagccaaatacttttctttcttgctgaaatctgttggtacaattccggaggccaacttggccaagcggtcaaacttggtagtatactcggtcactgacatactctcaccttgtaccaactcaataaattccttccgctttgcactgcggactgcctcgttgtaatacttggcattaaacaattctcgaaactcttcccaggtcattctagttacatctctggtgagggataccatttcccaccagatcagggcatcctcttgaaattgaaatgtggcacacgccaccctatcatttccagctactcccataaaattcaatattttctcaataacggtcaaccactgctcagcttttaccacatcagggcctcccagaa

SEQ ID NO: 290200 - DNA, 639 bp, Cannabis indica
aaacataaacttggacctagatagggatcaagatacgaacctggactcggaccaagacccagacttggatcaaaatgccgcaactagatctagaccgagatcctgaccaagacccaaacttggacctagacccgaacctagacccagatcagggtccagacctagacacaaactcggacacagactcggacccgaacttaaacacctacacctagaatcaaacccaaagctagacccggattcggacccgaactcgaacccacaccaggatcagaaccaaggacttagacccagaactaaatcaagactcaaattgggattggaacttgggactcaaacccaatctagaccaagacctaggacgcgaaccaacaaccggagcctgatctggacctagactgaaattcggacccgaacccaaactgagaccaggactcaaactccaacccgaactaaaacacaaaatcgaactcacaatcgcaaatggaacaagaaccaaacgaggattaggactaggacaaggacctaaacccaaacccaaacccagattaaaacctagacagagtcctaaacccgaaccgagaatacgactcgaacctgaacctaaaccgggacccaaacccacataataaccgagac

SEQ ID NO: 290201 - DNA, 117 bp, Cannabis indica
agatcatgataatactctgtgacagaaaggatacaaggattagagatctgaacggaaggatacttgtgagtagatttaagatcctgggaaaataatttccaacaactgggctcagag

SEQ ID NO: 290202 - DNA, 502 bp, Cannabis indica
tcgatcctttcattgtatatattttcgatataattacagtttattttccgcatttcatatcgtttgtatatgatatattacatatactacattatagtctaacagttggtatcagaacggtttaatctctgccttgattatatttgagtttcatatatatatacatatatacactgttgatatatatatatatatatatatttgttttggttcgttcgtgtatatatatatactcatattcatattattccgattatatatatattttcatacgcatatatatatatacatttttattcatacggtttatatatatattatatatagttatacgtacggtatatatatatattatttttttatttttggttatatttacatatatgtatatatgttatatatattgtatattatatatatgtttaatcgcataataatattcataatattctattttaattaatgtgatatatacatgcatatatatatataacataaagtt

SEQ ID NO: 290203 - DNA, 589 bp, Cannabis indica
agcacatttgaattcggaaaacaggtaagaactgtatatagcgtgttatatgagatatatgcatgatgtatgtatgattgtatatgttttgggtgatatcatagcggcacaacaattgtgtcggttcgacagtacaggcatcgtactggttaagagtgatattcaccccagagagtattaattggcgctatcatagcggcacaacaattgtgtcggttcagcagtacgggcacagtactggttaagagtgatatcatggccaattgtactcttgggtgctattgatgctatcatggcggtacgaacatagtgccggtcccgcagtgcgatcatagtgctggtagtgggtgatatcatggtcaatagcaccaaccattaagaacgttcttaatcagttgttaagccttgtaaataggtgtatgggcgcctagttacaagtcgaaagttgtatgatatgttatatgcttttcttactgagtctgttgactcacagttctactttcatgtgtaggtaaaggaaaggcgataactgaactggagtgaacctgagctcggatgggattgtacatgtcaaagcagcgcgacctgg

SEQ ID NO: 290204 - DNA, 439 bp, Cannabis indica
aaattagttaattaccaaattatatgccttgtcaatagttgttatgtatcgtgtttttaaattagtcgtaccgtattgtatttatttatttattttttcgtgttatgtcgtattaattaacagtatcatattatatcgggcttaaatttatatttttgtatcaagttgtgttagtggaaaatgctcaaattgtattgatttttacgtacttaaaaatgggtgaggacatcacataggtcatgttgtgaattattctcttctctttttttttttttttataaatcaaaaattgttctttctttatagtatgtaataattaagttgacaaaataaaaggactgaacaaataatttggagaagttaaaaccagaaatgaatttatatatatatatatatactagatagagttacgtggcaagtcacgtaaatattagggttt

SEQ ID NO: 290205 - DNA, 556 bp, Cannabis indica
gtagcgtgccttagcattagggcgttacaggctggctgctagggctagagtaaaatgcagaaataaaatctcattttgcttaatatttcccttttaatgaaccataacccaaaatgcacaattaccacattgcccttagggccaaattcccattttcaagcatataagggtaaaaatataattatcacatttcatacacaaataataagtttcagatttcttatataaaaataaaataccaattaaacatcccaaaattgtatttcgaccccgaaatacccggttgtgactataccgcgccaacccttcagaacacacctgaaaaaggacacaccagatatactatataataatatagttcataagcacataaataaattaaattcatagttttacccttctggggtcaaaattactaaaatgcccctagctcaccaacggggtcttaacatgtcatttctcaaattaattcgcatataataaattatataataatataattctacaataatactcaattaactagttaggctttgctaatccattttcttaattc

SEQ ID NO: 290206 - DNA, 505 bp, Cannabis indica
aatgaaggacttgggagcagtcaaagaaaatctttgggaattgaagtcatgaggaacaagcaagaaggaaagatggtgctaactcaaagaagctacattgagaaggtgatcaagaagtttaacttagattcatctaaggccactgcagttccacttgcagggcacttcaagttgtctaatgagtactgccctaaaactgaaactgaaagggaaaatatgagaggtgtaccatatgctatggctgttggatgtctaatgtatatcatggtcagtactagacctgatatagcacatgctctaagtgttttgagtaggtttatggcaaaccctgggttagagcattggaatgctgtaaagtggctgattagatacttgaaagggacaatcaagtatggtctgatctatcagaaagacacatctgatgtgaggttagaaggctatgttgatgcagattatgcatcaaatagggacaatagaaggagcaccactgcctatgtattcatgg

SEQ ID NO: 290207 - DNA, 589 bp, Cannabis indica
gacttactccacgactttatttcttgcctttctcgaattcaacatacatgctttgttaaggtgagcatgaacaccttatgtttcgctcgacaactgtcaacacctaaacaatttttatatccaaaaccagtgggtgttaaggatagattccttccactaggtagtagggccaacgaattcttaaaaaaccttccatgtccattcagacaatgaaagcccctacagtgcatacttttgcgtattctaaacaatcctccatacttccgtgtcgattccaagttgttgcctcaatggataaggtgatctcgtactagatcaatctagtactttcgcatattgtgatcaatcatccatgctttgttaaggtgagcatgaacaccatatgtcgcgctaagaatttttatgctttgttaaggataggtttcttctactagctagtagggccagcgaattcttagagaaccttccatgtccattcgaacattgaaagcccatacagtgcatacttttgcgtattttgatccatccaccatactttcgtgtccattccattgttccatataaccaagttgttgcatcaatggtcatg

SEQ ID NO: 290208 - DNA, 619 bp, Cannabis indica
taactcgctagggttgttgattataggggtaccagtaatggaccctccgtaatcatctagaccacaaggcgagcaagtagagcctggggctgcccaaaccaatccactggcaccaccccacctccgcagaattcgagggataatatgggggttagtaatgctaatccttcaactgactggcagcaaatgtttcatgaaatgcgaagtgtcatacttcgtcaggaagaagagttgcgacgattaaggcaaccggctgcccctgttgatcaagtgttaccaccagcacttgtgccaatggtgggtaactaggggttcgttttgctgcatagagatcggtatttgagcggtttgtgaagctgcaacctccgacttttctaggacgtattgatataataaaggtcgagcagtggatgagcactattacccgtattctcgataatatgggggtgacaggaactgagcaagtgaattgtgcagcctttatgctacaagaccatacccgcgtctggtgggacattgtgggtcaaactcgggatgtcagtgtaatgacctgggaagatttaaaagttgtttgaggaaaagttttacaacatcgttgtgagaacttcacacgtggagg

SEQ ID NO: 290209 - DNA, 565 bp, Cannabis indica
cttcggcaagtcctgcaaaagccagagacgtcctgaaagctcctcaaatgggcaatggagttaagtcaatttaacttgcactacattccccgcatttccataaagggtcaagcgctagcagacttcatcaccgagtgtaatgaagccgaagcaactgcgaacataccgacaccatcggtcccagcatggaaagtatttgtggatggagcctccaacgagaatggatacggagcgggggttgcaatgatatctccaagtggactttgactccaagcagccctacggttcgacttttcggcttcaaacaatgaggccgaatacgaagccttgatagcggggctaatactagcaaagaccgtggaggctaaaagagtagaagtctacaacgactaccaactagtagtgaaccaggtgtcgggagagtatcagacgcgcggagaaagaatggccgcgtacgtagcgatattccgggaactactccacgagttcacagactataaggtagaaagaatccccagagaaaagaacgctcacgcggactgtctggctaagttagcttcagaca

SEQ ID NO: 290210 - DNA, 577 bp, Cannabis indica
agatacgcacctctatgtcaaagcacaacacggataatttgagcttatggccgagtggaccttaaatttaaaatatgagcacgacataacacgaaccatataattatacggatcgggctgaccttaatctatatttgaaatagactttttaaaatatgggtcggatcgggctacccgtatgtacaactcaatatctatctaattacaattcaatttagacattgatatgttgatttgtcaatttcacaaagaccacaaaaaccagaagtgaaggcaatggggccaatatcttaagcattgattgactcctccaatggctcaattccaacataatataattctgtttaaagtagtagtagagaagaagaaaaatcctcatcctaattatgattctatttctgtcatacacctttaataattcatctccatatcattctattttatgttcaatttctcattgatcgattccattcctacgtcgacatggtatgtggctcatataaaaaccttagacaacaaaaattttatttttgtttacaatttttcaatacatatgtatctatctatatatatatat

SEQ ID NO: 290211 - DNA, 692 bp, Cannabis indica
tatggacaagtgaatgttgttttctcttggtcttccggagctatggaaatttgattatagccagaatacccatcaaggaaacaatagaattcttttcccgccaaacgatcaagcatttgatcaataaatggcagcgggaaatgatcttttcgcgtggccttggaacacattgaactgggacttacccaagaactgtctgaaatggggtaaacgatgccaaagtctaaccacttgattacctcctttctaaccacttccttcatgatggggtttagccgtcgctgctgctctacagaatggttgcacaaatcttccaacagaatcttatgcatgcaaatcgaaggacttatacccttgatgtccgccatggtccaaccaatggctcttttgtatttcttcaagacatcaactaacaagcattctctttgggcacccaacatagcagaaataattaccggcaaggtctctccatctcccaaataaacatacttcaagtgactaggcaacggcttcaactccaactcgggtggttcttgaatggaaggcttaggaggcttgaaattgttctctgacaactccaaagattcaaatggcctcctaaacttagtgaaaggctgctttgactctacccaagtaactttggtttcttcatcttcacttaaagcttcaagctcttcaagagaacttatcat

SEQ ID NO: 290212 - DNA, 688 bp, Cannabis indica
actcttttttacatttatcaaacgaatttcaaatacaaaagtcattattattagtgccatgcaatttaatagacagcaagaaaaagcaaaatatcatcataatggaaagaaaagaacgaagaacgaaaaagaaaacatatattctaacaatttaatctgacaacaaagtaaaaaagaaaagaaaaaaaagaatgtagttattcatcctataaacattaacaaatttttcaaaaatttctaaattgataacagaacaaaaaaaagaaagaatgtggactaacataagctttgatttgatcagaggaagtttttgcttgtttcagagtgaggatttggttttttagatcttatatttataggcagttttcctctttttttgtgaaaaaatattcgtttcctatttgtttgttacttattattattttttttatctttttttaacaaatatattattaatgaaaactataacagtttaaaagaaataataaataaaagatatttcctattttaattaaatttgaaattaataaaatattttcaaaaaatttaattagttaatatttatccaactatccgaacctatattatgtttactcaaaaaaaaaaaaaaaccctacaattatatctttacgaaagaaaaaaaacaatataatatgaaaataactttaaattcatgtatatgcataag

SEQ ID NO: 290213 - DNA, 833 bp, Cannabis indica
ttgggaattgcctgatgacgtaaagaacatgagagttggagtatctattgagaaacagccaatagggcgacccaagaagcaaaaggttagaagaattaagtcaaatcgaactgcttgtaatggtgaaaggattgtgataccacgaaattgtagcaagtatggtgccaaggggcacaacaacagaaatacttacacctaccgaggttaaaaatgaatgttgaatttagatgtattgtgatgtgttgtactattatctattgttattgaattcatgttggactttgttaaacattaaaatttgtggtgttttattttttgataattattataatttgtagcatgaacaggttattttactaattgcaaaaatccctttgtaaaaaaaccactagtctgatgcaggtctgatgctagtctgatgggggctcgatgcttgcatgatgtatatatttagcagaacaaacagtgatggcccgatgggttctgatgttatctgatgccaccatcaaacactatcaagtactatcggatcccatcgaatccaattgtcccatacagagacctaaactaatacaccaccaatcaaaaacctaatcgacccactgtattgtccacaatcgcccttgtacagaaacatatgtttaaaacataagaattcaaaaaatttaagctaaattattttgaacataatcataccaataaaaaaacctaagttacattgttatctccataaatacatatgtgtagataaatatatataagaaaaaaaaaacaataagaagttcatgctaaattttggtagaacaaatctacacaccaaccgctctctaaat

SEQ ID NO: 290214 - DNA, 550 bp, Cannabis indica
aaatgccctattttgctgatggccttgtcgtccgtaccgctcaaccacttgaagccttgctgagagaagtaaaaatacctcgacctgccttgctggggggtagacttcaggtcgaagaactaggcgacctcgtggggggaaggagcatcccatccctgggaagcgtagaggatgaagagagcggacaaatacttgttgccttttggagtaatctgggccgcgcagaggccaaagaagtctgccacatccctgaagtacttatgcaagggcatcagcgccccttgctggctgtgagcccccgaccaggcgcacattcccttatcagggtttaaggcgcgattgtcgtgggcgggaatgtagcagtccagttcgcctaggtacccgtcctggtcgagagtgcggaggcgtgcctccgaaatcttggacgaaggatgtaacgccctaaataattaggcacgctacccaagttatttacgaaaccctaatcccgtaaacgggattactaatcaaaatagcgcagatttaaacttttgcaataaacggaatgaaa

SEQ ID NO: 290215 - DNA, 509 bp, Cannabis indica
tttaaatgcccgaggacctgaaatcaaagaatcaagcgtagtatagccctaaaactagaaacaaagagtgaaaactaaccgaaaatacgacccgaaacttagactaattttagcctaacaaattcccccaaactagattcttactcgccctcgagtaagataaatactactaactacgctataagataatcacaatactacttctcatgtgctgttctcttccattgctcaaactagaatttcaattccaccaactctaacaattaatttagatgctcagtttgtcacatactgcacaaacacaagatgacttcacaatcaaaataatgttataatggtttgactctatccaaccattctacaacccgataactcatatgcttgcatgcttacctctctccactaatgttgacaacatcctttcggaatcaatagggctttttgaggtttagagagtatggcttagatatttggaaaaggaaaaaaaacaattttggctaaagatatca

SEQ ID NO: 290216 - DNA, 511 bp, Cannabis indica
agagtacatttgatttgtggttgagggctcttgtggaggtggacttgggctcgctgatattattaccactttgtgtgaggcacatggagtaccacagtactcttatgatacaaaagcagcgccacaacgcagtattaccttgtccacaatgcttcgattcaaaccacctcaccctcatggtcaaccgccagctcagagagatcctcctgcaagagaacaagaggagcatgaagacattgaaccaccacgtattgctgggcctctcgacccagccatgcagtacactcatgatcagctgaattatctgattcaacagaacatgcacatgcaaaattacatggcccaaaggagtgttttcgatgagcagcaggtggcccagttgaacacgctaatcacgaggatgaatgtcggtgtggatgaacccaactattttgccatgccacccgtttcaacccctatgatcagccacctccgccaaaccccttctaatggggctcaggtaagtttctct

SEQ ID NO: 290217 - DNA, 521 bp, Cannabis indica
tttaaaaaccaaagatgtaaaaaagtcttaaaaacttacatcgtctccaaaccatgtcttttgagtatgtagttggaggaaccaagctgaatcgtgtctaccggagaaacactctctcaggtacttgttcctaatttggctgagaacccaactgtgaaaagtcaacagcagttttcgatcaaagactcttagtgggtccacattcacaagtgtcttcgatgccctggacttcttcttaattcagtgtactcatcgaaccacctagaccgctttctcttcctccagttctccactagttctggagttgtctctaacgcctgtacctcagaatcctgagtatccccgatgctggtgatcttcgtgttgttaggtgtacagaacatatcatcatcatccgatttataatcatttgtgagaatgatttcattttccggtgactgaggctcttcttgtggttgtggctgtggctatgactaagtatctagcgtcgaccttccaggatcttgcaggagtctcattat

SEQ ID NO: 290218 - DNA, 786 bp, Cannabis indica
ctacgtggcgtagacctacgtgttgctctcacacgtctaattacaataaggccctagaatagttcatctcggttctgattaccgagtccaacttgattatgccttgaacgcataacctttaatctcaatatgtataacacataattaatggtgccactgcaccattggtctatctaccgtagacctgcatgttacgctcacatgcctatttatgtctacgtggcgtagacctacgtgttgctctcacacgtctatatacaataaggccttagtagggtttacctcggttttgattaccgagcctaacctgattatgccttgcttgcataaccctattcttatatatacgtaatccatacattacgttctttcgatggtttatcctggtgatatatataccaggtctaacccagttatgtctcatacacataacttttaacatacatgcgtgtattcaacatttactacaacatatataatcttagggtaataaccctaacttacatactaagtaaccactcatacaatacacttctatatactcagataacatttactaagagcgttaaccctaactcatgctttcactggattcataatattctagggtaataaccctagaccgcattaaaattaactcaaggtactagcttaccgagtctagcttaattatgccttaagcgcataattcataatctcaatatatacatttatccaacatggcatagtatttatacaacatatatcactagggtaataaccctaggctattaaaccgctcatgtt

SEQ ID NO: 290219 - DNA, 522 bp, Cannabis indica
tttcaagattatggagcagcagaagtgaacatgttcaaccaagtaagattagctagttctatccaaacgcacttcaatccaatgattagtacccctcccacgctcccaagtaaatggataaccacataactccatgtcttgaagtccactatcaaccaaagactgttgaaaaccttggattaaaaaatgaggatacctattaccgccccttttgtcatcatgagataaaacattgttaagatcacccatcacacaccatggtagattagaacgattagcaagagtacgtaacagattccaagtagaagcacgcctactcctattcggttcgccatacacaccagtgaaatgccattcttgcacaccttcagaagcaactctcacatctatataagcatcagaaaacccaagcaatacctccactcttaccattgacatcctcaattttccataacaacgcaatacctccactcctaccattgacatctacgactatcatgccatcaaatcccaacgtcacac

SEQ ID NO: 290220 - DNA, 506 bp, Cannabis indica
accctttatacaagaaaacaattcagctgaaactgagttcgttgttcaacttccacagttggatgttgttgactatgttcgccatgatgtcgacccaactgaagttgcaaatatccatcgtgtgaattcacagcctcaacaattagatgatttcattgtcgatgatgacaacgagggtctaaataccgaagaagacaactccttagaattagagagtgacagtgatgataatgctgtatatgtaactgatgatgaggatgatgaattgtaattgaaatagtgttttaaataaaataaaaattacaacccttcttctttaatatgtttgcaatatgttagtttattttaaataaacaatatgtgttgtatatgtagtatgtctacaccaggtggcagcagttcgaaaaagaaaggggtcagaggtaaatacaaaggcaagaatgttgaggaggagctctccaaaacacaatctgccaagttacagattgaggtgcacgcagagactg

SEQ ID NO: 290221 - DNA, 709 bp, Cannabis indica
cttgttttttaatcttttcaggccacttgacttggtttcccattcctttcattactgcaactatttcgacagggctaatgttcaggttgtattcaggaatcggtcccttgtctgattccctcatccgccgaggtagtgttgtctttgcaatgtaatctcttggtctgtgtgattgggtggagttctcgctatctctgtatgaccgtgatctgttggttggataaggttctgaataatggtaggactgtcgtcgctctaccctcttcggtactctactgtcgcgagagtaagagtaggatgttgtcgattgtctattggattcgtcttcctcccacttgatctgcgcccaagctttggcaagcacgtcctccattgtcctgcatggatattttgtgagttctttgtaaaggtcagattctacctgcaggcctttacggaaggcggtaatggctgtgtccacgttgcatgctgtgatggaaactttttcagcattgaatcttgccacatagtctcgtaaggattcgcctctcctttgtttgatgcggtataggtcatctgagagtttctccaatttcctgctgctcgcaaattgttctacaaaaacatccgttaactgagcaaaagaagagatcgaattattgggtaaattcgtgtaccattggagggctgggccagccaagctagacccaaaccccgttacacatgcatg

SEQ ID NO: 290222 - DNA, 671 bp, Cannabis indica
gatatttgatgctaattattcgaaagtcacaaccctctatcataaataggtacgtgccgaggcattaatatagccattaatattgcccaatagccaataggtactaaccacacaaaaaattagttttgggtttgtaatttatttctgatttaatttttatatatatatatgcaaaaataacataaatagactatatatatttaataaacacacataatattcacgtagatataaattaatatcatttatttaattaatttattcttttgggagctatatatcaaataatcaaattaaacggacaaatatattatcatttatgaaaaaattaattgttcaatatgacaatgagtatagttttttttttaaattgtctatagctagctacgtatttttaatcttttttcttttaaaaaaaaatatatgatcaaaccatggactctctaaattaatataggtaagttttgattatataaccattaatatttgaactgatattatttatctttttattgaaatttcttcaaactagaattctaaattacattactgagacaaaaaaaataattttaaagctttaagctgtaatacatataaaatgtatagatttttctaaacctaattttaatttcatataattacaatcatttatctgttttattttttaaaaa

SEQ ID NO: 290223 - DNA, 374 bp, Cannabis indica
gtcgtctctccaagaacataatcaaccatggtttcgtcctatccgattttggggacatggacgaaatcaggaagattccgcaggatcttactgctgggaggcgactttatcaggaggctgctgagcggcgggaggccgctgccaaagctaatgaggaagaggctaagcggagggaagtgcaggcggaggcgatgatccgggaggaggccctacagagagataggctggaggccaggcaccaggaggagctgagggcgaaaggtgaagccactgcaaaggccaggcggcagcttcgggaggccagggaagcctcgaatgagatggctgacaaggtgaggtccttagaggaaactcaccaggaaaacttagaatcc

SEQ ID NO: 290224 - DNA, 840 bp, Cannabis indica
gggagtaagtgtaagctaacttcaaaccggcctgcgcaaaggaaaaaagtcagcatatggagctaagtgtagaaagttaaaacggaagtatcaagaaagacttaccctggtgagctccttcaggactccgcccaccaacacatccagagatgattcactatcagcaccagccagttgctcaatgacctcaggaaccagccgattcatatagtgggccagcatctccttgccctttttcgcctctggcagcacgggcaaaggtggaattcgtgcctgcacccgctcaggaacactcctgaccagttcagacccagtcgttggtggtccagactctttggacttggcatatttgggggtagaagggtttgctgcagtaagctcctcggaaagattaataacctctccagaaggtctcttctccgaggacccttcaccgaccctagactttttggccggaggagaggcgctagagcttccgcccattctcttctgcatagaacaaaacaagtttggtcagaaaacagccatcagatgatacaaggcatgaaagtcaagaagctcaaaaaagaagtaaaaatgcagaatgaccgcccgcccagaaaatcagaagtccatcattacctgacatcgatttaatctcaaacatgacagccttcccttttccagcaaagggataagatggccgaacaggtgaagtgggctcccttatgcgaagtgcaagttcaacaagcctgggcgtggccaggagtttcttcttcctcttcaagggggtcacctgctcagcctcagccttaaccttggcttcatcttcaggattcaagggctcctgatcgtactgct

SEQ ID NO: 290225 - DNA, 539 bp, Cannabis indica
agccgtgcagcttcatcttgtgtgacacatctgagtaatggcatcgagaatcctcttctgttcatgaccccttctactatgatgtaccgtgctgcctttcttctcattttccgagcttcatttcggttatcttggagttccccagagttgaggtaaaccgctattggtgtcatccagtttggggatgtgtcgatcattttgatttctttcgtgccagtaatgctaggctcttcaaggaactggatagggagcaagttttccttgtcacttatattgctgcttgccaatcgagctagcgtgtctgcagtagtattttcttttcttggaatttatctgagaccgtagcttttgaattgtgcgagaatatcgtgtatttgttgggttttatgtcctaaataaaactctgtttcaatataatctagattattcaatatcaataaaataacagaagtatttttcattcacttgtgtatgtttttcttcaccttatcaattatttatctatttgatttatagattcattcaaacccttttcacat

SEQ ID NO: 290226 - DNA, 238 bp, Cannabis indica
acgggccatctcttgaagggtgcgatttttcctttccactaatccattctgctgaggagttttaggtgctgcaaactcatggctgatacccagtttatcacaaaattgagcaaagatagagttctcgaattccttcccatgatcactcctaattcgaaacactttctcaatgggtgagttttgctcgttttgtaatttcagacacagagacaagaatgcaccaaacgtgtcagatttt

SEQ ID NO: 290227 - DNA, 610 bp, Cannabis indica
tagttcactaaaatatcatttattggtagctaagtattttaaagattaaatacattgaagggtgtaacggtaaatttgtccctactcaatgtaaatcatctatagaggatcattgattattaggattataacaaatgtataactcatagcgtatctatatcgtagaacatatagatcgttctcaattaaagtgcaattccaaatctatagtggtgcaaggaggaattaataagttagggaatttacttggtacattctagatctgcttattggaagctcggttatatagccccatggtccacatactagttgtgacaaactgcttgtaagactcggttaattgattttaattaatcaattataattctaaaattacactatgtcaagtttatgaattttcactaagatatggcttgattgtgaagaaatagaactttagggtttatttgttaattaagagactttgtggagtctgattaataaataatataaatgataattttatttgataataattttaattattaaataaataaattttggcatttataggattaaaaattgtaaaaaatagatttgtgaaaaatagataaatgattgagaaaaagtg

SEQ ID NO: 290228 - DNA, 645 bp, Cannabis indica
aagaagaaattagctgccaagggtagatgggtcgacaatctacctcaagtactttaggctcataggacaactgagaagacagcaacggtacatactccattctcgttagcattttgctcggaggctatgttgcttggaaaagtaaatatctcgactcacagacgagagttttataatcaagaaaaaaaccaagaacttttaaaattgtccttggatctactttatgaaaaagatactgagtcgcagattactaatgcagcataccaacaacgagtaacaagatatttcaacaaaagggtgaaaaagaggcttttcaatgttggagacttcgtgctaaggcaagtatttgcaaatacgagagacacatctgcaggagtattcaagccaaactgggagggtccttatgtgatcaaagggatagtaggaactggggtttacaaattggctcggctgaatggctcgctgataaagaactactggaacgtggaacatttgtgaccctattaccagtaaagtgatgttgtaactcatatttctgatgtaatattttgaactttagttattaataaagttaatcattttttcaagtaaattataaagtgttattctttaaaattacttgaggagcatatgtgtatgattaac

SEQ ID NO: 290229 - DNA, 609 bp, Cannabis indica
gttcaggttcggttcgggtcctgagtccaggtttgggttttgaaccgggtccggctcctaattcgggtctaggtcttatttggagtccgggtcctggtccggttatggttcttgatctaggttcaatttcagttatgattcctagtccaagtcctagttccagtccagtcaactttaggttttggtaccaatttttggtcacaggttacgggttcaggtcaacttttgggtttgggacttggttcaggtctgggtgtgggttcgggtcctcgtcagggttcgtgtccagggcagggtcccaaatccagacaccgactacgggttttatccaagccgtgggtccagatctggataccaatctcaggtcccagtctggttccatttctggtgtcaactcacgtgctgggtcctatgttcaagttcgagtctgggtcgggtactaggacccggtcctagttatgtttcccaagtccctatccttattctgggtccaagtcccagttattctttgggtttaggtcccggtctaggttcggtttcgagtcctagtctcggttcgggtttacgtctctgtctgggttttgatgtgggttcgggtttgggtttagg

SEQ ID NO: 290230 - DNA, 592 bp, Cannabis indica
gtaaattattttttattatttgttttataaaaatagactttttaagaatgtcataattgtatatataaacttatgatgtacacattgttattaataatactaaaaaattggtaatattagaagtacttatgaagtgtacttatgattatgattaaaacatgttacacttagaagattgaaagaggcttcatattaatgataaatcaaagagaagagcttgcagcctatataaatatttatatatatagttaaatttttgttgagtcctgttaactctcacagttgtagtaaagaatggaatgggtccttggaaagagttcttttaggaaaccttgcatcaagacaaacaagtagttaactattgttaataaggatatagatattgcaacatcatcaaaatacagatatttgttcattttgccttacaaggtagtaagatttaaacatattctttttctaagaaagaaaaaacaaaaatgttgaagaataaatttcaaaccatatggatctggctgaatatgtgttggtggggctttagttttctgtaggaaaaaaaaattatcaatgaaactgtgataatcatcagtaatac

SEQ ID NO: 290231 - DNA, 349 bp, Cannabis indica
agctttactttaaccaatgctctggaaagaacatagcatttatccaagatgcaagtaaactatgttgtagattgtcatatcagtaaaaccctgtgttctgataaatctaggaatctttaatcacatagtcttgattactttccactgtgctgacgacacaataaacaagaacataaatgtgaaaagggtttggatgaatttataaatcaaatagacaagtaattgacaatgtgaaccaaataatacacaaatgaatgaaaaatacttctgtttctttattgatatcgaataatagagattacattgaaatggagttttatttagggcataaaatgttggaaattatttt

SEQ ID NO: 290232 - DNA, 523 bp, Cannabis indica
tcaggtaaatttcgaggacgaaattcttataaggaggggatggttgtaatatcccgataagcctaatggtaaataattaaggtttataattattttatgggttaattagataataagtgggattatggtcctactaatctagttcaacataaattttaaatttgctataagtggataaataagcgtaatttataaattatggagatttatatggcacatgtgaatacaatttgagttactaatgtaataaaaatattttcaggtttggcgaccttggagactcgatcgggggccacaaatttcataatgggtttaattgatagaattgataggaatattatgataagttgataatataagtattggggtaattaggagtatgtgggatttgacttagcgccctagaagtatagattttttagtaactaagaaatgataagataattatgaataataaagtttttattaatattattattacaatattattttttaaataaacttatcaattacgataagttat

SEQ ID NO: 290233 - DNA, 532 bp, Cannabis indica
tccctgggtcctgttgcccaggaggggtacaaatctcgggtgaccggatgggaggcggccgagcttcactccactctaacctgtccccatcagttggagaacatcgtggaggtagctggaatcaagccttccacatcagggacctaccatcggccacctcgcgacgcggagacgcccaatcataactacggcggctttggggcctggagccagacgcatttgatggctggggccatgcttcctcttcaagattattttgttaatttcttagtttttgtcggccttgcgccataccaactcattccccaagcatatcgcctgctttcaggcttatttattttttattccgccaggggatggggctctccccgcccggcggaaatattgtatttttatgaacttgtttccgtccccaagaaggaggagaaacttaaggacggtttctacgggttccgggcccaccctgctaatgaaagggtggtcccgtataataggcaaactcatgttaaggagtatcgccatcgttttttct

SEQ ID NO: 290234 - DNA, 899 bp, Cannabis indica
aaaaagataatgatatctataatttaaaatatataaaatattaaaatatctaaccttaaaaaataaataatatataaatattaaaaaattaacaaatttttaaatcaaaccataatttaaaaaattaaaataatcaattttttaaatttaaaccaaaatatcgaaaaatattaattacctattaaaaattaaatattattaatttagaatatcgatatttaggtttaaatggtaaaaaatattattataattagatattagggtttgaaaattgaaaaatccaaaatttgagaaaaaaaatccacaaaattaaagttttggggtgtggctacccaggacggctgcacgtgcagccaaggaaggctccacgcagccccgtccgcgcgcgcatgatgaaaaaaaagtagggtgtcatgggcgggaaacgtaggcgggtgcaaggtcaggtgacgcgtgttgcaacctctcgtctctaaagacacaggcgtgtcacagcttcaaacaacatctgtccccacacatgcgcgcgtcttgtccgaagctcctggtgcttgcgtgcaccaagcttcgacagccatggcatccaaattttcaaaacaccataacttttctgttttttaatcgaaattgagttctgtaatcaaaattgcttaatttttcacaaggaatccaaataaatattttcagaacaaaaataaaagtatattcatcgaaaaaattcgtaaaacacatacattcatcaaataatcacataaaccatcatgaaacaatcaaaatcaacacaaacatcgttttaattcatatttcatgaaagtaaatcattatcatggctctgaggccagttgttggaattattttaccaggatctggattactaacaagtatgtttcattaacatc

SEQ ID NO: 290235 - DNA, 712 bp, Cannabis indica
gcagaagtttaggccttgatctgattggttttatttccttatggatacattccaaaggaagggcttatcgaattcggtgatgtattggacttgtggaaactctcgagcccgtcgttgccgatgattaaaggtggtagtgagagtggcggcttgagttggggtgtgaatgcggtggcgcaaattatgattttggcagtcatggctgagatttttgcggcattgccatttaacgtgcattaatggcaaagatttttggagttttagtttttgggattgctttaattaattatttttttaattacacgtaataaatacatattattattttaatttatattaaattaaaaaaatattaatatgggagctataaattctgagatatttttgggcttattttgcattgattatgttttttagtaatgtttgttgaggagtcaacgatcttttctagcatatttgcattatttttgttttttaaggcattaagattgattctaaatttaagttttgaatcccatatatttaaagtaatgcatttttatattaatttcaaattaattaaatgtagtaataattatttataacattattaaatatatggtaattgtgggagatgtttaagaaaatcctttacatttgttgcattattatttttcattttagtgatattaaatgagactattttcggcctgctctcatcttcttctcagca

SEQ ID NO: 290236 - DNA, 729 bp, Cannabis indica
gaagataaaaagctgccagttatctctctgatgtggaaactgatagacttttgagggtactccgagctcataacaaggccatcgcttggacactaggtgatgttaaaggaatcagtccttcaacagtgatgcatcgaattctcatggaagacaatgccaaaccaactattgatgctcaacgaagactcaatccacccatgaaagaagttgtcagaaaagaagtaagtggttggatgctggagttgcttatcctatttcagatagtaagtgggttagcccggtgcaagtggtcccgaagaaaggtggaatgacggtgatcaagaatgaaaagaatgagttgattcctacaagaacagtcactggttggaggatctgcatcgattataggaaactcaacaaagcaacaagaaaagatcacttccctttgcccttcattgatcaaatgctagacagattagcggggcaagaatattactgttttcttgatggatattctggataccaccagatagctatagcacctgaagatcaggagaagactactttcacatgtccctatggtacctttgctttcagaagaatgcccttcggcttgtgcaacgcccctgccacttttcaaaggtgtatgatggctatcttttcagatttgattgaatcttgtattgaaatttttatggatgatttctcagtgtttggttcttcctttgatcattgtttggaaaatctgga

SEQ ID NO: 290237 - DNA, 668 bp, Cannabis indica
ccaactccgttacccaagctttttgttcgctctaagagtgaatagaaatcgacctttatctgtatcgtgttgtttaagataataacttgacttgaaatctacaaggtcaaccctcttccccttcactctaactatgacttctatacccaacaataacctccaagcatttggcatgagttggctaggagctaccccataatagtccaacacttcttgtacaaatggagggaaagggaatcgaaagccaatcctaaaaggaaattcatacatacaaacccaatcgccactatcccaatcgggacgctcagcgatagttggaagtcgcatttgtatagaagaatgaatctcatattgatgtcgcatgcgtaggatatcacccttagtcatactagacctcgggttgtccctcaaaaagtgaagggaccgcccgacatactcattcttgtcaccctcataatcatgtaccattatcgcatactcaagagctcgaggctctccatcaatcttacatacattctcatcaaaaacttccccctcatcatcactgtcaaccaaagtgacttgaggtaatggttgagcattagggatatcttcatcactatccaacattgaatgagcacctccttctgtagaagaagggaccccaatcattaatggtgaagtcacac

SEQ ID NO: 290238 - DNA, 546 bp, Cannabis indica
atgcttctcggcagttaaaggagtacgaacaaaggtaccctactcacgatctagaactcgcagcaggggtttttgcgctaaagatttggcggcattacctatatggcgagaaatatgagatatacactgatcacaagagtttaaaatacttctttacccatagggacttgaatatgagacagagacattggctagagttggtgaaggattatgattgtgagatcctttatcaccctggtaaagccaacgtggttgcttatgccttgagcagaaagggacagagttagataaatacggtgaaacaaatctcccagcagctagcaaatgagatgactcaagctaagattgagttggttgtagggcaattagctaatattaccctgcaatctactcttttggagccaatcaaagaagcacaattggaagatccatatttagtgaaacccagagatagggtttcggctgggaaatctggtgactttacagtggatgaaacggaaatgttacgatttgaaaattgtgtttgtgtgcatatggatgagagta

SEQ ID NO: 290239 - DNA, 693 bp, Cannabis indica
gcattaatggtgtcagatggatactaaaatatttccaccgccttaattacgaatcgatcgaaccgttgatcgttgggaattcgaagcgtgtgtcttcccaaccgtttcgattggtaggtgatagtgcctgttcctcatgcatttttttgcctataaaagccaccaccttttccttcattttcggttactttcccatttcttgccagttttgctcgagtttcccagagaaaaaatcctcagaccaagagaacaccctcgaacactttacaaatttcccagttaaccttcatccaccactgtcaatctacctttcctttgttttattgacaacataacccccagcttcaacacttcactgtaagtttctcgcatctcttgctttactgtttgtgtacatggcatgctttacttatctgtttgttgtttttctgggtttggtatttgaagtttctgggaacgtattcttttgggttcttcatgtaacaggtctagattcaccatttctggtgttaggtaggggtgttcacaaattatccgatccaatccaatccgcacgatccaatccaatccgcacgatccaatccaatccaatccgcaacatgcggatatcggcacttgtgcggattggattggattgagaaaactaaaatccgcacttgtgcggattggatgttgtttgacctcaaaaagtaa

SEQ ID NO: 290240 - DNA, 686 bp, Cannabis indica
gaattccggcgttattaattgcatttattattgtgattttggtttaaatctcatttattacgactccgcgtcggttggctaaaaatccagtcaacattttggtgctttcattgagagcttaggccaaaatcttcaagtttttcgccgaaaaaaatggtgttaacccgaagatctcaagagcgacctgacgaagagatggaaagtgcccaccaagttccatcagcgagcaaccttgccggaaacaatggagaacgacccccacgtccggggaacggcggcactaccaccaccgctcaaatcgctggccatggagcaactggtcgaactacagtcaaagaacagacaactactgggcgtaccaccaatgccactgccgcaggaggcggcgctgctgatggcgccaccggaagaggtaatcctagaaattttgtcccacctactgacggggcgggccaagctcagactggccgcggccctggaatctttacaccgcggaatgaaccccatgttgacatcgagggaattgaccccgagatggatcaactgcgagatgcgaatcaaaggagagaattccaatcttggctggaagatcatgctcgtgagatgaggaggcgccaagacgaccaagatcgtcgcacccaagaggctgccgacttaatacgaagctacttcaaccaaaacactca

SEQ ID NO: 290241 - DNA, 359 bp, Cannabis indica
ttattcttatccgaatttttaatagtactcctaatttatctgtgttaagtttttaattcaatacacaacttgtttggtttgataatatctcctatttctattaggatatttaaattgtatgacattatgctcattaccaataagtttagtgcctctaaaattggtaccatacttacaaatacttgatgtttcatattttatcccaaaaacaagaaagaaagcaaaatcagttacataatgataagatcactaaaacaatatccaacctaatattatagaacttgtgaattatatttttggggtgttgctcaaaaacatatgatacatttatatctttagtcttcaccgtacacataact

SEQ ID NO: 290242 - DNA, 837 bp, Cannabis indica
tcttaagacttgaagtcatcccaatccgctatctcccatcggcatatgttctctgaaccattcggcttacagtgtcccatacaacaccagtgttcccataaacacaaaacatgcccataacatgccgcaaactagctcagtcttgatctcagcctacacccttgcatattgtctatctgcagcttacatcaatcttgcaagtcttcgcactgaaccaccaatctgttgtagtgtttccctctggattcacacaccaaaactgaacaagtaccctgattcctcaaacatatgaattagtgggctcccccacttcaacttgggaagaacttctctcttttagaggaatacccctcaaggtacagctcgcaagctaacagcatactcgcatacggttcttccattccaaatttcacttttgatgaagatgctgaactaatgcctcggtcattctgactcttcgtccctcgacatttcaatgttgccttagtcccttcgtcttgctgactttcaccttaggccaacattgccatggtgttatcttagtacctgagtcctgcagactttcaccctagataactagcactgcctgtgtcccgagtcttcttgactttacatcctgaacaatgatcactctccatgatactcatcttgatgcttgtaatgaataactagtctgttgagtgaaccgtgaaggtctctcctccacttcatctgttggcgtcctcgacaacatgcccacacgcaaatgcccgatcgccccaactcttcatgcacaccatgccatctaaaagtgcatcccgcaggatgtgactctcgagtcaactatctcatatagca

SEQ ID NO: 290243 - DNA, 616 bp, Cannabis indica
tagtattaaactagaattaataattaagttgattttatacttaattatttaattcttatatttaatacattaaattaaattaaaaattaaatatttaagttgattttattctagatacttaaatattattattttcagaatatttaattaaataggaaattatttttaagttggaaattttaatttcagaacaacttaaattagaataattttaaaatatattatattttattttattaatcatttttttaaaaaattcgaaattgtattttttaaatgcagataatttttgattttttttaaaaatagattaaagttgaaattaattaattattttaattaattttagatcaacttaaatcaaataaattttcattaatgattaattaaaataaatggactaaaatatattataattagaaaataaagtaattagttagtgaaagtctagatagttattttctgtttgcttgaagtatttttctagttatatttaattaaatagaaaattaatatttaagttgattttattcatgatacttaagtatttgataattttcttaatatttaattaaataggaaaattatatttgtgttgaaaattaattttttaatt

SEQ ID NO: 290244 - DNA, 571 bp, Cannabis indica
atttgggtctgagttcaagttcgggtttaggtctctgtctgggttttgatctgggttcgggtttcggtttaggtcctagtcctagtcctagtcctagttcggttctagttccatttgcgattctaagttcgactttgggtttgagttcgagtcagagttcgagtcctggtctgaattttgggttcaggtctggatttcagtctaggtccagatcaggctccagttgtgggttctcgtcctgggtcttggtctaggttgggtccgagtcccaagttccaatttcgatctgagcctggattcagttctgggtctaagtccttggtcctgatcttagtctgggttcgagtttgggtccttgtccgagtctagcttttggtttgattctaggtgtgggttggagttcgagttcgagtctgtgtccgggtccgtgtccaggtctggaccccgatctgggtctaggttcgggtccaagtccaagttcgggtcccgagtgcgggtccaagtttgggtctgggtcaagagctcggtccacatctggtccagcattttgatcccagtctgggtcttggtc

SEQ ID NO: 290245 - DNA, 598 bp, Cannabis indica
atttaataataacagttcaaactgtaccgcactatatattacaaagttatcaatttttattatatgatttttattttttttaataaaagaacaaatatatgtaatatatattattatttagagacaatttaatataataattttatgttatgatgttaaaactttaatataatcttttttttttgtattgttaaaatttttattagttttatttttaaattttattataatatttgataatgatgttagtgtaaatagctcaaaccgtactgtaccacaccatagtctcgcaatgtgatttttgcagttttgaaattttacgatgcaattacaatttgaaaaattacaacaactgcatagtttagtttcaaaaaaattgctacaaccatccccaccccctttgtatgattttattttacattttaactaaaaatagtcaaggaaaggaaataaaatacaaaactaattttactaataccaatttatctatatataaaaataatatacactaattctcccttaccaaaataaataaaaaataaattgcattcatgaaagaatgggcgtcgagctatattttttttttttagttttttag

SEQ ID NO: 290246 - DNA, 724 bp, Cannabis indica
atatattctatataaaatgtgtctatatagcataattcttggtttatgaaaaattattggtgcccaataatttaaaagcctaaatttctccattactatcctattttatattcttgtacgtatatctctcatttttttctaatttttttttattaaagttaattatttaagtaaataaaattccataataaaaatctaattcctaaattttctctattactatcttattttgaatttaattaaaaccaacaaaatataggtacataattttgtacgtatatatctcattttaattttctaattttttttattaaagttaattattttaaataaataaaaatctaattcccaaattttctcaattactatcctattttgaatttaattaaaaccaacaaaatatatgtacctaatcttggacgtatatctctcattttttctaatttttttttgttaaagttaattattttaaataaataaaaattcataataaaaatctaatttctaaattttctctattactatactattttgaatttaattaacaacaataaaatatatgtacgtatatttttcatttttttaatataaattttctatatacatatatatttataaaaaaaaatagagataaaaatagtagtgaagagatccaaaaaatttcacataagcttcaaacacactctaaaaaaagtatcatttataattctatgtgtaactaatt

SEQ ID NO: 290247 - DNA, 488 bp, Cannabis indica
gatcctatccaattgcgaatagacaagttagaggacaagttcaggagatatcaagtgggggaactagggagacaatctggatacgactcagacgaggagcttgagccgtatcacccagatatcaggaataccccttttccttcgagatttaaaaacctgcatgtctcattgtatgatagaaccaccgattcggtcgtgtatttgaacaactttaatacaataatgcgagcaagtaatgtgacaaacaatttacattgtatctattggaatatattttaccaggatctagatttactaacaagtatgtttttaacatcctaaacatgaacttctaaaatgatataaaataaacacataaaaggtatgagaaaccttacagtggttgcagcggaattaaatgactccttctgctcagatctctaacccttgtatcctttttgtatcagagtatcaccaaaatttgagctcgaaactccttccttgtgttt

SEQ ID NO: 290248 - DNA, 533 bp, Cannabis indica
agctcggttcacggttcagtaagcccgtacttgtttagtattttctttttaaaagttacgaatgtgaaagcatgttaggaagcatattagattataattatttatgttaagtgcattgccttaaaatccgtaagtgcggtagtaagtatgtaaataggccgttgcctgaccagactgacttactaactgacaggttagtcttataaaatggacacctggtgctatatggagagtcagagtaaagtggccagggctagtaacggttggagagaatggagtccaaattgtccccgtaaccaaggtgaaatcccttggagggcttccgacgggagtgatggttatccgtcacaggctccgttggatttggagcaaaggtttgcaaaaatggaagctgtgattcaacgacatgaagaagagattcagaggttgaaacagcaaaggtctcctgtagtatctttaccacatatgccaatcatttttgattcggtattaccagcgaagcatggaatggctggtaatcaagtggaaccatt

SEQ ID NO: 290249 - DNA, 542 bp, Cannabis indica
actttgaaaatgcagtgaagaaccctcccaatgaacttaatgaagaccaatggcgactaatatgtgaattgttcacaactcctgatttcattcaacggtcgaagcaaaactctatcaatcgacagaagatgaaattctcttcaacaacagggtcggtaactatggctgagattcttcgtcaaaaagtaagttaatatattaaatttctattttacaaagtttactttatatataattttctaacaagttatatttatcagcaaggaaagggttacattgagacttggaaagaatgtcatactaagaaagacaccaacaccttcatcaatgaggctgccaaaaataaatatgtaagatatataaaataataacttttaaatattttcaaataattgtaactttgcttgatttctaacttatttatattataggaagagatgttgacaactcgaaatagtgctcctgaatcttcacaagtttcagaacttgagattcttcggaaaacacttggagagaggcgtggccatcaacgaggagtgggt

SEQ ID NO: 290250 - DNA, 658 bp, Cannabis indica
tcgcttatcaaaatgactcattttcgttggctaaaagtgaagtcaacaataataattcaagctccatcagtgaagatatataactttgtaaattagaaattaccagaaagttattcagctgaagaaaattctacactgtgttatctctatttcattcttgaaaagaatgagagatatgtcttctgtttattcagatacactttataagcagtaaggaattcagtatctcttaatgagtaatgcatatagcaaataatgttgcataatgttttatgaacatagttccagatatttgggttgagtcaaaaatactacacttgatctgaagatcgagacaatagattgattgaaatgcactacttgttttatgttagtgcaagtgggagtttgttgggattttatgccctaaataaaacccatttcaatctaatctgatttgttatcaataaaagattagaagtcatttatgtttacatgtagttctcatgtttatggtttaatatatacaaaatctgtcaagtccaaaacatatagtcatttacaattacagtgatgtcaacacagtaaaatgtgattgtgattatatgcttcaaaagataaagtccctgattcatcagtgcactggatttacactgatgtgattgttggaaattatttt

SEQ ID NO: 290251 - DNA, 699 bp, Cannabis indica
atataatcaaatcccgatgtacgaaccagaccaagaacatacctcgttcattactgatcgaggactatactgttataaggtaatgccctttggtttaataaacgcaggtgcgacttatcaaaggctagtgaatatgatgttcgcagacctcattggaaagacaatggaggtatatgttgacgatatgctcgtaaaatcgcaacatgcgaaggatcatatcacgcacctacaagccatgttcggcatattgcgaagatataagatgcgtctaaaccccttaaaatgcgtctttggagtgggttccggaaagttcctcggttttatggtaaatcaacgaggaatagaagccaatcctgcgaagattaaagcgttggtagaaatgccatcaccgactaagccaaaggaggttcagagcctcacaggcaaagtcgcggctttaaaccgcttcatatccagatcctctgacaagtgtaaagagttttttcagatcttgaagggtaacaagaggttccaatgggatgagaagtgcgagcaggcttttcaggcgttaaagacgcatctggggcaacctccaattctatcaaaaccgttgcccggcgaggtcttgtcaatttatttagccgtctccgagtatgcggtcagttcggtacttgtccgcgaggaccaaggacatcaacaccctgtgtactacgtcagtaa

SEQ ID NO: 290252 - DNA, 546 bp, Cannabis indica
ttatttccagtcatgtgacgagagcatccactgcaaaataccactgcccttcaacaaacgcagacagggatagctttgcaaccaaaccaacaccaggatttggtttggactttattttccattctcgacgaggtttgcgtacatgtgacttatttggttcagggaaactatttggtcgattgatcattgctttcaagtaatttggcaatttgtagcacttgggacgaatgtgacctcttctattgcagaaatgacatgtaggaatgaaattgtcattctgtggcagattttctacatcagtcctccttccttcaaacttgagtttagtgggtccagtggacttgtctcttcgcagatgagtctgattcgttaatggtagttgggatgtcatgtaactcatcttccttctttgttgaatcgacatttgagggaagagaattctcaacagacaggtcattgccttatttatatagcatcttatagcctaaggaggttcgatcaccatatggcttctggagctgtagagtttgattgatagctgctgtg

SEQ ID NO: 290253 - DNA, 503 bp, Cannabis indica
ctcagatcgggattggaacttgggactcggacccaacctttgccaagacccaggatgcgaacccacacccggagcctgatctagaccttgactgaaatccggacccaaacccaaactcataccaggactcgaattccgaccagaactcaaacacaaactcgaactcagaatcgcaaatgaaactagaatcgaactaggaccaggacctaaacccaaaccaaaacccaaatcaaaacccagacagacaacaaaacttgaacggagactaggactcgaaactgaacctagaccgagacacaaacccacacaacaattgggacccggacccagaataaggatagggacatgggaaacagaactaggaccgggtcctagtacccgacccagactcgaacttgaacatagaacccagctcgtgagctgacaccagaaatggaaccagactgggacccgagattggtatccagatctggacctagggcttggacaaaacccgtagtcgg

SEQ ID NO: 290254 - DNA, 697 bp, Cannabis indica
caagctaaagactttacagtgtcagatagtggaatgctgttgtttaagactagagtctgtgttcctaatagtgtggaacttagaaatgaaattctcgaagacgctcataccactcaatattccctgcatcccagcactaccaagatgtatcaagatcttaaaccttacttccggtggagcggaatgaagaagaatgtggtagaattcgtatcgagatgcttaacttgtcagcagatcaaggctaaacatcacaaaccggcagggttgttgcagcctttaactttacctgaaaggaagtgggaagatattacgatggactttgtggttgggttacctagaaccatgggtttgtttgattctatttgggttgtgatggatcgatttacgaagtctgctcaatttctaccagttaaaacaaccttcttagtggatcagtatgcagatttgtacgttaacgagattgtaagactgcatggtgtgccaaaatccataatttcagatagagatccaaagtttacttcaaaattttggcagagtttacaacgggctatgggtaccaaactgaagttcagtacagctttccatcctcaaacagatggacagtctgaaaggacgattcagatactggaagatatgttacgagcctgtgttatggattttgaaggctcctggagtaagtacataccgttgatagaat

SEQ ID NO: 290255 - DNA, 566 bp, Cannabis indica
aaatacccctttagtatgatttatgtgattttagtgtggaggggcaaaatggtctttttgccccaatgactttttgtcttttagtgaatttttatttgaaaattaaatgtttattttaattgtatacttggctgaaatgaatattgcatgtagtttatttcattttctctttttagcaaaaaaatcactaagtaagaaaagaaagaaaatttcaaagaacactctctttttctctctattttcggctgaagcattggggtgcatgaagctgattttctctttgatttccaagcaactttcatccattctaagcatccttcaagctaggttagcttcctttggttttcttctttataattttgaaaaaaaatggtgaaatattgagtaaatgcatgcttgattgcttgttgttgttgctgctgaaatttggttgttgtttctgagtttaagcttgttagattagggttgtttaagtgattttgaaagcatgttagataggttgttcaaagctttgagattttttaagcttaaatatgtgattttggtgaaaatagtgtgaatctgtt

SEQ ID NO: 290256 - DNA, 584 bp, Cannabis indica
aagttatgagaaaccttatagtgggtacagtggaattaaatgactccttccgctcagatctctaacccttgcatcctttctgtagtagagtatcaccaagatctgagcccgattctccttcttgttgattggattcttcaaagtcttacatactatgattcaggaccaacttgatgtgtgtgggcactcagttaatcactaacgactgaatattatttggtaaagaaagactaagtgtttcgaattgaagaagaaagaagaaggaagaggtctcatcaaaagcaagattattagctttggaggcattagtttggatgaagagaccatagccttccttttatactattcttcaatagggttagggttgaatgattaggaataaaaaattgataaaaatagagtgaaattaacccctaatggcctccacatagtgggccctacattagtttgggctttgtcatttttctcaactattttatccatttttcacaaatactacttttagcaatttcaaccctataaatgccaaaactatttatttaataattaaaataactatcaaataaaattttcatttataatat

SEQ ID NO: 290257 - DNA, 689 bp, Cannabis indica
ttttccatcgctgaaaacctcaataatctctatcatttgatatcaaataaaataaaattaccatgatgtatacattatggttatttaatgagtaattagtgtgtttatacttgaattgtttctttgtcaaaattaatattaagtatatttatatgtttataggtttatctattttctcttagatcaatcatgctcatatagcaaaaaaatcatactcatatagacatgttattttcattttgtaatttagatcttcttagtcattatttagttcacttaaaccttttccgattatggtaactgaagttttgtttcttttaggtactctattacaaagatctgtattacatgtattatttatttttgactatgaggaggtggatttctttattggcaaacatatagcgtgacaaattattgttcatatattgaataattatttttgattaatgagattcatatatataactgtatatattgaagtctttattcaaataattatttttgatttttacgtgattatttattgttcatatatctagaaccctatttgattaaagttaagattataagattaatgaatttgtgatttcttcctatacacataataataatctcacctaataactaataatattttttctttaatttttaattgtatcactttcaaataacatagaaaaaaacta

SEQ ID NO: 290258 - DNA, 791 bp, Cannabis indica
gcacgatccgcaggtaaaacattcggactgaatgtgatagcagacttatcaaaattgacttgttggccagaagcaaactcataacactgaagaatccgacggatagaatccgcctcccgtccattggctctaccaaatatcaaactgtcatcagcaaagaaaagatgagacacccgaggccctgaccgggagcaccgaaaccccattaactcaccactaaactctgcctgacgcagcagggaagacaaagcctccgcacaaaaaagaaacagataaggagagagcggacacccttgcctcaatccccttgtaggcaccacacatccccgaggctttccattcactaaaaagctatactgagccgaagtaacacagtccatgatcaaatccacccacctactagggaacccaaacttacccataatagcacgcagaaaacaccactcaactatatcatacgctttactcatgtcaagcttcaaagccataaaccccctagcgccattattcttcttgaaaagagagtgtaacaactcgaaccccaccataacattatcatgaatagaacgacccggcacaaacgcactttgaaatgatgaaattagaggagacaatgtacctttcaaccgtaaagccacggccttcgccacaatcttgtacatcacactacaaagactaatcgccggatattccttgacaaacgacggcctagagatcttcggaatcaacacaacatttgacttattaaactttcgcaccgactgttgaccattcaaaattgcaaggcacac

SEQ ID NO: 290259 - DNA, 664 bp, Cannabis indica
gatcaagccgttcgtagttctttacaaattttttttttgaggagataattttttttattttgtgtggctgggcctagttataaactagattgcctacgtacccggagtgggatcaagccttacgtagttcattgcacactcgcttttttttttttaagtgcgctgtctacaccatgggtaaatacctttttgtttaagtgtagaactttttgatgaacttcccattaacacacggataaatgcgtcggccttctgaatttgaaagttcatatgcccctcttaggaagaccttagtaacaacataaggtccttcccattttgcctcaaatttgcctttcatccttctagttatgacaattggtcgtttcacagtaagcactagatctccaaccgaaaaagatcgaaatttaactttcttgttgaatgccccagctacctgggcttggtaaatttcgagcttttgttgaatagcaagccgcttttcatctaatgcttcaagctcggctagacggacttgcacattttcatctgggtttgttagttgagtagcaattcttaatgaaggtatttgtacctccaaaggtaacactgcctcagacccaaacaccaagttataaggtgtacaaccagtcgcagtcctcacagtggttctataagcccacaa

SEQ ID NO: 290260 - DNA, 750 bp, Cannabis indica
ataaatggacctaaataaaatctatcatggtgtgacattttatttagcaacaacctatatgcatctataaaatttgctaacctaaatatcatttcaaaatttgctaactacttttaaaaattaaatgttattttataaataaaaattaaaaaagataaataaatatctttttcagattttaaatttaatttaaataaataaaataacaaaatttaaaagttagcaaaatatcttacatctatttaaaatttcatgattatagttatcttattttaaatttaaataaggtcaaattatttaaaaaaaaattaatttaaaaaattaatatctgaccttaaatttaaaaataagataagatataatcaaatttaaaaataagatagataattaagcaaaaagatagatatttactattttcaaattcaaattacactaatatcatgaattaaattaaaaaatattaattaatttaattatgataattagaattgaattaggaatagtaaatgtataaatacaaaactacacaaaaaatcggaagttaaatccatgaaaaagcatgaaaaatcgaagaaaaacgaaaaaaattgcgagctgccaagaaacctcggtgcagggagagacgtgcaggattatcgcgcgcgtaaggagcttcagacaggtgctgggcgagctgcttgtctgaatgcttactgtccgcgcgcgtgggtgatgcagcatccctatctttttttcgaattttcaaaaaat

SEQ ID NO: 290261 - DNA, 520 bp, Cannabis indica
acaacttgaacaacacggcgaaggaaagccgtttcgggagcttctggaatgccgtaccactgacattctcctcggtgttatttcaccagctgatgctccacaaaatgaaagtggatgctcaggaggagttgaggatgaggttttatgttggtcggaaggaggtccgattcggggtgctggagtttgcactcattacgggtttggacttctcctcggggccaacagaagaggagaaggctgcgcaggtcgcgcgctcggggtcagaccgattgatcaacaaatatttcaaccggtctgatagtgtgaagacagaagcactccaacttcagttcacaaactgccagaacccggaagacttgtacaagctcggcttgtgcttgtttgtggagtcagtgcttctgggccgcgaggccaacgcgctgatcacgcctcacatacttagatatgtggaagacctcgagttcttcttccggattccttgggggaagcactcattcgccagactcatgcactcgcttca

SEQ ID NO: 290262 - DNA, 376 bp, Cannabis indica
aaatattaaattaaaatttatattttgagttatgtaaattattaattttaattaattaagtatatatattaaatatataaaaataaatattagatgaaaatacactttaaataatgagctttattataaggatatccgatctccattgttggttctacatagttcttgttttagtgagtaatcatccccaatagatgaacgttcattagcaatttaacaccgtagaatctcgaaagataagtattattgtaagtgttttattcttagtaacatctaccccaatagtggctgctaagagtaagacgaattctcatcttgatcgaataaaaggttgctaaaatatttttcattttagatgagctgactgctctattca

SEQ ID NO: 290263 - DNA, 797 bp, Cannabis indica
tgtttccaagtataactctgcccccatttgttttcctgaaatcaaacatgaaagctttattattagtcatgtggaaagtgcaaccagagtcaaggatccattcatctttgatggatggtccaacttggtacacttcaccactttcatatccagcagtaacattagcatcatgcatatcagatttaggtttagagtttgagtatttagaatctccctgtccatgtggtttttgtttgttatttcttttcaagaaataacaatctcttttaaaatgcccaggtttaccacagttgtaacaaccattagtttcatcagaatttctagggttagaacttgatctgcctctttgaaaacctccctgtttgtttgaacctctgccttgacttctgcctctgttattccaaggttttcttggacctggtctgcccctactcaggttgacttcaccatttgaatgtccacctttctctgttctcatttctaagtctttaatttgagtgcagagatcacctcctctagggttatagatgtccttccatacttaatagcagtcttgacttctctgtaggattcaggtagtgaatttaggataattatagcctggttttcatcacttagtgcctcattttccccagaatttgcaagttcaatatgcatccttaagaattcatccaaattttgatcaagagatttggatgaactcattttaaaaccaaagatcctttccttcaagaaaatcttgttggttagtgatttctgttgaaactgttcttccagtttcttccaaatctgggcag

SEQ ID NO: 290264 - DNA, 833 bp, Cannabis indica
tctaagttaaacttcttgatcaccttctcaatgtagcttctttgagttagcaccatctttccttcttgcttgttcctcatgacttcaatccccaaaattttcttgactgctcccaagtccttcatttcaaattcagagttgagtttgttcttaatgacttgtatttcagccttgtctttgctgatgatcatcatatcatcaacatatagtaataggtacacaaccttaggtgttcctagttccttgtagtaaagacaagagtcaaattttgaccttgaaaaaccaatactctgaacaaactggttaaacctttgattccattgtctaggtgactgtttcaacccatacaatgaccttttaagcaggcaaaccagatcagttttgccattttccacctgaaaaccaggtggttgctccatgaatatctcttcatccagaaaaccatttaagaaggcagttttgacatccaactgctcaacttccaagtcattgtgtgcagcaatggctaacatcattctaatggtcttgtacttcacaacaggtgagaagatatctgtgtaatcaactccctcaacctgtgtgaatcccttagctaccaatctagctttatatctaggtggttcaccctctgacattccttctttctctttgaacaaccatctgcaggagacaactttcttgtcttttggtcttggcaccagaatccaagttctattcttcttcaaggaatgcatctcttctcccattgcagcaagccatttcttctttgatttgcatgcaattgcttcttcataggtagttggttcaggttcactctcagattgtatcacagc

SEQ ID NO: 290265 - DNA, 607 bp, Cannabis indica
ggtgattgaggatgtttgaaagccatcttgatcgacttcattgtcagaaggatgggggacactcgtctaaaaatcatccggcgtcacaaccatcaactgggtggttacgttggttgattgaggatgtttgaaagccatcttgatcgacttcattgttagaaggatgggggacactcgtctaaaatcatccggcgtcacaaccatcaactgggtggttacgttggttgattgaggatgtttgaaagctgtccgaactgacttcactgtcggagtgatgtattgctgacactcatttgaaatcatccagtgtcaccaccctccgatgggattttgacgggcgttcacgtttggtgattgaggatgtttgaaagccatcttgaccgacttcattgttagaaggatgggggacactcgtctaaaatcatgcggcgtcacaaccatcaactgggtggttacgtttgttgattgaggatgtttgaaagctgtccgaaccgacttcactgtcggagtgacactcatttgaaatcatccggcgtcaccaccctccgatgggatttcggcaggcgttaacggtttgtgattgaggatgtttgaaagctgttgcccc

SEQ ID NO: 290266 - DNA, 637 bp, Cannabis indica
attttgggtttcataagaactagaagagtaaaaactcaccaagaacattctctgtattaaatactatcataaatatacagactgtggactaaggctcattaacgccccaaccacgtaaaaatctctctcttaatttcttacagctctccaaattattattattttattggttgtcgaaaacttcggtcaacagtagtctatttagaataatttatgagatgtggttaaaaagaaaaaaccagttaatttttacaacaacaaataagaaaaataaaaaccatttattattaagagttttttttttaaagttaataataatagtggcatgaatagtctaaaatttacaacaccaattaagaaaaacaaagattattcattgtcaagagatattttcttaaagttgataattatagcatgaatagtctaaataaaataaaaaaataattgacacaagaatatcaaacaacgttaaattactaaaaagaaaaaaaatcagtatgtacttgagaaaattatataagagtttaattactaaataaattttctatactaatgaaatatatagttgggagattagtttcttatcactgattacttttttattcgctttagatgtgttcataaaataaccaattta

SEQ ID NO: 290267 - DNA, 873 bp, Cannabis indica
gacttgatacttggtccttgatgtcctcatcattccccccttctttagaaggatttgtcctcaaatcttcacctgtatcaaatggacttaaatcagaaacattaaatgtagcactaacattatattcacctggcaaatcgagtttgtaggcattgtcattgatccgttcaagtacttgaaatggaccatctccgcgaggcagcaatttagaacgcctttgtgttggaaatctctctttcctcatgtgtaaccatacccaatcacctggttcaaaaacctgcttgtgacgacccttgttagcctgcttaaggtattgttcagtcctcctttctatgttgagtcgggccctctcatggaatttcttcacaaattctgccttcttctcgccatctaaattcaaatgctcagaaacaggtaaaggtgataaatccaaaggagttagaggattaaaaccatacacaatttcaaatggtgaaaatttagtagcagaatgcattgcacgattataggcaaactcaacatgtggcaaacaatcttcccaagtcttaatgtttttacttatgattgcccttaacaaggtggatagggtcctattaactacttctgtttgaccatctgtttgagggtgacaagtagtagaaaataacaattttgtcccaagttttccccacaatgttttccaaaagtaacttaggaacttagcatccctatctgatacaattgttctaggcataccatgtaatctcacaatttccctaaagaacaaatctgcaacattagatgcatcatcagttttatgacaagggataaaatgagccattttagaaaatcggtctactaccacaaagattgaatccctcccacgcttacttc

SEQ ID NO: 290268 - DNA, 527 bp, Cannabis indica
agtggtaacatccatctgatctatctccatgtcaaactgagtagctaagcttaggaccactctaatcgttttatacttcaccaccggagagaaaatctcattgaagtcaataccttccttttgtgtgaaacctttagccactagcctagccttgaaccttataggctcacctttagatcttccttccttgtgaacaaccacttacaagacacaatacttttaccctcgggttttggtaccacaacccaagtcttattcttcttgagagatcccatctcatcatccatggccttattccactccttagaattctttccatttactgcctcattataagtcttgggttccatatcatccatttccaaatctgttagaagagcataagccaattcttcactccaaatgttgtagctgaatttctgattaggctttggagtcctcttagatctgtcccttgtcaactgatagtttgtaaggtcctcttcggtgtcttcatccctgatctcttgttgagcatcagttcctcc

SEQ ID NO: 290269 - DNA, 630 bp, Cannabis indica
gattgtcaatctctgcatgatgagcccttaacacttccatctctttgtctctccactcgacaaacatgcacctctgctcttcgaacgtgagatttaccgcagcgcggagttcctcctgatcatgatgtagggtgttggtatgaccctgcatgagtccaagagcagcacagagatttcggatctcagtatcatctccaatggtcgtttgagcattggtagcaggcgaaacgactgtgttatgaatgccctggctaggtgctgaactggtattcccagtctcttgcacaccaggcgcgatttcacccatagaagtcgtcacaccatgacccgcgtttgacggctgctcaggattaacagctggcagaacccttgtgtttcttgggttctgtaatgcaggatccaccgcctgtggatttgccagatcaatcaggcccctacgagtctgtaccatcatcgtacttgtgtggttatatttagaatgaagagcgattcttgattctgctctcaatgaaagcaccaaaatgttgacctcgcttttagccaatgacagtgagtctaatttagtaagcgacaagtagtttataacgattgaaatattataaagtagtataaagacacaagaattttata

SEQ ID NO: 290270 - DNA, 521 bp, Cannabis indica
gggcgttccgagaggaggctgtgcggcgagaggcccttgctaacgccaagtttgaggaagaggctaagcaaagggaagcccaagcggaggcgatgatccgagaggaggtccttcggagggataggctggaggccaagcaccgagaagcactgagggcggagggcaaggctgttgccaagaccaaacgcgagctccgggaggctagggaagccttagacgaaatggctgccaaggtgaagtccttagaggaattgcaccaggcggacttggagtccagggctaacttggccgtggagctgaaggagcttaaggactttaaagaccaagccttgaagaaggctaagaaagatgagctcctttctcctgtctcctgcagccgttgcatcaagcggttcgatgatggcgtctacatggcctggttaacaaatggccagagtatcaagctcgacttctacccaaaacctgcggagataattgccgaattccgggagaagaagaagaagcttgacgccatgctggag

SEQ ID NO: 290271 - DNA, 801 bp, Cannabis indica
tggatttgacgagcatatcatccacgtacacttccatattttgcccgatctggtctttaaacatttttgtttaccaatctttggtatgtagctccagcgtttttcataccaaacgacattactttgtagcaatatagacccatatctattcgaaaacttgtatgttcttcgtctggtggatgcattttgatttgattgtagcctgagtaagcatccatgaagcttagtatttcatgccctgctgttgcatctacgagctgatcgatccttcgtagtggaaaagagtctttagggcatgctttgttgaggtctgtgaaatcaatacagactcgccatttcttgttcggcttgggcactaatacgggattcgcgacccaagccaggtagaaagcttcaattataaagttattgttgcgtagcttttcaacttcttccttcagggctactgctcgttctttgtccaacagccttctttttgttgaactggccgaaagttgggatcgatattcagaacatgtgaaatgatagaaggatcaattccaaccatatccgcatgtgaccaggcaaaaacgtctaggtttgctctcagaaaactttggtcgcttccgtcatgaatctactgatatatgcccggagaggctcgcctggtctttgcttaactttgacaaagtctcctagatgcaatggaagttggcgtgaggaggagaattgtgcatggaaatccgaagagaaggttttccacgaactaaactttcgaggggccaacttgaaataccattgctcagcaaatcagccgctcag

SEQ ID NO: 290272 - DNA, 426 bp, Cannabis indica
caatcagaagaggagcatgagttacatcttcagatggttttgcaacggcttcgggaacacaagctttatgccaaattcaagaaatgtgaattttggctatctcaggtgtctttcttagggcacattgttagcaaagatgggatcaaggtggatcccgggaaaatagaatccgtcagggattggccaagaccgaagacagtgacagaaattagaagcttcttgggtttagccggatattatcgtcggttcgtggaagggttttctaagatttcaacacccttaaccgaacttacaaagaagaatcagcggtttgtttggtcagataagtgcgaagctagttttcaagagctgaaacaaagattgattacaactccagtgctagctttgccttcagataaagaaaaattcgtagtttattgcgatgca

SEQ ID NO: 290273 - DNA, 487 bp, Cannabis indica
actatttgggcctcttcaaggttgatatatttttggactctcttctggaagtcctgaaggctagcagccccctcttgttgtagttcgttccagaagggagtccctgtacggatgcctgcctggagaagggcaagttgttgtccgtcatcaactttcttggtcttcgaggcttcctctcggaacctctttatgtagtttttcaaggtctcggtgggcagttgcttgatgttagtcaaggcactgacctccaggttgacctttcgtgcggcgacaaattgtctccggaagttggtctgtaacttgttccaacagcccacggatcctggttccagcttcttgaaccattcctccgcggacccgcttagagtaagcgggaagcacagacatttcgcgtcattgctgactctcatgaccgtcatgacacggttaaaccgcgacaagtggtcgcttggatcggagttcccggtataagctgccatttcgggca

SEQ ID NO: 290274 - DNA, 939 bp, Cannabis indica
aaataccaaaacaacaaagaaagtcaaattgacatacccttttctcaaatagtgtagcgacatcaggttgcttcacatcatgtttcgtaaccgtgttgggggtgctccaattcaacattcgagggaatctagtccctctgcactgcccgtacttcttccccaaatcttgcatcacctcaaaggcccagtattgtagcgccggtgcatatccgtagacattgtacttcgcctctggttgagtaatttttttctccttcttccctttcttcttatccttagtagatttatcaaggtagttcttcctcaggtcagtcatacttttggctgtggatgacaacaacttctgatatgaaagaaggccccacggatattcgaagaacttctcctcgttttctactaacttcagcatatccgaccatatataaacaccctcagcccttgatagtagcacaccttcaacaaatgcacacagccccagcttgtacacgtcgtcggccacatcgcacgcctcaaaagctagccaaagggttttgaaagtgacccgtttggcattattgaggtagtcccgcaatatccgatcagactcacatagtgtagtcaattcttcagtcgaggggccaccgctcatcttcagtcccgtgatcaatccaaactcagaccttccaaatctggcctcggttttacccacgtaaaaccacacttcatcattctttacctcagtcactttcattttcctcaacagtagttgatgcacaatcaccccggagaatttcagatcattcgcattccaaaaaactccaaaaggagtttccttcaccctctcggtcaggttaaaggcttcaaactttgctttaattgaagcaaagtacccatttcctcggtaagtgatacgcccaggaaaatgctcagccaaggggagaatgagttctggagccatct

SEQ ID NO: 290275 - DNA, 848 bp, Cannabis indica
cacatggtattttttagtttgacaagtcgatttggttgttgatcggtttcgtttggagtttggattaatctttagggtttcttttggttaattgcaattacgcctggtatcaatcctttacaagtttcattattattgattaataattagaattagatcaagattaataaataggggagagttttttcatcggcaagcctgaggcaatggtatagacaataaacttgaggacaagatattaccgaaggagaagactattgtattggtcttcttgattgatgccaaaatttttctcattcccacatcaacgtcttcttctatgagagattcaagagcagtcatctaagagtggttcagttcggctcaacgacgtcctccgttttcaaatttttgttttcatttattaatttactattattattccaattaatatttttatggggttagaattataaggagtttattccttaattaattttaatgctgtgatcgtgtttatgtgttgaaactaatttagtttttccattagtcttgtcttttgacatggttttttagtcttttccttttagttttttctggttcgagtcttgtcttttggcatgggttgtgtagcttagaatcatcatggtgctatggtagaagcattcaagaaggggaagattggatgtgttcaactcgaaattgctgagataataggcattaaagaagcattgagttggattgcaactcattcgtgggatagagtcatgttggaaacagatagcttggtgtgtgtccaagcgattcagagcggtattttaataatttttatatttttttttacacatttaagtattattaaaaacata

SEQ ID NO: 290276 - DNA, 560 bp, Cannabis indica
ttgcgatgctagtttttgatgttcttgctgctgtgtttttgatgtttgatttttagaggttttatttatgatttaaaatgttgattcaagcatgatagggttggtgattagttggttttatcaagagatgaaattttggctcaaagctatggttttcaaagagaaattgttgaaatctgttgctgttgttttgttgatgcttgctgtagttttcagaggttatattatgcatgtttaagtaggtttgatctgatttgaatgcatgatagtgttgtttaatcaagtttgagtttggaactcaaagcttgatgctttaatggtgattttggattgtttgcatgaagctcggttttgatgctttagaaatgttccttagggtctaaatagcaggtctggaaggttttgtttgaattggatttgatttgagcaagttatgaatttttggttggattctgagaggaaccggaattccggttgtgcatccggaattccggatgggattctgaaattcccaaaaccggaatttcggttgggcaaccggtctgccggttgggagattt

SEQ ID NO: 290277 - DNA, 616 bp, Cannabis indica
agagttgagagaggtccttttaccacatttagctaaaaaatttagaaaatttctattataaagagactattgtgaatactcttactaataatagaaatttaacgacctaaaaagttcaggagtatgaataatgagaatttattatactatttttttaaaaaaaattaattagattaaattttgtgaaggattataccctaaaaattgataattttaattaattgattttctaatagaatattttgttaaaatttaaccaaaaagaaaaacaataacattaaactaagaattttgttacataactacattttatatagaatagatataaaactgaaatatgaggcggttaggtgataacttaaaattattttaaatacctctatctattctctctttttttcaatatttttaggaattttttcactatatacataattagaaaattatttacaataataaccttacacaaacaattaataatctttaacgtaccacatcagcaaagaatacctatttttaattattagtgtctgacaataaaaaaaacctagaaacatgtgcattaaatgtttacgttttttatttatttaattgagaaaccattagatgtcttttt

SEQ ID NO: 290278 - DNA, 535 bp, Cannabis indica
aagtatcctttacctaggatcgacgatcttttcgatcaacttcaagggaagacggtcttttcaaagattgatctccgatcgggctgtcatcagttgagaatccgagaggaggacattccaaagacggctttctgcactaggtatgggcattttgaatttctggttatgtcttttggactaaccaatgctcccacaacttttatggacctgatgaatagagtattcaaggatttccttaatattttgtgttattgtgtttatcggcgacatccttgtgtactctgaatcagaagaggatcatgagcaacatctccggatggttctatagcagcttcgagaacataagttgtatgccaaattcaagaagtgcgagttttggctatttcaagtgtccgttcttggacacattatcagcaaagatggaattaaagtggatcctggaaagatagaatccgtcagggattggccgagccaaaaaaagttacagaagttagaagcttcttgggtctagttggttattaccgtcagttcgtag

SEQ ID NO: 290279 - DNA, 572 bp, Cannabis indica
atttttatcactgtatctcacccgtagtcatcaccgtatctcatcccttgtcatcaacgtagctcacttattgtggttattaccactatctttcccaaatctatatcttaatattagatttcatctcgaattttaaatttttttaacattcttaagacattagagaaaatttactagcctgttatgttattattaattaatatgttcaaatcaatatatatatatataaataagagttttaaagcattgaggtggcattctacaatccatattacttctatctattattttttgttaaaaatttacaattttatttattttatatttatttgtaaaaaaaaaaaacttaataataacaacaataataattcagttgcacctttccacttattcatagccttcttattattattgcatatttatcagtaacataaataagtaaaataataaaaaaaaataagttacaactttttcacttccctttgattcttgcatattactcactatatatataggaatatatgttgggttttattccttaaataaaactctttacaatctgattagttatc

SEQ ID NO: 290280 - DNA, 466 bp, Cannabis indica
gtattcctcattgtatccaacttaaaacattttacaatagtcccaatgcgacatctaggatggtgttggacgcttccgctaatggagccattctttccaagtcttacaatgaagcttttgagattttggaaaggatagctagcaacaactatcaatggtcaactaatagagctcctacaagtcgaaaagtagcgggtgttcttgaagtagatgctttgaccgctctaaccgctcaaatggcctcaatgaccaacattttgaagaacatgaacatgggaggaagtgtacaaccagccgctgccattcaaagggcagaaatttcttgtgtgtattgtggtgatgggcatacttttgaaaattgcccttcaaatccagcttcggtttgctatgtgggtaatcaaaacttcaaccgcaacaacaatccatactcaaactcctacaatccggcatggaagcatcatccgaa

SEQ ID NO: 290281 - DNA, 637 bp, Cannabis indica
aaacccgaaactagcacaaaacgacaagttgagaaaaaccggtttcacaccctactgcaaaatccgggtaaccggttttacaagcagtgtaaaaccggttagccggttttaccagaaaaacaccaaaaatcaattctccaaccaaaacgtttccaaactcaaccaaactttccagacctgctaattagaccctaataaacattttccaagtgataaaacaaagcttcatgcacacaaacaaaaatcaccattaaagcatcaagctttgagttccaaactcaaacttgattaaacaacactatcatgcaccaaaccttgattaaaattacatattcatgcatattaaaactgcagaaacagaactcaaacacaatcaaactttacagcagctattttcacattttcactttgaaaaaccatagttttgagtataaaattccaagcttgaatcaaagcaactaacatgcatcaaactagctctaatctactcaaataatcatgcttaaacctctgcaaacaacaacaaaatcacagcaacaacatcaacctaaactaagcatgcaaaccatcattttcttcccaaaatttccaagaatcaagaaaagaagctagaacaaggtttacctccactagaatt

SEQ ID NO: 290282 - DNA, 521 bp, Cannabis indica
tttttttttttttttttagagaagagcttcgagactttaaagtggtcaaacctaaatggtcgttctgttaataccatcgcaggagtgcccattatttaaagtcaaatatagaatagattcacatgttacaatgcattaccaaacaatacatgttagaatttgaggaataagatgaatgaggttccatcccaaaaccaattggcaatgggaggagtagcccattcatcttatatatcacaatttatttccacacattagcaatgtgggactaactctaatacaccctcctcacgtttgggcctggaaagtgtgggtataacaaacgacctttaagaaaccacagggctgaacgtgacatttgaaagaatcccacaaggccaaatatcgagaaatttgtgggtatacacgtcgggaaatttgtagattttgaaacatatcaaagaccccaacactggaaattggcacacattggccgaaaggtcccaaatggaggttaaaggggagacagcggaagtatttgt

SEQ ID NO: 290283 - DNA, 661 bp, Cannabis indica
gcttcctacatgcacgctaaacgtgtaatatatatatgcatactgttatactaatcttacctggattcagaattcagctgtgccggtcaacctaactgaaaggaactgcgcggcggtttacaggctcctaaaccataacaatcacaacactataagtgatacgctaaatcatgtcccggagacttaaactagaaactaaaagtttccctatcgataaaaagcatggcaataccccaaataacatagaaacgagaaaatgtagggtttctcaaaatcacccaaccggcagaccggttgcccaaccggaattccggttctgggaatttctgaaccccatccggaattccggatgcacaaccagaattccggttcctcgcagactaaattcagaaattcatactttgctcaaatcaaatccaattcacccgaaaccttccagacctgttctaaataccccaaagaacaattctaaagcataaaaactgagcttcatgcaaacaaaccaaaatcaccattaaagcatcaagctttgagttcgaaactcaagcttgatcaaacatcactaacatgcatcaaatcttgattaaaattacatattcatgcataataaagctgcagaaaataatttctaactcatacaacaattacagccaccaatttc

SEQ ID NO: 290284 - DNA, 682 bp, Cannabis indica
tcaagtaagtataaattccataaacacaaacacacaatagtcgacttcatctaaaaaattcttaacttactaagtgcattatattatatagtgagcacaaggagttgcttcaagcaaggggtgtaggcaatattgagacagtgcaagagactgagttccctgaatggttcaaaactcaagtaagccttgttgcctctcaatactcttaatcttgttctcaataactgttcaacttttcttaatttaatatttttcctgatatgtagattaatgaactacggttgagcaaccagggtgcagtgtcagatgagttgtatgctatcgctaacccagcgaatacagcaatttatttttatccagggtgcatagtgaacggtattaaatttttggtcaaggaaagggatgataaccgcaaaacacaaaatagcggtgtcatggtccccggtgaagatggacaaaatttttacggcacacttgaaaaaattatggagttcacttatttgaaagattgcagtgttctcttatttttttgtaagtggtttgacactaacgggagtagaatggatagtgacggtgttattactagcatctgcgtcaaccgacagtggtaccaaaatgaaccgttcatacttgcatctcaagcaaaattgatctactacattcctgatttaaagaacggtaa

SEQ ID NO: 290285 - DNA, 527 bp, Cannabis indica
tatgtaaaggagatagttcatctccatggagcccctaaatttattgttttagatagggatccaaagtttacatcaaagttttgggtgagtcttaagaaggctatgggaaccaagttaaagtttaggacaaccgttcaccctcagactgatggtcagtcagaaagaacaatttagatagtggaatatttactgcgagcatgtgtcatggactttgagggttcatgtagtaagtacttgcctttgattgagttctcctacaacaatagctaccaaagtacaatagggatggctccttatgagatgctatatggtaggaaatgtcgttcccctattcattgggatgaaacaggagaaaggaagtacttaggtctagagttagttcagaggactaatgaagctattgataagatcaaggctcagatgcttgcttctcaaagcaggcagaaatttatgctgatccgaagcgcagagatgtcacatttcaggtaggggaacatgttatcctgcgggtttcaccaatgaagggt

SEQ ID NO: 290286 - DNA, 410 bp, Cannabis indica
gggcaacatttacccccaagccttgtttaattatgaagtgaacaaggcttgcctagatgcctccggttgccttatcagcttcctggcacgtgctttgggcgcgtggtggtgtattaatgaccatcattactgcagttattcgctttttgcaggcgtcgattcgtttcttgtccatttattgatacagctcattaaatgggtgtcagacgggtactcaagagttttccaccgtcttgatgatgatttaatccaaccgttggatctacaaaattcgaatcgattgctatcccagccgttcgatggtggctgatcacagctgtctcacacacgttctggcctataaaatccaaccttcttacttcatttggttactttcagcattttaccaaaattttcccagagtttcccag

SEQ ID NO: 290287 - DNA, 706 bp, Cannabis indica
ttatatggattaaaaaaataaaacattgggcaaaaatacacttatggtcgtacacttaaccactttctagttagatttttgccactttatttcaaccacttattcctcttctcaataataccatattttcccaattcaatcctataaatgccaaaactatttatttaataattactgttttcttcacaattaagaccttgttagtgaaaattcataaataagtcatagtctaattttagaattataattgattaattaaaatcaattaattgagtctgcaagcagtactatctcagctagtgaggggaccatgggcctatataactgagctttcaataagttgatctagatttcaccaacaagtgtgcgtttggaaagtcacaatgtaattagatttgtgtgtaattggaggtaattccacaatttggcatgtttttctgaccatgtaattacactgtaattgtgtaattagaagtaattgagggattccaattacactctccaattctcttggcctcccatgagaattggatgtaattacattgtgtaattactaaatactttccatattaagcattagctactaaaaaatattattttcccatgtaattactaactattttgccaaacaagatattagaaattcatatgtaattaacacattatatccaaacacatcttgaattttaaaatatagtgtaattac

SEQ ID NO: 290288 - DNA, 521 bp, Cannabis indica
ctttccttcatttcggttactttccattccttgccatttctgctcgaatttcccagagagaaaattcctcaaagtagcacgaactgtcttaacacttagacacttctttcagttttccagtgtttgacttcgccagttcttctcaactttcactttaccacattcagtacccccagttcaacgatctactgtaagtttcttgcatccttagataacatgcttatatttacttcgttcgttttctgggttcgtacttagagatttctgggtgtgtgagtgtttaagttcttcgagttctgttttatgtttactgcgttagttgtagaatcgccattatcatgcctctgttgtaatcatacagctttgttgaagagagccatgcgttcttcgttcaacagttgcttagggcatagaatggtttttctttctttttttttttttgttactctgtaaaacctctttctgcgatttcactgcacccgacacttgttcagggaatctctctagggtttcccatgtga

SEQ ID NO: 290289 - DNA, 919 bp, Cannabis indica
ggcttgttggggttctttgggcaaggcactatcaacttcattttctcttcctggatcactggcacttgcttgattgtcacctgatacgcctggtgctgtatttagagactctgtaggtgtgtcagggtacacttgaggctgtctagtgaggactggtctagagcctgagagaacaggagaatcatcttcgatccacacttcttcatgtccttctaaatcatcaaatttcacattcattgattcgactacagagagagtccttttgttgaatactctgtaagcccgactgttggtggagtaccccagaaatgttccttcatcactcctgggatcaaacttggccaagtgatcccgatcgttcaggacataacacgtacatccgaaaatgtgcatgtggctcacgttaggaggtcttcctttccatagctcataggcagtttgagaggtaccagtgcgaagatgaactctattgcacacgtagcaggcagtattgacagcttcagcccaaaatcgttttgaaatatctttggcctgcatcatgacccgagccatttcttgtagagttctgttttttcgctcaacaactccattctgctgaggagtttttggggctgaaaactcatgatgaattcccatgccattacagaactctgagaatatggaattttcgaactcttttccatggtcacttctcagtctaaagacttttccaactttggagtctttctcagtttgcaatctcagtatcaaggcagagaatgatccaaatgtgtcagacttgtctctaagaaattcaacccaggtaaaccgagagtagtcatccaccacgaccattacatatcttttcccactgatactttcattctgcattggccccattaagagaaatttgcctttgtgctagaaaatctttctgata

SEQ ID NO: 290290 - DNA, 564 bp, Cannabis indica
tggtgatggtgtaaggcaatctgaatatgcgagcatcattggcagtcttcggtatgccactgattgtactagacccgacattgcctatgtcgtgggattactatgcaggtttactagtagacctagtgcagagcattggaatgctatagagagggtcatgagatacctcaaaagaacattgactcttggattacattatcaaaagtttccagctgtacttgaggggtacagtgatgctgactggaacactttatcagatgactccaaggcaaccagtggctatatttttagcatagctggtggagctgtttcatggaaatctaagaaacagactattctggctcaatctacaatggagtctgaaatgatagcactagctactgctagtgaagaagcaggttggctgagaagcctgctagctgagattcctttatgggaaaaacctattccagctgtgttgatccattgcgatagtaccgcggctattgcaaaagtacagaaccgttactacaacggtaagagacgacaaatacgtcgtaagcacagcactgttagagagtttct

SEQ ID NO: 290291 - DNA, 822 bp, Cannabis indica
ttgtccttaaacttctaaatgagaacttatcttgtctgtggataagatttgctcacagttactgactttcttaggtttatttgtaaaccttgcaagaaattatgaatgtggaataacaatctaaaataatccactatgtgttaataatcacattaactatattagaatgaattcatacacaataaattaaaatttattggtgataataaagtgtgatttatttttcttaattatacagtaaaaactgtatatgctagatgaagttatcagaataaattttgaaaatttctactgttatggaagaaattttctactagtatggaagaaatttatgaatagtgatgtaataaaattacatatatagttttgaggtttaaatgaatcatgtttttaccaatgaataaacatgcttaaatatgaaatcttattaaacaaaaattgcctgtgggctaaatttttaatttaataagattagatttagatgtagattatgatagatttacacaatttatgaaaaacttaaagtttaatatttctatctcaatgaaaggtatgaaacacttaattatttataaatgtttcaaaattttatactttatgataaaattattaaattaaatctacataatttcctgtgggataaattaagagaatttaatttaacatattaattatgtaaatataataaaatccctgtagggtaagattattatgttcacataattcatgtccattatgtgatcttaatccacttaatatatataattttatataattaaggatgctgtggctactccctaattatttaaaattatgtggttc

SEQ ID NO: 290292 - DNA, 513 bp, Cannabis indica
ccgtgtattagtgtactggggggtgtaccccccttttttggcgcttctcccccgtccgggtgctacccttggaggaccttttactcctcaagccctgggaagggcctgccaggctaacagccggagcatagagcgaagtagtttgtccattcattccggacgggtttccgaaatgggatgatgctggcgccgaggcctggccctggctatatccgggggtagtggagaattgtatgccacttgtttgtggagttgcggtcggggcagtacccgagggcgatactccgggcatgtaccctgctatcacggtgggatagtatcctccataagccactatttgggcttattcgaggttgatatatttttggactcttttctggaaatcctgaaggctagcagctccttcttgctgtagttcattccagaaaggagtccccgtacggatgcttgcttagagaagcgcaagttgttgtccgtcgtcaactttcttggttttcgaggcttcctctcgga

SEQ ID NO: 290293 - DNA, 135 bp, Cannabis indica
cccaataattagtgatcctctatagatgatctacattgcatagggacaaaattaccgttacaccctttcaatgtattttacccttaaaacacttggcacctataaatgatattttagtgaactaatataatcact

SEQ ID NO: 290294 - DNA, 589 bp, Cannabis indica
tgtagtgtgcactagttggtttgaattctggggttaagataggtttattttagttgattttgtgctgagatagctaggtgtgctacaaattactcaaacttgaagttagagagcttaagttggctctctaatggtgtttttaatttctgagctatttgatgtgttctgttgcttgaaatggatttagtatagtatatgcaggtgttctagagagtagtagagtttgggctcgatttgagttgtgggggatatttttggggttgcatgcactgaataaaaaatataataatgatacaataatattatatacatatatgaataaaaaaacacataccttgctaatgttgttgatggtgtgatccaaaaaaaatattttttttattattgagaagaaaatataattatgttaaaaatgtttactactaactagttcatgcatgctttatatatgtaattaaaataaataattaatttaatatctagaaattttaatacattgaacatttatcttaaactaagttgaagaataagcatattgtgaatgtatattatttattagttcatgcatgattttaaatacattgaacat

SEQ ID NO: 290295 - DNA, 567 bp, Cannabis indica
agtgattgtttatgtgctaaatcatgctccccagactttgatatctaccaaatcatgaccctcaaactttgatatgtactaaatcatgccccctaaacttttatccatgttagaattttttactaaaattggacaaaagtccttaaattcaacagtctcaatagttcaagggtatttttaacgaccttaaaagttcaggggacatgattttgtacttgtcaaagtttgggagaaaaaattcctaattagcctctatattttacaaaccacccaaaaattctaactattttattaaaattattatttattttaatataatataaaaaatttgaaaaaaaaaagaattataactgtagatgctaaaatctacaatgatcggaatgaacgtttgtgggcactgacaacctgcggaacaaagacaaaggatgaccgtgaaacctttggacaccggggtggtgccgaccgaaggcactccgacggtcaagtcagtaaatttatagtgcgaagtagaaaacaaaataagaaatgtaaataaataacttcctgtgtctatggttatgcgatgat

SEQ ID NO: 290296 - DNA, 931 bp, Cannabis indica
atcttcccaaaaataaaataaaataaaataaaataaaacaaagtatactcaattcacaattaatatccctacctctaatttattacaaaatcccacatttataatttatataccaaattaatattatgttatctataataaattcatatttataatttatatacccaaaattaatattatgttatctataataaactaataaggcaataatctcataattatataccataattgttagctattaaattttataatatttttacaattcatgatatcttgtaattttaaccaattaccctaaataattagggaccagccataaatcatgcgtgaaaaccttaaaaggcaccaaatccataaacaatggcgcagctcatccatcaaatttgtacttccatttcttccatcaaaaaactaataccactcatccagaaattctttaaaaatacaaataaatataataattttggtacattcccaaaatattgacaacaaaccaaatttttataataatttgacttcccaaatatatctgaaccaatatattctcattagaccattagtgtttccacctccctttattacaagatcctcaagattcttattcttcaatttacttaattaattataatattagaatctcaatactaaaattctaaacactttccttttatgctgaaaattcctaaaaaaatataaaccaaaagatagctaataggaattagcgtttaaagtaaacactcttaaacattatttcaattaaaaatattctttaaaacataccttaaccaaaataatccttttattccgactaataaatctgtatagtgcataacttattaactttaaaatattaatgtgtcaaaattttcttatacattcaataccgaaaaacgtgaaaatgtaaacaaactaccctaaataattaggg

SEQ ID NO: 290297 - DNA, 496 bp, Cannabis indica
aatagtttctagtatgttttgcaactgtttaaatgcattctttcttttttaggtccccgcacccaatccagatgttgttggtcaaaagtcagatgcccttcatactgatgaagaaactgaggacactgtctctgatacacctctgttggataagaggaagcgtgctccggccttgaaatctccttttgttgatttcgggtctgctgatgtggggagcactccaatggagcttatgtcctcaggttctcaatcagctggggatgatagggatttcaaaatggtgacttatgtgaagggcctttatgctcttaatgatgcttttgctgatcccgtatctaccgagattgaggcaaaatttgacgcttggattggtgaaggattgcttaaacatcctaggtgactgtttttattaaatctgtttttgtattatgttttatttttcagttttattctggttttaatgctatttttttgttgtttctttgttgttttaggc

SEQ ID NO: 290298 - DNA, 740 bp, Cannabis indica
tccccttgtcctgcgtggtggcttagccagcttcttggaagaatctgcggcaagagtagccaccacatcgctcttcctcttctgggcgacaacgggcgaggtcgtcgctgctccacccttcggcttgatcttaaggacgggcgcggacttcaaaaaagtcatctctgcgaggataaatgaaagataagtgtaaataaaactcaagacatcagtttataacaagagataaattacctgagactggtcgagaagtttgcttggagaggcgtttgtctatccgctcttgttgcctctcagacggttctttgtatactggctctctttgaagacttgcgttctctggaatcagctggtgttctcgcagcttggcagtcgtacacagtaatcgccagtcgcgatcttgtaccggaaggctcccaaggatttcggctgtctctctgcgagtcgcgtcaagtgccggtcgagctggtctatctgcgagaacaaggaaaagcgagttagcataaaatctcaaaataaatcagaaaatgcctaagttaagaaacacgcgacatactaggtctgcgattaaagtcagttctaatcccagggactttaaagacgtagaaccacttcgatttccagtcccccatgttcgacaccattccttctactccattgatctcagaagtcgcccatttgctaaaacagtagaagccgttatgaagacctacgctttttatgtcgtagaaatagctgaa

SEQ ID NO: 290299 - DNA, 688 bp, Cannabis indica
gaataaccatccataagggggacgaagtctagcgtctcaaggttatattgaaaacaaattaatcatggaggatcaacaatggagatcgaatatccttataactcattattttaaagagttgtattttcatttgatacttattttaatctatttatttatttgattaaaattactaatttagaaaactttaaattttaattttaatttaatatttataaaatcatactttaggaagatctgaaaaataaaaatttagtttccttccttagtattaatttctcaataaatattatgaaaattacttaaatatatttttctacttaattaaatattaaaaaaaatataaattagttactagaaatcactatctagaatatttcatcaaactaagtgtatttatttacattaattttaaaataatccaatgaaaaattaattttgttaattttaaaattaattatgttactaattcaattttaattaggttaaactaatataattagcctaatacaattatttaaataaggaaaatgggccttcacaattggggttgttcatgtgacggagggctgtgtcgtacccactactaatggccccctaactctcacacaaggcctaaaggagaggaattcaacctttcattaaataattgttattcattgaataagttcaatactaattgggccta

SEQ ID NO: 290300 - DNA, 1102 bp, Cannabis indica
ctaattagttttttttatcaacatcataagtaaccaaaacgttacttatgaaaacctagtaaaataaataaaaaaaaaaacaaaatttgggattaatttcatttcagacatattattttgaaatgagtaatttgcagcataacctccttaagtggccaaattttttacaactaacccccaattctaaaatttcggtggtaaaaccccctaaactgctaacagaacactagtttagggggttttaccaccaaaattttagaacagtttagggggttttaccaccaaaattttagaattgggagttagttgcaaaaacctgcacacttaaggagattataccgcaaattattcttttgaaattaatatattttttaatgatgtggcaaagtattattgtaattaaaatttattaggtatttttgtaaatagtttatattttaagtatattattgaaaaaatttattttttttaacgataattacacagaatcatataaaaaataattataaattattagaatttcaatatgactatcactttaattgataaataatatttatcattgttattattaacattaacattatcagattttttaatgtgtcgtgcttatgtattgtattgtgtcactaagctcatatttttcgtgcatgtcgtgctaatttacaacatcgtaatgcatagtgcttaagcccatattttttttgtattatcgtacctaagtatatatttttcatgtcgaatcatgctcttgtctctcgaacttgtgctggtttcttgttgcgttaaaaaacccagtgtatatttacaatactagttttggattcttaggatgaggacagtttggggattgtgggtttaggttaggacattcattcaagtgacatataattgttttagtagagatgggagagagtggcatcccacacctcattaaacccaatttgaggagagagacaatccaacggtaggaaggaagcaatgtatgtacattacaattattagtgagtattagttgagagtgagagtattatagcaagagactaataccccacatttttatggccttcttattatttaatgttttttttttcttgatttt

SEQ ID NO: 290301 - DNA, 738 bp, Cannabis indica
ataaaatgagaataaccttgactctcgcctaccgggacaacgttggattcttattttgatcgaataaaaggttgctagaatggtttgcattttagatgagctgacaactctattcaatgaatgatactttgactctcgcctaccgggacactgtatcagtttgttggaaaccttagaaattatttaagatatgcttgttttgtattttcacatgtctttgttatttgctaaatgcttgataatttctgaattgtgtgtgaatttatattgaaccatgttattttctgttattagttgtagtttaatttcgattcttcattgttggtccaacttggcttgttgttttaatggggcgaatccctaatggattgtcatccattagacaaacataatagtgttagatgtcgatagataaatattataaatgcaacatctaaatgttcatcaattgatgacaccttagacaagtatttacaatatgaagcaagaagattgtgtaaataagaataactttgactctcgataatcgtagcatcgttagattcttatttaaatacgaaattatccttattcctcttagcttattcattttgaattagctcaataaatatatcattgcataaatggtttataaatcattaaatgtcattctatttcctcttaagaaattgaatgacacgtacgattatattctcgacattctatcccgaaatgatataaatcctcaatcttagaaat

SEQ ID NO: 290302 - DNA, 567 bp, Cannabis indica
gtattctaaaaatagaaatataaatctctatttggaaactaaaattttaaagtcaaagacttaaatttataccaattataatgagtaattcttctttcttggaccaccactactaatttaactctaagtttgcctaaagcaagcatatacaagtaggagatttctaagattgaggatttaagctaattcgaaatagaataagctaagaggaataaggataattttgaatttaaaataagaatccaacgatgctctgattagcgagagtcaaagttattcttatttatataatcttcttgtttcatattgtaaatactagtctaaggtgtcatgtattgatgaacagctaaattttgcatttacaatatttatctatcgagatttaacacttatgtttgtttaatggatgacaatccattagggatttgtcccattaaacaacaagccaagttagaccaacaatgaagattcgaaattaaactacgattaataacagaaactaacatggttcaacataaattcacacacaattcagaaattattgaacatatagcaagtaggaatgac

SEQ ID NO: 290303 - DNA, 295 bp, Cannabis indica
ggttatctgtccgaatgtgagggtgcctgccgcagagaagaccttccgggatgaactcattgccaccgccgagaagaagtactaggaatatctctactggaaggcccaggagaaggcttaccaaaggcccaggcggcttccgagagaacccacttcgcgtggggacgcccggtcgaggaggagaagccaggcgatcgctgggaagccccttcgcattggggactcagctgagaggagggctcccaggtacggagccttcgattcaggtgccgaatactggggctcctggcgccag

SEQ ID NO: 290304 - DNA, 541 bp, Cannabis indica
ataatttcataaataatcatgatatactgctaatttccaaattaactaagcgggctttacaatgtatgttatgtaacatcctaaatatgaatctctaaaacaatgtaaataaacacatataaagtttcgaaaaccttacagtgggtgcagcggaattataatggctccttccactcagatctccaacccttgtatcctgtctgtagtagagtatcaccaagatctgagtccgaatctccttctcttgagtctggattctacacagccttacacactatgaatgagtaccacttgatgtgtgtgggcacgtactctatcactatagggtttggaattatgaagagaggaagagaagagagtggttcgaatggcatagaatagatggctcaaaccttttactgaaggcaattgttttcatcatcttttaatattcggcatcactatctatttataggcaaccacctaggtttaggttagaattatttggcattaaaatattgaaaaattaaatggtaaattcccttcaagtggccggccatag

SEQ ID NO: 290305 - DNA, 794 bp, Cannabis indica
caagtactgcacgtttgtggtggtggactgcccaacagcctataacgcaatcctcggccgaccggccttggtggattttggtgcagtcacgtcaatacggcacttgtgcttgaaattcccaacccaagtagctgggatagggactgtgaggggaaatcaaggggaggctaggcagtgctataacattgctgcccacctacccgtgctgatggtccgagaaactattaagccagaaatggctgaagaagacgagttagatccctatgtgggatccgaaaaaattgtagaaccaatggaggacgtcgaggaggtgtcagtgtgcgacctcgactccaccaaagtactccagctaggaaagagcctagactcggaggaaacgacctcatcactcatgtcctcaatgtcaacccggacatgccgccggtctaacagaaacgacgtcccctcgactcagtgaaggccgaagccttagagaaagaggtggacaaattgttaagaagtggcatgattcgagatgtctattacccggaatggctagccaatccggtcctggtgccaaagcctaatgggacctggcgagtttgtatagacttcactgatctaaacaaagcttgcccaaaggattgtttccctctgcccaggatcgaccagatggtagaggccaccttcagattcaaactactgtccttcatggatgcgtatgccggttacaaccaaataaaaatgcacgtagcagatcaagagtgcactagcttcaggaccgataaagggggtatactgctacctagtcatgc

SEQ ID NO: 290306 - DNA, 512 bp, Cannabis indica
gtttcttaatgaaaaaaccactttcttggtgatttttctagtgattttgctagcgacaatgccaattctgacgactttttttatgccggcaataactccgacgatttttctgacatcgacaactattccgacgaattttctggcaccgacatcaaactccagaatagtcgtcggactcggcattgtcactggaaaaatcaccaagaaactagtttccaagaaactggtttcttgatattttttggtgattttttcagcgacaatgctaattctgacaattttttggcgccggcagcaactctagcactattccggtaccgacaactactccgacgactttttcggtgccgacagtaaacttcagtgactttttcggcacgagtaacaactttggcgatcactatagttttatttgtttattttttttaaaaaaataaatatgaagagaattttaatattttttatggtaatttgattaagttttattttttatgaattttaaatttaaattt

SEQ ID NO: 290307 - DNA, 519 bp, Cannabis indica
tgaaaaataaaaatctaaatacaaaattacacaaaaaattcgaaattaattccatgaaaaagcatgaaaaaatgaagaaaaaaatgaaaaaaaaaaaaaagggtttgatgcgcataccacgcgcgcacaactaagggactggccgagaaacctcggccaaggaggctgcatgcagcctgtcccgcacgtgcatggctcatcattcagacaaatcagggccttcagactgagaaaactcagacaggcccttgtccaaggcgcgtgtgatcgagtgaacacttatatccacgcgcgcatcgggtgacatcacccctatcttttttcaaaacttcaaaaaatcatcactaattcaaattaaatcgaaattgagttcagtaaaaaattaaatttcttaattttttccaaactataaaataaaataattctagaaaaaaattcttattattttcgtaaaaaacttgctaaacataaaacaatacataaaaacaaacatagatacaaaatgaatcacatccaaat

SEQ ID NO: 290308 - DNA, 891 bp, Cannabis indica
  modified_base (98)..(98): a, c, t, g, unknown or other
cggccctagcaaagtctcgaatcttaacactggctgcatcatctctgagatagctgtctaagggacagaaccagcagaagataaataggccgaagganaccaagggaatgggcaccggaggtccagaacccatccgggaccgacctaaataatcgcctaagtgggaaaaataatactccttggcatgattcccccaccgagtggaaggcatcctaaacctatggagacgttcatcaaaccctataggcctaaggctagcatactcacggacggaagggacataatgtatcgttaaaggggacttaccagaacccgaagtgctagcatcgggagcccccgtattcggtaccgaggtcacaggatttggtctgggggtcctccgctccaccggagccccaatacgaagggctctcccggcggtcgcctgggcctaattataagcccgctcctattccttcttgaagaggtacttctggtacttatcctatgccgtggcgatgatatcatcccagaataccttctctgcggccggagccctcacattcgggcaggcgaccttagaaaggttggagtcatccaccgactgatgccccaaaaccagcttggccttccgagagtgctccgtcgtgaccaactccccgacatcaaggtcctccttgtcatacgtggcgaagattttggctcgttgaaggaaaagttgggtaggctcagtccgcatataaggagggatcctaacccactccgtgagaagctctggatgctccacagcctagaacccggaggagaagaagaagcggtgacggtattccttcacatgcttctgataattaaaagggaccgggccctcattcaaggatggccggacgacgtaaaccgtacctaacttatccc

SEQ ID NO: 290309 - DNA, 536 bp, Cannabis indica
attagttgtgaccaaatgtatttttagtcacaatacttgttgtgactaaaactgaattagtgataacttgtaactaaatattatgttttagtcacaagtaacattttgttgtgactaaaagtcacatttagttacaaaaaaattatgttgtgactaaaaagctttcactaaaaatagcagttttttgtaaggataattttttttttgctatttttgtatatttgtaaaataattcctttaaatttcatccaactttttcttttgccttttttttttagagaatttttcatttttttttggaccggttttactattatactttttttttcttgaacaagacgtaccttaagtaaaaattaaattagacttttttgtaaaaaattataaattttatgaaaatctatttaatttttttttagtttaaagacacattaattagagtagatttttattttatttttattatttatttctatattattctttcacatgctttatttaataattatcacactatactatttttttttactttt

SEQ ID NO: 290310 - DNA, 524 bp, Cannabis indica
aattcaaaggtaagatttttttttaaaaaaatacatttttcatagatttggatgccaattattgcatgttgttgagattagtggattttgtgtagcatttgtgatctttaggtgtagtgtttgaatgaaatctgtgtaaattacagggttatcgatgacatgtcaataggttatcgataggatgtcgatagattgagtgtctgtttgaatgttactgtaatttgtatgtcgataggatatcgcttgtatgtcgataggatgtcgactggcattttaagagtatttctgccctatattgtcgactacttatcgacagtatgtcgatggtatgtcgattaaatgaacatgttgattgttaggttgtattgtcgactgaatgtcgactgtatgtcgacagtatgtcgatatattgtgtaattgttatttgtttgaattgtcgactgaatgtcgacaggatgtcgacattttgtcgacatgaaagtgttttctctgcttttgataatgtcgacataatgtcgagggta

SEQ ID NO: 290311 - DNA, 562 bp, Cannabis indica
agtcctgagaagaactttctatgccagccaagttcttttgcagcctctgcagcacctatgtattctgcctccatggtagagtctaaaattgcggtttgtttagcacttctccaaaccactgctccaccaccaagagtaaacaccatccgagatgtagatttcctgtcatcaagacatgcctggaaatttgaatcggtatagcctacgggatttaaaggaccacccttatagactaacacgaattgccttgtacttttcaagtacttcaagatatgcttaacagcattccaatgttcctgtcctggattcatctgatacttgctcacaattccaactgcataacagatgtcaggtctagtgcataaggaacccttctcatgtcctctatctcttgaggatcaatgggacactattccttagatagacgtacaccaaatctagaaggcatttgtgcccctttagtgtttgtcattgagaatctctgtaaagtttatctatgtaagttgtttgaaagagagcaagggatctgttctttcagtttttgataatctgaataccgaga

SEQ ID NO: 290312 - DNA, 609 bp, Cannabis indica
agatgattatactttcagtggatataggcatattgactctttacagagaaagatcttgtcaaaaccactatgaacaagatagaaatgccatagatctatataagcatgtagttgtggtctttcgatgacttaagtctagttatatcaaagagttcttagaatagtccaagtggattctatcacagaatattaaactcacatccatactaacatacagtttgaatccattgatagaaaatggatattaaacacttgtgaaagtttaactgtattgtattctggaaatagaaatataaaatttctatttggaatctaaaatttaaagtcaaagacttaaatttataccaaatgtacaatgagttttgattctagctttgaccaccactactaatctaattctaagtatgatttgcctaaagtaaacatatacaagtaggaaatttctaagattgaggacttatatcaatccgggatcgaatgtcgggaatataatcatgtgcgccattcaatttcttaagagaaaatacaatgacatattatgcaaatgctttataaaccattcatccaatgatatattatttaagctaattcgaaatgaataggataaga

SEQ ID NO: 290313 - DNA, 675 bp, Cannabis indica
gtgcgtgcaaattcgactggactaatcccttttatgttctgccatagtccacccaatcgctctttaaaccttcagcttcagcttccaaacacgctgaaatattattggcagcgtttcttctcccccaaataagcatatttgaggtggcttggcaaaggtttcagctctaactttggtggttcttggatggaaggctttggaggcttgaaattgctttctttcaactctaaagactcaaaagatctcttgaatttagggaaaggttgcatcggctcaacccaagcaacttgggtttcttcatcttcactcaaagcttcaagatcttcaagagagcttatcaccctctcatccttccacacttccttgtgaaaactttcagccacaatagaatcaatcacactcaaacgtgaacattcttcaatctcatccgggaatctcatagcattgaacacattaaaagtgactttttgatcattcactctcatagtgagttccccattttgtacatcaatcaaggttcttccggtagcaagaaatggccgtcccaaaataatcggaacttctctatcggcctcatagtctagaatgataaaatcagccggaaaaatgaatttatccacttgcaccaacacatcttcaattttcccttccggatgagccatggaacgatccgct

SEQ ID NO: 290314 - DNA, 957 bp, Cannabis indica
aacatcctcctcaaaaaatgttgcagttcccgtctcaaaaatatttctgacagtgggatcataaaacttatagcccctagatcgctcagaataaccaataaagtagctgctaactgttttggagtccaatttattttcatgtggcctataaggccttgcctcagctggacatccccaaatgtggaaatgctttagactaggctttcgacctgtccaaagctcataaggtgtttttgcaactgctttacttggtactctattcagaatgtaagctgctgtctttaatgcttctccccagagggactcaggtaaggtagaatgagcgatcatgctccttaccatatccttaagagtcctatttcgtctctcagcaacaccattcatgctaggtgatcctggcatggtgtactgtgggacaataccacattcctctaggaatttagcaaatggtcctggacgttgttcacctgagccatcatatctaccgtagtactcaccaccacgatcagatttgacgttcttaatccttttgttgagttgattctcaacttcagctttgtaagctttgaacacgtccacagactgagatttttcatgaatgagatataggtacccataacgtgagtaatcgtctatgaatgatataaaatattgttgaccattccaagatgccgtagggaatggcccacaaatatctgtgtgaatcaattctaagacttctgaagctctattggcacctaatctcttagttttggtctgttttcccttgatacaatctacacagacattgaaatctgtgaagtcaagagactctaaaatgtcatcagacacaagacgctcaattctacctcttgagatatgacctaagcgtttatgccataatgacgctgaattttctttatttaatttgcgtttagtacctcgtgattccacatgcaaggtttcattataggatgc

SEQ ID NO: 290315 - DNA, 574 bp, Cannabis indica
ctgggacgaaacatggaggtgtaagtggacgacatattgatcaagtcaaaggcatgtgcaagccatgcagatgacctcgaggaatgctttaaagtggttcagagatacggaatgaaacttaacccaaagaagtgcacttttggggtcaaatcaggaaagtttatgggatttattgtcagccagcgggggatagaggcaaactcggaaaaaatccaagctctcctgaatatgccttctcccaagaagcacaaagacgtacacagcttaaccggaaaggtcgccgccctgagccggtttatctcccggtccacacacaagtgcattcccttcttcaacatcctgaagaaatgccaaaaatttgaatggaccgacgaatgcgaggagacattcaaaaaactaaagaacacatggctaaacctccaatcctatcaaaacccatcctcggagaagacttgttactatacttggccgtctccgagaatgcggttagcgaggccttagttcgggaagaggaaaagacttagcaccccgtgtactatgtcagtaaacgcatgataggggtggagacacgata

SEQ ID NO: 290316 - DNA, 815 bp, Cannabis indica
atgtagaacgaaagtatttacatagcctttgtgactattagattattgcgtaatgctgattatatgttagtctaaaagatctgacaagagttaggttaattttataatctctcattcacattgagaaagagagtagtaattaacattaacaattgggtaattaaatcaaaatgattcttttccgtaatttctcatccttaattaaacaactttactgctttctttaattttcttgattatctttatttcaaacttattaaaattctttttatctgccaaatagaatcataaatctagtttagtggtattcagttcaattccctgtggttcgacctctcctgtgtgagtttactacaattgattacgtacacatgcgtattgttcatatttttcgtaacattttttaacatcctaaatatgaatttctaaaacaatgtaaataaacacatataaagtttgacaaaccttatattgggtgcagcgaaattataatggctccttccgctcagatctctaacccttgcatcttgtctgtagcagagtatcaccaaaatctgagcccgaatctccttctcttgaatctggattctttacagtcttacacactataattgagtaccacttgatgtgtgtgggcacttactctatcactatagggttcaaaattatgaagagagaaagagaaaagagaggttcgaataaggtagaatagatgtcttaaaaatttgactgaaggcaagtgtttgcatcatcttttgatttgaggccatcactatctatttataggcaaccacctaggtttaggtttaaattat

SEQ ID NO: 290317 - DNA, 628 bp, Cannabis indica
acggaaacgctttttcggtcctctcgatcctgagggccaagactccctttttggagcttgcccctctgcggacctttccctttagggaaatctgagcggacctttcgcggatcctgcgcctttttctttcgcccaggggtagaggtagggtttttcttttggttcccttcagcgggatatcttatggggctaggttccctagacttttgctgttgggtgctaggcgaggattcctctggttccttgccgagtccagcagtcattgccttgggatgcacgtggatgccagccgcctccatggctttttgcatggccagcatcacctcttgcattttttggttttgtgctttttgggcttcgatctcagcttcgtgatcgatagctttttgccttagaagcaccaactctgagtagctaccttcatcgtaggcatactcatcgaggtttccctcgtagtcatcatcaggaattccttcttcttcctcggaaccctcagctgctcttgaggctacgtcttcctcatttggatcttgagcatcctctagagggcgaggttgacgagtacttctagtctccaccatttttgtaacgtgaagtgtatttttgcagaagctttcttcagctctca

SEQ ID NO: 290318 - DNA, 594 bp, Cannabis indica
ccccgccatcaagaccgtgggccggagtatcagctctccgttgccgtttgggctcctcctgggcaaccattttgcccttgcgtttgcgaatcagagcaacttcttgctcttcttcactttcttcaacttcctcaggaagagcccggtgcccttcttgaccttcttcaacttcctcagaaaagccccattgcttttcttgaccttctcccggaagcacctcctcatccactaagtcaatagtgtctggaggggcactggaagaagcctttaaagggggggccatctgggaagaagtaaagggagggggagcttcaggagtgtgaaccccggcaagttcggccaaaatggcgtccatggaaacgcctgctacaacaaaagaaagaaggcaagtgttagaacatccatgggaaacaacaaacactcagatatagcaatcaagctagtcctaccctgactctctaattcggccctagcaaagttccgaatcttaacgctggcagcatcgtctccgagatagctgtccgaaggccggaaccagctggatgaaatataagccgaagggtctaaggggacgggctccagaggaccagaacc

SEQ ID NO: 290319 - DNA, 467 bp, Cannabis indica
tttattttttttttcacattcaattgttatattttaattattttgataatgagataaatataaagattgaatataaagttcaaaccattcgccataaaaaatatataatatattagtttgaactttctattttttataactatgtatataaattatataatatatagattatatatcattaaaacatatgtatatataaaaaaaaaaaaaaactaaactctaaaactatttatacataaataaaaataacaaaaaaatactgatttttattacattgtgtaaattataatgattttatgctcaaataattaataacaatacaaaactgatttaacagagttttcacttttagttgtaatgtaaattaaaatgttgttgtgacttaaaaagacatattttttgtgttggcaagttcacccaatgtctatatgtaatgcttaactaaaacaatacagccataaatacag

SEQ ID NO: 290320 - DNA, 725 bp, Cannabis indica
ttttaatttttaagatatgtgttagaataaataaataagttagtaaattattttttaagtaaattatattttgaattatttatagtttatacttaattttattatttttttgaattaataaaatattataaatgactttaaaaaagatagaatattataattttagaaaattattttttttaataaaagggacaaaattttgtattggttaaagtttaggaataaaaatactaatttttaacagtaaaagaaatagaacctaacaaaaggggcagaattatgtaactgttatattttgagaattttttttaacaaactgaatattttaaaaggaaaaattaagcagtaccgaaagttcaagagcaaaaatagaaattattctcaaaagaatatatataaagggattatctatggagggacttcttatttttaccctattgtataaggaaatttttttaaccaattagaaatagtgattttgagtttcactgtaatataataaactctatagtaggaaattattttatttattttattattttaatgaatatttattttgtttttcttttgaagttcaattttaaaaataaattgttagagcagggaagatgaaaaaaaaaatcttaaatgtgcactcttgtataatttttttattatttttttattttttatattttgcttataaatttaaacatttaaatcttaaaaaacatgttgttaatttt

SEQ ID NO: 290321 - DNA, 656 bp, Cannabis indica
aatagtgggcagcccacaaagtctagaaagtcaaaatacctattatacaaaatgactaatttacccccaaagaaattaaactttaaaataacctaggggcattttggtaattttctaactttcccgatttaacctagttctcaacatcttaacctagtccggtataatttccaatataacacaatttcaacaatcgtgacatttctgaccattctgtcgagttccacaattgccaggcccgaaaatattttattcgaattatggtatctacgatacccacatatttcaatacaatctccgtaattaatcaattacgctttattattcatttactcatattttcctaatcaactcgtaattagtttaagtaggattataatcctactctaatacccacttaatcacatatttaataaaatatgtccaattaaaatatcaatatatttttcgggatattacaccggatgatttcaaatgagtgtcagtaatacatcactccgacaagtgtgccccattcttctggcaatgaagtcggtctagatgcctttcaaacatcctcaatcaccctacgtgaatgcctgccaaaatcccggcgaagggtggtgacgccggattttaaatgagtgtcagcaatacatcactgcgacagtgaagtc

SEQ ID NO: 290322 - DNA, 546 bp, Cannabis indica
acggttattacaaagatattgaactttatgggtgtcaccgggaatgacaaggtggtgtgtgccacctttcagtttcaagaggatgctttagtttggtgggacatggtatcccagattcatgcgtcacaactatgacctgggaaaggttctaggaactcttcaacgcaaaatactacaatgaggccgttagaagtgccaagaggaaagagttcacccacctgacccagaaggaaaatatgagtgtgacagaatacacaactcagtttgatcggttggcgaggttggcctcgggaattgtgccaacagatttcaataagaaggaaaaatatcttgatgaacttaatgtgatgaccaagcatgaccttatgatcactacagaagacaagaccacctatgctgagatggtggaaaaagcactacgggctgagggcgcagttggatgtatgttggagtcggttatgactccagtgagtggcagggctcctacccctcctgcataaggctttagcaggggaggtagtggtttgaccatggaccagaagagga

SEQ ID NO: 290323 - DNA, 668 bp, Cannabis indica
gaccatgcattacccatggtatattcattaaaaatacccaactttatggatatttacagagatacatgtacaataatcttgggaatctccccaccaaaaacactataaatatcccctcaaagctcattaaatggggtcgagaattttgggttgcataagtggaagaagagtaaatatccaccaagaacattctctgtatttaatacactcataaatacaactgactcgtggactaaggctcattaacgccccaaccacgtaaaaaatctatctcttaatttcttacagttctctaattttatattattttattggttgccgaaaacctcagtcaacattttggtgctttcattgagagctgaagaaagcttctgcaaatatactttacatcacaacaatggtggagactagaagcactcatcaacctcgccctctagaagatgctcaagatccaaatgaggaagacgttgcctcaagaatagctgagggctccgaggaagaagaaggaattcctgatgatgattacgagggaaacctcgatgagtatgcctacgatgaaggtagttactcagagctggtgcttctaagacagaaggctgtcgatcatgaagctgagatcgcagcccaaaaagcacaaaaccaaaaaatgcaagaggtaatgctagcca

SEQ ID NO: 290324 - DNA, 762 bp, Cannabis indica
tgctagccaacctataactacacagttcacactatctaagaagcaatgccctgagagcaaagctgagaaggaggaaatgagtaaaattccctatgctaatgctattggatctgttatgtacctaatggtaagcactagacctgaccttgcttatgctattagtgtacttagcagattcatgacaaatcctggtaagacacactggcttgctatgaaatggttactaaggtacctaattgggacaactaaattgggactcaagtacaaaaagcaacaaggaagcacagcaatagaatgcttcagtgatgcagactatgctggagatagagacagtaggaaatctacatcagcctatatactactactaggggggaattgtgtaagttggaaagtccaattacaacctgttgtggcattatccacaactgaatcagagtacattgcaactacagaggccattaaagaaagcatatgggttaaaggagtcctagaagagctaagattactagacacaaaaccagtaatttactctgatagccagagttgtgtacacctatgcagaaaccctatgttccatgacagaaccaagcacatagaaataaagtaccacttcatcagagataaagtgacacagggacacataaacattgacaaggtgcctacagaagagaaccctgcagacatgggaactaaagtgatcaccctatctaagtttaaacatttttaaacttaataggttggatcaaggataaggtgatcctt

SEQ ID NO: 290325 - DNA, 1012 bp, Cannabis indica
atcggtccattccaatacatactccatgcatccaacttgagctttactttaaccaatgttttggaaagaacataacatttctccaaatgcaagtaaaactctgtttgtaggtagttcgtactaattactacgtaaaaacccgtaaaaacccgtaagtttactttcgtagtaaaattaaacttacggtaaaggtaaacttttaactttttacttaccaactaagttacgtactagttttacgttttttaccctttaccctacgttggtttggttacgaaaccaaaccaaactaaaaactaaaactagtagtactaacgtaaagttagttggtaaaagggggttaaaaaggggggttaaggtagtaagtttaaattttaaaattaaactaaactaaaagtaacgaaaaccaaaaacttaagttagttaaagtttaaggtaaccgaaaaaacccaaaaactaactaaccaaaactaaagtaagtaagtaaaaaagtaaaaaaactttacctttcgtttacgtttttaactttttagttagtaatttagttaagtaaaattaacttcggtaggttaacttaacttagttaaacgaaaacgaaggttttaagttttttaagggtttacggactaaaaaccctaaaaaccccaaaaacctaaacccctacccttacgttcgacctaaacttaaattaaaaactaaaaaaaacgtaaaagcgactttaattttaaattaatctacaacctacctagtatccagatcaagtgtagtatgtagtactctctccgtaataggatctgacaggttgtaatcaatacaacctttcctctaccattatatttccttaatcacaaaatccttaatattgtgagattcctctctatatgtctactcctctagggatactggattctttactttttggcaactacttctgtgttagtcaagaaataacactagtagtaaataaatcgttggtacaatgccaaaaactgtatagaactttccatagact

SEQ ID NO: 290326 - DNA, 511 bp, Cannabis indica
ttgaaacaaatatgggtgaaaaagaattgtctagctggtttttctgataaaactgctgcatctcaaatgtggtattttgacagtggttgctctagacatatgacaggtgacaaggattttttgactaacattcggcctatgcaatgtggagaagtcacttttggtaatggcttatctggaaaagttgttggtatgggaactctaaattttgaagggttacctagactgaaaaatgtgatgttagttgaaggactgagggctaatttacttagcatcagtcaaatttgtgatcaagggtttactgtttcttttgatagtgatcattgttatgttctgaatgatgacaatgaatgtatcttgcaaggatttcgatccaatgataactgttacactctaacccctgtgtttacttgtcattcaacttactacgacgtacttactaaccaaaaccaaacccaacccaacgaagtacttcgttgggtcggactagtccgaaccgaacgttcgggtt

SEQ ID NO: 290327 - DNA, 590 bp, Cannabis indica
ccttaattgagtgggagaattttaaaattctatacccatcttcattaggttgatacttgtgataggtacttaagaacactactgaaaagcaaatctaaccattcacatggataggtatagcttatcagaattatgagaataagataaagaactctagttcagtccattcgaatgacttgaaccaagaattcttaatcctcataaaattttatggtatcttaattttgattactttatctctggcatgtatttttcacttcaaatactagtctgctatgttgatgacttagtcttaacttaaagtttcagactaatacaaaagtcacaactaggtaactctcctaaacaatcagaggttctaagtcgctaattttaaccttaaccgacgaactacttcgtcgtactttagttaggtaggggtaggggacgtacttacttcgtaggaagtagttaagttaactaaactaaaaaggtaaaacggaaacttaagttaaaggaaagtaattttaaagtttaaaaaggaaaagtttaattttagtaaaggtaaaggtagtagttagttaattagtttaggttaagtaatttaaagg

SEQ ID NO: 290328 - DNA, 512 bp, Cannabis indica
tttttaaaaataaatacctatattaaaaaaatcaaactaattttttaaaaaataataataatttaaattaaaaaataataattttttataaattattaatattattttattttttaaaaataaatatatcattaaatattattataatgcataaagttttaattgtatacaagcagtcttatcgtaagagtatacgccttatattataataaccacacgatttaaaatcaatggttaaaaaaagtaccctaccggtagggaacttttgttaggtcctaccatagtcttgccctatatggcggacccaaaatttgaagtgagggggggcgtaaataaatttaaaaagaaaatataaagtgtagttagcggggtttgaacctttaccctctaacctatttaccaactaccttaaccattacaccaaggttactattatgtctataaatatcatcttttaatacaaatacatgttgtaactaattaaaatacatatacatttttttctcgatttt

SEQ ID NO: 290329 - DNA, 601 bp, Cannabis indica
ccccccataagtgatatggcgacgggaccatgcacacagcccctccccagggtcatgcgccaactgattcggggaggggagtactaactggcagtccttgccattcacagtcaactcctccacatattggagttgggtctcggtgagactgctagaaggggccacaaagggggtctgcttagtcttgcagcgggaagtgcgaacttccttgatcactttaggggcgaattcactgattttgagagtggctggttgggaacccttggttgtttctttctctttggcggctttataaagggtattcttggcttcctcttccacccatttctcaaactctttgactatctcctccatggctccatcggcagaatcagcctcaacatcgtcagataccctccgtttagtaacgacttccgccgtatgggaactgtcagaagagctaacccgactcttctttttagtgcgagccatagcgttcagcatggtaggtagttttgcggtggttatagcagtctcggccaagggaaacccccctgacaggccgatgggcaaccctacctatattgacctcaccaaagggaagagtgtatgtccactctcg

SEQ ID NO: 290330 - DNA, 465 bp, Cannabis indica
gtgtgtgggcactcactctatcattcaaggctgaaaatttagaagaagaaaagagagggtttagaggttcggctataggtataggtaagatggctcaattttcctgaaggcaagaaattttttcaactttaagtgttagccttcactatctatttataggtaaccacctaggttcaggttagatttatttgacattaaaataatagaaaaataaatggtaaattccttaatgtggccggccataggatgttattggccccactttgtaattttgccattttgtcattttccatttcattttctcaaaaacgctaattttccaatttaacaacttaaatgccaattctaattatttaataactaaaaattaattaataaataatattttcttttaatacatttattaattagacatataaagtctcttaattaataaataaaatctagaatatcttttcttcacaa

SEQ ID NO: 290331 - DNA, 1168 bp, Cannabis indica
atggagacaattttcttcgtctctgtagtttagatgcccaagtctgtagtgccataagtcaggtttatccaagaacaccctgtggcatttcacttgattggttagaacatagcagtgatctgccgttctgttccctgtgagaactgttttccctccagatgagactaagcattgagtcttggtgaagttcacatcatagttagcatcacacagttggctgatgctaattaggtttgctttcagtccttttacaaatagcactccagtcagagggaagacatctgagagatctagatcaccctgccccattatctcccctttatttccatcaccaaaggtgacaaaaccttctttggatgaatgaaagttatgaagatcattgcaggaacctgtcatgtgtcgtgagcatccactatcaaaataccagcagttatctttcatagctgacaaggaggtatgggcaacaagagccagattttcacgtttggatttcctcttcttcttaggtccatgttgaggggcaaaaggaaagttaccttggccagatttcctattgataatgtttgtcaagtaagttcggagtttgtaacatcttggcctgatgtgtcctcttttattgcagaagtgacacgttggaacaaatcgatcagcctgtttgacccttgatttttcactaacaggacctcttttgacagagttgggcttagattcatcaggtattatctccggttgatcatccttgatagtaggagaggcagacacaaactttattttatcaccagaggatgaagctgagttatcttcaatagtcaaatcatgcccttgattgtataacagtttgtatccaatagaggttctgtctccatacggcttctgattttggagagcttgattcagggcagcagtgcccgagggaacatgagaaagagattgcttagctctcacaagttcagaagtcaatttgtatatctcactatctttggaacacaactccaatgtcagcttcttgagtttatcttctagttcacatttactatcatcaacagctttgttcaaaatcctgtagttccttctactctcttagccatatagctccattgtgcaaacatttcctcataagccttatctctcatcaactgttgattcagaatcagacagagtgtcatct

SEQ ID NO: 290332 - DNA, 875 bp, Cannabis indica
atgtttattcttaccattttaagctgggattaagccttgggttgtgaattgttcaagttaaagcttagaaaacattagttaggtctttaatgatgtttttagaatttgagtggtttgttgtgatttgttgcttgggattggtttagtataatgcatacaggtattctgcaagttttgggaagatttgggattgatttgatttaaggggaagaatttttgggttcccagctcagaactggaatttcggttcctgggggcctgctgcaaccggtcgaccggttggtgccaggaaccggacttccggttggcaaccggtctgccgattggggctttttttcccgagccttaattttcccgtttttgcgtaatttagggtattggcatcctaattatcgatagggttaatcttagtttggatttacatccccaataagtgttttagcgtgtctctcatcgagttttcaatattatgatttagggccctgtaaagcgtcgagctacattttccactcaggctgatcgacacacttgagcacggaacgaggtaagatagcgtaagaatatatgcttcttttagttgtttgcactactagcactaatatgaatgtgactattagggtgttagtatagtgttgtatattagtgtggttacggtgttacgaacacgagtaccaggggtacgtcgtgttcgttgtacaacacttagtaattctcgggagtacagttagggctctaccaacacgagtacagaattggtactttagtgcatttggtacagtagtcgtacttcccataagaatgttcttatccatttggtgagcttaattattgagctcagggcggcttaatcataaagtcggcatcgcattattttt

SEQ ID NO: 290333 - DNA, 366 bp, Cannabis indica
caggtcttgtttttctttaaagaaaccatttctgaatccatagctttaaaccatttcttagcattaggccctgtcatagcttcttcataggtttgaggttctgtacttagagatttcatagcagtcatgaaggcataggctatgtcttcattccagatattgaaactgtacttaggattaggtttaggtgtcctcttttctctgtctctggtcaattggtaatcatctagagcttcagtgggttgaacaacttcagtttcatctctatgttgctcttctccttcagttccttctctgttggagctttctgtttgttccacctgatcttgatcaggttcacttccagctggttccacctgatttata

SEQ ID NO: 290334 - DNA, 1258 bp, Cannabis indica
cgactctctataatgcgagttcggtcccaatcgaccctacaaccttgataaaccgatatagactcgtatgtctaggttctatcaactcgccatgcgatgtccacaaaggcgactatataagaacgcagacatcctaaacgtaattaagtgttaggcccgcgagtttaacattagaatatgaacagtcaactcgcatgttaaaagggcgcatacgttgctgaatttagtaactgctattcatttattgatgttaacgttatttagtttagttattgaaattcaatgtgtaaagggattgacaatgaatgcaatctttgtataaccaattggacacctgctttgtatataaaggggtgatccaccgtgaaatgggacctacgaaactcttgctacagtggactaagcagaccgtgatctgactgaaccactataatcctctgtcttattgttgattccagttctctgttaagcatttcacattcccagctcgaatactcgccactctaggttgaatactcgcatttgtccttcaaacaatttcttcttattattagtattatcatatacttttggtgttgcaaattttgctcgacaacatttggcgccgtctgtgggaacgagaagtacattcttactaaattcaagaaagaaaatcatcatggctggaaaccaagcaaacggaggtgttaacaacgaatcaatcaacatcagaatgatgaacgttctgttatctggagttagaacgccacttgtggatgtcattaatggcggagtagggagagggtaatgtgagacctctcaatctattccctgaaactgctggcccccaagtcgaagaaacatccacgccagcagcaacaatggggcactttccacccatcactccagcggtagtatccgagggaatcgtccagctcaccactgaccagtataccgtgatccaggaccaattacgcgccctgcagaccgaggtggatggacagaacagggcctgacacccccctcaagcccccactactcgcacagaaaaccctcaggtaatgaattctaggtgtcgtaataaacgtattcgcagagaacgaaggaccaaccccgaaggtgtggacgtaaatcagccaaccttaagagaccaatctgcaaggtatcccaaccaagagacgcagatcgatgaagaccccaaacgacgtaaccctcgcagcaggccttcacgagacaacgacgtagaatccacctcctcgtcctcgcatggtcgcacacc

SEQ ID NO: 290335 - DNA, 710 bp, Cannabis indica
atttaatgaggaacataggctaaatgtctaatgaaaaaagtgaggaggcgtgagagagagaagctcaaggcgtagggcttaaataacttagttctcgtttggtacgtcatataagggtcgtattgtattaaataataaataacactatgtttggataaaacaatgtattgtattaattattacgaccaaattttttaatacaatgtatgttgtattatttaatacataataaatggtacgtattagcttgtattataatatttacaaaagatttggggtcaacaccagtctccgactcagacctgagacccgggaactgggacccgggactcggacccagaactcagacccgtagttggtgttgggatagagtgtattaaaaatatattataactttacacaatcaattaatacaagtcaataccaaatattatattgtactaaataatactaatacaatacaatacaacacaatctaacacaatacaatacgtcgtaccaaacgagcccttagagttttaatcatttttctaccttccctaactgccctttactataattcaaggcttacaaaagatcattattcaaaatggataaataatctcctcgaaatagggaaaatacgcttttcttatcttatatttaaattagtcaaaaaaagaatacattaataatccctaaacggataggtagatattagcttggtagat

SEQ ID NO: 290336 - DNA, 441 bp, Cannabis indica
gtcaaggaggagatcaagaatgcaatcttggaaataactcaaatggaagaggggtctttcccgctcaattatttgggtgtgaaacttagaccaacaaagtggagagccgaagattgtggtgttattttggataagcttagcttgaaattaaatgggtgggctagtaggaatttatcctttgctggccgtgcgcaattaattcattcggttttgcttgggatctggaacttttggatgagcctctttattctaccccaaaaaattgtggcagccgtggataaaaaatgtcgtgactttctctggggtgtgaatggtaataggagtaagctgcatatgccgtcatgggaaaaagtttgtctccctaaacagttcggtggtattggtttcagagagggtaagaaatggaacatggcgatggttgccaaacacttgtgggcgatt

SEQ ID NO: 290337 - DNA, 504 bp, Cannabis indica
cctgggcaactatcgcacaactatcgtgcaaccatgcagcaacccaacacaacaaaaatgaaaattcaacgagaaagagaaccaccattaattctagagacttcacttgagaagacgaccagaatcaatcaaaacaggagctgtttcgaattcataaaaaaagtgtagaaaaactactacgaaactaaaattcaactggaaattcagcttaatttgcataaaactaatatcctgacttcaaatttcagatccatgaaagacagatctcaaaaagttgaactggagttcccaaacaatccaactcaagtataatccaaaaaaaattacatcaatactatagtcaaatgtttatctttgtatattttcattattttccaaatttctaatggtgaatttgttcctattaaatcataaagagacatgtagatagagttacgtatgtagaaacactgttttgatttttaatgtttcacaacagttgcattatagttgcattacagttgc

SEQ ID NO: 290338 - DNA, 503 bp, Cannabis indica
tgcaactcattctagtaccacgatactagaatggagaacatttaaggaaatactaccaataaagtactcaggtcggcttgaccattttaaagtactaaatgaacattcgcttctaagtgaatggccttctgggcggactacgcgcaaaggtttcagaaacaaagtactcaggtcggccagaccactttaaagtacagtttcttatgtctgcaatttgttttatttcatgttaagctaaaagatcagattagatcaaatagctctgatgtaagttactacggtaacaaatacattttcgatcaataaatgaataaagatagtatttcaaattcaattgagtcgaaaaaatcagcatgattataatttacctaaagtgcgtacaaaaggtttagtcaaacccaaaacaccgaacagataagcaatatatttgcgaaagacaagtgaccaagagtcatacgtctgctcggtcacttggggggcacctatacctgtacaaagcattt

SEQ ID NO: 290339 - DNA, 465 bp, Cannabis indica
gtagtcggtgtctaaatctgggacttagattaggaccaaaaccaagacgaagaaccaaacccgaacccagacgtagacctggacctaaaattagaacttgaacaagaatcggccaacaaggacacttgaacaagtctaggaccgtgaccaagacccgaacccagacgtagataaaacacagacctagcctcagacccaaactgagactaaaactcgggcccaaacacggtcgtgtacacagagcggaactgagacccggtcctggacctaaatctgggacgcgatcccacacagacttggacctagatagggatctcgataagaacctggactcggaccaagacccagactgggatcgaaatgcttgacttggatctggaccgagatcttgacccagacccaaactttgacccgcactcgggaccccaagttggacctggacccaaacctagacccagatcgggg

SEQ ID NO: 290340 - DNA, 569 bp, Cannabis indica
acaaaacccgtagtcggtgtctggatttgggaccagctctggacccgaaccatgacaaggacccgaacccacaccctgacctgaatccagtcccaaacccaaaagtggatccgaacccgtacctagtgaccaaaaattggaacataaaccggaagttgaccaggtctggaactaggacttggactttgaatcataactgaaattggacatagatccagaaccgtaatcggaccaggacccggacaccaaatccgacctagacccgaatcgagagctgcacccggatcccaacccaaacctggactcgggacccgaacccgaacttgaactcagacccgaacatggaaccagactagggacacaagaccagggtcgggacctataaccgcaccccagtctcgatcccgaacccaaactcagaaaggggacctgggacctgaactagaaccagaccgagacccgtgatagtgatccagatcttgactcgagatttgggtaacggggccttgaacagaccagtagtcggtgtctagatcagggactcagactaggaccagaacccaaatgaa

SEQ ID NO: 290341 - DNA, 596 bp, Cannabis indica
aaggaattaattagataacatgtgatttagaatctagaagatctgaaaggagctaggttattttataatctgtcattcaccccaagaataggatagtaattaatcattaacaatttgggtaaacaacaacaggattctcctccctattgtctcatcttgctaaactttaaactgtgttattaagttttctgaatttctttcaaattttactgtttttaaaccgtaattgcttttgatttaccgaatagaatcataagtataatttagtagtacttaatccaattccctgtgggatcgacctcacctgtgtgagatttactacttgattgcgtatacttgcgtagcgcttaaaaatatagcaacattactaataggttaacaaaacctcttttagcaattaatatttataaatattttttttatttatatttaaatccttaatctaattattttaacaattaagtcatttaattataatatttacaataaaatttatttttttataaaaattaaacttctttctacacaaattaaaattctctttttataataaatttttaaataattaattattttaaataatatttaattatttt

SEQ ID NO: 290342 - DNA, 555 bp, Cannabis indica
acctagagcaaccaataaattatgaaaacctttttgtttcgtatcatagatagtaaatagcattacaaaaatatactttactgttttagcatcacttaactatttttcataattattttaagtattaattaaataaattcatgaaaaatacaaaaatgatcgaaaactaaatctatcaattctaacacagtttatagtatgtactaagccctaaataattaactttcaattttctgaatagtctaggtatttttcataattaattttagaaataacacaaataattcatgaaaaatacaaaatcgacccaaaatctaatctatcaattttttaacagtttataatccataactaatcatagaaaataaacatagatgtttctgagcaacctaagtattttttttaattaatttaataaataaactaaataattcataataaataaaataattgcaagaaaattatgaaacttcaccaaacaccctagaataatatgtagaatctaaatctacaaaataaaatgggaaaaagacctcagatatgcccagaacgcga

SEQ ID NO: 290343 - DNA, 831 bp, Cannabis indica
ttatatattttaattgtatgattatttatgttaaataatatttaatttagtttttattttattatatacagtggtagtatataattttgttatcatgatatatatattttaattgtggtatataatttggttagtcaagtatacatatatatattagatatacactatttttattattattattttttgtatatatgttttggtgaatggtatatgtattttttattatacagtatataattttttttaaataatttttaagttttattttctattgtacttttgctgacatgatataaaattttattagcatcctatatatttatatttttatgtgttataattattatatatatttctattgtaaggtatatattttctgttatatggtatataaattttattgtatagtatatcattttattttagataatgcatgtttagtttttattttattatacataaagtgatatataattttgttaatatgatatatacaattttttttaataatattatattattttattttattttttattgtaggtatatacgattttcttgtatggtatatggttttttttgtctatagtatagcatttatttaagatgatatttaatttatattttattatatataaacttttgggtatgtattcatattttaatagtggtatatataattttgattagcatgatatatatattttttgagtattaatctagtattgttataatttctttgtggtatataattttattactacggtatattaatttttcagtactacgatatatcaaatactgctgtatatatttaatgatctaata

SEQ ID NO: 290344 - DNA, 537 bp, Cannabis indica
attttcagaaccctagaaccaactaagcaccaacatcatgagaccagagcaagtagagcacattgttaggcatattaaggccttaaagagagtccccaagaccccacccatgctggaagaaaacaaggtctttgatagaattaacaaaatacatgagggtatggataagataatagatcgttggaattgtttattgaagtcacatgagaagtacatagccttgatgcacgctctcaacatgccacaagtccaacgtagtctaagagcaaattgggaacatctagggtatgtcggggtagatgaggccgaaagatatgacctactcatgatcaacttagtggatcaatatcaaattaccgacaccatttatcaccctgatggctctaaagaagaaatatatcatcgacccaataatgctgttaggtctgaattccttcaaaagttaccaatttcatcaaacttggtgtacttagaactcgactatgtagatttgacagaagatatgttagaggaagggtcagacatagaagagtagaa

SEQ ID NO: 290345 - DNA, 576 bp, Cannabis indica
caccctgatcgcccgcatggggatcacggagtgtctcagtattatgtgggccgcgagagcgtgccctgaaaactgcgttgagatgatcacgcagatcacctcggtgtacctgataacgtcctccctgttgtgtctgtacagagccggaccttgtgtacctgcttggagtgcgaccatgcgacgacgaagaggctgattctgcgtcgttgtctcttgatggtcggctgcgaggattacggcgctcaggatcttcatcgatttgtgcgctctggtttggaaaccttgcggattgatcccttgacattggatggttcaggtccagaccttcagggttagttcttcgttccctgcgtacacggttagtatgacgtctagaagttgttacctgagggttatcggtgcgaatagcgggaactcgaggagggcgtcgagctcggctttgtccgtctacttcagcctgtagtgcccgcagttgatcctgaatcgcagcatattgatcagtggtgagctggatcattccctcggacaccaccgccggagtaaccgggggaaaatgcatggttgctggtggcgtgg

SEQ ID NO: 290346 - DNA, 657 bp, Cannabis indica
cataatataacagagaacccattgttcagagtaaatcgcacaaaaatcgccaaaaatcgcataatataacagaaactatctaagctagcaaaaatcgcacaaaaatcgcacaaaatcgcataacatcgctcaaaatccctaacaaaaacttgaattcaatattaaatcgcattaaagtcgcataaaatcgcataaaatcgcacaaaacaccaaaatccagaaaaaccaattccccctagcctacattcatccccaaacacaaaaactagcaattcgaaactttcataaactacatatttcagttatatcacagattcacaatttaaaggataaattgcaaaaaaaaaattaaaggaagcccatacctggttcgtcgacggtgccgaggacgatgatgaacggatggagtggctcgtggatcgactgggatcgagtggctctcgtgggtcgactgggatggagtgggtctcatggggttcgggtctcgtgggtcgtcactgttcgtgtggggtcgaatgggttcgtgtgggtcgactgggttcgtgggtcgactgcgtgtggtggttcgaatggtgtggtggttcgaatggtgcggtggtgagaatgagggttaggttcgaaagggggaacggtggtgagcttgaaaccgagaaagga

SEQ ID NO: 290347 - DNA, 456 bp, Cannabis indica
gtttccgtgtcgagggaacctaaaatttcggttgtgacaaaccggaattctggatggggttcaggaattcccagaaccggaattctggttgcagaaccggtctgccgattggggaatttctaggaaccctagtttctcccgtttttatgtggtttagggtattgccatgctttttatcgatagggaaacttctagtttctagtttaagtccccgggaagtgatttagcatatcacttatctagtgttgtgattgttatggtttaggagtctgtaaaccggcgtgcagttcgttgcactcaggttgaccggcacacctgaattcgaaattgaggtaagcttagtataatagtatgcatatgtattacatgtttagcatgcatgttaggaagcctgttagattacattagatatgtatgttggcttcgtaccatccgaccgtatcacatcggttaggc

SEQ ID NO: 290348 - DNA, 568 bp, Cannabis indica
ctgttaaaaattaatatctatatatatatttatatctataattgtgatgttggagttggtgacgtggcactctagctttctaagaaacttaaatttttatttttctctattgtttcaatatattttatttattctttcttattcattatgaagcttaataaatattaatattaataataatgaagattgataagaaaagaaaactgttaaaaattaataatctatatatatatatatatctataatcctgatgttggagttggtgacgtggcactctagcttttcaagaaaactaaattttctattttctcattgtttcaatatattttatttattctttcttattcattatgaggcttaataaattattaatattaataataatggagattgataagaaaagaaactgttaaaaattaatattattaatattaataataatgtagattgagaagaaaagaaacgattaagaattaataacaaatgttcattctttaattgagaaagaaaacactttttttttctctttttctttttatcaatacatatatgaaaggatatataatat

SEQ ID NO: 290349 - DNA, 631 bp, Cannabis indica
ccacgtaaaaatcttcatctctactttctattatttaatttaatttcttaactctcattataatcggtttctaaaaatctcagtaaacattaaccatgaatgattatttttttcttaaaaaataatattttttatgttgtaattttgtttatcaataaaataaatagaaatcaaatttatttagtagaaaaaaaaagagagagataaattagagtgtggattggaaactcaaaatcgaaaggataggaaagtaagaaaaagaggatgaaaatattagagaaaaaatgaggagagcttgaaacagtaataaggaaaattgagtggcactatagcaaaactacctcaatggtatgtttcctgaaaataaataaaaataaaaaagaaactcgacaactgagaaaatcacagattcattcacccaagtgtaactgagagaggagagagctagagaggaaagggggtggtgggggaagaagagggttagagagagagagggtttggaattgagtctgggtctcgtggggaagagaagaccgagagagagggagagatgtcagacctagaccggcaaatagagcagttgaagaaatgtgagcctttgaaggaggcagaagtgaaagctctatgcctc

SEQ ID NO: 290350 - DNA, 340 bp, Cannabis indica
ataggtttacaaagtcagtgcactttttacctgttcagataaatttctccattgatcagtatggagaactatatgttagagaaatagtttatcttcacggttcccaaagtccatagtttctgatagggattcgaagttcacatctagattctgggagagcttacatagagccatgggtagtcaattgaaattcagtacatcattccatccctagacagatggacagttcgaaaggaccattaagattttagaagacatgctacggcatgtgtattatactttgaaggatcatgggaaaagtaccttcccttgatcaagttctcgtacatcaacaactatc

SEQ ID NO: 290351 - DNA, 778 bp, Cannabis indica
aataaaataataaaaaaaaagtgataatatggtgtagattttaaactttaacttcaatatccaaatacattaaaaattattaactataaaatctaagttttaagttaaaaattaaaatgtccaaactttaaatacaaaataatttaactaataaatgttatttatataatataagatatacacttttattaaaaaatatataaatcggttttattcggtttattcgggttaattgggcggtttagaataatttgtaaaccacccaatatattcattgggcgggttggattttcattatattatttcgggttgtattttttgtcggtttattcggtttggtttgagcggtttattcgggttgggcggtttgtaaattttattgaacacccctattagacaccaacaacaacagcaaaatctaaaagaacaaaacatataatacattttatataataaaaaaatagttgacaaaaattaagtaaagaggttttgatctattgtttttcataatttttattaaaggaataaaacatataatacattttatataatgaagggtattttaggtattaaaaagtaaaaatgacatttgctttattattttaaaaaatagacataacttatctataaagttaaaaataaggtcatttacttgcatttctcgttgctttatttccacttttttgggcttgtgtcttctatcaaaataggttgctaagtgtgataggtgtgtgttcgttgttggttagtgagttgtatagtcaattagttagtattg

SEQ ID NO: 290352 - DNA, 769 bp, Cannabis indica
cgagctcacaacaaggccatcgcttggacactaggtgatgtcaaaggaatcagtccttcaacggtgatgcaccgaattctaatggaagacaatgccaaaccgacaatcgacgcacaacgtagactcaatccacccatgaaggaagttgtcagaaaagaagtagtcaagtggttggatgctggagtggcttatcccatctcagatagtaagtgggttagcccggtgcaagtggttccaaagaaaggtggaatgaccgtgatcaagaatgaaaagaatgagttgattcccacaagaacagtcactggttggaggatttgcatcgactataggaaactcaacaaagcaacccgaaaagatcactttcctttgcccttcattgatcaaatgctagacagattggcggggcaagaatattactgttttcttgatggctactctggataccaccaaatagctatagcacctgaagatcaggaaaagactactttcacatgtccctacggtacctttgctttcagaagaatgccattcggtttgtgtaacgcccctgctacttttcaaaggtgtatgatggctatcttttcagacttgattgaatcttgtattgaaatctttatggatgatttctcggtctttggttcctccttcgatcattgtttagaaaatttggaaaaggtgctaactaggtgcgagaagtctaacttggtgctaaactgggagaagtgccactttatggtaacagaggaattgttcttgggcacaaaatttc

SEQ ID NO: 290353 - DNA, 501 bp, Cannabis indica
agttcaacgatcttttatatctaatgaactctggatttatattcgaaactccacataatctctataacacttagagaatcatgatctctataacctttaggggtaaaacataatctctatatacttaggggtggactttattccacagtactccctgtaacacatattttctttaaacatggaagtaatataataaattagctattatcagaataaatccttgatcttgattatatgttccagtttagatttactgttgtaataaataatgataccaataaagttctttgataatgtatcacactaccttaattgagtgggagaattttaaaattctttacccatcttcatttggttgacacttgtgataggaacttaagaacactactgagaaagcaaaatctaaccattcatgtgaatagaaataacttaccagaattatgagaataagatagaagaattcttgcatagtctattcgaatgacctgagccaagatttct

SEQ ID NO: 290354 - DNA, 675 bp, Cannabis indica
atatttcctctttgcttgtaaaaaaaatatgtttctctctctcctttaagccattttggtctaaaccgatctcaactacttctgccaagctttgtcgccatgagagaaggttggaatggtgctcaaaaggtccaacaaaaacaacccatttctcttcattggttagactcttcatcactctttctctaagtatggatggcactgtaacccccataacctcttggagtctctttatggcggcagtggtgcatgaaccacagaacaagagcgcatcctcttctccacctcccaaacatttcttcacgtagttccctgcttcatgaacaagagcgcatcctcttctcaaccttttctccatttgtatataaggggtttaaaagaaaaacttaatttgacattggtttttcttttgatcagtgaagatagacaagcatatatataaaagatgcaaacagccgaaagaaagttcaaaagtctcccaaatctgataaggtttttttctattgttcttgtgttgttttaagagttttttcaagttgattatatttcctatttcttttttttttttgttcttgtctatgttttttttttgttagtcttttttaatgtttttttttattggcttgttgtgtttattgttcttttaattttttattttttttttattgtttgttt

SEQ ID NO: 290355 - DNA, 512 bp, Cannabis indica
atggtcttatcgtcggtagtgatcataagatcatacttgatcttcacattaagtccatcgagatattttctttcttactgaaatcggtgggcgcaaatcccgaggctaacctcgccaaccggttgaattgagtaatatattccgtcatgctcatattctctcgctgggtcgggtgggcgaactctttcctcttgacacttctgaccgcctcgttataatatttagcgttaaagagttcctaaaacctttcccaggtcatagagatgacgtcatggatctgagacaccatgtcccaccagaccagagcgtcttcttaaaactgaaaagtggcactcaccactctgtcgttcccggtgacacccataaagttcaaaatcttggtgaacaccgtcagccactgctcggcttacaacacgttcgaacctcccaggaaaactggaggtgcttgcttccggaaccgctcgtacaaaggttccaatctactggccgccaccactatctcggcctgggca

SEQ ID NO: 290356 - DNA, 637 bp, Cannabis indica
catcttctttaaacagatagcaatataaacaaaaagctgcatcctttgatacactatattcaagccaatcctgatagtctgcataccaagcaacattgaaggcccttgattgaggtccaaccttttctgatggcttgagatgaggttgacaagggcctttttgcatatatgctcgtcgaacttgatcacgaacttttgaaggatggtctaaaattggtattctcaacccggggtcactttcaagttcttcaagatatgtgttaacatccacacgacttgattttacagttccatcactctttcccatagaagttgaagactcttgtatacttttaaaatacctcttcatatctatttgtaacaaatatgtgaaagattaatattatgatttataattataattatgaattaaaaaatcctacttgaattatgaaatataaaataatgatagcaaacaaataaaaaagaatcaactaaatataaaacacacaagatatactcaatagacaataaatattattaaaagttgttatttcttatttttatattttcaatgaaaaattatataatcttttaaacacccaaaaaaaataatatatcatatccatataaatctagattcaagaaataataatct

SEQ ID NO: 290357 - DNA, 652 bp, Cannabis indica
ctaaggagtcttggccaccaacaactgggtccgaactagtcaagaggatccctgagtgggtgcaggcaccaactccaaccgtgaccgtgctgcctgatgccaagaagggcaaggaggtgatggctcactacatgaaccggctggttcctgaggtcggtgagcaactggcttgtgctgacgactcatctctggatgtgttggtgggcggagtcttgaaggaactcaccagggttagtcttttttgatacttcccttttaacttttcacacttagctccatatgctgactttttcctttatgcaggccagtttgaagttggcttacacctagtcccgggctaaatcttctacttccaagagtgcagctctgtccgacaccttgagggcggaggcggacttgggcaagaaggaagctgaggaggcaagggcggagactgcagctgttcgtcatgagttgggtgaggccaacaagcagctgtttgccaccgagaagaagatcacgtgctaacaaaggacctcaaggctgctgatcgctttgaggaaaccatcgagaccttatttgctgaagttgatcgtgttcatgatgagaggagttctctgcggcaggtccttcttcggcaaaaggaagataaggacgctcaggtggccgaggc

SEQ ID NO: 290358 - DNA, 542 bp, Cannabis indica
tatcaatgattagtggagtttgaatatcttaaatattcaaccatagtgaaataggttctgcgaatacatgtgttgcggtcggatggatgaataaacaattattttatctgttttgtttattattaggcatgtttagaatttttgggggcattcaattatagtcattatgctgccgaaaattcggtagaattaggatcaaatttgatatattatatggtattttgtatagggtccactagctcaaccaccatcaagatgtgatgtgtcgaagggaaaaagccccatgccttctcgaaaaggcggtgctgatcaagaagatgaattattcacaccaaagatcatggctttaatctctaggtcactaaaatggatggttgatgaatttctaagagtcaaagataaacgtgatataatcacaattcgggtaccccgaggattcatagcacctcgtaaccagatcatgttatctggagaggatttgcagcaggttgctacgtgtgactacatcggcaaccagggaatgctgtttggaatgatgtata

SEQ ID NO: 290359 - DNA, 664 bp, Cannabis indica
agtaactagttactagttaccaaatttttgagcttttgcaaataacactccaaactattccaaaccattcccactttattttatatcatttatacacattataaataataaaattcaatccccaataactatatttgaattatagctttgaatttcaaaaaattaagttgtgtaactccacctcttatgttacaactactacatatatgtaactcccaatcatattatattgtaattattacatgtatataactcctaattatattatatattatatttagaggaatttacggcaaaagtccccaaaaagttgacgttgatgcagattagtccccaacctccaaaaatagcggcaatagtcctcaaggtcacactttttatttgtccgtccatacccagtttgacagccccgttaagtactggcaagaatgccacgtgttgaagtattattggtccaaattttaattttaattaaaaaataattaaaaataaaaaaataattaaaaaaaataaataaaaactttaatattattttttattttcttatttaaaattatttaaaattaatttcttttttctttttcttttttttctttttctttcttttcttcttcatcttcttcgtcttcttctccttcttctcactgccatcaccatcaacccc

SEQ ID NO: 290360 - DNA, 647 bp, Cannabis indica
ccaggaccctagaacaagactaagaccgtgaccaggacccggacccagacctagaaccaaacacagactagcctcagacccaaactgagacttgaactcgggcccggacacgatcgtgtacccagaccggaattgagacccggacctgcacctaaatctgggacccgatcccaaacacagacttgcacctagatagggatccagatacttacctagactcggaccaagacccagaccgggatcgaaatgttggacctacatctggaccgagatcctgacccagacccaaacttggacccgcactagggaccccaacttggacctggacccgaacctagacccagatcggggtctagacctagacacaaacctggacacagactcggacctgaactcaaacccacaccttgaatcagacccaaagctagacccggacccacgaacccaaactcgaacccagaccaggatcagaactaaggacttagacccagaactgaatccagactcagatttggattggaacttgggactcggacccaacatagaccaagacccaggacgggaacccacacccggagcctgatctggacctagactgaaatccagacccgaaccaaaactcagacgaggactcgaactaggaaaga

SEQ ID NO: 290361 - DNA, 826 bp, Cannabis indica
tttgtactattttagaaaatacagggtccattttatcatttagcaaaacacagggtccaattggtaacttttacaaaacagagggtctaaaatggtatttacccttttttgattagagttatacatgtaacaattgtaaatgttaagaaaattttaccacaaatatctatcacatataaagatatatatattctttaaggtatttgttttagttggatagtaatgaaatagaatagaatggaaatgaaattatttttattctatttttttgtttggttgtattttaaagtattaaaatatcattttagtagaatgtcttttttattatttaggtagaatgactatcctattttgaaatagaaagaataacaattccaattcaaagttgtgaaaaatttaatgccacctaagtgtgtttgtgtaaatcatcccttactaatatttcaggtgagtgacacatttttcttcatcccttttttattctgaattgagacaggcatgaccgcatggcataataaatcatgtcggtgggcccttcttagttggcccatgtaatactcttgggccatgattgagacccatccaatgattagaaaatggaaaaggattctcctcatcatggccttccttgactggtctaaatatccacatttgatcaatcgacttacatctgtcttattgatcactctatagctatggcaaaattgttataggttttcagttttttcttctttcccttttagttattcacctccatttagctatagggatccaaaattcttaagataaacataagttattagttacatatgattttgatatatat

SEQ ID NO: 290362 - DNA, 711 bp, Cannabis indica
aaagaaggagttagatcgagaacaaaatcaaatgaaacaacaaaacataaagtgtaaaagagaaagaaatcgagtttacctggtcaatttctgtgacaggaagctccaaatcttgtaactcaacattttgatagtggatatcaaacttctatctctgagaagagcttgacagagacgtagcccagatttgggtgaactctgaaacaaatctatggtgttttctctccttatttttcattttcactcatttaaactaacttgtgttcgtgtgtgggtgtgaatctagggtttctagacttggaatcgagcaagttcttggagaacttgctctgctagggtttagacttgtgagattgtgaggctgagtgtttgagtgttagggtttctagacccttcttcagagtctttaaactctgggatccaaacgacacaagttttggtgtcgtgttggatagacggtgccgttttagtctaaagaattaattagactaggaaacgtcaattttgacctttgatactgatattaaaattcttgttggtgtagggcaatttggtaaaaatcctacagtggtatcagagcctggttttggctaaagaagatcaacaagattcaagggaaaatatcaagaaggaattggcaagaaaatcttgaaagaaagattgacaaaaagaacaacactcaaaacagcaagaagatcatcaagattctga

SEQ ID NO: 290363 - DNA, 621 bp, Cannabis indica
gttgagtatgtgatttttgagaataggggctgttaaggtttaaagcttgtgtaatctgattcctaggttagttttgagttgtttttaagctctggttattagttttgaaaggtggtgatggaattgggtaagcttgagctttgaaactcaagtttaggtctttaatggcaagttggaatttattgttttgttctgtgattttctgattgaattaggtggtaaatgcattgtataggtgtactggagagtttggtaaagtttggttgaattttgaggtcatgggggaatttttcgggttcccagcacagaaccggaattccggttctggggaacctgtggcaaccggtcgaccggttggtgacccagaaccggacttccggttgggaaccggtctgccggttgggggaatttttggaaccctagttttgcccaattttgagatatttagagtattgccttgttgtttatcgatagggaaacttttagtttcaaatttaagtccccggaaagtgatttagcgagtcactcatctgtgttacaattaatgtgattagggcatccatctagcacgagcatttccgttcaggtcggccagcacacttgaattcggaaaacaggtaa

SEQ ID NO: 290364 - DNA, 550 bp, Cannabis indica
tagctcaccaacagggtcttaacatgtaattaatcaaataattctcatatattgaactatataataatataattcctcaattattcataattatctcattagggtttcactaatccatttcttaaatctagggtattacacattgggttggataaatccttaatcaagcatcccctgaagttgtatttttagctccttgagtgctgctggaaccattctatatggtgctttccaaacaaggtcaactccaagtgctaagttaattacaaaatctatttctcgttgtggcggtaatcccggcaactcctagggaaatatgttaagaaattttttaacaaccctgattactttaggcccaaatgtttcaggtcttctagagtcaatcacaactgccaaaaattttacacatccactgtgtagtaaatctctagcccttaagactgaactattcgatatccgagacccctgaatagatccaacatagataaatggatcttcaccctccggctgaaagttaccatttttcgcttacaatcaatgctggctgaat

SEQ ID NO: 290365 - DNA, 1062 bp, Cannabis indica
aacataaaatgttatttctgatctttattaataagtaaatctgattatatgaaatgacttttatttagggcataaaacccaacagtattttgttctccacctcgcttgttggaggagcgagtagctggtttaacaagtttactcatcactcaatcacttcctaggagcaactgtccagggatttcaagaagcaatttcatgctgctagggatatgcgacttgaggcggcctcactaaccaatataaagtagcagcccaacaacacacttaaggggtacttaagtcatttcagcacggctgtcgctatggttagaaatttggatgacagcacgcaacttaaaaccctttaagcggggatctttattgatccattaaccgcaggggtcgagttgtgggatgacttataaggacgtccggtgagaagcatcactgagttcaatgaaagggctcaggtgtttgtccggaaggaagaagcccgaaaggaaatgaacttgttgaaaacaagctcaggaagcaaacccagcaatgtttcaacaggtactgtttccacgagaattgataactcaggggcttctggtccgaagagaaaggacagaattaaggaatcatcgaaggagagaaagaaacaaaagaagcatgacaaatacgtaccagtgtatactatttatactgaacataaggaaacgcgggagaatatatacctcgcacaagagcagaaggtagccttcgacaaacccgagcctatgaggaattcgaggagcaaaagagatcctaacaaatactgtaaatggcataaggatattggacatacgaccgacgaatgtcgccaaatgaaagacaagatagaatatctcatcactcgagaccattttaagcagtacgtgaaaagacagggccagggacacaaccagcccagtctgcccaataacccaaataaccaagggttgcaacctatggaaggagaggacatcctagttatttcaggagggccacacatcgcaggggaaggcaataacacccagaaaagatatgtgaaagaaataaagaacgagcagtcagtct

SEQ ID NO: 290366 - DNA, 215 bp, Cannabis indica
catattaactctttgcagagatagatcttgtcaaaaccactatccatagatttaaaaaatatgtggctgtatcttttgatgacttagaatactaaactcatatttcatacagtttgaatccattgatagaaaatggttattaaacacttgtgaaagtgaaactgtattgtattaaaaaatattatttggaatctaaaatttaaagtcaaagactt

SEQ ID NO: 290367 - DNA, 526 bp, Cannabis indica
agttgatgacggacaacaacttgcccttctccagccaggcatccgtacagggactccattctggaacgaactacaacaggaaggagctgcaaaccttcaggacttccagaaaagagtccaaaaatacatcaaccttgaagaggcccaaatagtggcctatggaggatactatcccaccgggatagcagggtatatgcccggagcccagccgtcgggtactgtcccgaccgcggctccaccgatgagcggcatacaattctctgctactcccggatacagtcagggccaggtcttggcccccgcatcgtccaattttggaaatccctcggggatgaatggacaagctccctcacactccgctccaaccgccagcctggcaggtccttcccagggctcgaggagtaaacgatcctccaaaggcagcacccggacggaggagaagcgacaaaagagggggtacactccacaatacacccaatacacggagttgacggactcccaagagtgtgtgtactttgctactagg

SEQ ID NO: 290368 - DNA, 767 bp, Cannabis indica
aaacaagagataaaaagagaagtgttcaaacagctggagtcccaggctcttggttcggttcttctgagccaactggagcaggaggatctgttgttcgagcaggagaaagcatcaacagcctgttcagaagcttggccaaaagttgaagcagccacctctttcccaccatacgcaacttaggtcgcgcagtactcaaggtacatgtccttagcgtcgcccaagtagtcaaagttggcctggggattagccttccaaaaatcaaagaagagctcaaggccgacagtctccaaagcattggccttctccttcaaacggtccgcctcggtcacctgggcgtccctctcctcctttagccgaagaagaacttgccgcagagaactcctctcatcttgaagactgttaacttcagcaaataagatctcgatggtttcctcaaagagatcagcagcctcgaggtcctttgttagcacggagatcttcttctcggcagcaaacagcttctagttggcctcacccaactcatggcgaaaagctccagtctctgccctggcctcctcagcttctttcttggccaagtccgcctccgccctcaaggtgtcggacagagccgcactcttggaagcccgagagtaagtgtaagccaacttcaaaccggcctgcataaaggaaaaagtcagcatatggagctaagtgtaaaaagttaaagggaagtatcaaaaaagactaaccctggtgagctccttcaagactccgcccaccaacacatc

SEQ ID NO: 290369 - DNA, 537 bp, Cannabis indica
tacatattttctcagcatggagacatgaaacacattatatactccggacaacgcaggagttaaggctagctgataggctacctagcctaattacctcagtaaacaagtatctaatatttctcttgtaccacacttattaaggtacctaacctgtggtacatttaattatcacttttaaataaaaacctcatcagggaagagattattctaagataatctatcctttattaaatatgctcacaacatgtttctaatattccattgatcttctcaggttacccacctttcaagaataaaacatcatactatttttgctttaacctccatggttctcaataaccttctttaattcttaacatcatagccaaagatatcaaccttggaatttcacaagattagactattccttcgtatgaattccatatccttatttattgtataaattgtctatactgatagacaacatattaactctgtatgtccaaccgttactactcggtcaaaatcataagatcccatagtacataattcataatt

SEQ ID NO: 290370 - DNA, 660 bp, Cannabis indica
gaagatttttataagtcttgcatcgggagaaataaataattcatacaagtaattttaagggagttcaaaccttggtgtcttaaggagattcattcagtaaataggagtacaccatgcttgtgacaaaatctttaaaaggagtctatgttttgtttaactcaattactttgtacttgttaaaatttgactaataaatcttatctctgggcatggccacatggtttagtagcaatatacaaggatttctaataccacgtataaaatatcgtgtattattttaatttctgcaatatatttctgatctatcaagttcggtttctgatagaatagattttaattcgattcaaataattttataccaatttcgcattaattaaattctttgctaatttcacttggtaatcatgaaaacaaaatttcaattgtttgctaacaccacaaacatgtcaacctggcactgggcccaacgcccaagttgacatattgtcaacctgttctattttcaatcaagttctcaaaaaagtattctagacatttttttccatcatcagaaataataaagattcaaacaaactcggggagaaaactatatacttgaggctctgtaagcaaaacccattgcccaagttgacaatcaacctggtgcgctggtttcaatca

SEQ ID NO: 290371 - DNA, 689 bp, Cannabis indica
aagaagctcatctctttttgccttctttgaggcttggtctttgaagtctctgagctccttcagctccgcggccaggttggccctagattccaagttttcccggtgagtttcctctaaggacctcaccttggcagccatttcatccaaggcttccctggcctcccgaagctctcgcctggccatagcagtggcttcgccctccgtcctcagctcctcttggtgcctggcctccaacctatctctccgaagggcctcctccaggatcattgcctctgcatgcgcttccctccgcttggcctcctcctcactggccttggcaagggcctcccggcgcgcagcatcctcctgataaagccgcctttcagcagtaaggtcctgaaggatcttcctaacttcatccatgtccccaaaatcggacaggacgaagccatgattaattatgttcttggaaaggcggccggcctcagcagcaagctgggaaagaatacaagtataagtaagaatctccaagaaagaacaataaggagaaaagtaaactacaaaatacttaccacagtgagggagtggctgagatcctagacttggaagatggagttcaaggatgcacaagcagcgaaccgcctgggtgcacaccgggtaagctgggacacaaactcgccggtcatctccgcggcaaagggagctaaggt

SEQ ID NO: 290372 - DNA, 603 bp, Cannabis indica
acacccccagtacactcaatacacggagctgtcggactcccaagagcgtgtgtactttgctactaggcaaaatacacactaccggaggccacaaccgttgtacaaggatagctcccggagagatccgagcaaaagatgcgagtaccacaacgacatcggtcatagcaccaatgaatgcaagaatctcaaggacgagattgaaaacctaatccggttaggccacctctacgagtggatcaaaaataggttgccccaccttaatccgggccaggcgactgtgggtatgcctcagggaacaccggggggtacagcaggggcattagctccagctgctcccacgggcgacgcccagcacatccccggtctgccgcccaggcctaatgggagggtagccatgatctccggaggtccccatatcggaggaactactcgcaaggagcttaaacgatacgcaggggccgtgaaacacaatgaggtttgggaggttactcaactcccagctcaaaggccccggctgatggaccaacccatcacgttcacggaagaagacgccaagacagtgcgcttccctcatcatgacccattggtcatagagacccccat

SEQ ID NO: 290373 - DNA, 594 bp, Cannabis indica
ctttttttggccaaaacatctcaactcttagcttcaaatctgctttcagctcaatgatcaaagagacatgattttgttcttcctttgcccataacatcttatttctcagcctccatatgttgtaaaccaagttagctgttgcagcagtgtacaccagtcgcctaaacttgctttctttagctctccttagccatttgatgatgttagagagagatgtatgcattgtcctctaacctgaccagttcttgatttcctggaagctgctgttagtcctcgagcattcaaagaacaaatgttcaatgctctcaaacttgtcacagcagaataggcatttgatattagttactatcttcattttgtacaaatgatctctggttttcagcctttgatgcattgctaaccaaagaatgaaactatgctttcagatatttaattgactccaaacctaccttgtccattggacttttggtaaagtttgcacaagcaatttgtacccttgtacaacagtatactactgctgcaaattggatgtttgttgtaataaaatctaaaccagtcttaaataaaattaaaaataaaatttacagaacacac

SEQ ID NO: 290374 - DNA, 1216 bp, Cannabis indica
ttggagctttcacggttgtccgcccaagcctacaaaatgtatggcatagtgctccattaaataaatcaccattaagttgctttagaaatgatagggtttttacaaatatgaacatcataaagtgaaaaaattacaggtggaagtttgttttgaataccaataagttgatcaaaattcctttttgattaaaaaaagttatccataaagagggatattgcaatagataaagaaaaaagcatcctccacaaaaccaaacaaagtcaataaaaataacaaagaataatcaactggaacagttcaatttttgaactcctcaagtgaaaaccagaggttgaaaatagccttcttcccatagggacccaaaacaaattcaattcattaaaagattatacaattcctccctaatcaaattctccagagtaatgctatcaccacacaattcaagggtgttccaatttttttttcctttccctagtaaaatctatagacaacactataacttgctctttgatgtatagattacatgttttctaatgtacttataaggctcctattgttcttttaactaaatttatattaattgaatctataagagagatattataagctaaagctacattattaaaagctacaaagaaatattataagctgaacctcgtaatcaaaagctacattgtgattaaagatataataaattgagtgagggaacaaatttctttagaagtaaagttatatattttatacaacagttgacaagaagtcagcaccagattacaacaaccaaacatgtagagaaacaatgattagataccagaagttggggtttttttttatagagactacacaataaaataaatcttaaaatgcaacaatagaaatacgaaagcagaagagacaagttaatactatctgtatacctgaaacgtacaataggaaactcatgcatggacaaaaacatggaaaaatcatacaaataaccaaatgatcctggctcaagttaagttctctaaattatcatatgcatttattgcacacaatcgaggcttcaataaagaaaatgtaaaattcaactaactgagaaaacttgcctttcaattgagtctgcaagatactccaatgaatcactaagggaagcaagcaatataagttgttatcatcacgaatcagattctcctacatgatcaaaagaatagaacaaattagttaatgcataatc

SEQ ID NO: 290375 - DNA, 749 bp, Cannabis indica
cttcataaaatttgctatcagaagaaggatttgtcaaattggtttgagaggtgatttttctaagttgatataggatccttgtttattctcttattaggaataattaggaagaaggtggacatttctgaacattaattgcctaataaattatagagcaaatcaaaccctagaaaacacactcggggacagtttttttttggagaaactacttgcgaagtgttagattttaggataagaagcccatctcaaaaccaattggcaattagaggagtaactcatgatcttatatattttattagctttccacattttagtaatgtgggactatctaacacaaacaatttttttttccgaatcttgcatgtgtagttttaagtcctaatacaaatgatgttattaagtctcacatctgtagacgctgcatgtgccttcatcatatggtgaactttacatccttaaaatcttagaatataccgaaagatccagtcagtttgatttcccattcaaccaatcctaatggtcaatgaattttgaagtcattgcagattttacttatcttaattctaatgactggtggaattagtggaacaagttcctcctttcttagtacacaaagttccatttctaaggtttagacttgactttcagcccgtcgctgtcttgaagttgagcttgcaattatatttttctaaaggtccttatatgacattggaatgtttaaaatcttatgatcagagttgaataattgg

SEQ ID NO: 290376 - DNA, 482 bp, Cannabis indica
aaggaaaaatatcttgatggacttaatgtgaagatcaagcatgaccttatgatcacaacagacgacaagagcacctacgctgagatggtggagaaggcactacgagctgagggcatagttgggtgtatgtcggagtcggttaggactccagtgagtggcagggctcctacccctcctgcatcaggctttagcaggggaggtagtggttcggccatggaccagaagaggagaacatccactggatccggtggctcggggcaaaacaagaggttccgggggaaccagagtagaggcagtcgtcagggtggtcctgagacccagttttcgtacccagagtgcccttgttttaaaaggcaccatctgggtgagtgcagaggtcagggatgctttcagtgtggcatgccccgtcattacaagagggattgtccccagctcagatgagaggcacctagggctccggcgagacccactccagctagggt

SEQ ID NO: 290377 - DNA, 706 bp, Cannabis indica
gatagtcattaatggatttcaatcttcatttgcttcgatagagacaatagtgtaatttttatattttgcacttttcattctagccgggtccgcatatatctgaattgtctattttttcgttgataaattgaatatggtagtgtcgacaaagcggcggtgttcctgcaaaccgtgatgtattttcatttaaaatgattagacatggtgtgcatagcttatttaattaaaaaaatcaacttatgaaaggcatgtaaaactattttattttttttaaaattacacctctgcagtatatttcattagttgggcagcagtacacgaaaatattttttccacaatatctgcgaacatgacagcagataggctctttgtattgtcatcaagttcaacatatgctatagcactgtaaaatgcataataagattgttagtatctttttttattttaacttaatttcaataacatcatatgttttttgtaatgagttgagattctccttctctttggtttcagaaaaaaccctaaaagtgcatcacccttctccccgacctaactccgatagaaatactgaatcgtttttctaactgatatatcaattaacttggtatgtgattctaaatttaaagacaaacccaagaaaataagcacaaactatatatttaaattaaacggaccataaaacatacattcatgtatactaacagta

SEQ ID NO: 290378 - DNA, 961 bp, Cannabis indica
atgagttcgaaacaagaaattgcaaagtatgatagtaatggcagagacggcatagatgatgcaagttgttatgatgagtcctagatgttctaacatacgagctattatgggaaacttggaggcaatgcatttgcttatcaatactaaagcaaatgagagtaagatggtcattgaaactaaatcatttatattgaatttaaatttgagttaatttgggaccaaagacacaacttcagaatctcacacaatgaacaaaaaagaatccataaaaaaacaaatattcatctctaaaatcaaaataattaacaactcaaactggaaaaatggaaagtgagataagaggagattgaacctctagtttctgtcctgcagcgcgagtgagtccgagtttctggatcgaaaaggaaagcgattctcctaatttgaaaaaaaaaatgaacacaatcaatcaataatctctctgtagaactaaactaaactcttacaacaaaccagagatagaaagaggaatgaagaagagaaaaaaaccttgattttgtgggaacgaagagaacatcgacttgtgtacaaacatagggtttttgaaggagagagataagggttcggattagagagatctgacaggagctgagagaaggagctcaacttggactctcatactcatagtcgtctgaaatatttgagccttaggtattaatggcttcttgattttcttttgtaaactaaaagacaatgtttgaacggtattatatatattgtcttaattatttagacactaaaaaaagtaaaaaaatcattttggagccaagatttttttttttgtataactgttactttcgaaggagcaacacaacagcagaacaacacaagaactacacgaaaactaaaaaccagaaaaaaagcagaactaagcttcgaaacaaactaaatcagacctagtaactaaaaaaacgaaaaaaaa

SEQ ID NO: 290379 - DNA, 371 bp, Cannabis indica
ataaatattataaataacaattttatttgatagttattttaattattaaataaatgattttggcatttatagggttgaaagtgcaaaaggtggtatttatgaaaaatacgtaaaatagttgggaaaaatgacaaaacccaaatttgtgtggggctcattaattagccggccatcaagtttaattttaccctatttttatcattttttttattcctaataattcaaccctaaccctattgaagatagtataaaatgaaggctatggtctcttcatccaactaatgcctccaaagctaaaaacctagctttctgaagagacctcttccttcttcttcttcttgttgaaatttcgaaatactaagcctttcttc

SEQ ID NO: 290380 - DNA, 539 bp, Cannabis indica
ctagtttatgaattttcactaagttatggcttgattgtgaagaaataggattttacgaagagactttgtggagtctaattaataaatattaaaaatgataattttatttgataattaatttaattattaaataaatagttttggtatttgtaggattgaaattgaaaaaagtggtatttgtgaaaaatagataaatggttgagaaaaatggcaaaaatctaactagtgatgggcccacttcatggccggccattaggttgtattcatgctattattttattatatcttattccaaataaatcaatcctaaccctaagtaaattagtataaaaggaaaagaaaggtctcattatccaactaatgctactaatgactcttgacctagttttcttcttgtcaaacaactagagagtttgagacttcttcttcttcttttatcttcttctaattcgaaatcctatagtcttcttcaccattaaaattcaagctttagtgattgagtgcatgcccacaaacagcaagttagtactcaatcatag

SEQ ID NO: 290381 - DNA, 345 bp, Cannabis indica
ggaagaacgtgaagaaagatcttcagcaaaaggagtttcaaaataatttccaacaaatacaaactaaggggagtaggctattaccgaactgctcggggctaaacatctataaaattcttatatctttatttactttattatattacatatatattatactaactgttgcttacaatcaagactcactgtcgttggccaaaagcgagatcaacatttttgtgctttcattgagagcagaatcacaggatcgctctttatttcaaatccaatcataaacacaatggtggtacagactcgtagacgcatggttgatccggcaaatccacaggtagtggatcctgcact

SEQ ID NO: 290382 - DNA, 318 bp, Cannabis indica
caagtgatgagtttgaacccaaaatcagcaccaataatataagactttggatgatgtgcttggggagaagcctttcgtagctcgtagagaatataatatgatgttgatgaaatatatgaatccattggtggtttcttagtcaattgttggaaattatttcttcacgatcttcctcactatggttgaggtatcacttgctgtgtgtgggcactactctaacactaaggatttcgaaattgaaggaagaagagagagaaagtgggttcggccaaagatagggagagagagaggctctagttttttctgaatcagaagtgt

SEQ ID NO: 290383 - DNA, 472 bp, Cannabis indica
ataaataattatttaaatatcaataaataattttcatatttaaaccttaattatctgctaatttccaaatttaaactaagcggtctttacatctataacccaaatcttaaatgctagccaccctttcaatcaatttataatttgaaacaaccgaaaattgatttagcataattaaaaaatcttcatgaaatttttgttatagtaaaagataattgagttcctccatttagggtacccaactttctaaattgatctgtttcatcaaatgattgaggagcaactaaagactataattgtaataaacaataaattaatactaataataatattatgcctttgattgattgagaagtgaaaactatgtgttttttttatttgctaaatactaataatattatgcctttgattgattgagaaatgaaaactatgtgtttttttatttgctaaataactaataaatataacctttgat

SEQ ID NO: 290384 - DNA, 682 bp, Cannabis indica
ccagatatagcctatgcagtgagtgttttaagtagattcatgtccaatcctggagaagagcattggaaaggactaaagtggctattgagatatctaaaaggcactgcaaactatggtttaaagttcaacaaaactagttctaagatgaaactagaaggttttgttgatgctgactatgccagcaacagagatactagaaagtccataaccagctactgttttcaattaaatgaatgctgcatcagttggaaagttcaactccaaccagtagtagccctatcaacaactgaagctgagttcatggcaacaactgaagccttcaaagaggcagtatggctaaaaggaattttgagtgaaattcaaatgaagcctagaagagtgactgtattttcagacagtcagtctgcaattcatctttgcaaaaatccagtctaccatgagaggtcaaaacacatcgatattagattgttttggatcagagacaaggtagaagaaggagaagttgaacttgaaaagattcccagtgaagaaaaccctgcagatgcaggcaccaaagttctatctgttagcaaattcaaacattgcttggatttgcttaacataacttctacctaaagtgactggtataccccctatggtctttctcatcttgttcactgtgtttggattaaggtggaatttg

SEQ ID NO: 290385 - DNA, 1021 bp, Cannabis indica
ataaggctttttcctgatccagagagtagcctgaaagtttcttcgccaagtagttctggaatagaggaaaggaagacttgctttagatttggatcatcaatgccacctatttggtagaatcgttgagtcattctcttataatgcttttccaaatctcttttgtccattgaacaacacttgatcttgaaaaactctgctctaagtctttcaattacttgtgcatcttggccacataactcgacatagagatagcttagggcatttgtgacagatgggagtttcaagaaagtcatctatctgtattcgcctaagcttgtccaccaatcctgcaaagttcgtatgaatcttgagacaaaattcaagaggatcatcttgtctatgcctatggttttttgtgtttccaggctaagccaagcttggaattcttggaatctttctcaccacttagatgggggaatgtcatcaagagtaaaagtttgaaagttagaacatttactctttcgatgatgattggattctagttttacattagctgttgcttcttcttcatttttgtcttcacttttgacataggctcagtttgggatatgcttcttctgcagattgagccataaaatgttgggggtacgtcgatcgttcactagtatctaaaatcttgagactcatcactagtatcttggaaccaagggacacaagtctcagaagtctctgctagaggaagaggacaaaagaccttcaccctcaaattcttcatctatttgatggatcaaggcagaaataggaatagtcacagttggacgggccatgaattacttaggctctttctccgatagagaggaatgctcgtggaggagaattatccaaggctttattttttcatttcccattttaggttttttgtttgttgttgattttcattcaagcattcgtctaagtcaaagaagtgagtcttcttgtgaatagattgagaaaggtgatgccagagaagtctttggcattgttgagaacagccatggtactg

SEQ ID NO: 290386 - DNA, 369 bp, Cannabis indica
tttatttagtatctaaaaaaaataaaaacacattatttttagttttcctcgacagtttttttgttgactttattattactaaacaaaatagggtaaatactattttggaccctctgttttacaaaagttaccaattgaaccttgtgttttgttaaatgataaaatggaccctgtattttctaaaatagtacaaataggaccctgaattgatttttggtcaaaataaagtttaattataattcgatctaaaagtgctatgacaaaactgtttacattttttgtatctgttcgtattaaacattgtcttcaagttggatgtattaaaaaaaaaaacgttgtcaaaaattaagctcagggtcctatttttac

SEQ ID NO: 290387 - DNA, 533 bp, Cannabis indica
tctttaaacttggaattatttttcattttctagacaacaggctaactgggcagcttttaatctcggtattacgtgcttttgttatctttaatgaatttcattctctgtttataatcatcgtgcaattgtggcagttttatctttaccaaatgctttgtacaggtataggtgcccctcaagtgaccgagcagacttatggctcttggtcacttgtttcttacaagtatacttttttatctgttcggggttttgggttcgaccaaatcttttgtacgcactggatggtaaattagcaacatgctaataatttggacttgatttgaattttgaaacaaatatctttattcatttattgatcgaaaatgtgattgttaccgtagtaacttacatcagagctattttgatctaatctgatcttttagcttaacatgaaataaaacaaactgcaggaattagaaattgtactttaaatggtggtcatccgacctgagtacattttcttttttttttgaaacctttgagtgtagtccgcc

SEQ ID NO: 290388 - DNA, 615 bp, Cannabis indica
caagcgtaaaactgctccaaaagacaccaatagatgagataatgctaactttaaagacccgagacataggctaattataacctaacagtatgactcatcttgaacccaaagatcctctcctttaggtaaatcttattagtcaaagacttctgttgaaactgttcttcaagtttcttccaaatcttggcaggagtctcttctttatcaaccaatctgataatggcatcagaaaggttgaaaattatgattccagtagctgtttctaacagctcttcttgttgtatctttgaagtgttgtctggccattcaatagggtcttcaagaacccttagtaatttctgttgagccaacaaagatctaatctttctcctccagattctgtaatcaccagatcaatcaaaacgatcaatatcaactttgatattactcatgttagaaaaatcaaaaaattaaattgagttgagtttagaaaaattgattgattatcagtttgtggaatttccacaggttttccactgtccacaacttcttgttgtgtttctccttcttctcccagtcttagtcactttcttgatcctttcttgagttgatttaagcttgaaccaaagctctgat

SEQ ID NO: 290389 - DNA, 605 bp, Cannabis indica
aaggccccttcgtatcgggagcccggtggagagaaggacccccagaccaaggcctgcggtccaggtgccgaatacgggggctcccaatgccagcacttctggttttggtaagtcccctttaatgatacattacgtccctcctgtccgtgagtatgctagccttaggcctatagggttcgatgaacgtctccataggtttaggatgccctccactcggtggggggatcatgcaaaggagtattacttctctcacttaggcgattatttaggccggtcccggatgggttctggacctccagtgcccgttcccttggactcttcagcctatctatcttctagctggttccgtccctcggacagctatctcggggatgatgcagccagtgctaagattcgggactttgctagggccaaattagagagtcagggtagggctagcttgattgctttttaagtgtacattgctttcacagatattctaacacttaacccttttctcttgttgcagcagccgttcccatgggagcccacagtcctgatgtttccgctcctcctacttcttcccaggtggtcacccccgagaaagcttcttccagcgcccctcc

SEQ ID NO: 290390 - DNA, 707 bp, Cannabis indica
aaactagatccagaattcgacatcaacaacgcgaatctaataacagacaaacatcacccagaagtagaaaaaagtcaagcatacaagaacaaggaaactctgaagaatttcctcagctactacgcacaaccaaagcagaggaaaaacacccactggaggaaggagtatagccaatattacttcaatcaaagtttcttaacccatgatatgtataaaagttgtataattgtaaacatctatttttaaaacaaaatgagataggtgtctgttagatgagccttttggtgccacgtaggaggatgatcttacacgtgtacaagatgatagtcaacattcatttagattctttatatacataatatatattatcaaggaccacctagaagtaaagtagtctctatctttattacatttctgacacgtgtaaccaattaggacgttccatcaatattttatacaacatgacaaactctccagtgagagccacgattacatgaagttatagtttggaattttacttcacatggataaggatattggtccctaacttcagtgccaaacgggcttgcaaacatctaagggtattattataagagaattgaagtaatagactgactttctcttcttcttcttccatttcttttaatatttgaacatagtacttgaaaatgaagagcagcaaactctccagtgatattggctataac

SEQ ID NO: 290391 - DNA, 623 bp, Cannabis indica
tcacaaaggtggtgaagtctgatttggaaaccctcgaaattaaatcctcacacgcgaagggctcattcagctgggtatcgtcaaccgaatctgtcccactcccttccgcctcctcttcgtcctcacctgactcgcgaactggggtcgtccattcatcgtccatctcctcgacctcgatgtcaggagcatgcctcgagtggataaggtagtcgcgggccgacaccgtggactcgctgtctcgaatgtcgatggtcccaggttctgcgagttcctgcaccatcttttcgatgtccacagaagacatcgggcctagctctattggagcggcctcctcttcggaaagcgaggttgggagaaagctgtcctcctcctggtcaacttcaccgtcgaatgcacggcctccggagccgagctgttggctatccgacaagtcgctcatctgaaagatagaagatcttttcagcgtgatggatgtgtgaaaagcaaagtaagtgatctcacccgcattaaactataaagtcgcactcgatagaatggtcagcatccttgcgaatactgaccaccccatcaatatgcgagaagagataatactttcttgggcgagtaattcacgcatcctgggc

SEQ ID NO: 290392 - DNA, 561 bp, Cannabis indica
aggctcttggtttggttcttctgagccaactggagtaggaggatctgttgtttgaacaggagaagcatcagcagcctggccagaggcttggtcggaggttgaagtagccgcctctttcccaccataagcaacttgggccgtgcagtactcaaggtacatgtctttagcctcgcccaagtagtcgaaattggcccggggattagccttccagaaatcgaagaaaagctcgaggccgactgtctcaaaagcattcaccttctccttcaactggtccgcctcggtcaccttggcgtccctctcctccttcagccgaagaagaacttgccgcagagaactcctctcatcgtgaagactgttaacttcagcagataagatctcgatggtctcctcaaagcgatcagcagcttcgaggtcctttgttagcacgaagatcttcttctcggcagcaaatagcttcttgttggcttcgcccaactctagccgactagctccagtttccgccctggcctcctcagcttcctttttggccaagtctgcctccgccctcaaggtgttggacag

SEQ ID NO: 290393 - DNA, 698 bp, Cannabis indica
ccgagcacgcggtcagcgctgccctagtccgggaagaagagaaaactcaacatcccgtgtactatgtcagcaagcgcatgataggagcggagacgcggtaccccatcatcgaaaaactggttttctgcctcctaatggcctcaagaaaattaaggccatatttccaagcacacccgatcaaggtactgactaatcacccactccggcaagtgctccaaaagccataagcgtctggaaggctcctcaaatgggcaatggagttaagtcaattcgacttacactacgtcacctgcatctccataaaaggccaagtcttggctgacttcatcaccgaatgcaatgaagtcgaggcaaccgcgaatgccccgacaccatcgatccccacatggagagtgtttgtggacaaagcctccaatgaaaatggatccggagcgggggttgcaatgatatccccgaccggaatttgactctaggcggccctacagtttgacttctcagcttcaaacaacgaggccgaatatgaggccttgatagcagtgctgagactagcgaaggtcgtaggggccaaaagattagaagtctacagcgactctcagctggtcgtaaatcaaatatcgggagagtaccaaacacgcggcgagcgaatggccacatatgtaacaatagtccgggagctgctccacgagttcacggactac

SEQ ID NO: 290394 - DNA, 545 bp, Cannabis indica
gggggcctggttacgacggagaattgtcggaaggcaaaactcatcctgcagcaccaatccgtggaggactctaacctttcccgagttatctgtcccaatgtgagggtgcctgccgcggagaagaccttccgggacgagatcatcgccactgccgagaagaagtaccaagactatctctaccggaaggctcaggagaaagcctactctaaggctcaagcagcttccgggaggccacttcgcgtggggagcccggtcgagaggagaagccaagcgatcgctgggaagccccttcatatcggggactcggcggagagaagggctcccaagccaaagccttcggctcacgagccgaacactggggctccgagcgccagcacttccggctccggtggtaagtctcctttagcagttcattacgtcccttctgttggcgaatatgccagtcttaggcctgtaggattcgatgagcgtcattataggtttaggatgccttcgaccaggtggggagaccatacgaaggagttttatttttccaacttaggaga

SEQ ID NO: 290395 - DNA, 436 bp, Cannabis indica
gctttgtacttagttccatctgatttgaacttgttcttaatgaggtggaccaacaacccaacggtgctgcttgacggttaatcagcaatagtactaagaatccaggctacatgtgtgttcgttgtggaatacagtaacctcaaacatgtcacaacgtgccctcttcctccccctcactctccatttgcaatctgaacccctgcaagttgcataaaaaacatcggtcccagacttcttcaccatgaactcaaaattcattttcaatgcaaaccttccaaccacatttttcaattcagtcttatttgtatacagcttgccaacatatatttcccctgaatgtgtaccagtaagagaagttgtataaacattattttcctctatgtcttcccttgtccacacaataggtttgaattttgtacaaacttcaaaatcagat

SEQ ID NO: 290396 - DNA, 673 bp, Cannabis indica
ttctgggaaaaattcctggaagccaactggtcgactggttcctacaggcctccctgaaccggaattccagttcagtgcaggaatttttcaaaattccataacttgaccaattcaaccccaaaccacctaaaactctccagacctgctccaaataccctaaataacaattcaaaagcaacaaaacaacccagcatgcacagaattaaaatccaccattaaagctccaaggtttgagttcaaaactctaacttggttaaatccaactaacatgcatctaaacctgatctaatccactcaaatagacatgaataagcctctgaaaatagcaacaaccagcacagcaagctaaacaacattttaccataaaaccaaagttttgagtctaaagctttacccacagttaaatcccaccaaataataacaaaactagcttgaatcctcatattaaaacataattaagcatctggaaacaacaacaattaatcacagcaaccacaatagcaaaaacaccaagcatgcaaaactaacatttttcttacaactcaagaaacttaaaagaatagtcatgagtgagcttggattatactttgaatttctgaaaaacactagaattggatgaacaaaagcatgaacccttgctggttctagaggtggccgaaagagagagagagag

SEQ ID NO: 290397 - DNA, 693 bp, Cannabis indica
agtcttctggcaagactcctttttggatgtagtctttgattggctgacgccagtcatttttatttgtactatccaggaaagttatcaagttgattgtatttcctacttcaactttttccgtagattgggataatacatggtgttcccctatggtaatttgaatatccctttcttcaggaagtgttagtgatgcagctaaattagccaatgcatcagctttaccatttttttatctggggatgtgatttagagttatatcttgaaattggcccagcaaatattagccttttcgtgataagggactaaattttcatgcttgacggcaaattcaccactcatttgtttaataaccaaatacctccaatgattgtattttcatttcgagtgcaacttcgaggccgataactaatgcttcatattctgctgcattatttgtgaatatagctagaatatggaaagagtaaggtatcaggcctcctgacggtgtcacaaagacaattcccgcacctgccccactacttcttgctgccccatcaaaatataattgccacgatgaagtatcaattgcaaagacttcttcatctggaagatcctctcgcaactccatatcatctggaattgggtgtgctgccagaaaatcagccaagcttgtccttttattgctttttgggggacaaagttgatttcaaattc

SEQ ID NO: 290398 - DNA, 619 bp, Cannabis indica
aaaagaaagaaataataatatggattaatatagcaaatataccatgaaggtataatgcaagttcctcgaaagcgtctcttctggattcccaagattgattagatcccaatcataggggaggagagccttgagttggcaccagcaggcagtcccaaacaccttggcaaattcagaaccagccttccccgctgtggcagacaaagtttcaatggcctggctcgaggaggcagaggcatgagttgtatgaggatgaggtgcgttggtgttgggatcaactggaggaggagtctgttcatgggtctcgatttcagagacctcaagttcaatgggctcggacactaccttcttttatgggcagtgattttcttttccctttagaaggctccacctcggtatctgtagaaacccctgaattggttccccttttctcccttttcggtccataacatcttcaaaatgcatgtgtgcgaggcaaaataaagtgtaaaaatattaaatcaagtgaaagggaagcgtggagtgtaattttcacgtagaaatttccaaaacactagagtgagctatcacaagaagagggggtagaagggtcgtagtatccactaaaatccctacagcctgt

SEQ ID NO: 290399 - DNA, 673 bp, Cannabis indica
acactgctttgttcgagcatgaaatactggattctctgctagacgaatagcagactgattgtcacaatatagtggcactgcagaatctgtagattggtgtagatccttcattagttgcatcaaccacgtactctcttgagctgccattgctgctgctctatactctgcttctgtggttgacaaagacactgttggttgccttttgctacaccaagacactactccagatccaatcttgaatacatacccagtagttgatcgtcgggtatcatgatctccagcataatcagcatcgcagtagccaatgatcttaacctcatcccctttcttatagaagagaccatagttaatggtatctttgacatacctcagtattcgtcgtactacttccaaatgtggcttctttggttgctgcatatatcgacttactactccaactgcataagaaatatctggtcgagtcaatgtaaggtagattagacttcccaccagttgtcgatacattgctccatcttgcaagtccttcccagcatgagcacatagcttagcattagcttccataggtgttgagatgggcttgcactcgagcattccaaatctttgcagcaaatcttagcatacttttgctgacagagaaataagccttcctcagttcgatcaacttctaatccaa

SEQ ID NO: 290400 - DNA, 494 bp, Cannabis indica
ggggggggttaggcctggagcgtatgatctttgggacatcagggctttttattgtatagtcgctaggtgacaaaacttttgtatatgaatagcaaacttttgcaaatgtattttctaaacgggatcccgagattttataatatattattttaattttctaattaaataagcaaattttaattaatcacgtttttcattaatctcgttgatcagcatcgagcgacatagtatgttaaaaatcacgctaacacacctaaattagttaggttgttacagtagatctagaattcactaagtaaatcctcaacttattaattccgccttgcgccactatagatttggaattgaataacactctcagttatatagaacgctctatgtgtaccacgatatagatatgttaatgattatctattgttacaatcctaatagtcaaggatcctctatagatgatctacattgaatagggactaatttaccattctacccttcaa

SEQ ID NO: 290401 - DNA, 539 bp, Cannabis indica
taataataatccgatctaaaggtgttatagcaaaattatttacattttctgtatctgttcgtgttaggaattgtcttcaaattggttatattaaaaaaaaaagttgtcgaaaattaagcttagggtcctatttttaccattttggaaaatacagggtctattttgtcatttaacaaaacagagggtccaattggtaatttttgtaaaatatagaatccaaaatggtatttatcctataattacacagttacatttagagtaaattgtagcaaaacttcaaatagtttctgttaacccaaaacttatctgggtgatgttgacatcaatgtttgacacatggtagaaagaaaacatatcggagttgcattgtcctaagtcatagaagttaacctggaaggggtctctagctctgcgccccagttgactttgaaaactccagaattgcctatgctttcttgatcaccttggtagtggtgacgtttaccttccccatctcgcacttgtctctcacgtgcatggattctgtcgatctgtgttgg

SEQ ID NO: 290402 - DNA, 482 bp, Cannabis indica
aaggtgttggtgggaagcatttgcacactttatttgattgaattattcctgagaagtattaaggacatagatagcatgtaaaactcgattgaaacatacaagttcaatgcatattcactaccaccaattcacttccattccatctaattctgagagcaatttcatcgctaaaccaagtttaaatgagcattatcttctctgttgcaaaggtgttattgttgctgtcatttttttcttttgttcttgttgttttgttccttctgttttcattactcgaggacgagcaataatctaagtttggggtgtgataattctatggtatagagttattttttatacttttaaactgaaaatattgtgaggagagtagtaaaaatgtggttagttgtttaattttaagtagttttagtttaatttctagttaggaagctaacttttgagtcttgtaaaattattgtgttaagtgtgttttttttaattaa

SEQ ID NO: 290403 - DNA, 554 bp, Cannabis indica
gctagttagggtgttacaccttgtttaagtctgtaaagtcaatgcacaccctctaggtgccatttggctttggaactagtacagggttatatacccaaactgggtagtaggcctctttgatgaaattgttgttccatagtttttccacctcttccttcaatgccttggccctttctttgtcgagtaaccttcttttctgttgaactggcttgaaattttcgacgtcgatgtttaaagcatgacttatcacggtgcggcttattccccccatgtcttcgtgtgaccaagcaaagacatcttggttgtcccttaagaactggatcaaagcggatcttatgtcctcaggaaggtttttcccgatcttgattaatttggatggttgtttggggtctaatggaatttcttctaattcttcaatcggaccaacccctgtatcaatatccccaaaacgaggatcaatgtcctcgaccccgttttgggcgagtcttcattgttgagaactacttgccgtagctttgagggatttggctgctttctccctggttgtgatggat

SEQ ID NO: 290404 - DNA, 500 bp, Cannabis indica
tcaggaggagtcatacctgacgtctccaactagactaatggtgccattccactcgtcaaccaagcgaatcaatcgctaaggcaaccaggctcttctgtgttcaaaaggttgggaacaacccatgacctgaagaacgatctaaacagaagaaggggaacagacgagcaaaatactgcgacgatcgtgcagcttggagcccgtactcaaatccccgctcagaaagacgctgacgtaatccaaatcgaccagaatgccaagcaggtcagcccagccgtacaggccccgcttgacgaactgaaaaatatgtttcacgacatggctggacaacgtaataatgatctggagttagaccgagcacgcggaactcccttctcaccagagatcaatctcctaccactacctcacaagttcaaaatgccgacatggaagatgtatactgggagagaaaatcctctttcccatctcaagtactttgagatgcaaatggatttgcaaggagt

SEQ ID NO: 290405 - DNA, 619 bp, Cannabis indica
ttactcagtaaaagaggaaactatttattttgtaaaagttgagcttcccttttccctatatatagcagccctcctctcttccctttgcatgcatgattcacacacaaagtcaagagagaaaagagagagagatttcgaaatccttgtgagagagaagtgcccacacacagcaaacagtacctcaatcatagattgaaagactgcgaaggatcacatccatctgaaggacattcgggctcagatcttgattatactctgcgacagacaggaatcaagggttagagatctgagtggaaggagacacattattccgctgccatcactgtaaggtttcttaaccttttatgtgttttatttatcgttttagaagttcatatttaggttgttaaatcaacatacttgtgagtagatctaagatcttggtaaaataaattccaacaactggcaccagagccatggtaattgatttgcttgcaagaaatttggacttaaaacgatttgtttgtgatttggatggtatcatggtgtgtcatattgatgtttgattgatgtttgtgaattctgggaaaaataattgattatctgtatctgaaattatttttattggatagtttggaaa

SEQ ID NO: 290406 - DNA, 518 bp, Cannabis indica
gttgctacatgtgcgttgttgtgcacatattttaaatctaattgtcaaggatggcttatctgtcattggtgatagtgttgacaaaattcgagacagtgttgcttattggtcgggcacaccaaaaagacatgaaaaatttgaggacactgctcgtcaacttggagtaccatacaccaaaaaaatatcacttgattgtgtaacaaggtggaattccacttttctaatgcttagcacagctttatcgtacaagacagtatttgaacgtgcaaggttacgtgagttgagattgaggtgtgccccttcggaaattgattggcaaaatgctcaacaattatgtgataaattagaggtgtttcatgaagtgacagagctattctctggaacaaagtaccctaccgccaatatttttttccctaaaatttgtgaaattaagacaaatattgactcatggatgtcatcagatgtgccttttattaaggacatggcaactcaaatgatgtctaagtttcaaaaatatt

SEQ ID NO: 290407 - DNA, 797 bp, Cannabis indica
aagaaggaattgattatgaggaaacctttgccccggtagcaagacttgagtccattagaatgttgttagcttttgcatgccacaagaattttatcttgtatcaaatggatgtaaaaagcgcattcttaaatgggtacattatggaagaggtttatgtctctcaaccacccggttttcaaaatcataaataccctaaccatgtttacaaattgaaaaaggctttatatggtttaaagcaagctcctagagcttggtatgaaagattaagcacttttcttatttcaaatggtttttcaatgggtaaagcggataatacactttttataaaaagaaaatccaaagacattattatagtacaaatttatgttgatgatattatctttggtgctactaatgatgctctttgtgaagaattttctaagtgtatgcatagtgagtttgagatgagcatgatgggagaactcaacttttttcttggacttcaaatcaagcaacaaaaggatggcatattcataggtcaaactaagtacatcaaggatcttcttcaaaagtttgacttggcaaatgcaaagtccatgaatacacccatgagcacatccataaagatgactctttgtagaagaattttctaaagtgtatgcatagtgagtttgagatgaggcagtgaactgggagtaaaactcgaaacttcttttccttggacttcaaatcaagcaacaaaagggatggcatattcataggtcaaactaagtacatcaaggatctccttcaaaagtttgacttggcaaatgcaaagt

SEQ ID NO: 290408 - DNA, 524 bp, Cannabis indica
tgaagaacgaggtcgaacccatgggaattgcgtgaaatcgaagaaaatacttatttaatctaagctaataaaactctaacctagttccgaaaatggtgaggtttttggtaacaaaataaaataaagtgtttaaatgataaaaatgacagtaacagatattttcagaaatattttgggatattattaagggttcagaatccacttaagtgtatataaaaatatttatgtttatattgattctcataatttaatcagtaatcaaaccaattattttctaataaaaaatagattttccttcgctttaaaattataacttctaagcattaaatgtgaaacaatttaatgtaaatacaaaaaatcaaagaatattatttttaataaaatatggaaccaagcataaataatttctaactatcaaaaatacttgatattaaagatgaaagaaattattttaagaagcgaaaatcataagcatatattgtactgagaatcaaaataaaaataaatacttaattaaatacact

SEQ ID NO: 290409 - DNA, 539 bp, Cannabis indica
aaaatctccggaattgagaaattataactctaatattcatttctaaatattggggtccacaaataattaatttcataaataatcataaaaataacagaaatgagtgctaattgcctttactaatccaaattacaaaaatggtcattacatcaacagactcagtaagaaaagcatatgacgtacaatgtattaccgacttgatttatgcccccatacacctttccacaaggcttatcagataagtaagaacgttcttaacaaaagtacgacctctgtaccacatgcactaagtaccactacagtactaatgttggtagggttaaatcgtaccttgagtactaatgagtgttgtaccacatgcactacgtaatttaccatactagtgttgataatatcagatcataccctttgaacatcatatgttgtaccaatgcactcggtaccgctatcgtactagtgttggtagcatatgaatcacaattagcatgcatatattacacacaaatattcatataaaaatatattctatgctagtctta

SEQ ID NO: 290410 - DNA, 586 bp, Cannabis indica
aacaaaaaaatcaacatgcaaaatgagaaccccaaataatttacagagaaatgaacaatacaatgaaaatgaaaaaaaaacctaaaacaacacaagatcaatacgaaaataccttcacagatttaggagacttcacaaactcagtttccaactcaaaatcaaagtctgagttctccacaacagttcgaggacgttttcctcgagtgttcttggaagttccagcaggtagttttcttttaggggcaacaagagaagtaaggctaagaggattatctttctaatttttcttacctattgttggtttgggtttcattttatggggttgttttggggaatatttagcaatagaggatgatgaggatgaacgtgtaattgtcatttagatggaggaggagtagtattatatagagaaaaaggaacaaaaaatgggggaaaattaagagggaagcttgagaagaaaatgtaataattgaaaatttttgaaaagaaatatcaaactacccacatgtggaagaagaagaagatgaacagagattatgggagtggatttatggtaatgattatataacctttaaaatatttgaaa

SEQ ID NO: 290411 - DNA, 622 bp, Cannabis indica
ctataagtgtctgttttgactgacacttttccaggatatagctcctccagctaacaagaaaatgtagcctgatgtagaccttctgctatcttggcatccagcgaaatcagaatcagaataccctacgacctccaaatgatctgatttcctgtatgtgagcatgtaatcttttgttctctgaagatacctcataaccctcttggctgctatccaatggtccataccagggttgcttaaatatctgcctaacatcccaacaatgtacgcaatatctggacgcgtacatacctgaagatacattagactccctacaactgatgcatagggaatctttttcatttcctgaatttcaaggctgcttttagggcattgtctaagactgaatttgtctcctttagcaacaggggtatcacctggtctacaatcttgcatgccaaaccttttgagtactttatcgatatagctcttttgtgataatccaagaataccccgagaacgatctcgacgtatttgaattcctaatacaaaagaggcgtcaccaagatctttcatctcaaattgcttagataaaaatctcttggtttcgtgcaataagcctatatcattagtggcaagcaatatg

SEQ ID NO: 290412 - DNA, 721 bp, Cannabis indica
gaaagacggagttcaaggatgcacaagcagcgaaccgcttgggcgcacaccaggttagctgagacacaaactcgccggtcatctccgaggcaaaaggagccaaggtgggcccgaggaaacgattgaaccagtccgacagggggtccaagtttagatcccacgggttctggtagttctgatcgttaagggtattttgcatttcatctcgcaaaaccctcctcaaggcctccacatcggcatgcccccgggagtactcgtccatggcgtagttatgcttggctatccggagctcctgcctcgcctcatctccgggaaccggagtcagcactatgttgggaggcactgtatattcctccgcctcggaagggatcccggaatcagggccaggggccggagtgtccactctccgctgccgtttaggcacctcctcggctaccatcttgcccttgcgcttgcggatcagagcaacctcttgctcttcttcaccttcttcaacttcctcaagaagagcccattgctcttcttgaccttctttagcttcctcaggaagcgcctcctcctcatccactaagtcaatagtgtctggaggggcactggaagaagctttcatgggagtggccacttgggaagaagttagaggaaggggagcgtcaggagtgtgagctccggcaagggcggccaaaattgcatccatggaattagctgctacaacaaaagaaaa

SEQ ID NO: 290413 - DNA, 459 bp, Cannabis indica
agttttcgatttcttttatgctttatttttgcattgtttatttttcgaatactccttcgagtttgctatagaaaatacgtaggaaaccctaggttcaggaactctgcgattctgctttgtcattgtttcatgcgattttacagtccataatgcctgctttctgaactgcataatgcttgtctttcatcttgcttattctgagctttatgaaattttttgccctaactcgagaaaatttcaaacttcttgagtttttgacttttctttgaacattcttgttctttaatcttttgagtactcctggtcggcatatttgcttgtttatcattcgatattttgaccaaacactcatcttgtgtgttgtctttgtagatgaactcaagtgagttttgggagagcgaacatcaaatcaaccaggacctacttcaacttttgcacgaggatcgtcctcgtctttgt

SEQ ID NO: 290414 - DNA, 803 bp, Cannabis indica
ccacccccagagtaaccaccatctcagattctttatgagttggtgtagatataaggacttctaacatatacatccctataatctaacatatagctcactttcataaatctttcttgactttcctttactgttccttttgattacattccaaatggctcccactcaacagtaggagtctggttaaattcatacatagaagtacatttaacctcttactattgttttcagggatatcttgttgtgatgtttattttagtctgaaactgtaagttccttctagactaagtcaacaacatagcaatgttgtattaacattaatttaaaatacttgcttaagattaagtaatcatttgagataccataaaacatttcatgaggattaggaattttcttgcctaagtcattcgaatagagtatgcaagaattctactctcttattctcataattctgataagttatttatatccatatgaatggttagatttactttctcagttgtagtctaaagttcctatcacaagtgtcaaccaaatgaagatgggtttagaattttaaaattctcccactcaaatatggtagtgtgatacaatgtcaaagaactttgttagtatcaatttctattacaacagtaaatattaattggaacataaattaagatcaagaatatactctgataattggctaatttattatatttaatccatgtttaaaatatgtgtgccatagagtactgtagtgtattgagtatagtctagagttcaaaatgaactacatatgtaaatagtatagtccacccctaagt

SEQ ID NO: 290415 - DNA, 605 bp, Cannabis indica
caaatctgtcccaaagacaccatacgagttgtggtcaggcaagaaaccgagcttgcgtcattttcatgtttggggatgtaaagctgaagtaaggccctataacccacaatctaagaagcttgatccgaagactatcagtggctattttgtaggctacactattggttcgaggggttctagattctattgtccttctcacaccaccagggtgatagaatcagatagagctgtctattttgaagatgaatttggttcaagtcaagggtcaagagaaattgtgttcagggaagaacgtatttatgtccctgtacctgttgcttccgcttccgctcctactattgatcctgtgattgaacaaattccaacagaagctcatgatgaacctcagaatcatatgcaagatgaaaatcctgatattgagggtggtgaagttgtattgagaagatctgagagagctcgcaaacctgctattcatgatgactaccttgtctatttgcaagaacatgattatgttgtgggagacgcttctgaaccagttacttatcaagaagccatgaggagtcctcaatctaagttatggttgaatgcaatgacagatgagtcaa

SEQ ID NO: 290416 - DNA, 603 bp, Cannabis indica
tttttatccctgaatgttaaacgggatggagacaggaatcatactctctgtcccgacggaaactcgtttaatattttattttatattttataatttgtgtttgcatttttttagtatattagtattcttttaatgaattttaagttgtgttttgaataataattagtttattaaataataattaatgtgtaatattttaatttttatatagtttaatattttatatattttaatttttattatactttatttttttatgaggggattcctggcctggccctgttcttgttcttattaggagatttctcaccccatctccaatgaaaaataagcggggatgagaattaaaatataaataaatttaaatagtattaattatttttttttgtaaaaaagcattaatattttgattattataaaaaatattaccatatatatttagtttgtgagatctattttttatttttaacttaagttatttatatattattagcaataacaatatatatgcattatacataaaatatatgtggatggtgtacataaatgacatagcgaacaaaaataaatattataatagataaaatatatataaaaaagctc

SEQ ID NO: 290417 - DNA, 271 bp, Cannabis indica
ctcgaatggtcatgctcgacacgtgtcccctttcaaaggcagagccatctcggaataagtctatacgcaacctcggaggtcccgcacattatcccaaaattggcactcttacgtggcatcacaagaatggtgacacgtggcatcaacttagggcacctagtcagatgaacatgccgagcaggatgcctcgctggcgtatccatgatggaatactcaacgagccgtggagaatgagcaacacttagcgaattcaaccaagcacttcgtgagt

SEQ ID NO: 290418 - DNA, 664 bp, Cannabis indica
ctttagtcttttgctcttcgttgaggcctttgtggtctaagttgcggctttggaagtggctatctcgtggtagtaatgggtctttagcggaattgctggtgtttctatttgaggtacttgatctgaaaacttttgctttgttgtcgatggtttggtggtggttatggtttgataggaactcagtgttgtttgggaaaaagcaatctcgtttggatgtgcttgatgaattagctcgggaagctttggaggattttcagggtgtgggtttgggggttggcggtttgttgggagcctctactatgggtgggactttgaggggggtcgggtgtggtgtggagaggcggctccattggtgtccgccggcgcaaggggagtttgtgttgtcggtggatgcggcggtcactccggggagggggtttgtggggtttggcggtgtgattcgtggtggtgagggggtggtgtgggcggcttgggctatgggcaccgtgggggatttccaagtggcggtggccgagcttatggctctccgagcgggtcttgtttgggctagcaggctggggttcactttggtgcgtgtggagacggattcttcaattgttagttcttggattaattgtccggataatattcttatgtttaagccaattgttgaggagattatttc

SEQ ID NO: 290419 - DNA, 816 bp, Cannabis indica
atttcaatttagaatagaaggaccactatcattttttattttgtttatatatatgctaaaatcaaaggaccactaatgctatattttgctattacaagttacaaagaaaaaattgttagtacctataactatttgtactcaaaaaattatgcaatttttatttagccaatgccaaagtatacagcattactttctatttgatctctatatattggaatcgaaaatttttattcttctatcttttttattattattaacaatttttataagaaaaaatttctaatttgatttatgtattcaacttgaatatgttattagcttttctgttttgttaagtaataacttgaatattgtattttacaaaatagatcaaattgatacttgaagtcaattttagtaataaattgatacccgagctcaattattttcaataataactttaaatatatgttgaatgataacttttggtttaattatattaaaaagtgttttaacttattaatttggtttattttttaaaaaatatagtctctgagttattatttaacaaagtataaagattgataacatgttcacatgctaaacacacagttcaacggtatcttctcatttttaaatatatcacaaaaaatagttacttttagtgacaactttttagtcataacataaattttttgtgactaaatgtgacttttggttacaacaaaaactacttgtgactaaaacatagtatttagacacaagttgtcactaatttacttttagtcacaacaagtattgtgactaaaactacatttagtcacaacaaattgtaat

SEQ ID NO: 290420 - DNA, 629 bp, Cannabis indica
ctgattatatatatgaccacaacaataagtccaggtggcactaactaacacttaaaaagactctcgtaaacaaacgttagtgcagatataacagtctaaaattccagacacgactagacattgaacagaacatacactgtcacaaaataatgacactaacattctcccccttgacaggttatgttcaatgactaacacacaaaactaaagaccagaaaatattgataaaccagatataaaagtttttaggaatataaacaaatcaactacacaagcaaaacaaatgacatatatctcccacttcattgaatatgacctggaggttcctgtgctgtgccagactcccctcgggaaggtggtcctgtcgacacaaagggtgttgtagtgtcagctggaggatctagatcaggttgtgctgaactagtgactggatccaaggctgaaggctcccctcgcatatgtgcattattcccagatgtgtctgatgaggcgccaaacgaatcacgatgaaactcaggcagagagatgtcaggcagagaatccccaggaaaatggtgcaaaagagtggacttgatagagcaaaccatttgatacattgaggcctcaaaggcaagctgacgcttttgatc

SEQ ID NO: 290421 - DNA, 634 bp, Cannabis indica
ctcaaggagaatcccccttccgtctcatcctcggattctgaacctgaagaagaaattgaggaggatcatgattcaaagggcttgtccgattcaagtgaagcatttgtgcccaaagatcaaccttctattgctgattctgcatccgaaagtgaagaacctgaagctgaaaagaaggagaccctctggtatttctcttgaaaacttcaagccccactctcattattttgttataatgatcatgctagagacatgaaattctatgagaataggaattttacggtggagaaaatttttaatgtcattgctcataagccttttggggtttataacatgttgaaagaaagataatgggtagatactttgatcagttttgatggctatgtggatagaattgtgaaagaattttatgctaacatctctgatgagtttctcgatgaggactcttttatgtttggcaaagtatttgtcagaggacactagtattcctttactgtgaaggatgtggctgaggctctcaatcttcctatgggaattgagacaactgatgtggagtttgatcgtcaaaaggtgtttgggtatctcactggtgataatgatgtggaactctcagcaccatgcatatgtctcaactcac

SEQ ID NO: 290422 - DNA, 524 bp, Cannabis indica
ataccttgatcagtttgcttaatttgtaaacctagaaagaaactcagatcccctataagactcatttcaaattcactagtcatgagatcaacaaatttgacaacttccttttcacaagtagacccaaaaatgatgtcatcaacataaatttgagctacaaaaatacctggttgcaagagcttaataaaaagagtgttatcagcagtacctctggcaaacccatttgcaagaaggaaggaggttaacctgtcataccatgctctaggagcttgtttaagcccatatagagctttcttgagtttatagacatgctctgggaacttcgggtcctcaaatcctttgggctgtttcacatagacctcctcctgtaggactccattgagaaaggcacttttgacatccatttggtgaagtttgaatttcaggaaacatgccacagctaacagtaaccgaatagactcaagtctagccacgggggcaaaagtttcttcaaaatcgaccccttccacttgattgtagccttg

SEQ ID NO: 290423 - DNA, 534 bp, Cannabis indica
aatattttattatttaatgtatatttttggccagagtgttttaatttgtgtctttattttgtgtatcaaaacttggaaggaaagttgtctagctttcccatttatggaaattgaggtaaaaattgtaagttttgattacataatttatttttatctaactagatggtatattctgatcttgtgtgagttttctattttcttagatcaaatttctggaagagaaaaccggagctaaactttccttttataagctgtcattaaaaggaaatagaaattcctgagttgattgaagatttattttagggaagtttctagtgggctggggtcttgtttagaccgtgtgtaagctgtcattaaggtgtatgttgattataaatacatcttatagcagctaggtttagtatctcttttatacacttaaaattgtattaatatcttaaggaaaaagtgtctttgttttgtagagaagagatgttcgactcttactctgtttatttgtattttgtattgtcttgagtctgtattcaagtctac

SEQ ID NO: 290424 - DNA, 797 bp, Cannabis indica
cataaccgtacgccattgcaaatggtgtctgatcggttgctattttttccgttgtacggtatgaccatagaacttcggggacttcttctggccagtttcctttggcatcttcgagtttcttctttagtgtatccttcaaggttttgttgactgcttcaacttgaccgtttgcttgaggatgtgccactgctgagaaacttttgatgataccatagttcgcacagaaattagtgaaagattggctgtcgaactgtttgccattgtctgagactattttgtacgatagtccgaaccggcatatgatgttcttcactataaattcttgaactttatttgatgtgatggtcgcaagtggttctgcttcagtccacttagtaaagtagtcgactgctaccactacgtactgcactccgcctttacctttgggtaactgtccgattaggtcaattctccaaatggcaaagggccatggactttgcatctgtgttaactcgttgggcagagctcttggtatctttgaaaatctctggcatttgtcgcacttcttaacataggctcttgaatcttcaatcatcgttggccagaagtagccttgccttagaattttctttgataagctctatctggctgcatgatttccacagaatccgtcgtgaacttcagatagaagctgtgcagcttcattttgtgtgacacatctgagtaatggcatcgagaatcctcttctgtacatgaccccttctactatgatgtaccgtgctgcctttctctcattttttgagcttcatttcgattat

SEQ ID NO: 290425 - DNA, 627 bp, Cannabis indica
gaagatcttttcagcgtgatggatgtgtgaaaagcaaagtaagtgatctcacccgcattagattataaagtcgcactcgacagaatggtcagcctccttgcgaatactgaccatcccctcaatatgcgagaagagataaaactatcttgggcaagtaattcacgcatcctcggccaagcggtatacctccagaaacggctgggagtttcccagtgactcaaggggtatgcgttttcgagcataaccctgaagttactgggagacccccaccgttccgagactacctatcagccaaagagtacgatcatttgagtatcatcgcatattgcaaatggctgggtgtacctcagtatctcaaggggcatataatcgcatatatgaccattagaatactgagatacacccaccatttggaacggcgattgataccctcgcaactcagcccgcgacatataaaaatcctaaaagatctagctaacagtcaaatggaagtaaatcttggcaatatgcgagtattcaagttgttcatctgaacaccagcgaatattcaagttgttcatccgaatatccgcgagtattcaagacgtgaaacagtgcctatgtgtcgtgtgcggttatgtcagttta

SEQ ID NO: 290426 - DNA, 578 bp, Cannabis indica
attagatttttatggctagactaaaattatttttattttatttattttaatttgcctatttataattaacgcctattattttaattatcaatcattttactttctttcaacgaatcttcttatacattcatttttataaatttggaagttattcagaatttatttttaattatttattaaccttcttaattttgtgtagtctatctttaatggaattctaattctggttttgttttgattatttgattttaatgtcagttttatatcttttgatataaattttatttattgagtttacttttgtataatttatatatagaaaaattgtttaatggtaatttttaatttacacatatataggtaaagtatatataaattaagaattatcactttgttttataaaaataaaactaaaacttaagataacctattttattatcattattgttattttaattatgactaatatggcttttagtttttatggctactgtgctttttggtttataaggctatatgtctagttttgtaaatagtttgctttttattatttttgtaaggccaatgtggctagtttt

SEQ ID NO: 290427 - DNA, 606 bp, Cannabis indica
acatcttgaagcttgaacaaccacttcctaacctcatcgtttcgaagttgcttctcctcagcatcattgagcagtacattagctgatagcaacacagtgttcaactcatctagcttctccacaatcactttcttcccctggaacagccggggtatctcctcagaagccaatcgttcaaacaaaacatcaagggaagcacaaagcaaagcaccagccacaagatcaactgccatgatttttcagttaggaaaagaagtagtgaagcaacaatagaagaaagtgaataagtttgtgtagtatggtggtactatcaactcatgtaatgactagtgtgatgtgatctttttccattacttttatttgttaattaattatttgggagggagtttctatgctaaatcacatcacatgtaatatggtgtgaaagagaccgttggtgtcagtttagtctaaacaagaaattgtttaatggtatttttcaattaaaatgatagtaatgggatattggcggctaaaccacctgaactttacggtttgtaacacttaaccacaaaaaccgaatttttggcggctaaactacctaaaccctgattctgttttgctctg

SEQ ID NO: 290428 - DNA, 590 bp, Cannabis indica
tataggccaccttatacgactttggccaacatcaaacaagaacctggtgagtctttacaagactattttaaacgctttaatgcagaagtaacaaaggtcgagaaggcttccgagtcttcacttgtttgcatgctgataacaggtatcttgccgaggaccgacttttggaaggagttacaagctcgaaggcccgaatccttagttgaattcttcgccatggctgaaccccacaagagaatcgagaattctttagcggagttagagaagggaaaggaccaacgccggtaacctataccgcgttcacaatctcgcagtccccgagggaagaactccaggggccgaagcccaagaagacgcagcccgcggagactgcgaagtccgaagttggccaagtctcctccaaagaaggaatcctcgccgaaaaggaaaggtggacctcgtttcgtcaactatactgaactggcagtcccccgagaccatatctacgcaatcgaggaaagaaacagagtcttcaagaagccgccccccatcaggggaaatcgcgacaggagagaccctaaaaaattctgtaagtaccacaaggatattgg

SEQ ID NO: 290429 - DNA, 486 bp, Cannabis indica
ctcttttcggctgggtttgtgggtgcttgaagctggattttcctttgattttcagctagtttcaacctaaattcaagtaatcttttgttgtggtatgtctctctagctttatttctttgtttcttggaaaaaaatgatgaatatagttgatgcatgcatgattgttagttgttgttgctgctgtgaatttgttcttaatttcagaggtttaaagcttgttagattagggttatttaagttgttttgaagcatgatagttaggttgagtaaagctttggtttttctatgtaaaatatgtgatttttgaaggaaatggttatgttttgttgctggaatgttgttgatgtttgttattgttttctgaggttattctaagcttgattaagtagaattaagctagtttgattgcatgttgttttagatttggctcaagtttggagttttagtaacgtacaaagacttagtagctccaactaggtggttttt

SEQ ID NO: 290430 - DNA, 507 bp, Cannabis indica
gactctaacaactttcagcttttcaaggaaaaatatctcaacagaatatatctatttctcagttcaaacaaacacagccagcaacaacatcaacattataaatagatatacaaccttcacatttacacaacataacattttcggccagcagagaaataagggcagcagctgtgatttttctcttgaaacacacctcagaaacaagagagaaaaatatagagagttagtgagagatattgtaagaaaacaaagagaaataaagtgaagagaaagagattacctgctgtgttttgtagcatggaatctccatgaacttgtaaccggttttgacatcatagtgaagaatcaagcgtctttgagggaagcttgacggagatgtactcttgatttcaaggggaactccgagatcaaactttgttgtgttctcctttatttttctgtagtgtttttcggtttttcttttctataaccaacaaagatcattttagatctttgttgttactgttt

SEQ ID NO: 290431 - DNA, 686 bp, Cannabis indica
gcattttatgaccatcattactgcagttattcacttttgcagacaacaattcgtttcttacccatttaatgatacggcgcatgaaatgggtgtcagtcgagtactcaaacgttttctaccgccttgatggacgcttgtcccaaccgttggatttgtagaatgtgaatcgattgctattctgaccgtatgatgatggtcgatcacagctgttctcacacccgttctgacctataaaagccaaccttcccatttcatttggttactttcaccatttcaccaaattttctcaaagctttcacagagaggaaaaatttcaggcaccatagattacttgcttctcttccttcgccgttgccagtcttccctttaccggcgatcaacaccaacccccagccttcaaacttcgtgtaagttcttagcacactttacacttgcttactgtttgtttatatcgcatgtttatgattttgggttgaatgttgaacttctggggaatgattttgcctgagtttgctgtgctaagcataaaatctctcttttttgcaccttgattgtttccttttactatgttttctttttgggaatcgcccttatctttcgtaataatgcctttatggcttagagtggttcgtgctttcttgactttgtcttctttcccttttttctctttctttttgcaatgtcac

SEQ ID NO: 290432 - DNA, 113 bp, Cannabis indica
ataatagttttagagagattttagaccgccacgtcaccgcctcatacttctcctttatagatatatatatatatatatatatatactagcaaaaaattacgtgcgaggcacgt

SEQ ID NO: 290433 - DNA, 612 bp, Cannabis indica
tcccaagttccaatcccgatctgagtctggatttagttctgggtctaactccttcgttctgatcctagtctcggttcgagtttaggtccaggttcgggtctagctttgggtctgatacaagatgcgtgtttgagttcgggtctgagtctgtgtccgggtttgtgttcagatctggaccgcgatcagggtctaggtttgggtccatgtccaagttcgggttctgagtgcaggtcaaagttttggtcaggatcaggatgtcggtctagatctaggtcaagcatttcaatcccagtctgggtcttggtccgagtcctggttcgtatccggatccctatctacgtccatgtctgtgtttgggatcgggtcccagatttaggtccaggtccaggtctcagttccggtcttggtacacgaccgtgtctgggcccgagttccaatctcagttttgttctgaggctaggtctgtgttcggttctaggtctgggtccgggtcctggtcacggtcctagtctctttctagggtcctggttcggcgatacttgttcaggttctaatttttggtcccagtctaggtctggttcgggcttggttcatcgtctgagttctgctcct

SEQ ID NO: 290434 - DNA, 688 bp, Cannabis indica
cagggcaacatttaccccccaagccttgtttacttggaaaataaaccaaggcttgcttaggtgcctccggttgactcctcggttccctggctcaagcccagagcgcgtgggggcacatttaatgatgacatttaatgcagcgattcgctttttgcagaggcgtctccggccgcctcctcggtttctcggcacgagcttggggcgcgtgagggtgcatctaatgatggcattaaatgcagcgattcgctttttgcagaggtcgattcgtttcacgccctttgattgatgcggcgcattaatggtgtcagacggatactcaaacgtttccaccgcctttatggcaactcaatctgacccgttgatctttgggtatttgaatcgtgcatctcccccaccgtacgattggtaggtggtgacgcctgttcctcatgcacttttgcctataaaagccaccatctttccttcatttcggttactttccattccttgccatttttgctcgaatttcccagagagaaaattcttcaaaaacagcacgaaccttctgaacacttcgccatttttttttcagttcttccttgcttgttatcatcagtccttctcgtctttactcgactaaactcaggacccccagttcaacacattactgtaagtttcttgcatcctacgacatgctttcacttgcttt

SEQ ID NO: 290435 - DNA, 594 bp, Cannabis indica
ttccccctgatgctctggaagccccagccttcagtttgtgctcagggttaccactatcggtccccttactgatattaccactagcaggaggatttgataccgtgacgacatcttttgcaccctgctctttagttacttgctactcggcctccttagctattaaggccaagtctaccactctcttatacagagtgtcatgagatgtggtaattttcaagtcccgactgattgtagcattcagtcctcgaacatacttctatttcctgatgaaatctataggcaccagatcaccagcaaatttagataaccgatcgaattccagagtatactcggccacaaacatctttccctgagtcaacttcacaaaatcttcctgatgtgaagttctcacagcaacattataaaacttttcttcaaaaagtttcttgaattcttcccatgtcataacactgacatctcgggtctgacccactatgtcctaccagacgcgggcatggtcttgaaacatgaaggccgcacaattcaccctctcagttcccgtcacccaaatattatcgaggatacgggtcacagtgctcatccactggtcagcct

SEQ ID NO: 290436 - DNA, 581 bp, Cannabis indica
aggtctatgattagttactagtcattgcctaagtccttctaaggaaataccctagtgataggaaaatttcaaaatgatgcaatggttgtgtacttagtgtaaaccattattagattcatggatgacctaatcataatcttaagaaaagcttgaactattaacgaaggtttgcatgtttgttagctattctaagtgatcaagggtggaccatcccagagtcattagattagaaagtgtttgttttaacaaatactacttttctaagaatttttcttgattccaaaagtggtctatcatcttattctgtataaggtggtctcactgcctctgctgtctaaacacaaccgaagaggataattccacttatgttcttagacaaaaagtcacggtaccttgtcgtagtgggagggttccaaggaactcaccctgtaatgacttggaagacaccgtgattaaaattcattgtcagtttaaacaagtaatggattatcagaataaggaactaagaagcaaagccaagagagctgtggttaaaaccattcatatggaacacccaaaatttttctattacaaggacatga

SEQ ID NO: 290437 - DNA, 803 bp, Cannabis indica
ggacgggtagccatgatctccggaggtccccatatcggagggaatactcgcaaggagcgaaagcgatacgccggggccgcaaaacacaatgagatatgggaagttactcaactcccagctcaaaggcctcggctgatggaccaacccatcacattcacggaagaagacgccaagacggtgcgcttccctcatcacgacccgttggtcatagagacccccatcgcgaataaagtggtggccagagtcttaattgacaatgggagttccgtgaacttgctcttcaaagaagccttcaccgcgataggcttgacagatcgtgacctctcgcctagtggatcccagctcacagggtttaacgggacgacacttatcccaatgggaaaagtgaggctcccggtcacgctgtgcccggacactccccagagcacatttaaatactgcaccttcgtggtggtggactgtccgacagcctacaatgcgatcctcggccgaccggccctagtggactttggcgcagtcacttcaatccgacatctgtgcctaaagttccctacccaggaggccggagtcgggactgtgaggggaaatcagggggaagcaaggcaatgttataatgttgcaacccacctgcccgtacttatggtccgggagtccgctgagccagaaatggctgaagaggatgagttggaccctcgtgtagggtccgaaagaatcgtggaaccaatggaggacgtcgaagaaatatcagtgtgcgacgtcgactccaccaaagtactccggttagggaaaaaccttgaccagga

SEQ ID NO: 290438 - DNA, 726 bp, Cannabis indica
aattacagtaggtaactcaacaccactaaaaacacggtcagcctcaaaaagagaagatcgcgccaatgaatgcgcaaccttattagcagaccgcttaacaaaattaaaagaaacatcagtaacagaggctaacatagccttacaatctaaaattatatgaccataaggagaagtcatatctttatttccttgaaggtccaacacaactcgacgacaatccgattccacaatcacgttaggccaattgttgtccttaatccaacttagagcctctttgataccaatggcttccacttcatgaggttgtaagtcccccgccttcttcagagtcttagcttgaatgaccaaaccattactgtctctagcaaccaagccaataccataactcttctcatttgaaaaaagtgcaccatcaacattaactttgtatttaggaaacgtgggaggggtccaatgctcaagacgaacccgatggggttcattaggagatcctaactcttgattttgagcattataccaatcaacaaagtttagttttgccaaaaatagcacttcttcagatgtaggctgcttttcattccaaactacctcatttctaaccttccaaatggaccacaaaatcatacttgcctccaagcattcggcttccttccatacttgtaaaccatcttcccaccagctacagaaaagcatcgcagccaaaccaacagcaggaagttgcgtctg

SEQ ID NO: 290439 - DNA, 668 bp, Cannabis indica
tgagtaacttcccacacctcattgtgtttcgcggcccctgcgtatcgcttaagctccttgcgagtagttcctccgatatggggacctccggagatcatggctaccctcccattaggccggggcggcagaccggggatatgctgggcgtcgcccgtgggagcagctggagccaatgcccctgctgtaccccccggtgttccctgaggcatacccgcagtcgcctggcccggattgaggtggggcaacctatttttgatccactcgtagaggtggcctaatcggattagattttcaatctcgtccttgagatttttacattcattggtgctatgaccgatgtcgttgtggtactcgcatctcttgctcggatctctccgggagctatctttgtacaacggttgtggtctccggtagtgtgtattttgcctagtagcaaagtacacacgctcttgggagtccgacaactccgtgtattgagtatactggggggtgtacccccttttctggcgcttctctcccgtccgggtgctgcccttggaggatcttttactcctcgaaccctgggaagggcctgccaggctagcagccggagcagagtgtgaaggagcttgtccattcactccggacgggttgccaaaatgggatgatgctggtgccaaggcttggcc

SEQ ID NO: 290440 - DNA, 371 bp, Cannabis indica
aatggacggaggccgagcccctcgtctccataacctacaagaaagtccttgactttgtcatcaagaacgttatctgttggtttggaattctcatgaagatagtattcgataacggaatctaatttgatggtgacttgtacactgaattttgcgagaggaataaaattatcaaaagcttctcatcagtatccaggcctcaggcaaatggacaagtggaagtcgttaataaaaccctaaaggatactattaagaagaagctagacgctgttggaaatattttaccaggatctagattactaccatatatgtttcattaacatcctaatatgaattctaaaataatgaaacaaacacatataaagtttagtaaa

SEQ ID NO: 290441 - DNA, 572 bp, Cannabis indica
cccctgaactcgaaagtctctccatcttctggtgtgaaaacaactttcttttgcttgcagtcaattgatgctccatatttggtaagaaaatccatgcccaagattacatcaaaatcaaataaatctaatacaatcaggtctacaaataattctctaccatctatcctgacaggtatacccctaagccaacttctagagattacaacctccccagatggtaacatggtcccaaaccccacagtaaataattcactcggtgcatttatatgatttacaattgtgctagcaataaaggaatgagttgcaccagaatcaaacaaaactttacaagtggtgttggccataggaatctgacctgatacaaccgaaggactggcctcagcttctgcttgagtgatggcaaaaactctggctggaacatacttgtcatctttcttgggttctgctctgttcccagtctgtccccacagtgggcaattgcgtttgatgtgtccttcttttccacatttgtagcatgcttttgcgcgacactcgccgagatgacgtttggtacatttagggcattctggaat

SEQ ID NO: 290442 - DNA, 569 bp, Cannabis indica
aaatcaaaggagaagaagatgataataaaatgaaccagaaatactaatctgaagtcattgttagagattgcacagaaggttatgatcttctaagaatacactatttctctaaggtattttctctgattgggaaggagagaatacatgaacctagtatttcttgaagacaactacctatttataaactcatcttagaatgagttttaggtatttataatttgacccctcaacaaattataaattaacttatagtatctatacattatttccatgacaatttaatacccttttgatacccataacataattggtcacttaattttgtatcacactttataatagcatatacattatacatatgtgcccacaataagattttaatccaacaatctcccacttgggcaacatatgttacctgataaatgtataaccttatgagctcaaaatttgctattatgtaaaggtattcacaacaatctcgtccatcaactataaccatataggatcaaagcgattttcgtcatatcattcatgactaaacccattaatggtcacgtatacaaatatag

SEQ ID NO: 290443 - DNA, 786 bp, Cannabis indica
acaacatacaacgcaatcctcggccgaccggccttggtagactttggcgcagtcacatcaatacggcacttgtgcctgaagttcccaacccaggaagctgggatagggacggtgagaggaaatcaaggggaggcgaggcaatgctacaacgttgccacccacctacccgtgctgatggtccgagaaactattgagccagaaatggctgaagaagacgagttggatccccgcgtggggtccgaaaaaatcgtagaaccaatggaggacgtcgaggagatatcagtgtgtgacctcgactccaccaaagtactccggctaggaaagagcctagacccggaggagaaggaaaaaataataaagacactgaagggtgccattgacgtttttgcgtggtgccaggaggacatgactggcataagtccccacgtcatcacccatgtcctcaacgtcaacccggacatgccgccggtccagcagaagcgacgtcccctcgactcagtgaaggccgaagccttagagaaggaggtggataagctcttaacaaacggcatgatccgcgacgtttactacccggaatggctagccaatccggtcctggtgccgaagcctaacggaacctggcgagtttgtatagacttcactgatctaaacaaagcttgtccaaaggattgtttccctctgcccaggatcgaccagatggtagacgccacctccggattcaagctactgtccttcatggacgcgtacgccggttacaaccaaataaagatgcacacggcagatcaa

SEQ ID NO: 290444 - DNA, 208 bp, Cannabis indica
ttttagttattaaataattagaattggcatttaagtggttaaattggaaaaatagcatttttgagaaaataagatgaaaaatgagaaaaatggcaaaattgcaaagtggggcccacaatccttggccggccacttgggagggttttgccactttattttttcattattttaatgctaattaaatttaacctaaccctaagtggtttcc

SEQ ID NO: 290445 - DNA, 257 bp, Cannabis indica
tttgttaagaaaatgttgtaaagggtggggagatggaggggaatggatgcaccatgagtcacggaccataattgggaaggaagggtcgttgagaagaaagttctcaagatggaagcgagattgattttgattcgtggtaagaagtgtcttctaattggagtttcaggtactctgtgatcggatccataaaaccccaatgagtgagagaggcatgagggaaaagactttccaagaagaggaaatagtacaccaatcaa

SEQ ID NO: 290446 - DNA, 500 bp, Cannabis indica
ttacttctgtttattgatatttgtagtgccaatatgaataacccacacccgacccactcctagtcaatgtcttagccaatgaactctatagtgtgaaaatgtaccatggtagttgcataaactcgcacctattgatgatgaatctgaagttccaaaaggcaaatctacttggaattgaattatcaaaggaacaatgggttcaattcatacttaatagtcttcctccagagtataatgcatttgttgtatcttacatgatcaacaattttaactcttccgacatggataagctcgaagcagaattatgagctcatgaacggaatctgattgcaatgccacctcctggttttgcaaactttaatcagaggaaaagaattaaggctgaagctactaacgaagctgcttcttcaaatacaattgatagtcatattcttctatgttcgaattgtaatgagaagggacatcaggaagaacgatgtcccaggcttctaaacaattca

SEQ ID NO: 290447 - DNA, 691 bp, Cannabis indica
aattatgggccatttgggcctacatgcccaatttggagagattagttgtcttggcccaatgtgctgaccaaagacgttttagagtgtgtctatgggccccaagcatgttagtacgttatgtccatcccattatggcccgatggtaataccatgcattaccgattatatatagttatcattatatgctaatacgacactgagtgagcgacacttaattatgtcagtccacataaaatattctaacattcaagtcttttaagttcttatatttaagatagattggtttacaatcgttttttcacattacctttttttaattttattgtgtggtaatatatttttatttttgttgttttgtggaggaactacacttacagagaatttatcaataagtttaattttaaatataatctgtttgatattgattttcagtagtttctaattagggtgctagtttgttgttactagccaaagaataatacttttagctagttttctcagaaaatttaagggtgtttataaaatagccgatccaatctaattcgcacgatccaatccaatccaattcacaaagtgcggatatctgtacacgtgtccgaatggaaaaattcaaaatctacacttgtccggattggatgttgattgacatgtaaaagtaaccaatctaatccaatccaatccacacatatat

SEQ ID NO: 290448 - DNA, 746 bp, Cannabis indica
tttagttatctattacattgtttttttagtttagttgagttttagctttactcgggggcgagtaaagattcagtttgggggaatttgttaggctatttttagcctaagttttgggtcacattttatagttgtttttctttattattatttttggaatagaattacgcttgttttctttggtttcaggtttctacacttggaatgtataaattggacaaatttcggaaaacagtgatctataaaatagagaaaattttgaaagagaataaagctgaaacttcaagcctaaattcgactatgttctgatcatattttggaaaaagtcaaacataaaagttttagatctcttttttatctttccaacgcatcttgaatcagctcatttggagtttggatgagaaagttatgctcattttactaaaacagatcgaagcagaaaattccatctcgccgcggcgagatttccatggccgcggctagaaagtctgggcagaaacgtggttttttgatgcacttttggccgcggcgagaccacttttggccgcggcgagcgtccgtacggtcaggggtatttttgtccgacgaaccctaaaaattagatataaatagaaaactgcgattggaagtcaagggaagcgatttggaaccctaaaacacagcagagagcggcaggaagagcagaggaaatcaaagtgaagatccagaattcatccaccaacagtttctttctctattcctctttaatt

SEQ ID NO: 290449 - DNA, 489 bp, Cannabis indica
gtaaaggcttcaggaaacacacacaacataattgcatatcattccttggagacatattattccgcagcatccaatgtaaggtttctcatactttatatgtgtttacttatattcgttttaaaagttcatatttaggttgttaatcaacatacttgtgagtagatctaagatcctggtaaaataattccaacagtgtcaccattatgtgataacacgtcagagtgcaaaaattgggacaacattttcccccaagtctatacgagacttccgaagttgcgtgtaaacttcatccgagctacttctacctttggatggggacacgtgttgggcgcgtctgtccgagactcgatgtgaggctgactgggcatccctttagttttcggctaattaatgctctaacaattaatatttcaaaatccaattttctctcaccacggttgacagctgcacttgattattttttatttcccatattcgcttttaaggggg

SEQ ID NO: 290450 - DNA, 510 bp, Cannabis indica
ctttgatacatatgcacttgttactagaattacatctattagtgtgcttattgcttttgatgctattcttaacactactagaaaaaatatcattaacaacacttttatttaactaaaaaattattaaaggcgcaacacttatataagtgttgcctccaagactattactaaaagtaaatttttaagaaaatactttacaagtgttatcttttccttaaaatttaatacttttatatatatatatgtctatagaaagactttttatgcaaacgttgcttaattaaaatttaaaatttaatttttttttttttaatttaaaaaggaatgaacttcattaaccacaagcaattacaacctaaccaaaacaggtagcaaggcccaaaacaactaattacagtatagtttctctatacatttcctctcataataagtttttaagcttcccttttttgcaacttgtaatctatagaacactatatctttaatatcctgtacaattttcaaagctgt

SEQ ID NO: 290451 - DNA, 652 bp, Cannabis indica
ggtaaaatattttcaacaatattgtgggggacaaaccctgatgttgtacttgaataagtttagcaactaagttcgtagtgtaagtgtcatgttttgtgtggcaaattagatattgcttttgttcagtatttgttgtctctaacatctgttctggagttagttgcatctgtttttcactaatatcattttagtgccatgtcagctttctgctagtttgttagagtgtgccagctgtactttgctggttggttagttagtctggtttattatctttagtatataaattcgatcaaaaccgttgtactaactaactctcttctgttagaatcttcttcttgattcttgctctgctagggcaacatattttctgtttttgttcttgtttgtgcagattgaagttcgagagatcttcctgaggttgaagatgaagttcaaatctgcttgatctgaagggagttcagattctttgctgaaggttgttcagctgtgtgtttcttgtgtttgagatctaaatgtgtttagatctcaaagcttgaggttgttcaagcattaggtaactttgtataaaagtcaatttagattactttgtttgatttgaagaatcagaactggatattgtaattgaattgattgtttagtgaaagttactgta

SEQ ID NO: 290452 - DNA, 528 bp, Cannabis indica
ataaaaaatcaatttagggtcctatttgtagtattttagaaaatacagggtccattttgtcatttaacaaaacacagggtccaattggtaacttttgtaaaacagagggtccaaaatggtatttacccattattaaatgcagattaaaaaactagttattataaaatgaataatttgcggcataaatacctaagtttaacttctagttgcaaataaatacctaagtttaattgttgacagttataatacttaagttataattttgaaatttttgtaggtacctagttaaatcctaaaccctagttgaaatactttaaaaggaataagatgcctctcattctcatccaactaaattctaattacctagttttcattctttgacaaacaactagaaaattgagagcctcattttatagctattttgaaattcatttcttcttcttcttcattcaattcgaatcacagtgaagagtacatgcccactcatatcaagtcaagtactcaatcatagtgtggaagattgtgaag

SEQ ID NO: 290453 - DNA, 632 bp, Cannabis indica
atggatttctgtgaggagtgcatatatggcaaaagctgcagacagaaattcacaccagcaaagcacacaaccaaagaacagttggcatatgtgcactcagatctttggggcccttcaagaattcctacacttggtggtgcttactatttcatgagtatcattgatgattactcaagaaaggtgtgggtttatctcttgaaaaccaaagatgaggctttcaacacatttgtcaattggagaaaactccttgagaaccaaactggtaagaaactcaagaagattagaacagataatggatgggaattctgctcaaaccagttcaaggagttctgcagcaaagaagggatagccaggcacttgacagttagagacactcctcaacaaaatggcctggcagagaggatgaataggacactgcttgaaagagttagatgcatgcttaaaggagctggtttagaaagaaaattctggggtgaagctctgaacacagcatgctatctaataaatagatgtccctccactggtatcaatttcatgacaccacaagaaaagtggactggagaagctcaaacctatgaccatctaaaggtttttgggtgcactgcttatgctcatgtgaggcaagacaaact

SEQ ID NO: 290454 - DNA, 527 bp, Cannabis indica
ttactatctgagatgggataagccactccagcatccaaccacttgactacttcttttctgacaacttccttcatgggtggattgagtctacgttgtgcgtcgattgtcggtttggcattgtcttccattagaattcggtgcatcaccgttgaaggactgattcctttgacatcacctagtgtccaagcgatggccttgttgtgagctcggagtaccctcagcagtctatcagtttccacatcagaaagagaggctgacacaataactggcagctttttatcttcacccaaaaactcatacctcaagtgactaggaagcaccttcaattcaagttctggaggcttttcagtagatggcatcagctcttttggaactgctcccaattcctcataatatcttctgttcaagggcccataggagtcaagccacttcacataacccatgacatcttgtccctcttgctccgtcaattcatcttctgttaagctcagttcgagaggatcatctagcaactttttctcactcac

SEQ ID NO: 290455 - DNA, 510 bp, Cannabis indica
ttagttgcaatttagaaagacactacatcaagccacggtttaccagtataaaaacaactcaaacgccacaagacatcagaggagaaatgaaacataagtatggggtgagaatgaactacatgaaagcatggagaagcaaagagcacgtgcaagaagaattacgaggaaaagcaaacgaatcatacaagctgctgccaagttttttatacatgctgcagaaactaatcccgaaactattgtacgcatccaaacagaagacaacagcttcaagtacttgtttgtggcactagatgcttcaataaaaaggattgaagaagtgaaaacctataatagttgttgatggaactttccttaaatcaacatatggaggtacattgctctctgcttgtacacaagatgggaatggacaaattttccctagctttctgttgtggattcagaaacacaactcatggcaatgattttcacaaactagggaacatatgggatcagagaggaacagtgcttgat

SEQ ID NO: 290456 - DNA, 446 bp, Cannabis indica
cttaaacctaggtggttacctataaataggtagtaatggcttcaggaaaaagaagatacatctaattccttcacagaaaatcttctagccgccaccttaggatgttaataaaacatacatggtagtaaatctagatcctggtaaaatatttccaacagagcagacgttgcatggatatggaaattgataggggtgctatatgagatagttgactcgagagtcacatcttgtgggatgcactttgagatggcatggtgtgcatgaagagttgggcgttcaggcatttgcgtgtgggcatgttgtcgaggacgccaacagatgaagtgggggaaagaccttcacggttcactcatcagacttggaattcattacaagcatcgagatgagtatcatggagatggattttgttcaggatgtaaagtaaagaagactcgggacacaggcag

SEQ ID NO: 290457 - DNA, 515 bp, Cannabis indica
tggaaatcgtgattaattaaaattttgcttatttaattaaatacttataacatttcatacaaaatactttgggatcccatttacaaaatactttacaaaaagtttactgttcattacaaaatacttgtcgcccaacgactaactacagaagccctgatgtcccgaggatcgtacgctccaggcctaactgccccgacatgtacaatcttcatcggctcgtcctcacggttcctcagctttggtcttgcccttacctacacataaacatagcactgtgagtcgacacactcagtaagaaaagcataaatcataaaacatacataaatcccgggttatgatcagacgcccatacccctgaccacaaccctaatcttcgtgtcccacacgatactgagtctcgaatgttcatacggcggtacttttgacaaagtaatagcctatactcggtacactggtcatactccagccgctagtcatactctagccttaccgatgtgttacagtatcagcctata

SEQ ID NO: 290458 - DNA, 676 bp, Cannabis indica
gaaaaatcaaaatatagtaaaataataatagatggaagattactaaatgaaaataagtaatatatactatgtagtgaaaaattattgtaattgtatccataaaatttaggggggccacgaccacccaatggtataatgtggctccgcccttggagcctgtgagcatgaagttgtagttcagttcgtcttctgcagttggtagggctctgtgcacggcttagtgggtcaacgatcccactgttggttacagccgattctcgatggatgtcggcttccagttttggggctttgcttgagttaattaggtggctgttgcggtgcaacgagatctccctttttgtacgtttttttttttattgttgtgtttatagtttaactttgtgtaataatctgaaatcagttgtaatctttagctcataacggagatgaattttttagttgattcttagtttgtgttgtcttgaaatttgtctttgttgccttaaggacaatttgtgttttgttgtatccatcagggctgtaaactggtgcttcatttcgagcttttagagtgttaagcaaaaatttcacatttagaatattaaaaataaatgcaaaatataatttcacctatgctcaatttatagcataaaagtttattaatttaaattggacccatccaagattataagaataa

SEQ ID NO: 290459 - DNA, 577 bp, Cannabis indica
ttattgatcgaaaatgtatttgttaccgtaataacttacatctgagctagtgatctaatttgatcttttagcttaacattacataaaacaaataagaaactatactttaaagtggtcttggcgacctaagtacgttgtttcagaaacctttgcgcgtagtccgcccagaaggccattcacttagaagtgaatgttcatttagtactttaaagtggtctaaccgacctgagtactttgaagtggtctagccgacctgagtacttctaagtggtctagccgacctgagtactttgaagtggtctagccgacctgagtactttattggtaatattttcttaaatgttctccattccagtggtactagaatgagttgcattttttcgtcatacttacccaatttatatgctccggagtcgagaacttcgaccacctggaatggtccttcccagttaggtcctagtacacctgacgtgctgtctttggagtttaggaatacccttcttaggaccatatctcccacgaagaatttccgagctttcacttgtttgttgaaataccgagctacttttgttgatga

SEQ ID NO: 290460 - DNA, 789 bp, Cannabis indica
atttggttgtacccagaaaatccatccatgaatgataaggcatcaaaaccagtggtagcatctatcaataactcagtgatggggagtgggaattcatcttttgggcaagcccgattaagatctcgataatccacgcatatgcggagttgcccatttttcttcatcactatgacgatgtttgcaagccaagtaggatactgaacttcccgaataaaccggcagtctcttaacttgtcaatttctgcctcgactttgggaagtaattctggtcgaatccttctttgagattgtttaacaggggtagcatcttttgatactgccaacctgtgcacagcaacctttcggttcaaccccggcatgtctcggtataaccaagcaaatacatctttgttctcgcgaaggacttgtatgtactgtggtaactcttcttcagataataaagcactgacaaacacaggctttggatcatcctcggtcccgaggttgatctctattaagtcatccacagttgcttgtcctccatcttcgaattcctgaggtgctggttgaaagatgtctataaaatcttccgaagggtttgagcttgagccttcatcttctacggtcaagctttcttcgaaagagaggtaattgacttgagcaaaattttctccatcttcttgtgtttcatgcccccgaatagtaattctcaaagatttcttctgttttggcatccactgtttttgctttttagttccctttgactgtggagcacttgggaaaacaagcctttcgaatgctgacactcgt

SEQ ID NO: 290461 - DNA, 451 bp, Cannabis indica
aatggtcaagaataatacccatacatgggtaatacccattaagagcatacccatatatatttatagtaatatttatatattgtatttctcttatattagatgtgattatggtatggatattgttagtttggttttaacggttaaaactaacagttaaatatatatatatatatatatactagtaaaaagttacgtgcgaagcacgtatactaattttatgttaggtattttttactttatttaaaagatataattaacaattaaagaaaaaatattattacttgttaggtgagattattattatgtatatctaaataatgtaatttataattttgacaattaaaagtaaatactggatgtaatatattatagtgtttaagaaaacttgataatttaagtgtaatatgttcttaagataatccaaaaataaactaaaaattcatgttcaaat

SEQ ID NO: 290462 - DNA, 1194 bp, Cannabis indica
tttgagatgatattagatttgagtctttgctataaattctcctcttcaaagtcccaatattgaagactctaaaaatgtcactctcttatcaaaggtggtaatatatctctaagatctacatatttatattgacaattctttcattggactcttcgttttagtaaagtaatctaaataaaaaaaaaaccaaaacttcaaataaaactaaccatacgtgcctcggcacgtaacatttacctagtatatatatattgatgtatataattttaaatgacttttagttttgactacattactatgagtactttacaaatataaaattgaaataacagagcacattagaaaaattttataatatgaaaatagaataccaaaaattaatataaatatacataacacaaaattctgaacatcaagccaatgaatggacacttatatttgggactatatatataaacaataataataataaaaaaaaagaactatacaaagatataaataggtttattaatagaagaatacaaataatttttataattaataaaaaaatattaatacaaacatagtagaattatacagagaatacataatattttttggttacaaactattgtcttgaggtaataataaaaagtctaaataaataagaaaaaatggaaaaaataaaaaaataaatgaaacaaaactctaaggatatcatttcatcatcaagattatatagatatatagatatatagatatagatagatattacattaaattttaactttagttagtaattactatatatataaatggagaaattgaaattaaaaatactattgtttaaatttataactaatagtattgttaggggttagagttagggatgatacatttttttattattatcattaaatagaaaaaattacaatttttttttttaaaaaaagaaaattaaaaagagaagatatcacttcaccttttttaacatcacaattatagatatacaataatttcattcttattcgtgatttcgttattagtgttaaacttgatgatgaaaatatagtagatagttgtaaagcccgcttagttaatttggaaattagcagttaatcatgattatttatgaaattatttatagctatttaaataatttattatgctgttatttatggaattcagaaatgcatgtttatgttagttcagtag

SEQ ID NO: 290463 - DNA, 1027 bp, Cannabis indica
tatactgttacaaagtaatgccctttggtttgataaacgcaggtgcgacttatcagaggctagtaaacatgatgttcacagatctcattggaaacaccatggaagtatatgttgacgatatgctcgtaaaatctcaacatgcgaaggatcatattgcccatttacaggccatgttcgatatattgcgacgatataagatgcggctaaaccctctgaaatgcgtctttggagttggctccgggaaattccttgggttcatggttaaccagcgaggaatagaggccaatcctgcgaagatcagggcattggtggaaatgccatcaccaaccaagccaaaagaggtccaaagcctcacaggtaaagtcgctgctttaaaccgctttatatcgcgatcttctgataagtgcaaggagttttttcagattctaaaaggcaacaaaaagttccactggaccgaaaaatgcgaggaggcttttcaagccttaaaaacgcatttggggcaacctccgatcttatcaaagcccatgaccggcgaagtcttatccatctatttagcagtgtcggaatatgcgattagttagtactaatacgcgaggatcaaggacgacaatacccggtgtattatgtcagtaagcgattactggatgccgagacacgctacccccaaatggaaaagttggcgtttgccttgataacatcgtcaaggaaattgcgaccttatttccaggctcacagtatcgaggttttgacaaactaccccttaaggcaagttttggcaaaccagaagcatcagggaggttattgaaatgggcgatggagttgagtcaattcgacatcaagtataaaccaagaactgcgatcaaggggcaagccttggcagattttatccttgaattccccagcaccgaggtagcactcatagaagacaaaagcgacattgctatagcgaatagagagatgtggacattgtacgtcgacgaagcctcgaatacgagggctctggtagcgagatcttattaatcagtcc

SEQ ID NO: 290464 - DNA, 647 bp, Cannabis indica
tctcccatttataatttttacaccaaaaaaatattatgttatatataatgaaccttatatttattgtcaatataaattcccataaaatgaattaaaatgaattaattaatattcacaatccaatttgagtattatggcttaatatttaatactgatattttaaccaaattaccctaaataattaggggccagccatataataggcgcaaaagccttgaaaggcaccaaaaccattatcaatggcgcaactcaactatcaaattggtactgaattaagtaataataatctgctaaatataaatttataaactatcaatagggtagaaatacaatagtttaaatcaaggaaaataaattaaaagaaaaaaaatatttatttaattatttaaaatattaaaataaaaaattcctaaagatattaaaataaaataaataccacaaattaagaataataataaaatttattaaaataaaatattaaagaaagaaatttagaaatttctgattcaataaatgaaaagaagcaaactttactgctaaacatataaaaggaaaaaatacaagaaaagatactattaataacaaaagtcaaaattatataaatataataataaatgtaataactatatatgaaaataataaatgta

SEQ ID NO: 290465 - DNA, 594 bp, Cannabis indica
gattcggataaagaaaccaacccttttggaagttgggcctgccgcacttctgcggtaaaaggcgaggtgccgtgcagcttgtatatgggcttacgctgctgctcgagcatcttcaaggcttgcagaagcatgctttgatcgattcctcctgtcgcaggggttggagtcgctacgactgcggggctcgcaaccactgcggcaaggttcgaggggatattaatcccagtggtcgcgatcggcgcgataggcgggttgttaactgtattgacaccctgatcgcccgtatggggatcatggagcgtctcagtgttatgcgggccgcgggagcgcgccctaaagactgcgttgaggtgatcacgcagatcacctcggtgtacacgataatgtcctccttgctgtgtctgtacagagccagacctcgtatacctgctcggagtgcggccatgcgaggatgaagaggccgactctgcgtcgttatctcgaggtggacgactgcgagggttgcggcgctcaggatcctcgtcgatttgcgcgctctggttaggcaaccttgcagattggtctcttgacgtcgggtgattcaagtccaaaact

SEQ ID NO: 290466 - DNA, 362 bp, Cannabis indica
tgttttagggataaaaacattgaaagggtgtaacggtaattttttccctatgcaatgtagatcatctataaaggatcattgattatagagattataactatggataattaataagctagtgaatttacatggtaaattctatatctgcttattggaagctcggttatataggaccatggtccccatactagttgagacaatactgcttgtaagactcagttacttgattttagataattaatgataattctaaaattagactatttctagtttatgaattttcactaagctagggcttaattgtgaagaaaagagattctaggattttatttgttaattaagagactttattaagtctaatt

SEQ ID NO: 290467 - DNA, 585 bp, Cannabis indica
atgcgacatctagctgttcatcaattgatgacaccttacactagtatttacaatatgaaacaagaagattgtataaataagattactttgactctcgaagcatcgttggattcttatttaaatacgaaattatcctaaatttctcttagcttattcatttcgaattagctcaataacatatcattggatgaatggtctataaatcatataatgtcactatattttctcttaagaaattaaatgacgcatatgattatattcccgaaattctatcccgaaatgatataaatcctcaatcttataaatctcctacttgtatgggcaaatcaaacttagagttagattagtagtggtggtccaagaaagaattactcattatacagttacactttcacaggtgtttaataaccattttctttcaatggattcaaactgtatgagtttagtattctgtgaccagaatcaacttacactattctaagaactctttgatgtaactaaacctaagtcatcaaaagactagaaccattttgtttaatctatggcatttgtatcttgttcatagtggttttgacaagatcattc

SEQ ID NO: 290468 - DNA, 410 bp, Cannabis indica
tcatcctgaagacgatcaaccttagcagataaggtctcgatggtttcctcaaagagatcagcagcctcgaggtccttggtcagtacggtgatcttcttctcagcggcaaacaacttcttgttggcctcacccaactcatggcgaacagctgcagtctccgccctggcctcctcagcttccttcttggccaagtctgcctccgccctcaaggtgtcggacagagtcgtactcttggaagtagtagaattagcccgggaataggtataagccaacttcaaatcggcctgcataaaggaaaaggtcagcatatgaagctaagtatgaaaagctaaaaggaaagtgtcgaaaagaaaagattaaccctggtaagctccttcaagactccgcccatcagcacatccatagatgag

SEQ ID NO: 290469 - DNA, 869 bp, Cannabis indica
aatttctaacacgaatggatacaaaaaaatgtaaccagttttttcataacatccatagatcagattaatattaagatttattttgataaaaaatcagttcataatcttatttgtacaattttagaaaatacagggtctattttatcatttaacaaaacagagaataattaataacttttacaaaacatagggtttaaaatggtatttactctaaaaaaaacaacacatttgcttatacaagtgtcttttatttattataaaaaaaaaaaaacttataaatctttaaaattattaaaatttatatataaatttacaaattatatttaatttgatacacgtgcggagcacactccgcacgtgtgtctcccactaatattatttaaatgttataatttatgttatacacatttaataacattttagaatgtaatcatatattttttaattaggttttaactatgttatcttttagcttcatgttgcacttttgcacaaagaccatacacatttcatgatcccacgagatgcacactccatgttgcttaagttcaacttgttaccaaacatttaaaatattatttctctgcacatggaaacataaggagtgagatgtgaagcccagtataaaaaaatacaccatgtacagacactagctttgtaatgatcgcataagtatacatggaaattagcagataattaacaacttaatagtgattaaattaatatttatgagtatatgcctattagcacaaaaatgggaacctattaacacaaaataggattttgagtaaataatttctctattattggaaattttatttgaaaatctaggtgtatatatatgctatatatgaattattataattttt

SEQ ID NO: 290470 - DNA, 633 bp, Cannabis indica
tatttgagaactatataggtacctaaaaaagaactccgaatgaccattttaggtaggatatttaaaaaatactcaaggtaaagtgtagatatttacgcttgtgaagattagattgaatcgaaaattcaaaatccatatttatacggattgaattgacatgtaaaaattactaattaaatctaattcacatatatttatatatatatattttaaagaaattatatatacaataaatattcttaatacaaaaaaatattaatttaaaaatctactacatattatacaaatatattttaaaaaatcgaaatgtatatttcattcttagaaaatataatttaaaataaaattaaaacattaattctacatacaattttttccttactttaaatgtgttattttatttattttagttatattattggtagtacataaaataacaataatttaattctattttgttgttaattggtaaaataatacattttttaataaatattaataattcaatatgaaaaaataaccgatccaatccgtactttcacagattggattggattggatttgaactatggtgcagattagattggatcttaaatatgaaaatccgcgcttagtgtagatcgaatgtactat

SEQ ID NO: 290471 - DNA, 669 bp, Cannabis indica
aaactagaaactaaaagtttccctatcgataaaaagcatggcaataccctaaacaacataaaaaacgagaaaaactagggttcctgaaaatcccccaaccggcagaccggttctgggaattcctgaaccccatccgaaattccggttgcacaatcggaattccggttcctcgcaggaaacatgcaaaaatccataactcattcaaaccaaatccaattcataccaaaccttccagacctgttctaaataccccaaagaacatttctaaagcatcaaaaccacccagaaaacacagatactaaaaatgccattaaagctccaagctttgagttcaaaactcaagcttggttaaatctaactaacatgcatcaaacctgccttaattcaccataaacaaccatattataaccccagaaaacaaactcaagcaccattaacaatcacagcaactatttcacattttcattttgaaaaaccatagcttttgaaccaaaactctaaactaatttaaaaccaaccaaacatgcatcaaaacagtttcattccactcaatccaacatgcttaaacctctgaaaacaatccataaacacaacagcaacaataaaccaaaactaagcatgcaacctaaccattttcttcaaaaactcaagaaaataacaagacaagtt

SEQ ID NO: 290472 - DNA, 432 bp, Cannabis indica
tgtcgttgatcagccatgagtgcagcagctggacaaagaatgtacatgtttggaccacactagaccaagtgggttggggtctaccagtgatgtattttgagactctattttgctgcttaggtcggccaaaggaaaagaacttgaaatagtgtttcgtaaatactttcgggatcccaacttttgtaacttttaaattataaggtttaaattattacaagttattttcattccgtttattaataaagtttaatttctgtgcttatttttctagtaatcccaattaggggattagggtttcataagtttattgggaagcgtgcctaattatttagggcattacaacaatcgtgcagcccggagcccgtgctcaaatccccgctcagaaagatgctgacgtaattcaaattgaccagaatgtcgagcaggttagcc

SEQ ID NO: 290473 - DNA, 718 bp, Cannabis indica
ttattgtacgaaaattctatcaacggtagatacttactccaagagccttcaaaatccataacacaggctcgtaacatatcctccaatatctgaattgtcctttcggactgtccatctgtctgaggatagaatgctctactaaatttcagtttcgtacccatggcttgctgcaaactttgccaaaattcggaggtgaacttcggatccctatccgaaactatggattttggtactccatgaagccttactatctcttagggttgttcatataaaccggaaactgcagtttaaatctggaccactacaatccaaaccactgtaaaccgtaaccgggaaaccgtttttggtggtttggttaatccggaccgtttacggtgtaatggttcggttgcgcttcgtaataaatagttaacggttaaatcagaccggaccgtttataatatataattaatttatatatattttatttatgactatatgtataattttgaacttttttgttgttgctaaaaatattaattactacgcaagtgcacgtaatcaagtagtatactcacgtaagtgcggtcgaaccagagggaattggattaattactactaaaatatacttatgattctatttggaaattcaatagtgtttatgattcaaaagaatctaaagtaattcagaaaaacttaaagaacacaagtgaaagttaagcaagatgagataataggg

SEQ ID NO: 290474 - DNA, 1274 bp, Cannabis indica
ataatgaataaaaactaataacacgaaataactcaaaaccggttataactaaaatagaaacggttatataacatagtgaatacaaacaagttgcacacaataattcaaaccgaatacaattaaaaaataaaagggaaaccagttcctagaacattgaaacataaattaaaaataaaactagttctataataaaaaacctcataacacataatactagggatgtacatcggtcggttcggtcggtttacgttacattttatttaacccaatataaagatcaggttgcaaaaatttaagtacaacccgcccaattaagaaaaaaagtttcagtccgcccaatttattggtcggtttagtcgggttaacccgttcaaatcgagcactaatgtttatttttttcacattcaattgttatattttagttattgtgataatgagataaatattatgtataacctggaatttagcagtggagacggcttttgcaataaacagattcttctgatcatatatgtaatcccattcatgtagcagttaaaacaaaaaacatgaggaaaaaacaaaagactaaaaccaaaaagagaaaagtactaataaaaataacacagagaaaaaagacaccttaggaggatttttttttggtaagtcaaagtcttcaaacttctctgagctcttagcatggacctgaaaaatggaaaaacaaataaaacataagcaacaaatttgaaacaactaaaaaaataaaatgcacgcaaacaagtacaaggcacatctaaaaaataagacaaccaggaaaaaaccaaaaaataacatttaaaaaacaactccaatatgctcagcctaaaagatgaacaacttcaaagtaatatatttaccagaaaatgaaattcaaacagtaattgtcaatcgagaaattaaattaaacaacctgaaaacaaacagttaaacatctgttgataacaaggcaataaatcactgaaaaaccaataatactataaactgtttaatagcagaaacaaaaccaaaaaccaactaaaaaacaacacaaaaacaacatcaacaaaaaatacataaaagaaatacaaaacaaatgagacaaaacataaaaccgtcattaatggttagtactagacctgaccttgcttatgcaatcagtgtgctaagcaggttcatgtctagtcctggaaagaagcattggaaagccatgaaatggcttatgagatacttaaaaggtacatctaagttgggattggtctatcagggtcaccaaacag

SEQ ID NO: 290475 - DNA, 172 bp, Cannabis indica
ggaaaagatgatacatctcattccttcaaataaaatttgagcctccactcctacactgtagtcgaaaccatctttctctcttttcctcttcaaaaccgaagccatatagtgaaaacagtgagtgcccacacacatcaagtagtactcaatcatagtgtgtaaggctgtgaag

SEQ ID NO: 290476 - DNA, 689 bp, Cannabis indica
acccgagacctcttttattccaaagaacctgaaaacatagaaaacaagcgtaattccgtcccaacacagcgaaaaacgcacataaattagatccaaaacataggctaaaaatagcctaacaagtctagaaccttattcttagtgggatatttatttgagaaaaatagaataccgggtttggacggggttatggtttttgactattttacccctagaccttaaattgcccaagtttaagctaaaggggtatttttgtcattctgatgagaggggtgtggtggtttcttagggaagtgacacccagcaaaatttaatttcagcaaggatttaatttaccaagctttattccatttaatcacattagattaaagacaaaaaaaaaaatcaagaacactctctctttcccttctctatcttcaaacccagcaagaatcaagaagaattgcagaagaatttctcatttcagcaagggacttaagtaggattcaagctaaggtaaccctagaacctatagtcttgtattttttaagttttgagtttggttaattatgtgattttgagatataggggctgttagggtaaggttgtgttgtaattcgaattctaagcgtaaattgagttaattttaaattactgctgctgtatttgatgattgttgtggtggatgatcaagtttgagtttgaaaact

SEQ ID NO: 290477 - DNA, 794 bp, Cannabis indica
tcccaacccaaacctggactcgggacccgaacccgaacctgaactcagacccaaacatggaaccatgctagggacaaagaaccagggtcaggacctagaaccactcctcagtctcgatcccgaacccaaactctgaaatgggacctggaagcttaaccaagacccagactgggatcaaaatgctggacctagatcaagaccgagaaccctacccagaccgaaactaggacccgcactcgggacctgaacttggacctcgacccgaacctagacccaaatcggggtcagacctggacacaaacccagacacaaactcggacccaaactcaaacacccacacctagaataagacccaaagctagacccggacccggacccaaactcgaaccaagacaaggatcaaaaccaatgacttagacccagaacttaatccagactcagatcgggattggaacttgggactcggacccaacctagatcaagaccaaggacgcgaacccacatctggatcctgatttggacctagactgaaatccggacccgaacccaaactacgaccatgactcaaactccaaccccaactcaaacccaaactcgaacttagaatcgcaaatggaactagaaccgaactaggactagggccagtacctaaacccaaacccgaacccagatcaaaacccagacagagacctaaacccgaacagagactaggactcgaacccgtaccttgaccgagaccaaacccactcaataactgggacctggacccagaatcaggatagggacctgggaaa

SEQ ID NO: 290478 - DNA, 922 bp, Cannabis indica
  modified_base (82)..(82): a, c, t, g, unknown or other
ttgtgttataaatttataacttatatgctttaatttaatatataaaaaaaccacataaaatttgattttttttaaaaaaaanaattaatgagaccgagtccacccattgacccggccaacccgaacccgcgaacgcatgagcccaacactcacgaacccaaaccatacaagaaatatacaagaaaaatttagttaaattacttaaatttagaattaatttcattaaaattttttaaataattattaatgtaaaaaatttcccattttaaatataacttgttaacaatttttaaaaaactactaacttgttataaattattaaattaacatgtatatttttatcatctaaaattttaaaaaaaaattcagtagaataacatttatattttaaactagccaaagattttaaaacatgttcgaaacactccaaaaattaaaatatatcatagattttcaaatattacatattttcacaataaatcaaataatttattaacatttaaaaaattaaaaaaaaatcacatataatattttcagaatattaatacatatattaaaaagaaaaaaaaatcacatataatcacaaataacattttcaaaatattaaaatttatattataaacataatatattttataaattaatttttttttacatataatgaataagtataagaaataaaaaaaactaacagtgtggctactccgatatatgagcggtttgtctaagttgtttgtggtggctccactatgaataccaacactatatatacatataaacataaatatttatatatatatatataaatataaaatatatgcatatattaaagaaaagagtatgagggatgaaataatattacctaaaggatggcgacgtctcagggaggcgggcaggcaggtggggtcggggggctggatgg

SEQ ID NO: 290479 - DNA, 707 bp, Cannabis indica
gtcaggtagtgtgatgcctccagctttgttctttttgcttaggattgtcttggcaatgtgggctcttttttggttccatatgaactttaaagtagttttttccaattctgtgaagaaagtcattggtagcttgatggggatggcattgaatctataaattaccttgggcagtatggccattttcacgatattgattcttcctacccatgagcatggaatgttcttccatttctttgtatcctcttttatttcattgagcagtagtgtgtagttctccttgaggaggtccttcacatcccttgtaagttggattcctaggtattttattctctttgaagcaattgtgaatgggagttcactcatgatttggctctctgtttgtctgttattggtgtataagaatgcttgtgatttttgtacattgattttgtatcctgagactttgctgaagttgcttatcagcgtaaggagattttgggctgagacaatgggattttctagatatacaatcatgtcatctgcaaacaaggacaatttgacttcctgttttcctaattgaataccctttattaccttctcctgcctaattgccctggccagaacactatgttgaataggagtggtgagagagggcatccctgtcttgtgccagttttcaaagggaatgcttccagtttttgtcccattcagtatgatattggctgtgg

SEQ ID NO: 290480 - DNA, 535 bp, Cannabis indica
ttgattttgaaaaattgcttgctaagaactcaactcaaagaaagaaaataagtttattgcttgaagaagttgaggctttgaaagtcaaagaaattgagtttttgattgaaacccaatgcaaaaagtgttccttatttgaaaaagatgttgtaaacttgaaagctaaaattgatgatttaaacaaggtggtttacaattttacaaaaggaaaagagaattttgaaatgatgcttgggagtcaaaaatgtgctttttcaaaaagtggtataggatataacactagtgtgaaacaaaaatttcttaggaatttctttgtcaaatcatctagtaatttgaacttaacttgcacttattgtaaccaagatggtcatactaaatcctattgccatgtgaaaaagaatgcctattttggtaaggctatttggataccaaaggttttaaagactaacatcaaaggacccaaagtcatgtgggtaccaaaaagaaagatataagtttgttttgtaggtatcaataaagaggaaccaaagttggc

SEQ ID NO: 290481 - DNA, 581 bp, Cannabis indica
atactcacactatttttctatccaattttacccttaaacaaataaaaaccaaacatccatgtctctctctatttctccggcgttaaccctaacctagaaccttcaccgtcgaacacacagacccagaacttcagtcgcaaggcctcgccgtcatcttctctcacggcctctctcgttttctgtatttttcttctagtttaccagttttttgcgatatttagcgatgatagaacaaatctgaggtcagggatgaagtttagtgatgatttgcgatatttagcgatatttagcgatgtttcgcgatgtgttttgcgatattgtgaatttgagacatttagagatgttttcacgatttcgcgatatttcgcgacatctagcgatgttttgcgacctcgtcaaaaatcagaagaaaaaaaaatgtagaaaacaagcgctgttgtgaattgaaaacatttagagatgtttcatgatttcgcaatgtttcgcgacatttatagcgatgtttcgcgacatcgtcaaaaaactaaaaaaaaaaatgcagaaaataagcgagtgggttttgccggaagtggtgcgatggt

SEQ ID NO: 290482 - DNA, 670 bp, Cannabis indica
taacattcatgcatatatcaaaaatgttcaactcttattaataattaaaaatatctttataaacttttcagggcattaaccctaacatgtgggaccacactggaaccaagggccatacaactagagcacagtgaccatcgtcaaggcatatcattcttattcgaacagagcaaattaagtttttcctcatgcccaacacaaaccacatttgaaacatactagagggaggcgttcaaacttgaagtagcacaagatctttttgcttccttcgtcagggagagaggcccctaccataagaacagaatcaagtttaatccaaacttgtaaacacatgttcgttcagaaaaaactcatctttcctgactttacaagcatgtaactaggttcccatacaattcactataagcaccgctcctcataagctgtgaatatggtggggactcttaaagcacgaaaccaaatggccaaggtgttgtgattttatgccctaaataaaacacatttcaatatagtcagatttactaattaataaaagattaaaaatcattttatattgcatggttcacatgattgctttcatgattatatatttaatatataaattctattaaatctagaacatataattattcatgattatagtgttgtcaacacagtggaatataatcat

SEQ ID NO: 290483 - DNA, 609 bp, Cannabis indica
ttctctttaacaaaatagtactttatgtcaatgtgtttagaacgggaagtacttctaacatttctagagaaagctactgctgcggaattatcacaatacaatttcagcggcctcgagatagagtccataacacccaatgctgaaatgaagttccgcagccatattgcctgacaagtagcctcataacacgccatatactctgcctccattgttgaggatgctgtgagtgtctgtttgacacttttccacgaaacagctcctccagccatcatgaaaatgtagcctgatgtggatttcttatcatccacgcatcctgcataatcggcgtcactaaacccaactatatcaagagtgtcagctcgccgataagtcaacatatgatccttggtaccctgaagataccgcatgaccttcttagccgctttccaatggctaagtccaggatcactcaagtatctacccaacacgccaacaacaaaagcaatatcagggcgtgtgcatacttgagcgtacatcaggctacccacaactgacgcataaggaaccactttcatttcatctctctctttatcattttgtggacattggccctttgagaatttgtcacct

SEQ ID NO: 290484 - DNA, 310 bp, Cannabis indica
tctatagaggatctttgattattgagattagaacgatggttaaatgtttatagcgtatctatatcgtggaacatatagagcgttctatatgactgagagtgcaattccaagttctatggtggatgcaataaggaattaataagttagggaatttacttggtaaattctagttctgcttattggaagctcggttgtataggcccatggtccccatactagttgagaccatactgcttgtaagactcagataattgattttaattaatcaattataattctaaaattagactatgtctagtttatgaatttt

SEQ ID NO: 290485 - DNA, 622 bp, Cannabis indica
aaaaaaaatgccccaatccattttttgacccccccatcggacctaggggtggcaaaacgggtttcaacacggcacacgaacacgaacacgacacgaattttacgggttagggtcgggaaaattaaatgtgggtcgaaaacgggtcgacacaacttgacacgaaataaaaacgggtcaaaaacgacacgacccgcttaacacgaatgtgacacgtttggcacgatttttttaaatataataaaataaaaaattaataataatactataattatataaaaatatatatttagtgattcaatgttaagttaaaaaatttttaatttaattttctttaacatgaaattaaaaatattttaattttttaatttttattatatataacaaactatatatacataaatgtatataagttttttaatggagcttaaatttattaattttctctacaattttagctttaataatagcaaaacgggtcacagtgggtcgacacaaacacgacacgattttttacgggtcgggttagggttgagataattagacacgagtcaaaaaacgggtcgacacgcttgacacgaaaatataaagcgggtcacataaaatatgtgttggaaatatttta

SEQ ID NO: 290486 - DNA, 601 bp, Cannabis indica
gcctagtagcaaagtacacacgctcttgggagtccgtcagctccgtgtacgcgggtgtacgtggggagtcgttacccccttttctgacgctttcccccgtccgggtgctgcctttggaggatcttttgctcctcgagccctgggaagggcctgctaggctagcggttggagcggagtgcgagggagcttgtccatttatccccgagggatttccaaagtgagatgatgcgggcgccaaggcctggccctgactatacccgggggtagcagagaactgtatgccgcttattgatggagccgcggtcgggacagtacccgagggcagtgcttcgggcatgtaccatgctatcccggtgggatagtatcctccataggccactatctgggcttcttcaaggttgatatatttttggactctcttctggaagtcctgaaggctagctgccccctcctgttgtagttcgttccagaagggagtccctatacggatgcctgcctggagaagcgcaagctgttgtccgtcatcaactttcttggtttttgatgcctcctctcagaacctctttatatagtttttcaaggtctcggtgggcagttgctt

SEQ ID NO: 290487 - DNA, 581 bp, Cannabis indica
tagttacatatatgtatacatgttagttgccgtcagaataacatatcaaggcatcagtgaggtgtacatagagttgcactaagataccaacagatatatgttaggcaaatctatagccatcagattagcatatcagggcatcggtgaggtgtacatagagttgcaccgagatgccaacagatatatgctaggctatcagatagtatgatttatctgctaccacatcagtacgactagagtactgagtataggctggatttgcagttagtcatactttgtcgagaatgttcctgactcagttaggattattgtaacatctcgataagcctaatggtaaataattcgagtttatatttatactatgggttaatcagttaattagtgggattatgatcttactaatctattaccgtataaaatttaaattttgctataagtgagtaaataatcgtaatttgttaattacagagatttatatagcatgtgtgaatgtaatatgagctatatgtggaataaaaatattttcaggtttggcgaccctggagacccgattagaggccaaaaatgtcacaacagtttta

SEQ ID NO: 290488 - DNA, 571 bp, Cannabis indica
acggttcagtaagcttttattgctttagtagtttatttaattattatgaattaagaaaagcatgataggaagcatgttagtagcctgatagtagaataggcgcatgtttttaattttcaaattaagcggcattagtaagctctcgttgatcatgacttgatgtgccaactcttggtttcgcaggttgttcagactaaatggacgccaggcggaacaccaggagtcagggaaactcagtacggtcaaatcagggtcaaggagctcagtttccccagcatgctaggggccgttgttgtggtcccaggggcagggcccgtggtcaaggtgatgataacccaccacaggctgcccaagccaatcaagaagcccagaattgggaaattaggtttgtcgaaatgcaagccggaatagaggagcaagacagtgagatttagagattgaggcagcagggtgctcctgaagtgccggtgccagaagttccagtggcacctcccccgttgcttaggccgagatagtggtagcggcgaacagaatggaacccttgtatgaaaggtttcagaagcaggcacct

SEQ ID NO: 290489 - DNA, 508 bp, Cannabis indica
aaaaaaaaaattaccccatatattattttttagaaaatttacagttcgggttgctccagtagtttccatgtgaattgttatacggattttggttgcgatttaggttgttccgttagtataggggtttttgtatagaatttcataaaaatacaaaaaaaattattttaaagtgtaaaaataaaaatacctcaaaaaaaaaagggtcttttcaatattatacctaaaattgattttatttataaaaatacctttaagaaaattatttgcacaaataccgatgtgtcacgtcagcataaataccgaaatataaaataattaccgaaaatagaaaaaaaatcgaaaaatctcgcttccagaaattttagtgttttgcaaattttgaaaaaaacaaccttttggttgctaaaaggttgcttttgatgtaaataatatattaattagttactttttattagaaaaaaactaattcaagataaattttttctcatacacatttggttgcttattt

SEQ ID NO: 290490 - DNA, 511 bp, Cannabis indica
aagatacttattcagtctaaggagagttctatacatttttggcattgttccaatatttattaactactagtgttacttcctgattaatgcagaaatcgttgccaaaaagtaaagaatttagtatccctagaggagtagacatatagagaggattttcacaatatcaagaattttatgattaaggaaatgtaatggtggaggaaagtttgtattgaatacaacttatcagatcctattacagagagtatactacaaactacacttgatctggatatcaaggtgttgagattatttaaaatgcacttttggttttatattagtacaaaggggagtttgttgggttttgtgccctaaataaaacccatttcaatataatcagatttactaattaataaagatcagaaatcgtattttatattgcatggtagacatgatttatttcatgattatatttaatgtataaattctattaactccagaacatatgtatttgttcatgattatagtgttg

SEQ ID NO: 290491 - DNA, 591 bp, Cannabis indica
tagttcttatgaaacccagaattctcgacccctgccttaatgagtttggagggtatttatagtgtttttgtggggtgatctctagaattgaggtacatggcttttagtaattctcagtagaggcacacattcccaatggatacatcataggaaatgcatggtctaatccctaggctgtgtagggattttatggacgtagtcctttattctttttgactaatgtgattcctcacaaagtagccgtcactaggctcattaatcatagcatagtagctgcagagaggggggttttcacctatcaaactttaagacatatggcagtttcaatacgccttctcccatgcggcattaaatgcgaggtgacttttcagataggatctgacacctcccagagatgctttgttgtagctttgctctccgggagtacgtgagactgacatgccttcttcaggaggcatgtctaaggctgatccctgtggctaaagagatttagctgaatcattaaacaataaaccctttcagtctgcgtgtcatcatccggttggtccacgtattttggctaaaacttaggggtaacatttaccccccaag

SEQ ID NO: 290492 - DNA, 670 bp, Cannabis indica
tcatagtcgtcgaaaagttcgaaagttttaacttccctttcttcttgttggtagttacttctcgatcatcctttacaacttccactcgacaacaagtaggaatttcagttgcggcaaataccttgaaagtctcttcttctttttgaacacgcaactttaactcccccttctgtacatcaattaatgctcttcccgttgctaggaatggtcttccaaagatgataggaatattctcatcttcctccatgtcaagtattaagaaatcagcagggaagatgaacttaccaacctttaccaaaacatttcaattataccccgaggatgagtcaaagaacgatctgccatctgtaaagtcactgttgtgggcttggcttcccctaattttaatcttttaaacatagataggggcattaagttgatactggctcccaggtcacataaagcttttgtttgtatcgaaccccctattgagcatggaatgttgaaactacccggatcttttagcttgggtggtagtttcttttgcaggaccgcactgcactcttcagtaagtgccaccatctcaaattcttccaactttcttttcttagataggatatctttcatgaacttcagataagttggcatctgttccaaagcctctatgaatgggatgttgatatgcagtttc

SEQ ID NO: 290493 - DNA, 558 bp, Cannabis indica
ttcaagctctcaaacttgagcttcaacccacatatcaacaataaaaacccaacagcataacactatttaaatatgaaattccaacctagaaaacatcataaaatctctgcccaaactcatcaaagaagcatacaacaacaacaagctcaattaaccaagatcaagcatcaaatctaacaacatgcataatcaagaacacgacatctatttcatgctcctctttattaaaaattcagttaataaataaagattaaccaaggaaagttacctcaaatctcaattcaaggctaaactccaacaactcccaagtatcaagctccaattcatgcaataatcacaccaatttctcaagaaatcaaagattgagaaatgagagggtttgagtgagagagagaggtcgggtgagagggatacacaaccagaattttttttttagttttccttcaaaattcaatttgtcaaacatagaaattagaggtcaaatgaccaaatgcccaagggtcaattaacatgcatacacacttccaaggacaacattgtcatttcatacccatttaa

SEQ ID NO: 290494 - DNA, 485 bp, Cannabis indica
attgatcaagttcaagcaatgcttgaacttgtttactatcaagaccttagtcccaacattagcaggattatcgtctattttgaccttttctaaatcaaccagtctttcttctatcttctctctaatccagtagagtcttatatctatatgttcgctcttttcatgataaactggattcttacaaagatggatggatgactagctatccaaaaacacagtcattccccctttgatttgttttaactcataaagaactcccaaagccataaagcttccttgaatgcttctgtagttgccatgaattctgcttttgtggtggaaagagcaaccacgaactgtaattgggccttccagcaaatatagttctgatttgtcaagaaacataggacatagttgattttctcatatctctattcgaggcgtagtctgtatccacgaaccctttcaattctaattctcctttagatttttcataggtcagacca

SEQ ID NO: 290495 - DNA, 927 bp, Cannabis indica
cctcccgttgatctgagaaatcaaatcaatgggaaccaaggtgacctccgggatcaccttgaccaaaaaagatacggacccgcggtctccacgggtacgttaaatgaaggaattatggcggaactcgccatacttcgaaaagacattgcccgagtctcccgaagacagaaaggggacgactccgactcagacagcgaggaccgggagccatgtgctaagcacatcctggaggcggaactccctaagaacttcaagatgcccgaaatggcagcttataccgggaactccgatcctagcgaccacttgtcacggttcaaccgtgtcatgacggtcatgagagtcagcaatgacgccaaatgtctgtgcttcccacttactctaagtgggtccgcggaggaatggttcaagaagctggaaccaggatccgtgggctgttggaacaagctacagaccaacttccggagacagtttgtcgccgcaagaaaggtcaacctggaggtcagtgccttgactaatatcaagcaactgcccaccgagaccttgaagaactatataaagaggttccgagaggaagcctcgaaaaccaagaaagttgacgacggacaacagcttgcgcttctccaagcaggcatccgtacggggactcctttctggaatgaactacagcaagaaggagctgctagccttcaggacttccagaagagagtccaaaaatatatcaacctcgaagaagcccaaatagtggcttatggaggatactatcccaccgggatagcagggtacatgcccggagtatcgccctcgggtactgccccgaccgcaactccacaaacaagtggcatacaattctctgctacccccggatatagtcagggccaggccttggcaccagcatcatcccatttcggcaacccgtccggaatgaat

SEQ ID NO: 290496 - DNA, 693 bp, Cannabis indica
gaaaccccaatgtcctaaacttcttacaaagaaacaagatatttcttttcctataaactgatgagttttagtgaattattatccatttggattattaattctggacctactaaccatgtttatttgtttttcttcttattacagcccaagctgcttgaactcggatgctattttagcgagttgaatcggaaagttggacaaaggggtggagttcatccaagatgaagatgaagctcatttttattatttatttttgaattaattgttttagttgcaaaacagtttggatttcaattattagtttgggattttattccctatttttttttatatttttgcaaacaactcctttaattgtggaagactttataataaagttttctattttggaaataaattgcaatttatgaattgagcttcatttactttgtcttgtgtaaccaatacaaattatatttatatgtttcaataattgtatgtgtatgtgtttttattattgatacaaattctatagtatcttaaactcttcaaagagttaatactacataaacacttagaattacttttctatgtttatgaaaaattgttaattcgaaaataattattaagaatttatttaatagaaagatcttttcatctgatacgggtggagaaaaagttaagaataatatgcagttcaacgatcttttatat

SEQ ID NO: 290497 - DNA, 724 bp, Cannabis indica
cagtatttttgtgccacgtggtattattcttgacacgtcatcatcgtcaaaatttgggtaaacaataagtaagggaaaattgcaaatttttcatgcaattttccccacctgcattatcaaattttagaataactctatataatagtaaatacataatacaaaaaaaattaaaataatatttttaaaacttatataaaattagtaatcgattctattaactaatcacacaataccaaaattgttaataaaatcgattctaaaacttaaattccatgtatatcgtaaactaaatataaactaataacatatgcaaaagataacaataatcataaaacttgttactcatgtattataacaaaagtgtagtaaccttaagtacttaatctataatcaaaggcttcacaaattcggcccactcatcccgtacggcattgatctcctcgttactatagggagcatctaacttgaactgtaaaacaaaagataaaaaaacattaatcattatattaaaagtatatataattaaaatacaaactaaataaagaagagtagttattcatgtttacatgatttttcaaaaaacttgcaggattaacaaccgtcatgaaactctggataatcttcataacataataaccacattgtactccatccggctgctgtcgacacgtgtattggttgatttttactggacccttatttcatatatttttttcgatcctgt

SEQ ID NO: 290498 - DNA, 630 bp, Cannabis indica
agggcataaaacccaacatgcagctcattgctaatcaacgaggttattgaaaatcgtgaataattaaaatttgcttatttagttagaaacttaaagtattacatatataaaatttcgggatcccatttataaaatactttttcaaagtttactatatacataaataaaagttttttgcccagggactatacagcaaaagcctcgatgtccaaaagatcgtacgctccgagcctaactgccccgacatgtacaatcttcacctgctcgctctcacggctcctcagctttagccctgcccttacctacacatggaaatagcactatgagtcgacaaactcagtaagaaaagcataacataaaacataataataacccggattaaaatcaggcgcccatacacccaaccataatcctaactgagtcaggaacgttctcgacaaagtataactaactgcgaatccagcctctactcagtactctagtcgtactgatgtggtagcagataattcatactatcttatagcctagcatatatctgttggcatctcggtgcaactctatgtacaccacactgataccctgatatgttattctgacggcaactaacatgtacgctaaacatgtaaatca

SEQ ID NO: 290499 - DNA, 529 bp, Cannabis indica
aaacagtaaagaaaactttaaaaaaaaaaaatataaaaaaacctaaacaataaaataagaataaatacctcatcagaaggacgacgatgaatggcattaaccttctcctggatatccttaattacagtcattacggatttgaaattaaaatcaacaaaacacctcaatgaaatgaagtcctcggccaatgatgattgattcgaaatgagcatctccagcttagatttcatccaatcaatatctgctgaatcagacttctttgaagatgacccaccctcgaaggattgcttcgctacaccacggtcatcaatagattcatcgagaaataaaccgtcaagttgaagctgctgcctctcttcatcagtaggacgcatgttttttatcttcaactgaacagcataatcaaacataatatgaaaaaaattaaaacaattggaaaaaccaaaaaataacaacataaataaaactgaaaagaaacagtaaagaaactgtaaattaccttgtccaaaggtaaatcaaaaatcttgcc

SEQ ID NO: 290500 - DNA, 631 bp, Cannabis indica
gagtttttgccatcactcaagcagaagctgaggccagtccttcggttgtatcaggtcagattcctatggccaacaccacttgtaaagttttgtttgattctggtgcaactcattcctttattgctagcacaattgtaaatcatataaatgcaccgagtgaattatttactgtggggtttgggaccatgttaccatctggggaggttgtaatctctagaagttggcttaggggtatacctgtcaggatagatggtagagaattatttgtagacctgattgtattagatttatttgattttgatgtaatcttgggcatggattttcttaccaaatatggagcatcaattgactgcaagcaaaagaaagttgttttcacaccagaagatggagagactttcgagttcaggggggtaggaaagaaaccccgcactcctattatttcggcaatgaaggctgggcaactattgcagcgtgggtgcttagggtatctagttaatgtggttgatgacaccaagaaaattgaaagaaagccggaggaaacacgggtagttgctgagtttcttgatgtatttccagaggagttacccgggttaccaccacacagagaaatcgaatttgtgatagaattagt

SEQ ID NO: 290501 - DNA, 593 bp, Cannabis indica
tggttcttcgtctgggttctggtcctaggctgagtcccagatctagacaccgaatggtggtgtgttccaggccccgttacctgaatcctgagtcaagatctagatcactgtcacgggtctcggtctggttctggttcaggtcccaggtcccatttctgagtttgggtttgggatcgagactggggtacggttttaggtcccgaacctagttctgtgtccctagtctggttcaatgtttgggtttgagttcaggttcgggttcgggtccggagtccaggtttggtttgggatccaggtccggctccctattcgggtctaggtctgatttgtagtctgggtcctggtccggttaacgttatggatctagatccactttcagttatgattccaagtccaagtcctagttccagtcccggtcaactaccagttttggttcaaattttgggtcacagagtattggttcaaattttgggtcacagagtattggttcgggtccacttttgggtttaggactcagttctggtctgagtgtgggtttgactcctggtcagggttcgggtccagggctgggtcccaaatccaaacaccgacta

SEQ ID NO: 290502 - DNA, 667 bp, Cannabis indica
tgactgacgatgaagcccagaaacttccctgacttaaccccgaaagtgcacttctttgggttgagtttcattccgtatctccggaccacttcgaagcattcttctaggtcgtccacgtggctagggcacgcctttgacttgactagcatgtcgtccacgtatacctccatatttcgccccaggaggcctttgaacatccgatccacatattttgccgaaaggcatgactaggtaacagcatacccccttatcggtcctgaagctagtgcactcttgatccgctacgtgcatcttaatttggttgtaacctgcgtatgcgtccatgaaggacagtagcttgaatccggaggtgacatccaccatctggtcgatccttggcaaagggaaacaatcctttgggcaggctttgtttagatcggtgaagtctatacaaacctgccatgttccgttaggcttcggcaccaggaccggattggctagccactctgggtagtagacatctcgaatcatgccactcgttagtagtttgtccacctctttttctaaggcttcagccttcactgagtcgaggggacgtcgcttctgctggaccggtggcatgtccggattgacattaaggacatgggtgatgacgtggggacttatgccagtcatgtcctcttggcac

SEQ ID NO: 290503 - DNA, 558 bp, Cannabis indica
agactgaaagaacaaatcagatcttggaagatatgttgagggcatgtgtgatagatttccaaggatcatggagcaaatacttgcctttgattgaattttcttacaacaacagctatcagtctactatcggggtagcaccctatgagatgttgtatggaagaaaatgcaggtctccactacaatgggatgagttgggagagaacaaactcctacggccagatgcggttcaacacaccaatgaagctattcagaagatcagggctagaatgatcacagctcagagcagacataaatcttatgcagacctgaagcggagggacattgagttcgaagtgggtgatcatgtgtttcttcgagtgacaccacgaaaaggactctcagtgaagagatttgggaagagagggaaactaagtcccagatatgttggtccatttcagatattggacagagtaggcagtgtagcttatagaatagctttaccgccatcattatctggggtgcacaatgtatttcaagtatcccaactttgaaaatatgtgtcagacccatcacatgttt

SEQ ID NO: 290504 - DNA, 584 bp, Cannabis indica
atgagttgttagcagagagatttcggaaacaacacccacctgagtttgagggaggcatagacccggtagtggctgaggagtggataagtcgcatagaaagcattttgcagatgctaagggtggatgggaatgaccgagtgaagtgtgcatcttacatgctgaggaaagatgctcgtatctggtgggaggtggtggaacaaacaaaggatgtagataccatgaactgggacgatttcaaaagggtctttaatgagaagtattataactcagcagttctagcagcaaaggtcgatgaatttactgggttagtccaagggagtcttactgtgactgagtatgcacaaaaatttgatagattggcgaaatttgctccagatctggtacctactgatagagtgcgagcacatcgatttgtggaaggcctgaaaccaatggttgctcgagatgtggaaattgtgtcaaggggtcaattcagctatgctcaagttgtcgaaatggctcttacggctgagcggagtgaaaacaaaatttggaaggaaaatgctgccaggagagaatctaagaaaggtggagccaattctaat

SEQ ID NO: 290505 - DNA, 530 bp, Cannabis indica
tgccataatctgacaccaatatcgcatcgtctaatcagacgagcccgtacctacgcccggtacttatcatatgtcactgacgtccgtacctatgcccgatacatcaccaggaaaattacatcacctaatcaggtgagctcgtgcctatgctcggtactcatcatatatcactgacacccgtacttacgctagtacgtcgccaagaaaatcgcatcacctaattaggtgagcccgtacatacactcggtagtcattatatatcactgacacccatacttacgtccagtacatcgccaggaaaatcgcatcacctaatcaggtgagcccgtacatacactcgatactcatcatatattgctgacgcccgtacttacgccaggaaaattacatcacctaatcaggtgagcccatatatcacatgcacaattttatcacattatcagtactcaaccaatcagtcttttcaatatataacaatattaactatatctcaatattattcaattcataacaatactaattgtattaca

SEQ ID NO: 290506 - DNA, 722 bp, Cannabis indica
atcaagatgaaaaacaaagttatacacaagcaatccaaaacactcaagacaattctaaactaaactatcataaaactcagatcatacccaaatgcaaaatacaatactacaacaacgaaatgaaccacaatgacccaagaaactccactgaccataaaccccaaagcttcttatatactattttttctctttgttatcaaaaaaaatagagcttacaattcaagaaaattggtcaaattccattctaggatcatgtacttccttccatattaaaaataaagagtcatatcataaaaaagttaccttttttttccaaattgaagatccccggagctctcaatcatcaaaagcttgcaggagaagaagaagggtcgcacaaactcttagttgcaggaatgtcttccgttcccatcgcttaaaggcgggattttttttttcgaaaaggagcttcatttgacattaatgctctaagaaaacttgtgaaagaagtttttcaatccaactcttcatttcccaatgcacacaccaactaagaccatttctattgtgttatgtttggcattaaaaatgattttatgatttatttgaattaatttttagaagggtaaataccattttggacctctgttttacaaaagttgccaactggaccctgtgtttgttaaatgacaaaaaggaccctgtatttctaaaatagtacaataggaccctgaattgatttt

SEQ ID NO: 290507 - DNA, 516 bp, Cannabis indica
ccccaggtggctcagcttgccaccctgcccgatgccaaacaagatttggtggtcccaatggaggaggaccgtgagggggacgctgaagtccaggaagatgaggagctgtacgaggcacgtccgggcagccctcccgctgctgagggagaggaagagattgaaccccctaactatggggagtacaatgaggctgggcaaccagttgatgctgacgctgacatcctggttgtgggcgttgattacgtcactcaggagcttgctgaggcaattcctcataggaggcagggtgccttgggcgccaggtgggtgagtcctccgtccaagattttggaggcacgcctccgcactctcgaccaggacggatacctgggcgagctggactgctacattcccacccacgacaatcgcgccttaaaccatgataaggggatgtgcgcctggtcgggggcgtcacggccagcaaggggcgctgatgcccttgcacaagtactttcgtgatgtggcggacttgttcgg

SEQ ID NO: 290508 - DNA, 586 bp, Cannabis indica
ttccaccgcctttattgcaaatcaatctagtccgttgatctttgagcattcgaatcgtgcgcttcccccaccgtttgattagtaggtgatgacgcctgttcctcatgcagctttgcctataaaagccaccaccttttcttcatttcggttacttcccatttcttgccaactttgctcaaatttcccaaaacaacgcctttgaacactttgtaattttctccagttcctcttcgtttgttactatcagtccttcttgtctctattcgattcacagcaggacccccagtttcaacacttcatcgtaagttctttgcaccctttgctttattattgaatggcatgctgttacttatctgtttgttcttttctgggtttgcattcgaagtttctgggcatgcaagtgtttaaatccttcatataatcggtttgagtttactgctctagtgataggattactgttgtcacgcatctgttgttgttttctgtagaagaccatacgttcttcgtataatggttgcttagggcacaggacagacttttttctttctgttttctaccttttcttttctttagcgtgtaaggccgt

SEQ ID NO: 290509 - DNA, 677 bp, Cannabis indica
gtcctttccagggcattggcaaagtttaccagtatcggatgtatggagtatacattggaagggaccgatattgaactttgattagatatgataaatttaccgtaatatctattcaattcaatatcacctagttgatcctagatcaaatgatcttaatcctgatatggttaggttcgatctcaagagtattatacatgttctttgatttgttagttaagcctactttttggtcagggtgatacgtacattttgggaacatggtagtgcaattgagtgggagcgctaatcatagatatggaatctatagcttctataggtatttagaagtgaaacgatgatttccttcgagcttgctaaatagagataaatgatagagcgctcattttagtgactatattagttcactataatatcatttataggtggcaagtgttttaaggataaaatacattgaaagggtgtaacggtaattttatccctatgcaatgtagatcatctatagaggatcattgattattgggattataacaatggataattaatagcgtatctatatcgtggaacatatagagcgttctatatgactgagagtgcaattccaagttctatgcgtggatgcaacaaggaattaataagtcagtgaatttacctggtaaattctgggtctgcttattgga

SEQ ID NO: 290510 - DNA, 338 bp, Cannabis indica
aattagactatgtccagtttatgaattttcactaagcaagggcttaaatgttaagaaaagtgattctaggtcttatttattaattaagaactttattaagtctaattaataaacatattaaatgaaaatattatttaataattaatttttagttattaaataattggaattggcatttaagtggctaaatttgaaaataggcgtttttgagaaaataagatgggaaaatgataaaatggcaaaattgcaaagtggggcacattatcaaaccgatggtcggccactatgcatggattttaccatttatttttctaatattttaatgctattaaatctaa

SEQ ID NO: 290511 - DNA, 784 bp, Cannabis indica
  modified_base (21)..(21): a, c, t, g, unknown or other
aagtaagttttgtatttttcnctgagtaattgatttatagaaagcatgtgaataatttcatattttgttaatgttaatgtatttttaattatatcattaatttaaattattataacaaatttataatatataatatgaattataaaaataatatgaaattattattattaaattttttttataatataaataaagaagtatacaaatttgtatgaaaaaaagattagtacagtattggtaaataaattgttcatttgtaaactttttgacaaaatgattaatataaaatattgtttatttaattaaaattattattgttatccttaattgtatttgtatataattaatataaattattattataaaatttgaattaaaataattaaatattatttttttttgtagaaaaatatttaatatagtggcactttttgtgtgtcactatatatctaaaaatattaataaaaaaataaaaaaataaaaaaaaggatatagtgacacttcatgtgtgtggctgttaccttttcagtctgacaaaacctgactctatacgcctatagtgacgcgcaaaaaatgaatgtaaaagggttcagtgacacgtgtgaagtgtcactaaaaactgtctttccagtcaccctcattagtgacgcgcgttgaagtgtcactatatagttttagagttactcaatgtgtgtcactaaaacccaattttctagtagtgatgatttagaacctataattagtataattaatttgtatatgttaattatccataatttcatat

SEQ ID NO: 290512 - DNA, 710 bp, Cannabis indica
tctactttgtagtccgtgaactcgtggagcagctcccagactattgttacatacgcggccattcgctcgccgcgtgtttggtactctcccgatatctgatttacgaccagctgggagtcgctgtagacttctactcttttggcccctacggcctttgctagcctcagccctgctatcaaggcctcatattcggcctcattgtttgaagctgagaagtcgaaccgtagggctgcctggagtcgaagtccggtcggggatatcattgccacccccgctccggatccattttcattggaggctccgtccacaaatactctccatgtggggatcgatggtgttggcgcattcaccgttgcctcggcttcattgcattcggtgatgaagtctgccaaagcttggccttttatggagatgcggagaacgtagtgtaagtcgaactgacttaactccattgcccatttgaggagccttccggatgcttctggtttttgtaggacttgccggagtgggtggttggtcagtaccttgatcgggtgtgcttggaaatatggccttaatttccttgaggccatcaggaggtagaaaaccagtttttcgatgatggggtaccgcgtctccgctcctatcatgcgcttgctaacatagtacacgggatgttgagttttctcttcttcccggactagggcagcgctgaccgcgtgctcggagac

SEQ ID NO: 290513 - DNA, 771 bp, Cannabis indica
gtccacgccctcaaccaagacatctccgtcagcatcgactggctccccagccacgttgtactccccatagtttgggggttcaacctctgcctcttcctccgcctcggaggaactgccagggcgtacatcttcctgctcctcgatctgctggacctcagcgtccccttcatgatcccctccatctggacggctggatcctattcggcgctgggcaaagttgcgtgcctagccacttgagggtcagatgcgtcagccagacgcgttattttctttgtacgagccatcattctatggttgggtacagggtttggagaatgtccttcactagagggaggtgggctagaacgaagaagaggatgatcctcgtgcaaaagttgaagcaggtcctggtcgatccgatgtccgttctcccaagactcacctgagttcatctacaaaagaaaacacacaagatgagtgtttggtcggaatattgaacgataaacaagcaaatatgccgacccggagtactcaacagattaaagaactagaatgttcaaagaaatgtcagaactcaagaagtcagaaattttctcgagttagggaaaaaaagttcatgaagcttacaataagcaagatgaaagacagacgtgatgcacttcaaaaaacaagcattatggactgtaaaatcgcatgaagacatgacaaagaagaatcgcagaagtttctggacctagggtttcctagacattttctacagcaaagtcgaagcagcattcgaaatgtaaacat

SEQ ID NO: 290514 - DNA, 474 bp, Cannabis indica
aaaaaaaggagaaaagagtgagatcaaaagccttagacaaaatattgaggaaagaaatgaatcaagtgcttaccgcgaccatggcgttgctgatgtcttgcacttggtagacggagttcaaggatgcacaagcagcgtactgtttgagcgagaattgagtcatgtgggagacatactcgctgatcatcttcgcggcaaaaggagccaaggtaggccccaggaagcggttaaaccagtccgtcagcggatccatattcaggtcccacagattccggaagtcctccgcgttgaggacgttttgctgctcctcccgtaggaccctcttcaaggcctccacttcggcatgcccccgattgtattcatcaagggcatagttgtgcttggctatccgaagattctgcctctcctcgtctccaggaatcggagtcaacacaatgccgagaggcactgcgtattcctccgcctcggagggga

SEQ ID NO: 290515 - DNA, 585 bp, Cannabis indica
aagtttagaaataaaaattttaaaatggaattagtgtgtgatataattttatttttttgagataatagtgtgagatataattgattatatatatgtatgtataatttagtaactaagtaacttgttacaattttttataactagttataagttatgaaataattaattttgtaatttcgttgtatttctttatattataggggttcggcataattttgtgtgtagcgtatttgggcttgcaattataggtatatacttttactaatttttcttaatatataattaattatcaatgcatgttagttgagtttgaatatcttaaatattcatccgtagtgaagtaggttctgcgaatacatgtactgcggtcggatgggtggattaattttgtattgtttatctgttttgtttgttattttaggcacttgtaaaatttttgggaacgtccaattacagccgttatgctgccgaaatttcggtagaattaggataaatcttactaaaaccattcataatatagttaattataacatagtaataagaagttaggtcacataaaaaataataatattcacatttatgaaa

SEQ ID NO: 290516 - DNA, 1130 bp, Cannabis indica
caacaacaccaatattcaagagctcggactcacttgaagctgaggaatggttgcgctcagtggagtccatattggaatatatggacctcaatgatagggaaagagtatcctgtgctgccagcctacttaaaaaggatgcacggatctggtgggaagtagtaagacagagtcgcaacataacaactatgacctggttggactttgttgatgtgttcaacaggaagtactacagtgccgccatactggctgcaaaagaagatgagtttatgaatctgaggcagaacaatctcactgtcacggagtatgctaggcaatttgaccgtctggcaaagtttgcacaagagatcgtaccaaccgaggcccttcgggtcaaaaggttcttgaaggggatgaaccccatgataaaaaaagatgtgaaaatcatggtggggaccaacacagtttatgctgaggtgttagaaaaagctctcgaagctgagttgctcgaaaatgatataaagaaggagaatgctgctaagtgggaagcccgaagaaacaatggaggaaatcaagagaataagagaaaacacgagggaaatcacggtaatgatcgtgataaaaaggggaaagcagtggtccaaaataacaacaatggggtgaaaaggtcctatgtagaattcccaatttgccccacatgcaatagaaaacatcttggggagtgtaagatgaagtcaggggtgtgctacaattgcgggcagccaggccatctgaagaaaaattgcccaaagggacaaaagaaggagaaccaagccgctcctgctcgagtgtttgctctcaccagaggagaagcggccacaagcaacactgttgtctcaggtcaggtttctatttacggattgccttgtaatgttctctttgattctggagctactcattcttatatagctactaggttaattgatagtatagataagccatgtgacctacttagatgtggtattgtgacggaattaccctcgggagaaaccatgctatcaacaagaagaatgcgagatgtacctatcataatcgaaagcaaagaactcatgggcgacctaatagagctgggaatgaaggaatatgatgttatacttgggatggattggctatct

SEQ ID NO: 290517 - DNA, 786 bp, Cannabis indica
tattttaaaatcaagatattatcttgatagtgaaatgtgagaaaatgtgggggtgatatatccaatatttatcaagcaatttggtaaaagaatggatgatatgtgaaatttaggcatgcttggtgcctaagacttgagtataacttagacacattagtctaagacatggatatgtaagtgatttgattcaaagaggagtcatctcaatatcctatgtgagatcaagtgaaaacttggcggtccgtttacgaagccactaactagagatttagtggaaaagacttctaaagggatgggactaaaactccctaaatcggttcacaattgagggtaacctatcttaatactagtaactttactagtgttaggttcaataggtaagaacaaatcaatgtgtgaacaaatgtgataagtactatatgtcccatcttacaaatttgtgaaagtacttagtgagttaccaatttgagggttagacttttaaagtctttaatagaattcagtttggaaaacaagtattttggtaacaaatactgtaagaattctacctatattgacctaagggtggtgccgccctaaatgagaagtagggagtatattttctcaaaaggtcaatgaatggatgttgcacatggccattaacggtgcacaagcgagatataatgaggtctcaagtgaactctagcaaagatgtgtgtgttatcaccggtttgtattaaaggaatagtggttcaatgcttcggcaaccaaaatttcaacaaactttgtggtaactacactaaggta

SEQ ID NO: 290518 - DNA, 615 bp, Cannabis indica
gacaagctttgccaactcgcatgatccccacaaaagccttcatgaatctctcgaatgatttcatttgcttctgcagggagaacacaccaaagtaggggcattgagtaccctcttccatatagtttgccttcaatttttgtgtaacgaggcactgagtacaatagtttttgtgcctcatttttgtcatttggaagttgtccgttgagtaagtaattgataataggagtcatccatgtagaagagtcatctatcatctcgatgtcttccgtttcacatatacttggctcgctcagcatctctaccagaactaagtttaatttatccaagtcattctgcaaggcaagttttgctaaggcatcggcgttagagttatgttctcttggaattcgtataatgttaaagaaatcgaatctttccaagttcttccgaactttctctaaatacctcgccatttttaagcctttggcctggtattccctgaggacctggttcacaatcagctgcgaatcactatgacagatgaggtatttgactttcaacgcctcagctatctttaagccggcgatcaaggcttcatactcagcctcgtatttgatgcgtcaaattggaacctca

SEQ ID NO: 290519 - DNA, 540 bp, Cannabis indica
ttggtaaaagggagatgcaccctttgggtcggtttaggtcgctgaaacgcaagtcgcagcagatttaacctcgtaaaggtagtgaagtctgatttggtaaccctcgaaatcagatcttcgcacgcaaagggctcgttcagctgggtatcgtctaccgaatcttccccactcccttccgcctcttcttcatcctcgcctgattcgcgagctggggccgtccagtcatcgtccatctcctcgacttcgacgttaggagcatgcctcgagtgaataaggtagtcgcgggccgacaccgtggactcactgtctcgaatgtcgatggtcccaggttcggcaagttcctgcaccattctttcgatgtctgcggaagacatcgggcctagctctattggtggggcctcctcttctgaaatcgaggttgggagaaagctgtcttcctcctggtcatcgtcgccatcgaatgcatggcctcccgagccgagctgttggctatccgacaagtcactcatctaaaagatagaagatcttttcagcgtgatg

SEQ ID NO: 290520 - DNA, 473 bp, Cannabis indica
agaaagtaagtgtgggggagaatgagaatgttgctgttcatcaaagaaagttgttgcctgagacaagtacaattccatgcacaattagtaaaaccaggtttgatcattgcatgatagatttaggagaaattattaataatatgtcttattctaattttgcttctttaaatcttggtccatcaagaaaaactcaggtttttattcaattgactgatcaaactaatgcttatcctttagggatagttaaagatatttttgtgcaggcttatggacttgtcattccaggtgattcttacataattgagatggaagatgagggtgatcccaatcttacatcaactttatttgggagaaccttcttactcactgcaactaagaagaggaatacaaaagcatggatacttagaatggaattcgatggtgaaacactcaaattcaatgtgttagattccattcataaatacataaagaat

SEQ ID NO: 290521 - DNA, 822 bp, Cannabis indica
cagaacagtcaccctgctgaagccgagtgagctgtgtttgtaattgaaaaattcgagggccattgccttcattgaaacgctcagcaagatcgctccacatttcagtagctaaatcaaagtacattatactttgtgcaatctcaggtgaaacagaattaatcaaccaagacattaccatattattgcaccttaaccaagagtttagatttgtgttaccaggttcgggacgaggaagagatccgttgatgaacgcgatcttgttcttggccgtcaatgccattgtgatacctcgtttccacggttgatagttggttccgttgaggactgtggtcacaagaaccagacctgggtggtcgtcggtgctgaggaagaacgggctggaatgatcatcaacaaccgatcgtgattggagagtctgagttgagttgtcttcagcaatggtggaattgtcatgaaaaccttgatctgcattctgagattgaactcgaacaggagggattcgacgaggaactgctgaggaagggggagcaggaatggagtcggaattgacttctgctgtgttgttgtcgatcgtcgatggtgcagtgccatcttgggatcgagtggttggccgagccatggaagctgagggcctgagttcttctgataccatatgagaaagaatagagagaaaaatagaggaaaatcagagcttttaggatttttattatcctgaactgatttttacagatgggaaaaaaggagcttatatagctcaataaaatcaagaaaatggttagtaaggactaccgaagtgctgtacaaaaatgtatagctgtaatg

SEQ ID NO: 290522 - DNA, 686 bp, Cannabis indica
gtcatttaacaaaacacaaggtccaattggtaacttttgtaaaacagaggtctaaaatggtatttaccctaaaatttatataaaaatctcctgcatagtgtgcacacagatggtctatttttttttaatagaaaatatcattttttttattaagaaatattacagacaaacaaaaaatattttgagaataaatttgttagaatttttttggttttacacacataaaattactctaaaatattatttactacacaaaaataatgaagtttttaattttaataaacatttatttttaaagaatacacatttttttaaattcacacagaaattatatagatattttttaaaagaaaaatacgatttctttttcttttttgaataaatgggaataaagtacttactatcatactaaactacgcaaaagaaaacataatcatgtaaaccaaaataggcaaatggtgccttcatatgatataattaatgataataaatcgtgaatcaaataaatggttacaaaaataatcataaaaaaaataaatctataaacatcaacgaaattcctgaaaaggaaagaaaatcctcaattcagctctctacatcaccaaaactgaggccaaaacgacaacggccaaagatccaacgacagtgaacgaaaccgaagcggcgccgttttgagctggtgaagg

SEQ ID NO: 290523 - DNA, 641 bp, Cannabis indica
acggtttttaaaccgtcgggaaatcaacattagcgacgattttgaaccgtcgcctattctgtccgttttacgacggtcgtataggcgacggttatagaaaccgacgggaatactttaaacgactgtttaaaaacgtcgggaaaacccatttttgtagtagtgtttttttacctatttcaaattcaaatttcactaatatcttaaattaattttaaaataaataataatttaattctgataattagatttgaaatttgaaaagtaaaaatcaaaatacaaaacaacacaaaaaatcggaaattaattccatgaaaaatcatgataaaatgaagaaaatcgaaaaaaaaaattgggagttcggacattcctgagcgtgtttcttcgaacacaacgtgtctgaacacgcgtctgaccgagtgaaactcggtgtttgcgtgcgtgagggtgtgtcaccacccctatcttttttcaaaacttcaaaaaatcataactaattcaaagaaaattgaaatcaagttctttaaaaaagtgaatcgcttaatttttcccaaactatccaacaaaataatttcagaaacgaaaaatttaattaatttcataaaattccttaagtatcaatcaatcatcaaataacacacata

SEQ ID NO: 290524 - DNA, 900 bp, Cannabis indica
gctaaacgaataatgaaataaaactagaaaaacaaaaaatcaaaaaaaaacaaaaaaaaaaatttattagaaaataatcaatctgatcaaaacactcaaaactcaaaaattgaaaaactagatccccatataaaatactataactagccaaagggagaccctttggctagtagcaacttaactcttgtattttacttcatcatcatcttaggattactatctcttactaagaccctaaaacctaaaaattttgatatgtaatctgataataacaaaaatcctacaatgctcccatccataggatatcaaaagtttgctttaaaaattatcgcaataataaagtaagcaacgaataatgtacttcaataaccttgattattaatgattaatgaaacaaaataaccttgattattaagcattaaggacccattaattccataatccttcccaaaatagacaaaatcaaccatattaatgtccccatttctaaaatattacaaattcctttattgtacttatcccaaaaaagcaatttttatacatatttatttatggtaaaactttattataatcaaatcaatctatattgaattgaaattacttaaaataatccaatttagttattatgacataattattcctattttaatttccaaaagacaagttgtaaaacttccaaaaattgtatccttttaagttaccataaaaacatttataatgataccttcctatacgtcgtagattacaaaccaaattccataaaatttgacttcccaaatatatctgaacacaataaattcgcaacaattagtattcccacctccttttattacaatatcttcgtatttattattctttaaattacttgattaattttaaataataatattagaatctgaa

SEQ ID NO: 290525 - DNA, 661 bp, Cannabis indica
agatgattggaagaggtagcaacatgaatggtctctacatccttgatgatacaactgaaactcatcaagtcttgtcaatctcagctgaaacttggcactctcgacttgggcatccatctcaaaaaagactagatcttctcaaagattctttacattgtaacactactattttgcataaagataaaccttgctatatttgtccaattgccaaacaaaaaaggttaccttttcagaataataacaagttgtcaaataataactttgatctcatccattgtgatatatggggaccatatcatatagcttcacactctaatcacaagtattttcttacacttgtggatgaccactcacgattcacttggatctacttaatgcataataaatctgatgctaacactatcattccccaatttctgtcttatgtccaaacacagttcaattgcatcttcaaaacttttagatcagataatgcacccgaattggttttcaaggaattgtttgcccaacatggaatcatgcatgagtttacttgtgtggagacacctgagcaaaatgctgttgctgaaagaaagcaccagcatttgctcaatgtggctcgagcattgatatttcaagccaaatttccaataaaattcttgagtgaatgcatcttggctgc

SEQ ID NO: 290526 - DNA, 664 bp, Cannabis indica
ctggatctatgtccaatttcagttatgattccaagtccaagtgctagttctagtctcggtcaacttccggttttggttccaattttgggtcacagcgtacgggttcgggttacttttgagttcaagtcatggtctaagtttgggtttgggtgtgaatttcagtctaggtccagatcaggctccgagtgtgggttcgcatcgggggtcttggtctaggttgggtctgagtccacggttccaatcccgatcttagtctggattcagttttgggtctaagtccttggttcttatccttgtctgggctcgagtttgtgtccgggtccgggtgtagcttttctctgattctaggtgtgggtttgagttcgggtccgagtctgtgttgaggattgtgtccaggtctctatcccgatctgggtgtaggttcgggtccaggtaaaagttcaggtcccgagtgctggtccaagttttagtctgggtgaggatctccgtcaagatctaggtccagcatttcaatcctagtcttgttattggtccgagtccaggttcgtatccgggttccctatctaggtccaagtctgtgtttggatcgggtcccagatttaggtccaggttcgggtctcagttccggtatgggtacaagaccgtgtccggccccgagttccaa

SEQ ID NO: 290527 - DNA, 643 bp, Cannabis indica
actaccgcatatttgactccacctttccctttaggtaactcgccgattaagtcaatcccccatactgcaaagggccatggacttgtgatagaatggaggttacttggaggttggtgggtatatgtggctattcgctggcacctgtcacacttcttcgcaaatgcgagagcatcttgtcgcaaggttggccagtaatacccttgtcgcatgatttttaatgcaagggagttacctccggtatgattgccacaaatccccccgtgtacctcgcgaagtatataaccacaatcttccccgctgatgcatttgagtagaggttgactaaaacttctgcgatacaacctttggtcatatattacataacgggcggctcgctgtcgcagctttcttgcttctattttgtcatcaggcaagagccccttttccagatatgcgacgataggagtcatccaggtgatctcctgaacggtatctatttccatgatcacttcttgatttatagttgggtgagccaatacatctaccggaattacatcgagcaattcggcttctctagttgaggccaaacgggccagtgcgtctgcatgtgaattttgagcacgcggtactcgagacacagttacttttttgaatttctgcatta

SEQ ID NO: 290528 - DNA, 682 bp, Cannabis indica
tccttccattctggttcaagagcttcacagggatccaagaacacctctggtgtagccgcatcatcatcttcctggattgacgggagttcaggattctctcgcagcacagggttgcccttcgaactaggcttcgataccccttttttcctcttcgcaagaacacctcaattttttacaatttttgtatatatatattataggaaaattatttcatataccattttttaatttttttttcaaatttacattttaaatattgctctagtggttgatctggtagtttctatgttggctgttatgtaaattttagttgtgatttgggttgctccgtttgttgctatgtagatttttataaaaattcaaaaaaaaaaaaaactgttttgaagtgtaaaaataaaaaacctatattatacttatattgaatgatgtaatctaaaatataatattttgatgtgtgtattataaataaataaaaaacaattgtattgaaatcataaacataattctctattttaaaatgtatagaaagagggtgatttggtgaaattaacaaagaaaatagatgtgttttatgataaataaataaaaaaagataatagtatttaatgaatttaataagtggtcttgtgactaatgatgcagttatttttaaaagactatttagattttttttttaataaaa

SEQ ID NO: 290529 - DNA, 521 bp, Cannabis indica
caaaatatattaaaatttgatcgtacaacgactacaaaatacaaccccagaggtcccgagaccgaacactcgaggtcgcgtcgcctcgacatgtacaatcatcaccctagctcagagctcactcctattaagccttcgcctttccattacctacacatggaagtagcaactgtgagtcaacaaactcagtaagaaaaccatataacaaataatataataccgacttgcatctaggcgcccatacacctatccacaaggcttaacagataagtaagaaattctttactagggtacagccactgtaccacatacactacgtaccattattgtacgagtgttggtagagcttgtttcatagctcgagtaccactaagtgttgtaccacacacacctcgtttccgtactagtgttggtaacaccataacatactctttaaacattatacactataccaatgcactctgtaccgctatcgtaatagtgttggtagtgtaccaatcacaacaagcatgcatatatat

SEQ ID NO: 290530 - DNA, 758 bp, Cannabis indica
acatcgggatttgattatatccccgagtatgcgtccataaagctaagaagttcgtgacctgcagtggcatcaacaagttggtcatgctaggaagtgggaaactgtctttgggacaggctttatttaaatctgtaaagtcaacgcatgtgcgccatgagccgttaggcttgggcacgagtacgggattcgctaaccaattggggtagaacgactcccgtataaagccgcaggctaggaggcggtcgacttcttcttttagcgcttggtacctcgcggggtccattttgcggcgcttctatcgaacacctcgcacttcggggtcaatgttcaagcgatgacacatgacctgcagagatattccgaccatatctgaatgtttccaagcaaaaacatcaagattttgtttaagaaaagtcgttagttgttctcgctgctgaaaagtcaatttagaaccaattttcaaaactttactattatctatggggtctataggtacctcaatagtgtcttccgcggcttgggccgctgcggcatgatcgaggatccttggatccagatctggtccatccgtgtgcggcacctcttcgatcctaaggacctcctggcgaggaggtggtgcctccaataaatagataacatttattgactttttctccgcgagcttgactgctgcattgtagcattctcgcgagtctgactggactcctcgcacagagcctactccagcgggagtagggaacttcatcgtgagatgatag

SEQ ID NO: 290531 - DNA, 526 bp, Cannabis indica
atgtcagtttacaggccctatattgaatgttacccagtttcattgacccaaaacacataaatacccactagcatacactcctaaaaagccttcaaaaacatccaaacccagaaagtaaagcacaatttctctaaaaacaaaaacgaaaatgcagaaaactaacctttagttttgattcctgcgaactgctctcgatcacgtctgagattggaaatgttgtgaaaactggcagaaaatctggggatgaattttttctgaagtgtatgaactggagggaagttaagagaaaagagggaaaatggggaaatttgattcgtatcaaagcgtttaaatacccatatcccttattaattgggattatgacacgtggcagccagaatgcctaaggtcgcccaatctaacggccaattatggccacgcctacacgaaaaccgaagggttttgtgacgtggcatcctagagataataaaaattaattattacagccgtcatttttcgaaaccctcgatgggacaaccaaaaggtc

SEQ ID NO: 290532 - DNA, 671 bp, Cannabis indica
gtgtgttttcctcaccacgaccctttggaaatagagactcccattgccaataagatcgtggccagagtcttgatcgacaatgggagtttcgtgaatctattattcaaagaggccttcactgcaataggcctaacggaccgagatctctcaccgagtggttcccaactcacggggtttaatggaactacacttatcccaatggtaaaagtgaggctcctagtcaccttgtgcccggacacaccccaaagcactttcaagtactgcacatttgtggtggtggactgcccaacagcttataacgcaatcctcggctgaccggccttggtagattttggtgcggtcacgtcaatacggcacttgtgcctgaaattccccacccaagaagctggggtagggaccgtgaggggaaaccaaggggaggccaggcagtgttataacgttgctacccacctgctcgtcttgatggtctgagaagttattgagccagaaatggcggaagaagatgagttggatccccgcgtgggatctgaaaaaattgtagaaccaatggaggacgttgaggaagtatcagtgtgcgacctcgactccaccaaaatccttcggctaggaaagagcctagaaccagaggaaaaaaatactaaagacacggaggggcaccacggacattttcg

SEQ ID NO: 290533 - DNA, 524 bp, Cannabis indica
cccttattccactaaaatcacacacacacatatatatatatatactaatttaccctaagggtagagtagacatagttttgggtttaaaatgataggatttataaaacactcaagaaatataaatatcacagatctaaacatattcctaaaggtgctttaatatagaaaaccctaaatcataaatctatatagcctttgctaaactaaagaagaagaagatgataaaatatgagtggaagcaccaacctgaagccattgttggagattgcagagaaggttttgatcttccaagaatacactattttcttaggtattttctctgatcgggaaggagagaatacagaaacccttaatgtttcttggcgaccactacctatttatagactcatcttaaaatgagttttgggtatttataatttggcccctcaacaaattataaattaacttatggtatctacacattatttccatgacaatttaatacctttttcatacccataacataattggtcacttaattttgt

SEQ ID NO: 290534 - DNA, 889 bp, Cannabis indica
cctataatgctacactttcttccattcatctgttttctttgttccttctccaaaaatctttgttattcacgcattccttttgcagttgtttttattgggtcaaccctatttgctttacaacagctatctggtataaatgctgtgttttatttctcttcggctgtttttaagaaggcgggagtatcatcaagccttgcaaacgtcttcatagggattgtgaacttaacaggtataatttgcttcttgatataaggtttacatgtgttgaattgtattaatccgtctttttaaaaattagtttctacttattttcaggatcagtcattgcaacagcattgatggataagctaggaaggaaaattcttcttcaatggagcttctttgggatggtaatttctctgtaatttttttttttataaaatctatatatattttttctctcagtgtgtttgtattgtattgtgctaataatgtatatccataatatttacgtggaaccgaaattgggacggtcacaacacagaactaatgttcatggcaccaaggaaaatgaacttttatgttttgacaaaaagtgtgtttatttaaattatattctttagccagcaaatctctccctatcattgcaattttagttatatctctctttaggctaattgccaattttttttttccgaactttgacatgtactaaatcatgtcctctgaacttttttagccgttaaaaatactccccgaactattgagattgttagatttaaagacttttgtctaattttagtaaaaatattctaacatggatgatagttcagggggcatgattagtacatatcaaaatttgaggggcatgatttagtacatatcaaaatttgaggggcatgatttggta

SEQ ID NO: 290535 - DNA, 551 bp, Cannabis indica
ccataccatggagagtgaaatggaggagtcggtggaaggaagctttggttcgtcggggttcgccgggctgttgatttcgacgatctgcgattgggagtggaatggaagggagatctgcgattgggagtgagaatggaagggaagtgagaaggaaacgattgagatgagatagattttttttttacatatttttataagaataataagttaacgacgttaaaagaaaacgtttaaaaaattaaaaattgttctacttggcgttaaaaaaaaagaagaatcgttaaaccaagaattgtcgttagataaacacttttaatatataaagatatatataaagatatggtacagtttttcgtctactgatctaacaagatcgtaataaacaagaggactgcgataaaataatttgactaaatataattgcaataaatgaaaaaggacaccagtaatttatagtagttcacctcccatgttgtgatggtaatggggctatgtctattttaattttattaattagattcgatacgttagagttatgttctcaagaatgt

SEQ ID NO: 290536 - DNA, 699 bp, Cannabis indica
acattcgggctcagatcttgattatactctgctacagaaagaatacaagggttagagatctgagtggaaggagacattaattccgctgcatcaatgtaaggttttcttaactttatgtgttttaatttaccgttttagaaagttcatatttagggtgtttaaacaacatacttgtgagtagatctaagatcctggtaaaataaaattccaagagtagctccagcgttatttagaccaaatggcatgactttataacagtacaaacccatatatgttcggaaacttgtatgttcttggtcaggtggatgcattttgatttgattataaccccaataggcgtccataaaacttaggatctcatgtccgactgttgcatccacgagctgatctattcttagaagtggaaaacagtctttggggcatgtcttgttgaggtaggtgaaatcaatacatacccgccatttcttgttggacttgggtaccagtacggggttagctacccaagccggatagaaagcttcaatgatgaagttgttattgcgcagcttttctacctcttcttttaatgcttgtccccattctttatccaacaatctttttttttcgctgaatgggacggaagttcggatcaatgtttagggcgtgtgaaattatagaaggatcgataccgaccatgtcttcatgcgaccaggaaaaaat

SEQ ID NO: 290537 - DNA, 375 bp, Cannabis indica
tgtgtgggcactcactcattcactcaaggttcgaaaaatagaagaagaaaagaggagggaaagtggcggctagaaagttttctctgaaggaatgagatgcatcatctctttcctgaagtcatcactacctatttataggtaaccacttaggtttaggttagaattatttagcattaaaataatggaaaataaatggtaatttcttagtgtggccggccctatgaatggataatgggcccactttgcaattttgccattttgtcatttttctatctcattttctcaaaaatgctaatttttcaatttaaccacttaaattccaattctaattatttaataactaaaaattaattattattaaataatattatcatt

SEQ ID NO: 290538 - DNA, 563 bp, Cannabis indica
cccttcaagtctctaagagttggattttttgtcacaatggtattgctccaattcagaattcttggaatcctagatgtaacacttttgcagaaagtgtttaccatggcaggataacattcataaaaccaaacaataaacacccacagacatcccaacgccctataccaaccatcatactgacctcccttctcttctttcttatttttcattttaatcctatgttgtattctacctttgaatgaatcaatagtcaattcaaaggattccctaccccaacaatactcatcccaacgaccgctatcgacaacatctagatcaaacctagatacttcttgatcaggagtattgctaagaagaaaacattggataaaatacaacacacacagtttcaaaccaagagactcgtccaaaccccacctactacccaaaaaagcatcctcaatagctttatgatcaatggtttttacaccacggaaacaaacctcaatcaactggtttgattcctgggaaaacaacaatttgttgcaatcaccaaaacaatcaatgtcagtgatcaaataaaa

SEQ ID NO: 290539 - DNA, 135 bp, Cannabis indica
aatagcactcctgagattgagcctgagcatatcaggatttagattcttttaatctaagatcaacttctgatattgacttggaaagatacaacggtaagtttataatatcttatctaagttcaatatcggtccagt

SEQ ID NO: 290540 - DNA, 503 bp, Cannabis indica
aataataattaataaaattatgcatttagtttttaataaataaaattattaataataatatgaaataagataatatatttataattttattatatattagaattatatttttaagtaactatttattataatattaaaaaaaaacttaaattagctgtgcaaagagcggatatattgtgtagtgagtatatagggataattacataaggcactattttttgtaaaaaaaattatatttttacgtttattgatttttttttaatatttttacggttttctataaaaacaacaaaaaataacaaaaaaataatatctaaataataacaaaaaataacgtacagataacaaaaagtcaacaacaaattaacaagagtacaacatgtcaacattaaaagaccgcattttctgtaaataaaattaaaaaaaatacataaaaaatagtttaaaaattttactatgcaatcttatttttattaattttttttttattttgtttttgttgt

SEQ ID NO: 290541 - DNA, 520 bp, Cannabis indica
acaaagaccactgaaaaaactggtttcaccccctgctgcaaaaaccgggtaaccggttttacatgcagtgtaaaaccggttagccggttttacccagaaaaccaacaacaatcaaaccccaactaaaacgtttccaaacccaaccaaactttccagacctgcatattagaccccaatagacattttccaagcaacagaacaacaatcaaagcttagaatcaaaattcaccattaaagcttcaagcttgagttctaaaactcaaagcttgactaaagcttcaaacaactaacaattcaagcctaaatcaacatattctatcataatttaattgcagaaactcaaatcaaatatcaacagcaaataaaggactcaaactctcaaaacatgcatgatttcataacttaattttcaagaaaactatagggaggttgtctagaagcttacccttgcttgtaatcactaaaatctgctgtaaaaatggcaagattgaagacacaaatctagaaccctagctgctta

SEQ ID NO: 290542 - DNA, 1160 bp, Cannabis indica
gcttttcagaatttacataactttcaagatcattcacatcattgagataaaaatattgagtgctttttactttttctaaaatgagctttaattaccatatgtttagcttaaaaagtttgtaattttgatagttttttgagtttagctatatcccacttaatatattaaacttttacaatgcacattaaggaggtctgtttggacatttgagaaaatttgttggtaaagtttttttatagtcgtcaatgtcgtaattattagaacataatttaatattttaaaaaattcagaaaaatttaacacgctaaaaataagattcaacaatctattttgcgcatgtataaaataaaagagtcttacgtgtaataaattatttgaacctatttttggcatgttaaatttttttaaaattttctaaaatttgcataatatcttaaataattacaatataaatgaccttgaaaaaaaattagactaaaaaattttctcagatgccaaaataaataaaaagtgtattggtagacccttttaggggtgtatttatagaagtatccaaaatatattattttggaaaattatagggacattacttttttttttcgcctatattgacaatttttattttttaacatttaaaaattattagaattttttaaaaaaagaaatgtaatggctattataactttaatgattttaatgtagaccattttataaaaaataaattaaaaggatatttatagtaaaaatttgttgaatatttataattgttatacatataattttaataaataaaaagatgacaaaatgtactgtatcttacaattttattgcagatgtatctttttttggctattaagtgtcaactctgaaatacgtggcgacatattttggactatgtattaaataagttaaagaaatatgtcgtcacttgtttttaagatgactattagtggccttattgacacttaacaactaaaaaagagtacgactgcaacaaaatgtaagataaagtacttttagcgtttttctattaaggttaatgtataacaattacaaatattaaaagagttttgccataaaaatatctttatatattaaattataatttcttgaaatatcaaaattataaatatcctttctaaaagtggtattcctactat

SEQ ID NO: 290543 - DNA, 488 bp, Cannabis indica
accattaattccggtgagattgagaaaaaaaacagcgaaattgaattcaaataaataatcatggcaaaacaactgtaaaacaacactaaaacaaatcaaataaaagaaattaaaaaaactaaaaaaagttctgcacaacctcaatacccaatataatagcagttatatttgcaagcccaatctttaaaaatcagaacaaaaaaatactaaaacaatacaaaaataaatgtaaaacaataagcagatttaactacttagaaaaacataaaagaaccacaatcaataattccagcaagatggggcaagaacagtgaaatcgacgttaaaaaaataaattgtggaaaacaaccataaaacaacactaaaacaaataaaaaaaaaataaagaataaataacagtatactgctatataaaacttataaaaatacacagtaaaaaagtaaaaaaaaaaatactgtctgacagtatttttttaaaaaaatgacaa

SEQ ID NO: 290544 - DNA, 594 bp, Cannabis indica
tgaaagttatggttggctcttcttctcgtggaactttggacttcctttcttccacggccaggatgacttcttcttgctcatactgagctgtttgggcatatctctctcgatctttgcccgtatctctagcgatgtgcgagcctccaataatgacttggaagtgtccatctactagtggaggtagcagattcttgttattttgaccttggttggtcttgacatacttctgcaactgcgggttctatttcccgctttaaattataacatttgttggtgtcgtggccgtagtctccgtggaaccgacaaaattttgtcatgtcccttttgttggaatctttcttcatgggcccgggcttcttgtactaaattaacgactgagttgccatatacacactctatatatcttcagttagaatagtgaatgcagtgtgtttggcatgatcatggggagtctgtccggatttctcggtgaactttcctttcttcccgtttccttgcttgtggttgttgcttgatcgcttgccacttgaattgttggaatagttgggaagttgggcggacgttccagtggaaggagccttcgttttgcctggc

SEQ ID NO: 290545 - DNA, 314 bp, Cannabis indica
tatccactcttgttgtctctcagacggttctttgcatactggctccctttgaagacttgcgttctctggaatcagctggtgttctcgcagcttcacagttgtacacagtaatcgccagtcgcgatcttgtaccagaaggctcccgaggatttcagctgtctctctgcgagtcgcgtcaagtgccggtcgagctggtctatctgcaagaacaggaaagacgagttagcataagatctcaaaataaaatacagaaaatagcccaacgttaaaaaacaacgcgacatactaggtctgcgatgaaagtcagttctaat

SEQ ID NO: 290546 - DNA, 560 bp, Cannabis indica
atttttacttctctcagccaggctttaagtggttgagcgggacggacaacaaggccatcagcaaaatggggcgttttgctgatgagtacttcatggtgaaggatccgaacatcacccggactcggtttcagcagattcttacatatcaccgtcctcccctcactcttacccttagggatagggctcagaagcttgcccgattgccggcggaagacagggatataatccagttgacctctgatgcaaatctggtgcagtttgggctctaccctgaggacttttcttctaagtccgtgacggggaagaagaggaagtctgctgctgctcggcctgtacgagctcatcaggagaatgagctgatttaacttaagcgggaggctaagttgaagggaggtgctcgggcagagcagtatgctcaggattccatgaatcttgaagatgaggcagaggctgaggctgaggctgagcaggtggctcctttgaggaggaagaagaaactcccagccacgcccaggcccatggaacacgacattcgcataatggagcccatttcacctgtt

SEQ ID NO: 290547 - DNA, 507 bp, Cannabis indica
catttaaataatgcaatttcaaaattttgggaaaacatgattaataaaataaaataaaatatattttgaaaattattcaaacttaagttgttctgaaattaaaatttccaacttaaaataattttctatttaattaaatattctgaaaataactaatatttaagtatcaagaatgaaatcaacttaaatatttaatttttaatttaattaaatgtattaaatacaagaattaaataatcaagtataaaatcaacttaattattaattctaatttaatactaggaaaaatattctaatttaagttggtccaaaattaattaataaataattaattttcaacttaaaatattttcctaattaaatattagaaaatataattagttactagaaataactatctagaatatatctcattaactaagtgtttttctaaaattaactttaaaatattcaatgaaaaaaattcatatattttaaagctaattatgttgctaattcaattttaat

SEQ ID NO: 290548 - DNA, 802 bp, Cannabis indica
gatagagttttttgcggttaaactctctcaactatcattctactttcatttaaccctccaagttcaaattttggtgataaaaccctctaaattacttaactgttagcaaatttaaggtgtcatctatttttcatagttatctgctaacatggacggcttatgtgtacattcttgtacacgtgggacgtttatattggtacataattaataatattatttaaaaattataaaaaatttataatattttttattttttaaatatttgattattattttttataatttaatttaaatttaaaatgacttagtgtactaatataaacgtgtcatgtgcacataagtagtctatagtgaccattaaccagatgacacttttaatttgcaaacaattcaatagtttaaaaggttttaccaccaaaatttaaactttgaaaattaagtacaagtaaaacaatagtatcataattaaactttgcaaacaattcaaatagtttaaaaatacgttttcattaggtgtttcacgagtgattaataatttttctataataattattaaaaatatatatattaattaaatcgtaaaaggataataataatatgatatttgaagttgaaaccacttgtatcatttttctctagtggacgagtgtgaaggtcaacggtgatatataacatacatcgataatatatttatttactatatagatagtaaataaataataacaataaaaaaaacaaactaaatttttattaataatggttaattagtattttattcctaaattttaacatgtactgtgtg

SEQ ID NO: 290549 - DNA, 952 bp, Cannabis indica
ggacctcacaccgaacagctacaggaaatactcccttctcactcacctatgggagtgaagccatgctcccagttgagacccaagtcccctcacaccgaaatcagtactatgaacaacaccgtaaccacctactcctggaggaggccctagacttactcgatgaaagaagagaggagtcacaattacgtaatgccgctcaccagcaacgggtaaagaagtattatgactctcgtgttcgtaatagggagtttataataggcgacttggtgttaagaagggtgttcttagcgacgcgtgatccaacagctggggtccttgggcccaattgggaaggaccgtatcagatcgaaactgtcttgaggcctggagtatacaagctcgctcgccttaacggggagcaagtgccgcgagcgtggaacagtgagcacttgaggcgatactaccaataggtggaagtcctcctcggtcgggggtccttaccttactttgatatttagccaagtttcctcttagtttatttatttatttagttatttatttttatttttactttttattttttatgaccaagatcttcattagattgtcatattcttagaaattcttaaagttgttattttcaacgctagaataaaaatatttattatttattcaaaatatagttaaattgccaaacccaaaaacaagtcaccaaggataataatcaaaccttagtaacttggggggcataagggtatagatttaactatactcgtacctaatcctacaatttccataaacaaaaataattttagaaaagtggtgaattttttaaaatcacaaacacttagactaaaaattataatggatagagagtggatttaattatatacatgataagcacttaatctagaaaagagaattaactctaaacaaaaactagtaagtcaaacatgttcatcaagagagctta

SEQ ID NO: 290550 - DNA, 960 bp, Cannabis indica
cctagtaacatgataggacccatccaaattcatttgatttgtgtgagcctatatgtttgcttttgggcttagatgcatataggaagcccatttaagtttaattaattaaacggactaggttactaattttaaaaaaacacttagttagtgagatatatttatagtaactaattatattttctaatattttattaattagaaaatatatttaagttgaaaattaattattttaaatactttttagagcaatgtaaattagaatatttttcttagatattaaattagaactaataattaagttaattctattcaagatacttaattatttgtttcttatatttaataaatttaattaaatagaaaatttaatatttaagttaaatagaaaatatcagttattttcatgatatttatttagataaaaattatatttaagtacaaaattttaatttcagaaaaactttagttagaataattttcgaaatatatgttattttattttattaatcattttcccactaattttgaaatttcttttatttaatgcagataattttgatttttttttaaaaaaaatatattaaaattaataattaattattttaattaattttagatcaacttaaatcaagaaaaaaaatttcattaatgatttgttaaaatatatagactaaaataaattatattttaaatagaaaataagcaattagttagtgaaatatttagatagttattttttgtatgcttgtggtatttttctagttatatttaactaaatagaaaattaatatttaagctgattttattcaatattcttaaatatttgatatttttcttagatatttaattaaatagaaaaattatatttgtgttgaaaattaattttttaattaattttagaccaacataaattagaataatttttcaatattttattttattttatataaatttcgaaaa

SEQ ID NO: 290551 - DNA, 713 bp, Cannabis indica
gtgaaagaagatcgataacaaggtgagaaaaaaaataagtagaagagtaaatgtaagtaggagaattattcaaatattcaattctctatttacttagttatggagaatataattatttgtttcaaatctacttcttaaattagtaaaggaaaaaactgaaaatatcaccataaactttaataattaaaaaaattcttaatttatcaatataattatttaacaataaagtaatattattgtataataataactaaagtttgaatgataaatcaaaaatatcacatataattgatcaaattcaaaaataattgttattattattatttttttttttgtaacagcaaaataaccattgttcaaaaatatcataattattttagggtattcgttttttttttcttttatatttttattgtatttgaatttttttaaagtgaaaacaaaattattttcatgttgctgcaacacacatggcgctctaaacagtgacgggcccagaatttttgttttgtgggggcttatttatcattaaaaaatatttatacttatattataatcactcttactatatttacttaattctatgggggcttttttattattttggtttataattatcaaattaaaaaaatacatttaattttttgaaaggcaatatttttgttcgtgggggtcgtatagcccccaccattgataagagtaggtccgtctct

SEQ ID NO: 290552 - DNA, 535 bp, Cannabis indica
ttaagtagaaaaacataagttttctgtatgtaataacattcatatgaagagtgggaatagtaaaagagaagtcaactaagattcatgttatttatgtatgtttacagtattagagcatgaccattgctaacggtatatatttaaataatatgtttataagatccatgttatttaagtatgtatgtaaatagtgtgtttataagattcacattatttaaactgactatgtggtttggataatggacggtacaatggattcgcattatttaaattagttatgttgtttggataatggacggtacaatggattcgcattatgtaaacaatgatatgattatggtatgattatgatatagttatgatatgattattatgtagttgtgatttaattatgatatggttatgatatgattatgataggattatgatttaattatgataggatttatgatatgctatttaaatattgtatagtagttaaacattatttaaattagatttattgtagattatgtgacatggtttgaccgagaag

SEQ ID NO: 290553 - DNA, 648 bp, Cannabis indica
gaccattagaacgagtaggtgggcagcaacgttgtaacactgcctggcctccccctagtttcctctcacggttcctatcccagcctcctgagtagggaattttagacacaagtgcctaatcgacgtgactgcaccgaaatccaccaaggtcggtcggccgaggattgcgttgtaagccgttgggcagtccaccaccacaaatgtgcagtacgtaaaggtgctttggggtgtgtctgggcacaaagtgactgggagcctcacttttcccattgggataagtgttgttccattgaactctgtgcgcagggaaccgcttggtgagaggtcccggtccatgaggcctattgccgtgaaggcttcttcaaataataaattcacagaactcccattgtcaattaggattttggccacaatcttgttggcaatgggagtctctatgaccagagggtcatggtgaggaaagtgcactgtcttagcgtcttcttctgtgaacgtaatgggttgatcaattagccgaggcctttgagccgggagttgagtaactgcccaaacctcactgtgttttacgacccctgcgtaacgttttagctcctttcgagtagttcctccgacatggggtcctccagagatcatagctactctcccgtt

SEQ ID NO: 290554 - DNA, 579 bp, Cannabis indica
aacataatttctaatacgaacatatacagaaaatacaatcaattttatcataatacctctaaatccaattattattaaattttattttgtcataaccaacttttttaatttgctaacaggtaatttagagagttttatcattaaaaattaaacttataaaattaaatgcaaatcaaacaatagttacgatagtttagcagctaaaaactcttagctagtgtttagttggaggtaattccacttctttatttagttacattttaaaatataagaatatcattctaatagaatatttttttactatttttcgtagaatgattgttctattttaaaatagaagcagcgatcatttcaatataatatgaaaaaaaaattaataattttttttataaattttgtttatgcattataaattttattttattcttattctcacttttaatattttctagagttgttgccttaaagagtagttagttatactctttaaaatttattacattaaattacaaaataacaatatttaaatgtaccaagtcacattactccctacaagtttttactctattttttaaaata

SEQ ID NO: 290555 - DNA, 845 bp, Cannabis indica
aggccctcaagaggatcttacgagttgagatgcaaaatactctcaacaacccggaataccaggaatccgtgggatctaaacttgggatcccttgtcggattggttcggtcgtttcctcgggcccacattagctccctttgccgcggagatgactggcgagtttgcgtcccagcttacccggtgtgcacctaggcggttcgctgcttgtgcatccttgaactccatcttccaagtccaggatctcagccactccctcactgtggtaagtattttgtagtttacttttctccttattattatttttttttttggagattcttacttatacttgtatcctttcccagcttgctgctgaggccacccgcctttccaagaacataatcaaccatggcttcgtcctgtccaattttggggacatggatgaagttaggaagatccttcaggatcttactgcggagaggtggctttatcaggaggctgctgagcgctgggaggccattgccaagccaatgaggaagaggccaagcggagggaagcgcatgcggaggcaatgatccgggaggaggcccttcgaagagataggctggaggccaggcaccaagaggagctgaggacagggggcgaagccactactaaggccaggcgggagcttcgggaggctagggaagcattggaggaaatggctgccaaggtgaggtccttagaggaaactcaccaggcaaacttggaatccagggccaccctggccgcggagctgaaggagctcagagacttcaaagatcaagcctcaaagaaggcaaaaagagatgagcttctttctcctgtctcctgcagccggtgcgcca

SEQ ID NO: 290556 - DNA, 508 bp, Cannabis indica
ccatagtcattagatatgaaagtgtttgttttaacaaatactacagttctaagaaatgactaagtttgaaaacaaagtagcaaagtagaggagatatttttttcttgattccaaaagtattctatcatcttattcgatatatcatgatcccactacctctgttgttttgacacaaccaaagaggacaataccatttagtattcttagaaaaaatccatggtaccttgtcgtagtgggaaggtttcaaggaacttaccctgttatgacttggcagacacttgtgattaaaatccattgttagtttaaacaagtaatggattgtcagaataaggaactaagaagtaaagccaagagaactatggttaaaaccattcacatggaacaaccaaaagttttctattacaaggacaagaaaggaaattttgttagtaagtgtattcaatggacttaacaaaacatcctgttccaagtagtaaaggtttgagtttatctaaacctatggcttgtg

SEQ ID NO: 290557 - DNA, 724 bp, Cannabis indica
agctttagaaatacctaagttatatctttaagggcattttagtcatttgctaataaatagagataggtggctgccttaggttttgacacctaatcaagctaatttcagcaaaggatttacttagtccttttgtctcatttgaagaaaaatcaaggaaaaaggaaaaatagaaaattgctttgttcttgaccctctctctctctttcttgctttcggctgggacaaaccaagggagtttggtgttgattgttggatttcagcaaggatttcataggagataatcaatctaaggtaagctccattgaacccttcttagttttcaagtttttaagttaggttgaaatggtgttttgatgtaataggagctgttaaggtttgaattgcttagggttcgaattctggggttaggttgagttgatttgagtccctagctactgtttttgatgcttgattttagttctaagcaagcttgagttttgaaactcaagctttgagctttaatggcataattggatttattggtttgttctgtgaaatactgcttggattctattgtgtatgcattgtataggtatactggagagtttggtaaggtttgggcttgatttgaattaagggggatgatttttggttcccagcagcagaaccggaattccggttctgggaggccagtaccaaccggtcgaccggttggtgacccagaaccggattgccggttgggaac

SEQ ID NO: 290558 - DNA, 644 bp, Cannabis indica
ttgcagggaacgaagaaccaatcatgaaggtctggacctaaaccagccaacctcgagagaccaatttgcgaggtatcctaatcaggaaacacaggttgatgaagaccctgagcgacgtaatcctcgcaaccggccttcaagagataataacgcagaatccgcctcatcatcctcgcatggtcgcacacctagcagatacacgaggtccggttctgtggagacgcaacagggaggacggtaccaagtccataggggcgatctgcgtgatcacctcaacgcggttttcagagcgcgctcccgcgcccctcgcgacgaggaaacaccccgtgatccccccgtgggcgatcaaggtgtaaacactcgcactaacccgcctaacgcaccggcagcgactactggagttaatgtcccagcaaacctcgccgcagtaatcacagctcctgcagtcgcagcagtcccgacccctatagccgggggaattgatcaaagcatgcttttgcaagctttgaaaatgctcgagcagcagagaaagcccatatacaagctgcatgggacttctccttttactgcggaagtgcgacaggctcagcttcccaaggatttcgactgtccgaatccctaaagtataaaggtacctctaatcc

SEQ ID NO: 290559 - DNA, 640 bp, Cannabis indica
ggaagaagaacacagagattgcccaagcatatttagagaaagcttcacgaagaatgaagaagtgggcagatcagaaacgccgaccgctggagttcaagacaggtgacttagtgttgatcaaactgcggccagaacaattgagattccgaggggacaaggacattagactcatgtgcaaatacgagggccatgttccagtcatctccaaaattggcctagcatcctacaaagtcgaactaccttcatggatgaagatacacccggtcttgcacgtcagcaacctcaagccgtatcatgaagatcaagaagatccagtgcgcaaccagtctaccagggacgacatcagcattcaacgacgcagcagcagagaaccagaagaaatccttgccgaaagaactgttcgtgtgaagaaaaagaagagaaaagagtacctggtcaaatggaaaggccttgctgatgacgagatcagctgggaaaaggcggaggacttgcagcagtttatacagaagactgaagatcatgcagcaggttcgtcgaggacgccaaacaattaagtggggaagaatgtggcgtgctgccccatggcacactcacaatagggccattttgtaacatgagcatgccttggtgcttgatcatt

SEQ ID NO: 290560 - DNA, 770 bp, Cannabis indica
acgacaaggagtcacatgtcttccactagtactgaaagtagactcagaagcaactgtagacactgggatagccaaaacatctctagcaacttgttgtaatattggatatttaagaccatttgtcttccaccaagctaaaatatcaaactctccactcctaggcaaaactgcttcctccaagtataagtctaactcagacttgtaagtttccacatttgaagtactactaacatacaagtcaaaaccaactaaatcatctacacatccatcattatctccaccaactccagaagcattgaataaaggttcaagaagattttcttttccatcattcgatttatattctttcaataaatcatagcacaacattctaattcgcttaacttcattttgatattcaccaacataaattttaggaaagtaatactcaatcaatttcatcttgaaccttggatccaaaaaagttgctatggctaatatgccatgaatggaagtccaatactgctcaaatttatccatcatatcatatttaatgccataatcctaatctcatcatagaaagatttaagacactccttaagcaacaaccaaatttcacaaatcttagagaagaaatgattagcagtaggatatttagttccagaaaacatcacagttacattgtaaaacaacttcaatttttcacacataaacttttgccaaaaagccaaatctcgctcactaggttctttttgttaattttcttcagtatgtattaggcgactaaatac

SEQ ID NO: 290561 - DNA, 780 bp, Cannabis indica
agaatgacaagttggggaattggtgagctgaacttgagtagaggaaggcctcatgagaagaagccttggaacaataggggaaggagtaatagcaaagattcttccaagggtggaagatatggaaatgggaagtctccatcaagaggacagaaagatcctaaaggctgctatcactgtggtaaaccggggcatatcagaagagactgttatttttggaagagaagtaacagaggaagaacagatggtagcaatggtgactcaaaccagggagaaaatcatttctcaaaggaaaagggaaagaagcatgaagccaatctaagtgatggctatgagagtggagaagtttacattactgcaactaaattcaaagaagaatggattttagattcaggatgcacttttcacatgactaataatagatctttactttctgatttcagggaatctaaaggagggaaggtcatcttaggcaacaaccaaacatgccatattgaaggctcaggtaatgtgagctttaaaatgtatgatggtattgtaagaactcttacaggtgtaagatttgtgcctaacttagctagaaatttaatttctataagtatgctagatgaccttggtgttgtgagtaagattgagacaggtacaatgaaactaagcaaaggttcaatgaccataatgaaaggctacaaggaagaaggattatactacctaaagggagaaccaatttcacattgtcacaacacaacaacagaaactcttgaagattctaaggcaatctatggc

SEQ ID NO: 290562 - DNA, 828 bp, Cannabis indica
gtttcgtggaaaccctcctactacaacgaggagccgtgaccttctcaataggaacatttgtggtagatttctcagttgtaacaacttgcgttggttcaaccaagggagtgggattatcctctacttgagtagaacatgatggaacattagatggagttatttccgaaagcatttcctctaatactactttactttgcggcttgaagttctatatagtcatcttcaaggaaagtggcgtttgtagaaacgaacactttctcatccttgcgactataaaatagtccacccctagtctccttagacttttcgagaaacatgcaaacttcagttcgcgcttctagtttgccttctttctttcttaagacatgagcagggcaccccaagattctataatagcgtaaactaggtatacaaccattccatagttctacgggtgtgttagggactgatttagatggaacaacatttaaaatgtcatttgccatctgaatagcatatccccagaaggacgtagacagagttgaatagctcagcataaacctaaccatttccaaaagtgtgcaattacttctttctgcaactccattttgctgtggagtgccaggggcagtatattgcgattcaattccaagttcaattaactgatctttgaactgcatatccatatactctccacctttatcagttcacaagatctttaatgtttacctaattggttttgagccaaagcatgaaattcttgaaacttctcaaatgtttcaaatttcttttgcattaggtaaagaaaactatatctagagaaatcgtcaatgaaagtgaaaaaatact

SEQ ID NO: 290563 - DNA, 327 bp, Cannabis indica
atttgaacgcgtttaaattatttcagagatcaaaggaggttgtgtttaagtttatgggaccccaaagatcagttttaacgtgaagaatcaaagctttaaggtctgaaacggaattcaccatttttggactccattcttaacggttaaccgccaacgaagaagataaccggattttggccattttggctcttttcttggctgttcttggttgttttgggatcctagattcattgtaaggttcttccaatcaaaaatacacgtcgaaagcacccgaagaagagttttgcattcgccgacaccgaaaccgacgagaactccggcgacact

SEQ ID NO: 290564 - DNA, 574 bp, Cannabis indica
tttatttaattaagcccatacatatgagcccaacccaagcctataaatcttagggcaaaatccataactcttcacaaaccctctcttcttagcaacaaacccaagcccatacatgtgtattgaaatttggagtaagaactttgtgtttgttttatttttaatctattgctgaaagtatgttagttgtacatttatattgttgttggaatttaattagtttcaagtttgttattttgatttaggtgtgttgttgaaactttaaaaacattattgacttattgttgttgttataacttttattagtctcaagtttgttgtattttcttaagtattttggaataattatattaataatagtttaattattttatgatgatttcaaaaaaaaaaaattgtgatagttcaaaccgcaagaaaccgcaccgcatcattttttgcggtgcagtttttacggttttttagtatcgcggtgcgggtggggtttggaaaattggaaaaaccgcatgtgcggcttggtttgaaaaaatgtttaaaaaccgcaccacccgaaccgcgaacacccctacgacatgga

SEQ ID NO: 290565 - DNA, 709 bp, Cannabis indica
aaataagtatctctccatctctattaatttaaattaataaaattaatattaaatcatttaaataagtatctctccatctttaattctctctctgataaggttgttgtggtgcatcgtggatatatagttgtcttcatatttctcttgacattagataatcaaattagtcacttgtttttcttttttttttcttcctttttaagtttcatttttttttaccatttttaaagttatttatttttattccttaaacttattatttattttactatttaaaaaaatgaattaaaagataaaactaggtattatatgtggtgcacgccttaaaaaaaccgaatgggtgcacccctattgatgaaatttaattggctctcaaattgtcttttgtattttcttaccatgagattgagctgcactatgattaatcctattgatttcatgcaatttttcaaggagaaaaaaaaacggtagtataatttctattgatctcatgcaatttttatcactataaaattcagaaagtatgcgaacattcatcaaataaatttcaaaaagcgatacaaccttttgtacagaaattcattttctatagattttaaaaaaatcaaaaaaacgttacttcaaaccttttcgaagaaaatttacctctaaaaataatgaaaaattcaaaactttaaaagaacttttagtaagtttgtaaatctttaga

SEQ ID NO: 290566 - DNA, 845 bp, Cannabis indica
gttagtgtcaattatgctacagtgaaatagaatcaaattttgatataggacgagagtaccaatatggtttggatatcttatagggcttatgtgtttaatgccttttacatgtttaaattatcacgagtgtagaaaaattgcacgtaattgaggtttatatatctgagaagactataaattaccttagtagacctgctattgcatagaatttagtaatatgaatagaatcatgttaaaccataatcaatagatgcaattgaaatcgaaagtcttaacttttaatgatcattaatttccttattgatttacttgcttcttattttcattgtttctttaaagttttctaattttaattttctcttaatttcgatataaccaaatagaagtaaatgtttaattttaaagtaattaactacaatccttgtgggatcgacctcactctttgtgagtctactacttattaacgatacgtattagggctgtacaaaaaaatttgtaaaccgcccaaaccgaaccgaaaaaaccgataaaaattacaaaccgaaataacccgaaaaaattacaaaccgcccaatctgttaattgggcgggttgaaaataggtccaacccgcccaattaaaccgaccaacccgattttgcacctttatttttttttttttataactttttagtttttattatatataacataaatgattaaatatataataatataaagttatatacttaattattagttttaaagtcatatatatggtattgtactttggtggaatgtgatatttttaatttatcttttttaatttttatgattttgactttaaaaaaaaaaaaaaaaaagttt

SEQ ID NO: 290567 - DNA, 922 bp, Cannabis indica
tacaacgggctggttggtaacactagaactcttatagatgcagcagctggtggagcatttatgagaaagagtgcgaatgaggcttatgatctgttggaggagatggcctaaacaatcagcagtggccaactgaaagaagtcaaactaagaaggtagctggtgtgctagaggttgatgccattacaaagctgacagctcaggttgaggccctaacaaagctgatcgcagtgcaagccaaacaagctcaagtggtttgtgagatatgtggaggtccccatcacttttctgagtgtcaggcagatgtggatgatttgccaatggatgaagcaaaagccattggaaattattctcagaacaacaacaactatgggttcaatcaaggaggtaaccgaaggaacagtgggttctatcaacagagaaatcagaaccagacacagaaccaacagtatactcagcaacaaagctctagtggaaattctggtttgcagacagatttattgctacaatttatgactgaaactagatcttccattaaagatttgcagactcaaatggggcaactagcaactcaggtagcaacccgtcctcaaggaaatttgcctagtacaactgaagttaatcctaaagaaaactgcaaggcaattaccctgaggagcggtaagaaatatgatgggcctgaaatgatacaaccagtggatgaagagattaaagatcaaccagcaccaactccaacatcaacagaaaagaaggctactgatagtcctgcaccacaacaacagtctccaccagtcagtattgatcatcatgtgaagataccttatcctcagagactccgaaagaccaatctagacaagcagttcacaaaatttctagaggtctttaaaagactacacatcaacattccttttgctgaagccttgga

SEQ ID NO: 290568 - DNA, 757 bp, Cannabis indica
gattgagaggggttatgggatttgactattttacccctagttttagaaatacccaagttataaccttaagggcattttagtcattttatttggtaaaggtttaggtggctgcctaaaggagtgacacctagcaaatgattcagctgagattaattcttttaatcttcctttttcatttaaggacaaaatcaagaaaataggaaataaagaaaatgacattttctcttgaattctctttctttctttccttcagctgaggcaaccagggcaagaacctaccttttcatcttgtttttctggaaatcaactagggaatcaagcactcttgaagctaaggtaaaaccctagaaccctagaacatgtttttaaagttttcttcttagtttgagcttgtgtttttgagtattggtggctgttttgatttgaaatgcttagggatcaaattctaggtttagtttaggttaattaagagttatatcagctggtttggttggttgatttaggtgttgtgttaatttgagcataaaaaccttaacttaggtctttaatggcataatttgaattattggtttgttctgtgatttgttggttggaaatggatgtttatgcattgtataggtatactggagagtttggtaaggtttgggattgatttgaattaagggggatgatttttggttcccagcagtagaaccggaattccggttctggaaggccaatacaaaccggtcgaccggttggtgacccagaaccggga

SEQ ID NO: 290569 - DNA, 588 bp, Cannabis indica
tgtacaatcatcatcagcagttagctcgttctatggttcagtaagcttttattgctttagtagtttatttatttattttatgaaataaggaaagcctgatagaaagcatgttagtagcctgatagtagaataggcgcatgtttcgtttttaatttccaaattaagcggcattagtaagctctccttgaatacgacctgatatgccaactcttggtttcgcaggcggttccgactagatggacgccaggcggactaccaggagccagggcaattcggtagggtcgaatcaaggtcagggagctcagtttcccccgccagctaggggccgaggtagaggtcccaggggcagggctcgtggtcgggctgatgggaacccgccacaggctacccaggctccccaagccgatcagggagcccagaattgggaggttaggtttcctgaaatgcaagccagaatagaagagcaagacctcgagatacagagattgaggcagcagggggctcctgcagtgcctgtgccagtagttccagtggcacctacccctgctgctcaggccgaaatagttgtggcggccaacagattggaac

SEQ ID NO: 290570 - DNA, 611 bp, Cannabis indica
aattcattgtgagtttaaacaagtaatgtaacgccctgactctcagggacgccacgtgtgtgcttttataaacttattattattactaatctataaatttttagaaaaagtgtggtttaattaaaacctttaattaaattcaacataaagactttcattttaaatactgttgtaatatggggatcccctgctaagaaaattcttttacaactaattacaaatccatttgaacaagaataggttatacatcaaatcatagaaaagggttgatcctgcttcacaaaagccaagacaacacggttgatatgtacactgctggaagacctttgacccatggccgaacagaactgctaatcttcttacctgcaccatgaagtacccgtgagtcacagtgactcagcaagaaaagctactagataaagaaaatcatggaaaataatagcaaattatagtaccacagattatacataccaagagatcattctctttcaacgtacatatacaattcaacgtctatacaggcaaacttgttacaaaattaagagtatttatagttatacataatcaataacctcagtgtttcataaaacaccctaatcatatagtattgt

SEQ ID NO: 290571 - DNA, 618 bp, Cannabis indica
ggtccctatccttattttgggtctaggtgctgattattgtttgggtttttgtcccagtctaggttcgagttcgagtcctaatctcggttcgggtttaggtctctgtctgggtttttatctaggttctcttttgggtttaggccctggtcctgatcctagtccttgttcgactctagttccatttgcgactctgagttcaagtttcggtgtgagctcaggttagagttcgagtcctggtgtgagtttgggttggggtccggattttagtctaggtccagatcaggctctgagtgtgggttcgcgtcctaggtgttggtctatgttgggtccaagtcccaagttccaatcccgatctgagtctcgattcagttcttggtctaagtcctttgttgtgatcctggtctgcattcgagtttgggtccgggtgcgggtctgggtctagcttttggtctgattataggtgtgggtgtttgagtttgggtctgagtctgtgtttgggtttgtgttcaggtctggacttcgatctgggccttggttcgggtccacgtccaagttcgggtctcgagtgcgggtccaagttttggtctcggtcaaaatctcagtcaagatctaggtcca

SEQ ID NO: 290572 - DNA, 415 bp, Cannabis indica
tgaaacgatgatttcctttgagcttgccaaatagagagaaatgatagagcgctcattttagtgactatattagttcactataatatcatttataggtggcaaagtattttaaggataaaatacattgaaagggtgtaacggtaatgttatccctatgcaacgtagatcatctatagaggatcattgatattgggattataacaatggataattaatagcgtatctatatcgtggaacatatagagcgttctatatgactgagagtgcaattccaagctccatgagtcgatgtaatgaagaattaataagctagtggatttacttggtaaattttaaatgtgcttattggaggctcagttatataggcccatggtccccatactagttgagaccatattgcttgtaagactcagat

SEQ ID NO: 290573 - DNA, 823 bp, Cannabis indica
caaaattcagtgtgtatatagatacatcgatcgatcgatcgtgattattgcgtacgcgcgcaatccttgtccttaatgtgtacgtacgtataatataacacatgaatgaatgaaaggaagatagtcatgaactcatatgacatgatatatatacgaaaaagtgtaagccataattaataacacaatatatgttacgtacgataacgatgtatgaactagtgatctcaatttcctccctaaccaaaaaacaaaaagaaaaaagaaaaagggatttcaactcaagcaataatatactagtctctctacatccacaaaaacaatgaaggctttaaaatcttgtacttggatataattagacctaaatgacgtattatgtcatttcaaagaagaagaaattaaaaggggagtagggacaaaaaattaaataatgattgaattactcaatctaaatagagatgggagtattaattaattttggtgcgcaattcattatatttaaattcatcaaaatgaagtgaaattcaagttgcacattcagagaaaaaaaaaatgaaattaggatggtacgtagaatagctagggctgaaaatatatgataaaagcatacatgaatgtccaaccagaatgtgcgacgaataactcgagattaggttaagtggttataagaggatacgtgtgtgttggaggtcctgattcgagtctcaagtatacaatataatatataaacatttaaatagaaaaaaaaaaaaccaaaatgtgcaaggaattaactatttcataattaatttcactactacaaaaacaccctttagaggcggttttt

SEQ ID NO: 290574 - DNA, 815 bp, Cannabis indica
atcttttttttttaagtttaattttcttaatatatattttaatataataagttacccaatcctaatcctaatagaattcacgtatgtcaatttaaattaatcttttatatctctatataaatacccactgtgaacatcaaattcatattcattattctttagttactttcctaagctatagctgaacgcatttgattaattaaccctaattatgagttattcagaagaaaccattgttggtaattccatttaccaaataataccatatcattttgaattaaatccaagaggacaagaatcacataatgcttgtctctttaccattaaattaaatgtcaagttcactcttgctatagataatgaagaatcttatttactcgatgatgatgtagaaaacccatatgttgttgtacaatgtgttgggcgaatttcatatgatacattgatgaacaacaacgatactcaaacccaagttaccattcaagacatgcttgttgccattcaagacatgcttgttgaagtcatacttcctcctctctcttttcttgctgatgaagttattgattgcagtagagagatgatgaacaacatagattattataattcaaatgaagaagtcggtgttgatgttcatattataatttatgttgatgaactacctcaactttatttggatgataatgatgaatatgatatcaatgatcttcctatctgttttgtggcggcaagtgaagagtcaattaaaaaattagaaaaagtggaggtaaaagataatccaattttttgttctatttgtttggaggatgtttgtatgg

SEQ ID NO: 290575 - DNA, 641 bp, Cannabis indica
caacaaaagtaaaaaaaaaaaaaaactatagtttcttacgtttcaaggtatttatttagacaatcaattgcccccgaaacatcgccttgtgcctttgccatggctaccctcctcttgaggattccctacgtagaaaaaatgtaaaaagttagataccatccaatatcattctaaagttctttcataaaaacatgaaaaagagaatccagtattacaaattgatttcatcaattcaaactgcaaaggcacaaaattttacttgatcaagaggattatcttctaaaaggcttgagtaagctttttctgcttctgcccaggagccttttgcttcaagcagcatagcctctagcttacctgtgattcatgccagtaccacataagaatatattatttctattaaaacacagatatttacgcactttatcattggtatgttgattaacctaccaacccttttactctctggaaatctcttcatcaaagcatttatgcagtcctgcaagttaattacatagcaaaatggtatcagacccatgatatagatatcaaacctacactatcagagacagtgctaagaattcctagctaatagctaaaaaccaatcttaaataatccgcaagcccagcaattgacacgaaaa

SEQ ID NO: 290576 - DNA, 1012 bp, Cannabis indica
tattattttatttgttacaattattcagaattttgtaaaaagtgaatccgaaatagaagaaacatgatttaattagctaacaaattaaaatagctagtgtactaattccaattaaaaaaattaaataatactaatttaaccaattacattaaaaaagagaagaagaaaaagaaatattggaaagatgaatgggatatcaaggaatataaggtcttcatctttctattggtcaatgtctttaattttttttttttaaattatatatttatatattggtcaatgtcattagatctaagtataggttgatctaattaatagcatttttttatatatatttttcttaaaattaaatatcaatttgttctaaaatcttggtattataatatataatttttttaaatcacatcaaatatattatttatttaattatcaaaaaaaaaaagttggtgcaatagttgagatcttgtaaactcttactattatatacttatttaaaatgttatcttctctctcttcaaaaaaaattaaaaaataaaaagaaatgttctgaactccttttttcttatgacttttaaagattctatataatagcaaaataattaattaaatataagaataattacataaaataatatttttataaaattttatatttttacgtttaaagtatttttttttatattgttacggttttacgaaacaacaagaaattatataaaataaccgaaaaataacatcaaacaacaataaaaaataacatacagataataaaaaaatcaacaataaattaacaaaagtacaatatatataaaagaccgtatttttctataaataaatcgtaaaaattataaaaatatatttaaaatgttgtacaatcgcatttttataaattttttttttttgttatttttatgcatttgtaaaataatcccttaaatatacttattaataattttttaaggtggtatatatatacatgtatattgccttaattattcttcaacactttgcc

SEQ ID NO: 290577 - DNA, 512 bp, Cannabis indica
ttctcgagaagataggtcaagtggcataccggttagcattgcctccagctttatcaacatttctccttgtagcttttcttggtgttttcttgtgttttaagaaaaagttagtgaattgcatgcttgattttgatgtgtttttgttgctgtatgttgtggttaatttctgaagtttattctagattatttgagttgatttgagctgctggtaatgcatgattagtggtgttgtttaaagttatagattttctattcaaaagcttaagttttcaaagagaaattttgaaattggtggctgtaattgttgtatgagttagaaattgttttctgcagctttattatgcatgaatatgtaattttaatcaagatttaatgcatgttagtgatgtttgatcaagcttgagttggtttgtttgcatgaagctctgtttttatgctttagaattgttctttggggtatttagaacaggtctggaaggtttggggtgaattggatttgatttgagcaaagt

SEQ ID NO: 290578 - DNA, 416 bp, Cannabis indica
catcataaccagctctattctaatcaaatgaacaagatttaaaccacagaaaacataccacagaaaacagcagcaacaacatcctaaaacaacatgcatgcactcatattttcaccatttttattcaagcaaaataaagagaaagagttagaatttacataccacaacctagagttcacaattaggatgaatttagctttgagaattgaagaaaaacccagctttgcaccccaaaatacccagccgaaagtggagaggaaaagagagagtttttggaaaattccttttttcttttctaagtgttttttgtaaaatgaaagaaatgatataacccacttaacataaccatttattaaatccatttcagccaaaaacaataaaataaataaacatttaatttccaaataaaagtcact

SEQ ID NO: 290579 - DNA, 465 bp, Cannabis indica
gtaatttatcaatcataacagcaacttgaaattgttcatcaatagtcatacattcagatagaatttcgtgagctattttatgaagctcgtgagactgggcttcgactaatttatcatcggtcatttgaaacttcaggtagcggctcacagcgtatttctttgttcccgcctcctcagtatcatattttttctgtaatgcttcccatatctccttggcagatttttcagaattataataatcatacaaatcatcaaacaaaccattcaaaataaaattcttacacagaaaatcattctctacccaggagtccctttccttaacctgcaattcgtacttctcgacttcatccttcttctcagcaagaggtggagtctcagacacaactggtttcaaaacagtaagcacaaatgcaacttttgtcatggtcagaaataacaacatcttctatctctaacgtttaaagt

SEQ ID NO: 290580 - DNA, 675 bp, Cannabis indica
ccataactggtttcacccaatgctctaagtccactcttgaacccgtaggaacaagtaaagaccccattctcctttgttgagcatttctccattgattaaggactactcttgccaatagaataacctccgccgctgacattgatttgtcccgccaaaccacctcatttcgggcataccaaatcgcccaaagaaccatgagcaattcttcctgggccgtggatgagtgttgtagcagaatgtggctaaaccaatcccaaaaagactccataggcgtatgactccaatttagaaccgaaagatgccaacaagaccgtgcaaaagaacattgcaccaacaaatggtaaatggtctcaggcacctggttacacataggacaaacttggtctagaggaatatgtttggtggtaagttgaaccttagtagccaaacaaccagataaagcacgccacatgagttggtgcactttgggagggacatgaagcttccatgcaattttccatatcttaatctcagactcactagtattagtgatctctgaatggtgcagcaaccgatatgcctccctcacagtatagaacccataaagatccttatgccaataccaagtatcaataggagtctcctgatcaatgttagttcgaatgatgatctctttatctcggtcattgaatatat

SEQ ID NO: 290581 - DNA, 689 bp, Cannabis indica
agagttgtttgaatatagtagaagcaccatcagatgaatacatagaagagactgagcctagaattgaagagaaagaatcctttgaagtggttgaaaatttggatacattggatgcttgctcaacaaatgatgatctcaatttggtgaatgaagaaacatccatcctcaatgatgaaattattgaagatcaaatcacagtcaaggatgcggatggtcatgaggaaactgaacaaccaattgagaggttatttgagaaaagcaagaaagaggtgccattggtggcagaagaatcacttgtagttgttgatttgaggttgtcaacaccactatattatgaaccaccaatggacccttattttccactaatgccgcattctccatattgtattctcttcgagttaccaaaggcttctccccaagctcatcatccaaggtcttttgttgttggtgcagattttggttcaaactcattacatgccaagcttgagggcatctttaaaaacaactttcaagttgtcttgcatgacgcttattatgggcgtcaaccgcttgttgatgtggcatggacctaaggtaagctttcttctctttaagttttattttcacattgggaacaatgtgaaaaattagtttgggggaggggcttaatttgaggggcttaattttaatttttttatttgtttgattgt

SEQ ID NO: 290582 - DNA, 650 bp, Cannabis indica
agagcgtttccgtgcaccaagagcccggagggagaggaagaaagggccagagatgtcctcccatcgatctgagaaatcagattaacgggaaccacggtaatctccgagatcacctggaccaaaagaaatacggacccgtagtctctacgggaacattaaacgaaggaatcatggtagagcttgccatactccgaaaagacatcgcccgagtctcccgaagacaaaaaggcgatgactctgactccgactgtgaagaccgcgagccttgtgtcaagcacatcctagaagcagagctccccaagaattttaagatgcccgaaatggcagcttataccgggaactcggacccaagcgatcacttgtcacggttcaaccgagtcatgacagtcagcaacgatgccaaatgtttgtgcttctcgcttaatctaagcggatccgcggaagagtggttcaagaaactggaaccaagatccgtggattgctagaataagttggaaaccagcttccggagacagtttgtcgccgcaaggaaagttaatctggaggtcagcgccttgactaacatcaagcagctgcccacagagacattgaagaatttcataaagaggttcaaggaagaagcctcaaaaaccaagaaagttgatgacgga

SEQ ID NO: 290583 - DNA, 680 bp, Cannabis indica
tattcgatcaaaataagaatacaacgttgtctcggtaggcgagagtcgaggttattctcatattatgagcttccaccattgtctcatattttgtaagtttatttctacatagtcatcgtaggggagagtctaatagaaacgaaaacttacaaaatacttatcatatgagatcttacggtgttaagtgctttcaacgaataactatccataacgcggacgaagtctagcgtctcgaggttatattgaaaacaattaatcattgtaagaccaacaatggagatcaaatatctctttgattaaggctcataagttaaaataatgtattttaaattaatcatttattttaatctatgtattttaataataaaaattatttaatttaagttggtccaaaattaattaaaaaattaattttcaactttaatttaattttcaaacaataatttcgaaaatccatttataattgaatataaaatttcgaaattatataaaatatattaaaataaatttctcaaaaatatctaatttaagttgttctaaaataacaaaattttcaacttaaataatttttcaaaatttaattaattatcaaattaagtatcttgaactaatcaccttaatttaaaaaatatccctatttaagttgatccaaaattaacaaattttcaacttaaaaattt

SEQ ID NO: 290584 - DNA, 652 bp, Cannabis indica
tatttacattttatgtcgtgtagcagataagtacttaagttgcattttttgtggtaaaaataccttcggttacactcttggaacttccgtaggtacctctccgttaactgacaaatcaatacctacgtggcagcccctgatatgtccatgtcattaaaatttttatattttttctaacaatttttaaaaattaaaaaaaaatacttaaaaattaaaataaataataataattaaaaaacaaacatatatttttccttttctcttctctaatctctctctttcctctcgacttcatctccttcaatcttcatcccatttttccattaataattatatcataatacaaaaattaaaaatcattaaacagatcaaatcctcatcctacaccatgttttcttttttttttctctctcttttcttttacactctcttgaacagtcaacaaaatcccaaaaaataagtatgaacagcgaacacaaccataaaacaaattcagaaaattggaatgagcctaaaaaaaacttacacacaaatttgaaaataattttgtacactaaacctcagcacaccataatatattttggtcactaaaattacactatgccatccttatcttcttctccattttttttctttgtaacagtatcttctt

SEQ ID NO: 290585 - DNA, 621 bp, Cannabis indica
gctattatatgcttagtctttagaaaaaaactttattgattcaaaaaaaaaaataaaaattaattattaaatatttaattatttattattatcttttaaacaaaatacaaatttcatttacttaaattacttaattttaacattaatttttatgaataattattaacttataatttttctttctaaatatcactttaatatttttttataaaaaaattactaacttattaaaatttattaagttaacctatttttttttattatctcaaaattttgttaaaatttgggcagaataacatttatactttaaactatacccaaaaatttaataacctaatttatacaatcttaacaacttttaaatacattacaaatttttaaatattactaattttcaaaataaatcaaaaatttataacaatacaaaaaataacaaaaaaaaaaacaaacatataaacacacatacttttttcggaatattatctaaaaaaaaaatacagattattcacataaataataaaaaaaaaaaaaaaaaagttaaacaaatacagtagaacctctatttaagaatactctattcaagaataacctctaatttattataaaaaaataagtccaaat

SEQ ID NO: 290586 - DNA, 674 bp, Cannabis indica
atttctttacattaaatatatatattattttttttaaaaaaaattgtaatatagtacattaatttatatataatcaacaaataaaattaaaatttttagttatttattttctactgtagttatcaacttatgagaaagaattgaaggacatggaaggtgtggctagagaagagtatattggatcacttagaaggtaattataataattgattatacataattttttggtagcttgaatattagttaattattatatatatgcatatataagacataactttgtacattaatatatataattgctcgtaaaaatcatacaggaaaagtagtgggttctctcgaggagtttcaaaatatagaggtgttgcaaggtatttaattaatttttatatatataaaatataaaaataaaaaacttactgtttatatattttagaaaaattttacaatacactttcttaaaatgggtgtatcaatgttccttatttatttcggtctctaaaaaatacttagtttaatttttttaataatacgtatatattatacttatttaagatatttggcaaaactttaaaaatttagaaaatttagcacatcgaaacaacgtgtgactttttattttattacgcgtgtgaaatagatggattaacattgatttctatattgtgaattat

SEQ ID NO: 290587 - DNA, 515 bp, Cannabis indica
cacacccggagcctgatctggacctagactgaaattcggacacgaacccaaactcagaccaagactcgaactctgaccctgactaaaacccaaagtcaaactcataatcacaaatgtaactagaactgaacaaggactaggaccaggaccaggacctaaacccaaacccgaacccagatcaaaaaccaaaaagagacctaaacctgaccaagactaggactcgaacccgaacttagaccgggacataaacccacacaataaccgggacgaggacctagaatcaggatagggacttgggaaaaagaactaggaccaggaccaggtatccgaccaagacccgaacttgaacctaggacccagctcgtgactcggcacaacaaatggaactagactgggacccgagattgggatccggatctggagcaagggcttggacaaaacctgtagtcagtgtctagatttgggaccaagctctggagccgaaccctgagatggacccgaacccacagccggac

SEQ ID NO: 290588 - DNA, 699 bp, Cannabis indica
aaatagaaaaaagatttagagcatctaatgtagtatatttttagtttagctctttaaatattctagaggttttcaattttaaacatttgataagataaaatgtataacctagtatgtaccatgaaaagtagtataataaaattgatccatagatactaattttcaagttgttaattactaattattaacaagtcattaacacaaatttaaaataatattataacaattctttataagaaatccaagaataaaaaaacttaggcatttaacttccgttatgttatcattttcaatttaatattctaattgttagtatatggttcttaattatttacaaagtaatttttaaattataagtgaatcttgttaatagatctaattcccataatttcatctagaatttaaatttatgaatagcattaagttaaggggaatggtaaaacattaaaggtaaccctaattcgattggggataagttgaagaatatttttttttttttttgttattgcattaatcaaattaactcttatattatatttctattgtaaataatacccaccttttgttagtagtggttgtcccaactataccctccaccttctacttaagtctacgcacattatttacattaacttaacgagatataataaggacattatttattaaaagtagggtatattttaaaaaataatgaaaata

SEQ ID NO: 290589 - DNA, 608 bp, Cannabis indica
aacaataatttccagccagtaattcacagaacaagccatcaaaacccaagttgccattaaagcccaaagctttgaactcaaagctcaaagttgcataaaacttacaatcaatcactacaccagctgctatgaactaaaattaactcatactaaccctagaattcgaactaaacaaacatcaaaccttaacagctcctataacccaaaatcacctcttaaaactaaaatacaacttcataaacttaaaaggaaaggagctagggtttaccttgaatgttctcctttgaatccttggctgaaaacacaataaaaatgaagagttggctgggttttccttctggtttgggagggccgaacaccaagagagagaaaagagaagtgatattttctctaatttgatttttcttttcttagtttgatttcctccaaagtaaagtccttctttcattcaattaggctgaaaataaagtaggtgtcatcacccaaggctgccacctaacccacattaaccattttactaaatgaccaaaatgcccttacacataaaactaggataaaccaaaagctaggggtaaaatggtcaaattccataaccccgctcaatcccg

SEQ ID NO: 290590 - DNA, 570 bp, Cannabis indica
gacattattttttttgttttctgttttcatgaaagtatttttagaaatgagaataaaaaaatagtttttgaagattttaaaacataaatcctatttagctaatattttcaataaaaaaatttttatttttaattttaatttattgagaccctcatatgaacaagacccccgaccacaaagacccccacttgcaccttgcccccgaccctggacctcgaactcggcctccaaactcacattcgtcctagacctggcccaaacccaaattctagacccatcccagacccaggcccgaaccctgacctgaactcggacccagaccctggccctagacctagtcttgacctaaacctggaccccactcagcccaaacccgaaccttgacccagacctcggccctagacccaatcctgatctggactcggacccggccccgaacataacctaaacccaaaacctacaacaaaatacctgaacccgacttcgccctacgaccaaaactagaggagaaagaaaatagatgatagagaaaataaatgaaagagtaagagatgagagagaaaataatga

SEQ ID NO: 290591 - DNA, 507 bp, Cannabis indica
agaagttctacaatgtttatatttaaaggtaaattctggtaaaatctctaatacttttattttatttgtatttaacttttaaaattcaaattttggcggtaaaactctcaatactcatgttctgttagcaatttaatatttttatcaattttacgtatacatctacgtgaacatagtgtacacatgacacaattttattagtccacataaaaaaatatttaaaaaattaaaataaaatcaaaaaattgtaaataaaaaaaaaataaaaaatttgaaaaaaaaaaaatcaaattggaaaccctaaaattaaaaaattctctttctctttcttcctcacttgacaaccaccctctctctctctctatctctcttattatgtattgttgtttttacctaatttttttcttttcttttttctttattttttatttctattctattttctcaatcatcttcatagtgtacctaaacaaccaagccaccaccacttccacctcaatctatctt

SEQ ID NO: 290592 - DNA, 926 bp, Cannabis indica
atttctgccaactttgctcaaatttcccagagagaaaaaattctcagaccaagaaaacactgttgaacactttgcaattcctcccagtccatcttcgttcactactatcaatccttcttatcttcgtttgatctacagcaggacccccagtctcaacacttcactgtaagtttcttgcaccccttgctttactgttaatgtacatggcatacttttacttatctgctcgtttttcctgggttttgtatttgaagtttctgggaatgcaatcttttagatttttcacgtaacaggtctagattcaccatttctggtgttagatttactcttgtcacgtatttgttactattttctgcaaaagaccatatgttcttcgtatactggtcgtttagggcataggagagattgctttctttcgattttctgccctttctttttctctggtgcgcaatgtcgtcttctgtgaatttattgcacccgactcttgtccagggaatccttctagggtttcctgtttgacagatgtccggagggggcctctttccagcggttaggggacccccattccctttttcttggtttagggtttggtatggggctaactgctggaatcttaattctttttacagaatcgaaacatgtctgcttctggttcaaagtcatccaagaagagtggtaagcgtctggctaccctcgaagatgtctcgctgggtcccgttgcccaggaggggtacaagtctcgggccaccggatgggaggcggcagagcttcactctactctaacttgtccccatcagttggagaacatcgtggaggtagctgaatcaagccttccacatccgggacgtaccaccggccacctcgtgatgcggagacgcccaatcacaactacggcggcttcggggcttggagccagacgcacttga

SEQ ID NO: 290593 - DNA, 527 bp, Cannabis indica
cctagtctcggttcgggtttaggtctctgtctgggttttgatctcggtttaggttcgggttaaggtcctggtcctggtcctagtcctacttcggttctagttccattcgcaattttgactacgagtttaggtttgagttcgggtcggagttcgagtcctggtttgagtttgggttcgggtctggatttcagtccaggcccaaatcaggctccgggtgtgggttcacctcctaactcttggtctaggtttggtccgagtcccaagttccaatcccgatctgagtctggattcagttctcggtctaagtccttgattctgatcctggtctgggttcgagtttaggtccgggtctgggtctagctttgggtgtgattctaggtgtgggtttgagttcgggtccgagtttgtgtctgggtttggtttaaggtctggaccccgatctccgtctaggttcgggtccaggtcaaagttcaggtcccgagtgcgggtcaaagtttgggcctgggtcaagatctcggtctagatct

SEQ ID NO: 290594 - DNA, 510 bp, Cannabis indica
ttgagaccggaggtggtcggggtgagagaaatccccaaaacccccgtggatgcggtagaggccgcggtcgtgccccgagaggtggtcaggagaacctacctcaggctctggttgactgagagcaaaggtttgctgaaatgcaagctagaattgagcagcaagaggatgagattcgaagacttaggtagcgggatgctcctgttgagcttcccctgcatccgcctggtgaagttcctgcagcccctgcggtgccagctgagcaacatgttgctggtaaccgcatggagcctttatatgagagattcaggaagcaagcacctccagtgttcctgggaggtcctgatgttcttaaggctgagcagtggctgactgttattgaaagaatactgaactttatcggtgtgatcgggaatgatagggtggcgtgtgccacgtttcaatttcaagaggatgccttgatttggtgggagatggtatccctcaccaaggatgttgccagaatgacctggg

SEQ ID NO: 290595 - DNA, 722 bp, Cannabis indica
agtggtacaattggtttgtatgactttttcagtgatggtggaccaactaaagtaggagattcaacctttggtggagatgactcttcaagggatgaatttctgacttcatgacttggaatcaaatcattaacttcttggtgtggtgattcaagttgtataccactttggacagtgatgccactgacattctctattggatcactctctacttgtgaaggcataatgtttgaacattgaatttcatattcacttgtagatgtttcccttgactccgcaggattctctaacttttgtagagattgttgaaagatctgcatatttttctgaaagttttgctgacactgtatcatattttgtttaatctccaaagtagcagccttcaaagagttgctcatatcaataagagcacgttctagatctggtgatagtacaggaggatagtaagaagttggttgaacatattgattaattccattgtaggaagtgctagaataatctccccattgctgattgtatgtgtaagtgtcatagtagggattatattgatactcttgtggcgaggtataataaggatcatagtattgttgattgtacatcgccatgtttctaaaggaagatctgaaaattaaaaccacaactagaagcacaagttagtaaaaaaaattaaaaaaaaaaatagaaaaaaaaaattctaataaatttttctttaaatatctatcttt

SEQ ID NO: 290596 - DNA, 607 bp, Cannabis indica
ttcacccgggacactaaaatgtaccatgacctaaaagcattgtgttggtggtctggtatgaaaaaggatgttgttgaatttgtggccaaatgtttaacatgtcaacaagttaaagcagagcatcaaagaccagcaggattactacagccattgaaactccctgaatggaagtgggaagagatttccatggattttatgagtgggttacctaagactacaaagtagcatgacgccatttgggtagttgtggataggcatacgaaatctgcccattttctaccagtacgcatgacttactccatggaccaatttgctgaactttatgtgaatgagattgtgagattacatggggcaccgtattttattgtttgtgatcgagatgctcggtttacttcatctttttaggaaagcttacagagagcgatgggaactcaaaattgaagttcagtactgcatatcatccagagacagatggtcagactgagagaacaaatcagatcttggaagatatgttaagggcatgtgtgatagatttctaaggatcatggagcaaataccggcctttgattgaattttcttacagcaacagctatcagtctactatcgg

SEQ ID NO: 290597 - DNA, 653 bp, Cannabis indica
tactgcttggcccacgagtggaactcgtgaccggggatagggcggctgaccatttgcatttttgagaagtattcatcgctggatctttgtctgtctcacctaggggaatgacgttcggcgggtgctgacctacagtttggtaggctttttgtattagcacggtagcctgccgactacgattttcgatctctgcatggtgagcccttaatgcctccatctcactatccctccattcggcaaacatacacctttgttcttcgaacacgagatttaccgcagtgcggagttcatcctgatcatgatgtagggtattgttatgaccctgcatgagtccaagagcgtcgcgaagattttgtaactcagtagcatatccgatggtcgtctgggtgttggttccaggggaacagttgtgttatgaatgccctggttgggtgcggaactgttattcccagtctcttgcacactcggagcgatttcatccattggagttgttacaccattccccacgttcgccgactgtccaggatcaacagttggtggaatccttgtgtttcctggattctacaatgctggatccaccgtctgtgaatttgctggatcagttaggcatctattagtttgcaccatcagatttgtggttatatgttgaataa

SEQ ID NO: 290598 - DNA, 708 bp, Cannabis indica
tcatcaacctcatccaagagttctcgtccacaaaactcaccggtgttaaaggagttcgagaacacatttctaaaatgagggacatcactgctcatttgaagaaactcgacgttatcattcctgataccttcctggttcattacatccttcacaatcttcctccacagtatgggcctttcaaaatttcctacaacacacataaagaaaaatgactatcaatgaattgatgaccatgtgtgttcaagaggaagccaggctcctacaggagcaaggagaaagtgttcacctgaccactcaacctaagaaacgcaagccattcaagaagaacaaagggaaaaagcccatggctcccaaggctgccataaagaaagattccatcaaatgtttcttttgtaaacaaaagggacatgctaaaagggagtgcagccagttcaagaaatggatggatgacaaaggtaatccaatttccttagtatgttatgaatctaatatggctaatgttaatcttaacacatggtggattgattccggttcaacaattcacataacaaattccttgcaggatattcaaaatctaaggaagccagtggcaagtgagcaaagcatcttatctggaaacaagatgggctcacatgtggaagctattggaacatgcaatttagttttaagtaatggttttattttaaagttagaaaagaccttttatgt

SEQ ID NO: 290599 - DNA, 1084 bp, Cannabis indica
ctggtactacccccagctcttcgatttcactatctgaagctaacttagccagacagtccgcgtgagcgttcttttcccgggggattctttctattttgtagtccgtgaactcgtggagtagctcccggactattgttacatatgcggccattcgctcgccgcgtgtttggtactctcccgatatctgattcacgaccagctgggaatcactgtagacttccactcttttggctcctacgacttttgctaatttcagccctgctattagggcttcatattcggcctcattgttcgaagctgggaagtcgaaccgtagggccgcctggagtcgcagtccggtcggagatatcattgccactcctgctccggacccattttcattggaggctccgtccacaaacactctccatgtggggatcggtggtactggcatatttgcggttgcctcggcttcgttgcattcagtaatgaagtccgccaaggcttggccttttatggagattcggggaatgtagtgcaagtcaaattgacttaactccattgcccacttgaggagccttccggatgcttcaggtttttggaggacttgccggagcgggtggttggttagcaccttgatcggatgtgcttggaagtatggcctcaattttctcgaggccattaggaggcaaaagaccaacttttcgatgatggggtacctcgtttctgctcctatcatgcgcttactaacatagtacacgggatgttgagttttctcttcttcccggactagggcagcgctgaccgcgtgctcggagacagccaagtatagaaataggtcttctccgagaacgggttttgacaggataggaggcttggccatgtgttcttttagctttttgaatgcctcctcgcactcgtccgaccactcaaacttttgacacttcttcagtatgttgaagaaggggatgcacttgtctgtagaccgtgagatgaaacggctcagggcagccacctttccggtcaggctctgcacatctttatgctttttgggggatggcatgctcaggagagcctggattttttccgggtttgcctcaatccc

SEQ ID NO: 290600 - DNA, 497 bp, Cannabis indica
tgtctaccgaagcttgctatgacatgtacaatcttcatcagagaaagctcggttcacggttcagtaagcccgtacttgtttagtattttaaataattgtgaatgtgagagcatgttaggaagcatattagattttaattaattattttaaagtgcgttgccttagaatccataagtgcggtagaaagtttgtaatgggatcgttgcctgaccagactgacttactaattggcaggtttgtcctatagtatggacacctggtgcaatatggggagtctggatagtgtggtcagggctagtaacggttggagagaatggagtttgagttctccccgcaaccaaggtgaaagcctttggatggcttctgatgggagtgatggtcgttcgtcacaggctccgtgggggttggagcaaagattcgcagaaatggaagctatgattcaacgacacgatgaggagattcagaggttgaaacaacaaaggtttcctgtactatct

SEQ ID NO: 290601 - DNA, 728 bp, Cannabis indica
atcaagcaaaagggtggaacaccggcgacttcgccggtcgtcgcccagaagaggaagagcgatgtgatggcttcgcttgtcgcagactcttccaagaagttggccaagactactcaggataaggggaagaaagtcgtcatcgactctccagttcgtgctcgcgacttcctggccatgcaggaaaaattcctgactgagatcccttacgaggatctcgttactcgatctactgaactggccgtgcaatccatggctttgttcatgaaagccgcggctactccttcgaaggaagctgattcgctgaagaggcagaacgcccattttcaagaaaatataaagaagctgaagcaggaggtggcgaggatggaggagcttaacaaggccaaggagaaggagctcgaggaactcagcagggcaaaagaacaggcggagctcgagctcaagaagtcgcagacaacgatcgttgagatggctcgcgacttggaggctgagaaagagaatgggaagaaacagtacgatcaggctgtgtctgattacatttataccactctttccaaagtccctgacttcgacttctcgctgcttggagctgaagctgctgaaatggctgaagcctttcgcgccatgtctcctacccagactcaaggtgggggaggcaaccttccggacgaaatcgagggagtacaggctgaagaggtcgagaatgaggtcgtcagcaagatcgcgga

SEQ ID NO: 290602 - DNA, 719 bp, Cannabis indica
tattccactactgaaaaagagttgcttgctgttgtctttgctcttgacaaatttcgagcttacttgattggttcacctattacgatcttcacagatcattctgcccttaagtacctcctttccaaaaaggatactaaggcgcgcttaatacggtggatccttctattgcaagaatttgacatcacaatcaaagacaagaaaggtgttgagaatgtcgtcgcagatcacttgtctcgacttgaatttagtgattctgctgatgatccacctattcgtgatgatttccccgatgaacaactgcttgctgttactaagttaccgtggtatgcacacatagttaactacttagtaacaggtgaacttccttctgagtggagttcacaagatagacgcaagtttctggtcgaggtgcgcaatttctattgggatgatccatacttgttcaagtattgccccgatcagatcatgcgaagatgcatccctgatgatgaggtgtctagtgttttgaacttttgtcacaatgatgcttgtggtggtcacttctctgtgaagaaaactactgcaaaaatcttacagtgtggcctttattggcccactttgttcaaagacaccaacgaattttgtcgttcatgtgtgaggtgccaaaagttaggctctctatctcgtcgtcacatgatgcccttgaaccctattcttgtgattgagatatttgattgttg

SEQ ID NO: 290603 - DNA, 404 bp, Cannabis indica
aagattaatgcgagctcgattatgccttgaccgacaattctgtcgccagttaagccgcaaagatttaccatgcaaggcttcaatttggccttttcgagccccatcttcttcaacgtttccttataaaggatgtttactgagctcccgttatctatcaacaccctctttatccttttattggtgagttgaatagtaatcaccaatggatcaacatgaggatatctcacattcttctctatctttgtccgagaatatgattggatgttcttctagtttttaccttcttggaaggtttcggggtaaataccggctgctcattctttatttctttcacgtatctcttttgggcgtttttgctctcccctcgctatgcgccctcctgaaataactggatgtcctctcct

SEQ ID NO: 290604 - DNA, 558 bp, Cannabis indica
agacgtcactgtaatgacctggggaaaaatttcgagatttatttaatgccaagtattacaatgaagcagtccacagtgataagagaaaagaatttacaaaattagtgcaaactgagggtatgtcagtaactgagtacacaacaaaatttgaccgtctagccaagctggctttgggtattgtgcccacagacttcagaaagaaagagaaatacctggcaggtttgtatttaaaaattagacacgacctggtgattactaataatgaggcaataacttatgcggagatggttgaaaggacactacgagccgaaggtgcggtaaagttcctttaggagccctgagtgactccgagtgttggtgggacccccactcttcctactcctagttatggtagggagtggtggtgatcccaccaataatcaaaaaagaaagtctaatctagcatttggtggttcgggacggagcaagcggttctgtgggaaccaaggtagaggtggatgctagggttacgtcttaccctcgagtgcccaccgttgtaagaaacatcatccgggtgag

SEQ ID NO: 290605 - DNA, 462 bp, Cannabis indica
cttcggtcccatcctttgaatgaaggcccgatcccttataatttttagaagcatgtgaaggagtaccaccaccgcttcttcttttcctccggcttccaagccatggaccgcccggagcttcttacggagtgggtcaggatccctccctatctgcggactgcgccttcccagctgttcctccaatgggccaagactttctctacttatgacaagaaggccctcaacgttggggacttggtcacgatagagaattgtcggaaggccaagctgatatccgagaatcagtcggtggatgactttaacctttccaaggtcatctgcccgaatgtcaggactcctaccgcggaaagggtgctccgggtggacataatcacttcggcggaggaccggcaccagaaatacatctttaggagggagcaggagctagcttatatcaaggccctgttgggttttgtaccctaa

SEQ ID NO: 290606 - DNA, 535 bp, Cannabis indica
aaatccattacacatgccctcagcatatcctcaagtatctggatagtcctctcagattgaccatcggtttgaggatgaaaagctgtactaaattttaacttagtacccattgcttgctgtaagctttcccaaaatttggatgtaaattttggatctcgatccgaaactatcgactttggggcaccgtgaagccgaactatctccttgatatacaaatcaacatattgatccactgtatacgttgtcctcactggtagaaagtgtgcagatttcgtatatcgatccactatcacccaaatagagtcatataccctactgttctgggcaaccccactacaaaatccatggtgatgtcttcccatttccattcagaaatctttagaggctgaagcaaacctgtcggcctttggtgttttgatttaatttgtggacaggttaagcatcttgacacatattcaacaatatcccttttcatccctggccaccagtacaaggatttcacatcatgatacatcttggttgttcccgggtgtaa

SEQ ID NO: 290607 - DNA, 486 bp, Cannabis indica
cttaatatggtaatatcccaaactagcagagaataaaccaactagaaacctaaaactgccacgaaacgacaagctgaaaaaccagtttcccccctgctgcaaaattcgggtaaacagttttacaagcattgtaaaaccggttaaccggttttacccataaaaccaacaaaaattcataccctaaccaaatcgtgtccaaacccaaccaaacattccagaccagcatattataccccaataaacatattccaagcagcaaaacaacaatcaaagctcagatttgaatttcaccattaaagctccaagtttgagttctaaaactcaaaacttggttgaaccttcaaacaaccactaattcaagcttaatcaacataataaaccataactaaacctctaaaaacaatatcaaataactacagcaactacagcaacaaaaccatcaattcatgcaaaaattccattccttaaaattcaagaaaactagag

SEQ ID NO: 290608 - DNA, 576 bp, Cannabis indica
aaacctaattttattttttttatgtgaaaccaagtgtaataaaaaaagaactgaatgggtgggtcaacaattgggctttgaaggctctttttgtgttgaggcccaaggtgtgggaggaggtttagtgttgtattggaaagaaaaataagagggtgtcttattgggcttttctaataatcgcattgatattaggattgacaaagtgggctacccaagctggagactcactggcttctatggtgagcctaatagaaatcgaagagaaaggacttggaatcttcttcgcaccatagccggttcttcaactcttccttggtgcgtgattggggatgtcaacaatattctcaaccaagaggacaagaaaggtggacaaccttaccctggatggcttctagaaggttttcaaaaagctctcaccgattgtcatttacttgatcttgatctcacggggtaccctttcacctgggaaaagagcagaggcactaccctttgggttgaaattcgtctggacagagcaatggtcactgaagcatggactctcttatttcaaggtgctaaactttttaaccttgaaac

SEQ ID NO: 290609 - DNA, 720 bp, Cannabis indica
aacaatataatatgctcattatactatttaaataataatgccattcatatatgtttgttgtgtcacagacctgcatgttacactcacatgcctatttatgtctacgtggcgtagacctatgtgctgccctcacacatctatttatatctacgtggcgtagacctacgtgttgctctcacacatctaaatacaataaggccttagaattggttcctctcggttatggttaccgagtctaacctgattatgccttaagcgcataacccttgaatctcattacatataacatgacatgacattttcacacatatatcactagggtaataaccctaggcaattataccgttcctattagggtaataaccctaatcccgattattaaacaatcataaatatcacttaaatataagcgccactgcgcatactctacgtgctaaccactgtcttacctgttgtcccgcaactgatagagattccaaatccccgggtgctcctgatcaggtgccggtaatcctagtcacacaaatctgggattttcacaactagggttaacccttgattccatactcataaaattcaatcatggcatttaaaattcagataatcatacagagcttggaacaagattttcaacgatataaagaactcccaaatcggagttcggaatcaaaagttatgaatttttgaaattcaactcaaaattgcccaaaaacaccaggg

SEQ ID NO: 290610 - DNA, 867 bp, Cannabis indica
accatatgactcttgaaaaaaaaaaatgtgtgtcttattattttatgtgattatttattttatctttgaataaatagaaattatttgtgaactagttatgtaagtatgggcattttttttgaaaatagtgatatcttatttaagtttatcttcttttagaaattcttagaaacaaacaaggaacattaggaaataatgtctccaagaagatcagttcgaatcaacggcaatagaaacatccacgtggatgcagctccagcacccgcaaggggcggaggccgaggtgatggtcgacgcggaggccgacgtggaggccaaagcggtaggggaggtagacaaggagcatcggtagcaccggtagatgaagtagcactcgaacaacaacaacctcccaatgctcaagctgagatactccgagaaaacgctcgtatacgtgaggagctaactcaagaaatttcaaggctacgagctcagaatgaggagttacgccggaatcaaaatccacccgttagaaacctagctcttcaaccagctgcaatgaatccagaaccaatacaacgttttgaacctgtgtacgagcgattcaggaaacaacaaccaccaatattcaatgggagctcggactcacttgaagctgaggaatggttgcgctcagtggagtccatattggaatatatggacctcaatgatagggaaagagtatcctgtgctgccagcctacttaaaaaggatgcacggatctggtgggaagtagtaagacagagtcgcaacataacaactatgacctggttggactttgttgatgtgttcaacaggaagtactacagtgccgccatactggctgcaaaagaagatgagtttatgaat

SEQ ID NO: 290611 - DNA, 541 bp, Cannabis indica
gacgtagaattccatgtttcttcctatctgtttcgcaaacatttcattcactagtcgctaatatgttgcccaaacatttttcaaaccaaatgacatgactttataacaataaagtcccaatgttggttacgaatctcgtatgttcttgatcagggacatgcatttttatctggttatatccagaatatgcatccatgaatgacataagctcgtgtccagcagctgcatccactaactggtcgatcctgggtagtggaaagcaatcctttggacacgccttatttaagtctgagaaatcgatacaagttctccaagttccatttagttttgggatgagaacagggttggatattcacgagggataaaacgcctcacgtataatgtcgttaactaacaacttatacacttcttgcttgagtgccccttgtctctcagaatccaagggtcgtctcttttgtctcttggctgggtaatttaggtcgacattcaagtggtgacagataatcttagggtcaatccctatcatatttgagtggctcca

SEQ ID NO: 290612 - DNA, 691 bp, Cannabis indica
ccatcagccggcgcatttgagctgggagttgagtaacctcccaaacctcactgtgtttcacgttccctgcgtaatgtttcagctccttccgggtagttcccctgatgtgaggtcctcctgggatcatggctactctcccgttgggtcttggcggcaggccaggaatatgctgggcatctctgggggggagcaactggggccaatgccccggctacaccccctggtgctccttgaggcaaagctcctgctgcctgaaccggattgaggtgaggcaaccggttcttgatccattcatagagatgtcccaatcggatcaagttttcgatctcgtccttgaggtttttgcattcattggtgctgtgcccaatgtcgttgtggtactcgcatattttattggggacctcttgctccgtctggctgctgccttttgaggacctcttgctccgagagccttgagaaggacctactaagcttgcggctggagcggagtgcgacggggcttgtccattcatccctgagggatttccaaagtgagaagatgcaggggccaaggcctggccttgactatatccgggagtagcagaaaattgtatgccgctcatcggtggagcggctgttgggaaggttcctgggagctgagctccaggtacatatcctgctatcccggtaggatagtgttggaaattatttt

SEQ ID NO: 290613 - DNA, 1399 bp, Cannabis indica
catttttggttgggcaatatgaaattggtgagacaaggtagatgttccacagaaattatattttttatgtattatttttattttatttgatatatgtatgtaccattgcattaagaaaagttggcatgacacaattattaacataagcaacttacagtgaaaaaaaaacattaatagaaatcaagcaacagctagttctccatcctctttatgtagacaatatgagcattgctttaaggtacggcactatagtgctaacacactgttcttggtactattgcattaagtagcaagcatatacaaaattttgattaaattaatttaaatttaacaataaacatgcgtacctgcccaagtattatataaacaattgagcattataggcactgaaatcctactgtcgaagtgcagtaataatttgtgtccttattgattaaattatttagagttatgtttttacgactgtaaattatttataattttgtaagaacatgtgaaatgcatacataaacaaaaataaggcatatatgttaaaaaaaaaaaattaactagttagggctatgcataaatagatctactccaattacaactcaccgccaaactattaaatattcaactttgatcggatcggattgaatgttatttttaaatatctaattagatcggatcagatattggatggagtgtctaaaaattcaatatatctaacatccaatcgaactaattaatattttcatttagtttaaataagtaattaaattttatatttttatacgtaaaatatacatgtatatataaaagttaacatttaaaattttactctttttttcttggattggatgtccaatccaacacatactagacttaaaatattaaatgaattccatctaatccaaaaaaaaatactagatctaaaatattgaataaattcaaattaaaccaacaaatatatatgaaatacatttaacggataaaaccgatccaatccaacatccagtaaatgttggatcgattggataattgaaattaattggatcatatcggatggttcatctcatctttggtcgagtttgatttgggaaatgaatttgcttaaatgcagtcttcggagatccattagtgatggaatgcaagttcagacattcaaggacccatggctccctgtgttcgacgccttttcagccaatcacgaggatgatcaatgatgattattgggtaagtgaatttatccttccctctcgtgcttagggatgtggtgaaacttcaataagttttttttgccaatagatgtggacataattctgtctatttccattagagaggtgagaaacaagagatggatggtgctgacactatgatcgagatggggtttgtaatgttaagagtggctactcgttgg

SEQ ID NO: 290614 - DNA, 482 bp, Cannabis indica
acctaaaataacacaaaaacaggaaaaactagggttcgggaaaaagccccaaccggcagatcggttcccaaccggaaccccagttcctgggtaccaaccggtcgaccagttgctagagatctcccagaaccggtcgaccggttctaagctggaaaccccaaaaccgatccctttaattcaaatcaaccccaaaacttttcaaaacttccagaatacctgtatgcactataatgaagcatattcaagcagcagaatacaataaacgacacaaaatctcaagataccattagaggtcaaggtttgagttcataaactcaaaccttgttacaatctcactaccacaaccaaaaacaactcaaatccacctaaataacctcaagcaaactccagaattctaattaaaacaacaattataaccacaactccaaaattcctacaacctttacttcaaaacctagcttagacttaagaattactaaaaa

SEQ ID NO: 290615 - DNA, 574 bp, Cannabis indica
ttgtcttttcaggtgtgttctgacaggttagcgcggtatagtcacaaccgggaatttcgggccgaactgggttcgggcccgaaatgtaaattggattgattatttggcattttatttgatgaatgataatctgaaatttatttgaaattaattgagtattgaatgactattttacccttgtgagggtgtatgtgggtatttaagccctaagggcattttggtcatttgacccctaattactatgtttggaaaatgtgatttttgaggaaatgaaatgttaatttctggtggctttcccctctcaaccgaaccctctcatcctctctaaccctcttcttcttcaaacttgatttttgagaagaaagcttgattttagcttggtttggaagcttgatttgtgttggaagcttggagcttgtttgagcaagagattgaggtagtttctagctgaaattatatgagttgtttgttgaattcatggctgaaatatggtgataaaagcatgcttgagattgtttattcttggtgttgcatgcttagtgaattggatgtttaagcttgttaatctcttgat

SEQ ID NO: 290616 - DNA, 668 bp, Cannabis indica
attattagaatttattcttgatcttgtattttgttccaattaatatgttactgttgtaatagaaattgagaccaatgaagttcttggacatagtatcacagtaccttatttgagtgggagaattttaaaattccaagcccatctttgtttggatgacacttgtgatagcttactatgttatgatcatgataggaactttagaatataactgagaaagtaaatctaaccattcatatggatagaaataacttatcagaattttgaggataagataggagaattttgcaaagtctattcaaatgacttgggcaaatatctaatcgtcatctctaatgattacttaatcttaagcaagtattttatattaaagttaatactagaatgttatgttgatgacttagtctagaaggaacttatagtttcagactaagataatatgtcacaacaagatatccctgagaaacaatagtatgaggttaaatgtacttctatgtatgaatttaacaagactcctactattgagtgagagccatctaagatgtaatcaaacatggaacattaggagacagtcaagaaagaatctctgaaagtgacctatatgtgagatgataggggtgtacattagaatccttatatctacaccaactcataacctattcgagatggtg

SEQ ID NO: 290617 - DNA, 979 bp, Cannabis indica
gcttcttcaaaattttgttcaagactgcctacgagaagatggggctctagctcaaggatttaactccatgccttcagcccgtctatggtttctccggtcaaggagttgcgcctctaggacaaatccgcctacccctcacagttggacaagctccaacgagcataactgtcatggcacagttcctggtattggatgttccttcagcctttaacgtaatgctaggccgaccagccttgtatgacttaaaagctgtcacatcaatattccactcgtgcatgaagtttccaaccaaaaacggggtagggtgtcttagagggaaccagcaatctgctcgggaatgttacaaccttgcagtggccaaggctaagaaggaaatatcctccagccagagcctggacaagggaataaatattcccaagtaggaaaccgcccaaggcgaggatgaagacgtggatcctcgacttggggacccaagcatcaatgttggacctgtggaagaattagaagagatcgaggtcgatcaagatatcctgaccagaaagctgaaaatcagaaaaggtttgttgctcgaagtaatatcggaattgataaaatttttgagagcaaacctagacgttttcgcttggtcacatgcgaatatggtcggaatcgatccttctatcatttcgcatgtcctgaatatcaatcctaatatacggccatttcagcaaaaacgaagactcctggataaagaacgagcagtagccctgaaagacgaagttgaaaagctgcgcaacaacaacttcattattgaagctgtctacccggcttgggtcgtgaatcccgtactcgtgcctaagccgaacaagaaatggcgagtctgtattgacttcacagacctcaagaaggtgtgccctaaagactgtttcccacttccaagaatcgaccagctcgtcgatgcaagagccaggcacgaaatattaagcttcatggatgctta

SEQ ID NO: 290618 - DNA, 650 bp, Cannabis indica
ataattttcttggataagctttggccggcggcatgatttccacagaatccgccgtgaacttcagataggagtcttgcagcttcttcttgagtgacacatctgagcaatggcatcaagaatcctcttctgtacataattccctctaatatgatgtaccgtgcagctttccttctcattttctaagcttcatttcggttatctgggagtttcccaaagttgaggtaggttgctattggtgtcatccagtttggggatgtatcaataattttgatttcttccgtgccggtgatgcttggctcttcaaggaactggataggaaccaagtttgccttatcacttacattgttgcttgccaatcgagctaacgcgtctgcagttgtattttcttctctaagaatttgtctgagaccgcagcttttgaattgtgcgagcagatcatgtattttactcatatatgctatcatttttctccccgagcttcgtattctccggatacatgatttaccaccagctgtgaatcactgcagatctcagtgtgtctggctttcatttcctgggctacctttagcccggtaattagagcttcatactcggcttcattgttagatgctttgaatccgaacttgactgcagcatgcaggtgttgcccc

SEQ ID NO: 290619 - DNA, 1041 bp, Cannabis indica
tattgctgctctcttattcacatataatgaagaattggtgatgtttctcaactggagtatggccagggatcatgttgatatctaggaccgaaaccaggataaaatctcgtgttgttcttttgattgatttctggtttgattcgttgtgttgattaattgatttatgatcattattactgttcaagtgttgagattattgcaggtttatgattgaatcctcaaagttatttccgctggaattacaacaaaatcagagcttaggttcaagatccaattgaggaagtcaagaatcaagattcaatcaagactcatctgcaaccagttatgacaggatcagcaagatttgaacttgagaagttcaatgggacaggggactttggcctatggagggaaagtttgaagggaattcttgttcatcaaaaagttgccaaggcattgaaacccaaggaagaactcactgacaagttgcagaaggaagaacttgaagatatggaggaattggcatattacactatcataatgtacttgtccaatacagtgagaaggaaggttcagaatatgaagacagctcgagaactatggagcaagcttgaagagatttacatgaaaccctctctaactaacaagattaatttgttagaatctttatatggttttaaaatgtcttctcatttgtctttagatgataaccttgatgtatttaaccaaatcattataggattggctaacttgaagcacactgttgatgaagaaagccaagctgtcattcttctcagatcattgccacctgcataccaagaattgaaggctgtgatcaagtatggaagagatactctcacccttgatgatgttcttggagccttgaagtccaaagaacaagaaatgtctaaggagaaagacaatgtcaaggatgaagcttacctggccagaggaagagacaacaataggggcagagatcactacagaaaggatcatttcaaaagccaacatagatcccaatcaagatcgaaatcaagaggaaaataccataaggacagaaaa

SEQ ID NO: 290620 - DNA, 616 bp, Cannabis indica
atgtgaaacagctgtgatcagctaccaatcgaacggttgggaaggcacacgattcgaattcccaggatccaacggttggattggatcgtcatcaagacggtggaaacgcttgagtgtccatctgacacccattaatgcgccgtatcaattaatggataagaaacgaatcgacgcctgcagaaagtgaatcgctgcagtaatggtgatcgttaaatgtgccatcacgcgcccaaagcacgtgccaggaaaccgaggagccagccagaggcacctaagcaagccttgttcacttcacaattaaacaaggcttgggggtaaatgttgcccctaattttgcccaatatacgtggaccaaccggacagtgacacgtggatggaaagggtttagcgtttgaattaaatagctaagtctttataaagcaaagcattattttggatatgcctcccggagaaggcatgcaaggtctcatatgctcccggagagcaagatggcatcaaagcatctcagggtggtgtcaggcttcctctgagcagtcatctcgcatttaatgccgcatgggaggaggcgtattggaactgccacacgaataaagtctgacggcacaacccccgatct

SEQ ID NO: 290621 - DNA, 747 bp, Cannabis indica
ggaggaagacgacgagagaggagggcgatggtgcagatgcgtgggtggggttttggagagtcaagattttcgttttagggtgtgggaaatggagaagaaataggtgagaagatataggtgggcatgtgggaaatagaaaaaaagtaggtgggcacgtggaaaatgtggcaagaagtaggtgatgatttttcaatgaacccttataggcgacggttttaaaccgtcgcctataaaggtcaattaaaaaattacattttattaaaaaacgtcgcctattttgtttactacaattttaaaccgtcgggaatactaaagtttcccgacggttttaaatagttacttaatttttttaacgacggttcccaaaaaaaatcgtttttaggaccgtcgcgaattctgatatttgtagtagtgcgatacacttatagtgctaatacatgttgtaaattagcttaaaattgttaaacaaaaagagatgaccaaatttgtaattgtttttgtttggcaaattatgtagatttctagcgttcattttactgtcttagtctatttcattaaacatctaagttgttattagtctcatatgttatgtcttggggctcgtttggtacgccgtattgtaatgtattgtattgaattgtgttgtgttgtattgtattgtattagtattatttaatacaatacaatgtttggtattgatttgtattaattgattgtgtaaagttttaatatatttttaatacactc

SEQ ID NO: 290622 - DNA, 533 bp, Cannabis indica
gaaggagtcattgaattccgctgcacccaatgtaatgtttcttaaactttatacgtgtttatttcatcgttttagaaagttcatatttagagtgttaataaacatacttgtgagtagatctaagatcctagtaaaataattccaacactctgctcgtagattactctgttaaaagattactcaatcttcatgaagttaacccaatcttctcgcttagataagaaatggagacacttctatagtgaatattttgttgtactttgcgagttgaacctcaacaaaccaaatttctctttgctagggggcatgcagggacggagggactttagcccatatgtgggctaaagccctcactcaaatataaacatcaaattttttatatgtagatatatacatatattaattcactttgctcaatttattaaagtccaattcacaaaagccctcagtcaatatcttaatcatgattcatgagcctactcttattctaatcaagcccattttaaaagtagtccaatacaaataataaaaaa

SEQ ID NO: 290623 - DNA, 985 bp, Cannabis indica
actcttcacattcaaaaatacctttttcctaatacctcttaatcatacatttaattaataatattaaattaatattaattaatccaattcggtattatgacataatgcttccttatttattatttaaaaagatgacctcctaattattataccattcaaattattataaaaaccattaatattagtatcttcctatacaactaataaggcaataatctcaatacttcattagcatttacttcccattaatttcaatatctttccaaaaataaaaataaaataaaacaaaatattctcaattcacaataaatgttcctacctccaattaattacaaaatcccacatttataatttatataccaaaattaatattatgttatttataatattatgttatctataataaactcatatttataatttatctagccaaaattaatattattttatccataataagctaataaggcaataatctcataattacataccataattgttagctattaaattttataatatttttataattaatgatatcttgtaattttaaccaaattaccctaaataattaggggccagccataaatcaggcgcgaaaaccttgaaaggcaccaaagccataataatggcgcagctcatccatcaaatttgtacttccatttcttccatcaaaaaagctaataccactcatccagaaattatttaaaaatacaaataatgtaataattttggtacattcccataatattgataacaaaccaaaattccataataatttgacttcccaaatatatctgaagcaatatattctcattagaccattggtattaccacctccctttattacaagatcctcaagattcttattcttcaatttatttaattaattataatattagaatctgaatactaaaatttcaaacacgaaaattcctaaaaaaatataaaccaaaatatagctaataggaattagcgtttaaag

SEQ ID NO: 290624 - DNA, 703 bp, Cannabis indica
aagtttgaaaaacaaagtagcaaataaaggagatatttttcttgattctaaaagtgttctatcctcttattcttataagatggtcccactgcctctgttgtttttgacacaaccgaagaggacaataccatttagtattcttagacgaaattcacagtaccttgtcgtagtgggagggtttcaaggaactcaccctgttatgacttggaagacacttgtgatgaaaatccattcttaggttaaacaagtaattgattgtcagaataagaaactaaatagcaaagccaagagaactatggttaagaccattcatatggaacaaccaaaaagttttctattacaagcacaagaaaggaaattttgaacataagtctattcaatagacttaacaaaacgtcttgttcctagtattataggtttgaaattagctaaacctatggcttgtggtatgcctggtaatttacttactgtagtgcaagcaatttactttagtaagttactggagcatttttctaatggcaatctataaaagcttctcgatttctagatatagattttatttatctaaggaaaagtttcaactattccagaaaacataaggccaatgaaagaattccttgaatcaacagtgagaggtctcaaatatgctttcctatgtattagaccagacacctgctgttgagtgggagtaatgagtaggtat

SEQ ID NO: 290625 - DNA, 780 bp, Cannabis indica
tatgtcatatagtgaaatttcattaatttgcatttcggtgcccggcaacatggaacgcggtgtacggctcattagaatcacaatttagtattttagtttagcggggcggtattgttagacattgggaatgtcgggattagtcagaatttagagttttcccaaattaccctttagtgctttttaatccttttagtatgggaggcaaaatggtcattttgccccataagcttttgtcctttagtggacttggtattatgtgattatttgagttatttgaattaaattggctgaaataaatggattagtatgttagttattcattttattgaaaaatcaaagaaaagcaaaattccatttttctctctagctctctctctctttcggcccctctttgagaagcaaagaattggtgtcttccttggtaattgaagctggttttagcaaagatttagtgatctcaagttgttggtaagattcttgtagctctctcctaagttttcttgaattttaaaaaaaaattgatagttgcatgcttggtaatttgatgttgttgttgctgtgtttatgggatgttttctgtagattatatatgtttaaattgaatggattaaagcaggttttgatgcatgttagttgggtttaaccaagtttgagtttttaaactcaaagcttggagctttaatggtgaattgagtttttagttgctgtagttgctaaagttgttagatgttgtttacagagggctaattatgagttattatgttgatctatgcatgattt

SEQ ID NO: 290626 - DNA, 618 bp, Cannabis indica
gttgatatcaatttctccttatgaacttggaaagttttcaagcattcttccccaaactcaaaaggaaccccgttaacaagcagattggacaacggttttgcgatctttgagaagtccttaataaatctccagtagaatccagcatggcccagaaaactccttactccttttatagaaacaggagggggtaaattctctattgttgacaccttggctttatccacctcgatgcatgcctttgagatcttatgccccagaactatcccctctgttaccatgaagtggcacttttcccagttaagtaccaagtttgactcctcacatctgattagcactttctccaaattctccaaacaatgatcgaatgaagaaccgaaaaccgagaaatcatccataaagatctctatacatgtttcaatcaagtctgaaaagattgccatcatacacctctgaaatgttgctggagcattacatagttcaaagggcattctcctgaaagcaaaagtgccatcgacatgtaaatgtcgtcttttcttgatcctcaggtgctatggctatttgatggtacccagatagccatctaagaaaatgtaaatactcttgcccagccaaccggtc

SEQ ID NO: 290627 - DNA, 949 bp, Cannabis indica
tatatatatttttaaaaaagttacgcttattttactaatataagttgtttagtaattttttgtattttattgtatcttattaaattttagatatatttaaaggtaatgtgaaaattgctataaaaataacaaacaaaaaaaaataacataatgatcaataatatataagttaatgaaaataaaattataatttttaaagttaaccaactagaataagtaacaaaaacttgtatatgagataatattatttcataaactatttagtattttagtgtcttttttttattaataatatctcataattttaaatatctttttttgattaacaacattcaataaactaaatagttgctttgaattttaaatatatttttccacttattgaaatggttagattaaaaaaaagattacaatggtattattcccaaaccattaaagtaattgaaaaataaaacgtaaaaacgaaaacgtaaaacgtactagggttacggggaaacaaaaacgaccttagtttccgcccctccaccataaaatgacataaatcatactaaaggggtatttttgggacattctaaacttcccggccattcccgacacttcccaatgtctaaaacccgtccccaaattactaacatactaagttgtgatttctactgagccaaacgccgagttccaaaataccggacaccggaaatgcaaaatatgcaagctactgaataacataaataacagtatcataaattatttaaatagctataaataatttcataattaacataaacaactgctaatttccaaattaactaagcgggctttacaacgtcctccttttttgcaaaggagatctgcaaagtattagattgttgcttcaaggattgaaactcttttcaagatcttcaagtctctggccaaataatagcaaatctgctatttactgtgcaggaatgtc

SEQ ID NO: 290628 - DNA, 657 bp, Cannabis indica
tcaatcctaataatcaaatggaaacaacatcaaatttcaaagttctcaaaaatctaataaaaataaataaataaaaacaaatctcacaaacacaaactcaaacattagaacctcagtaaaacactaaaactcaaacattaaaaacacacacaataaaattcaaacccagaacttataacacacacatctgaataaaaattaaaccataaatgaagatttatgttagtattttttgaatttcggtatttatcagcaacaaatttaatattttaagtatttatatcataaattttttaatagtaaagttaaaattttaatataattttattaagtaattattattaattaaaatacacaatttattttttatatataatttaaaatattttatatatccgccgcgaagcgcgaaatgtttactagtatatatatatggtaaatactattctggtcgaccctgtgttttgcaaaagttactgattggaaccctgtgttttgttaaatgacaaaatagaccatgtattttccaaaatagtaaaaataggaccctgaacttatatttttgacaacttgtttttttaatataatcaacttgaaaacaattcctaatacaaacagatacagaaaatataaataattttgtcataacacttttag

SEQ ID NO: 290629 - DNA, 615 bp, Cannabis indica
agcataagctagacacccaaaggctttcaaatggtcataagatggctctttagaatgaagaatagcatatggtgtcttatttttgagattaggtgtaggtgttctattaattaaataggctgcagtagccacacattctccccaatacaccaaaggaatgtaggattgaaagagtaaagccctagcaacattgagtaaatgctggtgctttctctcaacaacagagttttgttgaggtctttgcacacaagaatgataatgcataatcccaagttcattgaacaagtctttgaactgtaattctttagcattatcagacctcatacccttaatggtcttaccaaactaattttgaacaagagtaatgaattgagggatagcatgctgagcatcagacttttgtttaatgagcttgatccatgtatatctggaacaatcatcaacaatggtaatgaaatacttatacccttcaatggtacaagtattataagggccccaaatgtcaacatgaataagatcaaagcacttttcagcaatgttatgatttgaaatgaaaggaagtttcctttgtttggcataatggcaaatagagcaatgaaataaagaattagaatc

SEQ ID NO: 290630 - DNA, 291 bp, Cannabis indica
tttattgtattttatttatttttttgtgttgaaaccaatttgtgagtaattagttctataaatcaatttccaattttcaatccctgtggagacgatactcgatttatcactttattacttgttacgattgcgtatacttgcgtacacaatttttcacaacagtattttcattacttttattcctcaaattgaaccaaagaattttaaagaggccgaagttgatgaattttggcttctagctatgcaagaagaaataaatcaatttataagaaataatgtttgggagttagt

SEQ ID NO: 290631 - DNA, 731 bp, Cannabis indica
atagtgtataatatatgtattgtaaatagtataaaatagacacagaaaagtatagtggttcagcaggagcttcgggcttggcctgcctaatccactgttgaaaagagtactctagctctgtttctttattcagatcagccccctttgaatggagggggaagcccctacttataggtagtaggcatcggttacaaataatggccataatgagaccgttacaaaataataacaataataggcttattaatcaaattaattacaacgattatataacgtttgtcatgaatgctccttgaatgcttgactgttgacttccgttgattggtgtatgtatttgcgccttttcctatcgatactgcgagttcaccaaatatgcgatgtgtgcctttcttaatatagcgaggtctctttaagttaatattgcgagatcctttctttcggtactgcgagtactataatattgcgagccaccttcaatacagcgagttctctatagacaagtccttctcgcggggagggtaaatttatgccgataacacatgcccctagttcttcagtatagcttgctctgtgctggagaacttaaaatagtccgagcccgcgtttgtcgatgatcatgatgccttattcatgttgtgcgtcacattttcgattggttatctaaactcgcaggtttcttataagaccatcgcacaataaaaatgtgaatctcgcgggattcttttggatgt

SEQ ID NO: 290632 - DNA, 561 bp, Cannabis indica
agaattagaaactaataataatttaaatataagaaaaagaaaacaccctttgaagactaacagagagacaacggtagaatgagcgccttgacttccgaagaaatatagaaataaattttgattcgaaaaggaaaacttatgaactattagagacttatgaaatatagaaacaaatgtaataattatatatatatatatatattatgtgtataaaaatagtccaaaggctatcaaagttcacacggactgggagccgaaagaataataataatgaaaagaaataccccgatcaaggtttgagagtaattcgtaaacagtatattcagatcaggcaccgaaacacatgaagtctgaagccttacatggactagaataagttaatatatatacaaaggcatgagacacgaaatataaacataaatgtaagagaaatcatatataagctttacctctctatctctatggccgctggtcatcttatctccatcaatcttacctcttccagaaacatttctcctttgaatggaggaaagagatggaatgggaggattaaaatcatga

SEQ ID NO: 290633 - DNA, 510 bp, Cannabis indica
cttgggggtaaatgttgcccctgattttgcccaatatacgtggaccaaccggacagtgacacgtggatggaaagggtttagcgtttgaattaaatagctaagtctttataaagcaaagcattattttggatatgcctcccagagaaggcatgcaaggtctcatatgctcccggagagcaagatggcatcaaagcatctccgggtggtgtcaggcttcctctgagcagtcatctcgcatttaatgccgcatgggaggaggcgtattggaactgccacacgcaataaagtctgacggcacaacccccgatctgtacctactaggctatgaccaataaagtctagtgacggctactctgtgaagaatcacatcagtcaagagggattaaggactgccctcataaaatccctacagcacctagggattagaccatgcataacccatgatatattcattgggaatgtacaactttactgatagttacagaaatgcatgtaccttaattctgggga

SEQ ID NO: 290634 - DNA, 1489 bp, Cannabis indica
tttgtatttttacgaacttgtttttgtccccaaaaagggagacaagcttaaagacggtttttatggcttccgggcccacccttcgaatgatggcgtggtcccttacaatcggcaaacccatgtcaaggaatatcgccatcgctttttcttctcctccgggttccgagctgtggagcacccagagctccttacggagtgagtcaggatccctccgtacgaacggaccgcgcctactcagatctttcttcagcgggcccaggtcttcgcgacttatgatagggctgacctcgatgtcgggggcttggttacgacggagaactgccggaaggccaagctaatcctgccgcaccagtcagtggaggactctaacctttccaaggtcctctgcccgaacatgagggtcccggccgcggagaaaaccttccgggatgagattattgccaccgcagagaagaagtaccaggagtatctctaccggaaggcccaggagaaggcttataccaaggcccaggcggcttccgggaggccccttcgcgttgggagcccggtcgagaggagaagccaaacggctgccgggagatcccttcgcattgggagcccggttgagaagagggctcccaggccaaggcctacggtccaagtgccgaatacaggggctcctgatgccagtacttccggatccggtaagtcacctttaacaatacattacgtccctgctgtcagcgaatatgctagccttacgcctgtagggttcgatgaacgtctccttaggtttaggatgccctcgacccagtggggagatcatgccaaggattattatttttccaacttaggtagatttccctaggccgacgtcccggagtgggttcctggtcctccacgagcccgtccccttacgacccttcagcctatattacatccagctggttccggccctcggacagctatctcggagatgatgctaccagcatcaaaattcagaactttgctagggccgaattagagagtcagggtaggactagcttgcttgtcatatctgagtgttggtggtttcccacggatgttctaacacttgttttctttcttttgttgtagcaggtgcttccatggacgccattttggccgaacttgccggggttcacactcctgagactcctcctccctttacttcttcctagatggccccccctctaaagatttctggccgcggagctgaaggagctcagagacttcaaagaccaagcctcaaagaaggcaaaaagagatgagcttctttctcctgtctcctgcagccggtgcgccaagcgttttgatgatggcgtcttcatggcctggtctacaaatgaccagaacatcaagcttaccttcaaccccaaacccgaggagatgatcgcaaagttccgagagaagaagaaaaagcttgatgccatggtggaggcacgcatcggacctcgtctccctccgcgtatcgattaggccgctccgagtt

SEQ ID NO: 290635 - DNA, 608 bp, Cannabis indica
ggaggctatggacgagatggctgccaagttgaagtccttagaggagttgcatcaggcggacttgcagtctacggccaacctgaccgtggaggtgaaggagctaagggatttcagagatcaggccttgaaaaaggccaaaagagatgagctcctgacccccgtcgtctgcaagcattgcgtcaagcgcttcgatgacggcgtctacatggcctggcagtcgaatggccagagtatcaaacttgacttctatcccaagcctgaagaggctcttgctaagttccgggagaagaagaaaaggcttgatgctttacttgaagagcgccggggccctcgtcttcctcctcgaattgaataggccgcggagtccaaccaatttcatcattacaactatttttttttttatttacagtctcttttctttccttttagacaatttagattattatcttttaaggggagacaattattacggctcgtccccaggcccttagtatgttatattttttggacctgccctttgggtcaagatatttaaaatatatatgttcactttcatatatattctattttgattcttgtttttacttttggtcctgttttactatctg

SEQ ID NO: 290636 - DNA, 540 bp, Cannabis indica
gcacaatgtggcacaaaaaacacaacaagaaataataataaaaaaaaaccatattgcataatgatgtaaagatatcgtacataaatcacaaaaccattaaaatcgcacaaaatcataagaacatcgtttaatatcgccaaaaagaatgaaagccatccctaacttctgatttctgttggcatcgcacaaaaaattgcacaatggtgtacaaaattgcaaaaaattttgaaaaaacccagaaaaaaaaaaaaaaaaaaaacccaatagttcgggtacaaactctactttcattttaggttcacaaaacgaatataatacaacgaataatatgtacatccatgcaatacaataaaagaccaataatattttagtataaaaaataacttacccattacttttgggtgagaaaataaaagttttaggttgacgaaaataaaagtttttggaggtccaaccgagtgtggttgtggtttggcgtgattgaggcgcggctaaggttgtggtgggtggtgatccggctggttttggtgggtggtggtg

SEQ ID NO: 290637 - DNA, 639 bp, Cannabis indica
tactcgcaaaaacacatgatcccctacttggaattcaacatctctgcgttttggatctgcataactcttctgtctactctgagaggcaagcattctagctttaattttctcaattgcctcaatggtccactgcactgattctggacctaggtatttcttttcccctgtctcatcccaatgaatgggagacctacacttcctactgtataacaactcatagggagccatccctatcgtactctgataactgttgttgtatgaaatttctatcaacggtaaatatttactccaagagccttcaaaatccataacacaggctcgcaacatatcctccaatatctgaatcgtcctttcagactgcccatctgtttgaggatggaatgctgtactgaattttaattttgtacccattgctcgttgtaaactctgccaaaacttggaggtgaacttcggatctctatccgagactatagattttggtaccccgtgaagcattactatctccttaacatacaatactgctaactgatccactgaatagtttgttttaattggcagaaaatgaccagactttgtgaatctatctaatacaacccatatagaatcagacaaacctgtggttctaggtaaccctaccac

SEQ ID NO: 290638 - DNA, 775 bp, Cannabis indica
acaaacaagtcaaataaataatttgtaataggtaaattttgtaatcttttttcatctgtgtataaacctagtaacatgaaaggatccatccaaatcagtgtgcctgtgtgagcctatatgtttgctttgggcttagatgcatatagggagcccatttaatttttgtaattaaaattgactaggttgctaaataaaattgtcacatttgatagattttatttaggccaattagtattaggcctattcaactaatagcagttgtttaaagtaaggttaaattcctctcttttgggccttgtgtgagagttaaggggccattagtagtgggtacgacatactgaacccaaccctccctcacatgaacaaccccaattgtgaaggcccatttgcttgatttgaataattgtaataggctaattatgttagtttgacctaataaaattaattaggaacataattaatttcgaaatatatgaaattaattttttatcagattattttgtaattaatttaagaaaaacacacttagtttaatgaaacaaattcaagataaactagatgtattttttctatatttaattaaataaaagaagttataactaattagattattctggatacttaattatttgaattttcaaagaaaatatatttaagttgaaaaatagtttttcaaactaattttggatcaacttaaattagaatattttgaaattaataattaagtagaatcttctaaaaacttagttattaagatattctttaaaatattttt

SEQ ID NO: 290639 - DNA, 513 bp, Cannabis indica
tatataatatactaggtaactaagccgcgcttcgcgcggtattgtttaacttttataatctttatttgtacatatatttattatacttatattgagtgatatatctaaaatataatattttaatttgtgtatttaattattatttataaaagtttttacattttattttatggtgccgttaaaataccttctctacaaaaatgaatgtaggatgagaactataaaagggattgtcgtaacattatcttttttttaaaaagttaaaaactgcgagatttatataaaactattagtgatagaatatttctatataaaatgtttagataagagaattaattttaataaattatatggatgtaaaatttataccaaaagaaaactcataatccatatgactaattatttccataataaaatatttatttatcttactattttgcgataattaaaataataagtgccgtatgaagttggttatagttatatagatttgtcaacattaaaaaaatataa

SEQ ID NO: 290640 - DNA, 1062 bp, Cannabis indica
attcaattttgattaacttacaaattcaatttatttttttttaattcaaatttttattttaataatattttattattcaaatgtttattaagataaaatgataaaatatcttattttaggaaaaagatatatatcttttatcatttttctaatcttaaaatttaaataaataaaataaaatttgaaagttgattattatggttatctaatttaaaatatttttaggttttgaattttatctttttaattaaaatattaaataagataattttaaatttaatattatagtttaaaatattattttaaacttaatatttactaatactccaaataactaatctcattatttaaaataaaaagataaaattagattttaaccaatttcaaataatagcatataatttttacagtttaaaatatcataatattagaaactaattttaattaattaaaaaaataataaaaattaattttattctgaaaattagatttttaattgaaaattcagattctacacaaaattctaccaaaaattggcttttgtttcaatagaaaaacgatttttgagtcaaaagttatgactaaaataaaattggtgcacaggggtacgcattgcatacccctgcgcgcgcggaatcaaggggagctcggcgggacgcgtcttcagacagcccgtgtccgagtttcctcggtcaggctgtctgaaaccgcgtggaaatgccgagatatcccttcgtgcgcgcgcgtgtgtgcaacccgatttcagatattttcgttcaacttcaaaaaatcataactaattcataaaaaatccaaattaggttctgtaaaagcctaaatttattaatttttcgtctactttccagaaaaaataattccagatcgaaataaaaaatatttcagtaacatatattgcgatttctaaactatcatcaaataagcacataaaccacatgaaaccatccaaatcaacacataacatcgttttaattcatatttcatgaaagtaaatcattaccatggctctgaggccagttgttggatatattattttaccaggat

SEQ ID NO: 290641 - DNA, 696 bp, Cannabis indica
cttatctccaggtacattgattttgttatctttcaattatgtaaatgtgtttattcagtttataatataatattgtcatttattagtcgaatgtattaccaatacattgtttgtttgtgacagttggtgtacttgactcacgtggagtggaactttggatatgtcgaccgaacagtgctccccgttgatttttggggtagtaaacaatgtaagtccgcttacaaatttgtgaaagacaatgggggtcccaacagcgacaaggtacatcgaattttggttacaatgtggtaaagtgatttcagttgatattaattattttgggtttgaaaaattaaatttgttatgtttaacagataacgctcacttcgaatcccgtaatactgcccaactactactcggactcggaaggaagaaagagcagtgaccactttgtcagctctatcaacgagttgaaggagtacatctcgaatgagttaaagtctcagttgagatcattttctttgaaatttatggacaaaggagaaggtgtaggtggtattgaccgagagttggaggaggatgctgctgcggaaacggggaagaaggcggagtgcagccaggccgtggaggagtccccgttgaagtcccctgtccgttcgaagactaatgttgttggtctatccgacgaaaatgtggtggattctgtaagtacgcctt

SEQ ID NO: 290642 - DNA, 568 bp, Cannabis indica
ataagctataattattataaaaatcatatgcttcctcagtttcaaactccatacccacttttggtattatttcatgtaaaattttagaatgaatcaactctattcttgtttttccatcaaaattgctactacaattcattctccaataaaacttaaatctgtaatatataataagtccatgtatagtaaatttaattatttttatcacaatttatatttaataaattaatgatacaaataacaaattaacaataaacataaataatattatatatacataggaaaattaatgttctataacatagctcttttttttcttctttaaactcaaaagattaccgaaattgtgagataagacttcctaatgcccatatatgtagccactccttcaaaacaaaaaaaaaaaaaaattgatttgttgctatagaaaaataaggatgaacagtgatgtttagtgtttaaaaattaaactggttctataatataaaaagtacttctataaagatgaatgaatataaaaaattgattaaaaatttaaaaataagatatatatatatatatattaaaa

SEQ ID NO: 290643 - DNA, 485 bp, Cannabis indica
ttacttctttttcagcttcttgactttcatgccttgaattttctgctggctttttctaaccatgacgtttttgttctgtgcagacatgtctcggcagatgcttgatgctttgaggaagaggatgggtggaagctctagcgcctcccctccggccaagaagcttaagggcggagagggatcttcggagaagagaccttctggagaggttattgacctttccgaggagctgactgctgcaaatccttctactcccaaatctgccaagtctaaggagtctagaccaccaacgattgggtctgaactggtcaggagggtccccgagcgggtgcaagaaccaactccaccttttcccgtgctgcaagaggccaagaagggcaaggagatgctggcctactacatgaaccggctggttctcgaggtcagtgagcaactggctggcgctgaaagcgactcatctctggatgtgttggtgggcggagtcttga

SEQ ID NO: 290644 - DNA, 537 bp, Cannabis indica
ttatgaaatagagtacaaacttacttctatttccttccctttgttcaagtcttgtatttcctgtcctgattcctgcttttgccatttttattttatttttttgctgttaataaactattagaaaactaaaataaaactattaagaaacgttaaaaattatttcagaaactaaccatttctcaaagtgttttctccttttcttttttccaaaataaattcctgcaaaaagtagaattaaactattataaaatgattatgcaactgtaaatcaacttgaaaaaccataactctttactcaatttaacatagttgttgtcattgtgccttttcatcagttttatttgaatcagatcaatttccaactattataaaactaatttgccaccatttacataaatcgtaccttgtatatctgctagtttttggtacacgtcaagtgacactccttcataatttgtaaaccattttaaaacgatattgcaactgtaaggcaacacaaaaaattaaaaacaggcttatacgtaacatgtcgttcct

SEQ ID NO: 290645 - DNA, 562 bp, Cannabis indica
ggtcggtacccaaaccagaactgagacctggcccttgatctaaatcttggacccgaaatgctggacctagatctggatcgagatcctgacccagacccaaacttggactcgcactcgggaccccaacttggacctggacccgaacctagaccgacatcgggatccagacctggacacaaacccagacacagagtcggacccgaacttaaacccacacctagaatcagacctaaatctagaccaagacccggacccaaactcgaacccagactaggatatgaaccaaggacttagacctagaactgaatccagactcaaatcgggattagaagttaggactcgcacccaacctagaccaaggcccaggacgcgaacccacacccggagcctgatttggacctagactaaaattcggacccgaacccaaactcagaccaggactcaaactccgacccgaatttaaacccaaactcgaactcagaatcacaaatggaactagaaccgaactaggactaggactaggaccacgacctaaacccaaacccgaacccagatcaaaacc

SEQ ID NO: 290646 - DNA, 403 bp, Cannabis indica
aaactaagcggtctttacaacccttttcgcggttgatgcagaaaaatgtcccatttatttgggatgaggcatgccaaaactcttttgaaagcattaagaagtacttgttgcacccaccagtgttgagagctccaacctttcagcgactagattttttgtgaccaaatcaacttagtcactaatagatagaatttgcgactaatttttagtcacaaatatttttagtcatgagacaatattttattagaaccaaaaaaatcaatgaccaattttttagtcacagtttgttatatttagtgactaaaatagtatttagtcactaaaactgtggtgccaaattataatagttttgagactaataatttttagtgactaaaaatttgaaatttgtgatgaaatagtt

SEQ ID NO: 290647 - DNA, 542 bp, Cannabis indica
ataatatactacaatcttaaactaacatactacctttcagttattataaaatatatatatactacctttcagtttttttaatatattattgcacataaaaacgatatactatggtgcaaaataactataccaaacacttaattatttaaggttataattgtaattttatcatcaaatttttaactaaaaggacattttgttaatttttttttaaaaaatggacatttattaacttaattgttagatttagggccattttgcatcttggcccaatacttaatgttacaattctcttacattgttactactatttccgttaactcataaatatagacacgtggaggattcaaatgcattacatttatttttattttattttaaacttaatattcttaataccataaactaaatgctacttgttctaaaaaaaaaaccagttcccataataattttcacatgatattggcacttcaattcaataatcatgttccatatactatactggttcactcagctatggtaatttagtattgcatctctct

SEQ ID NO: 290648 - DNA, 593 bp, Cannabis indica
atctccgagatagctgttcgaaggccggaaccagctggatgtaatataagctgaagggcctaagggaacgggctccgggggaccagaacccatccgggaccgacctaggaaatctcctaagttggaaaaataaactccttcaaatggtctccccaccggtcgagggcatcctaaacctataaagacgctcatcgaaccctacaggcctaagactggcatactcaccaacagaagggacataatgaactgctaaaggagacttaccaccggagccggaagtgccggcaccaggagccccagtgttcggctcctgagccgaaggctgtggcctgggagcccttctctccgctgagtccccaatatgaaggggcttcccggcgatcgcctggcttcttctctcgaccgggctccccacgcgaagtggcctcccagaagctgcctgagccttagagtatgccttttcctaagccttctggtagagatagtcctggtacttcttctcggcagtggcgatgatctcatctcggaaggtcttcttctcggcagtggcgatgttgcccctaatttttcccaatatacgtggaccaaccaaa

SEQ ID NO: 290649 - DNA, 325 bp, Cannabis indica
tttgttcacgattatagtgtcgtcaacacagtggaatataatcatgattatatgttcaaaagtttaattcccatgatttgtcagttcactgaatttagactaacatgataatcaacgataggtatacttacacattggataagtgttatgtcctttctagggcattagcaaagtttaccagtatcgaaggtataaagtatacattggaagggaccgatattgatcttagataagatatcataaacttacagttatatcattctaagtcaatatcaatggttaatcttaggtctatggatgttaatcctgacatgaatagattcga

SEQ ID NO: 290650 - DNA, 726 bp, Cannabis indica
gattctttctattttgtagtccgtgaactcgtggagcagctcccggactattgttacatatgcggccattcgctcgccgcgtgtttggtactctcccgatatctgatttacgaccagctgggaatcactgtagacttccactcttttggctcctacggcttttgctaatttcagccctgctattagggcttcatattcggcctcattgttcgaagctgggaagtcgaaccgtagggccgcctggagtcgtagtccggtcggggatatcattgccactcctgctccggacccattttcattggaggctccgtccacaaacactctccatgtggggaccgatggtactggcatatttgcggttgcctcggcttcgttgcattcggtaatgaagtctgccaaggcttggccttttatggagattcggggaatgtagtgtaagtcgaattgacttaactccattgcccacttgaggagccttccggatgcttcaggtttttggaggacttgccggagcgggtggttggttagcaccttgatcggatgtgcttggaagtatggcctcaattttctcgaggccattaggaggcaaaagaccaacttttcgatgatggggtacctcgtttctgctcctatcatgcgcttgctaacatagtacacgggatgttgagttttctcttcttcccggactagggcagcgctgaccgcgtgctcggagacagccaagta

SEQ ID NO: 290651 - DNA, 576 bp, Cannabis indica
caccattctagcaaccttttattcgatcaaaataagaatccaacgttgtcccggtaggcgagagtcaaggttattcttattttatgagcttccaccattgtttcatacttcataaatttatctctaagtagtcaccgtaggggagagtctaatagagacgaaaacttacaaaatacttatcataagagatcgttacggtgttaaatgcttcaacgaataaccatccattagggggacgaagtctagcgtctcgaggttatattgaaaacaattaaccatgtaggaccaacaatggagatcgaatatccttataactaaagctcattattttaaagagttgtattttcatttgatacttattttaatctatttattttaacatatatttatttaattaaaattactaatttagataactctaaacataaattttaatttaatatttataaaattatacctaggagatctgaaaaataaaaaaaaaaatattttccatccttagtattaattttccaataaatattccgaaaattacttaaattaagttggtctaaaattaattaaattaatttttaa

SEQ ID NO: 290652 - DNA, 604 bp, Cannabis indica
ctgggctaatactcctgctgcaccccccggtgttccctggggcacaacccctgtcgcctggcccggattgaggtgaggcagcctattcttgatccactcatagaggtggcccaatcggatcaggttttcaatctcgtccttgagattcttgcattcattggtgctatgaccaatgtcgttgtggtactcgcatcttttgcttggatccctctgggagctgtctttgtacaaaggatgcggtctccggtagtgcgtattttgcctagtagcaaagtacacacgctcttgggagtccgtcagctccgtgtactgggtgtactggggagtgtacccccttttctggcgcttcttccccgtccgggtgctgcctttggaggatctcttactcctcgagccctgggacgggcctgccaggctagcggttggagcggagtgcgagggagcttgtccattcatccctgagggatttccaaaatgggatgatgcgggcgccaaagcctggccctgactatacccgggggtggcagagaactgtatgccgcttatcggcggagccgcggtcggggcagtacccgagggcggtactccgggcatgtaccctgct

SEQ ID NO: 290653 - DNA, 621 bp, Cannabis indica
tcgcatcactctccataaaggtgatgtcgtcacattccttcttaaacagcttctcgggccgctcactaagattattcacattggtaagtcgcttctccttggcttctctggcatatcgctcttgtgacttgcgagagtctcctgcgatatgaggtcctccaataatagttaggatgttgcgaggtgttctggagccactcgcattctggttttctcctttgtcatccgcttggggacgactttcctcgctcttcttatacttgtcgaacctccctctccggattagctcctcgattttatcctgcaagacccaacattctaaggtagtgtgaccaatgtccttttggtacttacagaattttttagggtctctcctgtcgcgatttcccctaatggggcgcggcttctggaagactccgtttctttcttcgattgcgtagatatggtctcgggaactgcgagttcagtatagttgacgaaacgaggtccacctttccttttcgccgaggattccttctttggaggagacttggccaacttcggactttgctgtctccgcgggctgcgtctccttgggcttcgtcccctggagttcttccctcggggactgcgagatcgtga

SEQ ID NO: 290654 - DNA, 642 bp, Cannabis indica
agttcaagtcctggtctgagtttgggttcgtgtccggatttcagtctaggtttagataaggctccgggtgtgggttcgcgtcttgggccttgctctaggttgcctccgagcctaaaggtccgatcccgatatgagtctggattcagttatcggtctaagtccttggttctgatccttgtctgggttcaagtttgggtccgggtctgggtctagctttgggtctgattctaggtgtgggtttgagtttgggtccgagtctgtgtccgagtttgtgtcaaggtctggaccccgatctaggtctaggttcgggtctaggtccaagttggggtccctagtgcgggtccaagtttttgtctggatcaggatctcggtctagatctaggtcaagcatttcgatcccagtctcagtcttggtcctagtccaggttcgtttccggatccctatataggtccaagtctgtgtttgggatcgtgtcccagatttaggtcaaggtccgagtctcaatcccggtctgggtacacgaccgtgtccgggctcgagttctaatctcagtttgggttcgaggctaggtttgtgttcggttctaggtttgggtctaggtcctggtcacgggtcctagtctttttctagggtcctggttc

SEQ ID NO: 290655 - DNA, 688 bp, Cannabis indica
aatggtcattttgccccattgttagtttgtcctttagtggactttatttggttaaattaaatgttatttgatgttaatattggctgaagtaaatgggttatgttgcatttattttcattttcccaaacttagaaaaaattagaaaattttcaaaggaaagctctctctcttttcctctctctttcggcctccttgtgcagcaaggattcttgccatttttcttggatttcaagctcttttagcaaggttttgtgacctcttgttgttggtatgtttcctctagcttccttttaagttttcttgaagaattttgatgaaaaatggtgtaatgcatgcttagtttaggttgttgttgttgctgtgattttgttgttgtttgcagagatttatacatgtttatttgagttgaattaagctgcttgtgatgcatgatagttaggttgatttgagttatggaatttttagttcaaaagcttaagttttcaaagaaaaattggaaatttgttgctgtgattattgcatgagcttgtatttgttttctgcagctttagtaagcatgtttaagtagttttggtatgatttgaatgcatgataggttgcttagtcaagttttgagttttagaactcaatcttgaacctttaatggtgaaatgagtttttgtggttgaagctcggttttgatgcttta

SEQ ID NO: 290656 - DNA, 546 bp, Cannabis indica
aagaacaactgtccacagctacaaaagcccgaggctaagaaagaaagtcctgtggttcctgctagggtgtttgctttgacccaagcagatgctgaagctggcccttcgactgttacaggtgagatatctattggtggtattatgtttactattttgattgattctggtgccacacattcatatatttctagtagaatcattgagaaattgagtaggccatgtgatatcatgtctagtggatttggtaccttgttacctactggagaagtggtaatctccaggaggtgggtaaggtctctcccagtgttagtagaagggagagaattgtcagtggatctgattgaattagacttagaagattttgatgcaatcctgggaatggattggttgactaagtacaatgctactatagattgtaagagaaaaatggtgacttttgaaccagagggtgagattccatttgtttttatgggaaaggtgcagggatctcggattcctttgatatcggcacttaggaccagggaattattacgagaaggatgtatg

SEQ ID NO: 290657 - DNA, 514 bp, Cannabis indica
gtaatatcacactgaagtttcatttagaaggaactaaggaggcgtttggttgggaggaatgaaaatataggaataggaatgggaatgggaataggaataggaatggaatggaataaaatttaaaatgcataaaaaaaaattgaataaaaaaataatttaatttttttttcttgttacattggaatggtcattcctttctttttaaaatggaatagccattccaccaaaatggtggaaagagcattccattggaatgccattccaatactttaaaatgcaaccaaacaaaggaatggaatgaaaattgtttcctttccattccattccatttcattacctccaaccaaacgccacctaagtactataaggataaaataatttaagggatagaacagtaaaaatagtatctcacatatgtagatcacctatagagaattgagtgattgttggtggttataattatggataacctatctctataggctgcatagtattctcaaactttaagagtgtg

SEQ ID NO: 290658 - DNA, 626 bp, Cannabis indica
ctcccttgagcaagtggagactgaaaaaaggaaagttagaagactctgtcaaaaacctcaaccgacttcttgatgaaaaggagaatgagatttacaaactcacagctgatctaatccgaaccaaacaagcgttacagttcattcccccaggcactgctgccaccaatcaaaccctacagcttcagaagccctacggtgatcgaacttcattaggatataagatgctttacaagcaagggaatgaattgtctgttgagcattccttaccctccaatgtcaattcatcaaagaaggaagatgggtctcctgacacctcagtcaccattaatgaatctgactcatctgagaggagacaggttccaactggacccaccaaactcaaatttgaaggaaggaggactgatgctgacaactttccacagaatgacaatttcattcctacatgtcatttctgtaataggagaggtcacatccgtcctaagtgttacaaattgcagaactacttgaaagccatgatcaatcgaccaaatagtttccctcctccaaataagtcacatggacgcaaacctcgtcgagaatggaaaataaagtccaaaccaaattctgatgttggtttggttgcaaag

SEQ ID NO: 290659 - DNA, 696 bp, Cannabis indica
attggaaagggattaagcacatactccgctatctctagggtactattgataaaggattattctattctaataattgtgggtcacaacttattggctacgtagatgcaggatatttatctgatccacataaagccagatatcaaactggctatttgttcacttgcggtgacactgctatatcctggcagtcaacgaagcaaactctggtggctacttcctcaaatcatgctaagatacttgcaattcacgaggcaagtcgagaatgtgtttggttaagatcaatgacacaacatattcgaggaacatgtggattaacatctaataaagaagtaccaataattctctgtgaaaataatgctgcttgcattggtcaacttaaaggagggtacattaaaggagacagaactaaatatatttcaccaaaattcttctttacacacaatcgtcaagaaaatggtgatatacgatagttcaaacaaattcgaatcaaagtagataatcttacagacttattcacgaagtcattaccaacatcaacttttgagaagatggttcacaagatcggaatgcgtcgattaaaggatctccatgaatgcccaaatgaggggggagtaatttcatactgcactcttttttccttgaccaagttttgtctcactgggttttctcggcgaggtttaatgaggcagttattat

SEQ ID NO: 290660 - DNA, 493 bp, Cannabis indica
tcagcttcaatttcctcaaataagtcatcaaaatgagggtttgtggttggttgttcatcttctccttgtacatcctctgttgttgggggaaagaagtcttctagaataggaatcatttcatcctctgattcaacatcggcaactgctacatcatcgacaacatcctcaggctcgccgtgataaatccacttctcatatccttgcatgaaacctcgatcaaatacgtgtgctctaaccctatctattttttcaaacctactatttatacatctcacacaaggacatcgaattcttccatcacaatccttatgttctgatgccattgctaaaaaggcttgtagaccattccaaaattcatggcaaccacgatttctgattttggtccaagacttatcaattgtcgccatctacaatttaggcgacaaataaagtgttacaaatttgaataatttgtaaagtgttatgaaatataacaaagctatggtatatattt

SEQ ID NO: 290661 - DNA, 493 bp, Cannabis indica
aaactagtttaattaccctattatagttattcaaatcaggcaaatgagccttcacaattggggttgttcatgtgagggagggttgggttccatatgtcgtacccactactaatggccccctaactctcacacaaggcccaaaggagaggaatttaaccttaatttaaacaactgttattaattgaataggctcaaatattaattgggcctatataaaatttatcaatagtgatcattttatttagcaacctagtccattttaattacaaaaattaaatgggctccctttatacatctaagtccaaagcaaacatataggctcacacaggcacactgatttggatggatcctatcatgttactaggattatacacagataaaagaagattgcaaaatttacctgttataaattatttatttgacctattgacaattgaaccattgattaaaataagatcattggatctgtcaacaagttaaccatggcaattta

SEQ ID NO: 290662 - DNA, 742 bp, Cannabis indica
gcttttgccataatggctctaatggaagcttgtttcaccacaggtgcaaatatatcattgaaatcgacaccttctctctgagtgaatccctttgccacaagccttgccttgaatcttactgaattttcattaactccctctttctgtctaaacagccacttgctatcgatcaatctttgccctggtggtctgttcacaacagaccatgttttgtttctgatcaatgatactttttcttcattgattgccctcaaccagtgttccctgtttttgcatttcagtgcctccttgtatgtagtgggttcagaattttcgagttcactggcagcagctagagcaaatgcagagaaatctgcataaccaagtcttgaaggaggtctgatgtctcttctttccctatctctggccaggagatagtcatcaagatctccttgtgtttcaagagattgttcttcaagctcttgagcttgattctcatctgcttctgtgtctttgtctgtgcagtgtgactgatccacctcaagattgactctgctatatggctcttctgtctgcagagttgggtttggtaatggtttcatggccatttcttcttctctgaaagtgacatctctgctgatgatacaccttttgaatcctgattcaagacaccaaagtttgtatcccttaacaccttcaggatatcccaagaacatacacttcactgccctgggcttcagtttgtcttgcctcacatgagcat

SEQ ID NO: 290663 - DNA, 499 bp, Cannabis indica
aacggcgcggggacgggggttattttttgtcgtcgaatgttaaacggggcgaggacgagtatcacactccccgccccgatgggaacctatttagtattttatcttatatttctagtaatattttataatttataatttatgtttgcatttttttagtatattagtatcttttttatgaattttaagttgtgttttgaataataattagtttattgagtaataattaatgtgtaatatttttattttttattatagtgtaatatttttgtatattaaaaattttattataaactttatttttctattatggaattcaccgccccgtccccgcccccattaggggattccccgccccaaccccgatggagaataagcggagatggagattaaaatccttaacggggatgggaacgggggggagcactccgcgccaattccccgccccatgtgcatcactagttgtgagtgctcttacatcaataaaatatatataatatat

SEQ ID NO: 290664 - DNA, 495 bp, Cannabis indica
tttcgtttatccgaatccctcaaatataaaggtacttctaacccgttagattacttagaaaggtacttctaacacatttctaggccacaatgacgtataggccaccctatacgactttggccaacatcaaacaagaacctggtgagtctttacaagattatttcaagcgttttaacgcagaagtaacaaaggtcgagaaggcccccgagtcttcgcttgtttgcatgttaattacaggtatcttgccaagaaccgacttctggaaggaactacaagcccgaaggccggaatccttagtagagttcttcgccatggccgaacctcacaagagaatcgagaactctctggcagagttagagaagggcaagaacaaacgacgatcacccataccgcggtcgcgctctcgcagtccgcgagggaagaattccaggggccgaagcccaagaagacgcagcccgcgcagaccgcgaagcccgaagttggctaagtcacccc

SEQ ID NO: 290665 - DNA, 458 bp, Cannabis indica
tattcaattttataataattttcttcagaaccttcaccggaaatgtcaatcagttgaccaaaaccctaaattaaccttttaatccatttatgatggagttgtttgtacatgtagggagttacatttatacattatatagagttttgaaaattctctgtataacctaatattacaactaaaataaattcttaattatttttcttttcaaaaaaaaaaaaagcaaaactaaataaagagccacaaaaaacaaaaaaaaggatagtttggtaatatcccaaaaaaaaaaaaaggggagttctatttacaccccacaaaatgataagtacaccctattattaaaaaaaatataaacttaaataatttttaaaaattactcttaatatttttttaaaattttttctaacattattttatgttaatttcaatacttattttgattttattttcataattttttc

SEQ ID NO: 290666 - DNA, 459 bp, Cannabis indica
ttgactaattaattcattttctaataataatatattttaattcatttattataattaatcatttaatgaaaaattattgatttaagttggttcaaaattaattaaaaaataattaattttcaagtttaatctatttttcaaaaaaatcaaaattttctgcatttaaataaaaaatgcaatttacgaaaaaaaaaagattaataaaataaaaataaaatatatattgaaaattattcaaatttcaaattgttctgaaattaaaatttccaacttaaaataattttctatttaattaaatattctaaaaataataatatttaagtatcaagaatgaaatcaacttaaatatttaattttcaatttaattaaatgtattaataacaagaattaaatttaatttacaacttaaaatatttttctaattaaatattagaaaatataattagtactagacataac

SEQ ID NO: 290667 - DNA, 787 bp, Cannabis indica
aagttattattatttacttatttctacgtaggtaattgaagaacttaattatgcacaattagttgtaatttttctaaatgaatgcaaaacacacttttttacatttttttaatcttcgtcaagtatttcatataaaaagtattttcttaaaagtattttattgtaatttttatttaaatatatttaaaataattaaagataatttcttagtcacccttataattttttttttaaatgtaaagcaacacatatcgttgcattttttcaaaatttctcaaatattgaaaattttataaaaaataatccttaaaagttctttaacaaataaaaaaaaattagattttttttattttaaattattaattttagttgaatatatataatattattatatacaaaaaattattccattttttattttgaaataaaatgaaaatagcaaacacatgatttgttaatatatacacacatctaaatattactagatgaaagttatgtgacgagccacgtaaatattagttttatttaagttttagtgaatttttttaaaaaattcgataactaattttaaattattttttaaaagatttgttttataaaagtaaacttgttaagaatgccataattgtatatataaacctatgatgtacacattgttattaataatactaaaaaattagtaatattagaaattaaaataaataacctatataaaattgaaaaattgtaagaaaaaagaatgactaacatgttaaattagaagaaaaattcttttaaagaagaagaa

SEQ ID NO: 290668 - DNA, 497 bp, Cannabis indica
aaactagttttttgcctcctaattgccttgagaaagttgagaccctacttccaggctcacccaatcaaggtgttgaccaaccaaccactccggcaggtcctgcaaaagccagaggcgtccggaaggctcctcaaatgggcaatggagttaagtcaatttgacttacactacgttccccgtatttccataaagggacaagcgctagcagacttcatcaccgaatgtaatgaagccaaagcaaccgcgaacataccaacaccatcggtccaagcgttgaaagtatttgtggatggagcctccaacgagaatggatccggagcgggggttgcaatgatatctccaagtggacttcgactccaagctgccttatgatttgtcttctcggcttcaaacaatgaggccgagtacgaagctttgatagcagggcagagattagcaaagactgtgggggctaaaagagtagaggtctacagtgactcccaactggtagtgaacca

SEQ ID NO: 290669 - DNA, 904 bp, Cannabis indica
gagacatgcaactttagtacttatggagccagaaagctttgaagtagctcagaaacaagaagtatggagagaagctatgaatgaagagataaagatgatagaaaagaatgagaattggaagcttgtagatcgtccacaagacaaagatactataggagtcaagtgggtctacaagacaaagctcaacgcagatggctctatccaaaagcacaaagcaagattagttgcaaaaggatactcacaacaatacggagtcgactacaacgaaacatttgctccagttgcacgccttgacactattaggctttaatagctctagctgcacaaaagaaatggaaggtttttcaactcgatgtgaagtcggcattcttaaatggttatcttgaagaagaaatttatgtggagcaacctcaagggtttgtggcacaaggacaagaagataaagtccttagattgaaaaaggctttatatggcctaaagcaagctccgcgagcctggtatagcagaatggacagctactttaccgagcaaggatttaggaggagcaagagtgagccaactctttacatcaaaactcaaggtacgaatgatactctaattgtctctttatacgtttatgatcacatctacacgggcaataatgagaagttgataaagaagtttaaagaagacatgatgaaaaatttttagatgaccgacctgggattaatgcactactttctcgagatcgaaataactcaaaaagaagatgggatcttcatctcacaaaagaagtatacagagacactattgaagaaattcaaaatggagggatgcaagactgtatcaactccattagacaacaacaaagctctcaagaaagaagatagctcaccgaaagctgatgaatcaaaatttcgaagtc

SEQ ID NO: 290670 - DNA, 628 bp, Cannabis indica
ttggccagccattccggatagtacacgtcgcggatcatgccattggacaaaagtttgtccacctctttctctaaggcctcggctttcaccgagtcgagcgggcgtctcttttgctgtacagggggcatgtccgggttgacattgagtacatgggtgatgacatgagggctgatgccggtcatgtcttcttggcgccatgcaaagatgtcgatggcgcccttcagtgtttttattattttatctttttcctccggatccaggctcttccctatccggagtactttggtggagtcgtcgtcgcacactggtatttcttcgacgtcctccattggttccacgaccctttcggatcctatgcgaggatccaactcatcctcttcagccttctctatctcaggggactcccggaccatgagtacaggtaggtgggtggcaacattgtaacattgcctggcttctccttgatttcccctcacagttccgactccggcttcctgggtagggaattttaggcacaggtgtcggattgaagtaattgcaccaaagtccactagggccggtcggcctaggatcgcgttgtaggctgttggacagtctaccaccacgaaggtgcaatatttaaatgtgc

SEQ ID NO: 290671 - DNA, 600 bp, Cannabis indica
acaagaatcgccgaaccaggaccctagaacaagactaggaccgtgaccaggatacagacccaaacctagagccgaacaaaggcctagcctcagacccaaactgagactgggacttgtgcccggacacggtcgtgtaccaagaccagaactgagacccggacctggacctaaatttgagaccccatcccacacacagacttggacctagatagaaatccggatacaaacctggactcagacgaagacccagattgggatcgaaatgctggacctagatctggacagagatcctgacccagacccaaacttggacccgcactcgggacccgaacctagacccagatcatggtccagacctagacacaaactcggacacagactcggacccgaactcaaacacccacacctagaatcagacccaaagctagacccggacactgacccaaactcgaacccagaccaggatcagaaccaaggacttagacccagaaatgaatccagactcagatcgggattggaacttgggacatggacccaacctagaccaagacccaggacgcaaacccacacccggagcctgatcttgacctagactgaaat

SEQ ID NO: 290672 - DNA, 605 bp, Cannabis indica
caaccgttattatggctcttttatttggatgcttggctctgccaagcgttccacgggtactacccccagtccttcaatttcactgtctgaagctaacttagccagacagtccgcgtgagcgttcttttcccaggggattctttctactttgtagtctgtgaactcgtggagcagctcccggatccgttttcattggaggctccgtccacgaatactttccatgtggggaccgatggtaccgggacgttcgcggttgcctcggcttcattacattcggcgatgaagttcgccaacgcttgtccctttatggagatgcggggtatgtagtgtaagtcgaattgacttaactccatagcccatttgaggagccttccggatgcctctggcttttgtaggacttgccggagtgggtgattggtcagcaccttaattgggtgcgcttgaaagtacggccttaattttcttgaggccattaggaggaagaaaactaatttttcaatgatggggtaccgtgtccctatcatgcgcttgctgacgtagtatatgggatgttgagttttctcttcttctcggactagggcagcactgaccgcatgctcggagac

SEQ ID NO: 290673 - DNA, 723 bp, Cannabis indica
tttgtcgccaatattggcggagacaatgtccaccgtatactcgtggacaacggatgttcagtgaatctcttaaacttcgaagcctttaaacaaatggggttgcatgagaaggatctgcggcctgtaacgtcgagtatatacggttttatcggggacatcatcgcactgaaagggatgattaaactcccaattaccttgggaaccgcccccgtaacagccaagtcaatggctgacttcgcggtaattgactagtattcggcatacaatgccgtgattggtcgacaaatcttgaaggagatgaagatcgtaacatcgatctgtcatctcacaatgaagttccctattcccgctggagtaggctctgtgcgaggaatccagtcacactcgcgagaatgctacaatgcagcggtcaagctcacgaagaagaagtcaataaatgtcatctatttattggaggcaccacctcctcgccaggaggtccttgggatcgaagaggttccgcacacggatggaccagatctggatccaaggatcctcgatcatgccgcagcggcccaagccgtggaagacactattgaggtacctatagaccccatagataatagtaaagttttgaaaattggttctaaattgacttttcagcagcgagaacaactaatgacttttctcaaacaatatcttgatgtttttggcttggaaacattcagatatggtcggaatatc

SEQ ID NO: 290674 - DNA, 502 bp, Cannabis indica
cttcaccgagccgaaggcttcatcaagctcgaagaagccattcaacaagcagaaggtgagcaaaagcaaggcaaaaagaaggctccttccactagaacatccaaccaacttcccaattattccagcaattcaagtggcaagcgttcaaacaacaaccacaagcaaggaaacgggaagaaaggaaagttcaccgagaaatccagacagactccccgtgatcatgccaaacacactgcattcactattctaactgaagatatagagagtatgtatatggaaactcaatcattaattccgtacaagaagcccgggcccatgaagaaagataccaacaaaagcgacatgaaaaaattttgtcagttccatggagactacggccacgataccaacgaatgttacaacccgaagcgggaaataaaatatctgatcaagaaaacaacccgcacttacagaagtatgtcaaggccaaccaaggtcataacaaccaggatctgttacctcc

SEQ ID NO: 290675 - DNA, 554 bp, Cannabis indica
ataactgaaattggacctagatccaaaaccataaccggacaaggacccgaactccaaatcagacctagacgcgaattaggagccggacccggatcccaacccaaacctggacttgggacccaaacccgaacctgaacttagacccaaaaatggaaccaaagtagggtcacagaaccagggttgggacctagaaccgcaccccagtctcgattccaaaccaaaacacagaaatgggacctatgacgtgaactaaaacaagatcgagacccgttaccgttatctagatcttgactcgcgattcgggtaacggcgccttgaacagaccaatagtcggtgtctagatatgggactcagactaggacaagaacccaaacgaagaaccaaaccggaacccaaacctagacatgggaccaaaaatcagaacctgaacaagaatcgccgaactaggacccaagaacaagactaggaccgtgaccaagacccggacccaaacctagaaccgaacacagacgtagcctcagacccaaactgagactagaactcgggcccggacg

SEQ ID NO: 290676 - DNA, 357 bp, Cannabis indica
tttcagttgacagtttactccatgttatgtccccggccgaatgagattgagtttgtgagttacatcactgggggtcagccgcctttatttgttgacttggaggaacttgtgttgggtgaggatgggcaacctacacaggatgctttgcaaagtcaggccgaaaagcttgcctccacattggaagaacgagcggacgcagcccgaatatttagagactctacaccacctccatcgtctccactgttggaaatattttaccaggatctagatttactaccatgtatgttttattaacatcctaaagagcatcaccaagatctgaacttggatctctttctctccttcctttgatgttga

SEQ ID NO: 290677 - DNA, 406 bp, Cannabis indica
atgttgtatttgttccaattcttaaaataatagcaccaagaacatctttgacctggaaaaacaaatattacaaaattaagaataactaacacttgaaggaacattctcactaccaagaagaaatcttagatatatattacaaatattacaaaattaagaataactaacacttgaaggaacattctcactaccaagaagaaatcttagatatatattacaaatattacaaaattaagaataactaacactagaaatcttacatatggaatcaaaaacagagcaaaatcaaaattaatgtgtacaagtattataaagccaccgtcactcaaaatagcacaacaaaagtaacaaagaagtattaaaggtgtaaattttaccaaaagcaatgagaattaacaactgatga

SEQ ID NO: 290678 - DNA, 1100 bp, Cannabis indica
aaaaggggaaagaaagtggtccaaaaaaacaacaatggggtgaaaaggtcctatgtagaattcccaatttgccccacatgcaatagaaaacatcttggggagtgtaagatgaagtcaggggtgtgctacaattgcggcagccaggccatctgaagaaaaattgcccaaagggacaaaagaaggagaaccaagccgctcctgctcgagtgtttgctctcaccagaggagaagcggccacaagcaacactgttgtctcaggtcaggtttctatttacggattgccttgtaatgttctctttgattctggagctactcattcttatatagctactaggttaattgatagtatagataagccatgtgacctacttagatgtggtattgtgacggaattaccctcgggagaaaccatgctatcaacaagaagaatgcgagatgtacctatcataatcgaaagcaaagaactcatgggcgacctaatagagctggaaatgaaggaatatgatgttatacttgggatggattggctatctagtcacggtgcgacaatcaattgccgaaagaaactgatcgtttttgaaacaaaggctggggatcggtttattttcaagggcgacaagctagcccttaggactccattaatctcttccctaaaagctagtcagctaatgaaggcgggatgcatggcattcttggccagcgtagtggatcgagcaatagagacgcaactaaatgtggagaatgtgcacatagtctgtgaatttccagaggtctttccagaagatctaccgggactacctccagacagagaggtggagttcatcatcgaattagccccagggactaatccaatttcaaaggctccatacagaatggcacctaatgagttaaaagagcttaaaatacaactacaggagctcttagacaaagggttcattagaccgagttactcaccttggggtgcgccggtactcttcgtcaagaagaaagatggaagtatgaggatgtgcgtggactaccgtgagctcaacaaggtgaccatcaagaataagtaccctctgccaaggattgacgatctctttgatcaattgcaaggctcg

SEQ ID NO: 290679 - DNA, 100 bp, Cannabis indica
gagagagagaggtttcagctagggtagcgagaagaggcttgaaatttttactgaaggaatgagatgcatcaccttttccctaacccatcactacctattt

SEQ ID NO: 290680 - DNA, 502 bp, Cannabis indica
gttttatgacgtggcatcatcaaatgcaacaaaagtaatgattacagccgtcatttttcgaaaccctcgaagggacaaccaaaggtcacctcctcgtgacaacctttcacctgtctctcgagtaatagtttccctttgtgaccacacctgtcacatcacaaaactaggggcatgtgttatagtgagatttctctcacctagaaactcgagaccagacccctatttagaggacacacataatcagatttcccaaagaaagctgagatgtccttgagggactcctcgaagttttaaacctcgcttaagatagaacaagcgagaggtagcgagcataaccaaagtctaaacgcatccgagacaagagagtagatcgcatatatcaaactatatgcgagcatccaccccgtgtccgtgtataaaccaggagaacaattctctgtaaatacggatgatctaagaaccctgcagcctttataatgcaatatagactcgcatgtctagg

SEQ ID NO: 290681 - DNA, 622 bp, Cannabis indica
cgtagacctacgtgttgctctcacacgtctatatacgataaggccttagtagggtttacctcggttttgcttaccgagcctaacctggttatgccttgctcgcataaccctattcttatatatatacgtaatccatacattacgttctttcaatggtttatcctggtgatatataccaggtctaacccagttatgtctcattcacataacttataacatacatgcgtgtattcaacatttactacaacatatataatcttagggtaataaccctaacttacaaacaagtaatcactcatataatacacttctatatactcagataacatttactaagaatgttaaccctaactcatgctttcactggattcttaatattctagggtaataaccctagatcgcattaaaattaactcaaggtaccaacttaccgagtctagcttaattatgccttaagcgcataattcataatctcaatatatacatttatccaacatggcatagtatttatacacatatatcactagggtaataaccctaggctattaaaccgttcctattagggtaataaccctaatcccggttactaaacattcatgcatatcatattcacataagcgcc

SEQ ID NO: 290682 - DNA, 557 bp, Cannabis indica
ggagtaaccgataaaggttaagatatcaaatgtaacaaaagttatacataggtgggggattcttccatccaagaaagttcattgctatcctaagggcatgcttagccaatctatgagcctcaacattaaagttgcggctaacatgagagagatgccccaggaaaactagacaataagactttaatatcataaagataacccccagttcatttaaatacactgtctgaccctccaaagctgagactaaagaaagtgaatcagaaaaaaccctctccacgggaagtcccacatcttgagcccaacgcaaacctactagtaaagcaactgcttctgcctggaaaactgaaaaagaacctgcaaatgagatagttaaaccaataagtacttttaattttaaaactcaaaaattttagaatataactgtaatagagtcaaaaaccaaagggaaacccctttggtttgactctttacctaacttcttagcatgataacataatagtataaatttaaataatcccccacgctaaagcagaccatatatctattttgaaaaaaca

SEQ ID NO: 290683 - DNA, 744 bp, Cannabis indica
gtttggagagtttatgctgtggttctttttgagttagtgaaagccctatagattttagaatttttgcttaaatgtttgcacagtgtgatgaagattttgagttaaattttttaaatttagttttgagcctgggagatctcggtcagtgtcgtgttgggttgaaggctgaaatggtggatagttgatttcatcttgttgtttgttattgattttgttcttttttgggtgagctgatataatgggatatactgttaattttgttataggtttgttttatattgattttgttctattttgtgccattatttatggctttggcgccttacaaggctttagcacctattatatggttgggcccctaattatttagggtagtttgtttaaattttcacgtttttcggtattgaatgtataagaaaattttgacagaataatattttaaagttaaagttatgcactatacagatttattagtcggaataaaaggattattttggttaaggtatgattgcttcagatatatttgggaagtcaaattactatagaattttggtttgttatcaatattatggaaatgtaccaaaattattacattatttgtatttttaaataatttctggatgagtggtattagcttttttgatggaagaaatggaaatacaaatttgatggatgagctgcgccattattatggctttggtgcctttcaaggttttcgcgtctgatttatggctggcccctaat

SEQ ID NO: 290684 - DNA, 539 bp, Cannabis indica
ctttattattgttgtgtaacaaaattagtccttgatgaagaaaccactttcttggtgcagaaaccagtttcttgatgaaaaaaaccactttctttgtgatttttctaatgattttgctggcgacaatgccaattctgacgactttttttacgccggcaataacttcggcgatttttccaacaccaggaactactccggcaactttttcggcaccgacatcaaactctagaatagtcgtcggacttggcattgtcactggtaaaattaccggaaaaattaccaagaaaccggtttctaacatcaagaaactagtttcttggtgatttttccagtgacaatgctaattctgacgactttttcggcgccagcaacaactccgacgacttttccggcactagtgggtactccgacgacttttctggtaacggcagtaaactccgatgacttttccggcacgagtgacaacttcgacaatcactatagttttatttattttatttttttcaaaaaataaatatgaaggtaattttaatattttt

SEQ ID NO: 290685 - DNA, 561 bp, Cannabis indica
ttacagtataaatttatagttgttttgtgactataataatcatttatggtctcacaatataaattcattattttgttaattaattttttgtaaagttattaataaaaattaagtaatttacgtcataaatatttaagtttaacttttaattgtaaaaaaatacttaagttaattttaagttataattgaataactgactgttaaatgttaaagtaaattattatatagcaattagaagttcaagtcattaaatttttatttttttaaaaaaataatttaaatatactaataaaaatatgactgaataataaattaatttatttataaaaagattatgtatgttgcaaattacttaagaaaaaaggggtatttaggtaattttcattttgatcgcattgtcattgttaatgggaaatttgataatccatgctaaaaaattagacatggtgtttaattatacccaattataacacatagaaaaaatataccaatctttcaattttcttccaaaaatacccccatcatttcaattcccccccatctctctaacttccctctctc

SEQ ID NO: 290686 - DNA, 795 bp, Cannabis indica
ttggcattttatttgatgagtgataatctaaaattattgtaaattatttatgcataaaatgacttatttacccttgcgagggtgtaggtgtgaatattaagccatgggggtaaaatggtcatttgaccataattgatttacatggaattaaatggattttgagggaaatgaatttatttttctggttgtttcatgctctcacccgaaccctctccctctcttaccctctttgtattcaacttggattttggaaggaaaaacttggttttggcttgatttggagctagagtttggaggaagattattgttcttgctttggtgtgaattgaggtagtttttacagattttctaattgagtttcttgctgaattttatggtgataagagcatgtcttgagttgtgttcttcttgtgattgcatgttcttaggtgttattgtgattttgatgaattgagtgtatgattgcatgatttggttgagaattttattgttgagcatggattttgactatagggtattttctagaattgattcatgtgtttttggggtatttccatggctgaaaatgggttgagttgctggaaatgaactcttgttcaagagcttaatatagccatgattgtgcatgaattcttgagggtttgttgctggattttgatgcttgatgctgtgttttaaatccttagtatttgctagctgctgtaagaggtaaattgagaatttggttgtgaaaagcaagcttgagttcatggtgctttaatgatacttttttattcttagtgaaattattgtgtt

SEQ ID NO: 290687 - DNA, 440 bp, Cannabis indica
ataattaggataattattatttgtttataattttattcttaaaataaataaaataataattccctaaccatatctattttaaaattggtttattttattattttaattttattaaattataagattagaaaatgatattgaaaatatctatttggttattttcaaatcatttatcttattagatattcaatttaatttgataaaataattcaaataaacctagatattttaaaattaatttgaatttaaattttgaaaagatattttaggttatttttaacaaccctaaattttcaaaatatttggttagttaaataataatttaattatataagaactaaatatcttatttcacattgttacatggatattgtgtttgttttatttaattgtttattcaatattttttttacaaatctattattcatctgatctaaatt

SEQ ID NO: 290688 - DNA, 789 bp, Cannabis indica
tcagagacaatagccctccgtctcaacggaagttccctcaagttatagaacttgattgaacatccgttcggtttcaatcgtggtattttatatatatatatagtgtacttttgttacaactcatctcatatggccgttgaatcaactttttgttaggccatttaatgagattgaagcacttacctccattatatatatagttgtatgtaactctactatattattttaagtctattttctttctgtttgcagttgtgatttcacaatgattcacttcacttttaattccacaattaattaatgaggaaagtgacattaatactccaaaataaaccaaagtacagatttcataacaaatactgatagtacattatagcatcaaaatataaaataacataacttggacactaacacagtgcatcatttactgtttttgggagaagtatccactcctcctttgtccccaacttctatatcatctccatttcggtcctcacctttgtcagtcgaatctttcacattgtcctgttcgggtgatttatttgcaccagagcattcaccctcatcaaacagtgagcaaacagaattaaggatagcctcttcatcattatcatcatcagaatcccacatgcagggaaactcattaacacagcaaagttctctaacttgctgcccagtgaagcattgtcccgtctctccatgtagacataaagcagagaaagcttctatgaaagattcataacgaattatttttatggacgcatcagaagtagtgtttttgcttacagc

SEQ ID NO: 290689 - DNA, 708 bp, Cannabis indica
gcataaaacccaacaataaataccccctcaaagctcattaatgggggtcgagaattttgggttgcataagtgcaagaagagtaaatactcaccaagaacattctctgtattaaatacactcataaatatacagactcgtggactaaggctcattaacgcccaaccacgtaaaaatccctctcttaatttcttacagctctttaaactcttattattttattggttgccgaaaacctcggtcaacattttggtgctttcattgagagttgaagaaagcttctgtaaacacacaatacattacaacaatggtggagactcgaagcactcgtcaacctcgccctcttgaagatgctcaagacccgaatgaggaagacgtagcctcaagagcaactgagggttccgaggaagaagaaggaattcctatgatgatgattacgagggaaacctcgatgagtacgcctacgatgaaggtagctactcggaattggtgctcttaagacaaaaagctgtcgatcatgaagctgagatcgcagcccaaaaagcacaaaaccaaaagatgcaagaggtaatgctggccatgcaaaaagccatggaggcagctggaatccacgtgcatcccaaagccatgtctgctggacttggaaaggaactagaggaatcctcgccaagtacctaaaggcaaaaatctagggaaccaagccctataag

SEQ ID NO: 290690 - DNA, 645 bp, Cannabis indica
atatggtcctaagaagagtatttctaaacaccaaagacagtacggcaggtgtactcggacctaactaggaaggaccatatcaggtggtcgaagttctcgaatcaggagcatacaaattgggtaagtatgatgaaaaaatgcaacttgttctactaccacggtattggaatggggaacatttgagaaaatactaccaataaagtaccaggtcagacgaccaaattaagtactgaaagaacatttactcttaagtgaatcgcttgctgggcggaccacgcccaaaggttccgataaaatgaaaaagtactcaggtcggatcaccatttaaagtacaatttctaatttttgcaatttgttttatttcatgttaagctaaaagatcagactagatcaaatagctccaatgtaagtttctacggtaacaaacacattttcgatcaataaatgaataaagatgtttatttcaaaattcaaattgagtcaaaattactaacatgttactaatttaccatctaatgcgtaccaaaggtttggtcaaacccaaaaccccgaacaaatgaaaaagcatacttgtaaaaaaaaagtgaccaagagtcataagtctgcttggtcacttgggggcacctatacctgtacaaagcattt

SEQ ID NO: 290691 - DNA, 772 bp, Cannabis indica
atgttagttttaaacgctggcggccagccccgatatatgaacttcttttcgtgtattgtttaaatgctcaagttcataagttatttagttgaaaatgatgttttttataaatagtttggttaacctatttttatttaatatcaatcttcatattatctattaatataaatttcatttactttaaagagaaaggtatatattaattttaaaattaataagggaactttccctcgtagattcatatataatcaaaatttcatatatattttacctcgagagacagacacacttgttttggtgcggggttatagctcgaataaaaaaataaataatttgtggtgtaaatatttaaattttacttttcagttacagataaatatttaagtttaattttttaggtaataatatttaagttataattctaaatttttagtaattgtctgactattaagtgtcaagtcaataaccacgtagataatgatcaattaacagttaacagtcagatacctacagaagtttcaaaaatataacttaagtattattatattaaaaattaaacttaagtatttacaccgcaaattactctaaaatatatattttaaaaaatagaacattttctttttaaattaaataatttaacaacaaaataataaaaagacttccacaaaaatattataattttatttaaataaataattttacactcactatgggactttaaaagttacttatgattaaatatgacacatttaagtttgaccaatttatatgg

SEQ ID NO: 290692 - DNA, 544 bp, Cannabis indica
gtgagctactaaactcagtaaggaaatgcttgtcacgtagtcacataaaataaaagaaaaacatataactaaaacttagatgcacatatttagacacatagcattacatataagcttaatcttatcactattaactaatcactagtttctaagctaagtcacataataatggttatgccggagttcgcctttggcaaataaacttgcactattagactaaatggcggagggctgggttcagtataattgtacccactactagatggccccctatctaccatatagacccaacagtcaagcatttaaccagtatcttctcggtcaaaccatgtcacataatctacaataaatctaatttaaataatgtttaactactatacattatttaaatagtgtatcacaattatatcctaatcatatcataatcatattataatcataccataaccatatcataattattccataactatataataatcatatcataacaatatcatagtcatatcatattcataccataatcatatcattgcttaaataa

SEQ ID NO: 290693 - DNA, 677 bp, Cannabis indica
tattagaaaataattggtttgattactggttaaattatgagaatcaatataaacataaatatttttatatacacttaagtggattccgaacccttaataatgatccccaaatatcactgaaaatatctgttactgtcatttttaccgtttaaatattttattttattttcttaccaaaaacctcaccgttttcagaactaggttagagttgtaatagcttagattaaataagtattttctttgatctcacgcaatttccatgggttcgacctcgttcttcacaatctccatactacaataaagattcgtgtgcttgcgagttgataaatgtaaaacgtacaacattcggtacacaacagtacccctatagcctattgatttgttacatgggccaaagcaaatgggtcattactgttgcacccatttatgtaaagtcaactcactcatgctgacagctgcttggtctaatagctcggcagtaaagacagcaacttctctccttattcttggcatcagttgtttgctcaaagcctcattgtccatcagagagttcatgggagtagtgttgggttttatgccctaaactaaactccatttcaatgtaatctctatcacgtaaatatcaataaagaaacagtagtattttcatcacttattgtgtcatttggttcatgtta

SEQ ID NO: 290694 - DNA, 230 bp, Cannabis indica
taaacttatataatacttcatacaaaatactctgggatcccatttacaaaatactttacaaaagtttactgtctaatacaaaatacttgtcgcctagcgactaattacaaaagcactgctgtcccgaggatcgtacgctccaggcctaaccgccccaacatgtacaatcttcatcggctcgtcctcacgaccatacccctaactgccgtgtcccacacgatattgagtcc

SEQ ID NO: 290695 - DNA, 683 bp, Cannabis indica
atttgtgtgtatatgtgtatataaatgtgtataatagttatatatgtgtatttgtatatatatgtaaatgtatatatatatgtgtgtatttgtataaatatgtgtatatgtatatatatatatatgtaaaagtatatatgtgtatatgtaattgtatgtaaaagtatataagtgtgtatacatatgtgtatatgtatatgtaaaaatatatatatttgtgtgtatatatataaatgtatattatttataatattttaaaaaaaaaaaagtttacttgaaaatgcatattagtagagtttgaatatcttatatattcatccatagtgaaataggttctgtgaaaatatactgcggtcggatgggtggcaaaaattaatatgtatgtaaattgttttggtattgtgtttgtgatttttgtgtaggtgttgtaaatttgggaatgattaattgtaaagtgttatgctgtcgaattttcggtagcataacattttcaatttggttaaagttttttttaaaaaaataattagaacatcattaatatcatatatatgataataggttaaatttgatatgcatgtaaactgctttggtattgtgtttgtgatttttgtgtaggtgttataaattttggaatgcgcaattgtaaagtgttatgctgttcaattttcggtagcataacattt

SEQ ID NO: 290696 - DNA, 673 bp, Cannabis indica
ggtcaggtgcccatgcccagcaaggggcactgatgcctttgcatcaatacttcaagaatgtggcggacttctttggcctttgcccggcccagttcactcctaagggcattaaatatctgtctgccctcttcgtcctctacgcttcccaaaagtggggtatgccttctcctcatgaagtcagctggttttttgatttgaattccacccctaagcaaggcaggtcggggtacttctatttctctcaacgagactttaagtggttgacgggcaccgatgattcgaccatcagcaaaattgggcgttttactgatgagtacttcatggtagatggcacgggcatcactcgcactcggttccagcagattcttacatatcactgccctcccctcactcttgctctccgggatagagctcaaaagcttgctcgactgccgagggaagaccgaaatattatccagttaacctccaaggataactttgtgaagtacgggctctatccaaaggacttcattcccaacccagtgaaggggaagaagaggaaatttgatgctggaaaggctgaacgagctcatcaggaggatgaactcattcaacttaagcgcgaagctaagttgaagggaggtgcaagggccaagcaatatgctcaggagccttaaatcctgaagatgaggct

SEQ ID NO: 290697 - DNA, 611 bp, Cannabis indica
ccttcgaacctcactcattctcatccaaatttagattttcatagctgaattcaggagcaatcaagggagttgaagcttgtatttaaggtattatgatctagtctttctctttttagtaattcttaagcttaggttaggttttgaggtagaggttatgggatttatggagctgtggatatagttgttgttttaatttgaattctggagattgcttgaggttatttagatggatttgagttgtttttgattgtggtagaaagattgtagcaaggtttgagtttatgaactcaaaccttgacctctaatggtaatttgaaattttgtggagttcattgtgttctgctgcttggttatgctttattatagtgcatacaggtgttctagaggtttttgcaaagtttgggattgatttgaggagaggggatcggttttgaggttcccagctatgaaccggtcgaccggttctgggaagcctctagcaaccggtcgaccggttggtacccaggaactggggttccggttgggaaccggtctgccggttggggcttttcccgagccctagtttttcccatttttgcgtaatttagggtattggcatcctatttatcgat

SEQ ID NO: 290698 - DNA, 711 bp, Cannabis indica
ttgtttttttttgtggtgtttcttattatgttttgttgtgtatcgcattgtaatattttttaatattgtttatttgtttttagtgtttttttaaaaaaaaattatatatgttttgttaatcttgatgggttgtttttgttatttttttaatgtattttttggtggaagaattattcatgctccatctataaatgtcctttctttggtatttttatctttgttagttgttttttttcttttgttgttttgtggtttttttattatgttttgttgtgtatcgtgttgtaatatttttttaatattgtttatttgtttttagtattttttttttaatttatatatgtttttgttaaacttgatgggttgtttttgtttatttttttaatgtatttttttcactttttattattaatttaaaactgtttattatttttaatcgttaattatttttttatgtcttatatttaaaatattacatctgtatattttaaatattattgtttataattagaatcttattatgttttttaattattaatatataaattttgttaattagtaggcttactcattaataccatatcaattagtcataaaaaatagttatacaaatctaaatatagaaagttgaatcattaatatatctattataatttaattaaaaatatgtatgaatttttgtaaatatgttttcaaatgtgtacattttta

SEQ ID NO: 290699 - DNA, 711 bp, Cannabis indica
gagtgatgtctgcgaacaccttagacttaggcattttccttaccttggtccttgccatccttccatttatccaattatgcaacctgatgggctaaacctttgtgaagtttgcagagatgcgtaagaagggattcgggcgtatttttctatttttttttcaataattttggctgaatacgtatcttatctctgaattcatgcttggatttagcctttgaaagaagaattgaagcgcacttctctgagggggacttagtcgaaaatgtttcctgtttttggatgcatgtgcgtgttaaggctagtcaactttggacataaggagttgtaattgtcagcgattagatacactataccccccaaaagagctagcaattttgtcactcaaattactcgatcatttgtctgggagtctaacatgtgtcctcttcaagttcttaggagtagagttgagtgtggtttggcctacctagagaagcacattgtcttgcctaacatgatcacttggagaggagtgtcttaggagtgtacaggccacttccatgcttctatgagaaaaaacaagttgtgtgaatggtctccctgttgggtctgtgccctaaataaaaaccattttaatatattcaaattacaaattaataaaagatcagaaattactttggcgatgcatggttcacatgatttattttatgattatgtttaatgtataaattc

SEQ ID NO: 290700 - DNA, 788 bp, Cannabis indica
gttttatataaaattaaaaaacaaaatccgtttcatgtacgattatattttgttgtgatatttttttaaaaaaaaaattagttttaatttttctaattattttgaactttaaaaataataatttttaattaattaattaagttattatgaatatatcatttgaataaataaatatgaatttaaaatacatatttctaataattgataaatcaagatattacacatcatcatttgagttaaaaatttattttcatgaccatatcttacttatatttaaatgaaatctaataatttataatgaaaaaaataaatataaatgtatttaagtaaaggaagaaaatattataaataaaaaaaaatcaatcctacaaaataaaaaatctataacaaagactattaataaatttatggaaaaactcgttatatatattttaaatttattatcataaactgtatctcatttgtaatattctactatattcaaaaataataacatcatcatcactatattacttacttatagtcatcactattttctttaataggtttgttgtaagtaaaacaaattaaatatagaattaactatttatttttatacataactagatctataaaaatatataccaaaattattggtaattaaaattttgtacaaaaaagactaaaaagggtatttaggctaaatatactttaaaaaattttgtttaagtttttagtaatttttgagttagtgttatgggttgtgggtcaaattctaagtttgtatattaattgatattttataaatt

SEQ ID NO: 290701 - DNA, 655 bp, Cannabis indica
actggaactaggacttggacttggaatcataaatgaaattggacctagatccagaaccgtaaccagaccaggacccggactccaaatcagacctagacccgaattgggagacagacccggatccccacccaaacctggactcgggacccgaacccgaacctaaaattacacccaatcatggaaccagactagggaaacagaaccagggtcatgacctagaatcgcaccacattcttgatcccgaacccaaactcagaaatgggacctgggacgtgaaccagaaccagaccgagacccgtgacagtgatccagatattggtattcgggtaaaggggcctggaacagactagtagtcggtgtctagatttgggacttagattaggaccaaaaccaagactaagaaccaaacccgaacccagacgtagacctgggacctaaaattagaatctgaataagaatcgcccaacaaatacacttgaacaagactaggaccgtgaccaagacccggaccccgacgtagaaccgaacacagacctaacctcagacccaaactgagactggaactcgggcccagacacggtcgtgtacgtagagcggaactgagacccggtcctggacctaaatctgggacccgatcccaaacacagacttggac

SEQ ID NO: 290702 - DNA, 1333 bp, Cannabis indica
atgagagttttagaacctagaagatctgaaaagagctaggttaatttataatctgtcattcacttcaagagaaggatagcaattagacattaacattggtaacttaacaacaggattcgtctccctattctctcatcttgattaatattcacttgtttctttaagtttcttgaatttctttctcctttttcaatcataaatacttttgatttgccaaatagaattataagtatagtttagtagtaattaatccaattccctatggttcgacctcacttgcgtgagtatactacttgattgcgtgcacttgcgtagtaattaataattttcgcaacaggggcggagttggagcttcggttatcgtgaacggacagaggttgacgccgctcaagaaagggagaagggcaaatctggcttagctgaaagaaatttacttgagagagaaagagagatgcgagaaacacagatactgtaaaaaaaaattagggtttttaattgttgcagtttgaatgagaaggagagagaaagtgtatatacatgcatataattaatggactgtttttcttttttattttttttttaaaaattttttattaattcagagtgtacatacatgcatataattaatgggacctgtacgttctttttttaatttttttttattaattcagcattaattttttttagtggaacccaatatttttctagagtaccgcgcttaatttattaccataaataattaattaaatttagagttctgatatagtgacgcgccaaacacgttgggatacgtttacctagtcatacctggcgtgtcactatatgtaaatttttttattttaaaaaaataatagaaattatgggaattactctttagtgacacttcatatttttagtgacacttcatatttttagtgacacttcatatttttagtgacacgtattgtaggacactaacattaaattttagagtccttttgtgtgtgtcactaaagctcacccttaactctttagtgacccgcacatttgtgcgtgtcactaaagtgtgtcactaaaaggtaagtttgtagtagtgcttgtctgtgtccttagacttccccttgatacttaacaaagttccaagtacactttcacacacatttttctcgatatgcattacgtcaagattatgtcggagagacaaatccttccaatactctagctcaaaaaatatactcttctttgaccaatttaactcagctacagaacatttacgtttgactccaccaaattgcttgtgttttccaggcaaacgaaattgtaactgctcaagctgagctaaaatatcgtcccc

SEQ ID NO: 290703 - DNA, 369 bp, Cannabis indica
tctaaaatttaaagtcaaagacttaaatttataccaaatatacaatgagtaatgattctagcttggaccaccactactaatctaactctaagtctaatttgcctaaagtaagcatatataaataggagattctaagatcaaggattatatctttcgggatagaatgtcgggattatagtcatctgtgccattcaatttataaaagaaaatagaatgacattataagcagataatttataaatcattcatccaatgatatactatgtaagcaaattcaaaatgaataaactaagaggaataattaaaggataatttcgattaaaataagaatccaacgatgtcccagtaggcgagagtcaaagttattct

SEQ ID NO: 290704 - DNA, 504 bp, Cannabis indica
tttcctcaaccgcatagatgtggtctcgaggtacggcaagttcggtataattgacgaagcgaggtcctccttttcttttgggcgaggactccttttttggaggcgacttggccaacttcgggctccgcggtttgcgtgggctgcgtcttctggggcttcggcccctggaattctttcctcgcggactgcgggaccgcgaccgcggtatgggtgatcgccgcttgttcttgcccttctccaattccgccaaggagttctcgattctcttatgaggttcggccatggcgaagaattctaccaaggattctggccttcgggcctgtagctctttccaaaagtcggttcttggcaagacacctgttattaacatacaaacaagcgaagactcgggggccttctcaacttttgttacttcagcgttaaaacgcttgaaataattctgcaaagactcaccaggttcttgcttgatgttcgccaaagtcgtatagggtggcctatacgtca

SEQ ID NO: 290705 - DNA, 501 bp, Cannabis indica
atccggatacctatctaggtctaagtctgtgtttgggattgggttcaagatttaggtccaggtcctggactcagttctgaacttggtacacgaccgtgttcgggcccgaattccaatctcagtttgggtcttaggctaggtttgtgttcggttctaggtctgggtctgggtcctggtcacggtcctagtcttgttctagggtccttgttcggcgattcttgttgaggttctaatttttgggtcattggtctaggtctgggttcgggtttggtttttcgtctgggttctggtcctagtctgagtccctgatctagacacggaatactggtctgttccaagccccgttacctgaattccgagtcaagatctggatcactgtcacgggtctcggtctatttctagttcaggtcccaggtcccatttcttagtttgggttcgggattgagactggggtttggttctaggtcccgacactggttctgtgtccctagtctggttcca

SEQ ID NO: 290706 - DNA, 533 bp, Cannabis indica
ccattaaaggtcaaagattgagttctaaaactcaaaacttgactaagcaacatatcatgcatcaaaccctgattaaaaactcatattcaagcatataaaaactgcagaaactaaaacctaactcatgcaacaactacagccaccaaaattcccaattatcactttgaaaactcaagcttttgcatagaaaaaccataactcaaacaacctaactatcatgcattactagcagcttaattcaactcatttaaacatgcttaatccactacaaacaacaacaaaaatcacagcaagaacaacaacctaaactatgcatgcaacatcatccttttcatcaaaatttaaagaaacttaaagaagaaatgcttagaagctaacctagcttgaattgaacaccaaagacagttgaaatcacaaggaaaatccaaagttccttgctgcaccaagaggccgaaatggagaggaaaagagagagagagctttgaaattttctatttttttctaagttttgaaattatgaataaatgaaataa

SEQ ID NO: 290707 - DNA, 377 bp, Cannabis indica
aactagtatagaaataactatctagaaaatatctcaatttaactaagtatcttttcaaaattttggaaaatatctaatttaagttgttatagaaagaatctaaaataaccaacttaaaaatttccaaataaaatttaattaaatatcaaaattaagttgtaactacctaatttaagaatattccattttaagtttaacaacttaaaaaatatctctagaatcttcaataaccaactcctagaattcctcaacttaattttaaattcaaaagatattcaaatttaagttgataagaaaaattagttagaaataactaatttataacttaaataggaatatttaatgaaataattaaaataagcttcagaaagaatcta

SEQ ID NO: 290708 - DNA, 644 bp, Cannabis indica
atgtgtgaatgcatcgcagccaatagcgcgtggttcttcaattgatcaattggcaggcatcttctcttatctggccaattccatgtcttctcccaagtctacatggggcgttaccaaaggcaaggtcatcaattcttggccccgtctctccaatataatagcggggaccatatcaagttacagtgcctaggggttgatccacgtgggttcttccttcaccaggaggcgctagtggagggtcttccctaggcaggataggctgattattcagacccacatgaacggttgtgtcgtcctggccaggttcgtggtgcttgccgagggggtaagagtggccacatctgttggatttgtcgagattctagttgtgactggaacatgcaccttaggattagcattcatggggtcttgagaaagactcgatgaggccaaaattgtggctagagttctccttatgttaaccatagcgtttgatcagacaaattaacaactcgctcttaatgaaagcactaaactgttgaccccaaatttggccaatcaacaacgaagtcgaatttaatgctaatgcttgccaagtgttacacaattagaacaataaagtaaatagatacaaaattttatagaggtttgaccctcttagttag

SEQ ID NO: 290709 - DNA, 506 bp, Cannabis indica
attaaatattaaacaattaattttgcaatctaaaatattttcctaatttaatattagaaaataactagttttagaattaactatctagaatatatttcaattaactaagtgtttttctaaaatttgaaaaaatatctaatttaagttgttatagaaaaaaaatctaaaatatccaacttaaatatttttcaaataaaatatcaacttaaatatttttcaaataaaatatcaacttacatatctaattttaagttgtaaccacctaatttgaaaaatattccattttaagttgatgtatatttaaaaaatatcaacttaaaaaatatcttaagaatcttcaataaccaattcctagaattcctcaacttaattttgaatttcaaaagatattcaaatttaagttaataaataaaattagttagaaataactaatttacaacttaaataggaatatttaatgaaataattaaaataaacttcagaaagaatctagttagttataattc

SEQ ID NO: 290710 - DNA, 589 bp, Cannabis indica
tttatgcttaagccgccctgagcccaacaaccgagctcaccaaatggttaagaacgttcttaagggaagtacgaccttcgtaccaaatgcactaaagtaccaaccctgtactcgtgttggtagagccattattgcactcccaggaattactaagtgttgtaccacatgcatgacgtaccccctggtactcgtgttggtaacaccgtaaccacactgatatcgtacactatactaacactcttaagattacataaataattagtgttattagtgtaaacagttaatacaagcatatatacattattatgctatcttacctcgttccgtgctcaagtgtaccggtcagcctgagtggaaacgcagctcgacgctttataaggccctaaaccataacgttcaaaactcaatgagagacatgctaaaacacttatcgggggtttaacattgaaactaaggataaccctatcgataaataggatgcaaacaccctaatttacgtattaactagaaaaactagggtttgggaaaaagctccaatcggcagaccggttcccaaccgaaagcccggttcttgggtaccaaccggtcg

SEQ ID NO: 290711 - DNA, 389 bp, Cannabis indica
aaagtacataagtataggtatttttattattttggctatggacataattggactaaaacacatagtgtcaaaaagaaggtaaaattggttaattttattttcagaataatgtacttcacatatttttatggtaaaaaaatttcgaaaacctaatagtaatggcaaaagataacaacagtaataataatcaccataataatgaccatacagtaataataattggttccaccaaattccaaaaacttccacaagtcttaccctatagtaacttataaaatcaccaacattagtacaatttcaaatcacctaacagtagtatgatgcaaatatataacataactaaatataatttatgacctaaaacctaacttttgtaaccattgtactaa

SEQ ID NO: 290712 - DNA, 518 bp, Cannabis indica
aagaaattaacaaattttaaatttgaccataatttaaaaaataaaataatcaacttttttaaattaaaacctcaaaatatcaaaaattaataataatctattaaagataaatattattaatttaaaaaatgatatttaagtttaaatatattaaaaaagaatattttattttaattttggggtttgaaaattggaaaaaaaatcgaattttggggcatgctggcagcaaggctgcacgtgcagccttcaacaggctgcaaaaggccctgggacgcgcgcggaaggaggagttgcagcctccttgaccgagaaatctcggtcagctgcagggtgcgtgtgcgggcgacgtaggcgggaagcagggtcagacatgggcgcatcagataggatttgtctgagcacacgatgggcctccttgtccgagggtctggtgcgcatgagcacctccctcgacaccatatagcaccttgatttttcaaaccttcataacttcttcgtttttcatcggaattgagttt

SEQ ID NO: 290713 - DNA, 683 bp, Cannabis indica
tggcagcatcaagatgaatcatgttccttataaaaccaacttggtcgacattttcacaaacctctctacccctctctttttcacgacattgtatccaagatgggtgtaaaaaaatttacactccaccttaaggggcgtgttaaaacttgttttagttaggctccttttcagctagttagttattttagttatttattttcttgttctgttatttttatctcattgcctatttaagtcttcaatgatgtaatccattttctgttcagatcaataaagaataataacaagtttttctctctcgtctctgtcctaatagtactagagtgaaagatgttttcgtttgggtttttgagttcccaatctaacatagtggacaggtttacaaaagacatcactactactacattgatcatgaaattgggagggatattgcttggtaggattaatctgaggactatacgctctaatccaactcccagctctcaagtcacatgacatctttgttatgactaacattgggattaattctaaagcctaactgctccgtatatgtacaacacatgccctcaaaaaatatctatatatataaataaaggaaagcataagagcactaatgtgacatcttttccttccatttctcattttttctattttgttatgttttctaattttttctattgaat

SEQ ID NO: 290714 - DNA, 554 bp, Cannabis indica
ataatattttcaaattcaaaaaatttgttattttgttaaatatttaattgtttataaattataagtttaaaaatgatattttactattttacatcattttacttattagaaatttataaattatattttttaaaaatttaaaacacttagatatttttgtagaaatttgaataatgcttaatttaagatatttttacatataattatcaaaattattatttatttattattttattcttaaaataataattatctaaccacatccattttaaaattggtttattttattattttaattttattaaattataagattagaagatgatattgaagatattttttttttgaaatcatttattttattttacatttaatttaatttgataaaaataattcaaaataaacctagatattttaaattagtttttcatttttgaattttaaattttgatgagatttttaatgttggttttaacaaccttaaatttttaaaatttagttggttaaatttaaaataataatttaattatattaatatcttatttcacatctgt

SEQ ID NO: 290715 - DNA, 657 bp, Cannabis indica
ttaactcaacactataatattttcaaataaaaatatattatattaatttcatgaaaatattacatagaattaaattaatttttttttgtatttttacactaataaatatacatttttgactacttaacacgagagtcaaagataacatttattgaatagagtagtcagctcatctaaaatggatactattttagcaaccttttattcgatcaaaataagaatccaacgttatcccggtaggcgagagtcaaggttattcttattttatgagcttccactattgtttcaactttgtaaatttatttctaagtagtcaccgtaagggagagtctaatagaaacgaaaacttacaaaatacttatcatacgagatcttacggtgttaatgcttcaatggataaccatctataagggggatggtgtctagcatctcgaggttgcattgaaacattaaccatgtaaaaccaacaatggagatcaaatatccttttgattaaagcttattatttaaaataatgtatttttaattaatcatttattttaatctatatattttaacaataaaaatttcttaatttaagttgtctaaaattaattttcaacttacaattaaattttaatttaaatttcaaaaatctatatatttaaaatataattt

SEQ ID NO: 290716 - DNA, 618 bp, Cannabis indica
agtattatctcaactagtgaggggaccatgggcctacataaccgagctttcaataaatagatctagaattcaccaagtaaattcgcaacctattaatttcgccttgcaccaccatagatttggaattgaataaaactctcaattatatagaacgctctatatgtaccacgatatagacacgttacgattatccattgttacaatcttaatagtcaaagatcccctatagatgatctacgttgaatagggataaatttaccgttctacccttcaatgtattttatccttaaaatagttacctatacataaatgatacttcagtaaactaatttaattactgaaatgaggcctcaatcattgatctctattcagccaagctcgaaggaaatcatcgttttacttctaaaaacttatagaagctacagattccatatctatgatcaacgctcccactcaattgaactaccatgtccttaatctgtatgtcacgagaagatctaattagtcgactttaacgaacaaattaaagagcataaataatatatttaagatgaacctaaccatatcaggattaagatccatagacttaagatctacaattgatattgacttagaaag

SEQ ID NO: 290717 - DNA, 554 bp, Cannabis indica
gaactcgtggagcagttcccagactattgctacatacgtggccattcttctccacgcgtctgatattctcccgacacctggtttactaccagttgggagtcactgtagacttctaccctcttagcccctacggtctttgctaatctcagccctgctatcaaggcttcgtattcggcctcattgtttgaagccgagaagttgaaccgtagggctgcttggagccgaagtccacttggggatatcattgcaacccccgctctggatccattcttgttggaggctctgtctacaaatactttccacgccgggaccgatggcgtcggtatgttcgcggttgcttcggcttcattacattcggtgatgaagtctgctagcgcttgtacctttatggaaatacgggaaacgtagtgcaagttaaattgacttaactccattgcccatttgaggagccttctggatgcctctggcttttgtaggacttgccggagtgggtgattggtcaacaccttgattgggtgagcttggaagtagggtctcaacttcctcgaggccat

SEQ ID NO: 290718 - DNA, 739 bp, Cannabis indica
agctcttacaagagtatctctgaatatataattctttagataatattctttagagtatagtctcaactgaactgtttttcgacctctttgcccagtgaacatgcatcactagttttataggggctagtaagcttggagaggaagtctttcccctctcgtttacaatgtgtataaacagaaagatcgtgggatcaatgctgagtacaaagatcgtgggattgatgctgaatacactaattgtgggatcgtgtgtatgccatatccctgtattctaatccccgagttatagggatttcgttgatgactcacaacgtgaaagctaaatacgctaagtgttggttgctttgtgcggattgcttattgctttgctttgggcaggccagcaaggcatcctgctcgaactattccctccgagcagatacgctaagtggattccacgtgtcaccattatgtgacgccacatcagagtgcaaaaattaggataacatttgcaccccaagtctgtacgggacttccaaagtcacatgtagacttcatccgagctgtttctgcctttggacggggacacgtgttaagcgcgactgtctgagactcaatgtgaggctcactgggcattccctcggttttcggctaacaaatgcttcgacaattaatatttcaaaatccaattttctctcaccacggcagacggctacacttgattattttttatttcccatatttgcttttaaggagggaa

SEQ ID NO: 290719 - DNA, 644 bp, Cannabis indica
gtacctaattaaggtatcagcaacatattcaaccagtatttcatagaaaagcttagtgaatcaaattatgtcattaaagatcaaaacttaggttttaaattcaaacttgcataaatccaaccccatacaccaaaaccagctgcaagaagctatattcaactcaaaccctaacaacctctaattttcaaaatcacctactcaaaccaaagtaaaagtatcaaaaacacaagtatatggattctagggttaccttagcttaaatcccacttgaattccttgctgaaaacaccaaagattagcagcaactcccctggtttttggctggttcgaagagagagaagggagagaaagaggttgttcttgaattttggctttttctcttattcaggtttcgggtgcccacccgacttacaaaaaatgttttttaaaaatacgaacccgatacccgaatatgctattttcgggggtgacccgacccgattatacgggttttatttttttttggtttttttacaacgggtcggagcgagttggcgggtttttcgggctttcgggttgaaatgttcagccctagtttgtaacacttaaccacaaaaaccgaatttttggcggctaaactacctaaaccctggttccgttttgct

SEQ ID NO: 290720 - DNA, 706 bp, Cannabis indica
ggtgcagatagtattatccccgccccgccccatccccgcttcgggtattgaaattgtcccccaccaccgccccattaaccaccaagatggggaatccctaccccattaggggcgggtccccgcggttacccatccccgcggtataaatttccatctgtaaataccatgccctaccttagagtaatatgagttattatgttcttttttttttttttactaatatggattcctttaattttatttatatttttttcattcatgatatataatataacatacaaatattataccttagagtaatatgaatataccacaacaattctatagtcaaataaatatataaaagaaacttaaataaacttccacaatttttttttaccctctttctttcatgatataccatagcaaataaaaataatataccactctatttatttattaatatatcatagcacataataaaaatatatcgtacaaattaaaaaaaaaaaactaaaaacttaaaacttaataatttaatagttttttacttttcttttcttatccttctacgatataccatatcacatacaaacgatataccttagaccaatatgaatataccataaacttaaactaatatactataatttttttactacgtatatacaatagcatataaaactataattctgcaatcataagcataaaaactatattaaaaatt

SEQ ID NO: 290721 - DNA, 511 bp, Cannabis indica
agaaatttgaagatatcaataggaactacaacgataacatcaactttatatgattggaaatataaaaataatacattatgaaagaatttaatttcataatctcacacatgtttcttcttctacataatctcagatttgctctttttttttttgttcaattcataataaatttttttaattaaaaaaaaatactttttctatacatagttatgaatacatatatataaataattgaataattatttaattttaatattattaatttaatttatatttactgttatgtatttttttaaaaataattaatttaacatagatatttttatagaaaatttattaaaataatagtaaaatattttgtaaatttaagctctaataaaatattaaaatattgagacaattaattagaaaaaagaaaaataactttagagagatttcggaccgccatgtcaccgcctcatacttctcctttatatagagatgaaaatttttgatttataatttcacacct

SEQ ID NO: 290722 - DNA, 463 bp, Cannabis indica
atgcatttcaacctaactaaacacatttaattcaacattttaaacatagaaacaacaacaacaactagcagcagcaacaacattaaaatcatccatgcattactcatctttttcatcatatttcaagaaaacttagaataaagttagaggaacataccaacaacaagagatcacaattactagctaaaagggcttgaaatccaagtaaaaatagccagcctcttgctgctcaaagggggccgaacaagagagaaagagagagagcttgagagaatttagttttacttgatttttttccaacttagaaaataaaaggtaaatgaaataccaacactacaggccaacatttaacataatacacacttagttttctcatactaagtccacaaaaggacaaaacaataatggggcaaaattaccatttttccccttcacactaaaataacataaataacactaaagg

SEQ ID NO: 290723 - DNA, 707 bp, Cannabis indica
ttcaatatgtgattagggcatccattcagaatgggactttccattcaggtcgaccaattcatttgaatttagaaagaaggtaagaactgtatataatgtgtgatatggatatgcaaatgtatgtatatatttagtgtatatgcatgcttatatgttgtaatttatacactactaacacttgtatggttgcggtacagagtgcattgttaaagtgtatgatgtctaaaagtacatcgtggtgttaccagcacttgtacggaaaggtacaaggtgtctgtagtacaacacttacagtactcaaggtgcggtccataccctacctacactagtacgaatgtatattgagtgcatgtggtacatgttacatggtcgtatccttagtagaacgttcctactcatttgttaagccttgtaaataggtgtatgggagcctagatacaagtcggtattatatgatatgttatatgcttttcttactgagtctctcgactcacagttctgttttcatgtgtaggtaaaggaaaggcgactactgaataggagtgagcctgactgagatgaggttgtacatgtcgtggcagcgtgacctggagtgttcggtctcgagacatctagggttaatattttgtagtcgctgtgcgacctggggatgtattttgagtattttgtataaaagtttaaaatgggatcccggtacttataaatga

SEQ ID NO: 290724 - DNA, 916 bp, Cannabis indica
agctgaatgacaatgctccaagatgcttccaactttcatcactcattggcacacatctccgcataatacgatctgggcactgcttgtacaagtatggctcatcccaaaaataaaacttgctatcatgaaggaactttttgagctgctgcttggtaaaatcaggtggataggcacctccaactaagtaattgacaatgtctgcataccatggtacccgtgtttgctctaccactagcagttgctcatctgggaatgagtcttgaatttgtaattctccctctaagtggctgctgtgattgttagtttccaacctagagagatgatccgccactttgttttctgtcccttttctgtctcgaatttccaagtcaaactcttgtagcaacaaaacccaacgaataagcctcggtttagaatctttcttggttatcaaatacttgattgccgagtggtcagtatacacaacaaccttggttcccacaagatacgatctgaatttctcaaaggcaaaaaccaccgctagcaactctttctcagtagtggtgtagttaatttgggcatcaacaagagttttgcttgcgtaataaatggaatgaaagatcttattcttccgctgcccaagaacagccccaacggcaaaatcacttgcatcacacatgagttcaaagggcaatgaccaatcgggtgctacaatcacgggggccgtaacaagagctgtcttcaacttcaaaaatgcttcattacattcagcggtaaactcaaatggcctattttgttcaagcaagctacacaagggtttggacaccttagaaaagtctttaatgaagcgcctatagaaacccgcgtgtccaaggaagcttcttatgcctttcaccgtggtaggggctggtaacttctcaatcacttctagctttgc

SEQ ID NO: 290725 - DNA, 651 bp, Cannabis indica
agcagccagagtgacgtactcgtgtataagagccattcattccgtgggtgtaaggacccaatggaggcttgaagcggggacgttacaaatggtaccagagccacagttacattgatcttgaattcacgcgacatacacaccatcgctgcaaaggatcaacttgtcatcaagtatgtatgctttatatatgttatgtcttatatgttaaatttggtttagtctttatcttttgattttcctttagttagctagaagtttagggtatggttaatcgaaacaattaactgattcttcggagttagaattttagtataactcaaacaattttcttattagtgtaattttttttatgagtgaagattatttattttacatggtgaattgttgcttgatgatttacgtttttttttaagtttatataatttagtgtatagatatttcctttttgagcgagatacatctttggttatttttttttcttaccgctaccatctcctttcttttgaagaacaagttaagggatttgatggaaaacggtgaacccagaagatcaacccggttgaatgaaagagcggctgtaagagaccgagctagaggtcgagggcgaggaagtgctcgcggtcgaggcaggggaaaccagcatgtccctgc

SEQ ID NO: 290726 - DNA, 553 bp, Cannabis indica
aatttactatattcttaacaaaaactcacataactaaatttggatgtgtctgtatataggttggattcataaatttgatataaagatatttttattcgcaaactttacgaaaaatatagtgtgtgaatcggtttaccacaactaaaacagaaaacaatcaatttcttattacaactatttcaatttaaaatataaaataaataataataaagttaaaaatatggttaaaaatatttatgatattttacaattaaatttctttatacaaaatatctacataatttttttttaattttaaattcaaattaaaatttatttatataaaatatctatataatttttatttttaaatatatataataatattataaaattaataaagaatattctattaagtaatataatattctgttaaagttaacgtataaacctaaaaataatcgttaaactaagaattccgttacatagccacattttatatagaatatatatatgaaacacttcttaatgggtaatacccattgattggaattaaaaaaaaaatataaggtaa

SEQ ID NO: 290727 - DNA, 539 bp, Cannabis indica
cctctccatctcatctggagtccacaagctcgtaggttttggtttggtgacaccgttatccatcatcgttgggcatgtccaaccatcttctatggccatccaaactctttcattcaccgccctcaagaatgctcgcattttggttttccagtatgggtaattagcaccttccagcattgggggtcgtgatgtggaccctccttctctgaacatctccattcctgtactaacaaggaaaaacaaaacaaagatagagagcagtatactcccagagtcgtgtctggagagggggttagttccaactgggtgttgcagaaagaaaaaatgcagaaaaatcaagaattgcagcaacaataaatttcagaataacgaatcttgcaagaaccctaaggatcaatatttctaacagaaatagctggctctgataccaaatgtaagcccaagttcttgtctaacctatctttttcatatttagattgattttatcttgatttaagcttgaatataaaaagaacaaaatcaaagattcaacaccagaa

SEQ ID NO: 290728 - DNA, 666 bp, Cannabis indica
ctttactgcctcggttgcattctaaccaggttgctcaggagccacttcaatcaacacaaaaaaggcccttttacaccaatgagagcaatgtgaatgttctctctccatttgataaagttagatccattcaacttattatcagtcaacagtgacaccatggggttggtcattgtcatgttggatactacaaataacaataaatggaaaatcaagtaaggttcaacacaaaatcacattcaaaaattattagcacttagcaagtaggaatgacaagcgaaaatactaaaacatacaatcctaaataattttcaagttttcaacaaactgatatcagtgttccgtttaggcgagagtcaaagataccatccactgaatagagttgtcagcacatctaaaatgataaacattctagcaaccttttattcgatcaagatgtgaatccagcgttgtcccatttagccgagagtcaaggtcattctatcttatgagcttctaccattatttcatacttttgtaagtcttactaatagtcgtcaccattagggtgatccatactaacaataaaacacttacaaataatacttatcttttgagattctgcggtgttaaattgcaaatgaacgttcctccattagggaggattactcactaaaacaagaactatgt

SEQ ID NO: 290729 - DNA, 973 bp, Cannabis indica
aataataatttattaaaaaataaaatatcattaattttaaacattgatatttaaatttaaatattaaaaattatattttatttagatatttaggataagaaattacaaaaaaaaaaaaaatcaaaattggtggaaaaatcaccaaaaatttgaatttttggtgcataacatctatctgccgagggacaggctgcacgctaccctgtccgtgagcggatggtggatcagcaaggtgacttagctgagatttctcggcgggtgcagggtccttgtgcacgaaatcgtgtctaaacgcaggcgtgatccaggcttgactgagaatcagacaaaacatgtctgaagtgcgtgcgcagaaccctgccttgtccgagggtctggtgcgatggtgcataaccctcgacaccatatgcacctaaattttcaaacttgcatatctcctttaatttttatcggaatcgagttccgtaaaaagtaaattgcttaattttcacaaggaatccaaataaattattttggaacaaaataaatttttcatggaaatattttttaatttataaatattcatcaaatcacacatagaccaacatgaatacatctaaatcaacaaattatcgttttaaatccatatttcatgaaagtaaatcattaccatggctcttaggcgttgaatttattttaccaggatttagataaactgacatgtatgtttgattaacaccctaaatatgaattctctaaaataatgaaattaaacacataaagtttagaaaaccttacattgatggtagcagaataatataactccttctgctcagatctctaacccttgttcctttctatcactcagtaataacaagatctaagcctggatctccttctctacttcagttttggttagccaccgtcttctacactatgattaagtacttaacttgctatgtgtgggcatggtactctatcactaaaggcttga

SEQ ID NO: 290730 - DNA, 506 bp, Cannabis indica
tgcacccgcaccacgaacatctctagtagtaatagacacacaattttacttgggattatttcacaaatacaaaaaaataacaaaaaaaaaattacaaacatacggttttacggaattttaaatatttttacgattttttgattttattaataaaaatattatcttttatgttgtactcttgttaatttgttgttatttgtatattatttttttttattattttgaactattgatgttatttatatattatttttatattattttctatatagttttcttatttatttcgtattagttctatgaaaaattgtaaaatatatataaaaaaaattaaaaaaaaatctgtaaaatgtaaaaataataatttaaaaaaaaaaaataagtgtaatatctaattattccatattactttttgatgttagtttagcaaattatcttttgtaaccttggagaagagactataggaaagtgggatttatttcattttatttattttgaccaatatt

SEQ ID NO: 290731 - DNA, 882 bp, Cannabis indica
agtcagataaagggtgagaagaaattaaaagaaaaacttttgagaatagtgttatttatttttgtataattattaattaattaatgagtcaattaatataacttataagactatccatcaaccctaaacttcccaagaaaaaaccttaattacatatcatgatcatgataaggatgattcattcatgcaggatcacatatcatcaaatcacaaatatatatatatatatatattattatgtataaattattaatatagatttaaatatacctaattataataaaatatcaaacaaatgcaaacttgcaaagtcatgcactagctagaagcattaaccagctcttaagaagaacaattaatcactcaaacatataaaatatatatatttttaaaaatatcataactttattataccacattctacacgtatataaaaataagtatgtacgtacgtaaacacaaataattaatttaactttatatagatcgattgatctacatgtaaagattcaatgatcaacatatatttttccttaagaaagaaaaagaaaaaagacagataagactttaaatttttttttaaaaaaaattaccgtgtaatgtaataatgtgtgtatatatatatggaaggttcggcacgtgtggtccatggtgacataaaagtgacgtcatgagttcgccatctttggcttctttcttccccgacaaatcccaacaccgttgattcgcgactatcccaccacgctcctttccttctcttaattattaattatataattaattttcactatatataattaatcacatctttttttcaaattaattctaaaatctttctattttttattaactagtacaccatcatatatagcttatatatat

SEQ ID NO: 290732 - DNA, 739 bp, Cannabis indica
atttcccatatcgttttgaggcgggaagctaaggcgtctgaggttcctttgagacaattacctcttttagtgacttgcctataaatacccacagcattggcacataaactcatttcatcacccttctttgctaagtaagcttcagagcgaaaagaaaatttcttggcttcaaagtcgccgaagtgccttcgtacaagctgcttgttggatagacgttgctcgaacccagacatttgaatcttgagtaagtttctgatttcctttatgcttatctttgcatgtttacattttgaatgctccttctactgtgctgtagaaaaatgtttaggaaaccctaggcttagaaacctctgcgattcttctttatcatgtcttcatgcgagtttacagccataatgcgtgtttttgaactgcataacgtccatctttcatcttgcttattctaagcttcatgaacttttttgccctaactcaagaaaattttcgacttcttgagttttgacttttctttgaacatagccgttctttaatctgttgagtactcctggtcggcatatgtgcttgtttattgttcgatattccgaccaaacactcatcctgtgtgttgtcttttgctgatgaactcaggtgagtcttgggaactcgaacatcggatcgaccaggatttgcttcaacttctgcacgaggatcatcctcgtcttcgttctagtcctccttcctctagtaaaggacattcttc

SEQ ID NO: 290733 - DNA, 667 bp, Cannabis indica
cctgcgtgccgagttgccaggagttattttagactggctgtatctgctgtgtattttgattttatgattaaatggttgtcgtatatatttcttttgcaaaactttttataataggaattctctgaacaaattatttatgccgttataatgtccgtttttagtgttttattttggtcaagtttttaatattgtcacagtttttaataattaattattctactagtattaaactagtttagaaaatcatacacgcggcgtctctgtagattagggcgttacaccgacacggtactgagtctagaacgttcatacgacaatactatcgaccataatgtcagcctatactcaatatgctagtcatactctagccttattgatgtgacaacatcgatcagtatttcagccaacacacatttatcagtaatcagtataactctaagtatactattactactatcaatataatctaacatgcataataaacatgtatgctaaacgggtaataacatatgcatgacattatactaatcttaccttgattctgaattcaggtgtgccggccaacgtgagtggaacaactgctcggtgaattacaggctcctaaatcacatcgataacaacacgaataagcgatacgctaaatcacaaccggggacttaggttttca

SEQ ID NO: 290734 - DNA, 721 bp, Cannabis indica
tttttaaatattttttacgatttttttgattttatttacagaaaatcagtcttgtactcttgttaatttgttgttgattttttgttatctgtatgttattttttatggttgttttgatattatttaaatgtatttttatgttacttttatgtaattatttgttatttttcgtgttgtttttatattaaattgtaaaaatataaaaaaaaatacttaaaacgaaaaatatgtaaattttttataaaaaataataacttatgtaattattctcaataaaaatactataatttctgatcatatctgaaaccggccccaaggccaactcaaatcaaatgaatatttcaattgtaggcaacaacacccaatacggcaacaaataaagcccaaaaaaaaaaaaaacgtgcccagctaggtagctgaggtgactttttttttccttggcagagtcaggtgagatgatttttccaaccaattatcaaaatgattcgttagtaatattcaataaaaattattttcttaattcgatacttattatgaatagtagtataaattagggatgggcatcatctaattcaatctaattgaaccgaaccaatctaattcaatctaattacaaaaagttagatattcaattacaattggattggattggatgctaaaagttagattctaattggattggatcggttattgaatgtcaatctcaaaattcaattaaaaa

SEQ ID NO: 290735 - DNA, 616 bp, Cannabis indica
tcgggtcccgagtccaggttttggttgggatccgggtccggctcccaattctcgtctaggtatgatttggagtccgggtcctagtccggttacggttttggattaaggtccaatttcagttatgattcaaagtccaagtcctagttccagtcccagtcaacttccggttttggttccaatttcgggtcacaaggtacgggttcgggtccacttttgtggtattgggactgggttcgggtccttgtcagggttccagtccagcactgggtcccaaatccagacaccgactatggattttgtcgaagcccttggtccagatccgtatcccaatctcaggtcccagtctagttccaattctagttccgggtcacgagcggggtcctaggttcaagttcgggtctaggtcgggtactaggtcccggtcctagttctgtttcctatgtccctatcctgattctggtctaggtcccggttaatgtgtgggtttggtcccggtctaggttcgggttcgagtcccaatcacggttcgagtttaggtctttgtctgagtttggggttaggtcctggtcctagtcctggtctgagttcgagtttgggtttgagttcgggtcggagt

SEQ ID NO: 290736 - DNA, 562 bp, Cannabis indica
caaatcttctattgataacaaatcagattagattgaaatggattttatttagggcataaaatcccaacacttacatcttgagaacatggtagtgcaattgagtgggagcgctaatcatagatatggaatctatagcttctataagtgtttagaagtgaaacaatgaaatcattcgagcttggcataatagagataaatgattgaggcctcgttttaataattacattagtttaatgaaatatcatttataggtagctaagtgttttaaggataaaatacattgaagggtagaatgataaatttgtccattatcggtgtagatcatctatagaagatctttgactatttggattgaattaatgggtaattcaaatcgcatctatttttggtaatagggtattctatgtaattaagagttcaatttcaaatctatagtggcgcaagaaggaattaataagttaagaaatttacttggtgaatttcagatctacttattgtaagcttgattacatagggccatggtccccacactagttgagataatactgcttgtagactcagt

SEQ ID NO: 290737 - DNA, 590 bp, Cannabis indica
  modified_base (517)..(517): a, c, t, g, unknown or other
gtctacgaatccacgcctgtcaccgtgacgcaggatgcggtcgatcaggctctgtccaacgtcgcggtccccgcagtgtcggcaccggtggtcatcgaaggccgacagaacgtggatgcgacgttgccggtggaccgtgtgggtgaggtcctgcgcttcgatccggacgggcagggcggcctcacgccgatctacgacaccggtatcgccaccggcattctcgctccgcaactggtccgcaccgaagttccgcccaaggacgcgtcgttcacgttctccggcggagctcccaccgtcgttcccggagtgatgggtgagctggtcgagtggaacaagaccctcgagcagcttcccgccctgctggctgcggacggtccgcgctcgaccgaggccgtctacgaaccggctccgcctgccctcaccaccgaggcggctgagaatctcggcgtgcgagaggtggtcgcggagtacacgaccggaggtttcgagtacgcgtcgggcgtgaacatcgggctcnccgcgcagatcgtcaacggcgcgctggtcaagccgaaggagcgttctcgctcaacgggtacaccggtccgcgc

SEQ ID NO: 290738 - DNA, 509 bp, Cannabis indica
gtgataatacaagggtaagaaatgtgatattttgtaatttactatttttttatatagtatatatattaacatattttctatggtgcaatatggatttttatgttattatatgtgagatatatatatgagttatatatatatatcagtgtatatgtcatattaatatagtgacatataatatgatatttgaatatattgtatgtgagatatacataatatataacatatatatgagttgtatatattatatatattgagcatgtgatacatgatatatatttatgatgagaatatttatgtatgtaagacatatatgatatatattatgaggagatgatatatattatgatgagtatatgttatatatatgcgagatatgtaacatgtatagttgtgatgtatattaatattatgtgtatgttatgtatgagatgatagtaacatacataatatactaattagcataaaattgggagataattttatgcatgagaattatatatattatt

SEQ ID NO: 290739 - DNA, 535 bp, Cannabis indica
cctgcacaaaggaaaaaatttagcatatggagctaagtgtggaaagttaaagggaagtatcaaaaaagacttaccctggtgaactccttcaggacttcgcccaccaacacatccagagatgagtcactatcagcaccagccagttgctcactgacctcgcgaaccagccggttcatatagtgggctagcatctccttgccctttttggcctctggaagcacaggcaaaggtggagttggtgcctgcacccgctcaggagtactcctgaccagttcagaccaagccgttggtggtccagactccttggacttggcagacttgggggtagaagggtttacagcagtcaactcctcggaaaggtcaatgacctctccagaaagtctctttttcaaggacccctcaccacccttatacttcttggctggacgagaggcactagagcttccacccattctcttcctcagagcatcgatcatctactgagacatgtctacacggaacaaaaataacatggttagaaaacagtcatcagaaa

SEQ ID NO: 290740 - DNA, 670 bp, Cannabis indica
aggatgacccgacgatgaatgcctcccaaacaaccaacggtcagccgtccaatccccggtcacgagttccactcgtgggccaagaggtaggcgggcagaccttgtacgggaattcatcaggaggagccatgcccaacggatccacgcacaataatggagccattccgcctgtcaaccaatcgaaccaatcgctaaggcagccaggttcttctgtgttcgataggctgggaacaacccatgacctaagggacgatctaaacagaagaaggggaacagacgagcagaatactacaacgatcgtgcagcccggagtccatactcaaatccccgctcagaaagacgctgacgtaatccaacccgaccaaaacaccaatcaagtcagcccagctcgacgaactgaagaatatgtttcatggcatggccggacagtgtaacaatgatcttgagttagaccgtgcacgcggaactcccttctcaccagagatcaatctcctgccactaccccacaaattcaagatgccaacgtggaagatgtacactgggagagaagatcctctctcccatctcaagtattttgagatgcaaatggatttacaaggagtgcgaggggacgtatgttgcagaactcttccccgccactctgtcggaagccgcacaacaatggtatttc

SEQ ID NO: 290741 - DNA, 505 bp, Cannabis indica
aattttgggtcccaggtctaggtctgggttcgggtttggttcttcatctgggttctggtcctagtttgagtcccagatctagacaccgactactggtctattccacgccccgttacccgaatctcgagtcaagatcaggatcactgtcacgggtctcggtctggttctggttcaggtcccaagtcccatttctgagtttgagttcgggatcgagactggggtgcggttctaggtcccgaccttggttctttgtccctagcctagttccatgttttggtctgagttcaagttccggttcgggtcccgagtccagttttgggttgggatccgagagcggctcccaattcgggtgtaggtctgatttggagtctgggttttggtccggttacggttctgatatctaggttcaattttaggtatcattccaagtccaagtcctagttccagtcccggtcaacttccggttttggttccaattttaggtcacagggtacgggttcgggtc

SEQ ID NO: 290742 - DNA, 535 bp, Cannabis indica
tttttttatttttcctctaacatttagatatctctcttacattttagtatgtgttaaaagaaacttttttgttccttttttatattttgtaacaaaaagtaataaaatttaaaatttaataaattttaacatatcaagtaacatcataacttaacttaaagtcttttgttattttgtatttaaaagttaaaatatagtatactaataataaatttatttaataaaaagaatttaatatgttaataaaaaaaacttataaagttaccaaatagtatctaaaacataatagaattagttacaatatgaaaattattatatatattaattttaaagttatctgatcaaaataagcaaccaaatgtgtatgagaaaaaaattatcttgaattaatttttttctaataaaaagtaactaattgatatattatttacatcaaaagcaaccaaaaggttgctttttttaaaatttgcaaaacactaaaatttctggaagcgagatttttttatttttttcaattttcggtaattattttata

SEQ ID NO: 290743 - DNA, 586 bp, Cannabis indica
gtctacataatagaagttcactctaaattatatcacaataaatcaattctttatatttattttatgtcattttaatatcttattattaaatttacttattgcttaaaatttcaaatcttatacattttttttattttaattatttttatacttttaataaaacattaatttaacattaaattttacattaaattttataattgtgcattgagcacaatactaaaaattaatgtaaatatatcacaaagtcacttaattttatatcaaatatagcataagttttacatcttccggagatagtcttatcttccggagatagtcttatataggcaatcaatcatatgctattttttttctttccataatattttacaaaatcacatttgacaaaatatatgtaagtatagggtgtttataaagtagctgatccaatctattccatacaatttaatccaatctaatctaatccgcaaagtgtggatatccgcacttgtgcgaattagagattggattgtaaaattcaaaattagatgttgattgacatgtaaaagtaaccgatccaatccaatccacacatatttataaa

SEQ ID NO: 290744 - DNA, 547 bp, Cannabis indica
aattatacatatagtcatataataaaaaaaaatataaattaattatttattataaacggtccggtccggtttaaccgttagttatatattacgaaccgcaactgagccattacgacgtaaacggtccggattgaccaaaccaccaaaaacggtttccccggttacggtttacaatggttcaaattgtagtggtccggatttaaactgcggtttcccagtttatatgaacagccctaggttatcctatcatgggtgagtacaacttgtgataagggattgccctattagatgcctgcataaggcagggcaagttacagttcatggctgatcaacatgagtgagagtagattatcgtatgtgaggacaatgtccaataagatactgtgtgttatgtgtgagagtatagcatgcattaagattacactatgatatgatgttacattgtatgtgagaataatacgtgatatgatatgttgatatatgtatgccaacatggtatgaattgatttgatgttgtgatattattatacttatgactatgttatct

SEQ ID NO: 290745 - DNA, 810 bp, Cannabis indica
ttctttcaaaattgactatttgtccccctgttagaagtattccagaaatgtctgcgatcgagtaaatagctctacgaacgaatggatcggatcgaattggaaaatggaaagatttgtacaagttatacctttcgtcaccattttgtggaaaatcgttaggtatgaatatgttagacacctgtaactcgattggtgaaatagtatctctctccaaaaaagcatatttttttttaccgccgcgcaaagaaaatattttgttgcgaatgaacaagatattgaggaattgtccatacgtaaaatcataattattgatacgggccttttccacataaaaagggaatcctttgttacaatagaagcagaagtgatgtggattattcaagaatcgaagtcgatttgctttataaaaagaagatatcaatgagcttctatgaaatggtttcacgggattcagccaattgtcttgatcgtgggatatcattgagaaataggaatccgtgttatcaaaagatttcctgcgattatttctagtatggaatgagtcaatcatccactttggtatcttattgaacaaaaatggtgatattgttcctccattgatcaagaatttcgatttttgggaagtatcatgatcatccaataaaaagggtttccatttttttaaatgaacgatttgaagacctattgattctaacaactgatggcagagttgatcattcggacctttcaattcatagatgtggatctcggacctatgaatggggatattcccgaaactcacaaagaaaaaaggaagtgagttagacaaaa

SEQ ID NO: 290746 - DNA, 631 bp, Cannabis indica
taaaattatttaaattatttttagatagatatttattttcaaaaattcttctgatgtaggatcgcttgaatgattttagatgctctttaattggaaccgtaccaacttgcttctcctaaactcaatttctttggcaaaaaaaataatatctaaccgaattaattaatttttttttataagtggcgtctcaaaagagcagccaaacaacaacaagataaaagtaaaaaaaaaaaaaacgactaggtgtaaacataaaaaaaactagcagtaaattatgaaaagcaaaaaaaaaaaaaacgtttagaaaaaataatttttttttagaaaataaatatcaatataaaaataattcaaagtaactttaaataaaataataataatttaaaataaaaattaataaaattttaattattaatattattttttaaaaaataaatattaataaatattattataatatatataaagttttaatcgtatacaagcagtcctatcgtaagagtatacaccttacatcataataaccacatgatctaaaatattcaatggtcaaaaaagttccctaccggtagggaacttttgctaggtcctaccatagtcttgccctatatatatgggtaaatagcggcat

SEQ ID NO: 290747 - DNA, 317 bp, Cannabis indica
gtgtatagattatgcacccgaggcgaactggtaggggtacccgcgagctagctgggctcggggctcctggtgagggcgagaaccctccaccaccaccaaactaggaagagttatatgttgcaatgcaagagactattcggcaacagggtcaaatcagagaactgagagagcagcgagctcaacctgctctaaaccctaaccctgatccttcggcacctctggtagtgccaccggatccagggaaccgtttggaacctttgtatgagcggttccggaagcagaacccgccagtgtttgagggtggtactgatccactc

SEQ ID NO: 290748 - DNA, 675 bp, Cannabis indica
cttgcacatggaattaaacacaaatatagatagtattcacaatcaagatggaggaatggcaattatttattaactaggcataaacttaaacacattcatcatcctcccttaatgggaaatttagctcataaaaataataataacatccatgattaaatctgaaacaaaactaaacataaaagaaagaaataagggtaaaagaaagaaactagaaggtgatatcgctccgggtcttcaagatagcttcctctccaccttcatccactatttaggtctatttctgcttagtttgaccttctgagtcgtattccttatatagggatgaaaggtgtgcctccaattgagagaaaaatcaaaattaggtcaaaaccacgatgtccgtacctagtcgcgactagcctataagctggtcgcgactataggcaaacctcaaaaatcctaggttctgccaaaatctcgaagtcgcgaccagagtcgcgaccacagaaaagggtcgcgacctggctcattggtggtcgcgactactgacgtctcttgagcagattttccaatttttcgccagtttgtcccgtcttttcaccaattaactgaatttgaactttgataccccaggaacctgaaacaataaaaatcaagcgtaaaaccgctccaaaagacaccaatagacgagaaaat

SEQ ID NO: 290749 - DNA, 858 bp, Cannabis indica
aatccagaatatgaaccataaaagaaaataccaagtaaaccgatcaccagaacaccagttacagtacctattatccaaagaggaatccttccagtagtatcggccatttgtcctactttcctccacatttcatcaggtggtgttacattgctatactgatgaagtctaaatctgcaatgctgatagatttgtgtaattgtgttcaatgattgtttcttctattatactaaccttctgggtatcacatcactttcatatttataataccatatatttttctaaccatatttatgtcttacatattgtagacctctatagttcacaaaataaatcccaacttcttaattgcactgttaagacctccaaaatctaaaaccagcttacattcgagtacagaccatctacttttagttaagtaagatcatatatgctaaaatatcgtaagtgcattagtaaccctttaaaacgagttcaaccttaacataggttaggtagcccaattatttatttatcatttactatttaaccataggttaatcatgtaatctcataatatatcaatcaaccaagttgtcggggtaaggatactatatacataattggcaaatcatgccgaacagaccttactctgttcatcgttactatacctcctacaccccacttgtatctgatttgctactagagactcactttttataattatttagccagggctctttgactcgtacttcctaaactacctttaaaaataagtccatacttcacttaagcatcttcattccatatctgaatgcaatcatgttatcaatatatacatccttttctctttccttataagttcctcacttccaattagat

SEQ ID NO: 290750 - DNA, 252 bp, Cannabis indica
ctatggttaactcagtgaagtataaaattgttcatggcggtcacgtgtcagattcttttgtgtcgggaaggggtatttgtcaaggagatcctttatctccttatctttttctcatttgtgctgagggttttacttctctcattaaaaagtttgaagttgatggtctcttgaagggttgtaaggttgcgaatggggcacctgtaatatcacatatgctatttgctgatgatagctatgtctattgtcgtgcta

SEQ ID NO: 290751 - DNA, 532 bp, Cannabis indica
cttacctcgattccgaattcaggtgtcccagtcaacctgagtggaacagctgctcggcgaattacaggctcctaaatcacaccaatcgtaacataggtgagtgatacgttaaatcactttccggggacttaaacttgaaactaaaagtttcactatcgatgaataacatggcaataccctaaataacacaaaaatgggaaaaacaagggttcccaaaattgccccaaccagaattccgcttctggtaaaattcctgggagccaaccggaattccggttcctacaggcccctctacaccggaattctggttcagtgcaggaaagaccaaaaatctcatatcttcaccaaatcaaccccaaaccatatcaaactcttcagacctgctccatacaacccaaagaacataattaaagcaacaaaaccctgatacaagctcagaaacaagatttgccatgtgagagcaaagcttgagctcataagctcaaactttgaacaactctcaccacaaacccccaaatcaactaaaaacaac

SEQ ID NO: 290752 - DNA, 537 bp, Cannabis indica
aacaataacacaagtgtaagaaaaaatccccaaaaagaaaaataaagggaaaagcaaaactacaaagcacttaccacggtgagggaatggcagaggtcctggacctagaagatagagttcagggaggcgcaagttgcgaaccgcttaggcgcgcaccgggtaagctgagaagcgaactcgccagtcatctccgcggcgaagggagccaaggtgggcccaaggaagcgacggaaccagtccgatagggggtccaagtttaggtcccacggatcctggtactccgggttgttgatggtttcctgcacctcaacccgaaggaccctcctaagggcctccacctcggcatacccccgggagtattcgtccatggcatagttatgcttggctatccggagctcttgcctcacctcatctccaggaactggagtcagcacaatgttgggaggagcaggatgctcttccatgggagagaccccaccatcaagaccatgggccggagtgtcagctctccgaggccgcttgggctcgtcctgggca

SEQ ID NO: 290753 - DNA, 506 bp, Cannabis indica
gaatgcgagaaacttacagtgaagtgttgaaactgggggttctgttgtcgatcaaacaaaggaaatataggctgacagtggtgaatgaaggatagcagggaaatttgtaaagtgttcgaaggttttttcttggtctggggatttcgctctgaaaaactcgaacaaagttggcaagaaatggaaagtaaccaaatgaaggaaagatggtggcttttataggccaaagtgcatgaggaacaggcgctatcacctaccaatcgaacggctggggaggcgcacgattcgaattcccaagaatcaacggttggattgattcgtaattaaggcggtggaaacgtttgagtatccgtctgacaccattaatgcgccgtatcaatcaatgggcatgaaacgaatcgacatctgcaaaaagtgaatcgctgcattaaaggcgatcattaaatgcaccttcacgcgctcaaagctcgtgccaggaaaccgaggggtcaaccggaggcacttgaaca

SEQ ID NO: 290754 - DNA, 876 bp, Cannabis indica
agtttttggttgtagtgcatttgtgcaccagagtattggtaagctagaacctagagctattaaaggggtttttctaggctatcctgaaggagttaagggttacagaatttggctaagagacaaaggtggattcaaaactataattagcagagatgttatttttaaagaaaatgaatttccttgtttgcttaaaactaaccctgcaggtacagtagacactaaccatgcaggtacaatacagtttgaccctactctatggaagctagatgaccaagaagaacctgatataaatcaggtggaaccagctggaagtgaacctgatcaggatcaggtggaacaaacagaaagctccaacagagaaggaactgaaggagaagagcaacagggagatgaaactgaagttgttcagcccactgaagctctggatgactaccaattaaccagagacagagagaagaggacacctaaacctaatcctaagtacagtttcaatatctggaatgaagacatagcctatgccttcatgactgctatgaaatctctaagtacagaacctcaaacctatgaagaagctatgacaggacctaatgctaagaaatggtttaaagctatggattcagaaatggtttctctgaagaaaaacaagacctggataatggttctaaggcctaaagggaaaagaataatagcctgcaaatgggtttacaagcataaagaagggatacttgaaggtgaacctataagattcaaggctaggttagtagccaaaggttttacacagaaagaaggagttgactacaatgagatattctcaccagtagccaagtacaagaccataaggataatgctatctatagctaatcagtttgacatgga

SEQ ID NO: 290755 - DNA, 508 bp, Cannabis indica
aaaaactttttactaaaagagctctaaatttatttttaaaaataccatattttatacttttactattaaaaaatgtaattattttataaaaaaatacctaatttattttataagatattaaatttatattttattaagaaaaaaatactcaattacttttttaaaatactatattttaaatttttaccactatttataaaaaaatataaaaactttcatataaaaaaacaaattagattttttggcctaagaccacactacaaaaaatcttacttttagtcacaacaaaacttgtgattaaaagtgaaaaaattatgactaattataagggctatttttaaaaatataggaaaaattattaaggttatgataaatatgacataaaaagtaaatgacactaaatatgtcattatctaaccaatcaaactaaaaagagaatctgaatttaagattcataaaaaataaaaatttaattgaattaccataaaaatattaaaatttccttcat

SEQ ID NO: 290756 - DNA, 695 bp, Cannabis indica
aataaaatattgattaattactaatataaaattcctcataatttaaatttaaattcaactaagtcaaatatcctaaactaacttccccattcttctctcactctcacgtgtccctctctctattcatctattactatagcctttataaatatatatatatatatattttattatcaagcttatacaaaatatatatattcctattataaataccactagtcttatttatttaataaacctatacgtataaaatagtatactaatttttatctatattcctattacatgtataacaaatcttatcacttaatcatacaactatttactaataacttattctctaatataattaatattaaattaatacttaatctaattaactatataattgtacttagcaaataccaataatattcatattttatttaatgcaacaataacatatcaaaacacacaataatataccaaaaataatatacttgtactggatattacatataattagcctatgtgtcgggtatttaaagttagcattatctcgtctattggtgtcttttggagtagttttacgcttgattttcattattttagggtcccggagtgttaaagttcaaattcagtcaaatggcgaaaaactaggataaactgaaaaaaaaagttggaaaattcggttccagaagctacagtagtcgcga

SEQ ID NO: 290757 - DNA, 694 bp, Cannabis indica
aacctttgaagcagcaaatccgagcaaaaagtttggattatgtggatatagccgaaactctagggtatccgggacttagatttcatacctatgatggagaaccgtatcaattgtttcggtgtgaactcaacccaatagccaaggcgtggctgtactttgtcagtgcaaggttgctcccgaacaaacacttttctgatgctcagattgacaggcttaaatatgtttatggaattatgaaagggtataatttgaatgtgggggacatcattcgactgacatttgatataatggttgagggttcttgtggtggtggacttgggcttgctggcattatcactgatctgtgtgagaaacatggagtaccacagtactcttatgatactaaggtagcgccgcaacgtagtatcaatttatccactgttatgcgactcaaacctcctcatcctcatggtcaaccaccagctcggggagatcctcccgcaccagaacaagaggagcatgaggacattgaaccaccacgtcttgtcgggcctcttgaccccgccatgcagtacactcacaatcagctgaattatctgattcagcagaacatgcatatgcagaattacatggcccagcggagtatctttgatgagcagcaggtggctcaattgaacacacttgtcacgaggatgaatatcggtgtggacgatcc

SEQ ID NO: 290758 - DNA, 565 bp, Cannabis indica
atatcaaatttagatatttgtatcctgtcgaagtaaggaaccatggcatatatgtttggaatatattccattttgagagagttgaaaaagcactatctcgttgaaaggttctatacatctgccctttctcaaggcatttctttagacaaagaccccgttttttcctcttttcggatggtaaatatttctcagaacatggagtgtgaatcaaacccatgtttgaattgaaattgagatactgatgcaagttcttctcttctgaatcagacagattaatatctgaaagaggttgacaataagttctttcaaaattgactatttgtccccctgttagaagtattccagaaatgtctgcgatcgagtaaatagctctacgaacgaatggatcggatcgaattggaaaatggaaagatttgtacaagttatacctttcgtcaccattttgtggaaaatcgttaggtatgaatatgttagacacctgtaactcgattggtgaaatagtatctctctccaaaaaagcatatttttttttaccgccgcgcaaagaaaatattttgttgcgaat

SEQ ID NO: 290759 - DNA, 611 bp, Cannabis indica
actcgattaatgatcgcttagctttattttaagaattaggagatgattagggcttattgccaggaataggctttaaattattatttttgtaattgtggagatatatttaaattttaggtgtattaattatgttatatatgaaattttgtgttttttacattttatgcccagtaatagtagaatatcacgatttggccattagagtcaatttgaaacggtgtagtatcttagatttagtgagacaatttagttagacatttagaatgtatggagtatttggggttgtgatttcataccattttaccctagattatttagtttacttcatactgaagtaagggtaaaattgtcattttaccctagatgtttattatttattttgtgacttgacttgtggactaaggaaatttagttcttgttttgtttagtaagtatcgatatttactctaattgattatgatgagtttccttttaaagtttgatatcttattcattgtattttgatttatttgttaatcttgtaacgattttttttttttatcttaatttggcctatttttggaaagttttcacggtttattcttatttctatttatttatttttttaaaaa

SEQ ID NO: 290760 - DNA, 1262 bp, Cannabis indica
tcttctggccagtttcctttggaatctttgagtttcttctttagtgtatccttcaaggttttgttgactgcttcaacttgaccatttgcttgaggatgtgccactgcggagaaacttttgatgataccatggttcgcacagaaatcagtgaaggattggctgtcgaactgtttgccattgtctgagactattttgtacggtagtccgaaccggcatatgatgttcttcacaataaagtcttgaactttctttgatgtaatggttgcgagtggttcgacttcagtccacttagtaaagtagtcaactgctaccactgcgtactgcactccgcctttacctttaggtaattgcccgatcaggtcaattccccaaatggcaaagggccacggactttgcatctgtgttagctcgttgggcggagctcttggtatctttgaaaatctcttgcatttgtcgcacttcttaacataggctttcgaatcttcaatcatcgtcggccaaaagtaacattgccttagaattttcttggataagctctgttcggcggcgtgatttccacagaatccatcatgaacctcaaataggagtcatttagctttgtcttgagtgacacatctgagtaatggcatcgagcatcctcttctgtacatgactccctctactatgatatatcgtgctgccttctttctcatttttcgagcttcatttcagttatctgggggttccccagagttgaggtaggctgctattggcgtcatccagtttggggatgtatcaatcattttgatttctttcgtgccagtgatgctaagctcttcgtggaactgggtaggaaccaagtttgccttgtcatttacattgctacttgccaatcgagcaaacgcgtctccagttgtattttcttctcttggaatttgtctgagaccgtagcttttgaattgtgcgagcatatcgtgtattttgctcagatatgctatcatgttttctccccgagcctcgtattctccggatacatgatttaccaccagctgtgaatcactgcagatttcaatgtgttcggccttcatctcccaggctagttttagtcaagcgattagagcttcgtactcagcttcgttgttagatgccttgaatccaaacttgactgcagcgtgcaggtgttgccccctaggcatgacgagggcaatccctacgccaaatagttgatttgtagccgacccatccacatgtagtttccaagtcgtttttgttggaaattattt

SEQ ID NO: 290761 - DNA, 617 bp, Cannabis indica
gtgttatcacaagtcttaattaagatagatttcattcctccactttcctaaatttaaatatttcattaaatctatcataaagttcatataattttattagatttaaaatttagcccacaggcaattttaaatttaataaaattttcatcttcatcatgtttctacattggtaaaatatgaattcattaaagcctcaattgtcttttaacatctaaatttgtaatcatattcttgcagctatttcatccacctctaaatacgctgaaatcactagtgaaatccctgagcttaggagtgacaacttcaaaatctggaaggaacgagttcttctccacctagcttgcactgacatggactatgcaataaggaaagacgaaccagctgctatcactgatactagaagtgctgctgagattgcattgcgtgaaaagtgggagcaatccaatcgcctttgcatcatgttcattatgtcaagaattcctttgggaatgcgtggatcggtggtgccacctgagaaggttaaagattttatcaaagttatggatgagcagtttgacacttcagataaatctttattcaacaacctcattcaagagttctcgtccacaaaactcacc

SEQ ID NO: 290762 - DNA, 584 bp, Cannabis indica
atgtcctcctctcggattttcaactgatgatagcccgatcggagatcaatcttggagaagaccgtcttcccctgaagttgatcgaaaagatcatcgatcctaggtaatggatatttattcttaactgttagcttgtttaactcccgatagtcgatgcacattctcatagacccatccttcttcttgacgaataataccggagctccccagggtgacacactaggccgaataaaccctatgtcaagtaacccttgaagctgaattttcaattctttaagctcagctggagccattctataaggagccttggaaaccggttccactccgggtgctaaatctatcacaaagtcaatctcccgctgaggtggtaaacccagaagttcttcgggaaaaacatctagaaattcccgaaccactttgatatcctctggccgaatagtgtctggccgagtggtgtccaccaccacggccagaaaccctagacaaccaccacacaataattccctagctgacagggccgaaatcaccgggatccgagatccctgaaccgaaccgacaaaaacaaacggttcctcaccttctgg

SEQ ID NO: 290763 - DNA, 727 bp, Cannabis indica
tttgatttggcatgagaccaagagagtgaaagatggaaaacttagacatcctgcagattcccaagcttggaaaaaagtaaactacataaatcctgaattcaaatctgaaccaagacacattcgtctcggtctgtctgcggatggagtaaatccacatagatctctaagtagtcgtcatagttcatggcctgtcttcctagttatgtacaatcttcctccctggttagtgatgaagaggaaatttaacatgctttctttaatgatatcaggcccgcaacaacctggacataatatcgatgtatatttggaaccattgattgacgatttaatagaattgtatgagaacggggttcaggtctatgatggttttaaaaaagaattttttaatctgaaagctgtgttgttgtggactgtcagtgatttccctgcttatagtaatttatcaggcttaagcacaaaaggttacgaaggttgtccgatttgttgcactaacacatcggctcgtcgcttggcaaatggacacaagatgtgttatatgggtcacagacggtacttgcctgcaaatcatcctgatagacggaagaagaaagcattcgatggtactgaagagggtgatatggctcctttgccactgtctggggaacaaattctccaacaagttcaacttgtagattttaagtatggaaagacgcaaaaaaataaaaaaactaatggttgttttcaaaga

SEQ ID NO: 290764 - DNA, 1105 bp, Cannabis indica
tgtccggttctgtagtagagatggaattaataaaaaaccctcaactataaccccaaaagaacccgattccgtaaacaccatagaggaagaatgaaaggaatatcttatcgaggtaatcgtatttgcttcggtagatatgctcttcaagcacttgaacccgcttggatcacatctagacaaatagaagcagggcgacgagcaatgacacgaaacgcccgccgcggcggaaaaatatgggtacgtatatttccagacaaaccagttacagtaagacctacagaaacacgtatgggttcgggaaaaggatctcccgaatattgggtagctgtcgttaaaccgggtagaatcctttatgaaatgagtggggtagccgaaaatatagccagaaaggctatttcaatagcggcttccaaaatgcctatacgaactcaattcattatttcaggatagagatgtagaaccaaaagaaaaaggtttttggatgaaaaaaaacaattgcaggtttctttttttgttttgaataaacaacatttttttttttacttcgccctttgcattgaaaaaacacagatcaaaaatgatatgattcaacctacaaacccaaacttagtaatagtagcggataacagcggagccagaaaattgatgtgtattcgaatcataggagctagtaatcgacgatatgctcatattggtgacgttattgttgctgtaatcaaagaagcaataccaaatacaccgctggaaagatccgaagtaatcagagctgtaattgtacgtacttgtaaagaactcaaacgcgacaacggtatgataatacgatatgatgacaatgctgcggttgttattgatcaagaaggaaatccaaaaggaactcgaatttttggcgcaattgcccgggaattaagacaattaaatttcactaaaatagtttcgttagcacctgaagtattataagatgagaccctaaagacagtttttattttatagtatttgaatgaaattaatttagtagatttagtagattgtttgtgtctcatgtatatgcctttaattttctaattaagaaaaaaaaaaaaagagcatgttgattatatccaaattt

SEQ ID NO: 290765 - DNA, 512 bp, Cannabis indica
ggtctaggtctaggtctgggttcgggtttggttcctcgtctgggttcttgtcctagtctgagtccaagatctagacaccgactattggtcggttccaggccctgttacgcgtatcccaagtcaagatcttgatcactgtcacgggtctatgtctgcttctggttcagaacccatgtcccatttctgagtttgggttcgggatcgaggctggggtgcagttctaggtccggaccctagttctttgtccctagcctggttccatgtttgagtctgagttcaggttcgggttcgggtcccgagtccaggtttgggttgggatccgggtccggctcccaattcgggtctaggtctgatttggagtctgggtcctggtccggttacggttttcgatctagttccaatttcagttatgattccaagtccaagtcctagttccagtcccagtcgacttccggttttggttccaattttgggtcacagtgtacacctttgggtttgggactgggttcagg

SEQ ID NO: 290766 - DNA, 714 bp, Cannabis indica
acgaagtctatggctaattttgcggtaattgaccaacattctgcatacaatgcagtaattgaacacccaatcgtgaaggagatgaagatcgtaacttcaatttaccacctcaccatgaagttccttacacacacaggtgtaggatcggtgagaggagtccaatcgacttgagggaatgctataacaccacagtcgagatcgtagagtttaataatttaatatctttttatcattcaataattgttttttcttccatgtttttgtgtaaatatttttatcttcttatcataatatcacaaaaatattttattctatacatgcatttgttttagaatgggagaagcaaaacagaaaaaagaataataaaatgggtatttttattttaaggtgaatttttttttttttttggtaaagaaatttttaaggagaaatttacaccctaagaatattttatattatatttgcaccctaaatttactattaatatatatttttttctttcatattctcttgcgtcattttcaataattttttaataatatttttcagatatagttttaatataacaatattgaattttgtgataaatattttttttaaaatgtgaaaaggaataagaataataaaaaaaaaaatatgagtataaattagaaagattattttatgcaagtactagggaacaaatccgcgcttcgcgcggttttaatatttttt

SEQ ID NO: 290767 - DNA, 476 bp, Cannabis indica
attaaatattaaactttatattatatcaaaatatttacaaatgacgggatcccgttttcaaacttctaaaacataatataccaaaatacatattaatcaggtcgcgcagagactacaaaatacagttcccagatgtcccgagaccgaacactccaggttgcgctgtttcgacatgtacaatctcatcctagctcaggttcactcctgttcagctttcgcctttcctttacctacacatggaagcagaactgtgagtcgacagattcagtaagaaaagcatataacatatcatataattttcgacttgtaattaggcgcccatacacctatttacaaggctcagcagatgaataagaacgttaatactaaggtacatccactataccacatgcactatgtacctcactgtacaagtgttggtagggtttgtttcgtaccctgagtaccactgagtgatataccacgcacccccagta

SEQ ID NO: 290768 - DNA, 580 bp, Cannabis indica
gaaataaattatgtgaacaatatagcataaaataatttttgatcttttataaattagtaaatctgatttatattgaaatgagttttatttagggcataaaacccaacaagctaatcatagatatagattctatagcttctatctggacatagaactgaaatgataatttctttcgagcttggcttaatagagataaatggaagagctcttattttattaattatattagtttacagaaatattatttataggaagctaagtattttaaggataaaatacattgaggggtgaaacggtaaatttatccctacttaatgtaaatcatctatagaggatcttttaattatttggattagaatgatggataaattcatggcgtatctatatcgtggaacatatagagcgctttatataattaagggtgcaattctaaatctacagcggtgcaaggaggaattaataagttagggaatttactaggtaaattctagatatacttactggaagctcggttatacatgcccatggtccccacactagttgagacaatactgttggtaagactcagttaattggtttt

SEQ ID NO: 290769 - DNA, 498 bp, Cannabis indica
tggatccagttttttactggtgttttcaagagttgttctaccatttcttcagcaaccagatttgcatagtcaattatgtcgaatttgtcgttctcatcttctattgtttctgactgttccccttcttctgtttgctgtcccgttgtgtatgattctgttgttgttatgttgttttcaagcgttgttgtgttgttttcgatcattgccacattatgaacggtgttgttgtggatatcaaatttggtgttgcaacagatgttgtgttgttgttttgctggttgacgcatagtggatatgtggtgaaatctgtttccttgattttcaattccaagtaaaagtagaggcttcgatcattgtatatttttatcggtggtattccttctttagcttggtactgtatttgtagtgttgtgctggtgttttcgcaccccaatgaagtaagcagtatttgcagtagctcttcgtagttgcattttgttggtatgaattctccactag

SEQ ID NO: 290770 - DNA, 737 bp, Cannabis indica
aaaggtcagcctccatgcgaaaactgaccatcccgtcaatatgcgagaagagatacagctatcttgggcaagtaattcacgcatcctcggttaaacggtatacctccagaaacggctgggagtttcccagtgactcaagaggtatgcattttcgagcataaccctgaagttactgggagacccccaccgtttcgagactacctatcaaccaaagagtgcgatcattcgagtattaacgcacgtcaacaaatggctgggtgtatcacagtatctcaaggggcatataatcgcatatatggccattagaatactgtgacacacccaccatttggaatggcaattaatactctcaccactcagcccgcgacatgtaaagatcctaaaaggtctagctaacagttaagcggaaataagtcttggaaatatgcgattattcaagctgttcatctgaacacccgcgaacattcaaattgttcatccgaatatccgcgagtattcgagacgtgaatcagtgcctatgaattgtgtgcggttatgtcagtttacaggccctatactatgaatgttacccagtttcatttacccaaaacacataaatacccactagcatacattcctaaaaagcctttaaaaacatccaaacccagaaagtaaagcacaatttctccaaaaacaaaaaacgaaaatgcagtgatttagaaactaacctttagttttgattcctgcgaattgctctc

SEQ ID NO: 290771 - DNA, 668 bp, Cannabis indica
tctctctctctctctctctctctctctctctctatctctatctctgcctctcactatttactaaaccctaaacaatcatataaacatcttatatatatagtcataaccctaagaataaccataacttaaaaaatttaaaaataaaaattatatatatatatacatacgtaacaacagtaataataataataataataataataataataataagtaataataataataataataataataatagtattaataataataataaattaaacaatatgctataatatatttacccatatttttattattaatatacctacaataatattcacaaataataaaatattaaattatctctaataatttaattatttatctagcattatacatacccttaaaataaaataataataaaataaaaataataaattttattgtcactaaaaaaaacacatacaccactaaactaataattattcgaaatgataaattatccccatggcaaacaaaataaataaaataaaaaaaaattaattacccaagaaagcggatattacaattatcccctcctaaaaagaaatttcgtcccgaaattctactcgatattattttatttttttttcgaaaagcgaagacgcaatgtcttatacctcagcacttgtcatcactct

SEQ ID NO: 290772 - DNA, 986 bp, Cannabis indica
gttagcgctcccactcaattgcactaccgtgttcccaaaatgtacgtatcaccctgacccaaaagtaggcttaactaacaaatcaaagaacacgaataacactcttgagattgagcctaatcatatcaggattaagatcatttgatctaggatcaactaggcgatattgacttgaatagatattacggtaagtttgataaatctatgtcaaagttcaatatcggtcccttccgatgcatactccatgcacccaacctgagctttactttaaccaatgctctggaaagaacatagcatttctccaaatgcaagtaaactctgttgtagattatcatatcagtaaaaccctgtgtctgataaatctaggaatctttattcacatagtcatgtttactttccaatgtgttgacaacacaataaacaggatcaagtatgtgaaaagggtttcagatgaatttataaatcaaatagacaagcaattgataagatgaaccaaaacatacacaaatgaatgaaaaatacttctgtttctttattgatgttgaataaaatggattacattgaaatggagttttatttagggcataaaacccaacattgcccccaagcgtgacaagggaaattcttgcaccagatagctgatctgtagctgacccgtttacatgtagtttctaggttggcttatcttcactgttacttggctgaggtgtgtgtaccggcttggggttgctttctggtatgctttcttccttgcctgtgcattctaccacaaagccagctaaggcttggcctttgattgctgttcggggttggaaagtaattttgtattggcccaactccaccgccaacttgagtaaccgtctagaggcatctggcttttgtaatatttgacgtaatggttggtcagtgtacacccgaacaggatgagcttgaaaataatgccttaactttcttgttgctagataaggcagtaagcgagtttctct

SEQ ID NO: 290773 - DNA, 781 bp, Cannabis indica
ggtaattagtttgattaatcattgtgaattggttaaagaactaatgggttacttggagtttttgtattctggcaaagacaacatatctcgcatatatgatgtttgcaaagctttttatcgcgcggagaaacaagataagtctcttatgaattattttatggctttcaagaaaacatatgaagaacttaatgtgctattaccgtttagtcctgatgtaaaagttcaacagcgccaacgagaacagatggctattatgagttttcttgcaggactctcatctgaatttgactctgcaaagtcacaagttctctctggttctgatgtctcctctttacaagatgtgtttactcgtgttcttcgcacagagactacctcttcaactcctcttaatagcgccttggtgagtcgtaataattctgcaccggaaagaaactctactccaagtggatttaaaggaggtaattcacaaggacctgataaccgcacaccaaattctgggagcatcatgtgcaattattgtaagaaaccaggccacaccaagtttgagtgtaggaagttacaatttaagaatcgacaacaacactctgccaatattgcaagcactagtgatgcatctgacaaatcggtccttatttctgctgatgaatttgccaagttctcaaggtatcaggaaacacttaagtcttcatcttcttctgtcactgcgattgctgattcaggtaactctaatgcatgccttctttccaaatcctcaaaatgggtcattgattctggtgccaca

SEQ ID NO: 290774 - DNA, 505 bp, Cannabis indica
aggttaggagcttacattcaatggtgaaaagaaccttacctaaggagaaaataggaaaaacataatgaccattgaatgctagttgagctctcaattttggttattttattttgtctttatctatcttctttttcttcttttatttctttgttttttttttttaattgtagaagggtttgcttatttctctgtaattaactattagtataaaaaaacgagaaatcacgccataaacaaatttttttttaacagtttgaattgctctagtggttgttatgtaaatttaagttacgatttaagttgctctattggttactacgtgaatttccataaaaaatcaaaaaaaaaaaaaaaaactaccttccaaatgtaaaagtacaaaaacccctaaaaaacttaaatagcaaattcgtataagtaaaattattttctaaaaataaatatctatacaaaaataatttaaattaactccttttttttaaaaaaaaacttaaaataataaatt

SEQ ID NO: 290775 - DNA, 1420 bp, Cannabis indica
cgctcagcaatatagatccatggtccccattctagttgagactatactgtttgtaagactctataattgatttatgattaatcaattataattctaaaagttagactatgtctaatttgtgaattctcacagtttaaggatgaaattgtaaataaaagggtttctaggtttaattattaattaagagactttgcatgtctaattaataattattttaaatgacaatattatttaataatctattttagttattaaataattagttttggcatttaaatggttagaattggaaaaatggcatttttggagaaatagaaataaaattgaggaaactgcaaaatccaagtgaggcccatacacaccatggccggccacatgctttgcatgtttcccaattattattttcaattttaattgccatgtaattgctaatcaaagcctagcaataataggaaagtggtggatcacactaaataaggcagttaatcaattacacagtaaaagaggaaactgcttatttggaaagttgagctcttcccttttcctatatatagccgcccctctctcttctcttggtatgtctttgtattcctttatatcacacgaaatcaagagagaaaagaagagagagaatttcgaaattccttgtgagagagaagtgcccacacacatcattcagtacctcaatcatagtttggaagactgtgaaggatcacatccaactgaaggacatcgggctcagatcttgattatactctgctacagacaggaatcaagggttagagatctgagtggaaggagacacttaattccgctgccatcactgtaagttattcttaacttttatgtgttttattcatcgttttagaagttcatatttaggttgttaaatcaacatacttgtgagtagatctaagatcctagtaaaattaattccaacagtctgattgaatgaaccctccattcttgcgtcacaccttctccgacaatggttatggaggctgtcgctccatcacgctggtcaccaatgggggcctcttcacgacgattcccttcttgtgctacttgaggtcccaggatgtccccgacttttcgttcaggtcgaccaactaacttgaatctggaaaggaggtaagaactgtgttataatgtgtaatatgaatatgcaagtgtatgtatatgtttaagtgtatatgcatgcttatatgtttgttacactaccaacacttgtatggttttggtacagaatgcattggtataatgtatattgttaaggagtacattacggtgataccagcacaagtatgagaaagtacagggtgtgtgtagtatatcactcagtggcactcagggtacaaaacaaaccctaccaacacttgtacaatgaggtacgtagtgtatgtggtatatgttgggtttt

SEQ ID NO: 290776 - DNA, 578 bp, Cannabis indica
tttttgatttaattaaacaccatatgtaatttttttagcataatttatcaaactttcctttttttattttttttttttgtttttttgttagacaaaagataattaagtaataaattgagtataaaagagttattctctaaaacatttaagataaggacatttacctacataatagtatgatgaggacatttacctagtatgttttttgatcatttacaatcattactcattacttttagaattgggatccaaccaatccattatttaggtaatatctctttgcttagtatgaacaaaagaaaaaaaagatcattggacacacccatgttgagctttatgtttttactagacttctaagaatgatattttggattaaacttggtatgctaagacaaattagaaagaaaacaagtacataatttagaaaaaaaaaaaaaaacacaaaaataataaaaatacggttgtatttaaatatttttacgattttatttacaaaaaatatagtattttgatgtatttttatattgtacttttgtttattttttgttatttgtatgttattttttgttattattttg

SEQ ID NO: 290777 - DNA, 804 bp, Cannabis indica
agaaagttctgatatagaagagatagaccctcgtttgggcgatgaccgtattgacttgggtcccattgaagaacttgaagaagttactcttaacttaaaggagccaaccaaaaccgtaaaagtggggaagcacctaagtaaggagattaagaaggctgttattcagttcctccgtgacaaccaagaagtatttgcttgggcacattctgatatggtaggtataagtccaaatgtcatgacccacgtgctgaatctaaacaaagacgtgcccgccaaacgacaaaagaggagattacttgatgaggttagagctgtggccttgaaggaggaagtaagcaaacttttagccaacaattttattcgtgaagccttctaccctgtatgggttgcaaaccccgtgttggtgccaaagccaaacgggaagtggcgaacatgcatcgatttcactgacttaaacaaggcatgtcccaaggattgcttcccacttcctcgcattgatcaactagtagatgctaccgctggtcatgaacttatgtccttcatggatgcgtattctggatataaccaaatacccatgaatgtggcggaccaggagcacacgagcttcactactgacatggggctttattgttacaatgtgatgccctttgggttgaagaatgccggtgctacctaccagcgacttgtaaataaaatgttcgccgatcaaattggagtcaatatggaagtgtatgtggacgatatgctcgtcaaatccaaactctcaaagaaccacgttgacgacttggaagagtgtttctctat

SEQ ID NO: 290778 - DNA, 624 bp, Cannabis indica
ctttttggcctttggaagcaccgaaaaaagtagagtaggtgcccgcacccgttcaggatcactcctgaccagttcagacccaatcgttggtggtccagactccttagacttggtagctttgggggtggaggggtttgcagcagtcagctcctcggaaagatcaatgacctccccggtaggcctcttttcctttgtagtggacccctcactgcccttagacttcttggtcggaggagaggcgctagagcttctgcctattctcttcctcaaagcattgagcatctgccgagacatgtcggcacagaacgaaaaatcacgtggttagaaaatagccatcaaaaacataaggtatgatagttaagaagctcaaaaacaagacaaagcaatatgcaaggtgactgcccaaacaagattcgaaagttcatcatcacctgacatcaatcttattttagacataacagctttcccttttccaaacacgggagggggtgaccgaacaggtgaaatgggctcccttatgcgaatcgcatcttcaacaggcctgggcgaggccgggagtttcttcttcctcttgagtggagtcacctgctcttcctcagcatcatcctcaggattcaagggctc

SEQ ID NO: 290779 - DNA, 329 bp, Cannabis indica
taattacactgtgtaattacataccaaaaataaattcaaattattttaattaattgatatgatattttaattatttttaatgtattgactttccctttttctatcaatcatcaaacacgtatacattcccatatacaacctttcatcaacctattttctatatattccatatctctcaaataaagaagaaaatcctatcaatgaatataatatagttatagtataggcatgataatttgtttcttataatgtttaattttagagtatataatagctcaaaatatatggaacacaagagcaattagatagtcttaaaaaaaaattatttt

SEQ ID NO: 290780 - DNA, 1147 bp, Cannabis indica
taagattgttaaatttaaggatttttgtctaattttagtaaaaaaattcaacatagatgaaagttcaaggggcatgatttagtacatatcaaagtttgagggcatgatttggtaaatatcaaagtctggggagcatgacttagtacatagaaacagtaaaattgaatgaaattagacaaaagtccttaaatttaacaatctcaatagttcggggggaatttctaacggccaaaaaagttcagggggcacgatttagtacatgtcaaagttcggggagaaaaattactaattagcctaaaattaataaaaaaaacaacatcaaaataacatatataatgttcaaccatgattaaaaaaaaaaaaactactaaaataacataatgttcaaccatgacaaaattctcatctcccaggatcaaccatcggcctgaccaaatttgaaaactgagatccataatgttccgtagaaatatggaggctcgtaaacacaagacaacaaaccaaaattatgctcagggtcaaaatacacaatacccaaaatctagtttctcaaaatacatacactttcaaaactaaaacctaccttccaagctagaattaaaccctccgcattacccacagcaggattaataatgttattataaaaatgtaaattcctaagaatacgtaccagattagcagcttccacttttaattcagtagtaaaaataatgttaggagagtacggctaaattagggctttcaattttgaaactatagaggtttatcccaatcttctacagttccaagcaatgcttactatggctcttgtagaggggatgaaccatccaccttgacagggaaaatgacaccatctgccacacaaacagcaaatccctcatcctcagtcaataaaaaattgttgaacgggatagcaatgtccattgtaattagttaatattagttaggttattttttttccttgtaattagttacttagttaagtaagtttgttagttccccaactaactgtagttaattccataactaattgttagctctctaagttggctaactaattggcctatatatacctttatatttcattctattcagccaagacaattcaatatacaagaaataaataattcctttttttaaaaaaaaa

SEQ ID NO: 290781 - DNA, 646 bp, Cannabis indica
aaatcaagaaactcaaacaagaaattcaagaactcaaccagaccaacttgaaatctttaacaaaggatttctgggacacattataattatctttacaattaaattgcctattaacacttatctttattttacattatttagattcattaactatgagcaatttaaaggttgacattgacaagtttgatggctctggtgattacaggatttggagaaggaaaattaagtcactcttggctcaacagaaactgttgagagtgcttaatgatcctatagaatggccagaagggactaccaagattcaacaagaagaatacttggaaactgcaactggaatcatgatattcaacttatcagatgccataatcagattaatagacaaggaagaaacccctgcccagatttggaagaaactggaagaacagtttcaacagaaatccctaaccaacaagattttcttgaaggaaaggatttttgggtttaaaatgagttcatccaaatctcttgatcaaaatttggatgaattcttaaggatgcatattgaacttgcaaattctggggaaaatgaggcactaagtgatgaaaaccaggccataattatcctaaattcactacctgaatcctacagagaagtcaagactgctat

SEQ ID NO: 290782 - DNA, 558 bp, Cannabis indica
tttttttctattgaaactgtattttatttttccccaaaatagaataaaggaaaaaaaaaaaaaaggaaattgtattaattatgaaaacattatattattaaaagcacatactgataattaatcgcaccaataacgatatgatatcacacaagatgttaggcactactgatacctttcagcatctagacactagtagtgtctaacaccatcatgaaataacactttagaagtgagaattgctaaaaggcattactagtgcataacaccctcttcagtattattagtataattaagtatcggattccatatagcttaagaaaataacttttaaggatatcattaactaatcgtagggcgtcacctataaaaaatattagacactgctgatacagttagcattactttacaaatacagttaggaatgatagtacatattaaattaagggaaacttacaaaaatactggatttttggttaacttttacaaaaatactgtcacacggaaattttttcaaaaatactgtgtttttataaaactaccagtaaaacacaaagcaag

SEQ ID NO: 290783 - DNA, 729 bp, Cannabis indica
gttcgcgatatgttagcgacattatgcgatgtcgacaaaagaaattgctgcatcgcttatcgcgacatatgtcgcgacatgtagcaacattgtgctgcattttgcgattatcataatttttgacttctttcacagtttttaattattctgtattttcttttttgtttcagttggtggtgaagaagtgcttgtttccccggcccagtgaagagacatacttcaagagtattaatgagggtaaagcccctctttgctttgagatggatgtggaacaaacggtggacgttgatggtacacaggagtctgtgtttgaaactcaagcgaagaccatcaacgaggccgtgacaaaggcaaatttagttccaccaccaccggcacctgaagtacacgagccatctacttcagcaggtccttctgctccaaccagtacaactgtggacactgaccttgtaaagaggttggatagcattgaggcccggctggagaagcttgagtcccagtaggaagccgtcatgttggcacagacggggttagtaaatagccatctcagtatgaggcggtccttcacagagagtcagaaagatctgaaggagactctactggctaagatggacgagttgatggcaatggtaaaaggagcgcccacacctggagagcccacacctgcaccgcaaaatgagagacacgccagtgatacgagatgcttccagagattgggaagcagatgat

SEQ ID NO: 290784 - DNA, 938 bp, Cannabis indica
gaactatttttgattatgaacataagtttttagattattcccatatttgttcttgttatttgtttatgtaattttgtgctaattatcatttcttaatgcttaatcaccattaattagtatagagattttaggttttaaacttgagagaggtaatctaaaatcagacataggaaaagtgtgagattgagagattccactaattctatgagtttcatttaaagagaatcatattacttttacgagtgcttatttaattaacattgaatagagatatcgtgttagttattctaagttgaatctatcatcgctcgagagaggttaataggttacattaggattcttgaaactaaaaattataggataaattaggataatcgataaatggagattcatagtttgaaatatagaaatcaatgctctaggtttttttactttctgattaaaaattagttgtttgtctatttatgtttctattttacttattatttgtttcttataatttactttgtgttatctaattaaagtataaaattgaaaagtataataattagtaaaatttaataatcaatcctagtgggttcgacaacctttttagtattaaagctttgttataacaacactatccgcttgcagtaaaaatagtgcatcacaaggccaagttacaacagtgacaagcagattattggtcttctttcaacacttacttctgccttacagggaatttcaggcacagtggtacatggatgttatgctctcaagttgtatagggctggtcagcctatcatggcattgaaagccgagggaacgtcgagtatgaagaactgcgccattagagttctggtggttggatttctccagcagagaggggtaatctgatatactcgatgagtgtgctacttcagccaaagaggccatacgtcacttgattgcagggtgcc

SEQ ID NO: 290785 - DNA, 570 bp, Cannabis indica
  modified_base (64)..(64): a, c, t, g, unknown or other
ttttttttaatttattttataaattttcataatgaataattaaaatgttattatatttctctcnttcaatcatgatctttaaattattattatgttaactattttgtaataaattacatacatttatattaattttagtgatgccttttgatttttttttaataatttacactatataattaatgtattgaagataatattttagcattttttttattaattttaatcatttaattttataaaaaaaaaatcacaatacatttatattaattttttataatttacaccatataattaatatattgaaaatgatatatgtagtatatattttttaattaattttaattatttaactttctaaaaaattattaatttaagaaatttttttggttattgataaacttaattttgaattattaatatttaattttaagttgtattctaatcgatctatttatctatatatttttatatctacatataaatctgaaaagaaaaaaaaagtgtggtgaattcatctcctttcaattttctactttacctgatttgcagttttttttataatttttt

SEQ ID NO: 290786 - DNA, 700 bp, Cannabis indica
taaaattttaaaaataaaattagataatattatgccaaatgagcaagaaatctaatataacataatgctaatttttaaaaatgatctcaagtttaagatgtatatttaaaagacctatataagtacaaggcatgatttgacaaagtacgaagttaagcggtaaaataattttagaaaattttacaaacgtacctgtttaaaaagaatgtaccaatgtatttttatttgttttgatatctgaaataattttttagttaatttttttctcatggtcatgtacactataattatttaagaccttttacaaaattttaaaaaattaggaaaaatttaacatgtcgaaaacagaattcaaacagtgtgttgtatgcttgaatattttattttaacccatgtgaaatagattatttgaatattatttttctatattgtaaattattaatttctcaaaattttgtaagatatctaaaataatttacacaaaaataaaaaaaaattaatactaaaaatttcttctatatgttgaaacaaataaaagacacatcacttagcgcatccttttaaaaggaatacattatagaaagaggacaattttttatttttattagggtcttctaggatgggatactaaattgctccaatgttactttaaatgccattcatatatgtgggaggtctataatgtcacactaaaaaatag

SEQ ID NO: 290787 - DNA, 528 bp, Cannabis indica
aaatttattaactaattcatcccaagtagaaatggatcgggctgggagtgaattaaaccaggctttagacttatcttttaatgagaatgaaaaaagtctaagcctaacagattcatcagaaaaattttgaaatctaaaagtagaacaaatttctaaaaaatctttcacatgcatgtatggatcctctctatctaacccataaaaagatggcaaaaattgaattacagaaggtttcaacacaaaatgtgtagcatttatttcaggaaaaataatgcatgatgaagaattagcataaatgggagaaaaatgatcaatgagagttttttcttccacatttacttgatttggttccatgatgtaaaattttcacttttaatttcaacccacaataatttatttttgactaaataatttttagaatttcgttcttaacaaatcatataccaagtatcacaaaaattaaaataataaaaaaaattaggaggcggtgcctaccatataattgcgtaaaataaagactgaatttaa

SEQ ID NO: 290788 - DNA, 496 bp, Cannabis indica
atatgtaacttaattaaaaataaagaaataaaaaataaattattaatttttattgtcacaataatatcataaaatcttaatataatggatttagtgaaaattaatatttaacaataataagattaatccattaataacataataaaatcgtgacttaattataacaaaattaactaattaataacaagactactaaattaaattagtatatacaaatttattatcttatatatagtttgtacataaagatgagaatattatttctcatagttaaagaaatgtacaactttttgtaattaatttttttttttttttgcacatatatattgttataaattttccttttatcaacataattgtctatatttggcaactgttcatttgaaccctagagtatagcttattcagaaggaatttagctataagtactaggggtgtacatcaaaccgttcaaaccgctcaaaccgcccgcaccgtatcacaccgcaaaaaaaat

SEQ ID NO: 290789 - DNA, 379 bp, Cannabis indica
atcaagatctgaatctggatttctttctctccttcctttgatgctgattctccttcttattgtttgcattctcctacagtcttacacactatgattgagataccacttgatgtgtgtgggcactactctatcactcaaggaatttcgaaattttaagaaaagaaaagagagagagaggggcggctatggctttctctaaaagaaacaatgtgcaagtcatgagtttcctaaagccaacactttcagccatctaggcttaggtaagaattgtatcgcattaaaataatgaaaaaataaatggtaaaagcttagcataatggccgcccatataaggaaatttgggcctcactttgcaactttcccattttgttatttttca

SEQ ID NO: 290790 - DNA, 595 bp, Cannabis indica
agattcaaaattgcttctccaattttataatcttttatctcattatttgaatccacaatgatccactttctttgagtctaaaattgtccttccaattgtatgagctcatttcacaatatagatccactttgatcactatgctcttgctatgaaatgaacaaacacaaaaaagtgtaactcacatagttcactttttcttatctcataaaatgagatgattatcaccaaaatggaacttcatttccaagtaactatctttaatcataatatagtttcacaataataatgatagaatgaacacatttttcttatcatcatctccattatcataccatatagtacatatattaatatgataatttatatacatatattaatacacaaaattaatatataactcccataaaattataactctcaaataattttatattaattaatattgtatatatgttaccatactatcataaataacatatacaaaatatcaatattaattccacaattaaatatatatatgttacatatcatatatattaacatacaaatacattaatatgcatatacacaatatatatatcatgtatgcatgtat

SEQ ID NO: 290791 - DNA, 429 bp, Cannabis indica
ctgatcgtgaaccaggtcctcggggaataccaggccaaagattgaaaattggcgaagtatttagagaaaatttggtaagaacttggtaaagattcgattactttaaaatcgaacaaattccgagagaacaaaactccaacaccgatgccttagcaaagctggcctcgtcaaaatgacctggatgaactaaatctggttctggtagaaatgcagagcaagtccaagtatatgtgaactaaagatgtcgagatgatagatagctctccaacatgcgtgacgcctattatcaactatttactcgacgggcaacttccaaatgacaaaaattgaggcatgaaaactattgtatatagtgcctcgtctacacaatgatcgaaggcaaactatatagaagaggtatttctacttcggtgtgttcctcccgcagaa

SEQ ID NO: 290792 - DNA, 470 bp, Cannabis indica
gaactactagtactcataatggagagactgggttgggtactagagatccatctgttggagaacctcgagttgtgatcggtgatgatattgagttgcaaaacctgtgagataccttagggtgaaattgtaatttataaaaattattattttaaatagttatgacaattatgaattgtgtaattaaatagtatttaactatttagttttatttgattaaactatattaagtagttaaatatatattattattattattaaataatattacagagagaaatatattattttagtgaaaataatctttattttaatccctgtaaaataagagattaatgagaattaatcaattaatatttttcggtaaagtaaataataaatcttatttgtggtaaaattgagaaattaattttggaccttaaaatatgaccccccacattgtaagcctagtccacatgtgtagggtgacatat

SEQ ID NO: 290793 - DNA, 603 bp, Cannabis indica
tatttggagtgattttagattgtcacatcaccgctttatacttctcccgattgtataaagtttttttctatctttttttaattaaattaatactgctattatgtataaaaggagaagtatgagacgatgacgtggcggtctaaaatctcttcaaaactattttttttcctccttaattctctcatttttttaatattttattaaagcataaatttaaaaattaatattttactattattttaataaattttctacaaaaatatctattttaaattaattatattttaaaaaacacataataataaatataaattaaattaataatattaaatttaataattattcaataatttatatatatatatatattcataactatatatatgtatgaagtttttctttttactttgcagaaaataggaaagagttttttttttttatttagaaaatttattatgaattgaacaaaaaaaaaaggtgtgagattatgtagaagaagatacaggtgtgagattaagaatcaaatttttactataatccattatttttattatttctaatcatataaagttaggttgtcatcattgtagtttctattgatat

SEQ ID NO: 290794 - DNA, 690 bp, Cannabis indica
tagataatgcccattgttggtgttagttactattatctattgtaaatagacaaatttgaaattttatgcataatagggactaaaattggtatactaatttaaaactatataaaatttgtaaaatgggataatttttactaaaacccaattttacccccctcattctaaactgactctctctctcttcctcccctttctctctctctttcgaattcccaccacccacatggaccgaacccattccccccccccccccccactcgaccgatgaaccctccatccacagaccgaaaccattcccccacgatgctcccccaccgacccacgacgcacccccaaccaaattggacataatgtcaaaggtgagttcgtgttccgttttttagaatctcagatctggccaaggttcgatgtaggtccgatggggttaatgaatttgtaagtttgtgagataggagacataggtctgatgggtccgatatggggtctgattggtccgattatgtctgatgtggggtccaatagggggtctgattttgtaaatgagagtgatgtaaatggggggtattttaaggatattataaaagttgtcatatcctataaatattagttattatgtgtttagggaattttttttaacctaatgtaagcacaaaaaatcaaatttttcttgtaaattttgtaatattt

SEQ ID NO: 290795 - DNA, 621 bp, Cannabis indica
tccgaagcatattgaccctttttaccaatgttgcccataatattggtgtcgtggccagtaagctcaattcgtagaataaaaatgtgcattagcgtcacaagaaagccattaacaataagaataaggagcttgcttttcttaattccaaccttaatcttaccaatcatagcgagttaaggaaaattgaaaaagaatttgatgtcctcaatgaaaaagaagaaaaatattggatctctcgtggtaaaaattcttggctcaaacttggcgataagaatttaggctattttcacaagtgtgcctccgagcggaaggctaagaattagggtgagcataaaatctagaaaactgaaaaaactgttcaaactgacctactgaacactgttagaatcgaaatcgacgaaattgaaaactgaaaaaaccgctaacagttaaaaccgccattgaacggtcggttttttttaagtatcaaaccgattgaaaaaagtaaaaccaactgttatacatatatataataatttattaagttttttttttgcatgtattatagttactaataatatataaaaataatatattatttttttttattgatattaaagttaaaagaataagataattagt

SEQ ID NO: 290796 - DNA, 565 bp, Cannabis indica
aagcatcgagatgagtatcatggagatggaattttattcagaatgtaaagtcaagaagacgcaggacataggcagtgccagttatctagggtgaaagtctgcaggactcaggtactaagataacaccatggcaatttggcctaaggtgaaagttggcaggactaaggtactaaggcaacatagaaatgtcgaggggcgaagagtcagaatgaccgaggcattagtttaacatcttcatcaaagtgacatttagaatagagggaccatatgcgagtatgcagttagcttgcgagctataccaggagaggtattcttctaagagagagaagttcttcccaagttaaagtgggggagcccactaattcatatgtttgaagaatcagggtacttgtttgttttggtgtgtgaatccagagggaaacactacaacaaatgggttgttcagtgcgaagacttgcatgattactgcaagctgcaatagacaatatgcatgggcatagactgagatcaagactgagctagtttgtggcatgttatgggcatgctttatgtttatgggaacact

SEQ ID NO: 290797 - DNA, 540 bp, Cannabis indica
aaaaaaaaaagaaaaaaaaagagtcgggtcagatctgatctgatccgaataagttgggtcgaatctaattcgatttgagtatctgatctaacagggcgagcgggacaaatccttacatgatctagatcagatcggatcagattcgatccgacccatttacactcctatttgctacctctaattttcttgatttgctttgcattaataccacttggcacttgctaatggagttgtagttgtaccttatgcatcttttacttgtacttgttggtctattttacattccctgatcccatgtgctaatgtctagtcagccataattttctttatagttaatatcttgatattttgagggaataaagaaaaaaacatcacgatattttttagaagaacaaatatgatttcatttcttcttgccacctgtgatatttttacgattaatttgcggcataaatgtctgggtttaattctcatttataaataaatagttaagtttaatttttgacggtaataataattaaattataattttaaaatttt

SEQ ID NO: 290798 - DNA, 592 bp, Cannabis indica
gttcaaaaaaacatacttagtatatatcaaagttcagagacaaatattttaaataacttaaattaaaataatgattagagattgaattaagactttcactaatctcaatataatgaatgttatccactccataatgcctttaccataagaagtacaaaggtggcaaaaattaggtgtctaaattatttttagtgttattgatgtaattaaatatcaaatataataaaaatagctcaaaatgaataaatgggaattcgtttggtcaaaagttgacagtataaactgatttgaccatatatataaattgattgtatggtggataataggtgtacatatttccatcaatattaggtatatacatatacctcttattagaaagtgatgatgcatgcttggcaggcagcttttaggatctgtgttggaataagttccatgcctttgattttgagtaaattataacaaaattcaacttaaacccattttaaccaaaaacaaaactcttcaatccacacaacataaacacagatttagtatgggaaatttgattttctatattagaaaatcaaaaaatttgatttctaaaccaataatt

SEQ ID NO: 290799 - DNA, 665 bp, Cannabis indica
  modified_base (636)..(636): a, c, t, g, unknown or other
tcactgcggcacgcagttcatcctgatcatgatgcagatgtgttgctatgactctgcatgagtccgagcgctgcacggagattttacaatttagttgcgtcttcgatggtcgtttgggcgttgcagaacagttgtgttatgaatgcccttgctgtgtgcggaactgttattcccagtctcttgcacactaggcgcagtttcagtaacaggagttgtttcaccattcacaacgcttcccgtctgtccaggattgacagcaggtggaaatcttgaactccctgggtcctgcaatgtcggatccagtgtttgcgagtttgctgggtcggacaggcctctacgagtttgcaccatcgtgttgaatgtcgaaaagagcgatttgcgatctttctctcaatgaaagcaccaaaatgttgacttcgcttttatccaacgacaatgagtctttttgataagcgataaacgatatgtcgtaatgaaaatataataaagcaataataagacacatgtattttatagaggttcagccccgagcagctcggtaatagcctaatcctcgttattgtactgaagaacataagaagaagatctttcttatagctcttacaatgtaatctctgaatatataaattcttagtntaaatatatagccttagcttagctgcgta

SEQ ID NO: 290800 - DNA, 640 bp, Cannabis indica
atgtgtatgttattgatgttgattcttttgatagtaaaaataaatgtttaaccgttatgaatgataattcttggttgtggcatagaagattaggacatgctagtatggattctatttcaaaattggttagaaaagatcttgttattggtttgccatctattccgtttgttaaagataaactttgtgatgcatgccaatttggaaaacaaattaaaacatcttttcattccaagaaagaaatttcaactactagacctttgcaattgcttcatattgatttatttggtccttctagaattgctagtcttggtggtaaatactatgcatttgtaattgttgatgatttttcaagatttacttgggttattttcttgactcttaaaagtgatgttttggaaaactttgtcaaattttgtaaaaatgtgcaaaatgaaaaaggatattctattacctccgttaggagtgaccatggtggtgagtttgacaatgatgccttagaattgttttgtgatgatcatggttttaaccataacttttcggcaccaagaactccacaacaaaatggagttgtcgaaaggaagaatagaacaattcaagaaatggctaggtcaatgctaaatgaaatttcattaccaaaata

SEQ ID NO: 290801 - DNA, 164 bp, Cannabis indica
ctcaaggaattcaaaattttgagaagaaaagaagagggaagaggttcgacctatagagaaactactctaacactaagaatttcaaaatctcaaggaggaagagagagagggagtgatcggccaaagatagggagagagagagagagaggctctagtttttctga

SEQ ID NO: 290802 - DNA, 524 bp, Cannabis indica
taacaattaatgagtttattttttcctaaattattactaaaaaaatcatgtctttgaactattatcgatactaaatattttttaaaactattcaggttactaagttgtgaccattctcttactttttgtcctacatgaattttaattttttttaaaaggagtccaaagaatgactaaattataatgatattttaagtttaaattttagtttatttttttaagtttaaattataatgttaattttgtacaaggagtgtctatgtgtcctcttataattttttctttccatttttcctatttttttatcacattttcctattttatttgaaaaccaaaccatatgtacaaactaaaagtcccacattgtttaaagattgtttaggtttaatatatgtaggttataaataatattcttactatattactttcctttgtctaaaaaatattttttttataggtgattgatgaacttaatcttgcccaatacaatttttttttttaaagtgaatgcaaagtacattttt

SEQ ID NO: 290803 - DNA, 792 bp, Cannabis indica
aaacatccacccaaacacagaatcaaaatccaccattagagctccaagttggagttcaaaactcaaacttggttaaatctaactaacataaaacaaacctgttctaatccattcatctgaacatagttaagctttaggaaacaacaataaacacatacagtagctacatcaagcaaaacctcaaagcatgcaacttttacttacttacaattcaagaaactcaaagagacaaagttaaaagcttacctagaacttaagcactccaaatccttgaagaatcttgcaggaaatgcagaaacaacccccaaaccctagttgttctaagggtggccgaaagagagagagaatgcaattctcttgaattttctaagtttaactttttgaacaaatgagcaaaataacatattacttaacttatttcagctaacataaattaaaataaatcaaataatcacataacactaagtccactaaaggacaaaagcttatggggtaaaatgaccattttccccttccacactaaaaggattaaaaggcagttaagggtatttttggaaaattctaaattcctgactaaactcaacattctcaatgtttaattatgccgccccgctatactaaaataccaagatgtgattctactgagccatacaccgcgttccaatgttgccgggcactaaacatgcaaaaatatgaaatttctatatatgacatacaaaatacattctgaattcaaataaatcatcataaataattatttaaatatcaataaataattttcaaaattaaacc

SEQ ID NO: 290804 - DNA, 635 bp, Cannabis indica
ttatttatttaattaattttacggaattatttattttgaattttaataaacatattttattattaataatttttaaaatattaatataataaacataaggataagatattataaaataatattacaaacattaattatattaatctatttatggtaattagtttaatcattaatgatttatattatttaatgattaaaatgtatggttttatgtaataagttttcaaaatgtataaattttttaaataatttttttttgcacattttttgtaattattttatttttgttgtacatttatgaaaaaaaaaacccttcttgtaataagtgttttatttaattgtaagttattggatcccttgccacaattattcttagtattattatgaagatttaataaataaataataagactacctcattgtcaattgagagatagataggcttaggccaccgaactttagagtttctaagggagtcacctcctcctcctaataacatttgtaaccagattaactcaattttcattttcggctaaattaattaaaattgtaacttatttttcagtttttatcactgcaagtaattagtcatattttagccattttaactactttttgtttaaaagaaaaaaaaa

SEQ ID NO: 290805 - DNA, 749 bp, Cannabis indica
  modified_base (21)..(21): a, c, t, g, unknown or other
catgtttatggtttaatgtanaatttgtgtttaagtccagaacatatagtattgacaattacagtgatgtcaacacagtggaaggtaattgtgattatatgcttcaaaaagataatgtcccatgattcatcagtgcactgaatttactctgatgtgatagtcagcgataaagcttacttacaccttggataagtgttatgttctttccaaaacattgacaaagtatgctagtatcatgatgtatggaatatagattggactaggaccgatattgatcttggtaaagatattataatcttaccgttgtatctttctaagtcaatatcactagttgatcttagatcaaatgattttaatcctgacatggttaggttcgatctcaagagtgttatttgtgttctttaagttgttagtcaaagcctaccatttggttcgagtcacacgtacaacttgagaacatgatagtacaattgagtaggagtgctaaacatagatgttgtacccaaaagtgagtgttttaatatttatactcgtaagtgtacgaatcgttttagaatataatgttcatgtaagtgcaaggttgaacccatgggagttgactaacatcaaaagaaactatttcaaacaaaatgagaatattctaacctagttccaaatatttgatgagattttgattgagtaaaataaaataaaagacaagtaactaaaagacttaagattaaagatgagtgagtatgaaaatgattttc

SEQ ID NO: 290806 - DNA, 558 bp, Cannabis indica
tataggaatattggcggctaaaccacttgaactttacggttcgtaaaacttaaccacaaaaaccgaaattttggcggcataactacctaaaccctggtttcgttttgctctgtacacctccgtccaaaaatcacagttaagtgtcacggtggactgtccacgtgtacacacttttaacgtggtaaatttttagtggtccacgcaatattagttttaaaaaataattataaatatttaaaaaaaaatttaaaaatcagaagaaaaaaaaaattaaaattaattttttatttctttttttcttttttctttctttcttttttccctttcctttttcttttcttattcctcttcttcactaaaaaaccctgcaaaccctagccaaccctcacgccggcgacacccccgacccccttgtggggcatcggagccaccaacggacctcctcctctccccaatctctcaatctaaaaccccgagacccaaaaccctaaaacccaaaaccctcaagccccgaaacccaaaacctcgacctcctcctctccccaatctctcgaccaa

SEQ ID NO: 290807 - DNA, 909 bp, Cannabis indica
atcttcatgggtagtaaaaatctacatttttactgtttgtctttacatagtagtaagtgtgatttgaataatgactgtctggctagctggaatattgtcttcctttagttaattaaatgaccataactggtggtctatttagaacacgtatgtccagttggtgagcattattatggcgtccatttttatgtctagttattttttttttgccacttgagctttgatatatgtatatatacatatctttttattctgtctagccggtgttttgctttgtatatgattatatttttggtgaactcgctcttagtccagtatctttgttctaggtgggttttttgctatgtctatgagcaaccatggtagttgtgccacttcgtctaataagacgaccagttcgtctgatgatccttcgaatattcctactggggtggtaggttatgtgttggatgacgggtgtgaggatacagatgtctattgctatgcgtctggggttggagtagatactgatcgccctaggagtgatactgagtcgggcgatatactttcgggtgttaatcctaggtcagtaataaccttgaatgacttgccgaaaattcgtcgtcgttataatattcccatacacattagtttgtatgctccggctagcggggaacgggctgactggaagataccgggttggacatgtttgtacaagcttccatttaagtatggtttcagatttcctctccctagattgatgtctgaactatgctcctatcatggtatctctcccagtcagctaatgccaaatgcttggcgtgttcttatggccatagaagtgttgaccgaaaggcataacattacatttacggttgctgaagtcttgtacgtctactacttgaaagagcatccacatgataaaggtag

SEQ ID NO: 290808 - DNA, 600 bp, Cannabis indica
ccatataccaaatcacctagtttcgcaaaaccaattgcaccattctatttgtagactcaaataaatggcaaataccaagtcccgtcccattccggacaatgttgaagatatttacgaaaataccactgcatacaaactaagcatcagcatgccacccgcatgcaccacaacatgcgccaccacttggccaacttgtggacatcacttagcttgtaacgtgccctcttggaccgcacgtaacacattgcatacccctgcgcgcgcggatgcaagggaatggccgagaaaaggggctgcatgcagcctgtgttggccgaggtagctcggcatgagcagcccttcagacagggccatgtccaagaatcctcgatcagcccgagtctgaaggcgcgtgctgtccgagtgaaaactcatcccccgcgcgtgcacacgtgcatccaaaacatgatattttcatccaaattcaaaaaatcataactaattcataaagaatccaaattaggttctgtaaaagccaaaattcattaattttttgtctactttccagtaaaaataaaaaatattttacaacatatactgcaatttctaaactatcatgaa

SEQ ID NO: 290809 - DNA, 610 bp, Cannabis indica
tctcttgctgatttttctaacctttttcttgcaatattttcgtgatccatttcaggaatcctaagtgtatgcgccgtcaaggacaagctgtcatattaccagttgatcctgaaatcgagaaaacttgtaggagaaaccgaaagaacaagaggcaagaaggagtttcagcaactgctgaaacttcagaaatcatggctgctaatgtgaatgctaatgctgcaaacaatggaggtaataacggtaataatggtggcgccgtggaagatcaagctaatggccgcagcttgagagattacattctccctactctgacgggagtgcagtcatgtatcaggccaccggcagtggatgcgaacaactttgagatcaaacctgccatacttcaaatggtgcagtcttcagttcagtttggtggcctcccttctgaagatcctaacctgcatctctctaacttcatggaactttgtgaaacttttaaagttaatggagttagtgatgatgccattcgactgagactgttcccattctctctcagagaacgagccaagagttggctaaactccttgccacccaactctattgccatcgatttggcagaacctctgatttt

SEQ ID NO: 290810 - DNA, 514 bp, Cannabis indica
gaatttcccaaaaatacccctttagtgatttttatgggattttagtgtggaggggcaaaatggtctttttgccccaatgactttttgtctttttgtgactttattatttggaaaataaatgttgtttattttattaatgttggctgaaatgaggttatatgttatgtgggtttaattcattttatcaaaaaaatctctaagtttaaaaaattagaaaattggaaaagctttttctctcttttctctctctctttttcggctgaaagcttggggttcaagagctggattttctgtggtgattcaagcttggtttgcaagctctagtaatcttttgttgaggtatttctttatgtgatttctctaccttgttttcttgagattttgatgaaaaagttgagtaaatgcatgattatttgagtatgttgttgctgtgttcaattgttgtttacagaagcttaattaggtttaaaatgaatggattatctaggttttaatgcatgctagttgtgttgtt

SEQ ID NO: 290811 - DNA, 554 bp, Cannabis indica
agagcggttgcccaaccggaattccggttctgggaaattttagaaccccatccggaattccggatgcacaaccggaattccggttcctcgcaggcagaaattcaaaatttcacactttcctcaaatcaactccaaaccataccaaaacttccagacctgttctaaacatcccctagaacatttctaaagcaataacacaacccagaatgcacagaattgaaaaacaccacgtgagctccaagctttgagtttaaaactcaaacttggctaaagctctccaacaagcatcaaaccatgattcaaactcataatcaagcatataacaactgcagaaactaaaacctaactcatgcaaaacactacagccataaattttgaaaattctctttgaaaacaaaactttttaacaagaaatctatccaactagagcaagagtaactagcatgcaattcaacctaattaaacatacttagatcaacattttaaatatggaaacaacaacaacaatttacagcagcaacaacaataaaatcatccatgcataactcatattt

SEQ ID NO: 290812 - DNA, 582 bp, Cannabis indica
tcaagctctctctcctttttcggcccttcttgagcagcaaggaagtgaggttttccttggtgattcaagctcattttgagtagattttgtgatctctagttgctagtaagtcttcttcatcctttcttaatgttcttgaagtttttaagatgaaaatggtaggttgcatgttagttttgtatggctgattgttgctgtgattatttgttgttttcagaagcttaattaggtttaaaatgaatggattatctaggttttaatgcatgcttgctatcttgtttaaagttatgatttttctaagctaaatatatgatttttgaaagaaattgtataatctgttgctgtgatgttgctggatgtttttagttgttttcagaggtttagatatgcttgtttaagtagattcaagctagtttgaatgcatgttaggtggttttgctcaagtttgagtttagaactcaaagcttgagctccaatggcatttttcgtatctgtggtttctgggttgttttaatgccttggaaatgttctaggggaggtatagaacaggtctggaaggtttcatgtgatttggggttgatt

SEQ ID NO: 290813 - DNA, 521 bp, Cannabis indica
ctaaatatttttttttcttttctcttattttgcttgtttgaaaaacaaaatatttttgaggcatatgtgctttagtttggtgatttttcacattctaatacatgattgatagtgtgcatagcttgttgaaaaatataaatattgcttgtgctagtttcattttgattgagatatgtccaattttgagcataaatgccttgatcatttaattgtgtgtgatttggtgaaagtttgtgtaaatatatgattttgtgatctcacaagtcttagaatttgtttgattctctcttgaggcgaaatcttagacgacacttaaccaaagacatgatttaggccatttgtggaccgtttgagccttttgagccaaccatgatattattttatccctagtcaccctctttgagcataattgaatccctttattttttttaccacatgtaagcctagctaaatacaaatcttctcaccatataccctttgagcaccttattattctaagattttgtttgttgtgtcatgaa

SEQ ID NO: 290814 - DNA, 519 bp, Cannabis indica
tggccgggaatttagaatgtcccaaaaatacccctttagtttgatttatgtgattttatggtggaggggcaaaatggtctttttgccccattagtgttttgtcttatgtgatttattaaatggattaaatggttattttattttaatttgttggctgaaataaaatgtgatttgtggcttatattcctttttctcataaaaatccacacttagtcaaattagaaagaaaatttcaaaactcacacactcaaagctctctctctttttcggctgggtattggggattcaaaggctgggtttttcaagcttgattcatcactttttaggaactcttgattgtggtatgtatctcttacttgttcttcttggtcttcttggaatttttgataaaaaaatgagttaatgcatgttaatttgaatgttgttgctgctgagtttgattgttgatttctgaggttaaatcatgatttttagatgttaattaagctacttgtggtgtatgattcctaggttgagcat

SEQ ID NO: 290815 - DNA, 872 bp, Cannabis indica
gaaaacaatattgttcacattgttttgtagtgaaaattacatgttgtttgttataaaaaaaaatacatgttgtttatgatatagtcatatgttaaattatttcctccaagtaatatgttttcttgttaaacaaatatacattttcttaatataaaaataggtaaagaataatatttttaaggagaattattttattttttatttttatttttatggcttaggtttctctgatgttgcacagtaggttgcgatttaagtatgtaaaaaaattactttgaaatgtaaaaataaaagaaagttcatatttttaatatacaaattaatggttctttagtaagttatttttgtaaaaaaaaataaaaaataaaaaacataagggcattaggtaatacttttattttttaattttttaatcacaaaaataaaagtaaaatttgtgtttttaaaatttattttaaaaataaaattgtgttctagaaccacttttattttttgattttaaaaatagaaaataaaagtgtgttctataattttcgttttcatttttatttctttgcttttattcaagttcgggttcaggtgcggggtctggggatcgggggtcgtggtccgagtctgagactgaagccaggtccggagttcgagtctaaggtccaagttgaggtcagagtctaaaatattaattaagaacaaaaaaactgtaaaaaaaaatatagaaagttaaatttttttttgtttttaaaaatttttaaaaatttttgtaattctcaaattaaaaaattaaaaagggaaaacagtttataaaacatgttttaaaaaatattttcaacttttctaattaaaaaacaaaaaattaagtaaaaaaaaatatt

SEQ ID NO: 290816 - DNA, 552 bp, Cannabis indica
aatgtaaaacgtaccatttcgatatacaacaagtttttggcgccgttgccaagggaactgcaagaagaaaaattactttaattcaggttggtataattcttctactagttattatattatacatattatattacgtttcttaataacgaagtaaacttatatatatatatataattattattattattataataaacgtaaagttttaaaaaaaaaaattatatatgcattattattattattatatataatattaatatattatattatattattacatacattacttaactatttaactattaagaaaaacatattattaatatagttatatataataaagtatatattattaattataattaatattaatatttatacttcagtcaaatatatacatgttatttattttccgttatattttaaattcagtttttatttcctgttatatacatattatttatttcccgctatattttaaattcagtctttattttacgtacttatatggtaggcaccgcctcctaattttttctattattttaatttttg

SEQ ID NO: 290817 - DNA, 646 bp, Cannabis indica
atgtaaatattgatgaggtaaatagatgagttagggtttaaggcattaagtgcgtaagtgtggtattggtgcttaattcgctggggttgttgattacacgggtactagtagtggaccctctttaatcatctagaccacagggcgagttagtagagcttggtgtagaccaaaccaattcaccgcactgcccccacctccgcagaatccggggaaataatgcggaggttggcaatgctaatcctcctgctgaatggcagcagatgtttcaagaaatgcgaagtgtcatacttcgtcaagaagaagagttgcgacgattaaggcaaccagctgccctgttgatcaagtgttaccaccagcacctgtgccagtggtgggtaaccaggggtttgttatgtcgcattgagactcggtgtttgagcggttcgtgaagctgcaacctccgatttttctaggaggtattgacataattaaggccaagcagtggatgaagagaggactgaatgccacaatcagtcgggacttgaaggttaccacttcacatgacactttgtacaagaaagtgatagagctagccttaattgttgaggaggctgaataatctgtaataaatgagcagaccacaaaggatgccgtcacggcatcgaat

SEQ ID NO: 290818 - DNA, 477 bp, Cannabis indica
aggataaaatacatcgaagggtataatggcaaatttatccctattcagtgtagatcatatatagaggattcttgactattagaattgtaacaatggataatcataatgtatctatatcgcggtacatatagagcgttctatataattgagagtgtattcaatttcaaatctatagtggcgcaaggcgaaattaaagttagagaatttacttggtgaattctaaatctacttattgaaagctcggctatataggcccatggtcccctcactagttgagataatactacttgcagactcagttaattgattttaatcaatcaattataattctaaaattagactatgccttatttaagaattttcactaagcaagggcttaattgtgaagaaaagaggttttgaggtcaatttgttaattaagagactttgtatggtctaattaataaaatacataaatgaaaattttatttagtaatt

SEQ ID NO: 290819 - DNA, 403 bp, Cannabis indica
acaacaatagaaattcattaaaaaaaacaaaattgactttacaataatattcttctaataaaaaatttacttttataatatggtcaataaagaataaactcttgctactataatattagattaatattttggtatatttatatagctcagaagtatatcttttcaatgggttattgcatatacaaacaatttacttttattacatataaaaaataaactatgatttctttgttttaggaacaaacaactattgtggaggaacaaaaaacacaggagaatattgaaatacaggtataaaaaggaacatttaaattatttgagtatattatgatttaagtttttagttttatttatttttatactatagtatatatttattctatgttaggtatatattaaggaa

SEQ ID NO: 290820 - DNA, 560 bp, Cannabis indica
aaaagtggtcaagaattcatagccaaaacaagaggtattctacaatgacctcaaacatatcagaatcactgaacgctgcaaatttggcagcaagggagctaccaattacaacgctgctagaatgcttgagagcattggtgcaacaatggacgcatactaataggacaaaagcacacaacaccttcactaagctatcaccaactggagaagacatactgttgaaaaattacacatactcattgaatctggaggtaaaatattaattatgcttctttttttttttttaaaaaaaaaaaacaaaacagtaagtaaaaggtgttgttgtagtgttgttttaatagttttgtattgttgttgtaagaatttcagctatgtttgttttttttgtttaataaaatttaaaacaggttaaagcaacaacagattacttgtttgaggtaacaagaatgaaagaatcgtgggaagtagacctagaaaaaagaacatgcacgtgcaacaggttccaaatagatgaaatgccatgcgggcacgctgtggccgtgatgagggagatgaacatg

SEQ ID NO: 290821 - DNA, 878 bp, Cannabis indica
agcatcattccagccttgtagagacctacccccgtcatctgcccaaaatgaagttttctgagatgactatcgaagaaatcgaggcccaaactgccgcccgactgaagagattcatggcaaagtctcctaagcgtaaaagcaaaagtaagagaagcaaaacggcagggctcgaggaggccaatcagtcggacgttggaatgtcatccaaacatgactcggccattgacaaagccatcaaggcactgcttaatgttcccctagagactacatcgaacgttggtaatgctagagggaattccctaggtttggtgccgactgagctcccaaatcctgaggaagtctcccagctcgaggatcttcctgtagttgatttgggctcgagtctgagttccttgctggcttttcctacccgtacttcctctcttcccttaggggctccgtcgtcctctcagcttgctctttctcccttcatggtccttccttcaacctgttgggttttgtgccctaaataaaacccattacaatctgattagttatcaatttaagagatttgaagtgatttatgttaacatgtatttttcatgcttatggtttaatatatatatttaatatatgcacaaaatcagttaagtccagaacatatatttattcacaattacagtattgtcaacacagtggaatgtgattgtgattatatgattcaaaagactaaagtccccgttttcatttagtgtttttggtatttcaaactcgatctgataatcagggaataagtatacttacactttggagtaagtgttatgttctttccagaatattgtcctgatatgcttaggctcaatcttaggagtgctattcatgttcttttgatttattag

SEQ ID NO: 290822 - DNA, 885 bp, Cannabis indica
ttgctcccgatatcgaagatgatgaaggtcctattattgatgaagggcctattaatgatgaagctcctattgttaatgagaatcctgttattgaagaaattccagttgtggaagatgttattcaaaacaatgatcaacaaagagaagttattccagaagtacctcctctaagaagatctcagagacaaaagaagtcaacaaagtgtcatgataattttgtttatcttggagaaggagaatatgatattgatcattttgtggatcctgtcacttttagtgaagcacttaatagtccacaatcttcaaaatggttagcagctacggatgatgagatcgactccatgaagaaaaatggtgtatgggagctagttttattacctgatggttttaaaccaataggttgtaagtggattttaaaggctaaaagggataaaaagggacagattgaaaggtttaaagcgcgtttagtggctaaaggctttactcaaagagaaggtattgattacactgaaactttctcacctgtttccactaaagattcattcagaattattatggccttagttgcgcattttgatttagagttgcatcaaatggatgttaaaactgcttttctgaatggagaattgaatgaggaagtctatatgtctcaacctgaaggctacaaggagaatggaaaagaacacttagtttgcaagttgaaacgatccatttatggtctcaaacaggcatctcgccagtggtacttgaagtttgacaaggttgtgacatcgtttggtttcgtagagaacaagtttgatcagtgtatttatatgaagatcagtgggagtcgttatatttttcttgttctttatgtagatgacattttacttgccagcagtgatt

SEQ ID NO: 290823 - DNA, 636 bp, Cannabis indica
ataatttataataaataaaataatatataaattaataaatatataattaaaatgtaattaaaattatataattaaattaaaaaaattgaaaaaattgaaattcgcgaccttttggcgtaggttgctacgctacctatggcgtcggttattggctaggaaccgacgccataggagtccatatggcgtcggttcatataaccctttagtgtcgccctgatcagcgtcggtagcgaattttgcgaaaaccgacgctaaaagagtttaaaaaccgcatctaaaaggggtttttgtagtagtgaccttatataatgcaccaaaattttaatggacaattttgattgtaaataatgtagagtattaatatcaaggtacctaatattattatgatattattatgatgtgatgttttataattaattagagcatctccaattatatatatatattttttttttttgaaaaaaatctccaattatattttttaaaacacactcttagttaaaataaagagtgagattttaaaaaaataaaataagctaacaaaaaataattatcaataataaagaatgaatagtaaatatttttaatagtattttaattaaaagtattattactttttattattttattaaatta

SEQ ID NO: 290824 - DNA, 367 bp, Cannabis indica
tctataggaactatttcaccattccccacgcttgccggcttgtactccctgggttctgcgatgtaggatccagcgtctgtgaatttgtcgaatcagtcaggcctctacgagtttgcaccatcgtattggcggttggatgttcaataaagagcgattcgtgatcctcctctcaatgaaagcaccaaaatcttgatctcgcttttagccaatgacaatgagtctattttataagcgataaatgatttataataatagatatacgataaataataaaaagacacaagaattttatagaggtttagccccgagcagttcggtatgcctaatccgcgttatttgtattgattgaagatcaaaaagaaagatt

SEQ ID NO: 290825 - DNA, 500 bp, Cannabis indica
aaccatgcaacattaaatgttatttctaatctatattaataagtaaatcgaattatattgaaatgagttttatttagggcataaaatccaacataatgttaagcttaacacatggtggattgattccagttcaacaattcacataccaaattccttgcaggatattcaaacttaaggaagctagtggcaagtgaccatagcctcttatctagaaacaagacgggctcatgagtggaagctattggtgttggaatattttttaccaggatctagatttactaaaatgtatgttatttaacatcctaatatgaatttataaaataatgtaatttaaacacatataaaagtttgataaaccttatagtgggtgcagcggaataaaatgactccttcgactcatatctctaatccttgtatcatttctatagcagagtatcaccaagatctgagcccgaaactccttccttgtgtttggattcttcacagtcttacacactatg

SEQ ID NO: 290826 - DNA, 540 bp, Cannabis indica
  modified_base (524)..(524): a, c, t, g, unknown or other
ccaggagccccagtgttcggctcttgagccgaaggctttggcctgggagcccttctctccgccgagtccccactatgaaggggcttcccagcgatcgcctcgcttctcctctcgaccgggctccccacgcgaagtggcctcccggaagctgcctgagccttagagtaggctttctcctgagccttccggtagagatagtcctggtacttcttctcgacagtggcgatgatctcgtcctggaaggtcttctcagcggcaggcaccctcacattgggacagataacccgggaaaggttagagtcctccacggattggtgcggcaggatgagttttgccttcctgcagttctccgtcgtaaccaggcccccgacgtcgaggtccgcccggtcataagaggagaaggcctgggctctctgaagaaagacctgagtaggtgcggtccgctcgtaagggggaatcctaacccactcagtgaggagctccggatggtccactgcctggaacccggaagagaaaaaaaacgntggcgatactccttaa

SEQ ID NO: 290827 - DNA, 644 bp, Cannabis indica
gctagcaatttcttatttccagtcatgtgacgagaacatccactgtcgaagtaccactgaccttcaacaaaggcagacagggatagctttgcaaccaaaccaacatcaggatttggtttggactttattttccattctcgacgaggtttgcgtccatgtgacttatttggttgagggaaactatttggacgattgatcatggctttcaagtagttctgcaatttgtaacacttgggacgaatgtggcctctcctattacagaaatgacatgtaggaatgaaattgtcattctgtagtagattttctgcatcagtcctccttccttcaaacttgagtttaatgggtccagttggaacctgtctcttctcagatgagtcagattcgttaatggtggttgaggtgtcaggtaactcatcttccttctttgatgaatcgacattagagggcagagaatgctcaacagacagatcattcccttgtttatacagcatcttatatcctaaggaagttcgatcaccatagggcttctgaagctgtaaggtttgattgatagctgcagtgcgtggaatgaatgttaaagcttgcttggttcgaattgatcagctgtgagtttatagatctcattctccttttcatcaagaagt

SEQ ID NO: 290828 - DNA, 615 bp, Cannabis indica
aaaaataataacaagttactagtactaaattatatatatagattaatttttgaaaataaataacatatacatacatatattagaatatatacaatacaatttacataaataatatacacaatacatatatataaacatatattcaataaaacacaaaatatatacatatatattatatcaagttaataaatatttaccttataagtgcaatccggcaactaattgcgacaaaaatccggccaccatgcacacacaataacctaatgttaataaaatggaaaaatctcaaaaaaatttacaaaaacgaaaataaagcaatgtacattaataaaagggcattttacaattttgtatacattattttagttaattacaaaatatgtgcaaaaaaaacttattatcattttctcatacacttttatatataattaaaaacttttttttttcaatttttattataatatatatatggtaataattattgattagtatatatatagtaatattggttatgtttatttttttgtttacaattataataaacatactaataatataaaatattttatatatgtgtttattggctatgtttatttttatgtttacaattataat

SEQ ID NO: 290829 - DNA, 624 bp, Cannabis indica
attatggctttctttagtttagactcgtgaactaacccttgcattaataccttcatcgtgattgagtctgtacattttgggatgcttacatactctctgctaaacctgtttatgatttttttgagtagttcatctggcgcttgatggatcaacatcagatatgtatctacctttgttgatttgacacttattgcaaagctcatttgtaatttcaaaattaattcatgatacaaatttattgtgcccgaagtaaggttatgaaaccacggcaaggcaggggccctcaaaccttgagtaaacatcttacactttatggcttttaaatcttccaaaggaactgaaattgtaagcatcttttgttcaaattggcattcatactctgaaagatcacctgttccatcatactctaggagttttggtgcaacatactgctgtggtgcttctacccgcaggatgtggtttccaaatagagaatgagtggatccttcccattcactgcttattcccatatgaatttttgcttctagggccaacaacttgttctagatcatctcttgtttttttgcttccctggtttgcgcaggagaacttttaggtgttgcaggggcgatgacacgtcttttt

SEQ ID NO: 290830 - DNA, 577 bp, Cannabis indica
tgttcatacaaaaatatttaactcaaactcaacttttttcctttctttatttttcttgacttaaaaaacttttttttaaattttttttttttaccgattggaacaatcttagcccatataatataaaaatgagagatttttttaatttagataaaaaaattaagacataaaaactcaaaattttctaatttttacccattcatgggtaatacccattaagagtgcacccatataaaatacttcttaataggtattacctattgatggttactaaacagatttaactgtaaatattaattttaaaaataataaccattagattttaatctaatgatgaagaataaagagaaatttgaatttttatgcttaatttagctacttaattaaaaaaaataatatatctctttctacactatatcaaaaatatgtttatatacaaaatatttagctcaaactcaatttttttattgatttttttttaacttgatgaaacagccacaactcatataatataaaaatgaaaatattttctaattagataaaaaaattaagtacaaaaactcaaattttcctaata

SEQ ID NO: 290831 - DNA, 532 bp, Cannabis indica
cgaccctttaaaacagatgggtacattcttaagtataggcgttggtttttaactctcacttaattttattagtaacgatttttgaaaaaagtagaccaatttaaaaattgacgagaatagtattttttttagtatatcaaaatacctcatggatattaaacaatataaatgatatgatgactaccattattttttttttttaaataggtgaataaaataagatatatcaatgaaaacatgcatgtacgaagactaattaatttattgtacatagcttgaggaaacttaaagttgctaatcgacatgcaatttataaatcatactacaagaaatgtcacttttaccagcccagttcgctactgcgctggtaaaagtaacttttaccatcgcatttcgcaaattacactggcaaaaaggtcaaagttttaccagtgcacatttgtagtggctaaaatctaacttttacgcactgtgaaaactcatttttgccagcactttttcgttttgtgctggcaaaaattctaataccaac

SEQ ID NO: 290832 - DNA, 591 bp, Cannabis indica
aggaaaacatgattaaaaaaaaagtaaaaaatgttcagcacaacttcaatacataatgcaatagcagttatatttgcaagcttaatcttaaaaaatcagaacaaaataactactaaaacaatacaaaaacaaatgtaaaacaataagcagatataaccactcagaaaaataataagcagacatatatatatatatatattatattctcacttagaaaaatataaaaaaaaccacataccttacaaaaataaattataaaaaacaactgtaaaacaacactaaaataaataaaaaataaataaatacagtatactgcagtataaaacttataaaaatacacagtaaaaaagtaaattctgccgtgtggtagtatttttgtaaaaaaatggcaaaaatcgatataccatgtaaatttttcttatttatatatgttattaataaaataaagagcataaatattggcagacccatataaatacctaaaagatattctagcgctctcacatttgtatattttggtatttatagtatattttatcattgatctatgaatatgtagtattataattttaataaatttttaattgtata

SEQ ID NO: 290833 - DNA, 508 bp, Cannabis indica
tagttaatgcgaggggtattgaagcaaatcctgaaaaaaaaaatccaggcattaatagacatgtcatcaccgacaaagcttaaggaagtacaagctgataagtgtgtgtcgttcttcaacatattgtgaggcaacaaaaagtttgagtggacaaaagggtgcaaagaggcctttcagaacataaaaaggcatctagaaacgcctccaattttggcaaaaccaatgactggagaaacactatttctctatttagccatcttgaaagatgccattagtgcagcgatagtgcgagaagagggcaagcaccaacaacctatttactatgtaagtaaaaggttactatggacgaaatatagatatgcccctctagaaaaacttgtgttgtacctagtccatgcgtctcgtaaaatacggccatacttccaggcgcaccccataaaagtgttaaccgatcagcccttgagacaagttttatcgaaaccagttgcttatagaagattgataaaat

SEQ ID NO: 290834 - DNA, 739 bp, Cannabis indica
caccagtacatcccctcttgccacatactctctgatgatgtgatatttcctttctatatgcttgcttctcttgtggcttcgaggctctttactgttggctatggctccagtgttatcacaaagcaaaaccagtggtttttccattccagggacgacaccgagtcctgtgaagaactttctaagccagacaagttcttttgcagcctctgcagcagctatgtattctgcctccatggtagagtctgaaattgcggtttgtttagcacttctccaaaccactgctccacccccaagagtaaacaccatcccagatgtagatttcctgtcatcaagacatgcctggaaatctgaatcggtatagcctacgggatttaaagcaccacccttgtagactaacacgaattgccttgtactcttcaagtacttcaagatatgcttaacagcattccaatgttcctgtcctggatttgtctgatacctgctcacgattcctactgcataacagatgtcaggtctagtgcataacatagcatacattagactcccaactgcagaagcataaggaacccttctcatgtcctctatctcttgaggatcagtaggacactgttccttagatagacggataccaaatctagaaggcatagttgcccctttggtgttggtcattgagaatctctctaaaactttatctatgtaagttgtttgagagagagcaagggatctgttctttcggttt

SEQ ID NO: 290835 - DNA, 462 bp, Cannabis indica
cccaatacgtcatcacaccaatccacctaatagatgcagaaatcttgtacttcgattcccaaggaaagccaatttatgcttttgaatcctccgaggggcataaatactgggatgtttgtaactgcaaaagttgtttaaaagatgatgagccctcaccacgtccaactccaggaagacgactaaagaaaaaattggaaagaagcgacaaaaccatcggtctattaggccaaccatcgggaaaattcgactacatagtcaaatactctgcaccaaagagctacaatcagcctatgccagaacctaccggatgggattcagacgatgcttcacaagattcacagcctaagatagttttgcctggttacaaacgacaagcaaaatggatgaagaagcatggagaaaaatttccaacaccagctgttcaacaatcatttcaatcacttcctgacgcaaacatgatca

SEQ ID NO: 290836 - DNA, 554 bp, Cannabis indica
aagttagcgctaattgggaggcaacccaaatttctttatgatttagtgaactttttttagtttttgctgttaattttctttttcggttctaattagcattcaaaaaaaaaaaaattgggactcgctcagtggccgcggcgagatagaccttggccgcggccataaggtccttacagagagaacgtattttcatcgatttctagccgcggcgaggctttatatggccgcggctagattggccagtttccctttttaagagccaaatccctacatttcaaatcaaaccccacattcaaatccctaacttctccagccgaaaaaccattctcctcaccatattttcttcatctaatcccattcaaaaccaattttcatcaaatttatccataaactctcatcctaaatcatcataatcccttatttctctcatctaacactcttttcctctaaaaatccattccaaatccctaaacctcacccaaatttcagaaaaatcactattcaccttcttcttccctaaagcttcaaggttctcatcaatggaggttgactaa

SEQ ID NO: 290837 - DNA, 476 bp, Cannabis indica
gggtaagcgaatttgtcctagaggtgcgactccttggtcgaagaaaccatagacaggcaagagacatgggattagatccttgagctagagtcccatcttttcatagacagtcttcaacaagatattggaagaggctccattatcaatcatggttctggccaccatcttgttagctatctggacctctacaaccaacaggtcgttgagcaaaaacctaatttatacggcatcgtcgtcgttgaaggttatggtaggccctcctgcccgtgggattttaggctttcgttcttctacggccaggattacttcttctttcttgtgctgtgctattcgggcatacctctctcgagctttgcctaaatctccagctatgtgcgggcccccaaagaagaacttgcaaatgtccgtctactggtggaggtagcaagtcttggttattgtcgttcctctgctctgatcagccttgacatacttct

SEQ ID NO: 290838 - DNA, 509 bp, Cannabis indica
tgttgaacaccacaacacgtgaaaaacgtaattactttattattgaaaaagcaattacaccaagacttgaacactttaacttgaccacaatacacaccaagcactcactctttattttatcactagacacctttactacacacttgtgtataactcacacttttgaaagattttagggacactttagaacacactctcactcttttgaacacactttgaacactcttgttggatgcacaacttgaagacccatgacccctatttatactactcaaaagaaaccaactataatattctagataattctaactaattgtgttactaaaatattcttgaaacttctaatgactactactctctatgattctagaaaattctataatattaccaaaatgatagaaagttctagatacttgtagagtaggtgttgatctttaacaagtagcacttgtaacatgagcataatttttccttcttccttctgatgtggattttcgaagatcaaattt

SEQ ID NO: 290839 - DNA, 582 bp, Cannabis indica
cctggtaaaataatttcccaacaatgagacccttgagctgcagccagacatgacatatgaagaacagccagtacaaatccttgatagaagggataaagtccttcggaataagaccatagcgttagtcaaagtactctggagaaatagcaaggtggaggaagccacctgggagctaaaatcagacatgagagctcaatatccagagttgctcaggttagatttcggggacgagatccttttaagatttaaatttggaaattagtagataattaagatttaattatgaaaattatttatagttatttaaataattatttatgttgttatatttgaattctgaatgcatttttatatcatatagtgaaatttcataattttgtattttcggtgcccggcaacatggaacgcggtgtatggctcagtagaatcacaatctaatattttagtatagtgggacagtttatttagacattgggaatgtcgggattagtcgggaatttagagttttcccaaaataccccttaagtgctttttaatccttttagtgtgggaggggcaaaatagtcattttgccccataagc

SEQ ID NO: 290840 - DNA, 651 bp, Cannabis indica
  modified_base (56)..(56): a, c, t, g, unknown or other
agttttttacgttttaagtattttttttttatatatattttttacagtttttttanagaaacaacacgaaaacataattgcacgtttactctacagtaatcagaatcggaataaattaatggagaaatataacggaataaatgaaaaataatttgaatcaatatttgtaatatgttgtttactaaatttttttagaaatagaatagttgtgatttatcttgtttactttgttaggaaacgtaatcggaatgcttaaattgactaaattgcccttttgatttaaactatattatatggtagttttgtaagacatattttaaaggacgaaattatcattatatatttaatattaaaaaataaaattaaaataataaaaatccattacccttaatgacattccttacaaaattggtgggggaagttctccctttattttctcctttatttaatcaacttctccctttcctaattttaataatgcaagtaaacaaatgtaagggaatgattaccttactattgattcccattacttattaataaatatgccataagaaaattacataaaagtaagaagaaaataatattcaaacaaaaaaaaaacattcagataacaaaaaatcaacaacaaattaataagagtacaatataaaa

SEQ ID NO: 290841 - DNA, 646 bp, Cannabis indica
aagtaaaatcggaattgataaaagttttgagagcaaacctagatgttttcgcctggtcacatgcggatatggtcggaatcgatccttctattatttcgcacgtcctgaatatcgatcctaacatctggccaattcagcaaaaacaaagattgctggataaagaacgagcagtagccctaaaagacgaagttgaaaagctacgaaacaacaacttcattattgaggccttttacctggcttgggttgcgaaccccatactcgtgcctaagccgaacaagaaatggcgagtctgtattgacttcacagacctcaacaaagcgtgccctaaagactgtttcccacttccaagaatcgatcagctcgtcgatgcaacagccgggcacgaaatattaagcttcatggatgcttattcgggctacaatcaaatcaagatgcatccaccagaccaagaacatacaagtttccagacagatatgggtctctactgctacaaagtcatgccatttggtcttaaaaacgcaggagcaacataccaaagattggtcaacaaaatggttaaagatcagatcggcagaaatatggaagtgtacgtggatgatatgctcgtcaaatccagaaagactggggggcatatagacgacctgga

SEQ ID NO: 290842 - DNA, 664 bp, Cannabis indica
tgtaaatgcgacatctagttgtacatccaaagatgaacaacttagactagtatttacaatatgaaacaatgaagaagtttaatagaataagaatgactttgactctcgcctaccaggacatcgttggatttctttattttaattgaaattattcctttatttttcctctttagcccttttcatttcgaaatttgcttaaatagtatatcgttggatgaatggtttataaatcatctgcttatgatgtcattctattttcttttatgaaattgaatggcacagatgactatattcttgacattctatcccgaaattatataaatcctcgatcttagaaatctcctacttgtatatgttcactttagacaaattagagttagagttagattagtagtggtggtctaagagagaataatcactcattgtatatttggtataaatttaaatcttttactttaaattttagattccaaatagaaatttttattttagtttcctgagaatatattcgacaatatagtatgactttcacaagttattaatatccattttctgtcaatggatccaaactatatgttaatgtaattaatatgagtttagtattctgtgaccaggatccacttggactattctaaaaactctttgttataactaaacctttttc

SEQ ID NO: 290843 - DNA, 400 bp, Cannabis indica
aacccaaacctagaccagggacccaaaactagaacctgaataagaatcgccgaaccaggaccgtagaacaagactaggatcgtgaccaggacctgaaccagacctaggaacgaacactgacctagcttaaaacacaaactgagggtggaactcggtcccgggcacagtcgtgtacccagactggaactgagacacggacctagacctaaatctgggacccgatcccaaacatagacttggacctagatagggatccggatacgaacctggactcggaccaagacccagactgtgatggaaatgctggacctcgatctagaccgagatcctaacccagacacaaactaggacccgaactttgactaggacccgaacctagacccagatcggggtccagacc

SEQ ID NO: 290844 - DNA, 494 bp, Cannabis indica
ccagggccaagcaatatgctcaggagcctttgaatcctgaagatgaagttgaggaagagcaggtgactccactgaagtggaagaagaaactcccggcctcccccatgcctgttgaacatgcaattcgcataagggagcccatttcacctactcggccatctcctctcccgtgttcggaaaagggaaagctgtcatgtctgagataagatcgatgtcaggtgatgatggacttctgagtcttgtgcgggcggtcaccttgcattttactttattttgttcttgagcttcttgattttcatgccttatgtttctgatggctgtcttctaaccataccatttttgttctgtgcagacatgtctcggcagatgctcgacgctctgaggaagagaatgggcggaagctctagcgcctctcctccagccaagaagtctaagggcagtgaggggtcctcttcaaacgaaaagagacctaccggggaggttattgatctttc

SEQ ID NO: 290845 - DNA, 623 bp, Cannabis indica
atgaattgaccatctggaaatatagttattgcccctgattttgcccaaaatacgtgaaccaaccggacgatgacacgtggatgggaaggggttagcatttaaataaaatagctaagtctccttaaagcgcaggattaccttagacatgcctcccggagaaggcatgtaagtctcgtatgctcccggagagcaagattgcaacaaagcatctccgggtggtgtcagatcctatctgaacagtcatctcgcatttaatgccgcatgggaggaggcatattgaaactgccatacgtaataaagtctgacggcacaacccccaatctgtacctactaggctatgatcaataaagtctagtgacggctactctgtgaggaatcacatcagtcaaaaaggattaaggactgcccccataaaatccctacagaacctagggattagaccatgcattacctatgataaattcattgggaatgtgtggctttactaatagttacagaaatacatgtaccttaattctaggcatcaccccacaaaaatactgtaaataccccccaaactcattaaagggggtcgagaattctgggtttcataagaactataagagtaaaaactcaccaagaac

SEQ ID NO: 290846 - DNA, 551 bp, Cannabis indica
ttatgaattttcactaagttatggcttgattgtgaagaaatagaattttagggtttatttgttaattaagagactttgtggagtctaattaataaatattgtaaatgacattttatttgataactaattattaaataaatagttttggcatttataggattaaaattacaaaaagtggtatttgtaaaaaatagataaatggttgagaaaaatggtaaaaatctaactagtgatggacccaaataaggtcggcaactaactcttatttttgctattattttatcattttttattccaaataattcaatcctaaccctaagtgaattaatataaaaagaaaagaatggtctcaaaatccaactaatgactcttgacctagttttcttcttgttagacaactagagagtttgagacttcttcttcttcttttctctcttctaatttgaaatcatatagtcttcttcaccattaaaattcaagctttagtgattgagtgcatgcctacccatagcaagttagtcttcaatcatagtgtgtaagactgtgaagaa

SEQ ID NO: 290847 - DNA, 761 bp, Cannabis indica
tattgagcattgtttgtgatttttgttagaattattgattgatataagaattgttaggtttatagtgtgatttgggattgtgaatgtaattgtgtgaattaattggtgagttttcaattttggggaaaaaaaaaaataaagggaggtgctgcccaatttttttttagttaaaaaaaaagaagaaaaaaaaaattcgaaagaaaaaaaaaagagaagaaaaaaaaaaaaaaatggcacctaagaggactaggaatgtggaggagggttcgtcttcagacccaccacctacgggttttgataggactcggtttggtaacatagaggcccaaaatcgattcatgagacttaagaatagggcttatattgaagatcggggtattgaattccccgagaatcctttgaggcgtcaacctcggtttgaaacaattcgagctcaaatagaaagaatgaagtggggaagttttgtggatgctcggggtcgggctaatgttactatggcttgtgagtttcttgggaattggcccgaccgccggaatggggaagtgaaggtgcggggaaagaaagtgcctgctactgctgatgcgtttaatgtgatgttctcggtccaagattacactagggaagaacaacgcctccgaattattgaggaggaagagcaatttgatatggtggatgtggcgaaaacagtgggatttcctgggttgaggttccacgacaatgatggcacataggggtcgccaaacatcctataccggtgtgaa

SEQ ID NO: 290848 - DNA, 512 bp, Cannabis indica
aggtagcagtatacccccttatcggtcctgaagctagtgcactcttgatccgctacgtgtattttaatttggttgtaaccaacgtacgcgtccatgaaggacagtagtttgaatccggaggtggcgtccaccatctggtcgatcctgggcaaagggaaacaatcctttgggcaagctttgtttagatcagtgaagtctatacaaacccgccaggtgccgttaggcttcggcaccaggaccggattggctaaccattccgggtagtagacatctcgaatcatgccactcgttagtagtttgtccacctttttctctaaggctttggcctttcattgagtcgagggtgtgtcgcttttgttggaccggtggcatgttcgggttgacattgaggacatgggtgatgacatggggacttatgccagacatgtcttcttggcaccatgcgaaaacgtcaatgaaacctctcaatgtctttattattttttctttttcctccggttctaggctctttc

SEQ ID NO: 290849 - DNA, 705 bp, Cannabis indica
tccaccaaggaaaagtgaaggttgacctttcccacttggcacatgattgccaaacacaactgactttcctctttcattgacaatagacttggaaacattagtcttgttgccattatgactcaaattttcattaagaggaatattcccatcatccaccaaatctggaatatcatcaaccacctttgactgaggattattctcaaactccaaacaaggtaacttcccagtttgcatggctggccgaatatcctcctcctcatgtcgcactggggaggcattgtcaaactgctcatcggcctccgtacccgtacgcaaatactgagagctcaatagataatttttccttcgtggttgcgcacgcataaagctcccataaggtttaacaatctcatcctcaggtgtatcaaataacttaggacaaaagttttccgaatgacctatcaagccacagataaagcaaaacgtcggagcaaattcgtatttaaaattagcataaaaccactcaccacctgttttcttaagcttcattcgtcttttcagtgggacatcaatgttcaccgtcactctgactcgaagataatcccgccaaagaccattatagttcttaggatccgattcaacaaaggagccaatgtagtttgcagctgtagagacaattttctccgtcataaatcccgtggaaaggccatgaatctgtacccacat

SEQ ID NO: 290850 - DNA, 510 bp, Cannabis indica
tataattaaaataaattatataattaaattattttatttttttttgaaaaaactgaaattcgcttgcttttggcgtcggttgctacgccacatatggtggcggatattggctaggaaccgacgccatatgtacccctatggcgtcggctcctagctaataaccaacgccataggggtacatatggcgtcggttcatataaactctttagcgtcgccctgatcagcgtcggtagcgaattccgcaaaaaccgacgctaaaagggcttaaaaaccgcctctaaagggggtttttgtagtagtatgttgtgactaaaaggttcgtgacaaaatgtattagtcacaaaaattacaatttgttgtgactaaatatatttttagtcacaatacttgttgtgactaaaactaaattagtgacaacttgtaactaatactatgttttagttacaagttaatattttgttgtgactaaaagtcatattagtcacgaaaaaattatatcgtgactaaaaa

SEQ ID NO: 290851 - DNA, 687 bp, Cannabis indica
ggctcataccactccatactctctgcatcccgacaccaccaagatgtatcaagatcttaaaccttacttttggtggagcggaatgaagaagaatgtggtagaattcgtaccgagatgcctaacctgtcagcaaataaaggctgaacataagagaccgacagggttgttatagcctttaaccctacctcagtggaaatggaaggatatcatgatggactttgtggttggattacctagaaccacagatttacttgattctatttgtgttgtggtagatcgattcacgaagtctgcacattttctaccagttaaaacaaccttttcagtggatcaggatgcagatttatacgtcaaggaaatagtaagactgcatggtgtaccaaaatccatagtttcggatagagatccgaagtttacctcaaagttttggcaaagtttacaacgggctataggtaccaaactaaagttcaatacatctttccatcctcagacagatggacagtccgaaaggacgattcagatattggaagatatgttacgagcatgtgttatggattttgagggttcctggagtaagtacctaccgctaatagaattctcgtacaataacatttatcagagtacgatagggatggctccctatgaactgttatatggaaggaagtgtagatctcccatccactggga

SEQ ID NO: 290852 - DNA, 531 bp, Cannabis indica
aaactcaagtttgaaggaaggaggactgatgctgacaatctactacagaatgacaatttcattcctacatgtcatttctgtaataggagaggccacattcgtcccaagtgttacaaattgcagaactacttgaaagccatgatcaatcgtccaaatagtttccctcaaccaaataagtcacatggacgcaaacctcgtcgagaatggaaaataaagtccaaaccaaatcctgatgttggtttggttgcaaagctatccctgtctgcctttgttgaaggtcagtggtacttcgacagtggatgttcgcgtcacatgactggaaataagaaattgctagttaactacaaagatgaaaaagggggatctgtcacttttggggatggtaacaaagggcagattgctgggagaggtgatgtgaatgtgaatggagcagctcagctgactaatgtcctatatgtgagaggactcaaagcaaatctcatcagcatcggccaattgtgtgacgacaacctctctgtaagtttcactaaa

SEQ ID NO: 290853 - DNA, 592 bp, Cannabis indica
tccaagggttgcttgacatagggtttactcgacccagtgtgtcaccctggggagctccagtactatttgttaagaagaagggtgggtctttgcggatgtgcattgactaccgggaatcgaataagctaacgatcaagaattaatatcctttacctaggattgacgatctttttgatcaacttcaggggaaaagtgtcttttcaaagattgatctccgagcaggctatcatcaattgagaatccgagaggaggatgtcccaaagacagcttttcgcactaggtatggacattatgaatttttggttatctcttttggactgaccaatgctcctgcagcttttatggacttgatgaatagggtattcaaggatttcctcgatatttgcattattgtgtttatcgacgatatccttgtgtattctcagtcagaagaggagcatgagttacatcttcgaatggttctgcaacggctacgggaacacaagctttatgccaagttcaaaaagtgtgaattttggttgtctcaggtgttccttttgggggacattgttagcaaggatgggatcaaagtggatccgggaaagatagaatc

SEQ ID NO: 290854 - DNA, 312 bp, Cannabis indica
ttttttattccaaataaatcaaccctaaccctaatagaagtagtataaaaagaaaagaaagtctcattatccaactaatgctgcaaaggcaataaacctagttttctttctactctaggtttatgtagacttcttcttcttcttttctttctcttattttcgaattactatattgttcttcacaaaaacaaaattcagctattagtgattgagtgtgtgcccacccatagcaagtgagtcctcaatcatagtatgtgagactgtgaagaatccaaacaattgaaggagtttcgggcccaaatcttggtgata

SEQ ID NO: 290855 - DNA, 829 bp, Cannabis indica
atttatatttaacaatttgataaattataattcaatttattttatatgaatgcctacgtgtaattataatatacataatctacttgttttcataaaatttagaataatttagagtgtagaaatatgattaaaccatttagttgcaagcgtacttgttattttaaaaggaaaatttgattttctatgcttacatctaccaccattgaaaatatatgaccacttttatctaatattcaaaaatacccctctcaaattttccatattttttttagtgcaaaaacataaaaaaaaaaaaaataggtagtccgatggggtccgatggtcacttgatgctacttttgtatgtacaaaaacataaaaaaaaattaggtagcagatttggtctgatgggtggtctgacgggtccgatgggtggcccgatgggtggtccgatggtgacccgatggggtggtccgatgggtggcccgatgggtggtccgatggtgtaaatggggtgatgtaaatgggggtattttagggatatcataaaagttgtcatatcttacaaatattagttattattttattagaaaaaaaaaatttaacctaatgtaagcataaaaaatcaaatttccctgttcaaacagttgattatttcaaactgttttcttgtatgtatatgtaacttcaacttattattattattattattattattattattattagggtaaataccattttggaccctgtgttttataaaagttacagattggaccctgtattttgttaaatgataaaatggaccctgtattttttaaaatagtaaaaataggaccctgagcttaat

SEQ ID NO: 290856 - DNA, 503 bp, Cannabis indica
atcagaaccaaggacttagacccagaactaaatccagacagagatcgggattagaacttgggactcgaacccaacctagaccaagagctaggacgcgaacccacactaggggcctaatctggacctagactgaaatccggacacgaacccaaactcagaccaggacacgaacacggacctgaactcaaacccaaactcgaactcaaaatcgcaaatggaactagaaccgaagtaggactaggaccaggacagggacctaaacccaaacccaaacccagatcaaaacccagacaaagacctaaacccgaaccgagtctaggtatcgaacccgaaccaagaccgggacccaaacccacacaataaccgggacccaaacccacacaataacctagacctagacctaaaataaggatagggactttggaaatggaactaggaccgggacctagtacccgatccagacccgtacttgaaccaaggacttagcacgtgacccggcacca

SEQ ID NO: 290857 - DNA, 545 bp, Cannabis indica
cccgagtccaggtttgggttgggatccgggtgtggctcccaattcgggtttaggtatgatttggagtccggtcctggtccagttacggttctggatctacatcaaatttaagttatgattccaagtccaagtcgtagttccagtcccggtcgacttccggttttggttccaattttgggtcacattgtacgggttcgggtccacttttttatttgggactgggttcaggtcccggtgtgggttcacatccgtgtcagggttcggtctagggctgggtcccaaatccaaacaccgactacgagttttgtccaagccctcggtccatatccggatccaaaactcgggtcccagtctggttccatttcttgtgccgggtcacgagctgggtcctagattcaagttcgggtctgggtcgggttattgtgttggtttgggtcccgttctaggttcaggttcgagtcctagtctcggtttgggtttaggtctccgtctgggttttgatttgggttggctttacgtccttgtcccagtcctagtcctagttc

SEQ ID NO: 290858 - DNA, 488 bp, Cannabis indica
ccacattgtatacaaatggagacttttttataatggcttgaatgcagcttctcgaatggtgttagatgcatcggccaatagtgctattttgtcgaagtcgtacaacgaagcatttgagattttggagaccattgcaagtaactactgccaatggtccaacacaagagctccaacaagtagaaaagtggcgggggtccttgaggtagatgcaataacggctttgacagctcaaaggcttccatgacgaatgttttgaagaatttgagcattgggaacgctaaaaatattcagccagctgctcccattcaaagtgatgatgtctcatgtgtgttttgtggagaagggcatgtgtttgagaattgtccctctaatccggagtccgtttgttacatgggaaatcagaattttaatagaaacaatcgggcattctcaaattcttacaatcaagcatggaagaatcatcctaatttgtcgttgggggggggggg

SEQ ID NO: 290859 - DNA, 546 bp, Cannabis indica
aagacagtagtttgcacgtagagtatgtgcggtggatcttatgttgaatattatatatgtgagtaattgtaaccgggattagggttattaccctaatctgagcggttaatagcctagggttattaccaagtgatataagttaagtaaatgctatgccatgctaagtatatgattatattgagatttaagggttatgcgttcaaggcataattgggttggactcggtaactagaactgacatgaaccattctaaggccttattatatttagacgtgtgagagcaacaagtaggtctatgccacgtagacataaatagatgtgtgagagcaacacgtaggtttacatcacgtaaacataaataggcatgtgagcccaacatgcaggtttgtgacacaaagatagttttaaatggcattattgtttatattatatgatgagaatattattgatatactttatactttcttgcttggcttggatcacgggtgctctactgtgtaggaaagggtaagactattgttgatcagccatgagtgcaggagttgg

SEQ ID NO: 290860 - DNA, 694 bp, Cannabis indica
caggtcaaagttcgggtcccgagtgcgtgtccaagtttgagtcttggtcaggatctcgatccagatctaggtccagcatttcgatctcagtctgggtcttggtccgagtctaggttcgtatcggaatccctatctaggtccaagtctgtgtttgggatcgtgtcccaaatttaagtccaggtccgagtcttagttccggtctgggtacacgaccgtgtctagttacgagttcctgtctccgtttgggtctgaggctaggtctgtgttcggttctacgtctgggtctgggtcctggtcacggtccatgtcttgttctaaggtcctggttcggcgatttttgttcgggttttaattttgggtccaaggtctagtactaggttcgagtttggttcttcgtctgggttctagtcctagtctgagtcccaaatctagacacccactactggtctgttccacgccccgttaaccgaatcccgagtcaagatttggatcactgtcacgggtctcggtctggttctggttctggttcaggttcaggtcccatttcaaagtttgggttcgagatcgtgactggggtgcggttctaggtcccaaccatggttctgtgtccctagtctggttccatgcttgggtctgagttcatgttcgggttcggctcccaagtccaggtttgggttggcattcgggtccggct

SEQ ID NO: 290861 - DNA, 693 bp, Cannabis indica
ttggtagcaaataatgcctatttggtagctattaaactttttgctactaactttttttggtggctacttcgtagctaatactccgttgctgaaagttttttgctaccaagacaatttgtagcaaatttgctactaatatttttgtagcaaaaaatgtcaaatctagtagcaaaataattactttgaaagactactaaaacttttttgctactacattttggttgcaaatcactttaaaattggtaacaaatacaactttagtacttaaaaatataataattttgctactgaaattttgttgcaaaataaatttaaattgaattatatgtgattttccaaccaaatttatatttaatatttaattttaattattccattaatgtaaaatttctaattatatatttgtagaataattaaaatatcaaaactcactttaatagaattaataacttatatatatacaaattcaactagtaaattgttgatatataatacaaaatctctaacataatttaaaatatataacatacacaaatctataaaaatcaaatcaatcttggatgttggcttatatccgaccaatctgttagtacttccccaaacattttatatttgctatacaatagattgagccctcttgtgatgccattggtgtggactctcacaacaccaattgaccagatcaagggtata

SEQ ID NO: 290862 - DNA, 766 bp, Cannabis indica
atcttcttggtgcagttttttggggtctatttcttgtgggaaattagagttgtatttgtttgtataactaaataaaattctaactgtttagtaattcaagtaaaaaaaaaaaaaattatatgtttggtgtggtagaaaaatagaagcaaataatggcatgcttatttattaaaagaataaggtcttaattctcatttatttattaattaaactttataataagataatttatttacttaaaggaatactattcccttatctaatttattttattttagttttttaatgttattaattgaagaaaataaatatatatatgccctttaaaaatttatacgttaaaaaataactatattttcgaaaaatgataatttaatcaaattaaaatatttcaattatctttcttaattattaaacaaaataaaattattatagttttctttacaaattagtttacaagataataaattattgtttgtaagtattttatattttaaatttattttaaaaattataaaattatttacacgtaaacttatttaattggaaaaaaattataaaaaagtgaaaaatgggtggaagaaaaaaaaaagtaggggaaccaattatctatccaaaagtgggacaaaatgaaaagttacaaaaatatatttggtgattttagaatgcactctcttagaatatattgatgcactctctacttgtttcagcatctagaataattttttagttcaatattttttttttcttatactcatgtatgtta

SEQ ID NO: 290863 - DNA, 635 bp, Cannabis indica
ggctgttcagattagatggacgcgaggcggaacaccaagagccaggggtaactcagtagggtcaaatcaggatcaaggagctcagtttcccccgcatgctaggggccgtggtagaggtcccagggacagggcccgtggtcggggtgatgataacccgccacaggctgcccaggctgctcaagccaatcaggaagcccagaattgggaaattaggtttgctgaaatgcaagccagaatagaggagcaagatcatgagattcaaatattgaggcagcagggtgctcctgcagtgccggtgccagaagttcaagtggcacctacccctgttgctcaggccgagatagtggtagcggtgaacagaatggaacccttgtatgaaaggttccggaagcaggcacctccggtttttttgggaggtcctaatgtcatgaaagtcgagcagtggctaacggtgattacaaggattctaaactttatgggtgtcaccgggaatgacagggtggtgtgtgccacctttgagtttcaagaggacgccttagtctggtgggacatggtgtcccaaagtcgcgatgctacgaccatgacctgggaaaggttctaggagctcttcaacgcgaaatactataatgaggccg

SEQ ID NO: 290864 - DNA, 565 bp, Cannabis indica
aaacatttatttaaataaagatagatgattatttagttatttatttgaatttcaattttaatcaataattatttttatttgataaatttaaataaaagactacatatatatgatatatgttatagaatacacataagatttaattggtataattttcatcaaaaaaataccatagccaaatatagcactctctctccttctactagtattcatctcacttgtagagtctttcactctctcatcatcagagtgtctcatgagttgattttacactatgataatcaataatctcccctaaattaatcctacaggcccacacttgtcctatagtattgaagattgatctgtaagactttggtgtgagctcttcacaaatcaaacatcattggattggatgatcaataatatatataaaaaaaattgaggatatcatagactactagaggtaaattattcatatcatgtagtgaaaattaatttatgtgaatgtgttgacatcctgggacttatgatttcgattatgattcataaaattatttcataaaattgcttttgctttctactc

SEQ ID NO: 290865 - DNA, 713 bp, Cannabis indica
ggtataatcaaatcaaaaatgcatccaccggaccaagaagatacaagtttccgaacagatatgggtattgctacaagtcatgatttggctcaaaaatgactggagccacataccaagatggtaaacaaggtgttaaagaccagatcggacggaacatggaagtatatgtggatgacatgctcgtcaaatccaggaaggctggggggcacatagatgacctggacgaatgctttaaagtcctccggaagtacaacatgaaactaaatcccttaaagtgcttctttggagtcagctcgggaaattttttgcgctttattgtcaatgcccaaggaattgaaagtcaacccagagaagattcaagccctcttggatatgaaattggcaacaagaaccaaggaagtacaaagtttgactggtcggattgccacactcagcagatttgtttcaaaatcaacagacaagtgtgttccattcttcaatatcctacgagggaataagcaatttgagtggacaaaggaatgtgtaaaagcttttcaggagctaaatacgcaactcgcaaagcctcctgtactcttgaaacctctggacagagaagaacttgggatatatttagctgtcacggagcatgttgtgagtgtcatactaatcagactcattgaggtcgaaggccgatatccattgatagagaaactcacttactgcctaattctagc

SEQ ID NO: 290866 - DNA, 792 bp, Cannabis indica
tccattgaatagacttattttcaaaatttcatttctcatccttgtaatagaaaactttttggttactccatatgaatggtttaactatagttctcttggctttgcttcgtagtttcttattctgactatccattacttgtttaaactaacaataaattttcatcacaggtgtcttccaagtcataacatggtgagttccttgaaaccctcccactacgacaaggtaccgtgactttttgtctaagaatctaattggtattgtcctcttcggttgtatcaatacaatagagccagtgggatcgtcttataaaataagatgatagaatactttggaatcaaggaaaaattatctcctctgctttgctactttattttcagacttagccattttcttaaaagagtagtatttgttgatacaaacactttcttatcttaataaccatgggatggtccacccctaatcacttagaatagctatcaaacatacaaaccttagttaacaattctagcttttctgaaggtcacgatcaggacatccatgattctagtaatggtttacactaagtacacaaccattccattattctaaaattttcctatcactagggtaaatccctaaaagaatttaggcaactgctaatagctaatcatagaccatatactttcatcaatatgtaaattgaatttttagggaggtaagtttgaatacaattcaaaaaattaacttaatgatctttgaactgcatatctaccaaatatttctccacccctatcagttcgcaagagctttaa

SEQ ID NO: 290867 - DNA, 496 bp, Cannabis indica
tactcgggggcgagtaagaatctagtttgggagaattttgttaggttatatttagcctatgtttcgggtttgaaaagtaagcattttctcgtctattggtgtcttttggagcggttttacgcttgattttcattgtttcaggttcccggggtgtcaaagttcaaattcagtcaattggtgaaaagacgggacaaactggcaaaaaatcgaaaaaatctgctcaagaggcgtcagtagtcgcgaccaccattgagccaggtcgcgacccttttctgtggtcgcgactctggtcgcgacttcgaggatttggcagaaactcggtttttcgagttttgcctgtagtcgcgacaagcttataggcttgtcgcgactaggtacggaaaacgcagttttgacctaattctgatttttctctcaattggaggcacacctttcatccctaaataaggaatacgactcagaaggtcaaactaagcagaaatagacctgaatagtg

SEQ ID NO: 290868 - DNA, 542 bp, Cannabis indica
ttgatgaagccttcggctcggtcaaggaaatcactcattgagtcgaccggcccgttcttccttatatccttccatagttcaccaaggacttcaatgcccccagtatcgcggataactttccatcctcggttacccgcgacactttggtcgcttccgtcatgaatctgctgatgtatgcccggagtggctcgcctggtcgttgctttacttcgaccaaatctcccagatgcaatgggagctgacgtgaggaagagaattgtgcatggaattccgaagaaaaggttttccatgaactaaactttccaggagccaacttgaaataccattgttgtgcggcctccgacagagtggcggggaagattctgcagcatacgtcccctcgtactccttgtaaatccatttgcatctcaaaatacttgagatgggaaagaggatcttctctcccagtatacatcttccatgttggcattttgaacttgtgaggcagtggcaggagattgatctctggtgagaagggagttccgcgagcacggtctaactca

SEQ ID NO: 290869 - DNA, 514 bp, Cannabis indica
attctcaagtttatattgttttcttgttctcctctaaacactcctaaatatatactatcatatatttatatattgaatatatagtactatatatattatatatacatactatatatacactctttatttctctactatatttcatctattatatatatattctatatcatatatatctatactctattatatatatatactatatcatacatatatatatacactattatatatatatatgtttttatatagtttacatttacttgtatctttgagttttgagttgtaactcttttcttttatttgtattttgtgctttgggattgtaactctttatttaatatattgtccttgtaatattttgtttagagttgtaattgtcttaatcttttattcatcttattttattcttccattgtaatctctctattatttctaacattctaagggaagaaatcgggcaaaaaaaaatgagagagagagagagcaatagtgttcacgtgaaacctagaga

SEQ ID NO: 290870 - DNA, 729 bp, Cannabis indica
gaacaggagcgggcttataataaggcccaggagaccgccgaaagggctctttgcattggggcttcactggagcagaggacccccagaccaaagcccgtggtcccggtaccgaatacgggggctcctgatgccagcacttcgggttctggtaagtctcctttaatgatacattatgtcccttccgtccgtgagtatgctagccttaggcctatagggttcgatgaacgtctccataggtttaggatgccttccactcggtgggggaatcatgccaaggactattatttctcccacttaggcgattatttaggtcggtcccagatgggttttggacctccagtgcccgttcccttggactcttcagcctatctatcttctagctggttccgtccctcagacaactatctcggggatgatggagccagtgttaagattcgggactttgctagggctgaattagggagtcagggtaggactagcttgattgcctttttgttaagtatatgctgttttcacaagtgttctaacacttaaccttttctcttgttgcagcagccgtatccatggacgaaatcttggccactcttgctggagcccatagtcctggtgcttcccctcctcctacttcttctcagttggtcactcccgggagggcttcctccagtgcccctccgagcactattgacttagtggacgaggaggaggtacttcttgaggaagctgaagaag

SEQ ID NO: 290871 - DNA, 534 bp, Cannabis indica
tgggtaaggatctcggtctagatctaggtccagcattttgatctcattctgggtcttggtccaagtctaggttcgtatccggatccctatctaggtccaagtctgtgtttgggattaggtcctagatttaggtccgggcccgagttccagtgtcagtttgggtctgaggctaggtctgtgttcgtttctaagtctgggtccgggtcttggtcacggtcctagtcttgttctagggtcctggttcggcgattcttgttcaggttctaattttgggtcccaggtctaggtttgggttcgggtttggttcttcgtttgggttcttgtcctagtctaagtcccaaatctagacaccgactattggtatgttcaaggccccgttacccgaatcgcgagtcaagatctatataactgtcacgggtctcggtctggttatggttcaggtcctatgtcccatttctgagtttgggttcgggatcgagactggggtgcggttctaggtcccaaccctggttctgtgtccctagtctggttcca

SEQ ID NO: 290872 - DNA, 518 bp, Cannabis indica
cgagacagtgccctttcttggggcaactcaccttttgttatgtattctatgatggggaccatccagctgggttcttgcccaaccgttgttatggcctcttttactttgatgcttggctctaccaagcgttccactggtactacccccagtccttcgatctcactatctgaagcaaacttagccatacagtctgcgtgagcgttcttttctcgggggattccttctactttgtagtccgtgaactcgtggagcagctcccggaccattattacatatgtggccattcgctcgccgcatgtttggtattctcccgatatctgatttacgaccagctgggagtcactgtagacttccactcttttggcccccacggctttcgctagcctcagccctgctattaaggcctcgtattcggcctcgttgtttgaagctgagaagtcgaaccgtagggctgcctggagtcgcagtccggtcagagatatcatcaccacccctgctccggatctattttcattgga

SEQ ID NO: 290873 - DNA, 677 bp, Cannabis indica
atcactttctagggtcttaaacttgaaactaaaagtttctctatcgataaataacatggaaataccccaaatatctcaaaaatgggaaaactagggttcccaaaactgtcccaaccggaattccggttctgtggggtttcttgggagctaaccggaattccagttcctacaggcccatctgaactggaattccggttcagtgtaagaatgagtcaaaaattcataactcattcaaatcaactccaaacttgatgaaaccttccagacttgctatttagactataaagaacacaacccaagcaataaaacacagctacaagcactagaacaaaacttgccattaatgagccaagcttgagttctaaaattaaaagcttgctcaaacaataaatcaggcaccaccacaagcctaaaacaacatatctaagcataattaatccatagaaaacaataacaaacactagcagcaagaccagcaaccaaaacaacaactaatgcaaaatttaatttttcttacaattcaagaaaacaaaaggaggttactagaacttataccttgtcttggattactctttggactactgaaaacactgaaatgaaggtgaaaaacaagaaccctagctggttcaaggtgggttcgaaaagagagagagatgagagtgaaaatgtgacttttt

SEQ ID NO: 290874 - DNA, 616 bp, Cannabis indica
gactttaaattttagattccaaatagaaattttgaatttcagtttcctagaatacattggacaatacagtatgactttcataagttattaatatccattttctgtcaatggattcaaactgtatgctaatgtatggaatatgaatttagtattctgtgaccaggatccacttggactattctaagaactctttattgtaactagatctaaattatgaaaagaccacaaccacattctaatatatctatgacattttcttcttgttcatagtggttttggcaagatcattctctgcaaagagaaaatatgccaatatccacttgaaagtagaattatttgtatttgaatatggatgcacattcaggggtggatatgagttatcgctaaattcttaagacgatcactctagattttaccttatgcaaaaaaatttgaaatgtttgagaaatttcatgaatttctagcaatggtggaaaaccattaaggtaagtgattaaagatcttgcgaattgtattaagtagaactttgaattgtatccaaaacttacctctccaaaaattccaatttgcatatagatgatagtaaaaggttatgattagttactagcagtttcct

SEQ ID NO: 290875 - DNA, 572 bp, Cannabis indica
ggttccacgaccctttcggatcctatgcgaggatccaactcatcctcttcagccttctctatctcaggggactcccggaccataagtacgggtaggtgggtggcaacattgtaacattgcctggcttccccctgatttcccctcacagttccgactccggcttcctgggtagggaattttaggcacagatgtcggattgaagtgattgcaccaaagtccactagggccggccggccgaggatcgcgttgtaggctgtcggacagtctaccaccacgaaggtgcaatatttaaatgtgctctggggggtatccgggcacagagtaaccgggagccttacttttcccatcgggataagcgtcgtcccgttaaaccccgtgagctgcgacccactaggcgagaggtcccggtcggtcaaccctatcgcagtgaaggcttctttgaagagcaggttcacggaactcccattgtcaattaagaccctagccaccactttatttgcgatgggggtctctatgaccagcgggtcgtgatgaggaaaacgcaccgtcttggcgtcttcttccgtgaacgt

SEQ ID NO: 290876 - DNA, 685 bp, Cannabis indica
aattgtagtagtgtatatagagagtgtatatatagtatgtatataatatatatacaaggccggccagagggtggggcagccggggcgtaggccccaggccccacaattctggaggcccccacaaaattaaaaactgacattatacatagaaaaatatatttatatgtataatatataaattttagttcaataaattacaattaatagctatagcacaattagttaaggattggatggtaatagttgaggtgatgggttcaacccttcttctacgtgacttatttattttgtttcaattttttttttttaatttaagggtttttttgttttttaaaaaatatatatgtatacataatttacataattagtcattagtttaaaattgtagatataattagggctttttttttattatttatttaaggtaagaatgtaatattttataatattttagtgcattactcaaaacaaatataatataatatttatatatattattttttaattttttttgctctattaaggaggtaataaaattttcttgtaaaaataaaaatgcattgccaaaaaaaaataagataatattatgttatgtatatttttgattaagctagcaaatattatatttagtactaatgttttttagaaaatttactctaatgtatagtgtatagtagtattttta

SEQ ID NO: 290877 - DNA, 521 bp, Cannabis indica
agcctaaagtagtaggattgtcagaggaattattctcaatattttcagctttccttttgcccttatctacattactggagagggatctccatgcaagtgacaatgtccattcataagcacgcaattcagcgtccagcttgtctatgtcggaggagttgcaattgttaatcacaaattggttaaactcaagtgataagctgttgagaacaaaataaactctttgctctccagataaaatgattcccagcatagctgctttctagaatttcatgttcatcatgagcaagcgtgaagtgaactttgaccaggagtcatcttcaactttttgaagttcattcctaaaggcatattctagatgagaattggggtgtgggtagtatattttgacactacaaatatcaataaacaaaaataaatcattggctcaattaattcatacacaagttcagatataacaagtaaaacaaatatgtttgtaaaaataccaaaaactaaacatatttattatcttctaaggtttc

SEQ ID NO: 290878 - DNA, 727 bp, Cannabis indica
aaattattttttagttgtttatagtttatttatagttgtattatatttgttataagattattttttttggttgttttgactcttttatagttaatttatagttgccatgaggctgttttctcattattttttttaattactttcttactttttgctaagaaaaatatctttcgtaattttaaaactttacaagcatatttttataaataaaaaatttaggtcataaaattgtaaataaaacataaaaaatatatttttaaaatctctaaatttctgtcactaatgtgataaattaaatacattatttttttttaaaaaaaaaacaacacatgtcccacttaatatataaatcaataatctaactgaaataataaatatttacataaccaaattatgatattttgtaaattatgactctaatgtcattttcttttattataaaagtctacttggatttcatttaaaggtactcttgtacgtatttttgtgttgtagaaaattattgaatgatgattgctaaatgtagaaattacactatatataggaaaaaatataagagtttatttttttatggcataaataaataatgctaaggggttattggtttttttttttttttttatatgagtttttttagggattatattacaaatacacaaaaacaacaaaaaaattacaaaaatacagttttagggaattttaaacatttttacgattttttttattt

SEQ ID NO: 290879 - DNA, 484 bp, Cannabis indica
ccccagtaggcctcttttccttagtagaggacccctcatcgcccttagacttattggccggaggagaggcgctagagcttccgcttattctcttcctcaaagcgtcgagcatttgcggcgacatgtctgtacagaatgaaaacaacatggttagaaaacagacatcagaaacaagaatgaagtaatatgcaaggtgactgcccgaaaaagactcagaagtccatcatcacctgacaccgatcttgtttcaaacataatagctttctctttttcgaaaacaagaggagatggccaaacaggtgggctcccttatgcgaatcgcatgttcaacaggcctaggcagggctaggagtttcttcttccttttcagtggagtcacctgctcttcctcagcttcatcttcaggattcaagggctcctgagcatactgctaggcccttgcaccacccttcaacttgcctctcgcttcagttgaatcaactca

SEQ ID NO: 290880 - DNA, 686 bp, Cannabis indica
ctgcaattttcccaaatcccagatatctgaacctaaaatcgaacctaaatctaacaaaactcacggtgcacacataaacacatacattatacattataaccctaaaatcaatacctatcaatactccaaaacatatatcacacaaaaaaaatgacaaaaaaaagggggccgtttggggttttaaaaaagtagtctattattttttttagtttaaaatgtattagtttaagaataaaatattaaggatttttaattatagaaatcaaatttcccatatactattaaagtagcaagggcttttttgtcctttattagttcagttcatttagaattacataaagtttgatatttagaatgagaaaagaaaaatttgattgtccttttgagacccttttttctgttatttgtggcaagggcttttttgtccttttagttcagttcatttcagcagctagatacaagagtaattcagctggttgaatttgaagagagattttgtaagggaagagagagagagagtgtttaggacattcaactttttggttcaagaagtgaaatcaagggagagtagtcgaattgtatggaccttgaatactagtgccactaagctgtgacagtttagattatttgtcttgttgagtttttgtttgttgtttatgttagattctgcttgctttgagttgatt

SEQ ID NO: 290881 - DNA, 581 bp, Cannabis indica
ttggcttatctccgagagtagcaacctttttctttttaactattttcacagcttgaacaggcttcttgctattcttccacttcttcttgttcttgggtttggaagcagaggcaatgctagcctcagccttagccgccccattagcattcccagaattaggagctttagatcctcctttctgtggtcctccaatcaaattttcaaatgtctgaaggttgttgaccagtcgtgaaagtcaagttccaacttgttcatgacataatttgaagtaaaaggtagaaaggctggagtcaaactgttcaagatcagactcacttgagttgtctgatccataacagctccatgattctcagcttcttggaagtaactcgtcatttggagaaggtgatcacgcacgctctgatgaggtctcatccgtgcattgatgaaattctttgttgcctcaaaacgagcttgaattgatgccattctgaacagttcagtcaactagttcatgatttctgcagccgtgagagtgttagcaaaccttgttttcaaggtgtcaaccatgctagaaagcataaagtatcgagctttgttgt

SEQ ID NO: 290882 - DNA, 924 bp, Cannabis indica
caccttcacccaaaaggaccatgaaacgtttcatcaggtctgggagaggtttaaagatttgatgggccagtgcccacatcatggatacgaaagttggcgtcttgtcagctatttctacgacggtctcacagccgacaaaagacaattcgtacaaatgatgtgcaatggcgacttcctacagaaagatcccgaagaagctttggaatatcttgaagaaatttctgaaaaatcatacacatggagtgcgccaagtcctacagacaagccacgaacagccggagtctaccaattgaaggaggaggacagtgtgaaagctcaacttgaagctttgaaaaaacaatttgaggctttcaaaactcaagaaggtaaagcactccagatggctgcaaaagtggaaaagcaagaaccatgcttcatttgtggagggactgatcatcaaccacaagagtgccctagtcttagtatgttaaggggaggagatgaggaacagtgtaatgccttaggggattacaagaagccttataatgcctactccaacacatacaatcctggttggcgtaaccatcccaatttcagttggaaggatacaagtcaaaatcaagcatctgggagccaatggaggcctgatcaacaaaagaattctcttgagagttccatgaaaattctcgcagaatctcaactagagttcaggacttatttcactcaggtgatagaggaattgaaggacataaagattcaaataacaaagttaaatgattcttcagtcattcaagagcgtggtaagcttcccgctcagcctctaatcactcccaaagggcaacatatggcacaaacctccgctccttcagagtctaatctcaaaggggttaatgccattactacccgaagtggtcaaagtacagtatcaccattacctaagaccac

SEQ ID NO: 290883 - DNA, 318 bp, Cannabis indica
actgagagtgcaattccaagttctatggtggatgcaatgaggaattaataagtcagtgaatttaagtggtaaattctagatctgcttattggaagctcgaatatatagccccatggtcccccactaagctaaggcttaatagtgaagaaaagatattttaaggtttatttgttaattaagagactttaaaaagtctaattaataaatatattagacaatttcatttaataattaattttaattattaaataattagttttggcattttagtggttgaatttgaaaatggcatttttgagaaaataagatgaatagttg

SEQ ID NO: 290884 - DNA, 583 bp, Cannabis indica
aagagacaagaaaattacaactctatgcaacaaaattacaaggactatagattaaataaaagttacaatcccaaagtacaaaatacaaataaagagaaagaaaagatgaggacaaagatacaactcaaagcaaatatatacacataaatgtaaaagcaaaaagagaatatatatataataaagagatatatgaatgatatatagtagatatatagtatatatatatattagtgaatatagaagagatataatatatgtatatataataaagagaagaagaggcagaaaactaataggaaaaagaagatgaagaagaactcaagtaagcaatgggggatcaccaaaggcttgaacaaggtttaaacaccttcgtccaaaaagcttatttcccctataaaaaatacttagggaatagaatggaaataattttgggaataaacaagcctctcaatattttctagcttagtgtttagaagatagaaaatagtgttgtctacaagtgaactaaagccctctatttatagtgttttgaggatcacatttgaaaatgaaattcttttatcacatggctgttaccaacaca

SEQ ID NO: 290885 - DNA, 352 bp, Cannabis indica
agatgagcgacatgtcggatagccaacagctcggctccggaggccgtgcatttgacggtgaagctgaccaggaggaggacagttttctcccccacttcgctttccgaagaggaggccgctccaatagagttaggcccgatgtcttctgtggacatcgagaagatggtgcaagaactcgcagaacccgggaccatcgatattcgagacagcgagtccacagtgtcggcacgcgactatcttatacactcgaggcatgctcctgatatcgaggtcgaggagatggacgaggaatggacgactccagttcgcgagctaggtgagaagaggaggaggcggaagggagtgggacaga

SEQ ID NO: 290886 - DNA, 727 bp, Cannabis indica
tggggtagaaggtaagcttgatattctggtcattggtagaccaagccatgaagacgccatcgtcaaagcgcttagtgcaccggctgcaggaaacgggagaaagaagctcagccctttttgccttctttgaggcttgttccttgaagtccctgagctccttcagctccgcggccagagtggccctggattctaagtttgcctggtgagtttcctctaaggatctcaccttggcagccatctcatccaaggcttccctggcctcccgaagctcccgcctggcctttgcagtggcctcgccttccgccctcagctcctcctggtgcctggcctccagcctgtctctccgcagggcctcctcccggatcatcgcctccgcctgggcttccctccgcttagcctcttcctcattagctttggcagcggcctcccggcgctcagcagcctcttgataaagccgcctctcagcagtaagatcctgaagaatcttcctgacttcgtccatgtccccaaaatcagacaggacgaagccatggttgattatgttcttggagagacggccggcctcagcagcaagctaaaaaacaatgcaagtataagaaagaatctccaaaaaagaaaacaataaggggaaaagcaaactacaaaacacttaccacagtgagggagtggctgagatcctggacttggtagatggagttcaaggatgcacaagcagcgaaccgcttag

SEQ ID NO: 290887 - DNA, 665 bp, Cannabis indica
gtttgggactgagttcaggtccgagtgtgggtttttgtcctcgtcagggttctggtccaaggcttggtcccaaatccaaacaccgactacgggtttgtccaagccctggctccagatctggatcccaatctctagtcccaatctggttccatttttggtgccggctcacgagctgggtcctatgttcaagttcgggtttgggtcgggtactcggtctcggtcctagttctatttcccaggtccctttcctaattctggctctaggtcccggttattgtgtgggtttggatcccggtctaggttaagtttcgagtcttagtctcggttaaggcctaggtctctatctgggtttttatttgggttctggtttgggtttaggtcctagttcctagtccttgtcctagtcttagttcggttctagttccatttgcgattctgagttggagtttgggtttgagttcgggtcagagttcgagtcctcatctgagtttgggttccggtccggatttcagtctacgtccagattaggctccaggttcgggtctagctttgggtctgattctaggtgtgggtttgagttcgggtctgagtctgtgtttgggtttgtctcctagtctagaccccgatctgggtctaggtttgggtccaactccaagttggggtcc

SEQ ID NO: 290888 - DNA, 880 bp, Cannabis indica
cgacgggagttggcagaaacagttcgaaaattcagcctagccatcccagtcgcgacgggcaatggcccagtcgcgacttctgggtattttttttttttttttttcgagaaggcctagtcgcgacgggaattaccccagtcgcgacttctgtagctatggccctttttttttcacagttttactgtaaaaattacaaatgcaaatctatcctaagtgcaatgaaacgaattaaaatgccacaaaacacttgtaaatgtcttctacaaattcaaaagaaaaataaagtaaaactaaattaaaagattgggttgcctcccaatagcgctgctttatcgtcactcagctagacgttgaccgagatcttcatagtggcgccagaatcatggcggacttggcttggtcaaattgacctcccaagtagagctttaaccgctgcccgttaactttgaaagtattagggccttcacctttcagttccaccgctccataaggaaacactttgaccactgtaaatggccctgaccaccttgacttcaatttaccaggaaacaacttcagccttgaattgaaaagtagaacttgttgcccaggttgaaactccttcctaactaaatttcggtcatgccaccttttagttctctccttatagatcttagcgttctcataagcctcattccggaattcttccaactcatccaactgtagtaatcttttctgaccagcagcctttaaatccatgttcaaagttttcattgcccagtacgctttgtgttctagctccaccggtagatgacaagcctttccaaacaccaaccgatatggtgacatcccgattggcgtcttgaacgctgttctataagcccacaatgcgtcatccaac

SEQ ID NO: 290889 - DNA, 576 bp, Cannabis indica
taccaattttttcataaattcgaacctcaatcataccatacccaaaattaagttcttacagataaaaatcatcacaatagagagctaacaacaacaacaacaactctcaaaattcaaattgcacaaaaaacccaaaatcatgcttaacacacaactcttcaagctcaaagacttgagctttaaatccttcaacctcataatttttccatcagcataacactacttaaaacatcatttccaacctagaaaatactcaaaacatctcatccaaacccaacaatctaacccacaacaataactatcaatttcacacctaaattcatcaaaacaacaccaattcattgaacatgcaaactcaagaacaataaaaccaaaaacatgcttttaccacaattaaaattcaacaagaacttcaatcaaactcagtaaaggaaactacctcaattccaatcaaagcaaagctcaaaaatcttcaaatatcaagctccaaatcaagcaacttccaccaaatcaaaatattgaataacaaagagggtgagagagagagagagggttcaagttgaagggaacacacca

SEQ ID NO: 290890 - DNA, 538 bp, Cannabis indica
ccttcagtgtttctgggaggtctcgatgtgatgaaggctgagcagtggctcacagtgattgaacgtattcttaactttataggagtagtttgtaatgatcgggtgacctgcgccactttttagttccaggaggacgccctcgtgtggtgggagttgatgaccctcactcgggacgtcactgttatgacctgggaagaattcagggagttgtttaactccaaatattataatgaagccctccgcagtgctaagcggaaagagttcacggagttggtacaaactgaggggatgtcggttactgagtatactaccaagtttgaccgtcttgccaagcttgctgtgggaatcgtgccaactgaatttagtaagaaagaaacgtatttggccggtttaaatgtgaagattaggcatgatctcgtgatcaccaccaatgaagcaaccacatatgctgaaatggttgagaaagccctacgggctgagggtgttgtgaaattcctttaggagcctcgagtgactccgagtgttggtggaaccccca

SEQ ID NO: 290891 - DNA, 240 bp, Cannabis indica
ccttaattgtttgagtatgtgagaaatggaccctaggggcaaaatggtaaatatgtatttttagatttattttcaactaaaggcattctttgtaaaaaaatgaaattcatttctgcatttaccttaacactaaaacagcccccttccccccctctctctatccctctttgtattttagttgaaaaaattggtgatttccttggtgttcaagcttgaaattgaagaattgtttgaggagtt

SEQ ID NO: 290892 - DNA, 537 bp, Cannabis indica
tcatgtatagaagaggattctcaatgccattactcagatgcgtcacacaaaatgaagttgcacggcttctatatgaagtccacgacaaattctgtagaaatcatgcagccggacagagcttattaaagaaaattctaaggcaagggtacttctggccgacgatgattgaagactcgaaagcttatgtcaagaagtgcgacaaatgccagagattttcaaagataccaagagcttcgcccaacgagctgacacaaatgcgaagtccgtggccctttgccatctggggaattgacctaatcgaacagttacctaaaggtaaaggcggaaaacagtacgcagtggtagcagttgaatactttaccaagtggactaaagccgaaccactcgcaactatcacatcaaaaaaggttcaagactttatagtgaagaagatcatatggcggttcggactaccatacaaaatagtttcggacaacggcaagcagttcgacagtcaatctttcgctgatttctgtgcgaaccatggcatcatcaaaa

SEQ ID NO: 290893 - DNA, 525 bp, Cannabis indica
tttttaaaacacaagttatgtttggttagtattttttaaaaacaatatgaacaaaagtgaattggtttttaaaataaaaaaacaacattttgttgtttttaaaattcttgtttttttgtaacttagaggttgtttggctttacagtttaaaaactgttttctgttttttaaaactgaaaacagtttttaaaaactattagaggtcgtttggcaaaaatttttaaaaactgttttttaaaaattgagtttaaaaaattagaaaacagaaaacatcaaaatgctggtttcaattttcaaaaacaatttttttgtctaacatattatattttatagtttgctcacatactcggatcctagacccgaaactatatccgaacctagactcggatgggtaaatgtcatggtatgatgctaaaatattgattttttttcgtaagaaaatatctaaaaacaatttttaaaaaatttgtgtcaaacaccattaaatttttaaaatgacaaaaaaactgttttctattctcactt

SEQ ID NO: 290894 - DNA, 593 bp, Cannabis indica
gctttatctatcttttacttttgccaaccttgccaaggcatcagcggtagcattctcttctcgtggtatttgttgaatggtgtacccttccagttgggcaagcaagtcttgtattttgctaaggtaggccatcattttttctcctctagccatgtactctcccaaaacttgatttacaaccagctgggagtcgctgtaaatgtctaagtgtctggccttcacctctttcgctagtttcagaccggcaattaatgcttcatactcggcttcattgtttgaggcagggaaaccaaagcgaatggccgtgtgaattcgttgtccctccggtgttgttagggtgatccccgctcctgatgactggtcggtagaagaaccatcaacttgtagcttccaggtttcaccggggtagtcttggttttcatttttctcggagttatggacgtgtggttcaggtgaatcgctcaggtcaggcctttggacgtcactggttattgttggttggtcgccctcttgcgccccggtacactcggctacaaagtcagccagggcctgccctttaatagccaatcttggctgatacgttatgtcatatt

SEQ ID NO: 290895 - DNA, 478 bp, Cannabis indica
aactaagcggtctttacacaaaagttcaccgaaaagtccggacagacaacccgtgatcacgccaaacacactgcattcactatcttaactgaagatatagagagtgtgtacatagcaactcagtcgttaattccatacaagaagcctgggcccatgaagaaagatgccatcaaaagggacatgacaaaattttgtcagttccatggagactacggccacgacaccaacgaatgttacaacttgaagcgggaaatagaacttctgatcaagaaaaacaacccgcacttacagaagtatgtcaaggccaaccaaggtaagttaaaccaggatctgttgcctccaccaatagatagacacttgcgagtcattattggaggcccgcacatcgctagagacacgggcaaagctcgagaaagatatgcctaaacagctcagtacgagcaagaagaagtcatcctagccgtggaagagaggaagc

SEQ ID NO: 290896 - DNA, 666 bp, Cannabis indica
gtagttgctgcgtggttgcgcggtggttgcatcagacgaaggtttcaatcagacgatggttgcatagtggttgctaggtggttggccgaaggttgcatcagacgaaagtttcaatcagataaaagtttctaagtggttgctgggtggttgaccgaaggttgcatcaaacgaaggtttcaatcagacgaaataactattagcaaaatgtttatgactgttgtgaaacattaaaaatcagaacagtgttttcacatacataactctatctacatgtctttttataatttaacatgaacaaatttattattggaaatttaaaaaacaacaaaatacactaggataaatattttactatagtattgatgtatttcttttagattatacttgaattggtttgtttgggaactccaattcaactttttgagatctgcttttcatggatctaaaaattgaaatcaagacattagttttatgcaaattaaactggatttccagttggattttagtttcgtagtagtttttttactttttttatgaatttgaaacaacctctgttttgattgattctggtcgtcttctcaagtgaagtcgccagaattaatggtggttctctttctgattgaactttcgtttcgattgtgttgggttgctgtgtagttgcacgat

SEQ ID NO: 290897 - DNA, 792 bp, Cannabis indica
atgttccaagtatcatgtagcatatagtgatattgaattatgggactaaaaaagtatgatcataatgaatatattaaacaaattttatacttttctttttctttgaaaatgatttttctctttagaatattagtttttttttcttgaacaatctttagaatattattagttagtctattgtgaaaaaggacatattaattataattggggaagctttgtcttaatcattgttataaattataagatcatataatttataatttgacatcattcatgattatatatgaaacatctgggtccttttcttgctcgattgcttatattcttcttttattaattatatcacaaatagattattattgtttatttaatccaacatttataacatgatcaaacaagggtaggcatgcaaaagtaaaaaaaaaatccaatataataataataataatgttttttttcctttggttatattaaggacagaagtaggagaaccttggctcctaattaaactaataatgttgcattattctataagaatctcaaagtttggtaataacactttattaaaagtttgtatattttggccctaaaagttaaatatgaaaggtaaatattatagggaatgtatataatagatcctttgaaagggtatattttggtagatttattgtctacttcaacattaagaatctattttctttttatactcgtatacgttatagttaggatcacttgtaaatttttatacaattttaaataatttgcaatataaggtttaaacaattatttaag

SEQ ID NO: 290898 - DNA, 519 bp, Cannabis indica
aatatcataatagaaaattgatcattggaatccgaattgatttttttcatcactccaaacatcataaaccctaattcaacaaaatcataatcaaaatagtctaaaaagatatacctgtgagaaaaagaggaaggaaaatcgaagctacagattaaagagatagaaatctttggaaaatttggattttctgtgtgagcgatgggagtgattgaggaaaccctagtgaagactccacctttgatataggtgtttttggaaccctagcaaactcggaggaagccctaagttggagtattgggctcagcccaacaacccctacaagcccagcccattgggctttttttttttatttagagaaatgctaaaaattaggggggtaaattgaaaaatacctcttttatttttcaattaaacaaatttacctctaattcatatttaattgaaacatacctctttttatatatactgtacccaaaataccctgatataagggagtcacatggagagtatcttgaagtg

SEQ ID NO: 290899 - DNA, 652 bp, Cannabis indica
caaaatccaattttcgctcaccacggctaacggctgcacttgattatttttatttcccatatttgcttttaaggagggaaacgaaggcgtctgaggttcctttgaaatgattacctcttttcgtgacttgcctataaatatcaaccagcattggcacataaactcattttcaccatccttctttgctaagtgagttcagagcgaaaagagaggttcttggcttcaagtttgctgaagtgccttcatcgaaactgcttgttggattgacattgctcgaacccagatatctgactcttgagtaagtttttgattccctttatgcttatttttgcatgtttacattttgaatgcgccttcgactttgctgtagaaaatatttaggaaaccctaggttcagaaactctgcgattcttctttgtcgtagcttcatgtgattttacattccatactgcttgttttttgaactgcgtaacgtctgtctttcatcttgcttattctaagcttcatgaaattttttagtttggtcggtttacgttatattttattcaacccaatataaagatcggattacaaaaatctaagtgtaacccgtccaattaagaaaaaataaattttaaacccgcccaatgaattgatcggtttggtcgggtta

SEQ ID NO: 290900 - DNA, 521 bp, Cannabis indica
tgatttagtggatgacgaggaggtgctgccgggagaaggtcaagaaaagtaatggggcttttctgaggaagttgaagaaggtgcaggagggctccgggctcttcctgaggaagctgaaaaaagtgaagaagagcaagaaattgctctgattcgcaaaagtaaaggcaaaatgattgcctaggaggagcccaagcggcctcggagagctgatactctggcccacggtctcgatggtggggtctctcctatggaagaacatactgcccctcccaatattgtgctgactccggttcctggagatgaggcgagacaggagctccggatagctaaacacaactacgccatgaacgaatactcctgggggtatgtgttaggttttatgccctaaataaaactccgtttcaatgtaatctattttattcaacatcaataaagaaacagaagtatttttcattcatttgtgtatgttttggctcactttatcaattgcttgtctaattgatttataaattcatcttaaa

SEQ ID NO: 290901 - DNA, 171 bp, Cannabis indica
atattttcattattttaatgtcaaataattcacacctaaccctaggtgaaatactataaataggtagtgatgtcttcagaaaaagatgatgcatcttattcctttcagagaaaaacctgagtgccttctacctaacctagccgccacttatctttctttattcttcattat

SEQ ID NO: 290902 - DNA, 440 bp, Cannabis indica
gttataaagtaaaaacgtactctgacactcatttaatgtaccctgagactcatctaatgtactactgaatacattccgtgaaagtatatcacgggacaaaatcatatccctataattattatatattgtccttttcttttactagctttgtcatcaaaagtagaagaagctttatgaaacatggcatgcttaaagcaataattataaaggagtgactcagtatatgtatatatatatatatatatatatatgatatatatgatatatgatattgtatatttgtatatgcatagggtggttctggttatggagaaaacataatatttcaaaacatagaaatgcacaatgtcaccaaccccatcatcatagatcaatactattgtgatcaaatggaaccttgtccagaacaggtaacacaacaaataattcatatcacatat

SEQ ID NO: 290903 - DNA, 413 bp, Cannabis indica
gtcctggtctgagtttgggttcgggtccggatttaagtcaaggtccagatcaggctccgggtgtgggttagcgtcctgggtcttggtctaggttgggtccgagtcctaaattccaatcccgatctgcgtctagattcagttctgggtgtaagtccttggttctgatcctggtctgggtttgagttcgggtccgagtctgggtccgggtttgtgtccaggtcttaaccccgatctgggtctaggttcgggtccaagtccaagttggggtcctaagtgcgggtcaagtttgggtctgggtcaggatctcaggccaaatctaggtccagcatttcgatcccagtctggttcttagtccgtgtccaaattcacatagggatccctatccaggtccgggtctcagtttcggtttgggt

SEQ ID NO: 290904 - DNA, 622 bp, Cannabis indica
ttccaccaaaataatgaaaaaattattctattggaatgacattctaatactttaaaaaacaaccaaacaaatgaataaaattattctattggaatgacattccaatacgtttcctaattacaaagttaatgttgatggtgcacttttttcaaatgagaagagttatggtattggcttggttgctagagacagtaatggtttggttattcaagctaagacgctgaagaaggcgggggacttacaacctcatgaagtggaagccattggtatcaaagaggctctgagttggattaaggacaacaattggcctagcatgattgtggaatcggattgtcgtaaagttgtgatggatcttcaaggaaataaagatatgacttctccttatggtcatataattttagattgtaaggctatgttagcctctgttactgatgtttcttttaattttgttaagcggtctgctaataagattgcgcattcattggcgcgatcttctctttttgaggctgaccgtgtttttagtagtgttgaattacctactgtaattgcttcctttgttttggaagatttgatttaatgaaatttcattattattcaaaaaaaaaaaaaaacaaaaacacca

SEQ ID NO: 290905 - DNA, 528 bp, Cannabis indica
gaggcagagaaggtggttggaattggttaaggactacgattgtgaaattttgtgtcaccccgggaaagccaatgttgtagccgatgctctaagcagaaaaggtcccggcgaatttgtaccacagttatgatagcccctcaactagcctctgaaatggttaatgcaggaattgagttcgtggtcaggaaattacataatttaacacttcaatctgatctgttggagagaattagaaaggcacaactggaagatcccgagctagttaaggttcgagacgaagtaatggctggtcggcctagaggcttttcagtctcgaacggtggaatgttgttatgcaaagctcgagtttgtgttcctaatgttgatgagcttaagagagagatacttgatgaagctcataccacgccttattcattgcattcgggaaccaccaaaatgtatcaggatttgaaaccctacctctggtggtatggaatgaaaagagatgtggtggactacgtgtccaagtgtttaacctgccagcagatt

SEQ ID NO: 290906 - DNA, 723 bp, Cannabis indica
ctacatgcagatgggtcggctacagatcaacgatactggggacaggaattgcctttgtcacgcctcggggggcaacacctgcacactgcagtcaagttcggattcaaagcatctacaacgaagccgagtacgaagctctaatcgttgggctaagactagcccaggagatgaaggccgaacacagcgaaatctgcagtgattcacaactggtggtaaatcatgtatccggagaatacgaggcttggggataaagatgatagcatatctgagcaaaatacatgatctactgcacaattcaaaagctacggtctcagacaaattccaagagaaaaaaatacaactgcagacgcattagctcgattggcaagcatcaatgtaagtgacaaggcaaacttggttcctatccaattcctcgaagagcctaccatcactggcacagaagaaatcgaaatgattgataatgttacttctggccaacgatgattgaagattcaaaagcctatgttaagaagtgtgacaaatgccagagattttcaaagataccaagagctccacccaactagttaatgcagatgcaaagtccgtggccctttgccatttgggggattgatctgatcggacaattacccaaaggtaaaggcggagtgtagtatgcagtggtagcggttgattattttactaagtggactgaagccgaactactcgcaaccattacatcaaaga

SEQ ID NO: 290907 - DNA, 728 bp, Cannabis indica
attaatttatttattaatattcttaaatttattctttcaattattgattagtgtgattttaatttgttaggttattttaaatactattcatccatttagagtcttttggagggattttaacatattttggtggaaaataatggaagtcggcgagctcgattgtacaaggcggaacttaattacaaattcggacgaacttaaaagccgaattggacttggtgctaaacatgaaagttttagatctcgttcttagttttccagaacatcttgaatcgtccaattccgatcaatattgagagagttatggccaaaatactatcagtcgtcgcagcaggaaatttctaaaaaaaaaaaagatagcgaaaataaagataaattttcaagaagagttgcgatttttatcttttgtttaaaagatgagttatctttatccgagatatttcctaatactattataaatagaatcctaattctaaaaggatttatctatccactataaatagaatcctaattctaataggattcaactaactttcccattactataaataagacctcttagactacaaatggaggagaatccaaaaaactacaaattaaatattatgatttttattaatgtctagttctgagtagttttcttttagttaagggttatttcaaaacccgaaacatgaattcttaatttcattattgaatgttaatttttagtttccattatatcaaat

SEQ ID NO: 290908 - DNA, 749 bp, Cannabis indica
aacttaaagttggtaatggcgaaatggtatcggttagagctagaggaaaagccaaactcaagtttcagaacagaattttggaattagacaatgtcttattcattccaaatttcagtagaaacttgatttctgtttcatgcttacagttgcaacaacaaattagattttttgagttctggttctaccatttctcgaaatgacattcaaatttgtgttgcatctatggaacaggggctttatgttctaagaccagaagaaccatttgcgcttaataacgaactgtttaaggtagctaaacctagaaaccacaaaaagcaaaagatcgataatgaagatgaaacatatctatggcacttacgtcttggtcatataggctatgatagacttcacaggttaaccaaaggtggtccattgaaaaatgtcaccttaggtgaattaccagtttgtgaatcttgcctagaaggcaaaatgacaaaacgttctttctctgcaaagggagagcgtgccaaggaaccactaggcatagtacattcagatctttgtggaccactgaatgtcaaagctagaggtggttatgagtactttgtcactttcattgacgattactctagatatggtcatatttaccttatgcataagaaatctgaaacgtttgaaaagtttcaggaatttctagcattggctcaaaaccaattgggtaaaaccttaaagatcttgcgaactgataggggtggagaatatatggatat

SEQ ID NO: 290909 - DNA, 642 bp, Cannabis indica
aagtgaataacaacaattcaatccatctttcaatttagctatcacgcaagactaaaaaaaactaaaacaaactaaactaaaacaaataaacgcgaaaaaataaattaagtttcccccccccccccaaactaaaatgcacattgtccccaatgtgtgaaaataaaccagggtgagagaaacttacctgagcgccacatcagtatggcggtggaggtggtggcgggtagaatccacctctcgcatccatgagggcctttgtgccaaacgaagaaaactgacctccaatgttgcaaattttaaagctttccttagattgagagtcaccttcatatttcccacacaacagtcttttcatacgtcgtcgaacagttcgaaatcgttctttagacttccctttcgtcttgttggtagtgacttctcgaccatcctttacaacttccagtcgacaacaagtaggaatttcagttgcagcaaatactttgaaagtctcttcttctttttgaacacgcaactttaactcccccttctgtacatcaattaatgctcttcccgttgctaggaatggtcttcccaagatgataggaatattctcatcttcttccatgtcaagtattaagaaatcagcagggaagatgaacttac

SEQ ID NO: 290910 - DNA, 976 bp, Cannabis indica
atattttttttatatataaacaattttttttttcttcctttgaatttgttatttgttattttatttatttaacgtgttgttggagacataaaataactataatttgttttatttgttgttagttatgtgaaaaaaaaaatatttttttcataaatattaaataatttaatattaaaaagtaacaaatccaaagtaaccaatccaatccgcacttttgcagattggattggattggatttgagctattgtgcggattggattggatccaaaaaatgaaatccacacttagtggagattggatgttgtttgaccaaaaaaggaattggatcggatgaacagccctactattacatatttccctactattacatatttgaaaaaactattacatttttttaaccttccatctaatagaaaaaatcagcataactgcttaattgtatttcacttggaaggttcaataaaaaaaaaaaaacgagaaagaaatgaaatgaacatgtttgctgacaaaaaaaaaaaaataataataaataaaaactcctctaaaaccttgatacgcaccgtttcattgcttgttttttctttcctactgttgaaggccatttcgtctttaactaggcgaggcgagagagataacatagaaagaaagaaagaaagagcagaggagaagactgactgaggaatgagaatgctgtgaaactgaaccaactatggcgaccaaatcaagtccttcttccaccgctcactctaaatctggaggagccatttccaaaggctacaatttcgcttctcactgggaacaggtctcatttttcaatcctatttctctatttctttaattatatttgctgtaccgggtttacttcaatcatggtggagaatttttatttcagatctagtaataagcagatctcagagctgaatttttcattgcagtagctttagatttcgtctttgaattttgtgttcttggtaa

SEQ ID NO: 290911 - DNA, 665 bp, Cannabis indica
atcagcctcgtcgtccccaggataaaacagcctagtcgaacacactgtatcggaactctattgcacgatagagaaccgtcgaaattaaacacccaaaaccgactactgctcgaagcgaaaatataaatatgtaatatagtagtgtgtatatatagtataatatttctgaatgaaaagttatatatctttctcccactgttcagtcgcattatataggcaatgcgttgatagtagtaacgggaagaaatacgttactggatgggaacgttggaacatgggatcatgtgaacgatgtaaaaaatcaagaagatgctataaatcaggaagcatctctgtttactaattaatcaaacacgttttcatttaaaaagaaaactgttttaattaattaaagaaataataatttaagaaataaattttctccaaaaaataaggtgacaccacacccgccagctcggctcggtcggtcggacggcggcggtggcgcgcgcgcgtgtgtggtggcccggtgtgtgagtcctcacccatgcgcacaaaactaggtaccccttggggcccaaacccatatctcaaacttgcactagttatacacttcaaatgaagtgtttctatcccatgtgggactcctactcacacacatcatttttttaacatttcacaaagtt

SEQ ID NO: 290912 - DNA, 498 bp, Cannabis indica
tagagaaggcttaatcattaatttccaatttaatacaaggaaaatatccttaattgaattgtaccaaaattaattattaaccaattaatttcacaatcaatgatattttcctagattagaaataataattagtatggaaataactatctagaaaatatctcaattctactaagtatcttttcaagatctggaaaatatctgatttaagttattatagaaagaatctatacaaacttaaaattttccaaacatcatttaattaaatatcaaaattaggtggtaactacctaatttaaagatattccctttttaagtttaaaaccaacttaaaataatatcttctaagaatcttcaataactaattcctagaattcctcagcttaatattattatcaaaatatattcaaatttaagttattataaaattagtaattactaattcataacttaaataagaatatttaatgaaataataaaagtaagtttcagaaagaatct

SEQ ID NO: 290913 - DNA, 563 bp, Cannabis indica
taatttaaaaaatattccaatttaagttgttccaaaattttaacaaattttcaacttaaaaaatatcctcagaatcttccataactaattcttagaattcctcaacttaattttgaaatttaaaagatattcaaattcaagttgataaaaaaattagttagaaataactaatttacaacttaaataggaatatttaatgaaataataaaaaacaagcttcagaaagaatctagttagttatattctatatttaattaaatacaagaaaaatactgttatcccaaatttggcattctgacgtggcatcacgagaatggtgacacgtggactctacttagagcatctgttcggatcaacatgccgagcacgatgcctcactggcatatcaataatggaatactcaacgagccgtgtaaaatgagcaacacttagcgaattcaacctaacgcatcgtgagtcaccagctcaatccctataactcagggatcaacttacgtggatgttgcatacacacgaccccactatcagtgtattcagcctcaatcccacgatccttgcattga

SEQ ID NO: 290914 - DNA, 527 bp, Cannabis indica
acccgatcccaaacacagacttggacctataaagggatccggatacgaacctggactcggaccaagacccaagttgggatcgaaatgcttgacctagatttggacaaagatcctgacccagacccaaattggacccacactcaggacccgaacttggacctgtacccgaacctagacccaaatcggggtccatacctggacacaaacccagacacaaactaggacccgaaatgaaacacccacacctagaatcagacccaaagctagacctggacccggacccgaactcgaacacataccaggatcagaaccaaggacttagacgtagaactgaatccagattcagatcgggattggaacttgggactcagacccaaccttgaccaagacccaagacgcatacccacactaggagcatgatctggaccttgacggaaatctagacccgaacccaaacttagaccatgtttcgaactacgacccgaactcaaacccaaactcgaactcaaaatcgcaaatggaactag

SEQ ID NO: 290915 - DNA, 424 bp, Cannabis indica
ataacactcctgagattgaacctaagcatgtcaagattaagatcttttgatctaagatcagctagtgatattgacttagaaagatacaacagtaagattatatatcttaaccaagatcaattacggtcccagtccaatgtatactccatacatccgaaactagcatactttaccaatgttctggaaagaacataacacttatgcaaagtgtaagtacaattcatcggtgattatcacatcagtgtaaatccagtgcactgatgaatcagggactatgtcttttgaagcatataacaaaaatcacattccactgtgttgacatcactgtaattgtaaatgactacatgttctagacttaaaagattttgtatatcttaaaccacaaacatgaaaactacatgtaaacataaatgacttctaatct

SEQ ID NO: 290916 - DNA, 313 bp, Cannabis indica
gggggcaacacctgcatgcagcgatcaaattcggattcaaagcctccaacaatgatgccgaatacgaagccctaatcgctagactcaaactagcgaaggaaatgaaagccgagcacatcgaaatctgctgtgactcactgctagtggtcaatcatgtatctggcgaatacgagactcggggagaaaaaatgatagcatatctgagaaaaatacatgatctgctcgcacaattcaaaacctacagcatcaagcagattccaagagaagaaaatacaacagcagatgcgctagcccgtttggcgagcaacaatat

SEQ ID NO: 290917 - DNA, 1132 bp, Cannabis indica
atacacatagtacaaattaactataaaaatcaatattaacattaatactcattaaaaatatacaaatcaattaattttatttatattattttaatatattacaaataaatcttattgaaaattagtgaatagtatttataagtggtagagaaataattaaaaaatataatatttattgtgggataaaatttatcatttgctatcttttatatcaaatttgacacaatttttagcttgagctaaatttggcacgcactttacatcaattttgaagttaaattttaacaaaatattcaaaaaaaaaaaacttataatacactatatttagctctctattgaaaatgcttttaaaaattatttacaagagatttttttttagtaaaaataatttataagaaaattaacaactaaagatatagttcttttaaaattatatttttttaagtcacttcattttattgttttttttgggtttgacaatagcatctaatacataacaatatatatatggaacacttcttaatgactattacccatgaatggttactaatacaaatttaactataaatattaattttaaaaatatcaaactatcgaattttgatctaataacgtaataatgaaattacaaatttgaatttctatgcttaatttaactacttaattaaaatagtatcaaaaaatatctctttttacactatatcaaaaatatggtcatacaaaaatatttaattcaaactcaactttttcttttttatttttcttgctaaattttttttaatttttcttttatcgatggaacaatctcagctcatatgatatataaatgagagatttttttaattagatagaaaaattaagcataaaaacttaaaattttctaattttacccattcatgggtaatactcattaagagtgcacccttaattctctataataatccaaaaaaatttaaaactattcaaacattacattggaaatatatagtcaatacattcaaaagagagcttgttttgattgggtggaatcaccattccttttggcaaaaaaaaaaaaaaagaatctcgaattaaatataaaataaaatggaagattccattatgccacgtcaccaatttgacttttcaaagt

SEQ ID NO: 290918 - DNA, 405 bp, Cannabis indica
tatgcaattcagatggcgaccaacattttaaatgttgttccatctaaatcagtccctaagacacctttagaactatggaatggtcgtacacctagtttacgccattctagaatctgggggtgccctgctcatgtcttaagaaagaaagatggcaaacttgaaaagcgaactgaggtttgcatgtttgttggaaattctaaagagactaggggggactattttatagtcgcaaggatgataaagtgtttgtttccacaaacgccactttccttgaagatgactatattaagaatttcaaaccacaaagtaaagtagtattggaggaaatgctttcagatataactccttctaatgttccatcctcttctactcaagtagacgataatcctgttggaaatattttac

SEQ ID NO: 290919 - DNA, 490 bp, Cannabis indica
aattaaaagcaatgtcaatttcccaaaatcgagtgggctgtaccaaaccaagaactccagttactgattggaacaaaaaaaccgccaagtacagcagttcacaaacaattaataaaataaacaagtaataataacaataaaaatcactcatcttgttgcaaaatagtctccctttgcttccaagttatcatattttcctaagataatttactattacaataccatcacagcaaagtcagttatacagtattcacttttaacatacaatgatgccaacatatgtaatataaaatatagaaacaattatattaagattttattgtagtataaaggttcaagggtaaataggcatctcagtgtagatgcagaaggaacatgaaagggtagttatatttacaccccataaaattataattacacccctaaatataattacatatttaaccttatgtaaaattaccaaaatagatatttttaataattttttttt

SEQ ID NO: 290920 - DNA, 1331 bp, Cannabis indica
gtagttaaagtaagtatgagctaattttattaaggcttgagtgactataaacccctacgtttgggtatgattaattttaagcacgattttggcaatgtagccttttttttttattcaagtgagtttattgtcatttaattatacttatcggttgtaagtatagatttgattctggaaaggctaaatctagtagttacaacttgaatgatgcaagtgaattaccatgtttaggttgttcttagttagtaagataggaatattttgctaccttgcataacttgagaattggtatgtaaatgatgttccacaacttgatttaatataggaatatattgaatcaagtggtagaactgaattagtgagttttggaaaaacctcactaacatattgtgaattctattaactctgtgcaactttgctgaagtaagtaatgctgtaaaaactggacaaatttaacatagggggaatcagctattcaagtctaccattccatcgatactttcccttgcagttaatttttcagtagttgtcgtcttattccgagcatattttcattgttaccaatttattttactttcatcaatcatctattgttttttttttacaaaagactttaagttgttagctagttgattttatatttattttaatttataatccctgtggagacaatattcaacttatcattattatattacttgttgccgattatgtgcacttgcgtatatatatttttcacaacaagtttttagagccgttatcaggattgaaattaaaaattgtgtatcatcaactattttgcaattttatttctggtttgacgttttaatcctattttggtgcgctgattttttttcttttttaggttgtaaagtaatgcatgaacgagcaagaagaagaccttgaactttctcccattgaccccgaaattgaactcacttttagacaaaggagaaaggaacaaaaggctaaaaacactacaatatggccgatgggtttgaagttgggggtgctcataatcaagccaatcctattgctttggccgatgatagagcccgagcaataagagagtatgcagcccctatgttcaatgagcttaatctgggtattgtgagacccgaaatccaagcacctcactttgagctcaagcctgtcatgttttaaatgctccaaacggttggtcaatttggtgggtcgccaacagaagatcctcacctccatattcgctcatttttggaggtgagtgattctttcaagctacaaggagtaagtgaagaggctttaagattgaagttgttcccattttccttaagggatcgggctagagcttg

SEQ ID NO: 290921 - DNA, 479 bp, Cannabis indica
cctactatttttttaaaagaaaaaaaaaaataatgaaatgaaaaccctatttaaggtaatagcttccaaggcaagaaacaaaacttcattcttcttctccccttcgtgcaaaccaaccagccagcaagagaggctctcctcaccattttcttttgtctttggagcatattattcaacctaagctcaacctagaagtgattgaggtaagtttacaccttatgggttgtgatttttaatggattttggttggtttaaggttagagttttgagattttgtagctgtagggatcaggttgagtttcagttatgtttaggttatgtttttgtgcatgttgagaatggttttgagaggtttctttggctgcttggattgaagtgtgttggttgaagctacaagttgaatttcttcacttgaacatgtgattctgagttagagattgaatttttgtgttttgaagcttgggttacgttatatctat

SEQ ID NO: 290922 - DNA, 251 bp, Cannabis indica
tcttcctccgcctcggagggactactaggacggacatcgtcctgctcctcgatctactggacctcagcatccccttcatgatcctcctcctcctagacggttggatcttgttcgacgctgggtaaggtggcgtgccaagccacttgagggacggatgcatcgaccctacgcattgtctttttggtacgaaccatcatcctatggctcgacaaaagatttaacgaagaatgccttgttgggttttatgccct

SEQ ID NO: 290923 - DNA, 516 bp, Cannabis indica
ctaaccattcatatggatagtaataacttatcaaaattatgaggataagataggaaattttgcaatgtctattcgaaagagttaagcacaattcctggtccttatgcaatattttatggtatctctagtgattacttaaatattaagcaagtattttacattaatgttaatactagaatgctatgttgatgacttagtttagaaggaacttattgtttccaaattaagataaaatgtcacaacaagatgtccctaagtatcaacagtaagaggattaatgcacaatatagattcgttatgattatccagtattacaatcctaatagtcaaagatcctttatagatgatctacactgaatagggataaatttaccgttttacccttcaatgtttatccttaatacacttagctacctataaatgatatttcagtaaactaatataattagtgaaatgagatctcagtcatttatctctattaagccaagctcaaaagaaatcattatttcacttcta

SEQ ID NO: 290924 - DNA, 633 bp, Cannabis indica
atttgcctgatttgaataactgtactaggttaattaaattagtttaacctaataaaattgattagcaacataattaatttcaaaataaatggaattatttttcattcgaatattttgaaattaatttaagaaaaacacacttagtttaatgaaattaattcaagataaactatatgtatttttcttgtatttaattaaatatagaattataactaactagattccttctgaagcttaattttttttttaatatttcattaaatattcctatttaagttgtaaattagttatttctaactaattttttttatcaacttaaatttgaatatcttttgaatttcaaaattaagttgaggaattctaggaattagttattgaagattcttaggatattttttttaaagttgaaaatttgttaaaattttggatcaacttaaaatagaatatttttcaaattaagtagttacaacttaatttgttatttaattaaaatttttgtttgaaaataatttaagttgaaaagttagttattctagaacaacttaaagtagatatttttcaacatattattttattatattttaatttttgaaattttatatatttattatatataattttcgatattaaata

SEQ ID NO: 290925 - DNA, 577 bp, Cannabis indica
ttccactgtgctgtagaaaaatgcttaggaaatcctagggctagaaacttctgcgattcttctttattatgtcttcatgtgggtttacagccataatgcttgtttctgaactgcatagcgtccgtctttcatcttgcttattctaagcttcatgaactttttttgccctaactcaagaaaattttctgacttcttgagttctgacttttctttaaacatagctattctttagtctgttgagtactcctggtcagcatattttcttgcttattgatcgatattccgaccaacacttatctcgtgtgttgtcttttctagatgaactcaggtgagtcttgggaactcgaacatcggatcgaccataatttgcttcaacttctgcacgaggatcaccctcgtcttcgttctagtcctccttcttctagcgaaggacattcttttgaccctgtacccagccataggatgatggctcgtacaaagaaaaccacgcgtctggctgacgccacagatcctcaagtggctcggcattccactctgcccagcgctgaataggattcggccgtccagatggaggagg

SEQ ID NO: 290926 - DNA, 541 bp, Cannabis indica
ttttcttctcttggaatttgtctgagaccgtaactttggaattgtgcgagcaggtcatgtatttttctcagatatgctatcatcttttctcctccagcctcgtattcgtcggatacatgatttaccaccagctgtgaatcactacagatttcaatgtgctcggccttcatttcctcggctagcttaagtccagcggttagagcctcgtattcggcttcattgttagatgccttgaatccgaacttgactgtaacatgcaggtgttgccccccaggcgtgacaagggcaattcctgcaccagatagttgatttgttgccgacccatccacatgttgtttctaggtccgtttgtcttcattgttatttggctgaggtattggctcgggattgctttctggtatgctttctttttcgcctgtgcattctaccgtaaagttggccaaggcttggcccttgattgatgttcggggttggaagttaatttcgtactgacccaattctaccgcctacttgagtaatcgtccagaagcatctggttttt

SEQ ID NO: 290927 - DNA, 549 bp, Cannabis indica
acccaaaaaacgtaacctcatacataccccttacaaacatacattcctaaagagcctcaaaataccaaaacccagaaagtaaagcattttttctccaaacagaaaacgaaaatgcaatgacttgaaaactaacctttagttttggtttctgcgattgctctcgatcacttctgagattgagaatattgtagaaagagtggtagaaatctgggcaaagaatgaaagtgggttttgaagtctctgtaaaggagggaaggaggaagttaagaacaagagggaaaaatggaagttttgattcgtatcaaagggtttaaatacccatatcccttattaattgggattacgacacgtggcaaccagaatgcctaaggtcgcccaatctaacggccaacgatggccacgcctacacaaaaaccgaggagttttgtgacgtggcaccataaatgcaataaaaagtaataattgcagccgtcatttttcgaaaccctcgacgggacaaccaaaaggtcacctcctcgtgacaacctttcacctgtctctcgagtaata

SEQ ID NO: 290928 - DNA, 489 bp, Cannabis indica
ctgcccaaactcataacggtcaaccgttcaatccccggtcataggttccacctgggcgaggccaaagacatgtatctcgagtaatgtgtttctcaagtggcttatggtgagcccgatgccttcttcctctggaaagaatgttgatgtacctcccgttcaaacaacaggtcctcgagctcctaccggcctagaagatccaaaccgagagcctgggactccagctgtttaaatatttctcttttatccttctttttatatatcttactcggccataaggccttttttttaagacatcatgaccggccaagcggtctttaaacttgaaatttttttcattttacagacaataggctgaccaagcagcttttaatctcagtattacatgcttttgttacctttaatgaatttcattctccgtttataatcatcgtgcaattgtgtttgttttatctttattaaatgctttgtacaggtataggtgcccccaag

SEQ ID NO: 290929 - DNA, 697 bp, Cannabis indica
tttttgtggtcctccaatcaaattttcaaatgtctgaaggttgtttaccaactcgtgaaagtcaagttccaacttgttcatgacataatttgaagtataaggtagaaaggctggagtcaaactgttcaagatcagactcacttgagttgtctgatccataatagctccatgattctgagcttcttggaagtaactcgccatttggagaaggtgatcacgcacgttctgatgaggtttcatccgtgcattgatgaaattctttgtcgcttcaaagcgagcttgaattgatgcctgtccgaatagttcagtcaactggttcaagatttctgcagccgtgagagtgttagcaaaccttgttttcaaggtgtcaaccatgctagacagcatgaagtatcgagctttgttgttggcattctgccaacgctcgaacttctcctttactgctttggttgcattctcacccggctgctcaggagccgcttcagttaacacaaacagcgcattttcaccaatgagagcaatgttaatgttctctttccatttgggaaagttagatccattcagcttgttatcagtcaacagtgacaccatggggttggtcattgtcatgttggatactacaaataacaataaatagaaatcaagtaaggttcaacacaaaatctcattcagaaattattagcacatagcaagtagg

SEQ ID NO: 290930 - DNA, 718 bp, Cannabis indica
tagatcagatcaatatcaatttaattaatcagatcaagtaggttaaaaacacctatataatacaactcaaccgtatatttgaacattatcagagatcaaagtttgaaactttaccatggttacagccgcaataaaatagatcctggttggagaagaagagagccgcaggcgattcgagtttctcggtcttatttctctctattttggatggatcaatctttgagaaacgtgttctgtttgttgatttatagcagtgtgaggcaccaagtcaatttcgtcagaccacgtaagtttgtatacgtgttcttacattattcgtccttcccataacatattacttagctggcattacgcgattcaagctgagctggcacagactgttgtatacgtggtcttttttttttttgaaacaatttttcttttagtttaaaagcttttgatatcaattttttaattaattttttgttttaacaattaaaaaataaaaatattttttaagatatatatcttataaaattattttcacttttaattttttaataaagaatttaaattttaaaaacaaaaaaattacttttaatatttttataaacagtttttctttgctaattaatatttttgagttggacctaaatttcccccgcggccctagcaccgaacctagcctttcacccgaactcaaatccgaccccagacttagattcgacataaataaaat

SEQ ID NO: 290931 - DNA, 614 bp, Cannabis indica
ggatgatgatgtggctacagaggtaccttccctgaggatggaactaactcctagcaaccaagtagagcgacaaagaagaccccccgtagtgagaatcaccaaacaccaaaaactagtagcagtcggccaggtccttctaatagtactcttgtatttgaatttgaagtttctactaaattcaaacctcttatgtgcaacatttgggtgattgaacattccacagtgtaatatatttaatatattgcaaaagattatgtatatatgaagtacgttacaaaaaaattattgtccacaaaaaatgtactatgcaaacaactaccatgtcaagttttggtaaaataagtccacacaccacctatgtataaaggtgagcatgttatcatctgtaacatgctctaacgaacggtccaacatgaggtgctcaatgcattcgatggagaacattctacactcgccactacaaataaaaaaaacagtaaatattagcaacaattaagttaagtaattcataatggagtgcaaaattaaataaattaaaaaagaagagatttaccttgtgttcatctgtagtacaattttaggggtagctcttctataatgcagtggtaggagct

SEQ ID NO: 290932 - DNA, 625 bp, Cannabis indica
tacaatttgttaaatgatatctaccttttttgtcagtcttcaaccaattttgtgtacatactaaatcttctaatgtagaaggatgaagtctcgatcgatgtgaactcacgtgcctaccaccagtgctgaatgtagattccgaagcaacagtgctaacaggcacagcaaatacatccttggcaatcatactcaacaaagggtatttgaggcccgtcaccttccaatagttgcatatatcaaatgactcttcagtcctaggtatcaagttctcctctaaatataaatccagttcagacttcatattctctactcgataggaagctctaacaaatctgtcaaagttagaaagggcatccaatcggcgtgttgaagacgatgttgatacattttcttcttgaacccttctttctctcaaatgaggaaacttagacccgtactcctctagtagctcgcaacaaagctcacgaaccttcgcaatttcagttacatattgctcatctccataaattacagggaaataatattcgagcaacatgaacttgtacctcgggtctaaaacaaccgccacacacataagcccgtgaatctctcaccaatatttctggaacttggacatcatttgagt

SEQ ID NO: 290933 - DNA, 496 bp, Cannabis indica
ttttttttagaagcttgaagtcccaggtgttatagcattgcttcagcattctggagcagagacacagaaaaaaaatgctatgctaaggcattgctataactcctgggagcacattattttggaaaattttggggcaataaataatggcaatattaatactcaaattttttgtgggatattctttgaggaagtaagtgtgaggtctcattttggtcttaggaaaattaaggtgcttttaggtgatttgagccaaaaatgacttctcttaaccaccttcacctaagccttacattacaagcttgaaaaagtccttttgatctttggttttatgtttgtctacattagtggagagagagagatgaaaaacaaacctatgggaatttgtcactttagagattttttgcttaatttatatttacatacattgatctaaattgcaagtaatattttgataaaaggcctttcacacacacacttggatctactcacaagtatg

SEQ ID NO: 290934 - DNA, 682 bp, Cannabis indica
aaaacatgtgccatttagaccaagggcatttttcgaaacccttggccaaaaatatgacactaccataaggccttttatttataaatgccactcttccctcttatttcccaaaatatttcatcacttttttaaattttcactcaccaatattcaagaacaccatttcaccactcatctctcaaggggtcggctagggattctcaagtactaatcaaggtaattttttttttcttttcattctctctcatccccattcatcttcttttcctctcttttattaaattagaaactcacaaaatcctaattttccttggtgtggctgtggcactagttaggtgaagagagaagggatttttcaaattttcttcaaggctccttggaaattcaagtaattctttgaagtaatttccaattcttcatgctttcttggtagtttacaattgatttttaccaaaattacatggatgagatcagtgacgaagccagaaatttggctcagtgagggcttgaataaatattaagtcaaaactaataaaaataactgataaatgtatcttttcaaattttcatcttcaacaaaataaaataaaatattgtcataaaaaaataaaataaaaattacaatctgcctcgacgacttttcatgttttgaaatcgctgcatgatgacttcattgtcaaga

SEQ ID NO: 290935 - DNA, 457 bp, Cannabis indica
atgttcttgagctaaaaacttcaaagcttgaatccaagcaaccatcatgcatacactaactctaagctacttaaaataacaagattaatcctttgaaaacaacaataaaacacagcagcaagtaacacattaaaatcaagcatgcatcatcatcttttcaaacattttctaaaaattacaaaaggaaaagggttagaaactttaccaaggcttgaagaacacttagattgaaggaaaaatagcttgaaaatcagaaatcccagccctagaaacaccctaccagccgagagagagagagaggaaaagagagagcctttttgaaattttttctattttttctaagtttgaatgaaaatgaaataaagggaatacttaagcaataatctatttcagccaacaattaatatcaaataacacttaattcaattaaataaagcccactaaaggacaaaatatc

SEQ ID NO: 290936 - DNA, 536 bp, Cannabis indica
tggtggaatgcacaggcaaaatagaaatcataccagaaagcgatctcgagccaataccgcaacaaagtaatattaaagacaaactgacctggaagctacatgtggatgggtcagcaacagatcaactatctggtgcaggaattgcccttgtcacacctggggggcaacacctgcacgcagcgatcaaatttggattcaaagcctctaacaacgaagccgaatacgaagccttaatcgctggacttaaactagcaaaggaaatgaaggccgaacacatcgagatctgcagtgattcacagctagtggtaaatcatgtatctggcgaatacgaggctcggggaggaaaaatgatagcatatctgagcaaaatacatgatctactcgcacaattcaaaagctacagcctcaaacaaattccaagagaagaaaatacaacggcagatgcgttagcccgattggcgagcagcaatataagtgacaaggcaaacttggtccctatccagttccttcaaagagcctagcatcactagcacgga

SEQ ID NO: 290937 - DNA, 1206 bp, Cannabis indica
atatttaattgtgcttctaattatttatgagcacgtgataaaaaacagtgctgtaatgtactctctgtatttggtttttttttttttttttgcatctaatgcctcaggtttaattatgataagttttggtgggttttagtaaatgtttttctttttctggtttgcattaatagctagaacatggagaaattaataagattggcattcctttttgtcgcagcatgtacaaagcagcataattataataatgctttaagttgcttttatttttatttaacagaagacgaaattataaattttatggcttcttaattatactgtatgtgctaaaatataactttttcttttaatgagtgtttttataggaaaatggtaattctagaagagaagaagagaaaaatcgtagatgtacaacagcaaaaacccaatcgtattttttttggatttaatgagatttattttattatatataaataaaaagtgacccatgaatttctcataaattattttatttttaatataaataaaaagtcacccattaatttatcataaaccaaaaattcgattatatagacacactttatataaatttttttacttttagtttacaagttttgttgtgactaaaagaaaaaaaaaattttagtgtcacttatttataaaagtgactagttaactcattgattggtttgttttatatatacaacaaacatattagggtcaagcctaacatcatgttatacacgtgagatatgacaataacaacacgtacccttgaatgtaatgttgactacaagtgagatacggtgatgagaacggttttgaaatcatatgataagttttctataaatttatcaatttttatagtaattcgatgggtcaaacctaacatcatgttatacaaatcgcgtttgacttctattataataacgagatttaataaatacaaattgcatcgattaaataaaaatcatgcattgatttttcaaattatattcatataaaatcattaaatatttgaaatttatataaaaaataaataaaataaaataaaataaataaatataaatcaacaaaatcactattatatagcaatgaggacttaatgtgaaaaaaaaaacaaattcttggattaactgatcaaaatttatatatttaaaaatcattttggtaaaaaaaaaggcttaatgactaacttactaaaat

SEQ ID NO: 290938 - DNA, 1020 bp, Cannabis indica
ttataaacagcttaacacaatacgacctagtaaaactcgtatataaataaatattaatttaaacaggccaaacccattaatttattagtgaacttgatttaaaaatgtttaataagatattcaatacgttaattaattttaaataagtcattaacaaattagtacttgtgttagatgtatcaatacaaatacacgatccgtttattaaacgagttagacatgtaaactcgaaaaatgacacaaaaccaacccgttaatttcttgcacattttgaatcgtattatcatgtctgacccattttgacgcccttaccactacatatatagttatatactcttgattattttatacctcttcaccatgttactttaaattacaactatattaaaatagttctatttattagttattataattcaaatacctactaaaatagttgttgtgacaaaaaaataatacttacaaagattatttttgaacatttgaagaaaaagaaaaagtttagcatttaactaatttggataaaaatattagtataaaataattcaaaattgaagatacttgattttactattctttctaaaacttttttattttatttaactggataactcaagcccaaagtgcagattcgaaatgttcactccatttctacctgcattttaagcatataaaaacatccatattaatttgactgagcaaaaggaaatattataaatcaaaaatcacagttcataaacctcttacatccatctcagagtattcatttgcagagttttgtctctctgaatagctaagggactgaaacataattagcttagttagcatggttagcaatagcatattcaaatggcaaacatttaggaggcgtttggttgagaggaatgaaaatataggaataggaatgagaatgggaataagaataggaatggaataaaatttaaaatgcaataaaaaaaattgaataaaaaaataattaaatttttttcttgttacattggaatggtcattccttccttt

SEQ ID NO: 290939 - DNA, 531 bp, Cannabis indica
cttcagtagttacaagttagcttctaatcaacgattttgtctatactgttttatttgattcgggtgctactcgatcttatgtgtcatcgaaagttcttaatcaacttgatagacctagtgatgtttttgagacgggatttggaacccttttgcctaatggggaactaattgtttcaagaaagtgggttagattagtgttaattagaattgaagatagagaaatcttgtggagttaccgttggtcgagttcgacattatactcggtatggactttttgtccaaatactctgctagtattgattgtaaacggaaaatggtaacttttgaactggagaatgaggaaccatttgtctttttttgttcggttcaaggttctcgtgttccaagaatctcagtgttgaaagctagggatttgttatgctgtggatgtatgggatacctagcagttgtagtggattccagtaaacctgtgttacttggacccgaagaggttaaagtggttaaggaatttctagacgtgtttccagagga

SEQ ID NO: 290940 - DNA, 192 bp, Cannabis indica
gagataaatggttgagaactcattttagttcgttgaaatatcatttatacggggctaagtgttttaaggataaaatacattgaagggtgtaacgataatttaatccctatacaatgtaaatcatctataaaggatcattgattattgggattataacaatggataattgataacgtatctatatggtggaac

SEQ ID NO: 290941 - DNA, 796 bp, Cannabis indica
tttcatgaatttgaaacaaccctattttagtttcgcagtagtttttctactttttgcaattgtgccttggaccacaatactaaattttgatataaatctaccacaaaataattcttacatatcccattggaaacggtcttatgataaaaaatttgcatcactataaatgcacaatattattattaacttttatgtcattttttattatttattagtatatttagctatagcattgatgataaaatatttcattttttttatgttttacatataaaaatataataatattaatgataaagttatattttcttttatatatttttataaaaatattaaattttgtcaattcaagttttgtgtataggggtgttcataaatacctaatctaattcaatccaatttgcaaagtatccgcactttgcggattgtatgttgattgatatgcaaaagtaaccgatcgaatcttatccacacatatttatatatatttttaaaaaaattatatacacaattaatattttaataaaaaatagtaatttaagaatctaatacatatgatataaaatatactttaaaacttaataaataaattcaaaacaaaattaatttctttatacatacaatttttttcttcctttaaatttctcattttatatattttaatttattgttaaagacataaaaaaggttaaatacttagaccctgtattttgtaaaagttaccaattggaccctctatttgttaaatgacaaatggaccctatattatctaaaatggtaaaaataggaccccgag

SEQ ID NO: 290942 - DNA, 704 bp, Cannabis indica
tcctgcttcagctcttcaggagttaagatggggaatttgcctttgttctttcttggggccatatttagaacttaagaataagagaaatttttaagagtaagagagaagtagaagacaagagcacttatgaataagaaagggatttgcttttatagagcagtaaacatgttgggaatgtaggaaaatttaatggtcattaaatgtgtaactgtacaggtaaaacgcatgaaatggtgtatttgtcgactgaatgtcgatactatgtcgacatgatgtcgacaacatgccaatttagtgacactgctaacttatttgtcgataccatgtcgacgtcatgtcgatagcttgtcgataggacacgtgtctgacatgcaacgtgtcagttgggaagggttgttgggaacgtaggtaaaatttattaacattaaatgtgtaaccgtaaaacacgaaacgcatgcactgtgtgtttgtcgattgaatgtcgatggtatgtcgatgttatatcgatggcgagcatgcttggtgtggttgtcgacgttatgtcgatattatgtcgacacaatgtcgacaattagtgccataatttctgctgttgtgattatcgacattatgtcgattgatatcgatgggatgtcgattttttttttttttttgggtgttttttcctttactcaccttgttttttggtttgcaattgcaggaga

SEQ ID NO: 290943 - DNA, 581 bp, Cannabis indica
agaagatcgtaaaacgagcaagatgaacacaagcaatagttaatcaaagtaaaccggtttacaaaagtaaattcaccaaagacgaacacaagaattttatagtggttcactcccttttaacggtaataggctagtccacttggagtgttattgatcacaatacttgaggagagttctccagagttatgttctccaagagttcactcctcaagtgagtttttagaatttgagagtgggagctcaagagtatgatttcgtgagtattaagttgagggtcccttaacaagtgatttcaccccccttatatagattttcatcaaggatttaaaatcccttattcatgggtgcacattcccgtaactatagttgggttaggttcaagatacaaaataataataaaataatcattcaaaaataaatattctcttcacttatcattttttgtactatattttcgggtataactttaagtagcatgtgtctttcgcatttagtcagacccggatggtcatgggccacacgagaggagccaatgggtcggttcgtgccaatcaggtccttgaggtaatttggtagctgag

SEQ ID NO: 290944 - DNA, 572 bp, Cannabis indica
ttgctgagatgcaaactagaattgagcaacaagaagaagagatccggcgacttaggcaacgggatgctcctgttgagcttcccccgcgaccgcctgctgcggttcctgcagcccctgcggtgccagctgagcaacatgttgctggtaaccgtatggagcctttatatgagagattcagaaagcaagcacctccagtatttctgggaggccctgatgttttaaaagctgaacagtggtagaccgttattgaaagaaaattgaattttatgggagtggtcggaaatgatagagtggcatgtgccacgtttcaatttcaagaggatgccctgatttggtaggagatggtatcccttacaagggatattgccagaatgacctgggaggaattccgggatttatttaatgccacatattataatgaggcggtccgcagtgcaaagcagaaggaatttgttgagttggtacaaggcgagggtatgtcagtgactgaatatacaaccaagtttgatcgcttggccaagctagcctccggaattgtaccaacagacttcagcaagaaagaaaagtatttg

SEQ ID NO: 290945 - DNA, 561 bp, Cannabis indica
gtacgatcctcgggacatcagggcttttgtagttagtcgccgagcgacaaatattttgtactgaatagcaaactttttgtaaagtgttttgtaaatgggatccctgagtattttgtatgctttattataaatatttaattaaataaccaaaattttaattaatcacgattttcataaacctcgttgatttgtaacgagctgcacagtacgttcaaaatcacattaacacgcctatgcttgttagggtgttacagaaaaaataaagtggcaaattgcttccctagaggctggccacggatagtgggcccccactttgcaattttgccattttctcatttttcatcttattttcccaaaaatgctctttttccaatttaaccacttaaatgtcgattctaattatttaataactaaaaattaattgttaaataatattgtcgtttaatatatttattaattagacttaacaaagtctcttaattaacaaataaaccttagaatctcttttcttcaccattaagcccttgcaaagtgaaaattcagaaactagacatagtctaa

SEQ ID NO: 290946 - DNA, 889 bp, Cannabis indica
ttatttctaattttttttattttttatttttttttagtattagaaagcaaattatttaaacattatggtatatctattattagttttgttaaaatcttttttattttaaagttatgtctaatttttttaatttttatgagttgtttgggttgttggtatatagattttgttgtacggtatatttctattttgttgtatgatatattattattcttagatgatatttattttttattatgatatgtataatagtggtatataattttattagcatattaaaaatattttaatgtatgtatataattttattgccatgctacatatatttaattattatttttatattttttgattgtatgattatttattttaaataatatttaattagtttttattttattatatacaatggtcatggtatatatattttaattgtggtatataatttggttagtatagtatacatacatatatatatgtattagtaatctatatttttattattattattattttttgtatatatgttttggtgtatggtatatgtattttttgttatacggtatataattttttttaaataatatttaagttttattttctattgtacttttgttgacatgatatataattttattagcatcctatatatttttatttttatttgttgttattattatatatatttttattgtaaggtatatattttatgttatatggtatataagttttattgtatagtatatcattttattttagataatgcatgtttagtttttattttagtatacataaatgtgatatataattttgttaatatgatatatataattttttttaataatattatattattttattttattttttattgtaggtatatacgttt

SEQ ID NO: 290947 - DNA, 625 bp, Cannabis indica
gtcatcgattatatttctccaactatagagaaaaatattttcatgagtgaaagaaagattgagaatctatatatataaatatatatattatagaaaaagaaaaagtagagagaatattgacaataatttataatatacaaagaaatatattataaaatatagagaaaagaaataccaatagaaaatcgatgttttgatgttgctcattgatatcactactactgctcattattcgtcaagaattaaaagttggttaaactctttagcaacaaaaaaaaaaaaaaagaaagaaagattgtaatatatcaaaaaaatatattataaaatatgaataaaataaataccaatagaaaatcaatatctttatgttgttcattgatgttactgctattgctcattatttgtatagaattaatagttagttaaaactctttaacacacatacaaaaaaaatgaaatttgagaaagatggagaattggcattaaaaacaaaactaaagaaaaaaaaaatacactaagaaaaagaaaaagaaatatgaaattaattttaggttcagggttatatatttacaattatataaggagaaaaaaagagttaggaaaatacattaaaaagaaaaaaaaa

SEQ ID NO: 290948 - DNA, 651 bp, Cannabis indica
ttggaaatattttaccgtaatttgttttagattttgtagttgtatttgttcatttggtataaaaatgttgtgagtattttatttctctaatctttaaagattcagagggtagtatataaaaatttgattagttatcctacaaagcattaatattcataaaaattatttctttaagttctatttaaaaaagatctggtaccatttttttaaaggaaatctggtaacaatgtaaccattctatttttttaccctaaaattgatttaaataaaaacaataacaatcaattaaaaaaataatttataaaatattaattgaaaagaattgaatattattattttttttttaaaaaaaaaatataatatagtcactctttttgtgtgtcactatatctacaaaataataataaagaattaaaagaaaagatatagtgacacttttttggagttgctgttacttttttagtctgacaaaacttgactctaaatgcttacagtgacgcgcaatgagtgattgtgaaaggatttagtgacacgcgctgaagagtcactaaaaactagctttccagtcaccttcattagtgacgcgcagtgaagtgtcactgaatagttttagagtcactcaacgtgcgtcactgaaacccatttttctag

SEQ ID NO: 290949 - DNA, 628 bp, Cannabis indica
aaaataaggaaaattattcatttactcatttattcaaaaaattggaaaaaagaaggaaaatcactttttctctcaaactctctttctctctttcgaaaatcctaggggctgctagggtttgatcttttgttcctcaattctgcaagttttcatcaattctaagtgtaatccaagctaaggtaacccttgtgcaactttcttgttagtttccttgagtttgaagaaagaaaatttatgcatgcttatggttttgttgctgcagctactgtatgtgtttattgttgttttcttaggcttaattatgttcagatgaatggattagaacatgttttagtggttgttagttgattttattcaagtttggagttttaaactcaaactttggttttaatggtgaaatgttgttagcttgctgttcttgctgctgtggttagattatgttttctgtagtttaattatggttttataaggtgatttgagctagttttgatagctatttagtaggatgagcaagctttgagtttttgaactcaagcttggctcatcaatggtggtttttgtatttgtgcatgaagctatgttttgttgctttagaaatgttcattggggtctaattagcaggtctgga

SEQ ID NO: 290950 - DNA, 575 bp, Cannabis indica
gtgttcggaagcggtggaaagcggcgttggggcctttagagaattttattatatgatttagaatatttttcgggatatcattgttaagttttaacggtgttggtattttcggggtttggtttgaccattttgcccttcatgcatatggatattttggttttattacctttgggtatttaggtcttttgatagggggttttgtcttgttgtgggatgttactagctgaatataatttaaatattatgtaaaggggttttgtttttattcttttgataagtattaaaaggaactcatcttttcttcatcaatctccttctttctttctttttcgaatcatcaagaaacctagcctaggtttgattttgcttgctgatttttggaatccctagcagtgttggtgaagctttgatccaaggtagtgtaccctagctctcttcttttgatttctttagttgaaacttaagttggttaaattcttgaactttgatattgaggggctgtattgaagtttataatttgaaatgaaattctgaagtttaattaaggttacctgagttattttatgttattttgt

SEQ ID NO: 290951 - DNA, 530 bp, Cannabis indica
acttttggtcaatattgtttttaaaaaacactaaccaaacatgacttgcttttaaaaacttcaaaaactattttttgttctcatttctaaaaacaattttttgaaaacaaaaaacagaaaacaattttaaaaaaaatatcatttcaaaaaaaaacaagctaaaacacatactcctgcaacaagttgactttggatagttggatgtaggatttatttaattttaaattaattaatttatataaataaaacttcaaataaataataaaaaaatattttccggttttaaaaaaataaataaataaaaaatttaaaattaaaacctacaattttaaaaaattaggtttcaactaacctaaatatcatttcaaaaaatttgctaaccatcttttaaattttcattttatttataaattaaatattcagtaaaatagaatggtaatttaatatatttttctgattttataatttaatttaaataaaaaaatagcaaaatatcttatttctattcaaaatatcatgattatagtaat

SEQ ID NO: 290952 - DNA, 595 bp, Cannabis indica
ataatacctaagttataattctgaaacttttgtactgttaattgttaagtaaattgccacgtggcaattcctaatttgtccaagtcattaaatttttatttttttaaataaaaattaattaaaatataccaataaaaaaatgacacgtggataacaacataatattttaacggttaggtacctagagagttccaaaaatataacttaggtattattaccgccaaaaattaaacttaggtatttatttggaattgggagttaaacttaggtatttatgccacaaattactcaattaacattttacccttctaattacttctttattctttagtaccattaactcactagtgaaagtataatttagatctaatgtaaacttgtattgcacaacttgttagatccaaaattaacacttaaaggggactaacattcgatccgttaggaaagtcgggattccataattgtagatcatgttcctgttggattttatgccctaaataaaactccaattcaatgtaatccaatttattcaatatcaataaagaaacagaagtattttacattcatttgtgtatgttttggttcatcttatcaa

SEQ ID NO: 290953 - DNA, 529 bp, Cannabis indica
tggtagatctgcctctccgctgtgaggtcctggaggaccttcctgacatcgttcatgtccccaaagtcggacagagcgaagccatggtttatgatgttcttggagaggcggccagcctcagcagcaagctgaaccataatgcaagcataagaaggaggaatttctcaaagggaaaaataaaatataaaaggaaaagcaaaaattgcaaagtacttaccaccgtgagaaaatggctgaggtcctggacctggaagatggagttcagggaagcgcaagtggcaaaccgcttaggcgcgcaacgggtgagctgagaagcgaactcgccggtcatctccgcggcaaaaggagccaaggtaggccctaggaagcgacggaaccagtccgataaggggtccagattaaggtcccacggatcctggtattccgggtggttgatgctcgcctcaacctcagctcgcagaatcctcctaagggcttccacttcggcatacccccgggagtactcatccatagcatagttgtgtttggc

SEQ ID NO: 290954 - DNA, 434 bp, Cannabis indica
taatgtacatttgcttttatttttattttattaattttttttagggtttttctatattattaaatatgtattgtgtgtatatatattgtgaatgaaaaatgtgatataggagagtatatatgtatgtattttgtgttgtattgaatatgtattgtgtgtgtatatattgtgaatgagaaatgagataaataggagagtattttatatattgtatatgtatatattgagtattttaaactaatagttttgttaaatattgtgaatgagaatgagataagagagtattaaaataaaagtttagaaattgttttctaaaaaattagtttagaaacaaaagtttaaaaattaactctattttgtatcaatttttttctattttcaattttattcatgtgtttttattttttttagtagctagtagatagttaattaca

SEQ ID NO: 290955 - DNA, 655 bp, Cannabis indica
actctagtttttttgatcatacattcatgtaatttgtttttttttagaaccgttttcatggttttgggcaaatatatatatataaaaaatatatattaggcaaactgaaaatctactaaataaagagaagaattacaatattatgtttgtttgaagttttttttttttatttattttatattagtattgttcttttcttattaggttttttttttttttaatttttattttttaaaattgactttattaaaattttaggatttttttaatttttatattttaaaagtagggtttttttttaaggatagaaactcacataacaattaataaaaaaatttaaatcgcaacaaaaatttacatagcagtccacataaaaatcattggagcaacccaaactgtaaatttttaaaaaataagtatttgtctttttccactaataagtattttccactaactaaagtgttaaaaactaacaaaacttttgttctttttctccaaaagtagcggtaatagtccttaatgtcatattttttatttgtccattagtcctaattttaactgagctgtttacttttttaaaattactacgtgttgaaatattattgatctaaattattattttcattttaataaataaattattttaaaataattt

SEQ ID NO: 290956 - DNA, 622 bp, Cannabis indica
tgattgctcatgtttgatatgtatttttatttgatgtcttatggttttgggaaatatttgttgatgatgaattcttgattgtgtgatagttataattctaggaaaatgatagattctcatgatttgtgtgcttaactcatgattaattacggctcaaacttgatttttcttaaaaacttttccacaacgttttaaattattatatttgctaatgtttggaaagatgaatgcatgtttgatttttaatttaaagtctcaaccactctagaacttgtttgataatcatttgaggcgaaattgataaattacacatgattttgagatatgatataggcaatttttttggatcgattgagcttttcaagcctaccctatttgttaaatccctagttttacccaatttgagcctaaatgttgacatatttgttttttctttttaaccctatactataaccttttgagcctaaacaaaaatcccttattcatcatttttcacaccatagtattgctgtttattgtatttgaaaatgtgtgagagttttggtgagggaaaaatattgatggttatgtataagtgatgatgagaaaaaaaattaatatttagaatgaatgttttgtaagt

SEQ ID NO: 290957 - DNA, 502 bp, Cannabis indica
cacacattgagataggtagctctattcatctaatggagcttgaacacatagtttctaaacattattattcgaaaatggtagcttacataacattgtttgatgaacctgaatattcctgggaggagtgaacaattttcctgaacagacctgtatgacaccataacatcacgaacaagcaataaaataatgactgtaattcttataaggttgagattttcttctaggacaaagacaaagacaagacattatgaactctaagtcaactcaaatatcaaggatcaagaagaacacaaacattaaacagtacaaacccctaaggatttccttagagaaataaaacggaccgagtcaagagctttagtaaaaatatctgctatttgcttgctagtttcaacatattcgaagataagagttttattttccacaagctctctaataaagtgatgacagatgtctatgtgctttatgcgtgagtgttgaacaggattcttagaaatgttta

SEQ ID NO: 290958 - DNA, 533 bp, Cannabis indica
tgttatcccaaaattggcactctgacgtggcatcacaagaatggtgacacgtggcatctacttagagcacctggtcggatcaacatgccgagcaggatgcctcgctggcatgtccatgatggaatactcaacgagccgtgcagaatgagcaacacttagcgaattcaaccaagcacttcgtgagtcaccagctcaatccctataactcagggatcaacttgcgtggatgtggcatacacacgattccactatcggtgtatacggcctcaatcccacgatcctagcattcagcaatgatcacacgatctttgtgtttatgcgctttgtaacgagagaggaaactcttcctcctcaagtttcctgccctataaatagtgaggaatgttcactgggcaagggagatcgatcgaaaactgtaaaacagagatcatacgccgaaacgctataagctaaggctatctaagaattatatattcagagatattattgtaagagctataagaaaaggaatcttcttccttattcttaagtca

SEQ ID NO: 290959 - DNA, 507 bp, Cannabis indica
atctccgcggcaaaaggagccaaggtgggccccaggaagcggttaaaccagtccgtcagcggatccatattcaggtcccacagattccggaagtcctccttgaggacgttttgctgctcctcccgtaggaccctcttcaaggcctccacttcggcatgcccccgggtgtattcatcaagggcatagttgtgcttggctatccgaagattctgcctctcctcgtctccaggaatcggagtcaacacaatgccgagaggcactgcgtattcctccgcctcggaggggatcccggagtcatgactcggggccggagtgtccaccctccgggggcgtttagaaggctcctcttctaccatcttgcccttgcgcttgcgcacaagagcaacctcttgctcttcttcaccttcttcagcttcctcaagaagtgcctcctcctcgtccactaagacaatagggcccgaaggggcgctggaagaagccttcccgggagtgaccaactgggaagaa

SEQ ID NO: 290960 - DNA, 648 bp, Cannabis indica
agtcttataatttaataaatttaaatattacataaataaactaattgaaaaataagatattttatatggttagaatatttttttaaaaaaataataataataagtttgaaaaatttatggtttgaaaccgtaaaatatctaatcaaactaaactaaccaatttttcaaatttcatgttatttttgccaaaatataattttaataaaaaaaatgtctaataagataaaatgttaaacctaacatattcctaatcttataattttaattaataaaatatatttcaaaaaataacaaatttgaaaaaaaaaatatgatatggttagcaaactttgaaatttgaacaagattattttaaaagataatattttaatatcaaagtaagatcattcaaatttaataaaaaataatatctgatcttataattaaaataaataaaataatctaaaatttcaaaattaaccataaggctcctttgtgagaaatcaaattttcaaaattcaaagcctactaatatcagaaactaattttaattaattaaaaaaaattaataaaaattaattttattctaacaattagatttttaattgaaaattcagattctacacaaaattctaccaaaaattggcttttgtttcaatgaaaaacgat

SEQ ID NO: 290961 - DNA, 718 bp, Cannabis indica
cattaaacaagtaatgaaattaaatctgtttctttattgataattgaatagaaaagattacattgaaatagagttttatttagggcacaaagcccaacaaactcccacttgcactaaataaaactatcagtacatttcaattaatcctaaattcaatctgtgcttttcaaatgtagttgcagtcaatactttggtgaatggatcagctaagttgtcttcaatgtccactttctccaccagtacgtcccctcttgccacatattctctgatgatgtggtatttcctctctatgtgtttgcttctcttggggtttcgaggctctttactattggctatagcaccagtgttgtcacaaagtaaaaccaatggtttctctattccagaaacaacaccaagtctttgagaaaaactttcttagccaaacaagttccttagcagcctcagtggcagctatgtacttggcctccctggtagagtctgatattgcgatttgcttagcgcttctccaaacaactgctccactctaagagtaaaaaccatcccaaatgtagactttctatcatcaagacaagcctggaaatctgagtcggtatagcctacgggatttgaagcaccacccttgtagactaacacataatgcctagtacttttcaaatatttcagaacatgcttaactgcagtcaatgttcctctgttgggtttgtctgatacttgctca

SEQ ID NO: 290962 - DNA, 426 bp, Cannabis indica
aaaacaatagaaataaacacatataaagtttaggaaaccttacattgggtgcagcggaatattcttgttggttgaattctacacaatctccacactatgattgagataccacttgatgtgtgtgggcagtactctatcacaaagggatttcgaaatttaagagaagaaaagagaagagaggggcggctagcaatcaggttttctttgagagaaaataagatgtcagtcatagttttctgaagtcatcactttctatttatagaatgccatctaggtttaggttagaattgtatggcattaaaataatgaaaaatataaatggtaaatcctatacaaagtggtcggccatatatgggataatgggcctcactttgcaattttgccattttgttatttttcaatcccattttctcaaaaatgccaatt

SEQ ID NO: 290963 - DNA, 679 bp, Cannabis indica
ttttaattattttttatttttttagttttttattttttttggttgtgaatcattctattttttattttttttattatatattttaaatttaatttaatattatatatttttattttaatttaattttttttttactaaaaggaaataaataaaatagcccagtctattcttaaaccaaacacaagattactttcagcataattcattcttgtcctgtctagtctaatcatttttagttcaatcgagtccaatcgtgcgtatcaaatgggcccttagggtattacatatattgtagacaaatataatttagtacatacacgattataataaaagaaattaagagtacacaaaatattcagcaaaatattataaaattatatttgtatgtactaatttagtacatatattgtagacaaatattataaaattatatattgtagacaaatataatttagtacatacacgattataaaatattcaatcttaaaaacttaaaaaaagacataaaataaaaacaaaaaataattcagttagaaaaatcatgcagactcaaactcgctgctatagtgataaaataaaacagtcaaacgatcacgatgcacttcaacatcaaaatcgtcagaagggataggcttactatcaataaaatactctgcaaaagctgctaaaaaagctccac

SEQ ID NO: 290964 - DNA, 616 bp, Cannabis indica
ctggagaggatttgcagcaggttgcattgtgtgacttgatcagcaaccagggaatgctgtttggaattatgtatactcttctttaatctaataaccttatatacaaaattctagtcaaattattatatataagacactaatacttaacaatttttttgacaggcgcatatgggagagcatcaacggtttgagaaagtttttcaaattttacgacccagagcttctcgtagtgagtggtagcaacgatgaagagaagagtcagtcttttgacaatgcggcaagacgattggctgcttggttatcatcgatgaataacaaccaccaaatgttctttattccttagaatatcaggtaaacactatttaattatttagtgctaattgttcatttctatattatgacttcaaattatttttgtactatcttacttatatcccaatataattttctagtgcgcattggatgctagaggtcattaagccaaataaaattgtctatttggaccctatacgtgaccaagtttccgaacaaattactcaaatgttaatttacaaattttaattaactaataaattgaaatgctattataatttttcaaacagagcatacggatata

SEQ ID NO: 290965 - DNA, 745 bp, Cannabis indica
aatcctagagtgatagtaatgggaattagaggagagaagtccttagtttatagaattacagtggaagaagtaagcattctatgattatctagactattacacatttttcttttactttccaaaaaattgcgttaaattttgaaatttattctataaatcagctaattgttgcatgttttagaaaattttcttagttcttacttttgatgctgtgacgatgtctacgacagattttataatattcaatctctaccataagaaggttcctctactcccctttgtttttattatctgctttgtctccatctttctccttctctcttctataagaaacactatttcaattccttcgcattctcatcatcgatcaatttaattctccaaaacaagcagcttatccaacccagcttcacctgaatcgtgtgactactcggatgaaaattagattcgcgacccgattgggacagccccaaggtacaaccatgcgcgtaaagagattttcaaggactggaatcgcatctccgacaataaatctaacggtcgggatctcatcaactggcactggaaaccacccattgggaactctaaccatttgatcccactgcttttctccacacacgtacagagacatcgccattggtacttgagtcaagcatttgatttaatataatataaaaaaaataaaacaaaaaaaaacttaatatatgggatttttaaaatgttttacaaaaatatggtataaaaa

SEQ ID NO: 290966 - DNA, 799 bp, Cannabis indica
gtagatgacaccaaagctaaagttttacacgtggcccattaagatttttctgtttatagtagaagcacgtgaaaaggatacttatatataaatagatatataaaaagtacattttaccaaaaaaaaaaaaactgtataaaaagtagaagtatcggttacatcacattctaaaattactttaaaattattctctttctctcattaattctctcaattttaatattttattaaaacataaataaattgatattttattattattttaataatttttctaataaaaaaaaaaccataaatttataaattgatattttactattaaataatttttttaataaaaaaaaaaactataaatctacaaattgatattttactattattttaataatttttctataaatatataaaatatttaaaaaaagttagaacataaaaataaattctaaaaaaatattaaaacttaaatcaattataattaatcgtaaatttcgtttatatacatacataaaatatcaatcaatatatatactttaacatttttggcgttttaaaaaaaactaagatataataataatcatcaataaatcaatcaatcaatcaatttataaagaagaaatatgagccagtgacatatcattctaaaatcactcaaaatattttctcttctctcattttaataatttattaaagcataaatctacaaattttaaaaaaattagaaaataaaaataaatttctaaaaaatattaaaacataaatcaaatataattaatcataaatctctctatatatatatata

SEQ ID NO: 290967 - DNA, 1172 bp, Cannabis indica
atattacagctagtgttatcatgggaaatatttctctggaatagctaaagttattcttcttgtgattaattgggctcaactactttggatacctgcttattatcattgaaacatattgtaaaaatattatggataaacttaatagtagaagcaggtttaatcctgtttttggtgatgttttaaattatacatgattctttagttatatttcttatgttcctagaaagtagaataagattgctcataactatgctaaaataaaccttagattagatgatgagtttaatttgaaatgattctttacctttcatgtaattcatgtttactttgtatctatttgtttatctaatcaaagttaacacgttgtcaaaaaaaaaaaaaaaactaagagaagattagtactgctcttgatctccaacccaaggttgattttactaaaattatatgtgaaataaaaataaattaatgggttttagaattttggttagaattattattactaccaatgtgttgctttttttgtttttttttttttttttgtaccggttaaaaatttactcgaagtattttacaatattaaaatataaaacttttatgtgtcattgttacatgaaatccaggtgtaaaattaaaatttaaaaaatgtattttttttatcaacaagaaaaagtttaaaattattatacttttatttattgatagtaaataaaaggaaacaaattttaaaaaactatttaaattctacatatagtgctggaataacaaaaacacataagtcatattagtattttgttagccataaatgataaaaaacttaacaatagtcttatatttcaacattgccttggaaaatttttaactaggaaaaaaatttagaaagtacaataattgtaataattgggagtaaaatttctaaacatttgctaacctaattatcccatacttttatggtgactatatctataaaatttaccaagcactagagacctacatcctaaatcctaatcaggataaacccacatgcagaagaatcctagcaaaattgtatcgtttggactcctaattttcttgtattttattaactgattttttattttcaatgattactattatatattaccaaatttggggtccaatttctgacccgactataccaactctgctcaagagaa

SEQ ID NO: 290968 - DNA, 852 bp, Cannabis indica
taacataaaaaaaaagtaaccgatccaaagtaaccgatccaatccgcactattgcggattggattggatcggattttaattgttatgcggattggattggatccaaattttaggatccgcacctagtgcggattggatgttgtttgaccaaaaaagtgcggattggatcggatgaacagccctagtaataaacactgttatatgactatcaacattattatcatatacattatataatttatatattaatgtacaaaattaatatataactcccatatatgaattataactctcaaataataattttatgtcaattaatataatagtgtatgtataacatacataatattaattatataaacattatatgttatatatctcatatacacataaaatatatatgttacatatcttatatatatataacatatatactataatatacatatatatcatatacacataatatatattaattacacaactatatatgttacatacctcacacatatataacatatatacactttaatacacattcatgatatatattatatataatatatgtattatatatgcatgtctcatataaatacatagaaataattatttctacatatttaatctcactaatatatattatatcacatgctctacatatatataatatatattactcatatatatacatgttatatattatatatctcacatatatacataaaataacatgatataaatttcaaatatcatatatataatatgatataaacacatgatcacatatatataactcatatataaatatcatatatattactatcatataaaatagtaaatcacataatatac

SEQ ID NO: 290969 - DNA, 822 bp, Cannabis indica
atccaatgtcttctgtttggtgattgtgatagcatgccatattcacacattattacatcatatgcacgagctaataattaatctttactaatttcactttctcaaaattacattaacaattctttttctcctaaaataaaacttataattaccaaattttaaaaatttacattaaatctattaatttatagaataaatatctcatagttatttatgatcatttgtaaactttataaaattttaaataatttataataacaaagataaagtttaaatattgtattacacgtgtgcttatttttttttatacatgtggtaagtaactgtttataaactactcgaaattttctaaaaatttataaataattttaaatagttataacatacgcaattataaaaaaaaataaactaaatttttttccttcaatatctaaagagagaggaggtctagcacaaaaatttctaaatttatattatttaataatatttttctcttttttttttatttttggattatattaaattaaattaaatattttatcaaaaaaataataattaaatccaatgtcatgtttttaataagatgtagatttatttgctaataaacaaaatcatcatatatttcattaatcttcaaatttctaaaactattctaataaatatttaattataattttaaattatttgtgatcttcttaataattttcaaaatcttatattacaagtaaagtaatgatggtttgtaacaatagtgatttgaagttggaaaccaatgtaataattcatgtggtttggatctaagcaaacatacaatatatatat

SEQ ID NO: 290970 - DNA, 234 bp, Cannabis indica
gagtcccaagttccaaacccgatctcagttttattcagttatggctgggtcaagatctcggtcctgatctaggtccagcatttcgatcccagtctgggtcttggtctgagtcaagcttcgtatccatatccccatctaggtccaagtctgtgtttggaatcgagtccctgatttaggtccaggtctgggtctcagctccgatctgggtacacgaccgtgtccgggcccgagttc

SEQ ID NO: 290971 - DNA, 1183 bp, Cannabis indica
gaaaagaaaaagttaagcattggaagcagcaggggcagagccatctgtgactttgctgatagcctcgtccacgacttcctcattgtccgcggcatcagcttcctcgagaaacagattccctccaccgccttgagtctgcgtaggcgacatggcgcggaaagcctcagccatctcagcggcttctgctccgaggattgagaagtcaaagtccagaattttggaaagagtggtatagatatagtagagaccgcctggtcatactgcttcttcccgttctccttctcgacctctaagtcacgagacatctcctcgaccttcatctgagcgctcttggcttcgagctcgacttgctccttggccttgcaaagttcctcgagctctttttccttggaagtcgcatcttgtttcagcttcttgatgtcctcctgaagatgaacattctgtctcttcacaagtttgactaccttagatccagtgacaaaggccctcaaaaacatggcaataaactgcgaagccaactccgcagaatgaggcagcagctcttcagcaggggtcttatcgacctttgatataaattcatcacccacgaacttctcttggagagtcaagatgttgcgagctcggacagccgaatcgatcacgactttcttccccttgtcttgcgtgcccttagttggcttcttggaggaatccgcgataggggtgaccaccacatcgctctttctcttctgaggaacaatgggagatgtcgtcgctgttccaatttttggcttgcggttgaggaccggtgtggacttcagaaaagtcatctctgcgaggacaaataaagataagtataaataaatttcaaggcactagtttataacatgcgatatgttacctgacgttggccgagaagtttgcttggaaaggcatttgtctatccgctcttgttgcttctcagatggctccttgtacactggctccctttgaagtcttgcgttctctggaatcaacttgtgttctcgcagctttgacgtcgtgcacagtaatcgcagtcgcgatcttgtacaggaaggcttccaagaacttcagcagtttctctgcgagtcgcgtcaagtataggtcaagctggtctatctgcgacaataaaaagagcgagttagcttaaagtcataagataactcaaaaattgactaagtaa

SEQ ID NO: 290972 - DNA, 519 bp, Cannabis indica
aattgataagatgaaccaaaacatacaaatgaatgaaaaaaatacttctgtttctttattgatattgaataaaatgaattacattgaaatggagtttatttagggcataaaacccaacaagcaagtcctgtcaaaccgttctgccaagaagcatctgtcatgagcacaacaggagtatcgatccttcgaagacaaactccaacatgttcaatatcctcggcctccaaaacagcatcagaaagctgtgcaaattcattccattttgaagaaatctgactctttaaaaaggctaaatcaacaccaccgcctttaaaaagaatcctattcctttgattccaaatttcctggcaaatacaccccagaaaacacagcagggagttcctatccagatctgtactagaatgaaggagattctcaacaaattcaaaaatcgactcacatggaatattctcaatccgaattgggaaaggccccgcatgttgggttttatgccctaaataaaacttcatttcaatgtaa

SEQ ID NO: 290973 - DNA, 605 bp, Cannabis indica
atatttatatagcacattaagtttcataaaacttcataaaatattcataaaactttataaaatgaataaaatatgaataaaacgtaagtaattttgtggtttgacataagaaaacatgaacctgggacaaatgctcatatctagaacggtttttaatgatcttcggacgaccacactaggagcactaatctcagtgattgtctattatgttaataacgaaattacttttaggtagagcccaatacctaatgtctaaagtgaaaatataattttatataattagggagtagccacagcatctttaattatataaaattatatattaattaaaattcaccttaatggacaaaacttgtaattaattatttggatataataattttaccccacagggattttattatatttttataattaattaggataatatattaagttaaattctcttaatttaccccacagggagttatgaggatttgatttaatagtgttatcacaaattttaattaaagatagatttcattcctccattatttctaaattaaatatttcattaaatctatcataaagttcatctaattttattaaatttaaaatttagccca

SEQ ID NO: 290974 - DNA, 573 bp, Cannabis indica
atttctaattattttctcagggcttcttttgtatgagttttctgtcccttttttgatatttcttgccactatttataattatatagtgggcagttaattacaaagttgactgtaatctgtttacaattatcatcccctaaaatcatggggtttgattacatatcacgcagtgtaaatgcggttattatttggaaaatcatacagctatcattttctcgcttttattgggtcaaaatgatcgtgtattagaacacatctttaattgttgtatccagggatgtctcgacagaagcttagttccagtgaccataatagcgagctggggccattctgagatcgacgatgcacgtcttgtgatgaccgctgttattatttacgacggattctttgaggcccgtttcgactgttagcttctgactttgtcaggattgtaagccttactgagaaaatgtctgaagttaactgggtaaagttacaggaagtcctcccatagcgagataggcatctcgcttgctaggtctcgagccaacccgactgtcacacttagtctgtacattatacactaagggtttt

SEQ ID NO: 290975 - DNA, 575 bp, Cannabis indica
gaaggctctggtagtgggatctttttaatcagtcccaattttaaggtacacgctgctttacattttgaattttctgcatctaacaatgaagccgagtatgaagcattaatcgcaggattgaaactcgctctcgaaatgaaagtcgagtaccttcaggcttttagcgactcgcaaatcgtggtatgccaggtgaatggagaatatctggcaagaggcgggagattggttaaatatttagccattgtctgcgaaataatgcaaaagttcaaaaaagtagtcgtgtctcgagtaccgcgtgctcaaaattcacacgcagacgcactggcccgtttggcctcaactagagaagccgaattgctcgatgtgattccggtagatgtattggctcacccaactataaatcaagaagtgatcatggaaatagatactgttcaggagatcacctggatgactcctatcgtcgcatatctggaaaaggggctcttgcctgatgacaaaatagaagcaacaaagttgcgacagccagccgcccgttatgtaatatatgaccaaaggttgtatcgcagaagttttag

SEQ ID NO: 290976 - DNA, 513 bp, Cannabis indica
taatgggtattacccataaatgattactaaacaaatttaactataaatattaatttttaaatatcaaactatcgaattttgatctaataacgaataatgaaaccacaaatttgaatttatatgcttaatttaactacttaattaaaaaaaatatcaaaaaaatctcttttgacactatatcaaaaatatgtttatacaaaaatatttaactcaaacttaactttttcttttcttatttttctagctaaattttttttttaaattttttttatcgatggaacaatctcagcccatataatataaaaatgagagattttttttaattagataaaaaaattaagcataaaagttcaaaattttctaattttaccctattcatgagtaatacccattaaaagtacacccatatatatatacacaaatatatattattaatttatattcgatgtttgaaagacttttggggctggtttagaaaacgaagtattaggtcgtattgtattatattatatt

SEQ ID NO: 290977 - DNA, 657 bp, Cannabis indica
attcattgagagtatttatcgaaaaatttacataaaatattatttttgacaaaattttaatatttttatagtcaaatacttttttcgcacatttttacaattttacggttttttaattttttaattacaattttatgttgttttataaaaataagaaaaaatatgaaaataataaaaaaataacaataaacaacatacaaataataagaaaacataaaattactatggaaaaataacaagaatatcccctaaactcacaagaacaaatactatcgtaccaaagtgggactccaaactaattttggagacaaaacttctaaacttcaattctgttgtggtttctaaactttctactattttgttaggggacatgtgctaaatgtcaacttgtcttactaatgtgtacattaacgtatacatgagatatttttattgatccacatctttttaattatttaaatattataaaaataaaaaaaatatatataaaattaatattttttatttattttttcttttttatttttctttttgtttctcttttcttcccgaaattgattggtgttttttcttttttcgttctattttccttccataccttacttgttgtcatccttattattctaatttgttttgggatttttacaaaaatactaa

SEQ ID NO: 290978 - DNA, 796 bp, Cannabis indica
ttctctcattattagttttttgagattcttacttatacttgtatcctttcccagcttgctgctgaggccggccgcccttccaagaacataatcaaccatggcttcgtcctgtccgattttggggacatggatgaagttaggaagatccttcaggatcttactgctgagaggcggctttatcaggaggctgctgagcgtcgggaggccattgccaaggccaatgaggaagaggccaagcggagggaagtgcaggcggaggcaatgatccgggaggaggcccttcggagagacaggctggaggccaggcatcaagaggagctgaggacggagggcgaaaccactgctaaggccaggcgagagcttcgggaggccagggaagccttggaggaaatggctgccaaggtgaggtccttaaaggaaactcactaggcaaacttggaatctagggccaccctggtcgcggagctgaaggagcttacagacttcaaagaccaagcctcaaagaaggcaaaaagagatgatcttctttctcctgtctcctgcagccggtgcaccaagcattttgatgacgacgtcttcattgcctggtctacaaatgaccagaacatcaagcttaccttctaccccaaacctgaggagatgatcgcaaagttctgggagaagaagaaaaagcttgatgccatggtggaggcacgcatcggacctcgccttcctcctcgcattgattaggccgcttcgagtttgacccagtacaaccaggatttcactctacttctctcttctttctttttttttt

SEQ ID NO: 290979 - DNA, 716 bp, Cannabis indica
tgtgctttgggattgtaacttttatttaatctacagtccttgtaattttgttgcatagagttgtaattttcttggtctttttattcatcttattgttattcttctattgatatctcatattttctaacaatgatatgtggttaatggtttgttgtggtaatgtagtgaagtagtgatgttgatgagtagttgttaatttagtaataaaaaatgattttggcttagaagagagggttgtttgagaaagtagtaaagttttattgatagtttggaactttggttttttggtgttggcttaactcctcaacccaagcttggtatttatagggagctaaggttgatactacaactttctagatttttcttattttgaattacaatttttctaagatattctagaattttctaaatttcttagcttacaatatagtttctaggtaaatctagttttatctaatttttcttagctttgtgtagttaatactagaattttctagataagaaaagtgtagaaatgtgtagcacttttcatcactcctccttggtacacatttcggtaacgccgatcatgtctcgcaatagctcaaactttcctcttggtagtgcctttgtgattatgtcggcacctgctctcagtctgcatgctgagctcgatttcttgtttgcttctgcttccctgatgaaatggtactatgctttatatgtttagttctact

SEQ ID NO: 290980 - DNA, 556 bp, Cannabis indica
taaatgattgaggcctcatttcagtaattatattagtttactaaagtatcatttataggtagcgaagtgttctaaggataaaataaattgaatagtataacggtaaatttatccctattcagtgtagatcatctataaaggatctttgactattaggattgtaacaatggataatcatagcgtatttatatcgtggtacatatagagcgttctatgtaattgagagtgctattcaattccaaatctatagtggcgcaaggcgaaattaataagtacttggtaaattctagatctacttattaaaaacttggtaagttttggggtcaatttattatttaagaaactttgtatggtctaattaataaataatataaatgacaattttatttgataattaattataattaataaataaatagttttgacatttataggattgaattggaaaatatagtattattgaaagaagaataactggttgaaataaaatagcaaaattgtaactagagattggtccttttatgtggccgtccttagagttatttttgcccaatat

SEQ ID NO: 290981 - DNA, 632 bp, Cannabis indica
tgctcggtgaattacagactcctaaatcacatcaatcacaacactgataagcaacacgctaaatcacttcccggggacttaaacttgaaactaaaagtttccctatcgataaataacatgacaataccctaaataacacaaaaatgggaaaaactaggtttcctaaaattgccccaaccgttagaccagttccccaactggaattctgattctaagaaaaattcctggaagccaaccggaattccggttcctaaagccctctctgaaccagaattctggttccgtgcagggaacacaaaaaaattcacaactcatgcaaatcaatcccaattcaatccaaactttccagacctgttctatacaccctagggaacatattcaaggcaacaaacaaccacccatacacagaagcgaattctaccattaatgagccaagcttgagttcaaaactccaaagcttgctcaaacaacataataacctctaattcatgcatatatcaacagaataaatcataattaaacctctaaaaacaaaacaaccaactacagcaaccaaagcaagtaaaacctcaaagcatgcaaaatttcatttccttaaaacccaagaagctaaagagaaagctacaagaaat

SEQ ID NO: 290982 - DNA, 548 bp, Cannabis indica
tctctcggattacagtttttcgatcgatcccttgcccagtgaacattcctcactatttataaggctagaaacttgaggatgaagagtttctgctctcgttacaatgtgcataaacagaaagatcgtgtgatcaattctgaatgcaaggatgtgggattgaggctgaatacaccgatagtgggatcgtgtatatgccatatccacgcaagttgatccctgagttatagggattgagctggcgactcatgatgcgttaagctgaattcgctaagtgttgctcattctgcacggctcgtcaagtattccattttggatatgccagcgaggcatcctgctcggcatgttgatccgaacagatgctctaagtaaagtccacgtgtcaccattctcgtgatgccatgtcagagttccaaatttgggataacattttaccccgaagtctgtacgggacctccaaggttgcgtgtagacttttttcgagctggctctgcctttgtatggggacacgtgtcgagcatgaccgtttgagactcgatgtaaagctgact

SEQ ID NO: 290983 - DNA, 477 bp, Cannabis indica
caaagacacaacaaactagacacaattacacaatatagacattaatttctccacaattcaacttaaaactcaagctcaaagatataaaaataactctaaatcttagagttatcaacaccccaaacttagaatcttgctcgtcctcgagcaatgccaacacaaaaaaaataaaacacaacaacaaattttacacaaagactcacacacaagacacatgagagattctatagaaattcaagatggcctagtgaacattgacgctctcagaaaaaatggaattaaatggaatatgaaattgcttgccgtaactttacacgctgcccctttaacgttcttgtcattggataacattaatatctcccaaaagtcacctaatcaacaatttatacaagtatatcccatctaaactttgaactttctgcaattaccttaaacttttttttctttttcattcatttaagctccataagttggatt

SEQ ID NO: 290984 - DNA, 290 bp, Cannabis indica
gtgtaagactaaataaaaaaaaatcgttaaaccaagaattgtcgttagataagcacttttaatatataaagatataaatatttaaatttgatttgattagctaaaataataataataaattaaattataattaattgtgcaagatcaattaatcaatcactcatatatttttagacaaattaaaatgaatgtaagaatactttctttatagtatagaagtatactaataatgtagttcttaatctatgtgggatttttacaaataataaaaaaactgttggaaattattt

SEQ ID NO: 290985 - DNA, 657 bp, Cannabis indica
tgggtttgattgattgagttatggaattttgggtgtttcctgcgaggaaccggaattccggttgtgcaaccggaattccggatggggttcaggaattccaagaaccggaattccggttagcacaaccggtctgaccagttggggaatttttaggaaccccaatttttctcgtttttatgttgtttagggtatttccatgctttttatcgatagggaaacttctagtttctagtttaagtccccgggaagtgatttagcgtatcacttatttagtgttgtgattgttttggtttaggagcctgtaaatcgccgtgcagttcgttccactcaggttgaccggcacacagaattcagaattggaggtaagattagtataacagtatgcatatgtattacatgtttagcgtgcatattggaagcctatcagattacattagatatgtatgttggcttcgtaccatcctaccatatcacatcggttaggctagagtatgactagcagctggagtatgaccagtgaacctagtataggctgatacgtagggtttgtggtactgtactgtttgagcgtatcacatcagttaggctagagtatgactagcagctggagtatgaccagtgaaccgagtataggctaatactgtaacacatcggtaa

SEQ ID NO: 290986 - DNA, 316 bp, Cannabis indica
gcaatatatatttattttttgaagtttttgttatgtttttttttttttaattcttgatgttttatattttcagatttcgaaaaagatcaatcattctccaatagatactttgcagcaaaattattaagtaatttttttctcttgctatgaaagattatattacttttatttttctttggtttttaattacaaatttttttgtcaaagtttttagttacaaattaagtattaagtttttccctaacttttattatgttttttcttatttaataacgttttatattttcagattacttggaaaagactattcattcat

SEQ ID NO: 290987 - DNA, 444 bp, Cannabis indica
tttttttttttgaaaaaaaaactgccccgacccaaacccgaacaggaaaacgaattccgacgataaaaattcatggaatcactcccatttgaatctccatgcataaataaagagattcatgtcggttttaggcaattaaaacacgtaaaaattggactttaattttaataaaaaatttctagtccgtatgagttcttaaaaaattaattttcaaatttcaatgatttttcacatgtttagatcgatctataatactatatgaatatagtgatgtatatagaattcgaaataaacaccgaaaaaagaaaaatgaaataaaacaaccaacggaccaaaaactccaatttttttttcaaatgaatctaaatgcaaaaattaagacattcatatagatttcatgcatcgaaaacacgtaaaacaaagactttaaaatcaccaaaattt

SEQ ID NO: 290988 - DNA, 642 bp, Cannabis indica
aataatttccaacaatattatcttagtctgaaactgtaaattccttctagactaagctatcaacatagcaatctagtatttactttaatgtaaaatacttgcttaagattaagtaatcattagagatataccaaaaaacaattcatgaggattaggaatttttgcctaagtcattcgaatagactatgcaaaattctactatcttattctcaaaattctgataagttatttctatccatataaatggttagatttactttctcagttgaattctaaagttcctatcacaagtgtcatccaaatgaagatgggactagaattaaaattctcccactcaaataacgtactatgatactatgtccaagaacttctattggtatcaatttctattacaacagtaaaatattaattggaacaaaaaaataagatcaagaatatgttctaataatttgctaattttgttcattatattatatccatatttaatcaaaaatatgtgtgccatagagatgttgttgtgtattgagtatagtctagagttcaaaatgaactacatatgtcaatagtttaatccacccctaagtgatatagagatcatgtggagttatgaatataatccagagttcaatagatataaaagat

SEQ ID NO: 290989 - DNA, 330 bp, Cannabis indica
gttatttgtgttcatcactttaattataattattttaataataattaattagaaaatgcttcaacacatgatcatataggccaccaaattgtaattaaatatataaaatcaccgacatacacacgctgatctaccccataaattttaattaatagataaatagaaaaaaataaataaaaattacgtgaatattaaaatatatagtaataataataaatagataattaaaattaataatattgttgatataacgtacgtatatatattgtgtcttaattaattatcaataaagccagaaaaaaactggatatatatataaatatatttttt

SEQ ID NO: 290990 - DNA, 980 bp, Cannabis indica
actcctgcccatggtctcgacgtggggtctcccccatggaagaacatcctgctcctcccaacattgtgctgactccagttcctggggatgaggtgaggcaagagctccggatagccaagcataactatgccatggacgaatactcccgggggtttgccgaggtggaagcccttaggagggttctgcgggttgagatgcacgaaaccatcaacaacccggagtaccaggatccgtgggacctaaacttggaccctctgtcggactggttccgtcgcttccttgggcccaccttggctcccttcgccgcggagatgactggtgagtttgcttctcagcttacccggtgcgcgcccaagcggttcgcaacttgtgcctccctgaactctatcttccaggtccaggacctctgccactccctcactgtggtaagtgctttgtaattttgcttttccctttatttttcttttttggggattctttcttacacttgtattgtttttcagcttgctgctgaggctggccgcctctccaagaacatcattaatcatggcttcgttctgtctgattttggggacatgaacgacgtcaggaaggtccttcaggacctcactgcggagaggcagctctaccaggaggctgctgagcgccgggaggcggctgccaaggccaatgaggaggaggccaaacggagggaggcccaagcggaggccatgatccgggacgaggcccagcggagggacaggctggaggcccagcatcaggaggagctgagggcacaaagcgaggctgctgataaggccaagcgggagctccgggaggccagggaagctttggacgaaatggttgccaaggtgagatccttagaggaaactcaccaggcgaacttagagtccaaggccgctctagccgcggagttgaaggagctcagggacttcaaggagcaaaccatcaagaaggcaaaaagagccgagctcctttct

SEQ ID NO: 290991 - DNA, 531 bp, Cannabis indica
ttggacctagatccagaaccgtaaccagaccaggacccggactccaaatcagacctagacccgaattgggagacagacccggatccccacccaaacctggactcgggacacgaacccgaacttaaaattacacccaatcatggaaccagactagggaaacagaaccagggtcatgacctagaatcgcaccacattcttgatcccgaacccaaactcagaaatgggacctgggacgtgaaccagaaccagaccgagacccgtgacagtgatccagatattggtattcgggtaaaggggcctggaacaaactagtagtcggtgtctagatttgggacttagattaggaccaaaaccaaaactaagaaccaaacccgaacccagacgtagacctgggacctaaaattagagtctgaataagaatcgcccaacaaatacacttgaacaagactaggaccgtgaccaagacccggatcccgacggtcgtgtacgtagagcggaactgacctcagacccaaactgagactggaactc

SEQ ID NO: 290992 - DNA, 513 bp, Cannabis indica
aatattatactctagataaatatcgttctcgccgtttgaaattagataattatgttcatataaatattcacatcaagtgtatcctcgtttgttttactaactcatttgatcgttttgtaatcaaatattaatgagatttgttttatttttattttattattttattatatataaataaaaagtcacccatgaatttctcataaaccaagaattcagttatataggcacacttaatatagaatagatgtatatagatatagattagtatttttacccctaaaatttaacatgtactaaatcataccttctgaatttttctaagcgttgaaaatttctcctgaactattgagattgttaaatttaaggactttaatttaattttattcaattttacaatttcagattttatttatgtacttaaaaccatgctccccaaactttgatatctaccaaatcatgtctctcgaactttgacatatactaaatcatgtccctgaacttttatccatgtta

SEQ ID NO: 290993 - DNA, 631 bp, Cannabis indica
aactaggaactaaaagtttccctatcgataaaaagtatggaaataccccaataacataaaaacgaggaaatctagggttcctgaaatttccccaaccggtagactggttgtccaaccagaattctggttctgggaattcttggaccctcatccggaactccggatgcacaaccggaattccggttcctcgcaggcagaatttcaaaatttcataactcaaccaaatcacacccaaacaacctcaaaccttccagacctgttctataggacccaaataacatatctaaagcaataacacaacccagaatgcacagatcaaacctacttaaacatgcatataaaagcctctgaaaacacaagaaattgacctcaacaaacacagcaacaaaactcacaactccactttgaaaactcaagcttctgcatagaaaaaaccataactcaagcaacctaactatcatgcattactaacagctcaaatatcctcaatttaatatgcttaaatctctgaaaacaataataaaatcacagtagcaacaaccacttaaactatgcatgcaacctcatctttttcatcattttacaagaaaacgaagtaagaaaagctagacaagaaatacctcttcaagga

SEQ ID NO: 290994 - DNA, 551 bp, Cannabis indica
acatataggagggtgctaggcaccactggtgtcctttggcatttctcatattataaatatacattttaatataaattaactaatagatatattagaataatataagttagctaatagatattgcttttactaatatccttttttatttgaatcaagggttcaaaatctacctatgaccgctcttgaaagagatttgcttggtccttgaaggctaaagtttactgtggtggtaatattttttagataaaaactctcgagatgataccaataacttaattaaaattaactgatatataagaattttatagctaacatatcatcctcattatcagaaatactaaataaatagggaaaattttatagttaacatatgatcctcattatcaaaaatactaaataaatagggaaagatttgcaccacgtaatctcctttcagataataaaaaaatggctaattagaatttttcctctcgaacttaatttgacatgtaccaaatcatgtcccttgaacttttttttttcgttaaaaattctctctgaactattgagat

SEQ ID NO: 290995 - DNA, 563 bp, Cannabis indica
aggaagcctcacttcttcttctctctctctctctctctctctctttcgtgacctagagctagccaaaaccaggggattcattttgatttctctcagtttttgagcaaattggatacccaagatcatcctagaagctttgaaggtaagttcttttccttggggattgaagacttcactaatttaggttggttttggatgagggttttaggatttcgtggctgtaggtttagtctgggttgtgatggtgtttttaggtctcttttggggtgtgttgaagtttgcatcatgtgattttaatggctgtttagattgaatgtatttgattaagcaatttgagcttaattttcatgtgagatggtgattttgagttaagtggtgaattgtgattgaatgatgtgttgaatatgttgtacttggtatattgaactgttctggaaatgcaatttaggtctgaaatggttttggttcgagctggggaagaaaacccagaaattttctggtctgacagcaaccggtcgaccggttggttctgatgtaccagaaccggtcgaccggttacagca

SEQ ID NO: 290996 - DNA, 904 bp, Cannabis indica
ttctctttttctttttcttctttttcttcattttcttctttttgttggagtagaccagcaacctcctttttccttcaattcccctctatgcatatatatatatatatatatatatatgcaatgataatgaaacccttcaatgcaagcccttttacaaaacaaaacaataatcaagcccttttttttttcatttgtcttttctttgctttgtatttttcttttacacatttaatcacactaaaagcatattagcccattaataataaaatggacttagaaaaagatatttgggctttaattggactttggtaaattaatcaactacatcaaccacataattcaaattgttctctattttgaccattttgacacttaataagtccaaattttacatttgatctcttatcaaatatacacaatattgagaataatatttttaaaatgggaaactaaataaaattgataaaatattacaaaaattaactaaaataaatctaaaaatactaaaactaatatttatgcaaaactaagtaaaattaaataaaatcactaaaataaattaaaaatacttgagaacaaaactaatttaatgtccaaaaagatataaataacgctattttcatagagttatcaaaaatcattttagtttcttgctctaaagtatttacacatctaaaaaagaaaagaaaaacttcaattctatgaaagtggaactaaccttctgggttctccttagaggtcttgaatccatattaggccaattttcttgcctatgatcactcgtaccctacaaaaactatattttcaaatcaaacttcagattcaaaaaaattaaaattgatcaaatcaaatccaatacaataaattcaaacctcttttggattcgactgtttatgaccatagc

SEQ ID NO: 290997 - DNA, 67 bp, Cannabis indica
agatttaaaccacgtttgattttcttattatttacagggccgacatgctttggtctatgatataaat

SEQ ID NO: 290998 - DNA, 514 bp, Cannabis indica
gagtattggtcgattactgcgaagtctgccattgacttggctgtcactggggcagttcccaaagtgattgggagtttgatcattcctttaattgctatgacatctcccgaaaagccataaatgctcgatgtcataggtcgcaaatccttctcctgcaaccccatttgtttgaaggcttggaaattcagcagattcactgaactcccattgtcaaccagtatgcgatggacattgtccccaccaatattggcgactatcaccagtgcatcagaatgcgggtgatggacccatctcgcatcactctccataaagatgatgtcgtcgcattctttcttaaagagcttctcgggccgttcaccaagattattcacattggtaagcggcttctccttggcttctctggcataccgttcttgtgatttgcgagagtcgcctgcgatgtgtggtcctccaattatagtcaggatattgcgaggtgttctggagccactcgcattctggttttctcctttgt

SEQ ID NO: 290999 - DNA, 516 bp, Cannabis indica
atcttgattactttccactgttgctgacgacacaataaataagaatataaatgtgaaaagggtttcgatgaatttataaatcaaatagacaagtaattgataacatgaaccaaataacacataaatgaatgaaaaatacttctgtttctttattgatatttaaagaataaatattacattgaaatttagttttatttagggcataaaacccaacatatttaccatttattttttcattattttaatgcccaataaatcctaacctaaacctaggtggtttcctataaatagatagtgatagctcacactaaaagatgatgaaattcaagccttcagtcaaattttgctgagccatcttcccttctattttcaaatcatcatcctctctttctctcttcatattttcgtaccttgagtgatagagtgagtgcccacaaacaccaagtggtatctcaatcatagtgtgtaaggctgtgaagaatcttgaatcaagagaaggacattcgggctccgatc

SEQ ID NO: 291000 - DNA, 743 bp, Cannabis indica
aatataattactaaaatagagctctttcatttaactctgttaagccaaacttcaaaagaaaatcatcatttcacttctatgtcattatagaagctatagattccgtatctatgattagcgctctcactcaattgtactactatgttcctaagatgtaagtcttgggtctatccatttggtcagcttaacgaacaagtcaaagaaaacaactaacacagttaagccagaacctaaccatcataggattaagaattattgatctaagatcaactaagtgatattgacttagaaagacataacggtaagtttatgatatcttattcaagttcaatattggtcaagtctgatgtatactctatacatccaatactagtatactttaccaataccttggaaatgacataccacttatccaagtgtaagtaaacgttattgctaattatcacgttagtataaattcagtgcacttataaatcatgggacttaaactttgaagcatataatcacaattactttctactatgatgacatcactgtaatcatgaataactacatgttatggatttatcagaaatttcatattaaactataaacatgaaaataacatgtaaacataaataatttctaatcttctatttatagcaaataaaattatattaaaatagtttttgtttagggcataaaatcccaacaaactcccacttgtactaatataaaactaaaagtgcatttcaatcaatcca

SEQ ID NO: 291001 - DNA, 546 bp, Cannabis indica
agctgacactcttgaatatagtttgggtttagtgacgccgattatgcaggatgcgtggatgataagaaatccacatcaggctacatttttatgatggctggaggagctgtttcgtggaaaagtgtcaaacagacactcacaacatcctcaacaatggaggcagagtatatggcgtgttatgaggctacttgtcaggcaatatggctgcggaacttcatttcagcattgggtgttatggactctatctcgaggccgctgaaattgtattgtgataattccgcagcagtagctttctctagaaatgttagaagtacttcccgttctaaacacattgacataaagtactattttgttaaagagaaagttacagagtctcttatttccattgaatacacgcctagcactggcatgttagcagacccactaacgaaaggcttacccatatgtgtatttttggagcatgttgctcgaatgggattgttagaagcctagctgttgagctcagtgggagttttttctattatgtattgaacatgctagtatctt

SEQ ID NO: 291002 - DNA, 817 bp, Cannabis indica
tatgtgattttagtgtgaaggggcaaaatggtcattttgccccattgttagtttgtcttttgtgacttaataattgaaaaataaatgttatttaatattaattgttggctgaagtgaataaataaaccttgttactttcatttttaaaaagttggaaaataattagaaaatttgaaaagaaaagcaaaacctttttctctcaaagctctctctctatttcggccctcttggagcagcaagaagctggccattttcttgggattttcttgtgatttcatctctcattaaggttcaattcaagctaggttagctcctcttcttttcttcttaaagattgttgaattttgatgaaaatagtgtaatgcatgcatgataaattgaggttgttgctgctgtgattttgttgttaatttctgagatttaaacatgtttattagaggttaattaagctacttgtggtgcttgatagttaggttgtttaaagttatgaattttccatgctaaagtttggttttcaaagagaaattgtgtgaatttgtggctgtagtgtttgcatgaattagggttagttttctgcagtgttattatgcttgaatatgagtttgaatcatggtttggatgcatgttagatgttattaaccaagtttgagtttggaactcaaagcttgggctttaatggtgattttcatttctgtactttctgggctgtgttgatgctttagaaatgttctaggggttatatagagcaggtctggaaggtttgaggttaattggatttgttttggttgagatgtgaatttttgaatttctgcctgcg

SEQ ID NO: 291003 - DNA, 500 bp, Cannabis indica
aatgtatacgtgtttgatgattgatagaaaaagggaaagtcaatacattaaaaataattaaaatatcatatcaattaattaaaataatttgaatttatttttggtatgtaattacactgtgtaattacacccaattctcatggggggtatgagaattggagagagtaattgaggcctcccaattacctctaattacacagttactatgtaattacgtggccacacaaacacgtcaaactgtgtaattacctccaattacatctaattccaattcccaggtggctttccaaacgcgcccttagtttttttagctttctatgaatagaagcttaggtttagagaaaacactcagtgttagtttaccgctttcttagttaattttcttacgggtttctaagtttccttattattaaggcggacgatgaaacctaatgtatttaattaagtatttatttttattttgattctcaatacaatatatgcttatgattttcgcttct

SEQ ID NO: 291004 - DNA, 593 bp, Cannabis indica
gcagcttacgcatggaacaagacggaatgtgataggcattttgaggtgctgaaatagatggaccctgccattgctacatacgtcgagcaaatagggtttgaaaagtgggctcgtccttattgtccaggcgatcggtacaacataatgacaagcaatgctgccgaaagcttcaacaaggtgacagaagaattcagaaaatatccagtaactattttggttgacttcatcaggttcacacttcaaaattggtttgcttctcgtctcgaaaaggctagtaagtgcgctactcctttggctactacttttgaaaatgatttaaaggatcaacataaagatggtatgttcaggagtgtccttcgtaatggtgcccaattgttcaacgttggtacgagtcctcaaggtgagagaggtggtgatgtgaacttagtggagagaacatgcacttgcggacttttccaaacgctcaaaatcccttgtccacatgcatgtgccgcagcagttagtcagaatgtgagcgtgtacacactttgctctccatattacactaaagaaacgtggaagaagatctacgatgccacaattaatattgttgg

SEQ ID NO: 291005 - DNA, 291 bp, Cannabis indica
cgtaaatacacatacattcatcaaataagaacataaccatcatgaaaccatcgaaatcaacacgtaacattgttttaatttcattatttcatgaaagtaaatcattagaatggctctgacgccagttgttggaattattttatcaggatctaaatttaccacaatgtatgtttttagtacatcctgatatgaatttctaaaacaatgtaaataaaaatatataaagtttaagaaaccttacagtgggtgcagcggaaataaatgacttcttccgttcaaatctctagccct

SEQ ID NO: 291006 - DNA, 541 bp, Cannabis indica
cctaaaatcaaccacgggagtaaaggggcattatcaaaaagtctgtcaagcaaacaccaagaatgggctttatcaaaactatagggagatccgtaataacaggaaacatgagtagtaatattgtcaattaaaagttataatacaatcaacatgattagtggaggagtttaaaatatttacataaatgtttgaagtccaaaaaaccaaaagacccccccccccaaacctatcctaggcacttcaaacacatggtcaaaaggtagattgcgacacaagctttgtcctcggccgacagtggctttagtttccatgatgaagagaaaatcaggcttgtgcttcttgacaaaacgggagaggtttctgaatgcccgagaactccctaaacctcgggcattccagctcatgagactcatttttctgggcggggttgccttgcaacacccgcctgttcctgggattgattgatagcagttgaaacatcagcaattgttggtccagctctagcacgcttgaggatattcctgagagaatcaccaaccac

SEQ ID NO: 291007 - DNA, 653 bp, Cannabis indica
cctcaggaagagcccggagccctcctgcaccttcttcaacttcctcagaaaagccccattgcttttcttgaccttctcccggcagcacctcctcgtcatccactaaatcaatagtgtctggaggagcactggaagaaatctttaaagcgggggccatcggggaagaagtaaagggaggaggagcctcaggagtgtgaaccccggcaagttcggccaaaatggcgtccatagaagcacctgctacaacaaaagaaagcaagtgttagaacatcgtgggaaaccaccaacacaagatatgacaagcaagctagtcctaccctgactctctaattcggccctagcaaagttccgaattttgatgctggcagcatcatctccgagatagctgtccgaaggccggaaccagctggatgtaatgtaagctgaagggcctaagggaacgggctccggaggaccagaacccatccgggaccgacctaggaaatctcctaagtttgaaaaataaaactccttcaaatgatctccccaccgggtcgagggcatcctaaacctataaagacgctcgtcgaaccctacgggcctaagactggcatactcgccaacagaagggacataatgaactactaaaggagacttaccgccggcgccggaag

SEQ ID NO: 291008 - DNA, 631 bp, Cannabis indica
tatatatatatatttaatataatatgcatgcatgcatttgatcatgtgctacgtatatataaacatatatactatacaatacatactaaaaataaaaatgttaattatataaaaaaaaaactttacatatatatatatatatatttatagaaacataccaggttatatagttgtggatatatattatatatcctccggtgaatgaaaagtggagatgagcttagttctcttttattctaccaacttattacttacacagatttagagatatcgattattagaagatgagcatatatatagtactatacactcatcaaatcttaccaacaaacacttaattatatattaatggttttatatataataataatattatttatgagcatatagctaaagttatagcttgctcacccaatcacttttgaacccttataaaatattcatagtatacatatacatatatatatatatatatataataggtagagcactactacaaagtttctcttcattattattaattaattatatataaaaatatcaagaaaaagaagttatacaaaaatttattatatatattaatttgagaaagagtgacacgtagaagaagtggtacgaaatagaagtacac

SEQ ID NO: 291009 - DNA, 508 bp, Cannabis indica
aaaacaatgaaaaatcaatctaacgacaattataaattaactataaaataataaaaaataattattaattttactaaaaaggtatttttgtaaattaaaaaaaaattgaagcgtgaaaataaaaaattttccgtgttgacattttttatgtaatttttcaaaaaaattttggttgtaatttttgcaatatatttaaagtattaatttaatcttttttcatactgattagttgaagataaaatggttatttacacaacatacagagtaagttttatactgtgtactgtgttaagttttcactgttattctacgttattttttaattgttcaagtgttgtttttagttattctatttttgtgttttactattgttttataaaatatagtatttttagaaaaaaaaaatgtgtgtcagtattttttataaaagttaattcaaattctagtattttttgtaagttttccaaaataaaatttggtgtctgtcacacccaaatttgtgttgttg

SEQ ID NO: 291010 - DNA, 658 bp, Cannabis indica
ttaaggaaatactaccaatgagtactcaggtcgggtagaccacttcaaagtactcaggtcaaatagaccatttcaaagtactcaggtcgggtagaccacattaaagtactattgaacattcgctataagtgaatggcctcttgggcggactccgcgcaaaggtttcagaaacaaaagtactcaggtcgggtagaccactttaaagtacagtttcttatttgttttatgtcatgttaagctaaaaagatccattggatcactagctctgatgtaagttactacggtaacaaatacattttcgatcaataaaagaataaagatagtatttccaattctattgagtcgaaaaaatcagcatgattataatttacctagagtgcgtacaaaaggttcagtcgaacccaaaacaccgaacaaaaaagcaatatatttgcaaagacaagtgaccaagagtcatacgtctgctcggtcacttggggggcacctatacctgtacaaagcatctggtaaacataaaacaaaaacaattgcactgcaattataaacagagaatgaaattcattaaggataacaagagcataatgtaccgggattaaaagctgcccggtcagcccgttgtccaaaaatgaaaattaattccaagtttaaagaccgcttg

SEQ ID NO: 291011 - DNA, 501 bp, Cannabis indica
attaaaatatattgttttaattaaaaaattagtaattagattatgaattatcttgatagatattttctaggtagactttttggtatttttcgagatatatttaattaaataagaaaattaatatttaagttgattatgttctagacacttaaatatttcatattttttcttaagagatttaattatataggaaaattatatttatgatgaaaattaatttatttaattttagaccaacataaattagaataatttttccagtttttattttattttaatttcgaaaaatgtatctttatactattggattttgaaatgcagttatatatatttgtagataattaaatttgagttgaaaattaattatttaatttatttttgaccaactcaaattaagtaattttcataatatttattggaaaattaatactaaggatgaaaaatagtttttatttttctagatcttcctagagaataattttataaatattatattaaaat

SEQ ID NO: 291012 - DNA, 566 bp, Cannabis indica
ttaaaaaaagggcctcgaccaaacctttttaacggaagaggggtcgaactgttataactccctaaccaaaccttttcgacagaagaggggtcaaattgttataacgccttgatcaaacctttatgatgagaaagggatcaaaaaactgtaatttttgattcataacctatctaacgagaaaggaaaatcaaaagttatgactagcgcataaagctgaatactaacggcttgcgctaagggaaagtattaaacgaggcatccaaatgtcttgaaaaaatacttaaacccaacacgtgggtagaaattttaactactcatgtaagcaatgaaaatatatataagatgacaagttcattaaaaatatatttgaatgtgcttaaaataagatcattttcgatgatcgcgagatggaattgatgatggctcgcagattgaggaacgggcagataagctgctcgcacgtaaagtaggaaattaactacttaacgtcggaggaaaggacaatcaatggaaacccctaataaactttatgcatgtgatagtttatattgtgaataaaatgcaag

SEQ ID NO: 291013 - DNA, 664 bp, Cannabis indica
agttcaaagatcatttaattgaacatggaattgaatcccaatatactgcacctagcactccacagcaaaatggagttgcagaaagaagaaatcgcactcttttggaaatggttaggtctatgctgagttattcaactctgtctacgtccttctggggatatgctatacagatggcaaacgacattctaaatgttgttccatctaaagcagttcctaagacacccgtcaaactatggaatggtcataccccttctttacgtcattatagaatttgggggtgccctgctcatgtcttaagaaagaaagaaggcaaactagaatcgcgaacagaagtttgcctgtttgtcgaaaattctaaagagactaggggtggactattttatagttacaaggataataaagtgtttgtttctacaaatgctactttccttgaagaaaactatatcaaagagttcaaaccgaaaagtaaagttgtattagaggaaatgctttctgatattactccttctaatgttccgtcctctcctacccaagaagaggataatcccactccctcagttgaaacaactgagaaaactaccgctaaagttcctgttcagaagatcaccgcacctcgtcgtagtgggagggtttctactaaaccatcttgttatggcttggatgg

SEQ ID NO: 291014 - DNA, 627 bp, Cannabis indica
actagccaaaacttggtttgctcgaacagtaggtgtatttttctttctgccaccatattcaagtgggaaaccatggatgaaatagcacttctcaaccaagtgacctggtttaagacaattggaacatgtagggcgaggcttcttgtttcgagaaggctgatttagtttcggtttggcaggggtagcagcaacaatgccggtgttgccaagacaatgttggtgttcttgttaaacaaccatggagaaaaccttggatagtgggggaagaggatccaagaggatgatctaagcccgtattccccaataagattcattaagaccgatcaagaactgaaggatatgttctctagtgtagtagtcttgaactttttgcatgacaccacaactgcaaggagtatttggttgatactcgttgagttcatcccatagggcttgtaactcagtgaagtatgaggtgaccgagttatcgccttgtttaacattgttaacagaggtcttaagttggagcatgcacgggacattactctgattgaagcgatcatagaggtttgtccacatttcgcgagcagtggttttgaacatgatgcttgcaccaatttcttgagacacggattgaaggatccatga

SEQ ID NO: 291015 - DNA, 348 bp, Cannabis indica
agttcagaattttggtgatcaccgttagccactgttcggccatcatcacatctggacctcccaaaaagaccggaggtgcttgcttccggaaccgttcatacaaaggttccaatctgttggccgccacaacaatttcggcctgagcagcaggggcgggtgccactggaactactggcacaagcactgcaggagcaccctgctgcctcaatctctgtatctcgaggtcttgctcttcaattctggcttgcatttcagcaaacctaacctcccaattctgggctccctgatcggcttggggagcctgggcagcctgtggcgggttctcatcaccccgaccacgagccctgc

SEQ ID NO: 291016 - DNA, 647 bp, Cannabis indica
gtacacagcgagaacgacaaccccgtaatgaaaatcgcactacacctagaactagcagtagtcgacaaggcagaactaaagaacatgctccttctcatcatgcaaccttcttaacgttctcctcttttgaagtttgtaccaagttcaaagctcctatgtggacaaaggaagatataatggaaaatcatgagctaactacttgtttacaaagtaaggaagcaggggtgatagagcttggtaatttttatgaaaacaaggaagaactgagacaagtagtgggtaagtttgcacttaataacaattttgagtggatggtgaagaagtcatcccctgatgtgttgtacgttaaatgcaaggctccagagagattgagggggaggaagaagatgcattctgacaacttcgaggtcactgtatttcacaacgaacacacatgtaacctgaatgcgagacgttcagatcaccgtcaagcagcaccatgggtggttggccaccttattaaggggaagtacacccaagatggaactaagtacaaggctaaagacatacagagggacatgtttgacaactatggtatccagatgagttatgtgaaggcgtggaggtgcagggaggatgattgggttctcccagaacacatcaagaat

SEQ ID NO: 291017 - DNA, 579 bp, Cannabis indica
taacattaaaagaaggtattttctctatactctctaattatagtcttgatgttcaatctattcgtgggcaaggttatgatggcgcaagtaatatgcgtggacaatggaatggtttgcaagctttaatttcaagtgaatgtccttatgcttactatgttcattgttttgcacatcgtttgcaattggcattagttgctgcatctagagaagttattcctgtccatcaattttttacaaagttgaactccattgttaatattgttggtgcttcatgtaagcgcaatgaccaactaaaagctgctcaagctcaaatattgctcatttacttgagattgatgaactagaaagtgggaaaggacttaatcaaattggttctttacaaagggcaggtgatactcgttggagttctcatttgaaatctatttctagtttaataaagatgtttagtgcaacatgtgaagttttattgaatattattgaagatggcactacttttgctcaacgaggagatgcggatgcagcttatgagtcattaacttcttttgaatttgttttcattttgcatcttatgaaaaaaat

SEQ ID NO: 291018 - DNA, 511 bp, Cannabis indica
atttcgtgcccggctgttgcatcgacgagctgatcgatccttggaagtggaaaacagtctttagggcatgctttgttgaggtctgtgaaatcaatacagactcgccatttcttgttcggcttaggcacgagtacggggttcgcgacccaagccgggtaaaaagcttcaatgatgaagttgttgttgcgcagcttttcaacttcatctttcaaggctactgctcgttctttatccaacaatcttcgtttttgctgaactggccggatgttaggatcgatattcaggacgtgtgaaataatagaaggatcgattccgaccatatccgcatgtgaccaggcaaaaacatctaggtttgctctcagaaattttatcaactctgattttacttcgagcaacaaaccctttccaatttttagctttctggccgggatagctggatcgatctcgatctcttctaactcttccacaggtccaacattgctgcttgggtccccaagtcgaggatccacat

SEQ ID NO: 291019 - DNA, 819 bp, Cannabis indica
aattacacccttgacagatttcaatttattttcatttagctcatgaaaccatagaatgcaattaactaacaattaaaccactttatgcatgccaattacaatcatcaatccactaacccaaaattccatatgcttgcaatacttactattctccactaatatagattaatgcacaaccaagaatcagaaggtctttctaggcttgtattgttaggcttaggtaagggtagatgaaatggtcatttaggcttgcctataccataagcttctccaatcatgtcacccaaaatatttttcacacaatcccaatacccctttttctaattacatgagagatattattatttttttttcaacaagattgcaacaactttatatttatctttttttttttttttatttgacactggttgtcagattttttcttttcttttctttttttttttttttttttctcaagttgttgccaatcaatttttttttatatatattctctcaatttccacacacatacaacaaacttcccatctaaattcccccaaactaaagatctacttatggtataattagggttaaatattttggatattcatgggtttatctttttatgctcaatatgtgtagaaacaaataataggttaaggctcaaaagggtaactgagataaaattacaaggatggcttgaaaggcacaatcgatccaaaaaaatacctaaatcatttcttacatgcataatttattatttcgctcaaatagcaagcaagcaagttctaaaattttccaaacaactttccacatgtcccaattaacatacataaa

SEQ ID NO: 291020 - DNA, 604 bp, Cannabis indica
gaagagcaagacctcgagatacagagattgaggcagcagggggctcctgcagtgcctgtgccagtagttccagtggcacctgcccctgctgctcaggccaaaatagtggtggcggccaacagattggaacctttgtatgaacggttccggaagcaagcacctctggtctttctgggaggtccagatgtgatgaaggccgaacagtggctaacggtgatcaccaaaattctgaattttatgggtgtcaccgggaatgacagagtggtgtgcgccaccttccagttccaggaagacgctcttgtatggtgggacatggtgtctcagatccatgacgtcactactatgacctgggaaaggttccaggaactcttcaacgccaaatattataatgaggcggtcagaagcgccaagaggaaagagttcgctcacctgacccagcgtgagaatatgagcgtgaccgagtatactactcagtttgaccggttggcgaggttagcctcgggaatagtgccaaccgacttcagcaagaaggagaaatacctggacgggttaaatgcgaagattaagcatgatttgatgatcaccactgacgacaagaccacct

SEQ ID NO: 291021 - DNA, 568 bp, Cannabis indica
gaaggatttgggtgaagctgcttatgttcttggtattcagatcatcagaaactggaagaacagatcccttgctctctctcaaacaacttacattgataaagttttggagagattctcaatgaccaatgccaaaggggcacatatgccttctagatttggtatccgtcaggaacaatgtcccactgatcctcaagagatagatgacatgagaagggttccttatgcttcagcagttgggagtctaatgtatgcaatgttatgcactagacttggcatatgctatgtagtaggaattgtgcacaggtatcagacaaacccaggagaggaacattagactacagttaaacatattctaaaatatttgaaaagtactaggccttatgtgctagtctacaagggtggcgctttaaatcccgtaggctataccgactcagatttccaggcttttcttgatggtagaaagtctacatctgggatggtttttactcttgggggtggagaagttgtttgaagaagcgctaagaaaacagcaatataagactctaccatggaggccgagttcatagct

SEQ ID NO: 291022 - DNA, 424 bp, Cannabis indica
gcatggccagcattacttcttgcattttttggttttgtgctttttgggcttcgatctcggcttcgtgatcgatagctttttgtctgagaagcaccaactctgagtagctaccttcgtcgtaggcatactcatcgaggtttccctcgtagtcatcgtcgggaattccttcttcttcctcagaaccctcagctgctcttgaggctacatcttcctcatttacgatctcgagcatcttccagtgggcgaggctgacgaatacttctagtctccaccatttttgtgaagtcaagtgttcgtttacagtagctttcttcagctctcaatgaaagcaccaaaatgatgaccgaggttttcggcaactaataaaatattataagattatagagctgtaagaaatttagagaaggattcttacgtggttggg

SEQ ID NO: 291023 - DNA, 675 bp, Cannabis indica
tttaaaaacaaaaaacagattttagttatgatgtcaaacatgcactatatgtttctgtcaattttaagagagttgctatgtattttagaaggggaatttgattttttatgcttatatatatttttttttctctaaactcataatatttgatatttgtggaatatgacacattttataatattcctacaataatctccccatttacatcacccccctctcttcttctctcttttatttcactatactgtcgagccatcgggcccaccatcggacccatcgggccatatcaaattctatttttttacacaggaattgggccaaccatcagtcccatcgggcccatcgggcctttgtcttcctcaattttcctgtgataccatcggaccggtgtcaggcctgcatcgggctcgacgaaatcaaaccccaaacccaaattttttccaaatcacatccgataaaaataataataaaaaaaaagaatccgaaggcttgccttcgacatctctgtttgaagctcggtggtagagggttggagtcgcgtctcacagtggtcggtggtctgggtaggcggtgatttgatgctcggtggtgctgatttcgtgatttggtgagggtgagataatgagagaacaacgagagagatagaggaagagagagagttgaggtttgaaaaat

SEQ ID NO: 291024 - DNA, 604 bp, Cannabis indica
ggaacataatttttagttcgtctagctgtgcctgtacaactggactaacctgctcagcattctggtcgatctgaatcacatcagtagcgtttttagcgggaatttgagcacgggctccgggctgtacgatcgtcgtgacaatctgattgtctactcctctccttctgttcagatcgctccttagctcatgaatcgttcccaatctatcaaatacagaagtgactggctgtcttagtgattgatttgcttggttgataggtggaatgacaccgttaacctggttggaactatcacgtatgacctctcctgatgaattactagacaaggtctgcccgcctaccgctaggcccacaagcggaactcgtgaccggggatttggcggctgaccatttgtagtatgggaagtattcatcactggatcttcgtccgtctcacctagggggatgacactcggaggttgatatctgacagtttggtaggctttttgtatcagcaaagtagcttgctgactcgattttcaatctctgtatgatgagcccttaacgcttccatctctttgtctctccactcggcaacatacgtctttgtgttgggttttgtgccc

SEQ ID NO: 291025 - DNA, 722 bp, Cannabis indica
ttatgatcttccaacttgtactgaacattcacaattttcaaaataaaacatcgcactcctttgatttatcatattgaatggttgtcatttcattcatagatgtccagttgtggcgttttcactagtgtcaaatagttttctactgttttgaaaaactcattagcatttgtggtgtttggcgaaccactaaataaatgttttagaaatttgaacttttcatagcaatgagactatgatgatttgaatttttccattgtgcatgaagatttttttaggcaacaatactgatatcagtaagatcggcagatttttcttctcacatgcataagttcaagtctattatgcctaaaataatttttaaatctcgttttcatgtcttaaagttggaagcattcataatttggatgaaaacgttattgttgttcacagaaaggagaccaaaaaaaattcaaaaattaaaacttgatcaagttatatgagcaatgcaattagaaaatattgtagagtcaactggtcattataaactcccctttggggtgagaatataacacacacatgatctaccttcatgaagttagcaataaaaaaaatacatatcaattaagaatttattacctttgagcaaataaatttcttaaaaaataatatatattaaatcaagtcaaaaataataatacatatttatttaaatttattatactttgggaaaataattaaaatat

SEQ ID NO: 291026 - DNA, 929 bp, Cannabis indica
tttattttgttgttaattatgtgaaaaaaaatatttttttcataaatattaaaaagtaaccaatttaaagtaatcgatccaatccgcacttttgcggattggatttgagctattgtgcggattggattagattggatttaaaaaataaaatccgcacttagtgcggattgaatgttgtttgaccaaaaaagtgtggattggatcggatgaacagccgtaatggacactattatttgccactataatattgtacagagattctttctaaaagaaataaaaaactaaaaattttgtgaaaaataattaaaaaaaaaaagacttaattgctattatttatagaactcaaaatttattatttccttttcagatactaatttcacaaactaattataactcatggcatatataaaaacccaataaataataaaataaaaacactatgaaagttttaatacaaactcaaaaatatatttataaaatccatttaaaaaaattatatattataatctatgatttatctaatagaaaaactatttattgtgttgaatatggttttggcaaaacaagctaaatcagtttcttaaaggtcccctacctttaacttatgcttggcaaagtgtacaactcattctatgtagtctcagctttacaccaactcaaaatttacagatatccaacaaattacagatgcctattaggccaactgtgttgataatcgtcgttcaatctcagacaagtagtaggctactacatattttcttggaacaaacttagttggctggtcttcagaaaacaacgtgatgtagatagattaagtacagagcttgaataccgttttttggcctttgagtctttcagaaaatcatttggttacaaaatagcaaattagtgttagaaatcttttgatgcagtgtcatttatagtatata

SEQ ID NO: 291027 - DNA, 664 bp, Cannabis indica
tacatgacgtgaaatagactgtttcaaaccctgaacattatagttatttaagaaattcttataaatttacgaaaaaaaaaattaaaaaaaaaaatgtaacaagccgaaataaaattcaaattgtctgttgcacgagtgactctttatttgaaaggacgtattgtaaaaataccttttaaattattgtgtgtaaatctaaatgtgaatattataattatttttattttattacaaaattaatataataataagtaatattttttagtgttgtggttggagtaaaataatttttgacaccaaatttagtgatagtgcaacactaaatttggtgtgctccttagagatgctctaagagcaactccaaagagccttcaaatttaaggttgcagtgggtaatcttctccaacgtagcagcatctttacatcatatatgcagtctttgctgcagtgcactgcatatatgcagtagcactgtagcaactgtatcttttttttaattattattattaatatttaatagctgatttttgtttatatatattgtttaatattaaaatatattatattttattaatataataaataaaatatattttttggtgtaaattttagtgttgtggttggagtgaaaatactttttgacaccaaatttagtgatagtgta

SEQ ID NO: 291028 - DNA, 544 bp, Cannabis indica
tatttcatagtggggaatattttagagaaaataaattatcgggattgagcggggttatggaaattgaccattttacccctagtttcaaaaaaataccctagtttaagttaaggggcattttagtcatttgttattaagtggaataggtggctgtccctttagttgacacctagcattcctttttcagccaaaatgagttaagtaaagtatttacttagttaagaaaaaagaaagaaaggaaattagaaaaataccaaaaaaaatcaagaaagctctctttccttcatctctctctcttcgaaccagctaggaaccaagggatttcttgctgaaatttgtgatttctaccaagatttcaaggagaatcaaactaaggtaaaccctagaatcatttaaatatgtgaatcttcaagattcatgcaagatggaattaatgagatttgtagatatagtggctgttaggtttacataggcttagggttcgaattttaggacccttttgagttgattttaactcctagaagctggtttggttgattggatt

SEQ ID NO: 291029 - DNA, 559 bp, Cannabis indica
aggagcctcaaccttcatgaattccagaaacagtccaaaagtacatcaacctagaagaggcccaaatagtggcctacgggggatactaccctactgggatagcgggatatcgtacccggagctcagctcccaggaaccttaccaacagctgttccaccgatgagcggcatactaattttccgcctacccctgaatatagtcagggtcaggccttacgcccctgcgtcttctctattttaggaactcgtcctgggataagcggacaacgccccatctcactccgctccgacccgcaagcttagaaggtccctctcaaggctctcagagcaagaggtcctacaaaaggcagcaaccggacagaggataagcggcagaaaagggggtacactcttcaatatacccagtacacggggctaacagactcccaagagcgtgtgtatttcgctactaggaaaaacacgcactaccggagaccacctcctctgtacagggatagctcccagagggattccaataaaagatgcgagtatcacaaaaacattgggcatagcaccaatga

SEQ ID NO: 291030 - DNA, 599 bp, Cannabis indica
ctgtaggatttttacccaattaccctacaccaacaagatactttaatatcagtatcaaggtcaaaatcgacctttccaagtctaacttaagctatagaccaaaacggcaccgtataaccaacacgacaccaaaacctgtgtcgtttgaatcatcagagtttaagtactctgaagaagggtctagaaaccctaacactcaaacactcagcctcacaaacccacaaatcgaaaccctagcagagcaagttctctctgagaacttgctcgattccaaaccctagaaacccagaaaacccagatctaaacacacacacacagattttaggtttagatgaatgaaaaacaagtaataagaaagaaatcaccagatttgtttcagagttcaccccaaaattagggctacgtctctgtcaagctcgtctcagagattagcttgatatccactatgatttaaaggcaaaatacagacttttggagcttcctgtcacaaggtttttgaccaggtaaactcgattctttgtttttacaagttctgtttgattttccttagctttttcttctcgatctaactctgtgtgtttgttgttgtgcatgtactc

SEQ ID NO: 291031 - DNA, 994 bp, Cannabis indica
gcctttgagctgggagttgagtgacctcccaaacctcattgtgttttacggccccagcataccgctttagctctttgcgggtagttcctccaatatgaggacctccggagatcatggctaccctcccgttgggtctgggcggcagaccggggatgtgctgggcatcgcccgcgggagcagctggagccaatactcctgctgcaccccccggtgttccctggggcacaacccctgtcgcctggcccggattgaggtgaggcagcctattcttgatccactcatagaggtggcccaatcggatcaggttttcaatctcgtctttgagattcttgcattcgttggtgctatgaccaatgtcgttgtggtactcgcatcttttgcttggatccctccgggagctatctttgtacaagggatgtggtctccggtagtgcgtattttgcctagtagcaaagtacacacgctcttgggagtccgtcagctccgtgtactgggtgtactggggagtgtacccccttttttgacgcttctcccccgtccgggtgctgcctttggaggatcttttgctcctcgagccctgggaagggcctgccaggctagcggttggagcggagtgcgagggagcttgtccatttatccccgagggatttccaaaatgagatgatgcgggcgccaagggttggccctgactatatccgggggtggcagagaactgtatgccgcttattggtggagccgtggtcgggacagtacccgagggcggtgctccgggcatgtaccctgctatcccggtgggatagtatcctccataggccactatctgggcctcttcaaggttgatatatttttggactctcttctggaagtcctgaaggctagcagccccctcttgttgtagttcgttccagaagggagttcctgtacggatgcctgcctggagaagcgcaagctgttgtccgtcatcaactttcttggtcttcgaggcttcctctcg

SEQ ID NO: 291032 - DNA, 513 bp, Cannabis indica
aaaatacccctttagtatgatttatgtgattttagtatggaggggcaaaatggtctttttgccccaatgactttttgtcttttagtgacttgtttatttgaaaaataagtgttatttgtttattttattggctgaagtaaatgagataagtgcctttatttttattctccaatttttacaaaaaatgctaagtgtagaaattagaaaaacttgaaaaagaaactctctcaagcctctctcttttcggccctctttgagcagcaaggaggaggagttttccttggtgattcaagtcctttttgtgttgattttgtgatccttagttactagtaagtggttctcaactcttctttttgttcttgatgtttttgaagtgaaaatggtaggttgcatgttagtttgtgaagctgtatgttgctgtgtttaattgttgttttcagtagcttaattaggttttaaatggatggattatataggttttaatgcatgctagttgtgttgttcaaggtttgg

SEQ ID NO: 291033 - DNA, 713 bp, Cannabis indica
tccttcattgtcttcacattcaaaaccttgagtgaaagagtgtcatgcccacacatagcaagtcaagtactcaatcatagtgagtagacggtgggtaaccaaactcgaagtagagaaagagatccagggttcacatcttgataatgctctgctacagaaaggaatcaagggctagagatcttgaacgaaaggagtcattatattccgctgcaatcaatgtaaggtttttcctaaaccctttatgtgtatgtgtttattttcattgtttttagagaattcatatttaggatgttaattcaacatacttgctagtaaatctagatcctggtaaaatattcccaacatcatagtattataactttattatatttgtgccattttaattaaagtactctagtacttaaattatttgttcatttatttatagaagaataaatatttttaagtgaaataatatttacaccccaaaatataaatatattttccataatatatatgtaattcattttttccttcatgtatgcacacatgtaaaacagaatatattttgaatattaatataaaaattaaaaaataatatagaaaatattagagtaaaaatataataaagctattatttaaaaaatatatgacaacaagattaaaaaattactaaaaattaaaagagaaccaatatattttttaaaaaagtattaagtgtaaattttaaaata

SEQ ID NO: 291034 - DNA, 796 bp, Cannabis indica
agaatctcaaggacgagattgaaaacctgatccgattgggccacctctatgagtggatcaagaataggctgcctcacctcaatccaggccaggcaacagggggtgtgccccagggaacaccggggggtacagcaggagcgttagctccagctgctcccgcgggcgacgcccagcacatccccggtctgccgcccagacctaacgggagggtagccatgatctccggaggtccccatatcggaggaactactcgcaaggagctcaaacgatacgcaggggccgtgaaacacaatgaggtttgggaggttactcaactcccagctcaaaggcccggctgatggaccaacccatcacgttcacggaagaagacgccaagacggtgcgcttccctcatcatgacccattgtcatagagacccccatcgctaataaagtggtggccagagtcttaattgacaatggaagttccgtgaacctactcttcaaggaggccttcaccgcaataggcttgacggaccgagacctctcgcccagtgggtcccaactcacagggtttaatggaacgacacttatcccgatgggaaaagtaaggcttccagtcaccttgtgcccggacaccccccagagcacatttaaatactgcactttcgtggtggtggactgtccgactgcttacaacgcgatcctcggccgaccggccttggtagattttggcgcagtcacatccattcggcacctgtgcctaaagttccctacccaggaagctgggattgggacggtgagaggaaaccaggggg

SEQ ID NO: 291035 - DNA, 512 bp, Cannabis indica
ctccgtgatcacctggacaaaaagaaatacggacccatagtctctacgggaacgttaaacgaaggaatcatggcagagcttgccatactccaaaaagacatcgcccgagtctctcgaagacaaaaaggcaacgactccaactctgactgtgaagaccgggaaccatgtgccaagcacatcctggaagcagagctccccaaaaaatttaagatgcccgaaatggcagcttataccgggaactcggaccaaagcgatcacctgtcacggttcaaccgagtcaggacagtcatgagagtcagcaacgacgccaagtgcttgtgcttcccgcttactctaagcagatccgcggaagagtggttcaagaaactggaaccaggatccgtggattgctggaataagttacaaaccagcttccggagacaatttgtcaccgtaaggaaagttaatctggaggtcagcgccttgactaacatcaagcagctacctacagagacgttgaagaatttcataaa

SEQ ID NO: 291036 - DNA, 566 bp, Cannabis indica
gcaccagcctcactcttaccctgatgatatggacgattttgatgatcaggaaaatactaatccaaacaaagctttcaagagacattttgatagtctttcactaaggaaaacttcttaagagatgttgtgcatcaaatgcttctagtccttctccttcctcagttgaagcgactgctaacccacaagtttcaacctcctgtgatgattttgctggttcagaggatatttcagcggtgattgctcagtaatcccgctcttcctcatgaatgtcgccagttggaatgcacggggcctatggaatccgagtgcattccgtcgtctgtgtttgcttgtccgtgagaaaactccccacctattatttcttatggaaactaagttaatttctggttctatttcccgttttaagcaatgtttaaagttcaataatggcctcgaggtccctcgctctggactaaagggtggtttaatgttattatggcatgatgatgtaaatgtaactctactatcaatgaactctaactattttgattgttatatctcttataatgatggtcctcgatggcact

SEQ ID NO: 291037 - DNA, 530 bp, Cannabis indica
atagaaaatgacaaacacaaatgtagggtagaagaccttatgcaaacttgtctttaatcattcccattctttagttgaatgttattacctataaaaatcttatttctctactagattttctactataaggctacaatgtcattctttcaatttcatagatgttactcactcatcgatagacacttgttccatgacacttagaaataaacatttaagctctttaaaaggtcttctatatataaatatttaatgatccatttcgaccaccttttgtctaacattcactttttgatatcttttatccatgtattcattgctcttgtcacgccttcccattttcctaggtaaccgctgtcggtttcttttgtagtctctttcttgtataactctattgtattttctttgttaatctcttctatggtgcttggtcctccattacccccttaaatcaagttgacttgattatgagattggtatggttgacttacacaagtgtttccagcgtgctttgtcctcactcacacgcatcc

SEQ ID NO: 291038 - DNA, 541 bp, Cannabis indica
attttaatttattattgagaatcaaaattttaaaaactttaaaaacaaagctacttttaatatttttaagttagtatttaaaattagatttgtaatgattttgtggtttaattgaattggatcggattgaattcgaagtataagattggattggatcgaatacccaatcctatttaaaattgtccaaaattgattcttttttttttaaaaaaaaaaaaaaactagatccaaaatattgatgtgtatgcattatagtttaataactaaggtaaaaaataatggattttaattttataaaatattatagtttatttatttttaaattttttaattttattaattatttattatatattaataaaaaaataacaattttatttgaattttttttttttagaaattttatatactatttttttaatttatttttattggtcttgtagttgttctgtgaattgcaatgtgaatttgtgtaacgatttaaattgtttggtatatttctgtataaatataaaaataaaattattttaaaatataaaaa

SEQ ID NO: 291039 - DNA, 510 bp, Cannabis indica
attatttttattatatatatatatatatatatatatataaacacccgaaaaaagagaattattaacaaaaatagtacagctttgttttaattatttttacgaattttaaacttttaatttttttcattcttctctttttttttttttatcttgtagaattttctaaatttttctataagtttcctattttttttatttaataataaaaaaaaaaaaatgtaacatcttatccttatttctgataataatagtagtaattattactacacatgcaaactttacatatccctatacttaatttttaataatctaatgcaaaatataataacagtgtttttccccttttgaccctttttaattgagtttagctatcatctatatatattatgtagctgcaatataatttaaaaccatattatatagatacggaacacgattttatcccgtgatgtactttcaaggaatgtattctgtggtacattagatgggtctcaggatacattaaatgag

SEQ ID NO: 291040 - DNA, 527 bp, Cannabis indica
aaataacgggtacgggttggacctgcccctttttaggctaacctgtacccgcccgccaaatagcgggttaaaacttaacccagcccaatttttgcgggtttttaatgggcggttttcatacgggcggattctaatgggttgggcggttcccacagtttagcggtttttatgtgtcggcctaatagtaactcttgaagagtataaatgttttggagaataatataattattttattcctgtatataaaaatgaaacttgtaatgattacttatatgttgtagtgattttacattagcttacgaaagtttcattgaaatacaaattatagtaaacatgcagtttatgaattgagttattttgatatgattaatcatatgcaataaattgtcaaaagatttgactaaattttattgaagaactagaagattcttctcattgttaatttataaggctcaaaattaagaagaatgggcatatatttgcacatataaaaaatgaaagtttatttttcttatttttaatttttt

SEQ ID NO: 291041 - DNA, 563 bp, Cannabis indica
gaacacctgaatttgtgtcggatctgcttttacttgacgggaattgggacatccggaagctcaatgagctctttcacagggaaacagttaatagtatcttgaggggcggtaaaccgagtggtcagggtagggatagatggatctggacaaagaactctaatggtcgattctctaccaaatcggcctatcttatccaagctatgagacgggctccgttgtgtaatgtagctccgaacctttggaacaagctgtggagttcaaaagttctggagcgtcacaaagtcctttggtggagtatcctctcgaatgcgctacctgttagggctatcctttctaagagaatgggtattaatgaaaccacctgccccttttgtggtaatggtgacgaaactatggagcatttatttctctattgcgatctggcgtctcacctttggagatcttccccttggggagttatgcctgttgtggaatctggggcccgtatgtgggactgggttagttttctatggaaccttaggaccagaggagtggatacagatgatttattcctttatgcttct

SEQ ID NO: 291042 - DNA, 654 bp, Cannabis indica
tctagacgttacaatatttatttttctgaaatatagtttatttttaaactctcgtccacgtgtcgtgaccatatttgttgctcgaaatatgtgcataataactttttatgattttttttcgcacataaataataaaatagcctaataaaaaatatatatattttaaataagaaaattattttaaagttattagtttttaactaaaaattttaagaaaaataactacaccattagtcctcaaaagaaaaaagaaaaaaatatttaataaataaataaccttttacaatttattttattttattatgttattcgcgtaaatatatattttttccggtattattttcatcaaataataataattataatattagattgtttaggatcaaaattctgttgcacctatacaataacaatggtcatattttccattattatgttgctataaaaaatttatatactatatttatttatatagtcttacaaattcacatatttatttatattctaagcagtatatacatatattaaaacattattttttttatatatttttcaaatagtgtaggtttttttactttataattaaacattattcaatcatttttctatataaaaattgttatatattttattttttagaatcttcatccattt

SEQ ID NO: 291043 - DNA, 531 bp, Cannabis indica
caacaacttcggagactttctgatgcctacagcaaactccgatgttttttccggcatcagtgacaaattccggcgattactgtagtttcatttgttttaattttttaaaaaaaaaatatgaagagaattttaatagtttttatggtaattcaatcccatatatgttgtaaggccagtatggctagttttggttctgtaaggctagtatggctagtttttagttttgtaaggccagtatgactagttttaattttgtaaggtcagtatgactagttttagttttgtaaggctaacatgactagttttggtttgtaaagttattatatggatagttttaattttgtaaggtaagtttggtctaataataacacatcaaatatagtgtagtaaccgttagcaatggagatgaaaaatagataagtatctatatcagagaattctatgtgactatttttataaattttcatattttattttttattttatttgtaagggaaatttcatttttttattaaatatttattatgtatt

SEQ ID NO: 291044 - DNA, 678 bp, Cannabis indica
aatacttcccagactgtaaatggtcagccacccagtccccactcacgagttccactcgtgggcctagcgatagttgggcagaccttgtctagtaattcatcaggagaagtcatacctgatggttccaaccagatcaatggtgccattccactcgtcaaccaagtgaatcaatcgctaagacagtcaggcacttctgtattcaaaaggttggcggcgacccatgacctaaggaatgatctgaacagaaggaggggagtagacgagcacaatgtcgcgacaatcgtaattcctgctcagaaagatgctaatgtaattcaaattgaccaaaatgccgagcaggttagcccagccatacaggcacagctagacgccatggatggacaaagaaacaatgatcttgagctggaccgagcacgcaaaactcctttctcacctgagatcaatctcctgccgttgccccacaagtttaaaatgccaacgtggaagatgtacacagggagagaagatcccctttcccatcttaagtacttcaaaatgcaaatggatttgcaagtggtacgaggagatgtatgctgcagaatcttccctgctaccctatcggaagccgctcagcaatggtatttcaagttggctcctggaagtttagattatggaaaaccttctcttcggaattccatg

SEQ ID NO: 291045 - DNA, 522 bp, Cannabis indica
tttcccaggtccctatcctgattctgggtccaggtcccaattattgtcttggtttgggtcccggtctaggctcgggttcgagtcctagtcctagttcggttataattccatttgcgattcttagttcgagtttgggtttatgttcggatcggagttcgagtcctggtctgagttttggtttgggtccggatttcagtctcggttcacatcaggctccgggtgtgggttcgcgtcttgggtcttggtctaggtttggtccgtgtcccaagttccaatctcgatctaagtctggattcagttttgtgtataggtccttggttctgatcctggtctgggttcgagtttgggtacgggtcctggtctagcttttggtctaattctaggtgtaggtttgagtttgggtcggagtctgtgtccgtgtttgtgtccaagtctgaaccccgatctgggactagcttagggtccaggtcaaagttcgggtcccgagtgcgtgtccaagtttgagtcttggtcaggatctcg

SEQ ID NO: 291046 - DNA, 656 bp, Cannabis indica
tttaaggagggagtacctggtgtaagctctccaccaccccctggcaccttggtgctaagtgagctactactagtcaatgggactagtagggcgggcatatgagaaccacgaggggactcatatgtctccatgagttggaatactcatggacactatcgggccgacccggtagtgcatctaagaatgccgcctgaggttagcaggtacgtttccattgacttgccggtatgctgcttgcacgagacgtggcccaaacctcttagagacgttgtggtgcgccttggccacgagtctcaacacgagatgacacgggtagtcattcgtgggctagtttgcatacgtccatgggacggatgcactatgctggaaagagacagaggtctagtgtatgcaactagtttggtgcttgtctcaagggcttgccaacatgcatggaggcatggcaccttgaggattggtccatggacgtatgggggtccttgggcgacgagagagattgttcggacaatatggaatggggcatgattgaagcgttggcacgtcggcttggtgttagcatcttgtcacacatgctaccttggtcacgagtgacgaggtgagcatcggtgttaggatttgtctcatcatagtgggaacctatgggacagtgtgagtat

SEQ ID NO: 291047 - DNA, 610 bp, Cannabis indica
aaaaacataaactgaaaactaaaaaatagacccaaatgatatttactatattattttaaaattgtatgtattatccctgttcttgctataagagacataatacttagtaacttagtaaatttggactgatttaccttgtagtggtttagataaggctgccttcatttgtttgtctgaggagaaaatgactgctccaaaaccaatcacattttgaggggttgatatcgctgcatccacatatagtttatagctattgacttctgtctctgtattactttgctcactagtacacccagttgaaaccccttttttggttttatttctttctcgacagatttcattataataagaagagatccatatcttgatttggtgtggagttcttatggttcttccatgacttttcttatttctttcaaaccatattgtccatgctgaaattaacactttctcaaaatcttctttttcaagtatttctgatgcatacagaagtactcctttgaaggtcaggtcctcttttgggcttgcaagaaaagggaaactcatttccttccatataacttgtgagaaggagcaccaaaaaattgcatgtgcattggtatcattcccg

SEQ ID NO: 291048 - DNA, 554 bp, Cannabis indica
aagcaatatgtcaggaatcgtgcccgtccggaaggctctataactgaatcttttgtggttaatgaggcattaaccttttgctcaatttacttttgagaagtggaaactcgattcaaccgtcctgaccggaacaatgacattgtcaaaaacatgccaactcgaaaattttctgtattcaaacatgttggccgacccctaggtatgaggacagtcgacaccttacccatgcaaagcaagcgtaaggcggagtggtacattttgaacaattgcacaaaggttgagccgtatatcaagtaagtataaattccataaacacagacacacaatagtcgacttcacctaaaaaattcttaacttactaagtgcattatattatatagtgagcacaaggagttgcttcaagcaaggggtgtaggaaatattaaaaaagtacaggagactgagttccctgaatggttcaaaacttgatgtaacgtccccgcttcaagcctccattgggtccttacacccacggaataaatggctcttatacacgagtacgtcactctggctgc

SEQ ID NO: 291049 - DNA, 587 bp, Cannabis indica
aataccgaggtattttggagtactcgaagttgaccaaatatcctaaaaatataaatttcttaatggctaaaaaatgataagataactatcaataataaattttttattaatattattattataaaacatatttgatacgtttatatagatatgttatatgttttaaaaacataaacagaaggaacgaacgaaactcttttctctcagttcaatgaaattttcatctccttttatctatttcctttaattttgaactcaaaatctagcgatctgagctttggtaggagcgagataacaaatctttgaagatggaaagcttaaggtattgtttaatttcattttaagcttagaacgtattagttttatataagggttacgtgaattatgaaaattctgactttatagaattgttctttcgtagctatgggactagtttcgatgtttacttgttgaatttgaggtgattttgagttagaaatcgagtttgaaactttttaaagcttagtccgaacattaatgacattttttatttaagggctcgattttaatttttgttatgtaaggatggcaatatttatggtatatat

SEQ ID NO: 291050 - DNA, 482 bp, Cannabis indica
taaacattaataaatgaagaacagtttccagtttcattcactaaatacagcaacgtacgcaacttctataatgcgagttggctgttcacattcttgcacaagcttcgcaggcttagaatgcattcgagactagttgagtctaagatgtctgcggtcttgtacagtcgcttttacgaacatcatataacgagctgatagaaccaagacatgcgagtctacatcggtttatcgaggctattgggtcatcgggaccagcttgcaacatagagaatcgatctctatgttttcgcaggaggatcgtggagatactcgcatatatctttgtatatgcgggttaaatccgttccttggtcctacacaatgcgattcatacgaatgcgattagacttggtcatatccgcatcatctcgttgagtctagttcaagcgaggtttgaactcgaggagtctctcattgacatctcatatttccttggggaaatt

SEQ ID NO: 291051 - DNA, 474 bp, Cannabis indica
agatgccatggatggttggactttcacttgtgcttgggttcgtggggcttttgggtgttgtgaccactagggtggagggtcgaaccttcgatattttgttgagctctcgaagctacaaagacaaagaccacgatagagagatgaatatcgatataagaggcatagacaataaaatgagtcatcgaagtatgattcttttttatttcttcttcttcctgaaaatttcaaggttgggttttgtgggttttggagtgctctgagttcagttttggtctctgtttgtgctaatggtggccaaaggtgggtccattgagtccacttgagtgaatcgcaacatcgattgaggggttttatttatatggccagacatcttagctttgggttttcgaaaatccatggtgtttattgattgagaaaatatcgtggcattggaggtacaataaaaaaaaaattagaatttagagttttaggatg

SEQ ID NO: 291052 - DNA, 577 bp, Cannabis indica
  modified_base (41)..(41): a, c, t, g, unknown or other
tatcatgcagtgctatgctcacaccagcagcagaaacctanacctataagtgttatctcacacaacagtcctatcactatcaaatactaacaatactaacataaagcaacaatccaccaaagaataaaacatgtaaatataaacccgtaatacagttgtatgtttcaacatatactatgtgcacagatgttcactcttcttacctcagttgttgagaacacctttttgctacttcaagcacctcaatgaattttcttgttgagaacaagatcctaaacattcattaacacaacaatacattcaaaatacattcaagtatgaatctctgtactcatacagaaacctacgtaaaaatacgtaacacataagctaatttcacttgcatgccacaccatacataatcatttatcattttgattcacacaaacacatatgatgtactcaaacgaatatttttaacgtaaaacatgaactcatacaaatattttttacgtaaaaatttactaaaatactatttattaacaaaatatacaattatgtaattatttaccaaaatcagaagctagcatatttttaa

SEQ ID NO: 291053 - DNA, 639 bp, Cannabis indica
ttattgatgttgaataaaatggattacattgaaatggagttttatttagggcataaaacccaacacgtcctggttacaggcatcgactacgtcactgaggagcttgctgaggcggttcctcataggaggcagggtgccttggtccccatatgggtgagtcctccgtccaagattttggaggcacgcctccgtactctcgactaggacgggtacctgggcgagctagactgcttcattcccgcccacgaaaattgcgccttgaaccctagtgaggggatgtgtgcctggtcgggggctcacggccagcaaggggcgctgatgcccttacacaagtacttccgggatgtggtggacttcttcggcctctgcccgacccagatcactcccaagggcattaagtatttgtccgccctcttcttcctctatgcttcccaggaatggggtggtccctctccccatgaggtcgcttggttcttcgacctcaagtctaccccaagcaaggcaggtcggcctattttacttctctcagccaggcttcaagtggttgagcgggacggcaacaaggccatcagtaaaatagggcattttgttgatgagtacttcattgtgaaggatccgaacatcacccggactcggttt

SEQ ID NO: 291054 - DNA, 169 bp, Cannabis indica
taatgaaaaaataaatgataatggcctacataagtagccgaccagggctagggatattgggccccacttttgcaattttgctgttttatcatttctacatctcattttctcaaaaataccaattttccaatttaaccatttaaatgccaattccaactatttaataact

SEQ ID NO: 291055 - DNA, 686 bp, Cannabis indica
gtttagtcttaagtttttaattaatttagtaagtttttaattatttttgaatttattagctttattgtaattttatatgtttttgtgtgtttttataattattttattataatatgttatgtggtatttatttttaattttattttagtttctaattaattttatgtatttttaggtgtgtttagaagaaaaagattgggattaaattgaagaaatattgaagaaatggagctaaaagtgcaatttttaaaaagaaatctcatcagccttatgcaaggcccacttgcggtcaaagtcagcttcccatcgcagccgtccacgtcctgatccgaaggtccagaagcgtgcgtgtagcacaccccagacagcagcaagtgggcgcagcagaagcccctttcactcccagccgcgtggtccccacctcgtcagcgtacacccaaccagcgcacgccacctcacgcacgtcagctccagcccacgaaccagcgcctgccaagtgtccctgcagaagaaaaaaaaaaaaaaagtaggctgttaattgtttgtctacacccgaaaattacagtcacaaacaccaaaaatccatattttctcccacatattacacataaatactctatttactcttcccaatttatttcaccaaaataaacatttccattttatttttaccctatcttttcact

SEQ ID NO: 291056 - DNA, 547 bp, Cannabis indica
gatctattgtttgaacgggaggtacatcagcagtgtggtcggaggtaagcagccgcctcagtttcaccataggccacttgggacgtgcagaactcaaggtacatgtccttagcatcacccaagtagcaaagttggcctgaggattagccttccaaaagtcaaagaagagctcaagaccagctgtctctagagcattaaccttctctttcaacctcgccacctcggccgaaagctcctcctccttagccttcttctcctcctccacccgatgaagaactgctcaaagagaagtcctctcatcctgaagactgttcacttcagcagatagggtcttgatggtctcctcaagacgatcagaaacctcgagatccttagtgagctcagttatcttcttctgggcggtaaagagcttcttgttggcttcacccagctccatccggacaccttcaagttcttccctggcgacgtcaacatccttcttgcccaagtccacctccgccctcatggtgtcgcacaaagccgtgttcttggaagcggtagacttagc

SEQ ID NO: 291057 - DNA, 468 bp, Cannabis indica
actacctccagacagagaggtggagttcatcatcgaattagccccagggactaatccaatttcaaaggctccatacagaatggcacctaatgagttaaaagagcttaaaatgcaactacaggagctcttagacaaagggttcattagaccgagttactcaccttggggtgcaccggtactcttcgtcaagaagaaagatggaagtatgaggatgtgcgtggactaccgtgagctcaacaaggtgaccatcaagaataagtaccctctgccaaggattgacgatctctttgatcaattgcaaggctcggctgtgttctcaaagatagatttaagatctgggtatcaccagctgaaggtccggaaggaagatatacccaagacagcattcagaacacggtatggacactatgagttcttagtaatgtctttcggactaactaacgccccagcagccttcatggatatgat

SEQ ID NO: 291058 - DNA, 608 bp, Cannabis indica
accaccatcttccgcttatagtcgagtcgttgccccatacttagacagaaaatccattcccaggattatgtcaaaataagacagttgcaattcaattagattggcagtcaattcacaaccgtcaatccagaaggaaaaagaccgaatccacctagtggatactataaggtctccggagggtaacatggtaccgaaatccgaagcataaatatcacatggcttatggaaactttctataactctactcgacacataagagtgagtagctcccgaatcaaacaacacagtataagaacaaccattaatagacaactgacctgtcactactaacagactagcatcagcgttagcctaagtcatagtaaaaagtcaccccgagttctgagtagcattcttcttaggttcctctttcttggcctaaggacaatctctgataaagtgggccaccatgccacactgaaaacattttttggcccgacactcacctggatggtgtttcttgcatttaggacactcaggataagatcagaatgaggacccgcgccctgacggccacctctatttccccaaaacattcccattacctcctgatgctccggaagcttcag

SEQ ID NO: 291059 - DNA, 483 bp, Cannabis indica
taagcgtccatgaagcttatatttcatgccctgctgttgcagctacgagctaatcgattcttggaagtggaaaacagtctttagggcatgctttgttgaggtctgtgaaatcaataaaaactcgccatttcttgttcgacttgggcgctagtacgggatccgagacccaagccaggtaaaaagcttcaattatgaagttgttattgcgcagtttttcaacttcatccttcagggctactgctcgttctttgtccaacagccttcatttttgttgaacaggccggaagttaggatcgatattcagaacatgtgaaataatagaaggatcgatttcgaccatatccgcatgtgaccaggaaaaaacgtctaggtttgctctcaaaaattttatcaattctgattttacttcgagtaacaaaccttttccgatctttagctttctggtcgggatagctggatcgatctcaatctcttataattctt

SEQ ID NO: 291060 - DNA, 95 bp, Cannabis indica
ggccatggtgtgtaatgggcccaacttggtttttgcagttttcacaaattttaaactagacatagtgtaactttataattataattgattaatca

SEQ ID NO: 291061 - DNA, 512 bp, Cannabis indica
aaaataatttccaacaatttaaaatttaaaaaaatcacatagagctcagaatgagctttccgacgatataaagaactcccaaaacggagtctcgagtcaaaagttatggccaaaacaaaattcagtattttccccgatacaatccaaccggaattccggatggaacagccctgaaccaaccggaattccggttctctgggcagcaacaacacaaaaagtcataaattttaaacctccaaaatctactcaaatttttcccaatcaccaccaaactttccagagcatcaacatattacgtattaaaaatattctacaactcaaacaccataatttcaccaagaatcaaaaagtattaaagctccaagcttgagttccatgaactcaagcttgcttttcacaatcaaattctcaatttaccaattacatatgctagataatattatagggtctaaaacacatatttatgcatcaaatccaacaataaacccccaaaaatcagattacaaattcat

SEQ ID NO: 291062 - DNA, 510 bp, Cannabis indica
tccagctaatctcgatctgtctgcaagtagggctggcacacgggtcgagttttcgggtttttccgggtggtcgggtaggttttcggatgcaaaaatcagcagcaagaggaattattatcatatataagcaagagaactgtcatgatcaggctgtggacgaccacgagtcggagttggaggtctttgaatgtttaactcctgcagaacaacaaaaacatatgtatgaataagaataacagatgcctgtttcgtactggtcgggtatcgggttacaacccgactaaataaatgcattgttttaaaacccgaacccgacacccgtgctgtgtattttcgggttagacccgacccgaccacacgggtttcaaaattttcggcttttttcggtagcgggtcggggcgggtggtcgggtttttcagatttgcgggtataaatgttcagccctatctgcaaggtgggataaataactcatgcatgtgagatttttttatcgtttttttaattttgat

SEQ ID NO: 291063 - DNA, 485 bp, Cannabis indica
gagggtggcggctatggtatagaataggaggctcaactttcatctaacagacttaagtgtgaatgtgagtcatcactatctatttataggtaaccacaaaggtttaggttagaattatttggcattaaaataatgaaaaaataaatgataaaatccattaagtgtggccggccatgggctttggatattgggcctcacttatgcaattttcttgttttatcattaatgcatctcattttctcaaaaacgccaatttttcaattcaaccattttaaagtctcttaattaacaaataaaacctagaatctcttttcttacaatttttcccttgcttagtgaaaattcataaagtagacatagtccaattttagaatcaagcagtatggtctcaactagtatggggaccatgggcctatataacaaagcttccaataagccgaaccgaatttaccaagtaaatttcctaacttattaagtccttattg

SEQ ID NO: 291064 - DNA, 590 bp, Cannabis indica
tcaatcagaagaggagcatgagttacatcttcagatgttttgcaatggctttgggacacaagcttatgccaaattcaagaaatgtgaattttggctatcaaggtgtctttcttagggcacatgttagcaaagatgggatcaaggtggatcccgggaaaatagaatccgtcagggattggcctagactgaagacagtgacagaatttagaagcttcttgggtttagctggatattatcgtaggttcgtgaaagggttttctaagatttcaacaccctaaccaaacttacgaagaagaatcagcggttggtttggtcagataagtgcgaagctagtttcaagagctgaaacagaggttgattacagctccagtgctagctttcccttcagataaagaaaaatttatagtttattgcgatgcatccagacagggtctggggtgtgtgctgatgcaagctgattgagttatcgcttatgcctcccgttagttaaaggattatgaacagtgatactcgactcatgatctagagttggccgcagtggtttttgcattgaagatctggcgacattacctttacggagaaaggtgtga

SEQ ID NO: 291065 - DNA, 517 bp, Cannabis indica
atgttttttaacatcctaaatatgaacttctaaattgattataaataaacacatataaagtatgagaaactttacattgggtgcagcggaataatatgtctccttccacttagatctctaacccttgtatcctttctgtcgcagagtatcaccaagatctaagtccgaatgtccttctgttgaatctagattcttcacgatcttccacactatgattgaggtaccacttgctgtgtgtaggcactactctatcactaaggggttcgaaacaataacgaagaagaaggaaagagaggtggcggctaggctagacagaaggctcaggtctttcgatgaaaggaataagatgcataatcttttcctgaagccaaaactacctatttatagtatgccacctagggttaggtttgaattatttggcattaaaataatgaaaatattaaatgataaatcctacataagtggccggccaaggcttatggatatgggccccacttttgcaatttgctgttttatc

SEQ ID NO: 291066 - DNA, 784 bp, Cannabis indica
attatatcaatgatgtaatatctcaagaaaatctaattatgtgtaatgagacatattttattagatataaaataatatgtgtatttagagcataaatgagtgagatttataatcttgccaacctaattatgtgagaattggatattttaataaattaattatgtaaattattaattagtagggtgcatttgggatagtttttaagaaagctagacgcaatttttttaagaagctatcattcaaaatgtgtttgataaattagaaactagcttttttaatcaatttaaaaaaaattcagctttgtgcaaaagttggccaacaccaactttgggaaattagcttatacgagaagctattttgttggtttaatgaatatttcacttgacaaaattaccctcattctaattataaaattcatttttttaccattttatttttaagattctcttctccccaatatatctttctctatcatttttatgtaatagatgatatttatataatttattttattattattattattagtacaagcctaattaattattttattatatatataattttttaaaaataaatattataagaaaaaaattattgtaatttgtaataaaataaaaaataattataaatatattaatatgtatgaatttgtttaaataaattagataacaaatatcatacttattttggtaattgtatatttaatagctattcaatcatctagcttaccaaatacttatatacagtgacggacctaaaaattttactttgtgggggctta

SEQ ID NO: 291067 - DNA, 1231 bp, Cannabis indica
ttcccaatctcaagactttgaaaggcaaatggatttgcaaggagtacggggggatgtatgctggagaatcttccccgccactctgtcagaagccgctcagcaatggtatttagtgttggctcctggaaagtttagctcatggaaaaccttctcttcagaattccatgcgcaattctcctcctcacgccatctcccattgcatttgggagattttgtcgaagttaagcaacgaccaggcgagccactccgggcatacatcagaagattcatgacagaggcgaccaaagtttcacgggtaaccgaggatggaaagttatccgcgatactggggggcatcgaagtcctcggtgaactttggaaagatataaggaagaacgggccggtagactcaatgagtgatttccttgaccgagccgaaggcttcatcaagctcgaagaagccattcaacgagcggaaggtgaacaaaagccgggcaagtcaaaggctccttccactgggacatccgcccaacttcccaactattcaaataattcaagctcaagtggcaagcgttccagcaacaaccacaagcaaggaaacaggaagaaaggaaagttcactgataaattcggacagactccccgggagaatcatgccaaatacactgcattcactattctaactgaagatacagaaagtgtatatatggcaactctgtcgttgatcccgtacaagaagcccatgcccatgaagaaatataccaacaaaagggagatgacaaagttttgtcggttccacggagactacggccacgacactaacgaatgctacaactcgaagcgggaaattgaattcctaataaggaaaaacaatttgcacctgaagaagtatgtcaagacaaaccaaggtcaaaacaaccaagatttgctacctccactagtagatagacacttacaagtcaatattggaggcccgcacattgctggagattcaagcaaagctcgggagaggtatgcccggacagcacagcacgaaaaagaagaagtcatcctggtcgtcaaagaaaggaggcccaaagttccacgagcaggagggccaaccatatccttcaacgatgaagacgctgtcaaagtcaaatttccgcacaacgacccgctggttgtggaagtccagatagccaataaaatggtggccagaaccatgatcgacaatggagcttcttcaaatatattgttcaagactgcttatgag

SEQ ID NO: 291068 - DNA, 546 bp, Cannabis indica
agtattgctcgtcctcgagtaatgaaaaacaaaaagaactaaacaataagaacagaaaatgacagcgacactaacacgcttgcagtagagaaaatcttgctctttcacacttggtctagggacgaaatttgctctcagaattagatgaaatggaaatgtaattggcagtagtgaatatgcctcgaacttgtgtgtttcaacagaattttgcatgctatttatgtccttaaaacttatcaagagtaattcgatcaaataagtgtgcaaatacttcccaccaacaacttgaatttctataacaaccacctttgatcctcaagtttaaaggtttgcttccataagttgaattagtgcaatcctctccactaatgtagcttagctttacaacttagatcaaaaggacttgactaggcttgaatgttaggcttgggttagggtatggtataggatgtatttaagctagctcaacacctaaccacttcacttgtcaaaaaccgagtctcttccttaaaatttttttttctcttgaccctcttccctaattca

SEQ ID NO: 291069 - DNA, 693 bp, Cannabis indica
tttgatgtctaaatatatctaggccatctcgactaagtaagattgcttatgggtttggtggagttaatgcactttatctgaaggatagtgacttctggatgataactccaatccatgatgcaatatggtactttaagaaacatgtcaaacttatactttacatcgacaaagagactatgattaaggcgggtgattgagaaaatacaaagttgaaaagttatattgctctctaatttacaaatataaggtgaattattattaaattgtttggcataaacttaatattccaaaacacaagcttattctctgggaagccttgaatagtggtaggccagttttaggtgcattttataaagtgttttagaggtgtgtttcaattttatattcattttgtataaaattatgcttattttctatttattttatatttaaatggtaaaattcataaattatgaattgaaaataagaagaaacatgttaaatgagatgaatataatgaattatcatagaatatagagttctagggtatgagtggtaaaaaattctaagttttggatgctcacacgctctgtttgtgatcgaaatcaagtctaaagcttcaagagaatttttgactattgtaatatccagtttatatacatatattggtatttggtatattaagtgtgatacaattaaattattattattatt

SEQ ID NO: 291070 - DNA, 536 bp, Cannabis indica
gcgccaacctgtcagaacacacctgaaaagactacacagacatactatataataatatagttctattaggcacgtaattaaatttaattttatcattttaccctcctcgggttataattactaaaatacccctggctcaccaacgtggtcttaccagataataaatcatattaattcacatatatcgaactatataatattataattccacaattattcataattatctaattagagttttgctaatccatttcttaattctagggtaatacatcgtatttcttgaaacatttgttgccagccggcaggagaattagcattgccaacccccgtattatcccccagattctgcgaaggtgcaggcggtgccgatggattggtttggtcaaccccaggctctacttgctcactctgtggtctagatgattgcgaagggtccatttttacaagtacccctgtaatcaacaaccccaacgagttaagcaccaataccacacttatgcacatattgccttaaaccctaactcaactattca

SEQ ID NO: 291071 - DNA, 926 bp, Cannabis indica
ggcacccgcatcatcccattttggaaacccctcagggataaatggacaagctccctcgcactccgctccaaccgctagcctggcaggcccttcccagggctcaaggagtaaacgatcctccaaaggcagcacccggacggaggagaaacgccaaaaaagggggtacactccccagtacacccagtacacggagctgacggactcccaagagcgtgtgtactttgctactaggcaaaatacgcactaccggagaccacctcccttatacaaggacagctcccggagggatccaaacaaaagatgcgagtaccacaacgacattgggcatagcaccaacgaatgcaagaatctcaaggacgagattgaaaacctgatccgattgggccacctctatgagtggatcaagaatcggctgcctcacctcaatccgggccaggcgacaggggttgtgccacagggaacaccagggggtgcagcaggagtattggctccagttgctcccgccggcgatgcccagcacatccccggtctgccgcccagacccaacgggagagtagccatgatctccggaggaccccatattggaggaaccacccgcaaagaactaaagcggtacgcgggggccgtaaagcacaatgaggtttgggaggttactcaactcccagctcaaaggccccggctgatggatcagcccatcacgttcacggaagaagacgccaagacggtgcgcttccctcatcatgatccgttggtcattgagacccccatcgccaataaagtggtggccagagtcctgattgacaacggaagttccgtgaacctacttttcaaggaggccttcattgcaataggcctgacggaccgagacctctcacccagcggttcccaactcacagggtttaacagaacaacgcttatcccaatgg

SEQ ID NO: 291072 - DNA, 500 bp, Cannabis indica
aattctaaggcaaggctacttctggccgacaatgattgaagattcgaaagcctacgtaaagaagtgcgacgaatgccagagattttcaaagataccaagagctccgcccaacgagctgaagcagattcaaagtccatggccctttgccatctggggaattgacctaatcgggcaattacctaaaggtaaaggcagagtgcagtacggagtggtagcagtcgactactttacaaagtggactgaagccgaaccagttgcaactatcacatcaaagaaggttcaagactttatagtgaagaacatcatatgccggttcggactaccttacaaaatagtctcggacaacagcaagcagttcgacagtcaatctttcactaatttctgcgtgaaccatgtcatcatcaaaagtttctccgaagttgaagcagtcaacaagaccctgaagaacacactaaagaagaagctcaaagatgccaaaggaaattggccggaagaactcc

SEQ ID NO: 291073 - DNA, 554 bp, Cannabis indica
gtgaactttctcttatgagaattgcttagattggtcaccatggagatacttcttgctctcctctttttcatgtcctcttcttctttggcaagaataacagtcatctcctcaatggtccattgctccttttgagcattgtagcttgatctgatcgaatcaaattgaaaaggaatggtttccatcacaaaccacaccatgtgatcctcaccaagatccaatcccatgcccttgagcttttggttacaatccatgagcttgtcgatgtgacctctaatatcacccgtatcagcataattagtgtgatggaacaatgttaagcactcatttttctcattctttgagaattccttgtacttttccttaatggcagcaagaaaatcctttgcattttcaatctgagaaatactatcacgaatggattcatccatgtgatacttcataagcatcaaacaacagcgattggaatgctcccaatcctcataggatttcttatccttttcattggcatcatcagcatgtttaggcagtgcatccattctcaaggccaaatccac

SEQ ID NO: 291074 - DNA, 503 bp, Cannabis indica
atataaaaaataaaaaaaaaataaaaaatactcattaacatcttaaaaaaattcaagtaatttaaaatcacgaaacacattatctataacacaaaaccgacaaagtcataataaaatatgaactaataattgtctaatcttgaagaaaactattaaaaaagttctaattgttaataatcttcactcattatcttcatcgtcgatttgctctccatatatgatcagcaatttcatcacggacattagccatttcacgaagttgatctcttgaaatgctaaactcaacactatcattcaaagtttcgtgggtgctttgtatagtagcatcttgtacttcaggaatgtcttcatctccatcaaaatatacgtctttttctgcatttgtccttataaaattatgaattccacacaagcaatcacaatgtacttctgtatttttagatcataggaaggcatttgcttttgttaattccatttttggcatatttaattgacaaaaatat

SEQ ID NO: 291075 - DNA, 598 bp, Cannabis indica
atttttattatatttagtatagttgaagtttaaaatttatactatattattttattattattatatgtttattcagttatatttatcttatattaatatttttaaaattaatttaacctatagtatttttaacttgaaatataaataatatattttattttttaaaatctaattatttgaatactaaaaactaacattaataattataaaaaaaaaatgaaaaacgatttagacgggttaacctgaccaaactgacgaaattattagacgggttgaattttttttaatttttaattaggtggtttacaattaaatatttgcaacctgatatttatattgcgttaataaaaatatattataacccgaccaaatcgatccacgtatatatagtatatagtatatagtaatgttgcttttgaaagttattattctctccaaccattttcttcttaaaggggaagtagatgataattggaccacagtaaccaatttgcattatccaaggttggtaattaattactagaaattaataaagagaaataggaaaaaaagaaaaagaaaaagaatttttcatttaattagttaagataccaattaa

SEQ ID NO: 291076 - DNA, 521 bp, Cannabis indica
ttgtgcaacaactcttttccccagcaaatgctccgccagacaaacgaaggtgagtgccctatcgaactatcaagaaaagatgagtgaggaaaatacctagcagacaagatttttgacaccgttgagtttggctgtttgaggatgcgccaggcttgcttagcaagtaaagcttgattgaagtggaccatggagcgaaaacctaagccaccatccttcttggagcgacagagttttttccagctttgccagtgagttttaggacggttgttatcattgacaccccaccagaaattggccataacagattcaagagagtgacaggtggcaaccggaagacgaaagcaagacatcgagtaagtggggatggcttggattacagatttaaggagagtttccttaccccctttcgagaagactttattcttccaattgtgaaggtgaccccagaccttgtcatgcaggtaatggaacaattgcttttttgttcgtccaatgtgctgcgggagaccaagatatttttc

SEQ ID NO: 291077 - DNA, 777 bp, Cannabis indica
  modified_base (10)..(10): a, c, t, g, unknown or other
gattgatcgngttctgctaatcagatggatgaaagtttccctattgccgaggcagtattcatgaatgaaggaatttgtcgaccattcacctattgttttaactgttcataacaaggtggtgactgggtaggaagccatttaaatactttaaaatgtaggaaactcatcccagctatactgagttggtgaaaagcacatggcaggggcagtttaaaggaactaaaatgtaccgtgttgtctctaaattgaagaatatatatgaagatggcttttaagggcttaaattctcaacacttttcagatatccaagctcaagaagttcaagcaaggaatactcttgaagagtattaaaccaagctacaccagcaaccacttgatactgggctgcaacaaacagaacttgaagctaggaacaattatgttacaacacataaaagtttcttattatatttgcagcagaaggcaaagttaagttgggcaaaggacagagatgagaattctgccctgtttcacaccagtatacaagagagaaggcaacacaataaggtgttatcaataataaatgcttatgggaaaagggtagaagagccaagagaatgtaacgccctgacacacaggaacgccacgtgtgtgtgcttttataaacttattattattaatctataaattttagaaaagtgtggtttaatttaaatctttaattaaattcaatataaagactttcattttaaataatgtcgtaatatagggatcccctgtttataaaataaaatattc

SEQ ID NO: 291078 - DNA, 615 bp, Cannabis indica
atcaaacaatcaaataaaaaaaaaatacacacacacaaaaatactaatcacaaatataatcaaaacaacacactatgcataccaatattaaaaacaaaatataagtgtaagtttcgaacctagaaacaaaataataaaaaagtaacttaaaataaaaaatttataataacataatgaaactattttttttattcttttaatgaaattattagtttctttcaatgttgatgaaactgatttttaaagtttgtattatttttagattatatttttttaaattgttttttttttttttcaggatgatgttgatgaaactggtttttttttctgctgcttttaatggaataattagtttttaacacaaaaacaaatagtagtttaaataaaaaaaaaacaagtttaatttctgtaaaaaaaaaaaaaaacaaacatctacagttgagatcattttttttatttattttagtgttttatttttaaaaaaaaaagaaacacaaatttaatgttttttatggcattcctcatgactttttcccatatttgtaagtttttttttttttaaaaaaaaatgtcatatttagagtaattaagtttttatgccatatatatcaaaac

SEQ ID NO: 291079 - DNA, 504 bp, Cannabis indica
tttcgggcatctttaaaagtcttagggagctctgcttccaggatgtgcttagcacatggctcctggtcttcacagtctgagtcggagtcgtcccctttctgtctccgggagactcgggcgatatcttttcggagtatggcgagttccgccatgattccttcatttaacgtcccgtggagaccgcgggcccgtatttcttttggtcaaggtgatcccagaggtcaccttgattcccattaatttgatttctcaaatcaacgggaggaaatctctgtcctcttcttcctctacctccgggctcctagtgcacggaaatgctttttcggtcctctcggtcctgagggccaggacaatctttttggagtttgcccctctgcagacctttccctttcaggaaattagagcgaacctttcgcggatcctgcacctttttctttctcccaggggtacaggtaggatttttcttttggttcccttcagcgggataccgtatagggctaggtt

SEQ ID NO: 291080 - DNA, 603 bp, Cannabis indica
acagaagtgaacattgtgtacttttgccactaaaaaaaaagattgggtacttaagtcatataaatatggaactttggatacttatgccgctattttctcattaaaatgtaataacatgtaaaaattattattatatatataaattaaaataactatattaatataaatatttgtataattggtatattttatatactatgtagtatcaatgtttaaaatcaattgttcgtatctaaagttatatgtaatttacacaaagaatatattatacggttgataatgcacttttttattttattttcttaattagtgtaaaaaaaagttgcacaccgtcataattttttaattaatatattattagttttaaaatatatatatatagaaataaatagagaaatttagatatgaaaagtttttttatgaattattaattaattaatatttagtatatttgataaaatatctaaatatcatgttataatatgttttataagttattttcgtaataaagtttataatagtgtatgattatgtaaagtttcctaaaaaaaggtaagactatcctattcttcagccaaccaatagagtcaaagactcttgggg

SEQ ID NO: 291081 - DNA, 911 bp, Cannabis indica
gcatttgcctgaagaagcgatattgggtggcccggtctttatgagatggatgtatccttttgaaaggtacatgaaaaaattgaagaattatgtgggaaataaggcacgtcctgaagggtcaattgcagaaggttatgttgctgatgaggcagtaaccttttgttcaatgtactttaaagggtgtgaaacaagatttaatcggcttgatcgaaatgaagatgcgccttctgtttgtcgctatctctcagtttttaattctcaatctcgtcctttaactagcggacttatcaagcctcttgatcataccagtcgtgaaaaagctgagtggtacattcttcaaaattctcctgaaatccaagcttacttagagtaagtttgttacatttttataaattattttattaaatttttagtttttattttctatctccttctatcgtatcttgacattatcatacttcacagtgaacatttggacaagatcaagcatgaaaatcctaatggtaatcacgatgccttgcataggcaaactttccgtccgtggtttcacaagaaggtataacgacaagaaggcaaacttgccacggaatggtatgtattaattctttaattgttaaatgtttcataaaaaaaaattctttaatagttaataatatttttttttataataaactaatttaattgtttatatttgtataggggggtcctcctggagagcatgtagttgaagcatggaaggagatccatgtgaaaaaaccgtctggaactttcgttaatgaattagctgcaaaagattatgtaagtgattaaaatgatttattattaaaatttatattttatattaattacatattctaataattttgatttaaataggaggaactgatcaaggagcttgataggaagcgact

SEQ ID NO: 291082 - DNA, 568 bp, Cannabis indica
ctcctaacacattcttatgaacacaaataagttttatgataaattctaatatatatttttttaaaaatatatatttatagttaagaaaaaaaatatatatttatttttgaaatatacttttatttattgattttttattattgatagaagtaaaaataaaatcttgtttaactgtgttaataaatattataaagtttcatgtaaaataattgttggattaaaatcctcaatatgggctcatatgtatattattgtattgctatttgatgtttggcccaaaataaagtgatcattttagtaattgtgagtcattgggtaataaagtatcatggactaaatgtgtagataccttaagcgatatttctaatttattgaggggctaaattaaaaatacttaaaattaataacctatctatgaggttataaattggtagtggtcctcaaaaaacaagagtcaatttctagggtgtctacacatttggtaccctgtgttttacctaaatacaaatttggtaccttgtatttttaataatgcttatttggtacctgtattttaaaattatactta

SEQ ID NO: 291083 - DNA, 719 bp, Cannabis indica
ggtttattagagaccgaaggtcagcttagggattttgcatgtatttccttttctgtcctttgtgttcaagttgtatttggacttaatatcagtgtaagtggaggtttaatccaacactctctagttctctgaatcgctctcacttactctttgttttgaatttttcctgaggtacacactagtgttcgaaaagcagtgaacgacacaagataggttgatgggattagagtactatagcagaaagatgattttacttttctttttttacaaaaaaaaaaatgtgacttgtttttattctggatttggttagtcaaaattttgattttttttattggttgattttgatatatttaattgtgaaaactttgatttaatagataggaatgtttttgtagccatagattgatagatttaatatttataacacagataaatgtataataatagttagaaaatgtgttccatcatattatttgctatattattttaataatatttgacaaatatatttttatatataaaaacaattaaatattagattctttatccttttctctttccatttttttttttttggttctgttacatttcttcttcttctatggtattgtactacatttttccatttaaagttttaaaaaaggtcaaactgtagtaatgtaatagttacataataaatttgtgcacttggatgaatcataatggaacttggatgttgt

SEQ ID NO: 291084 - DNA, 648 bp, Cannabis indica
tttctttcatctctctctttgtcattttgtggacattggccctttgagaatttgtcacctttcactattggtgcctttccaggtgaacaagtatgcatattgaatcttttcaaaatccgatcaatataagttctttgagacaaccgaagaatacctttagatctatcccgaaggatctgtatcccaagtacatatgaagcctcaccaaggtctttcatatcaaaatggtcagataacaattgctttgtctcagacaacagatttttatcattagaagcaagcaaaatatcatcaacatacagtaccaggaagatgaagctgctcccactgaccttcatatatatacattgatcaactttgttttccatgaaaccatttgcagtgacaactgcatcaaacttgagataccactgtcttgatgcttgtttaagtccataaatagacttattgagcttgcaaaccatatgctccttgccaggctcctcaaaaccaacaggttgagtcatgtagatatcttcatacaaatctccatttagaaaggcagttttcacatccatttgttcaagttccaaatcaaaatgagcaaccatagccatgatgattcgcaaagaatctttggtagagacaggtgagaatgtttctttgtaa

SEQ ID NO: 291085 - DNA, 589 bp, Cannabis indica
ccacctttctatgcataaatatagattgattaaataaaattgctacacttaaatgtgtacaattcaaattaagatataaattatttaaggtatatgaaagaattttttttttttttccaaattagttaatatatcaaggatttttttcaattacttaatgttttagttaagttatatatccgtgccttatttttaatgtactcacatccttttagattttagatagtatggaacaaaataagtttaacaaaattatatatattttcaaaataggcaaggcatagttttaagatttttttttcttaaacaaaacagatttttgttaaaataatttatattttcaattaattaatttcattttttttttttttgcaattagatttttactttcaaaatttaaatttaaaatttagttaacttttaagtactctttctcatttctcatgtatttaagttttataattaagaaataaaaaataaaaatatctcaactaactatttctaaacctttatttatatatgtttttgattatttgaatctattttgattagttttgatctaatatctcaactaactatttctaaacct

SEQ ID NO: 291086 - DNA, 442 bp, Cannabis indica
aaaatcacgtaatacgcctatggtagttagggtgttacatgtatcctttctgtagcagagtatcaccaagatctgagcttgattctccttcagttgattagattcttcacagtcttacacactatgattgagtaccaacttgctatgcgtgtgcatgtactctatcactaaggctcgaatttggataagtgaaaaaacactaagaatttcaaattagaagatagaaaagaagaagaagatgttggggattattttaccagtcaccaagatctgagcccgattctccattagttgattggattcttcacagtcttaaacactatgattgagtaccaacttgctatccgtgggcatgtactctatcactatagggttcgaaaattgaagagagaaagagagagagagagagagaaggattcgaattttagagagatagaaggct

SEQ ID NO: 291087 - DNA, 762 bp, Cannabis indica
aatatcaaacttgattatatatttaattataataattattttattaaattataaatataatattattaatactaaatatttattcatataatttatgtttttttatcaaactatatatttaattcttattttttttaatttcaattaataattaggaggattttatagtagggtatcaaaaaaagatcctatggccattattggtgtttttggcccaatctgacaatgtcacattgtgcaagagagggtgtagaatgttatatgttaagcaccatttattttaggaaaaattacatagaaaatttacatttttacttttaaagttttttttttatatttttacggtattctataaaaacacaaaattaactaaataaaagtagtaaaaaaaatatattaaaacaacataaaaaagtaatatataaataataaaaaaaaatcaaataacataaaaaaaatatatatcaaaagaccgtattttatataaataaaatcataaaaactttgtaaaactatatttttgtaatttttttcaattatttttgtgttttttttaaataatttatttattttatagtatagtatagtatttcatttactttgttaaatttactcttaattgaattggtaatagaagtaactagggctcccttttttttttagtcattccattattcttagttacgagaattgttcatactttaaaagtaaaattaaaataaataagaaatataatataattcttacatcaaaaaaataaat

SEQ ID NO: 291088 - DNA, 363 bp, Cannabis indica
atgcagtgtatttggcatgattctctcggggagtctgtccggatttatcagtgaactttcctttcttcccgtttccttgcttgtggttgcctcttgaacgcttaccacttgagcttgaattattggaatagttgggaaatcgttttaagtccaaatttcttgtaagatcacttgctatgtgtgggcactactctaacactaagtggttcgaaattcaagagagaagaagagagtataggtggcagctagggtttagaagagaagactcaggtttttctctgaaggaaatcagaagagaagtgttaaatttcctgaagccttcactacctatttatagcattccactagggttaggtttgaatt

SEQ ID NO: 291089 - DNA, 697 bp, Cannabis indica
aataggatcatttttatatccttcttttaataaatattcactaagtcgattgtaccacatgcgtcctgattgttttaatccatacaatgatctttgtaatttaattgagcacatttctcgattgcttgaattatatgcatcaggcatcttaaatccttcagggatcttcatgtaaatatcactatctagtgatccatataaataagctgtgactacatccattaatcgcatatcgagtttttcactcacagccaggctaaccaaatatcttaatgttattgcatccaccacaggagaatatgtctcctcataatcaatacctggcctttgagaaaaaccttgagctacaagtcttgctttgtatctcacattcatttttctcatttcttttacgtaaacatacccatttgtatccaacgggtttcacacctttaggtgtttggactataggtccaaatactttgcgtttagcaagtgaattcaattctgcttgaatttcttctttccattttggccaatcttttctattttgacattctttgatagatttaggttcaagatcctcgttttcattcataatttttagcgctacattataagcaatgtcgacaattacttcgagttggttccattcttttcctgtattgacataatttattgagatctcattattgctaatattttcaggtacctgaat

SEQ ID NO: 291090 - DNA, 507 bp, Cannabis indica
atagtggtagcggcgaacagaatggaacccttgtatgaaaggttccagaagcaggcaccttcagtttttctgggaggtcctgatgtcatgaaagccgagcagtggctaacggtgattacaaagattttgaactttatgggtgtcaccgggaatgacatggtggtgtgtgccaccttccagtttcaagaggacgcgttagtctggtgggacatggtgtcccagattcatgatgtcaccactatgacctgggaaaggttccaggaactcttcaacgcgaagtactataatgaggtcgttagaagtgccaagaggaaagagttcacccacctgacccagaaggagaatatgagtgtgacagagtacactacccagtttgatcggttggcgaggttgtcctcgggaattgtgccaacttatttcagtaagaaggaaaaatgtttggatggattaaatgtgaaaaatcaagcatgacctaatgatcacaatggacgacaagaccacctatgc

SEQ ID NO: 291091 - DNA, 367 bp, Cannabis indica
tggaaaaaattaagcaatttacttttttacaaaactcaatttcgatttaatttgaattagttatgattatttgaagtttcaaaaaatatcagggaggtgtcactcacctacgcgcgcgcatgaggggtttccctcagacaacacgcgcgcggacaccatttctgtctgagaaacgcccctacgcacacggaataggctgcatgcagcctcctgcccctgcgtttctcggtcaagtccaattaattaattaaatcaaatatcaaaaataaattaatttgaattttttaaatttaattttagatattagtgcaatttgaatttgaaaacaagtaaaaaatctatctttttgcttgattttatatcttat

SEQ ID NO: 291092 - DNA, 632 bp, Cannabis indica
aatgaaataaaaataaataacacgaaataactcaaaccggttataactaaaataaaactggttatataacataatcaatacaaacaagtaacatgcaataactcaaaccgattacaattaaaaacaaagaagaaatcagttcctaaaacactgaaatataaattaaaaacaaaactagttccacaatgaaatagttcataatacataatacctcataaaaccggttataattttttttttaaaaaaatgtggggatcaaatgtctcggatataataaaaatagaaccagttctataacataataaataaaaataaataacacacaataactcaaaccggttataattaaaatataaccagttctctcacacaatgaataaaaacaaaaaacacaaaataactcaaaccagttataattaaaatagaaccggttctataatagtgttataatgaataaaaatcagtaacacgaaataactcaaaaccgatgataactataatagaactggttataaaatataatgaatacaaacaagtaacacaataatctaaaccgattacaatgaaaaaagaaaggggaaattagttcctaaaacactgaaacataaattaaaaacaaaactagttctaca

SEQ ID NO: 291093 - DNA, 601 bp, Cannabis indica
aaaaataagtgggatggattgaaaaatgaatggaagctttggaagcaactcaagggaaaagaaactggtttaggatggagtatgcaaaagaatacaattgatgcaactgaagattggtggaatagtaaattacaggtacattataatcttgttaaatatttatataaaactaaaagacttttttatgaatggtacatttaattaacaaaattccttttgtagactcatcctgatgctgcaaagtttcgcattcggggaattgaaccagaagtagaggaaaaattagataagatttttatgaacactgttgctacaggagagcatgcttggacaccttcatctggaataattccatctgagtctgaaaagccttttaatgatactgaaaccttacatgaacaacttgagagtagtgatgatgatctagagacgcctaatattgatagattttctaaagagaaaattagcaagagatcaaccgagccacttgagaaacaaaataaaaaggtgaaaaatgaaaaagggaaaatgaagaagacagggcctgtaatgatatttgaacaaattggtcgccttgctgatgccgtggagacaagaagta

SEQ ID NO: 291094 - DNA, 589 bp, Cannabis indica
cattaaatgcgagatgactgctcagaggaagcctgacacctcccggagatgctttgatgccatcttgatctctgggagcatataaaaccttgcatgccttctccgggaggcatatccaagataatgcctttctttaaaatgacttggctattaatttaagtgctaaaacctttgtgtccacgtgtccttgtctggttggtccacgtacattgggcaaaatcaggggcaacatttaccccccaagccttgtttaattgtgaaatgaacaaggcttgttcagatgcctcaggttggctcctcggtttcctggcacgtgcttcgggcgcgtgaaggtgtatttaatgatcaccattactgcagcgattcaatttttgcaggcgtcgattcgtttcttgtccattaattgatacagcgcattaatgggtgtcagacggacactcaagcgtttccaccgcctcgatgacaaaccaattcagccgttggatcctgggaattggaatcgtgtgccttcccaaccgcacgattggtagatgatcgcgcctgttccacatgcactttggcctaataaaagccaccattctcacttcat

SEQ ID NO: 291095 - DNA, 707 bp, Cannabis indica
ttgacttagtggatgacgaggaggtgctaccgagagaaggtcaggaaaagcaatggggcttttctgaggaagtcgcagaaggtgcgggagagctccgggctcttcctagggacgctgaagaaggtgaagaggagcctaaggtggctctgattcgcaagcgcaagggcaagatggttgcccaggacgacccaagcggcctctgagagctgacactcctgcccatggtctcgacggcggggtctcccccatggaagaacatcatgctcctcccaacattgtgctgactccagttcttggggacaaggtgaggcaggagctccggatagccaagcataactatgccatggacgagtactcccgggggtatgccgaggtggaagcccttaggagggttttgcgggttgaggtacaagagagtatcaaccacccggagtaccaagatccgtgggaccttaacttggaccccctgtcggactggttccgtcgcttccttgggcccaccttggctcccttcgtcgcggagatgaccggcgagtttgcttctcagcttacccggcgcgcgcctaagcggtttgcaacttgcgcctccctgaactctatcttccaggtccaagacctcagccactctctcaccgtggtaagtgttttacaagtttgcttttccctttatttttccttttttggggattctttcttacacttgtatt

SEQ ID NO: 291096 - DNA, 500 bp, Cannabis indica
ataattgaatagaaaagattacattgaaatagagttttatttaggacccaaagcccaataaactcccacttgaactaacataaacacacaagtacatttcaattaatcctaaattcaatctgtgcttttcaaatgtagttgcagtcaaaactttggtgaatggatcaactaagttgtcttcaatatctactctctccaccaatacatcccctctttccacatattctctgatgatgtgatatttcctttctttgtgtttacttctcttgtggcttcgaggctcttcactgttggccatggctccagtgatatcacaaagtaaaactagtagtttttccattctaggaacaacaccaagtcctgtgaagaactttctaagctagacaagttccttagcagcctcagcggcagctatgtactcggcctccatggtatagtctgacgttgtggtttgtttagcacttctccaaacaactgctccacccccaagagtaaacacc

SEQ ID NO: 291097 - DNA, 566 bp, Cannabis indica
ggagaaaggagctcatctctctttgccttcttcaaggcttggtctttgaagtccttgagctctttcagctccacggccaggttggccctagactccaagtctgcctggtgaacttcctctaaggacttcaccttggcagccatttcatccaaggcttccctagcctcctgaagctcacgcttgggcttagcagcagctttgccctccgccctcagctcctcctggtgcctggcctccagcctatccctccgaatggcctcctctcggatcatcgcctccgcttgtgcctccctccgcctggcctcttcctcactggccttgacaagggcctcttggcgctcgacgtcctcctggtaaagccgcctttcagcagtcagatcctgaaggatcttcttaacttcgtccatgcccccaaagtcggacaggacgaagccatgattaatcaagttcttggaaaggcggccgacctcagcagcaagctgggaaaggatacaagtatgagtaagaatccttaagaaaaaaaaataaggagaaaagtaaactacgaaatacttaccacggtgagg

SEQ ID NO: 291098 - DNA, 668 bp, Cannabis indica
gcctagagctaattattagtgatgaagggagcccaacttttgcaacaaacagtttgaagctctacttgcaagatatggagtacgccatagaactgcactcccttatcatcctcagagtaatgggcaagcagaagtttccaatagggagattaaattaattctggagaagacggttcaacggtcaagaaaagattgggctaagaagctggatgatgcattatgggcttatagaacagcgttcaaaacaccaataggaatgtctccctatcggttggtctatggtaaggcttgtcatcttccagtggaattagaacacaaagcattctgggccatgaagacattaaatatggacttggcggcagcaggagaaaagaggttgttacaacttaatgagatggatgagtttcgtaacgaggcttatgaaaatgccaagatctataaagagaaaactaaaagatggcatgatagacatttagcaagaaaagagttccagcctggccaacaagttctattatataattccagattgaagctttttcctggaaaattgaaatcaaggtggtcaggaccgttcactgtggttcaagttttcccatatggcgcggtagaagttaaaggagaaaaaccagagactttcaaagtcaatggtcaacgattgaagccttatt

SEQ ID NO: 291099 - DNA, 479 bp, Cannabis indica
tttatatattgaagaaaaaaaataaatgtttagtttgatttaaaataatttagtttgaatattgttttgggctaataaaaatattgaattatatataaaatctaaaaaaaaattaacttataataaattatatattattattattatatattacatcaaatataaaaaatttataaaacaaatatttattaaataattacttttaaaaatataaataatgaaatgtatattagatgaaacataaaaaactataagacattaaaaataaaataataaaaacttatagggtaagaaactaatcaaccacccatgaacaaaaatacttttggatgaattatatttaatatgacttaaaaagaataatatttataacctacatggatgatgcctacatcttttataaacaatgtgggacatttagttccaagtatttttgttgttgttttctaaacaaaatagaaaaaaactacaaattttaa

SEQ ID NO: 291100 - DNA, 516 bp, Cannabis indica
aaattttaaaaagaatttcctttgaaaatgcaaaatagttatcaaaaacataaatgacaaataaaaaccaaaacccagtaaacaaaaaccagaaaacaaaaaaaaataaccagttaaaaacctaaaacaaaaacaataacacctatagttttttaaaaaataaccggttccaaacaaagcattacaataatattctgatattacttttttcctaaaattgcaggtatggaacaaatcatgcgtgtcatcaaatatgggggtcagttgagggaaaatacaaattatgatgactacacaataacggggattctaattccaaccaattcatcactagcaaacttgatggagctgataaaaacagagatcaactgcagcagaagcaacatagacatatcctaccagatttcaccggggacaacaccaatgaagctactgagtgacaattctctcaatttctacattgagctgagaaaatcacaagctggagtaactgattctccactatgcatcacaact

SEQ ID NO: 291101 - DNA, 594 bp, Cannabis indica
aaataatgaaaatattaattagaaaaagcttctccaagtggccggccatggtgttatgggccccgctttgaattttgcaattttaacaattttcgtttcgattttctcaaaaacgctaattttccaattctaaccatttaaaagccaaaactaattatttaataaccaaaaaaaaataataaaaaaaaatagacatttaacataattattaattagacatatagagtctcttaattaataaataaaacctagaatctcttttctttacaattttgcccttgcttagtgaaaattcataaactagacatagtctaattctagaattataattgattaatcataatcaattatctgagtcttacaagcagtatggtctcaactagaatggggaccatggacctatattactgagcttccaataagctgaaccgaatttaccaagtaaattccctaacttattaattccttgttgaatccacttttagaacttggaattgcactctcagttatatagaacgctctatatgttccaccatatagatacgctatcacatttaaccatcgttataatctaatttgatcaaagatcctcta

SEQ ID NO: 291102 - DNA, 564 bp, Cannabis indica
ttataattctgatggaagcacatcttaatttcgatattatctgtgaattatggatggaattttttatggacatactgtcgtactctcaggcttagcaacttaaatgattagtatatttttatcaattaattcttgaataaggagcaatcatggatgttacttgttcaacattttcaacttttgttttttaaggattttcttcttgtgtttttcttttttccaagtgagaatatattcactaaacataaacaagtctgatactttttcctttctttcttgactttactaatttcactttgaaacgattgctaatgaactgtttggaatgtcccctaaaaaaagtctagaaatggtttagaagatacaacctcaaaaccaggagccagaacgaaatacttaggggggccaattatttaaaatttatattttgaagaaaatatttttatagaattgcacatcacaaaaattattaataaggacatgtttgaatataattgtataattactatgatattaatttcataaataaacggtctaataattatattatattttaaaataaat

SEQ ID NO: 291103 - DNA, 530 bp, Cannabis indica
tgaggattacatggtgtggtttgtgatggaaaccattccctctcaatttgattcgatcaaatcaagctataatgctcaaaaggagcaatggaccgttgaggagatgactgccattcttgctaaggaagatgaggacttgataagagaaaagcaagaagcatctccatggtaacaaacccaagaaattctcagaagagagagtccacttccaacaactctagtgaccaaaagtccacttagagaagaaaggcagtaacaaatcgaagaaggccgaatagttcggaagggtacgtatatatggaagacgatactaaagtcaggatagagtttttgggactgttagactacagttaaatacaggatattttcttggaattgcaagttgttgcttacttgccctctattaggaggaacttgatttctgtatctattttggatagactaggttatagttttcttttggaatcggaaatctaattttgtatcgtgactctatgagggttggtaatggaagttcatgtggaacttta

SEQ ID NO: 291104 - DNA, 500 bp, Cannabis indica
cacacttagctccatatgctgaccttttcctttgtgcaggccgatctgaagttcacttacacttactcccgggctaaatctgctacttccaagagtgcggctctgtccgacaccttgagggcggaggcggacttggccaagaaggaagctgaggaggccagggcagaaactggagctgttcggcatgagctgggcgaagccaacaagaagctgtttgctgccgagaagaagatctccgtgctaacaaaggacctcgagggagttcttctggccatagaacttcggggagttcttctggccaatttcctttggcatcttcaagtttattctttagtgtatcctttaaggttttgttgactgcttcaacttgaccgtttgcttgaggatgtgccactgcggagaaacttttgatgatatcatggttcgcacagaaatcagtgaaagattgactgtcgaactgtttgccgttgttcgaaactattttgtacggtagtccaaac

SEQ ID NO: 291105 - DNA, 734 bp, Cannabis indica
tctataaacagaaaataattacatgttctaacaatgacaattttatcaaattaaagcattatgattacctttcctagttatgtaaacaaaataatatgattctggttttctttccggacagtttagtaaacatcataataaaatattgtttccgattattttctatttttaaaccgatatatttctctcattgattattctgattccaattagagtttagtaaacgcgcactagatgagtcatgagtgatttgataaaaattacgtactaaaacacatataagcattttattttagaatggaagatcaaagtatttatctagagtatcaacaattaattaaaacatacctccatagctatgcatacgtgagctatatgactttatgaatctataatataatcaatggaagctcaatatattaggagtgacttgtaagagagaaaccaataaagagcaaccgcggccacctttctctctaagcataccatcaattaaaaatgcagttaataaaaccgacgatcctattataatcttaattacatatataattggcattatactatacatatagctatccacatgtgttaatatcaacattgtgtgagccaagctcgaagagaatcatcgtttcacttctaaatacctatagaagttatagatttcatatctttgttagcgctcccactcaattatactatcacgttcccaagatgtacgtatcaccctgacccaa

SEQ ID NO: 291106 - DNA, 535 bp, Cannabis indica
gagacccatttttttctttttatactaattcacttagggttaggattgatttatttggaattaaaaatgataaaataatagcaaaaatcacacctaatggccggccacatgtcggcccatcactagttagatttttaccatttttctcaaccatttatctatttttcacaaatactactttttggaatttcaatcctataaatgccaaaactatttatttaataattctaattaattatcaaataaatttatcatttatattatttgttaattagactccacaaagtctcttaattaacaaataaaccctaaaatcctatttcttcacaatcaagctataacttagtgaaaattcataaattagacatagtctaattttagaattacaattgattaattaaaatcaattaactgagtcttacaagcattttgtctcaactagtatggggatcatgagcctatataaccgaccttccaataagcagatccagaatttaccaagtaaatccctgacttattaatccctccttgcacc

SEQ ID NO: 291107 - DNA, 541 bp, Cannabis indica
gcctttccaggatgatacaggatttcacagtcatagtctttcaccagctccaaccaccttctttgtctcatgttcagatccttctgagtgaaaagtacttgagactcttgtggtcagtataaatctcacctttcaccatataagtaatgtcgccaaattttcaaggcgaacaccactgctgcaagttccaggtcgtgagttgggtaacgctgctcgtaatctttcaattgtcgggaagcataggctatgactttatctgcctgcattaacacacagcccaaaccctgccttgacgcatcacaatacaccacaaacttctcttgatcagatggcagggcaagaacaggagctgtaatcaaccgttgcttcagctcttggaaactcttttcacacttatctgaccaaataaatcgctggttcttcctagttaactcggataacggcatcgcaattttggaaaatccttccacaaaacgccgataataacccgctaaaccgagaaaacttcgaatttcagtgactgttttaggtctaggccaat

SEQ ID NO: 291108 - DNA, 655 bp, Cannabis indica
aaaaaattagaaaattctcaaaagctctctctcatttccctctctctattttcggccccctttgagcaacaaggacccttggtttttctctgtgattcaagcttttgttggtgttttaatcaagctaggttagctccttatcttcttctctttaagtttctttaattttgatgaaaagatgatgtttgcatgcttagtttaggtggtggttgttgctgtgattttgttgttgttgcagaggtttaagcatgattaattgagttgaattgagctgctaataatgcatgattagtggtgttgtgtaaagttatggaatttctattcaaaagcttaagttttcatagagaaattttgagattggttgctgtgattgttgcatgagtttgtgtatgttttctgcagtttctaaatgcatgtttatgtagttttaatcaagggttgatgcttgtaggtgagctttagccaagtttgagtttgaaactcaaagcttggagctcacatggaatttttagtatctatgcattctgggctgttttgttgctttagaaatgttctatgggatatttagaacaggtctggaaggtttggggtgaattggttttgatttgaggaagttatgaaattttgaatgtggtctgcgaggaaccggaattcc

SEQ ID NO: 291109 - DNA, 557 bp, Cannabis indica
cataagggggacgaagtctagcgtctcgaggttatattaaaaatatttaactattgtaagaccaacaatggagatcgaatatctcttgattaaagctcattatttaaaataatgtatttttaattaatcattttattttaatccatatattttaataatgaaaattaattaatttaaagttggtccaaaattaattttcaactttaatttaattttttaaaatcattatataataatatataaaatttcgaaaattttaaaatataataaaataaatacttgaaaaatatctaatttaagttctaaaataataaaattttcaacttaaattatttttcaaaatttaattaaataacaaattaagttattaaccactgaagttgaaaaatattcaattttaagttgatccaaaattaacaaactttcaacttaaaaaaatattccaagaatctctcaataactaattcctagaattcctcaacttaaatttgaatttcaaaaatattcaaattcaggttgataaaaaaaattagttataaataactaatttacaactt

SEQ ID NO: 291110 - DNA, 463 bp, Cannabis indica
atcaccctaatggtggcgaccatatttgacttgcaaattgcacaacaatggtagaagcccatgagatagaatagccttgactctcgcctaaacgggacaacgctggattccaatcttgatcgaataaaatgttgctagaatgtgaaagtgcaactagtagattttaatgattcaagttaccaagttgtacatctttagattgatcgatttcaagatatgagttatgaacaagaattaaactttaagctgtaaatcacacatcaatttacaagcttcatctgcactgagaacacatctcagccgactagtgcttgggttccccgaaccagggtaaattcatccactatttatcaaaggttcatattacaatttccaattctctctaaaggaatcaaatacaacctttacagcaaatagtaatgaattaccaacgacaatcaagaacactgattgttaatgcaca

SEQ ID NO: 291111 - DNA, 572 bp, Cannabis indica
ggttatattaataataattattagtaaaattagcttaaaaaaataaagaagcattatttatttaaaaatatacttattgatagcaatccaaaaaaaatataagacaaaatgatcatttttacaaatattcacaaaagataaaatgttaattagaggggaagcttagtttagaagaaaaagaaataagtagtgtacatgtttcaattgcttagtttaaattttttataattgaatatatagtgagggctaattgtgtaattcaattagtgaaagcccaaaaagctattctcacttttatataggttatagatatatagagagaaaataaaaaatttattattgatatttataaatctaataaaaaaataaaaaagtgaaaaaattaaaaagagaatagatagaattatttaaaacaattttaaagtgtcatgtcccttatgatatttttaaatatcacttaaaaaaagaatatatatatatatatataaatatgggtgactattcaatggttacatttttattgtaaccatatggttacatttttctttaacctgtaatagcaggttactaat

SEQ ID NO: 291112 - DNA, 823 bp, Cannabis indica
ctagatccaaaaccgtaaccagaccaggacccgactccaaatcaaacctacacatgaattaggagccggacccagatcccaaccaaaacctagactcaggacccgaacccgaacctgaactcagacccaaacatggaaccagactaggtacacaggaccagggtcaggacctaaaaccgcaccccagtctcgatcctgaacccaaactcaaaaacgggaccagggattcggaaaacggggcctggaatagaccagtagtcggtgtctagatctgggactcggactaggaccagaacccagacgatgaaccaaacccgaacccagacctagacttgggaccaaaaattagaacctgaacaagaatcgccgaaccaggaccctagaaagagactaggaccgtgaccaggacccggacccagacctagaaccgaacacagacctagcctcagaaccaaactgagattggaacttgggcccagacacggtcgtgtacccagaccggaactgagacctggacctggacctaaatttgtgacccaatcccaaacacagacttggacgtagatagggatccggatacgagccaagactcggaccaagacccagactgggatcgaaatgcttgacctagatttggatcgagatcctgatccagaccaaaactttgacctgcactaaggacccgaacttggacctggaccaaaacctagacccagatcggggttaagacctagacacaaacccggagacagactcagacccgaactcaaacccaccatctagtatcagacccaaacgctagacccgaacctggacctaaact

SEQ ID NO: 291113 - DNA, 567 bp, Cannabis indica
catacaacgtactatgcagtacaatatacttttcttacctttaatccaggttcatacactttggccaacccaagtggagaactatccctgatgatctcggcccttaagctttcccttttcaaggatttgctatcctgctactaccggagcttagatcgctaagttttggattgaaaatcgaagaaaatagatataggaggaaaaagttttgacgaaggagagagaacgaggatttcgttcgttcgttctttactgtttatatgtaaacttaatatatatatgtatatataatccaaacgaaacactgtttcgtttatatatatatgataataatagtataataataataataatataatacaatattaataataatataatattaataataatattaataaaaactttattattaataattatcttattatttcttagccattaagaaatctctatttctagggtatttgaccaactccgagtatcctaaaataccccaatatttctaaaatcaacttatcccaataatcccatcaatatttctaactaaaactgttgtgatatttt

SEQ ID NO: 291114 - DNA, 533 bp, Cannabis indica
gggcataaaacccaacatttaatacagagaatgttcttggtgagtttttactcttctagcacttatgcaacccagaattctcgacccctctttaatgagctttggggggtatttatagtgtttttgtggtgtgatccccagaattaaggtacatgcatttctgtaactatcagtaaagttgtccattcccaatgaatatatcatgggttatgcatggtctaatccctaggtgttgtagggattttatgagggcagtccttaatccctcttgactgatgtgattcttcacagagtagccgtcactagactttattggtcatagcctagtaggtacagatcgggggttgtgccgtcagactttattgcgtgtggcagttccaatacgcctcctcccatgcggcattaaatgcagatgactgctcagaggaagcctgacaccacccggagatgctttgatgccatcttgctctccgggagcatatgagaccttgcatgccttctccgggaggcatatccaaaataatgctttgctt

SEQ ID NO: 291115 - DNA, 669 bp, Cannabis indica
ctgcctactatattattttcctttgctttctcggggaaaaaaaagagagagagaaaaggggagaaagataatgaaagcctcaattctctcttatttcctttcctttagaggcacttcttcttcttcttcttcttcgtctgttgtcttctttgtttctctctactaaatttgtagagagagaaactaaagcaaagggaaaggggtggatgaggaatattcgctacttttatttttgatattaactccaaaaagcaactgcttccttacaaaaataagcctaatttatataattgacaaaaatatttagtacatagatttagattaattaagtattttttgtctttaacttttatatgtaccaatcatgtctttaaatttttggccgttaaaaattctctttttgagaaattctaacatgatgaaagtttagggagcatgatttaatacatattaaaattttagagacatgatatgatttgatagatatcaaagtctgtttagcatggtttaatataaaaataatcactaaaacagtaaaattgaatctcaatagttgaggggcatgatttgacacatgtgaaaagttcgggaaaaaaaatctaattagccaaatatttatttgataatattatggcaattagatttatgggtttttttttaatttttttt

SEQ ID NO: 291116 - DNA, 988 bp, Cannabis indica
aatcttttatatttttatggagactatattatacgaaagtcctttttttttttttttgaaaattgaaagttattgttataattttattatcaaattaagatacaaagaaagaaaataaaaactctcctcattctatcaacttaatggttattgataaaaagttaagaaaagtatacttatcaattgtaataatcaatgactaattaggtgagcaaatacatgctatttttttttaaatatatatacatttaatattttttaaatataattataaggagttaaattaaactaaaaaaatttaattgtttgatttgtttaaggaaaaaaaaaattggaaattgatatatagaatgttatccaaacatacattaattgggattaaaaaatcaataatctttgccatttgaaattcttctactaataatggagtattaccttttcaagataaattagttcaccaaatagaacctaaccaaaattgaatatttatatatatatagcttgaaaaagtaaaaaaaaataaattaatttttattttacgtaacaaataaaaaaattatttatgtatgaaaacttgctaacttttggaggagcgtgggtatgatttaacacattgaactaaagaaaaagtttgtgaacatattattattggatagtgtaatatatttattgtagtaatgataataaattaaagcagcccaatatctcattctcttctctttttatctcatttccattattaatttatttgaactcctatataaagttctttctatctcatgatttaacactttgaactatgaaaagtactactccacacatatatctatgtgtacatattgctctgtcaatttataaaatcatgttacacattttctaattgataattgttattgagtattaatagtgcacaatattttaagtcacactttataattagttagagatatttttaaatagttattttcttaaattatataaaacctga

SEQ ID NO: 291117 - DNA, 919 bp, Cannabis indica
gttgagcttgatactctggccattgttgaccaggccatgtagacgccatcgtcaaaccgcttgatgcaccggctgcaggagacaggagaaaggagctcatctttcttagccttcttcaaggcttggtctttaaagtccttaagctccttcagctccacggccaagtttgccctggactccaagtccgcctggtgcaattcctctaaggacttcaccttggcagccatttcgtctaaggcctccctagcctcccggagctcacgcctggccttggcaacagcctcgccctccgccctcagtgcttcccggtgcttggcctccagcctgtccctccgaaggacctcctctcggatcatcgcctccgcttgggcttccctttgcttagcctcttcctcgaacttggccttagcaagggcctcctgccgcgcagcctcctcttggaaagtctgcctttcagcagacaggtcctgcagggtcttcacgacttcgtctatgcccccaaattcggacaagacgaagccgtggttgattaggttcttggaaaggcggccggcctctgcagcaagctggaaaaggatgcaagagtgagtaaagtccttaagaaaaataatgaggaaaaaagtaaactacggaatacttaccacagtcaaggaatggctgagatcctgaacttgaaagacggagttcaaggatgcacaagcagcgaaccgcttaggcgcgcaccgggttagctgggagacaaactcgccggtcatctccgcggcaaaaggagccaaggtaggcccgaggaaacgattgaaccagtccgacagggggtccaggtttagatcccacgggttctggtagttctgatcgttaagggtattttgcatttcatctcgcaaaaccctcctcaaggcctccacctcagcataccccc

SEQ ID NO: 291118 - DNA, 104 bp, Cannabis indica
atacttaacttagattgtatcaaaattaattattaaacaattaattttacaatctaaaatatgttccagatttaatattagaaaaaatataattagtactagaa

SEQ ID NO: 291119 - DNA, 665 bp, Cannabis indica
ccacaggtccaacattgctgcttgggtccccaagtcgaggatccacatcttcatccccgccttgggaagttccctacttggaaatattttttcccttgtctgtgctctggctggaggatacttccttctttgacttggctagtgcaaggttcaagcagactgctggtttcctctcagacaccctaccccattctttgttggaaacttaaggcacgagtggaatatcgatgtgacagcctttaagtcatacaaggccggccggcctagcattacgttaaaagctgaaggaacatctaatatcaggaactgtgccatgatagtcatgctcatcgaagcttgtccaacagtgaggggtagacgaatttgtcctagaggtgcgactccttgaccggagaaaccatagacaggcaggagacatggggttagatccttgagctggagtcccatcttttcataagcagttttgaacaagatattggaagaggctccattatcaatcatggttctggccaccattttattggctatctagacttccacgaccagcgagtcgttgtgtggaaatctaattttgacagcgtcttcatcgttgaaagttatggtaggccctcctgctcgtggaactttgggttcctttcttccacggtcaggataacttcctcttg

SEQ ID NO: 291120 - DNA, 588 bp, Cannabis indica
tatatgcatttaatattttttttttttgatgcaatttgttgttgtttttttgttcaggtttataaaatttcctgattatttcaattttttcctgttttcctcaatttataacacattctcaattatgtagaataaaaaaataggaagaggttcatgaagaaattgtattaccttcaattctttctttgattcgattatgggtgagtttcaatgatttctcaatgtccttctcttcgattcctctcctttgaactcgttgggtttttgattgtaggttgtttttgcattttttgtacagcaatggaggttgaatacctttttttttttcttatatggatttttcggattttgattggtttttcgttgagatctacatcttgttcagatctgatttccttggtttttgaaaaaaaaatggtggagatttggttgtttggggtttcttggctgggtcacgaagaaggaggtctctcctccgttttttgtggctggctggtatttttgtaaatagaaagttttgttttctatttatgtttatttttccttttaggttataaatgtaaattgcttccctttttaatttattat

SEQ ID NO: 291121 - DNA, 704 bp, Cannabis indica
caacccgtcccaaatcctaaaagccaatatgaagtaggagtcccaagtcataaagaagaagccaagtctatttcaacacttaggtccggaaaacaaattgccaaacccgattacacacctcaagttgaaaaagaccaaagccaacctcaaagttccaacacaaatgacttgtcaaaagataatgatcaaattcttccttccattccaaaagctccttttccacaaagattacttccactcaaaaaaggcaaccaatatagtgacatcttagaagtgttcaaacaagtaagtatcaacatcccattcttagatgccattaaacaaattcctgcctactccaaattcttgaaagacctttgcactgttaaaagaaacactaatgttccaaaaaaggcatttttaactgaacaagttagctccataattcaatataaaagccttgtgaaatataaagatcctggttgtccaacaatttcatgcatcattggtgatcattttattaacaaagctttacttgatttaggagctagtgtgaatttattgccttattctgtttataagcaacttggtctaggagaattaaaaccaacttctataacacttcaattagctgatcgttctgtgaaaattcctagaggtattatagaagatgttttaattaaagtggataagttctattttcctgttgatttcattgttcttga

SEQ ID NO: 291122 - DNA, 895 bp, Cannabis indica
acgtcgggggcctggtcactacggagaactgcaggaaggcaaaactcatccttccgcaccaatccgtggaggactctaacctttcccgggttatctgtcccaacgtgagggcgccggtcgcggagaagaccttccgggatgagatcatcgccactgccgagaagaagtaccaggaatatctctaccggaaggctcaggagaaggcatactctaaggcccaggcagcttccgggaggccacttcgcgtggggagcccggtcgagagaagaagccaggcgatcgccgggaagccccttcatattggggactcagcggagagaagggctcccaggccacagccttcggctcaggagccgaacactggggctcctggtgccagcacttccggctccggtggtaagtctcctttagcagttcattatgtcccttctgttggcgagtatgccagtcttaggcctgtagggttcgatgagcgtctttataggtttaggatgccctcgacccggtggggagaccatttgaaggagttttatttttccaacttaggagatttcctaggtcggtcccggatgggttctggtcctccggagcccgtccccttaggcccttcagcttatattacatccagctggttccggccttcggacagctatctcggagatgatgctgccagcatcaaaattcggaactttgctagggccgaattagagagtcagggtaggactagcttgcttgtcatatctgagtgttggtggtttcccacggatgttctaacacttgctttctttcttttgttgtagcaggtgcttccatggacgccattttggccgaacttgccggggttcacactcctgaggctcctcctccctttacttcttcccagatggccccccct

SEQ ID NO: 291123 - DNA, 607 bp, Cannabis indica
accttattcatccttttcttctcaaaagcttcaagatgtcaacaatggaggatgactaaaggaacattgtcattgaggtattgattctaagacttccattccaatttttattgaaaaatttgtgaatttgttggatagttttgaattatttggtggatatttgggatttttgctatatacattgttgaaattgattgtgtgaatagaattgggttaaattgaaagggatttaaatcccgggaagtcaatttttaaggggaagtgctgtcaaaattttgaaaaatcttgaaagttagaaaaatttgggtgctatgggtccaaagaggtcaagggttaatgaagagggagcttcatcatccaacccatctaggggacgccctaatcttgatagagttaggtttaccaacatggaggctcaagagcggtttttgaaattgaaagatagggcattcattgaagatagagggatagacattgtcaacctaagccaaactgccaacattccccctgcttttgcatctattagggatcaaatcctacagaggcagtggactaagttcgtagatgtcactgagcgtggtaatcaaactctagctttggaattttt

SEQ ID NO: 291124 - DNA, 571 bp, Cannabis indica
catagaaatcctagagacagtcacaagttcgaatctatagctgtataagactttcctaagataaacttgatctgcagcatcagaaacagattctgacgcaacaaatcagaccagaaaaggaaacttgccataaacaagtccgatcttgtattgggtcttgataccttccataaacagtttgtataatctgattgtagcaagacacaatcgaatttaataaggaaaaaggcaatagtcaaaatttcctttaaaaactaactttctataagagaattgcttctcttacaagaactttccatacaagaaaagttcagctgaaaaatgcatctttcctaacaaagaaaaaagcaataaaaacagaataataaaggagagaaaatcggttatgaatgcaaataaatctcaccttaaaataaaaaatattttggcatttatcttgccaaaaaaggactttacaatctctccttttggcattttagatgaactaaaatatttttaaactaaagaagtaacctgcaaatcaaagttaacaagataaaacaaaaattaccccccgagaaacacaaatcga

SEQ ID NO: 291125 - DNA, 863 bp, Cannabis indica
gtagttatttacatttgaatttgaattactgttttcaagaaatgtgggctttgaccacattctattttaacacgtgtagataatactagaaaactgcctaaccgttatcactcctatcttctaggcggtcgacgctgaggtggctaagaacatctcgctagaggcatctcactttgtacatagatgaccaataatgatttggtttattcatatgccttctagtaatggcatgagcaccagtgtactaagcaaacttaagaactactctttgaccataatgcctcgcagattggacaatcatgtcctacatgctcccaagttgttacacctaataattataatgtggattatacgctaagtgtttcaacaaccaattttcctcgtcaatacttccttatatgtagcgaggtaaatgtctcgctatacattgtccgtagttccctcaagattatgccttctgaggcaagatggtctctcgtcaatacatgaattgatagtttgggtatccttgtctcgtctaagagatttatgaatatactctattaattctatatttaatgagttattccattttacatttaatgatataattattactatatttggtggttcatattccccttgattgacacgtgtcactctctgaagtatagctgaatttcgggtataacagtttttaactaaatgacatacagtgtcctaataggcgacagccaaagcatcattacttgaatagagttgtcagttcatctaaaatggatactattttagcaaccttttaattgatcaaaataagaatccaacgttgtcctggtaggtaagagtcaaggctattcttatctcatgagcttctaccattgttt

SEQ ID NO: 291126 - DNA, 545 bp, Cannabis indica
tgaagttgatcaaaaagatcgtcaatcctaggtaaatgatatttattcttgattgttagcttattcaattcccgatagtcaatgcacattcgtaaagacccatctttcttcttaacaaacagtactggagctccccagggtaacacactaggccgagaaaaccttatgtcaagcaacccctgaagttgaattttcagttccttaagttctgctggagccattctgtaaggggctttagaaaccagatctgctctaggtgccaagtcaataacaaaatcaatttctctttgaggtggtaaacccagaagatcatcaggaaaaacatctagaaattcttgaaccaccatgatgtcttctggccgaacagagtcaaaccgagtggtatccaataccacggccagaaaccctagacatccctctcacaacaattccctagctgttagtaccgaaattactgggatccgagatccctgaaccgatccaacaaaaacaaacggttcttcgccttctggttggaagattaccatcttcctcttataatcaat

SEQ ID NO: 291127 - DNA, 595 bp, Cannabis indica
gatatttttcttttctatgatattagtataagacaaagtaacaagaagaaggcaaaccatttttttaatactttttgagtttgagtggttaatttttttatgttatttgaatgagtcattgccattttttatgtgtatgaagattattatttcttgaatctagatttatatggatatgatatatattattttttttgggtgtttaaaagattatataatttttcattgaaaatataaaaataagaaataacaacttttaataatatttattgtctattgagtatatcttgtgtgttttatatttagttgattcttttttatttgtttgctatcattattttatatttcataattcaagtaggattttttaattcataattataattataaatcataatattaatctttcacatatttgttacaaatagatatgaagaggtattttaaaagtatacaagagtcttcaacttctatgggaaagagtgatggaactgtaaaatcaagtcgtgtggatgttaacacatatcttgaagaacttgaaagtgaccccgggttgagaataccaattttagaccatccttcaaaagttcgtgat

SEQ ID NO: 291128 - DNA, 825 bp, Cannabis indica
ttgtgttaatattgtggatactggctgtgttttagtattgcgtatgtctaaactgttgatgatttcaatgtggtttgtcgttgatcataatttgccaagggggagattgtaagtgtcatgttttgtgtggcaaattagatattgcttttgttcagtatttgttgtctctaacatctgttctggagttagttgcatctgtttttcactaatatcattttagtgccatgtcagctttctgctagtttgttagagtgtgccagctgtactttgctggttggttagttagtctggtttattatctttagtatataaattcgatcaaaaccgttgtactaactaactctcttctgttagaatcttcttcttgattcttgctctgctagggcaacatattttctgtttttgttcttgtttgtgcagattgaagttcgagagatcttcctgaggttgaagatgaagttcaaatctgcttgatctgaagggagttcagattctttgctgaaggttgttcagctgtgtgtttcttgtgtttgagatctaaatgtgtttagatctcaaagcttgaggttgttcaagcattaggtaactttgtataaaagtcaatttagattactttgtttgatttgaagaatcagaactggatattgtaattgaattgattgtttagtgaaagttactgtacccggttcaagggaacccaagcactactcggttggaatgcgtttccaatgcagaggaagcttgtaaattctgtgttcattgtttttaatttctaaattcataacatagaattaatctgttaagaatcatcaaattgaacttgta

SEQ ID NO: 291129 - DNA, 1045 bp, Cannabis indica
aatttagatcaaataaataatagctttctattttttttttttgaataaataaataaataaataaacaaacaatacaaacatgtaccagataactagaaagtaggttaagtgtagacgctaaaatctacaatgatcggaatgagcgtttgtgggcaccgacaacctgcggaacaaagacaaaggatgaccgtaaaaccttgggacaccggggtggtgccggccgaaggcactccgacggtcaagtcagtaaatttatagtgcgaagtagaaaagaaaacaagaaatgtaaataaatacttcctgtgtttatggttatgtggtgatccacggtcaaacctcgctcaccggaatgagaaagagtatgtcagatcgtagagaaataataagtttggtagtaaaactatagagagagagagagtgaatattcgtctatcctttctccccctcctcagtcccagtgtgggcctatttattatcttaggaaaacggctacctcttgaaacgtggtccgtccctagagaaacggtcttcccccacttctccagggatgagcgtcatcttttaggtttgttcctagatgagcgtcctcccattagcgtatcactcagagggttgatattctcgctccgctatgctagggaagatcgctattttcgtgggttagttgggaaacttaacgttcttcttcctccacgcgtcaaccctaacattacactttaaaatcaagctttattgtgggttggacattcgaatatgggtatgacccaaaaggcatggattgggcgtggcccatgtgagccattgggcttacgggttccttgtttctaacttataagtgggcttcgtaagtacttcgatcgttgggccttttcgttgggcttagagcaatttttggccactacaatcacctatctagattttccttagactaattaattaaatttctaataaaatatattttacttcatttattttaatttaatcaataaatgaaacaaatcattgatttaagttggtccaaaattaaaataaataatttacaact

SEQ ID NO: 291130 - DNA, 706 bp, Cannabis indica
tctctctctttttcggctgaaacttggggtgcttggagctggatttttgtggtgattcaagcttgatttgcaaaactctagtgaattcttgattttggtaggtgtcttctagctttctcctcttatttttttaggaaaagtttgatatattgttgatgcatgcatgcttttgtggctgtgtttggttgttattttctgaggttcaaagcatgtttaattgatgttaattgagttgtttgaagcatgattagttaggttgttcaagctttgagttttctatgtaaaatgtggtttttggaaggaaaatattgtgaatctgttctgtgatgttgctgttgtttctattagttttcagaggtgatattatgcttatttgagtagaattaactaggtttggatgcatgttaggtggatttgctcaagcttgagtttggaactcaaagcttgagctccaatggtgatttttgtgtatgtgttttctgggtggttttgaggccttagatttgttctttggggtgtttagaacaggtctggaaagtttggtaccaattggggttgaattggtcgagttatgagaattttagttggctgcctgcgaggaaccggaattccggttgtgcatccggaattccggatgagggttctgaattttccagaaccggaattccggttgggcaaccggtcttccggttggggaaaattcagg

SEQ ID NO: 291131 - DNA, 560 bp, Cannabis indica
gatgttaatgaaacatacttgttagtaaatccagatcctggtaaaatatatctaacaactggcctcagagccatggtaataatttactttcatgaaatatgaattaaaacgatgttatgtgttgatttcgatggtttcatgtggtttatgtgcttatttgatgatagtttagaaatcgcaatataggttactgaaatattttctattttgatctaaaattattttttctggaaagtaagcaaaaaaataataaatttaagcttttacagaacctaatttgaattttttatgaattagttatgatttttggaagttggacaaaaatatcaggatttgaatcactcacgcgcgcgcacaagcctcggattcactcggacacacacgccaattcagacagtgctgaccgaggtctctcgtacacggctcctgtctgaagggctgccagcgccgagctccctcagtcaaatggggctgcttgcagcctctgtcctcggcgtttcccttgcatccgcgcgcgcaggggtatgcaatgcatacccctatgcctcaaacttgttttc

SEQ ID NO: 291132 - DNA, 412 bp, Cannabis indica
agcttccaataagctgatttagaatttaccaagtaaatccactaacttattaattccttgttgcatccacgcatagaacttagaattgcactctcagtcatatataacgccctatatgttccaagatatagatacgctattaattatccattgttataatccctataatcaatgatcctctatagatgatctacattgcctagggataaaattaccgttacatcctttcaatgtattttatccttaaaacacatgccacctataaatgatattttagtgaaataatataataactaaaatgaacgttctatcatttatctctatttagcaagctccaaggaaatcatcgtttaacttctaaataactataaaagctaaagattccatatctatgtttagcgctctcactcaa

SEQ ID NO: 291133 - DNA, 576 bp, Cannabis indica
atataatgtgtgtacttgctatttaattctgaattatgtttaattattaataattaaataatattgtgttgtgtttatttaattttaaaaaataagatatactgtatttaggtttgaaataattatatcatcacagaataagaaggtgatgttgctggcatggaatctgattaattacctgaaataagtactacatatgtatatatgtacacgcacacagaacaacagacagaaattaattaattaattaatagataatataacaaacagatgatatatatggaataataatatggatgatgaggcattacagatccaatttatatataaatataataaaaatatttgatcctcttacatggatataataaaaatacgcattaattcagttattcaatacaatgccattgcttctccaaagattcctcatatatatatatagggtatatgagttttgtcgtgatatattttcatgaaatgtattcggtggtacattatatgggtcttagggtacattaaatgagtgtcggggtacgattctactttttaaccctaattacccctagatcaatctca

SEQ ID NO: 291134 - DNA, 1068 bp, Cannabis indica
aaataataaaattattatgaattcttttaatgcacaaactccaaataaaagaaaatagaaataccaaacatgtcttgaaaggaagaaaaaatgtatttcacaagattttttgcttgatttgttcatgtcctgaaagaagtatttttaccgtttgaatatgtccaaaatttaatacataaattaccgaataatctagtttttctcttcattttaaattacacattctttttgaatataatctgccatcaaaaaataaatgaacatacttaatttataaagttaacatgtttaatttatgatggcagattatatttaaaaaaaaaaacggtagtaatttaatatagagaaaaagtcaataagaaaaggggatcatatgcttatttcaaaatttacataatggagaaaaaaaaaataaaggagagttttatttgctcttagtcgtctttgctttgatgtaatgtaatataatgggaatggtaattgtaatatgaatggtaatataatagaattagaattgtaataggaatggtattatgatgtttaatttggtttaactctgtaacgaacattgtaatcaaataaaataagttgtatattgacaaaaatacccttagttttattatttttaataggataaatagcggcataagtactcaaagtttaagtttgtaagcggcataaactcaatgtttatttttaccggaattagtacccaatatttatgtagaacttgataattaatcgtactaatagtaatatgacacgaactattaatgtcttttaacattttaaatttaatttttactaatttttccaaaaaaaaaaaaaaacttcttttcatattcattaaagagtatgatttttgccttctaaatttttacatatatcctatgatgttttttgaatttttttagtccattaaaaatttcattaactattgagattgttgcctttacggatttttgtctaatttcattcagttttattaattcagtgattgtttatgtagactttgatatactaaagtatgtgtctcgaactttaacatgcctttaaattttatccata

SEQ ID NO: 291135 - DNA, 538 bp, Cannabis indica
ctctttctctccttcttctttctctctcttcttctttacaaactttaaaaataatttctgattacgtcgttactcagatgaatctaataaaaatatcattgcgatctactctttaacgtgaacatttcaagatgtggaaaacatatattttttcgttatttccaaaaaaaaaaactatttagttccttatataatgattaattacaatttattaattttttttaaatcttaattaactttcattttataattttgttaattgaattatattatattatacgataactaattagctttcaaaataaccaaaaagtatataaaataatcagtatatagaaatagtaacttgttatattacatgacaactcattagtttcaaaaatattttttaaggttacctaaatgtattttaaattaggctaattagtaatttttcccctcgaactttgacatgtactaaatcgtacccctttaacttttttagccgttaaaaattctccccgaactattgagtttgttaaatttaaggacttttgtc

SEQ ID NO: 291136 - DNA, 579 bp, Cannabis indica
attgtctatatcatcggtacaaatttttaagtaaatatgtacaattacattcctttacgtatgttaattttcaaaaattaaatggttaaatttttgggatttagaaccaaacaatagattccatctccttttcctcttcaagtacccctctatcatttcacctctcttatagaatgttttattaatatataggtacttatgttaaaaaattattaaatctattacaaactcaaaaagtttaaagtcccttaaatatcactttttttttttaaaaaaaaaaaataaaatatcaacttcattgaaatgattagcattcagaatacaagagggagattaactcatcccaagcattatactcaaaaatgctacgatcagagagaaaacgagagtgccttgcaacaacatgggcaactcagtttgctgatcgtctgataaaacaaatcctaacattattgagagaagaaagtaaaatttgacagtcatgaataatcaaaccaaaaatagagttcaaagagtgattactacaaatgccttgcacagtgagcatgctattcgtctcaatcttaacatcagaccaat

SEQ ID NO: 291137 - DNA, 629 bp, Cannabis indica
agcaagttgaaagatattgaaaatcaagaacaagaagaatttgatcttcaagaacacaaggatggaaatcaagaggcggaattagatattggagatttggaggacattctaaacctttatctaatttgatttttaacaaatacaatatgagtagttttaaagttgatgttgatatgtttgatggatcaggtgactacagaatatggaggaggaaaataagatctctggcacaacagaagctgttgagggtccttgaagaacccattgaatggcctgaaggaacaactaagatacagcaagaagagtatcttgaaacagctactgggattatcatattcaacctaagtgatgcaatcattaggttggttgataaagaagaaactccagcaaagatatggagaagttggaagtgcaattccaacaaaagtcactaacaaacaagatctttctcaaagaaaggatctttggctacaagatgaatagatctaaaagtcttgaagatgcatatagagttggctactcgggagaaggagaagctttgagtgatgaaaaccaatcaatcatcattctcagctcattatcggaatcctacaaggatgtaaagatagcaataaagtatggaagaactt

SEQ ID NO: 291138 - DNA, 710 bp, Cannabis indica
taccactcttcaaccacgagctgaatatgtaacgccctaaataattaggcacgctacccaagatacttataaagccctaatcccctaaacgggattactaataaaattagcgcagaatttaaactttaatcataaacgaaaggaaaataaaacttgtaataatttaaactttacaatctaaaagttacagaagttgggatcccaaaaacatttacaaaatattattacaagtccttttctttcagccggcctaagcggcaaaacagagtctcaaaaatacaacactggtagaccccaacccgcttggtctgatatggcccggacatgtacattcttcgtccagctcctgcactcatggctgatcagcaatagtcctaccctttcctgcacagtagagcacccgtgagccaagcccagcaagacagtataaaacatatcaataatatgctcatcatataatataaacaacaatgccattcaaatttgtctgtgtgacacagacctgcatgttgcgctcacatgcctatttatgtctacgtggcgtagacctacgtgttgcgctcacacgtctaaatacaataaggccttagaacagttcatctcggttcttgttaccgagtccaacctgattatgccttgaacgcataacccttaatctcaacatatatatttatcacataattaatggtgccactgcactatttgtctat

SEQ ID NO: 291139 - DNA, 564 bp, Cannabis indica
ttttttattatttttatttattttgatgttatattttctttttagtatatattaatcctattttgtttataagttttatttgttgaatttatcaacaatattattgtatgtattttgtactttgtagtatataattgagtctgtgctgtttgatactttgtagtacataatctcatttaaattttggcaaaatcaaaataataaaacaaaacaaaaatatattattgggtagttaaatgcaaattaaaaataataaaagatactattaagtagtcaaatacaaaagtaaataaaaagctcatgtattattgggtagtttttttgatagataataattagttgatcatatagcaatagtaagatgtgatgtatgcttaacaaaataaaataaaaattgtagttagcaattatgagaatgtaatttatggctacatatgttaattatttttaagaaattaaatattcaaaaaccatattaaagttgctatcataaaggagtaaatcatacaatggatgtaattttaaattaaatcatttaggtataaatataaatagtatatataa

SEQ ID NO: 291140 - DNA, 712 bp, Cannabis indica
atgaggaacatttaaatattaatttttttgaatattgtatcttcctccaatataacattaagatccttataagtaattaattatcctatcgataataattgcttgctaaggatgcttaatatattgaagaaaatttattaaatattatgaatcacaatttatctatcctttcgatagtaaattaatgtatttaatagattgttctaacctgtgtatgagttctactttatttatttgtctaagaactctagcatacatgatgatcatttgttattttgcgatcatttgttcatgagaaaagagcacaaatgacatgattttgttataacatgcatttaatggttattgctcttgtttctcattcagctttaagcattccaagaacctctgccatgttgacactgaatggaaccaaccacaaacagtgggtagaatctctcatgttgaatttgactcttatgagagtggatttggccttgagaatggatgcacctcctaaacctgctgatgatgccactgaaaaggataagaaatcctatgaggattgggagcattccaatcgctgttgtttgatgcttatgaggtatcacatggatgagtccattcgtgatagtattcctcagattgaaaatgcaaaggattttcttgctgccattaaggaaaagtacaaaaagttctcaaagaatgagaaaaatgagtgcttgactttgtt

SEQ ID NO: 291141 - DNA, 1057 bp, Cannabis indica
ttttcgtttttttaccttcttaaaatatacttcatctccctccatgcatatataactataaaagtaaattctcggagagaataataatcgaccaccaacaaatacaataatagtaactacaacaattttgaataagattaaaaagatgtgctttacataaagggtaaatattgattttcaagtcctattctttaacattccaataaaaaaagaaaaatcattctataactattttagctctccaatctactctaactattttattcttttttctttttttattctattttttatcgtttatataagttattattaataactaattttctaatagttataataataataattcaatcttcaatatataattattattttgagatatttcaattcattttttattattaatatacaattatatatatttataagtgaaaaaattaatttgaatgttgagatattttagtttttttctttagtgttagttatacatatagataaaatagaataataaattaaaaattcacatattttataaaaaacggtacatctttgtatcaataaaaataatatatcaaagaaaaataaagtgaaaaaatatttataactatacatttgtataataactaataaataaatatatatcttaaacaactaatctacacataactttttttagacagagacacagttaatattaactaatataatttatcaaaagaaagtattaactaacatatcaaaaatatcaaaatcttaaacttgattaaatttatcaccacctttcccctcacataataaaagtaaatatttatcgatcattgtttaatttattttatgtacagagtaaaattattaaaaagatattaataataattataagtgagatacggtgatgacatcaactttaaatacagtggtaactataaatgagatacgatgatgatagttgttttgaaattatatgatgacttttctatagatttgttacattctttctattttagatctatattttgtgtaagaattgttcaatttcaattttttttactataat

SEQ ID NO: 291142 - DNA, 987 bp, Cannabis indica
gtttcaatatgtgattagggcatccatctagcacgagaattccgttcaggtcggccaacacacttgaattcggaaaatgttaagtagtcaaaaatgcatatttattagtgtaaaaatacaaaataaaattaattctatataatattttcatgaaattaatgtaatatatttttatttgaaaatattgtagtgttgagttaattttgtaagaaaataacattttatgacacaaataagagaaagaaataaataaaaagaaattaagaaaatgcattgtttttatttaaagaaatacaaattaattagatttttaaataaatattttcattaaaattattgtgatatattttatgttgaaaatattttgtttggatttaattttgtttgtgtttgaagaagaaaatagcatttatgaaaatgaaaagaaagaaataaaaatggtgaaaatatggcccaaagaagaaaaaaaatggcattttggaaacccaacatttgagccaaaaagcccaaagaatcggcccaaattcatctctcccagccaacagccacgacacgtggcgtcttccggttcgtctgcagaaggcgcgtcagcgccttgtctcctccgaagcccacgcgcgcgtgaagcgcacggacccttctggtccgtgtgtttcgtccactcgcccagccgagagtgggcctcgtcccaccttgttcaccaagcttcaaaaaggaagctttctcctcctttctgcatgcgccaagtgtcacttcatgacacaatttgttatttttcagccaacacaagctcgacacgtggcaccgactcatcaaaggcagccaatccgacagtgccacgtgtcactccggttttaactttttgtatttacaattttacccacatgcaatttgtaataagtttaattgcgtattagtccttttacccttctataaatagaagcttaggtttttagaattcagttacagtttcagacagaaaaatcc

SEQ ID NO: 291143 - DNA, 438 bp, Cannabis indica
cccaagttataaccttaagggcattttagtcattttatttggtaaaggtttaggtggctgcctaaaggagtgacacattaattcttttaatcttcctttttcatttaagaacaaaatcaagaaaataggaaaataaggagaaatggcattttttctcttgaattctctttctttctttccttcggctgaggcaaccagggcaagaacctatcttttcatcttgtttttctggaattcaactagggtatcaagcactcttgaagctaaggtaaaaccctagaaccctagaacatgtttttaaagtttttcttcttagtttgagcttgtgtttttgagtattggtggctgttttgatttgaaatgcttagggatcaaattctaggtttagtttgggttaattaagagttagatcagctggtttggttggttgatttaggt

SEQ ID NO: 291144 - DNA, 503 bp, Cannabis indica
accattcctcagcttccattggatctgagcccccttaaaatttggtgggtgttgcttgcggaacctttcatatattggttcccatcgaccctccagcacaggcatgtattgcaccggcaaaaatcgatgttgtccttgattggattgttcctgacggttgtgaggctcttcatctcgcttcctaatttcttccctgagacgagcaacttcttgcgccaaatcttcttgttgtggtggcaccactacaggggcgttttggtgttcttgaccaactacccaagcagggacttcgtggttgcccccaccttgacctggttgttgtccatttacaggggcattttgattctcctgcatcacctataatgactactctagtaatttggaatagtaagggcaattagcactaatttttattattttattattatttttgaattaatttaattatggaccccaatatttagaaataaatattagagttataatttctcaattccggagat

SEQ ID NO: 291145 - DNA, 726 bp, Cannabis indica
tgccttctccgggaggcatgttaaatgctgatcctattaatcaaggggaattagtcgaattatcccaaagtcttgcttctttaatccacgtgtcacagtcaggttggtccacgtattttggacaaaataaagggcaacaacaataataatatgcaattatataatgtaatttcattattactatacattgaaaaatatttttcttaacttattagttattatttatatacaataaattttaattttctattattattttactaataaaattaaaataataaccgcgcgaagagcggttatattggctagtttctcataaactaaaaattatatagccacattttatatagaatagatattgtacatatattaaagcattacacaatttaaattatctaaatacttttaaagtactttatactttatgtagttaagattaaattcacatctatatattataatttgtgggtactcgtttatatatatatacatcgattgatgaattacgtccacagctttttcaaggagcaattaatcggtttatccatacacatggaagagctaaagacagtgagtgataagttagaggtttccaatgctccaaaatcttaatgatcatctttatcttgataaatcactgtcaaatatatcaaattaaataagctttatacatttatataataagtaaaacatgttgatatatatatatatatatatattcagata

SEQ ID NO: 291146 - DNA, 601 bp, Cannabis indica
atgatgttcgaactgagtaatttatataatttaaccacttcaaggaaagtcgaccattactctattacattatgtaatgtttttgctgtttactttttaaattacaataataatatatatatatatattttaaaaaaatatttaataactacttttcttttgtttttaatttttattttaaaaacaaaatataaatatgtgtttatgttaaatttttttttttattttttataagtgaggagtgggtgagagaaagtgggcaaggatcgagggtcaagggccaggatgtccagactggggctggctggggttcaagccagactagtgtccttgtttgctctgatgtatgggttgcggtttatgtttcagcaggagacgagatttggggtcaccgtcttaagctaattgggggccttgggccaaaaaaatgtaattgagcctttttttatgtatttttttgtaaataatgataaaaaaaatatagtactttaaaaacataattgggtttaatgaaatattaaatgtagtatcttaaataaattaagtatttttttttagaaaatagttatatttttaaatagtggcataaatactcaaagtt

SEQ ID NO: 291147 - DNA, 1043 bp, Cannabis indica
tggacccatattctggatataaccagataaaaatgtaatgtccctgatcaagaacatacaagcttcctaaccaacatgggactctattgttataaagtcatgtcgttcagactgaagatcgctggggcaacgtatcagcgattggtaaccaaaatgttcataaaccaaatagggtgaaacatgaaggtttacgtcaatgatatgctggtaaaattgataagaagtaaggatcatacctcagaccttgcggaatgctttgaaatattaaagaagtataacttgaagctaaacccgaaaaaatgttcctttggagtttcctcaggaaaatttttgggattcatagttaacgcgagaggtattgaggcaaatcctgaaaaagatcaaggcattaatagacatgccatcaccgacaaagcctaaggaagtaaaagccttgacaggaagaatggctgcacttaacaaattcatttcgaagtcaattgataagtgtgtgtcgttcttcaacatattgcgaggcaacaaaaagttcgagtggacaaaagagtgtgaggaggcctttcagaacataaaaaggcatctcgcaatgcctctaattttggcaaaaccaataactagagagacgttgtttctctatttagccatctcggaagatgcgattagtgcagctatagtgcgagaagagggcaagcaccatcaacctatttactacgtaagtaagaggttactaggggcagaatccagatattcccctttagaaaaacttgcgttgtgcctagtccatgcgtctcgtaagctatgaccatacttctaggctcaccccataaaagtgttaaccgatcagcccttgagacaagttttatcaaaaccagatgcttctggaagattgataaaatggtcgattaaactggggcagttcgacataacataccatcctcgaacatctgtcaagggccaagctttggcttactcttgataaaaggtataactctagaagaaattccacctgatcagcgaggtgaggaaacctggaggttatacgtgga

SEQ ID NO: 291148 - DNA, 603 bp, Cannabis indica
catatacacaatatatatatcatgtatgcatgtatatagaaatcactatttctacatatttattctcacaaatatatatatatgtaattatatctcatgctcatcatataatatacatataactcacatatgtcacatattatatgatatatatatctctcacatatatacatataataatatgttataatctcaattataatattatatatcactatatataataatataatatacacatatcatatatattaacatgtaaaaactttataccaaaatatcatatctcatcatatgaatatgttaatatatattactattaaataaataagatatcacaaaataaatccaccatgcttacccatggatggcttgaatctcttaccacattatttttcttctcatgatcttgattgatgctctccctcatggataattttctttgattgtttgacctccatggcatgtcttttagaaagaagaatatgccacataaatgacttttagattgttggaaaaattctcattacaagagagaataggaggattacaatcaaaatactcaaaatacaaataaaagtatttcatcaagattacaagaaa

SEQ ID NO: 291149 - DNA, 536 bp, Cannabis indica
ctgaaatttccccaaccggtagatcggttgcccaaccagaattccgattctggaaattttcgaaacccatccagaattccggatgcacaaccggaattccggttcctcgcaggcagaaattcaaaaattcaccactcaatcaaatccaacccaaatcacctcaaaccttccagacctgttctatataacccaaataacatttctaaagcattaaaatcacccagaatgcacagaattgaaaaacaccatgtgagctccaagctttgagttcaaactcaaacttggctaaagctcactaacatgcctcaaaactagcttagaacttcataaacaagcataataacactgcagaaaactaaccctaattcatgcaaacactacagccacaaatttcaaaaattctctttgaaaaccaaactttgagctaaaactttcaatctaaaaatcaaagcaattaacatgcattacactagctctaatctacttaaaacaacaagattaaacctcagtaaaacaccataaacacagcagcaaga

SEQ ID NO: 291150 - DNA, 820 bp, Cannabis indica
catattttaaattaaatgatagtcttatcttttaatttgaaatattatatttatattatcttataagatgaattaaataattaataaatttgaattaacctagatattttttatagatattctaaccataatatttttaatttcaaaaacaagttattttgataaatatttaattgtttataaatcataagttagaaaaatgatattttatatcattttacttattagaaatttataaatagtattttaaatatttaaataacctagatatttttgtagaaatttgaaaaatgcttaatttgagatattttgacatataatttggataattattatttatttattattttattcttaaaataataattacctaaccatatctattttaaaattgatttattttgttattttaattttattaaattataagattcaaaaatgatattgaaaatatccatttggtaatttttaaatcatttatcttattagatatttaattaattagataaaataattaaaataaacctagataattttaaactagtttgaattttttatttgttttgaaaagaatattttaggttattttaacaaccctaaatttttaaaatagttcgttagttaaataataatttaattatttaatatcttatttcacatttattacatggatattatgtttgttttatttaaattgtttattccaaaactttatttttttttaaactaaacctattatttatctgatttaaattgctatgattaacttgttaagagattcaattaatctgatttgaatcatagtccaattgtcaataga

SEQ ID NO: 291151 - DNA, 320 bp, Cannabis indica
ttaattctggaaaaatttaaaatcgcgactttgcacgactacactagcgacatgttgcgatataggaagaacatttattaattctggaaaaatttaaaaattgcgactttccacgattacacttagcgacatggtgcaatgtaggaagaacttttatcaattttggaaaaatttaaaatcacgacgtttcacgattacttttgcgacattgccttgcaatatttgcatagagatccaggcttcacctgtttaccattaaaataacctaacttgcagcgacggcagccttcggggaaccctggtggtggagccggccatac

SEQ ID NO: 291152 - DNA, 619 bp, Cannabis indica
tgtcttaaaactagaacttcatgtttgttatattattgattcatatggaagtagactatttcgagggtgcaaccaagcttatatgcttaaatttgacgattcaagtgtaatttacggcaccgatcaacaaattctttgcacgggcaaagattgctgcaaggaatatatgagaaagtttttaagtagtaatattgttatgaaactggagaaggaatacaagaggggatacattcaattaccttatctatatgagaagttgcaagtagacatgagttatatgtgcttaaatgctccatcgccggtatcatcttcatcgacgtcttcctatgatgccccatctttccttcaattgtgatgattcttcttttattagtgatgctcatcttcctaatgaagagtaaataagattgtgtgataagattgtgtgttatgtagatgttcagttaatatgtaaatttatttattttattattttgtgtttatgtaaatatttaattaatatgtaaatttatatgaaaatgtttgaataaattttaaatttaattatatgtgagtaattaaatttaattagtactacaaacaatcttcaatagtgactaatgtatatcattactttaat

SEQ ID NO: 291153 - DNA, 501 bp, Cannabis indica
gtccctccattcggcgaacatacgcctctgttcatcaaacgcaaggtttactgcagcacgtaattcctcctgatcatgatgcagagtattgatgtgaccctacatgagtccgagcacagcgcggagattatgcaattcggttgcgtctccaatggtggtttttcctggttaaatagtcgtgttgtgaaagccctggctgtgtgcggaaccgttattcccagcctcttgcacaccaggcgcagtttcagtaacaggagttgtcccaccattcaccacgcttcccgtctgtccaagatcgacagcgggtggaacccttgaactccctaggtcctgcaatgtcagatccagcgtctgtgagcttgctgggtcagacaggcctctacgagtttgtaccatcatgtcgaatattgaaaagagtgatctgtgattctgctctaaatgaaagtaccaaaatgttgacttcgcttttagccaacgacaatgagtctttttgataagcga

SEQ ID NO: 291154 - DNA, 580 bp, Cannabis indica
cacgccgaaaataaagttcaaattatgtgttatatatttgactctttattaagggtacgttaaaagtacattttaatttattgtgtgtaaatttaaatgtgaataccataaattatttttatggtaataaaaataaatttttattttaaaagtggtgtactaattattatttaaatataacaagatataatattagttttttttaaaatttattaaaaaaattaatataataataaaaatattttttagtgttgtggttggagtgaaaataattttttaatactaaatttagtgatagtataacactaaatttggtgtactcctctaacagtaagtttttgtttttacgtttatatacatatcattactcaaaacaatattattaccataattattagatgttattattttagtaaaaattaagatgttataatatttaattattaatttaaaaaatatttaattgttattggtgtcttataatatcttttattcttacacttcactatggctaggtgttctatataatatattatacctactttagtatataataatgtttattttattttttactttt

SEQ ID NO: 291155 - DNA, 697 bp, Cannabis indica
ttccgccggtaataagtcctatccgccggtaatagttgatttataattaattaatatatatttttgggaaatggtttttatttaataactattaccggcggtttactaaatccgccggtaatacccagactattaccggcgggtctattccgccgggaataataccgccggtattaacttaatttcttgtagtgttcattattttttttgcaaattaatccttaaggtggtgtttggttaaaagtaatgaaaaagaaaatagaaaggaaataatttttattctatttctttgtttggttgcattttaaagtattggaatgaatgaccatttcacattttggtggaatgactattccatttgaaaaaatttaataatttttttatcaattttttttatgcattttaaattttaattcattaaatttctatttcaattctcattccctttctatattttcattcctcccaatcaaacgccatctaaatatttagtctcttggcaatttgaagcctttactattagatattagtcttttgttgaccttttatattttacatgttttcatctcaattttaataattttttagaaatatagtgtacattaatgtatatttttttctcaagtatatgtatatatatttaattaatttaactaaatatttaataaatttatatatatttaaatatgcaaaaaaa

SEQ ID NO: 291156 - DNA, 568 bp, Cannabis indica
agatagcttgttaattttctgattacttgattatttgaattatgttgatatcggaatggtgtgggaagaattataatatatggaaatacttatcagtattgttattacctggaatgtgatcgcaggtgtatagttatgcacccgaggcggactggtaggggtacccgcgagctagctgggctcggggctgccggtgagggtgagaaccctctaccaccacctaactgggaagagttatacgctgcaatgcaagagactattcggcagcagggtgagcaaatcagagaattaagagagcagcgagctcagcctgctctaaaccctaatcctgatcctccggcacctctggtagtgccaccggatgcagggaatcgtttggaaccattgtatgagcggttcaggaagcagaacccgccagtgtttgagggtggtgctgatccactcaaggcggagcaatggatgagtatgataacatccatttttgattttatgcgagttgaagataatgaccgggtcaggtgtgctacttatatgctacgagatgatgcccgtatttggtgggagattg

SEQ ID NO: 291157 - DNA, 443 bp, Cannabis indica
ccccccttctgcagctactacgctatgattaatgagcctagtgacggctactttatgagaaatcacatcagccaagaaaggataaaggattacgtccattaaacccctaaaaagcctagggattagaccatgcatttcctatgatgtatccattgggaatgtgtgcctttactgaatattacagaaagacatgtacctcaattctagggatcaccccacaaaaacactataaataccccccaaactcattaagacaggggtcgagaattctgggttccataagaactagagaggaaaactcaccaagaacattctctgtaataaatactctcataaatacacagactcgtggactaaggctcattaatgccccaaccacgtaaaaatctcttgcattaacttcttacagctttcttaaatattattattatattggttgtcga

SEQ ID NO: 291158 - DNA, 766 bp, Cannabis indica
ttttgggtacacacctacccgtttatttaaaaaaaaacagtagattaaaataattaaacgtattttcataaattttttcaaaagttggtattatgatataattttctctatacacacctacccgtttattttaaaaaaacaataaattaaaataattaagcgtatttcataaatttcttcaaaagttggtattatgatataattttctctatattatatacatatataaagctaacccaatatataaagcaacccaatgacccttttctttaattttcagcccaataaaaatagcatcagcccaataagttaaactctaaactaaacctagtatataaaggaaagaaacatatatcattaaaatcctaaaactattcctacggcagccactattgtgaaaagaatattcaaattctttcaaaatccttttctctcttcaacacaaaaaagcaggaggtaaaaataaattctaggagttaaagtttctaatatttctttctctacttcttcttttcactcttatggcagggttatattgttgtaatgggttcttatactttcttttctcttataaatttcttctaaaaacagtaaggaaatattagggttttctaagtttttttcttatttctcttttgtacacacctatggtttagggttcttaatttttctcttctcacttctacccgaaaacaataacccagaaaactttcacaaacttcggcctaatctctacacaccaaatccgaaaatcaccaacaacacc

SEQ ID NO: 291159 - DNA, 1286 bp, Cannabis indica
caacatgtgtttttaagtacaaaaattaactaagagattgtaataagaggttaataatagcactctttaaaaatgagaataatcacattatatgctattttagagtgtttttattttagagcattatatgtttagctaacatgtaggtgccttttaatatttcttgcctattttgagcatgtgagtatttttaatacttttaaacttatttatttaaaattttttagaatttattattcatgttctatatttataaaatataatttattattttaaatatattttattaattgttttagattaattatgttagaattttatgatatattttaaaaaaaattaatatatggtgtaataatttttttttttttggataaaataaaaaatatatattgttgatatattttgaaaaaaaaaataagagaagtcaaattagagtattctaatattatagtctagtgtgccacaatttatctcgcaaagagaatatcttaaattcgaatcttctataatttaaaaatatatactaaatactgatttggtacatgtattttattgaaatactaattttgtgtattatagtatacttattttgataatttataatttaaaattatatatataatgtatattatcttaaaatattttttttttaatttttcttcccacgtaagatttatcatcttctattaaaaaaataattttaattattgacaactttaaaaattaattcaccatgatcatatatcacattaaattaatgacttttaagtaaaaaaataaactttgttctaataaaaaaattaaaaaaattaacatatgaccattatttatattgagaacacttcacataaaattagtcttgaaaattagactacatcggatatgtggcaagactactttaatagataactccggttagagatgctctaaaggacacctatggtacccaatacttttatgatattatcattattagtacaattcaatatcaaatctcatttatattactttaataaacattataaaaaccgttaactaattataaaacgtaaacttcatagtaatactatatagtatacacttggtgctacataattgtgctcggaattttatccagttacttaaatgtaacacttattttctactgtaaaaactaaaagtaaaatatcccaacttaaaaagttaccatttaattctctttttgctttttttattgtcttttataatttctagtaaaagtagctctaacttcttttatcgttttcttcgtcatttgtccccct

SEQ ID NO: 291160 - DNA, 676 bp, Cannabis indica
taaaaaggcatctcgcaatgccttcagctttggcaaaaccataactggagagacgctatttctttatctagccatctcggaagatgcgattagtgcagctatagtgcgagaagagggcaagcaccaacaacctatttactgtgtaagtaaaaggttactaggggcagaatccagatatccccctctagaaaaactcacgttatgcctagtccatgcgtctcgcaaactactgccatacttctaggctcaccccataaaagtgttaaccgatcggcccttgagacaagttttatcaaaactagatacttttggaagattgataaaatggtcgattgaactggggcagttcaacataacataccatccttgaacatccataaagggccaagcattagctgacttcttgatagatagtataactccagaagaaatcccacctgatcagcgagacacggaaacctggaagttgtttgtggatggcgcatccaacgagcagggtttcggtgcaagggtaatattaatattgccggaaggctttaagtttcactatgcactgaggttccaatttgacgcatccaataatgaggctaaatatgaagcattgatcgctggcttaaagatagcagaggccttgaaagtaaaaaaatctcatttgtcatagtgattcgcagctgat

SEQ ID NO: 291161 - DNA, 628 bp, Cannabis indica
tttagagcttgaatcgcgtccccggacccgcttcgagtaaactataacttaaatttataactctcttgagggtaaaattcggagtagataacttcagaattataattgtagtgtgcaacatgacttgacagcgcatggaaatagctttaaaatacaagttgaatggtgtcaatcagatagatattgagtgagttatggtcattttattgaaggttgttcttggtccagtgcccaaattgacatgtaatgtcaacttggatgctaggtgagtaggaaaatgtgacaacgatgtatttttttgatgcctaagtgatatttggacctcacttagcctgtttctatgttctgctgaaactggtcaacagttcttggagatgatgttgttttacgggaacgagagactcgaaactcctaatttctgataagccactttgctagaaagtaaaatatgaagctgtgaatttgactcttctaactttatggctattagaaattatgaaaaattagatgaacaatcaagacagaatcataattcgggataagaaaaacccagcgcaccagaccatttgtcaacctgggtgatgggtggttcttcaagctttatgatgtcgtttagacacttccaagg

SEQ ID NO: 291162 - DNA, 603 bp, Cannabis indica
gagtgaaaaacgaaaaataaggagagaaaacaccagaatttgtttcagagttcacccaaatctgggctacgtctctgtcaagctcttctcagagatagaagcttgatatccactatcacaaggttaatttacaaactttggagcttcctgtcacagaaatcgaccaggtaaactcgattcctctctttacagtttatgtttttgttgttttctttagatttgttctcgatctaactctctactttgtttttcttgtgcatgtacttcctccttcgagcttctcaccatgagaactggtttctcatgtttggatcttggagcagaagactaaatctagggtttatttcttctctctctctctctctttctttctctgatctatttttctggcttagatcttaggatatttgctttgattcatgtatttatattgttgtagagtcggttgatcaaaggcttaggagttagttacaatttcagttgtaactaactactaagtcttgatccactagaggcgaagccaccctaggactgtgtctgtttgcttggtatagtttctctgtttttttgaatacaaatattcatttcagtattaaaaacaca

SEQ ID NO: 291163 - DNA, 349 bp, Cannabis indica
attatttaatatttattaaaaattatatataaaagttttataaatgatattgattaaagtaatgtaaatttttttggaggaatgaatagtgagctcgccacatttggtttgtcgagcttcctattctcttcgctattttaaggagccatatatgttgccattggagttgaatatttagttttgcttagctattatagctaaggaacatataattcgtgaatagttggagttgctctaaagaaagtgaaactatgtttttttttgccgaaaataaaagagataacgtggtgcaaatctaagaaggcaatattgttggattatgttttaacaggatctagatttactacca

SEQ ID NO: 291164 - DNA, 542 bp, Cannabis indica
ttctactcttttggcccccacagcctttgctaatctcagccctgctatcaaggcttcatactcggcttcgttgtttgaagctgaaaagtcgaaccgtaaggctgcctggagtcgaagtccgctcggggatatcattgcaacccccgctccggatccattttcgttggaggctccgtccacaaatactttccatgtggggaccgatggtaccggcgcgttcgcggttgcctcggcttcattacattcggtgatgaagtccgccaacgcttgtccctttatggagatacggggtatgtagtgcaagtcgaattgacttaactccatcgcccatttgaggagccttccagacgcctctggcttttgcaggacttgccggagtgggtgattggtcaacaccttgattgggtgcgcttggaaataaggcctcaattttcttgaggccattaggaggcagaaaactagtttttcgatgacggggtaccgcgtctccgcccctatcatgcgcttgctgacgtagtacacgggatgttgagttttctctt

SEQ ID NO: 291165 - DNA, 586 bp, Cannabis indica
catctccggcgggagcaactggagccaatactcctactgcaccccctggtgttccctgcggtacaacccctgtcgcctgacccgaattgaggtgaggcagccgattcttgatccactcatagaggtggccaaatcggatcaggttttcaatctcatccttgagatttttgcattcattggtgctgtgcccaatgtcgttgtggtactcgcatctttgttggggtccctccgggagctatccttgtacaagggaggtggtctccggtagtgcgtattttgcctagtagcaaagtacacacgctcttgggagtccgtcagctccgtgtactgggtgtactgtggagtgtaccccctcttttgacgtttctcctccgtccgggtgctgcctttggaggatcgtttactcctcgagtcctgggaggggcctgccaggctggcggtgttgggttttatgccctaaataaaactcatttcatataatcagatttacttattaataaagatcagaaataacgagttaatatgcaacgagttaatatgcctatatccactgaaagtaatttcatctcattcgcagatggatgta

SEQ ID NO: 291166 - DNA, 647 bp, Cannabis indica
taagtttagaaccttatttcatagtgggaaatattttggagaaaataaattatcgggtttgagcggggttatgggatttgaccattttacccctagtttggtggaatatctaagttgtaaataggagggcattttagtctttttcctttggtgaaggataggtggcagccttaagaagtgacacctagcattttatttcagcaaaggattagctttgttaactcatttatctcattttgggaattaaaagaaaaacatcaaaaattgaagaactctttcttctcttctctctctcttcgaaggcagcaagaacaaggggaaggggctgggatttctttggatttttcagcaaggattcaagctattgttagtgaggtaaagccctagactattggttattgattttcaagcttttaaagttaggttgaaatggtgttttggagtaataggagctgttaaggtttgaattgcctagggttcgaattttagggtcttgttgagttgattctaagtcctagctactggttttgatgcttgatgttagttctaagcaagcttgagttttgaaactcaagctttgagctttaatggcataatttgatttattggtttgttctgtgaattactgcctggattttattgtttat

SEQ ID NO: 291167 - DNA, 682 bp, Cannabis indica
gacttggttaccggggcagttcccaaggtgattgggagtttgatcattccttttaatgttatgacgtcgccagtaaagccgtagatgctcgacgtcacaggccgcaggtccttctcctgcaatcccatttgtttgaaggcttggaagttcaacagatttactgaacttccattgtcgacgagtatgcggtggacattatctccgccaatattggcgatgataaccagtgcatcggaatgcgggtgatggacccatctcgcatcactctccataaaggtgatgtcattgcattccttcttaaacagcttctcgggccgctcactaagattgtttacattggtgagcggcttttccttggcttctctggcatatcgctcttgcgacttgcgggagtctcctgcgatatggggtcctccaatgatagttaagatgttgcgaggtgttctcgaaccgctcgcattttggttttcttctttgtcatccgctcggggatgactttcctcgcccttcttatacttgtcgaactttcctctccgaatcagctcctcgatttcgtcctgcaagacccaacattctaaggtagtatgaccaatgtctttgtggtacttacagaattttttggggtctcttctgtcgcgatttcccctgatggggggcggcttcttgaagactccatttctct

SEQ ID NO: 291168 - DNA, 650 bp, Cannabis indica
agtattttataaacaaaaaaaacactattaaaaaagctcatcacttttctctttcttcttcttcttcttcattttctcttccctaaaaaaaatcccaaatgacaattcaacacaacctaaaaaaaaaacaccaaaagaacaaaacttgttcattatttttttcatatatgcatccccattattatagttacttgattttttggttactagttacaacaattctatttaagtatggttattgtgagtcatcatcaattggaattggttaccaatttactctgcctgtggtggtgggaatcagtagtggaagagcttatttaatggagagcagtaatgaaataaaaaatgagccaaattttaaggtggcattgagtgttgaagccattgaagaaaagttcttttgttgtttggaagtgtttttgggagatgttaaggtttggaattcatgtcattacacaagattttatatggttgataagtgtgttcttgattttactcaagatggggttttgaatttgaagggttctaaagatacaattgggtggacaacagctacttctggacaaggtgtgcaggtaattattttatttatttttattattagtaattttattataatataattaataaaagttattgctatatagact

SEQ ID NO: 291169 - DNA, 523 bp, Cannabis indica
catacaacatacaacatgcaacagatacaaatacatcatacaacatgcaagatacaaatacaacatacaacatgcaacatacaaatacatcatacaacatacaacctaaaacatacaaatacaacatacaacatatacaagtcatacaaccataatctatgtatcaattcacaaactcatattgtgtccataccacacattctcagtaccatatacatattcataataacaaatcataaatcatatttcaatacataaagaatttaaatttatgcagataaacacatacaaaactatctaatttccttacctcaaatcccgctgcttaaacttgttatctcgtcactactacctataataacacatgggtcaaggccctaacattaaaattcacactcttacagtacagcagaaagaatactatttttgaccaataactacacgaattcagtaaaagtttccttcataaaaattataggaaattcaattatctttccaacgatatatagatcattaaaaatgg

SEQ ID NO: 291170 - DNA, 467 bp, Cannabis indica
cgttgggtcttggcggcaagccaggaatatgctgggcatctccggggggagcaactggggtgaatgctccggctacaccccctggtgctccttgaggcaaagctcctactgcctgaaccggattgaggtgaggcaaccggctcttgatccattcgtagatgtcccaatcggatcaagtttttgatctcgtccttgagccttttacattcattggtgttgtgcccaatgtcattgtggtactcgcatcttttattgggatccctccgggagctatccttgtacagaggaggcggtctccggtagtgcatattttgcctggtagcaaaatacacacgctcttgtgagtccgttagctctgtgtattgggtgtactggggagtgtaccccattttctgccgcttgtcctctgtccggttgctgcctttcgaggcctctgctccgagagccttgagaggacctgctagctt

SEQ ID NO: 291171 - DNA, 477 bp, Cannabis indica
aatatttaaaattgaaaatatttcaaattggaaatatttaaaattggaaaaattgaatttttggaaacaatcccataaaaaatcggatttttggggaaaatcccacaaaaattgcaatttaggtgctggctgcccaggaggctgcacctgcagcctaggagaggctgctagcagcctcagagcgcgcggaaggaggagtaaacgccgagaatcctcggcatctgcagcatctctgaccgagaaaactcggtcagctgcagggtgatgggcgcacggggacttgtcttgtccgagggtctggtgcgcatgagcaccaccctcgacaccattgaaccttgatttttccaaaattcataactctttcaatttttatcggaatcgagttccataaaacgaaattgcttaatttttcacaagaaatctaaataaatattttcaaaaataaaaaaaaaaatttcaatggaaaaaattctgtac

SEQ ID NO: 291172 - DNA, 446 bp, Cannabis indica
tatatataacatacaaatacattaatatgcatatacacaatatatatatcatatacacataatatatatcatatatgcatgtatatagaaatcactatttctacatatttattctcataaatatatatgtaattatatcgcatgctcatcatataacatacatataactcacatatgtcacatgttatatgatatatatctctctcacatatatacatatactattatgttataatctcaattataatattatatatcactatatataataatataatatacacatatataatatatattaacataaaaaaaaattataccaaaatatcatatctcatcatatgaatatgttaatatattattatcaaataaatccaccatgcttacccatggatggcttgaatttcttaccacattatttttcttctcatgatcttgattgatgc

SEQ ID NO: 291173 - DNA, 516 bp, Cannabis indica
agagcatgactaagtctatatatatttagtatataatagcatatatagtagtatagatggatgaagaacaaaaaaataaaagtaaaataaaacttgcattgctcaaataaatattgcaagtaaatcaaagatacaaaataacctcacgttgcatatggaatcatccctaaccttccaaggaagattaggccattatgctaatcattctcataaagaaatatgataagaaaagtgaagataaattttgctatagtttctttactctaaaaactagggaactaatccgcgcttcgcgcggtttttacaatagttttaaattttcgtaggctaaatcattgtataaaattaataatataatataatgacaacacaaatttttgaactcatatttttaacaattgtaccagctcacacataatattcatgtattttatctatatatgttaggatgattattagattatgtaatgaaacaaaattaaattaacttaatatataaatttttactcatcaaat

SEQ ID NO: 291174 - DNA, 823 bp, Cannabis indica
tgagtttataataacattataaattgaatgagtatttttatagagatacaagtgtccaatgttaatagaattgtaattttcgtccaattacattagtatgaactctattaatatcttaaatttgtaactagacttagttttgaatttattgaaagaagatttagaagtaattaacactatatattttcatctaaacccattaatttaaaatatagacgaaattggaggaggaaaattatagttttaacattagatacttatgttaagtaaaaaaattattaaatttatgtttgttagaaattcaaaattttaagtacttttccccaaatattcctaaattaatattgtgaaaattattctaattcaagaaaataattttccaatagtcttttaggagaagctacttgacctttactttatttttttcataaagaaattatctttaaaataattaaaaaaaaaaaaacaaaagaaaaaattccaaacaacgccaaaaaaaataaaaaaaactaaaaaatcaagcccataaaaaacttagccaatagggtcagtataattataaaatcttaaccaactaaaaatgtcatgtgttataataataataataataataataataataataataataataataataacaataaatttagaattaaaattttactttcctacatttcttttctaaaataaagttgaaaaaaataaattaaaaactaattatacttgtagattctttttattttaatttatattgtgacattgtcgactgattttttagtctaatgtacacgaaatcgtaattaatgggaatacaaaaacg

SEQ ID NO: 291175 - DNA, 869 bp, Cannabis indica
ctatgcattttacagtgaaatcaatattaaaaattgaccaagggaagggtgtgtagtaccatccatagccaagtcacaagtggtaacttagaatttttcaatacttaattcagaatacctaatgatgagccttgaatgttttctttagtaggtttagaaagtgagtgctatagaaatgaagtatatattcttatttacatataagtacttagtccttatactggctaagacaatttatttatttatttttggaaatggcatgaatttcattcaaaatttaacatggacaacagtcttacatgctaggccaaacaaccgaaagagtcgcacatatataatcaaatagcagcaaatcaagccataagccctagaaaaggtcatctagcactcacaaagagagacatagaaaagaaagcacattaatatgtgtatacataaatcacacataaactttaaacacatctagctatgtggcatatacttttagcaagtatgactcatcttaaataaaatggattgattgaaataattacttgccacataaaaatatgtcaagtatgcgtaatttatgtgtacagatagatatcactactctaataatatatgcctataaaaagcatattaagtagggacctagtaatatttttattgttggactgctacatcatcttaactcacacattagtatgatattattatctattttggacctaaaactttcgtggatttatttttggagatcttttcaaaagtaccccatactgatagagtgtatcgattttaagttagtgtggcaaatttgtgtagtatgattaatctggaaacataacagatgtatttgactagtaactaattggcatttggcacgt

SEQ ID NO: 291176 - DNA, 787 bp, Cannabis indica
ggttattttaaattttaatctcatattattctaatttttaagatttattaaataataattaattaattaaaagagaaaaattaaataattaaaaaaataaagttaacctacccaattaaaagatgcaaaaataaccgaattttataataatactaattattttagttttattatctattattattaattaatattatttgatatgatcattcttgcttaccaaaagaaaaatgagattataatacaatataaattaaaataaaaaatatgtagtatttttaattaatatattgataataggtataatagagtatactaagtgatttattatataataagttttggttttaatatttatatatattaattacatatataatgcttaaataattattaaaatatataacagttgtttgaatatttttttatagaatattttatatatgttatttgcttatatatattccaattattaaaacaaaataatatgtaataaaactcaaatataaaatctatgcacattattacccatataattataataataagaaataaatattaatttatatcttttatttatttatatttatatcttatatatctatatctattctatataaagtgtgcctatataaccgaatttttggtttatgagaaatttatgggtgactttttatttatattaaaaataaaatagtctatgagaaattcataggtgactttttatttatatataataaaataaaaataaaagaaataccccgtaaatcaaaaaaaaaaaaaaaga

SEQ ID NO: 291177 - DNA, 561 bp, Cannabis indica
tatacattaaacataatcatgaaataaatcatgtgaaccatacaacgtaaaagtaatttctgatcttatattaattagtaaatctgattatattgaaatgagttttatttagggcacaaaacccaacaacgtgatagtgcaattgagtgagagcaataatcatagatatgaaatttatagcttctataacaattagaagtgaaacaataatttctttcgagcttggctcaacgtgataaatgatagagcactcattttagtaattatattagtttactaaaacatcatttacaagtagctaagtgttttaaggataaaatacattgaagggtataacaataaatttgtccatactctatgcatatcatctatagaggatctttgattatttggattgaaataatggataatttatagcgtatctattcttggtgaatagagtgtctatgtaatcaggagtgcaattctgaatttatagtggagtcaggaggaattaataagttaggaaatttacttggtaaatttcagatctactttgtaacaccctaactaccttaggcg

SEQ ID NO: 291178 - DNA, 508 bp, Cannabis indica
tgtcaagaccgatcagggtcagaggaacgacaataaccaagagttactacctccaccggtaaatggacatctgcaagtcatcattggaggaacacatattgctggagattcgggcaaagctcgggagaggtatgcccgaacagtgcagcacaaataagaggaagttatcctggtcgtgaagaaaggaagctcgaagttccatgagcaggagggcctaccataactttcaacgatgaatacgctgtcaaaattagatttccgcacaatgacccgctggttgtggaagtccagatagccaataaaatagtggccagaaccatgattgataacagagcctcttccaatatcttgttcaaaactacttacgaaaagatgggactccagctcaaggatctaaccccatgtctcctgcctgtctatggtttctccggtcaagtagtcgcagctctaggacaaattcgtctacccctcattgttggacaagctccgacgagcatgactatgttgg

SEQ ID NO: 291179 - DNA, 322 bp, Cannabis indica
atccttctcatatactcagttatgagagccagtgcagatcctggatagaaaggataaagtccttcggaataagaccatagctttggtcaaggtactctggagaaacagcaaggtggaggaagcaacctaggagctagagtcagatatgagagctcaatatccagagttattcaggttagatttcggggacgaaatccttttaagggggggatagttgtaaagaccgcttagtttaatttagaaattagcataaaatcatgtttaattatgaaaattatttatatttaaataattatttatactgttattatcgaattctgaa

SEQ ID NO: 291180 - DNA, 804 bp, Cannabis indica
aaatttcaactcccactcaacccacgatttctcaactgtttttccctctcagtttcatcttgtttcaaatttatttataaaatggccatcactcgttcatcatcatcaccttccccagttcagaaacaaaaatcgaaaatgggcaagaaaactttggctaacaaatcaaagggtaaacgcccgatcgttgaagagtatgattctgattttgatgctcctctgaccaagcgtgggaggccacatacttcgaagaaaacgaagctcaatgtggaggagcaaacggttcaagaaatttctgggaaaaaaactagtgcctctgccgaagttcgaacagaggttggttttcagtttcattctcgtttccccctttttcaacatttagacttttcccagatttttgcgtttttttgttcattctgctttgtgtaattttagggtttcattttgaacatttcgttttatgttgtttaattttttaggtctttattgttggttttgagcaatttattttgttcttttctgggtttggtttttaaatttgattttgttttctttattttcagtgtttgtttgtgctttaggttctgtattttgttttcgtttttagtgtgtacaatcagttgtatgtagtttcttattagttttttttatagtttaatgttgttatgtttgattgtgttttttcgattttcaattaggtctagttgtttgttgttagtttttagggtttctaaaacgattttcagaatctttgctgtttatttttgttatagttgtatctgtttggtagtttgtttttggttt

SEQ ID NO: 291181 - DNA, 799 bp, Cannabis indica
tctttttttactaaaaagaactttttatggggcaattgttatacccaaaatttggctggaggacacgtgtcaagataaagggaatgtgaatcagtgcaatagcttcttatggaataacccattaattacgtaagtattagagtatatttgtaacccactgactgtaaggtcttaggcaaggaatcaatgtacaaactggcacttagtgtattagcgagaaaccatatgtcgctaaatatgaatagcgaggcaccggagaaagtgacacataccaactataaaagtccttagcttgcaatgagcaaagtgtaacagtcaaatcggctcaaagaccaagtatgtgagatgatcatctcgctatcggaagacttcttatagcttcatctaactaacaggagcgagactcacaaccctggcaagttaaaagatttctatataaataaccgcgatcgacacaagacatacattgtcgacctcggaaggaagaatggccccagctcgctattggaatcactataatcaagtttttgtcgagacatctccaaattcaacagtgaaagacgtgtttaatacacgatagttttgacccagtaaaagcgagaaaatcacagttatataattttcaaatcataaactgcatttacactacataatatgtaatcaaatcccacaattttagggatgattgctgtaaaattatttcggtcaactttgtaattaactgcccactatgtaattataaatagtggcagacaagctcaaaaaaagggacaaaaaatcttatacaagagaggcccta

SEQ ID NO: 291182 - DNA, 658 bp, Cannabis indica
actactctatcactcaagggcttcgaattttaatggtgaagaagaagacttaaagtggcggctaggttagggagaaaaggcactcagttattctgaagaaaagatgtatttttctgaagccatcactacctatttatagcaaaccactagggtggggttagaattatttggcattaaaataatgaaaaaattaatgataaaacctataagagtgggcggccatattagtggataatgggcaccacttttgcaatttactgttttatcatttctgcatctcattttcacaaaaatgccaatttttcaatttaaccatttaaatgccaataccaattatttaataactaaaaattaattattaaataataatgtcatttaatatatttattaattagactaatcaaagtctcttaattaacaaatgtaccctagaaactttaccttcacaattttgccctttcttagtgaaaattcataaactagacatagtctaactttagaattataattgattaatcaaaatcaattcactgagtcttacaagcagtatggtctcaactagtatggggaccatgggcctacataactgagcttccgataagctgaaccgaatttaccaagtaaaattcctaacttattaattccttattgaatccac

SEQ ID NO: 291183 - DNA, 526 bp, Cannabis indica
tttaaaaatatgaggtaccaatttaaaactgtattttattttaaaaatatgtacaattcaaattttattttatttaaagtattattgaaaatataaggtaccaaatatattttggtaaaaacactaggtaataaataagttattcttttttttttaatttaataataatagactaaaatagtaaaaaagttccacctaataaaaataccatcttattatagtgtccaatacttgatttttaataataataataatcatgtgtaacgcatatatatgagagtaaggaaaaggtagagagataaaaaggagaaagtaagtaattctttttctaacattatctgtaattcttttgataggtacattcttttatttttgggttacatagattttgttttgtctaagttgtgagtttgtaaagtaggactttgagagttgagcttccacaccttataatatgtagctgtgatttaggttaaatgatagattataggtcagaagttgcctaaacccgcgtgaccgtgtacac

SEQ ID NO: 291184 - DNA, 571 bp, Cannabis indica
tctggtccatggctgaaccactacctcccatgctatagtctgatgcaggaggggtaggagccccgccaaccacttgtgtcctagctgactctgtcatgcacccaactgtgccctcagctcgcagtgctttctccaccatttcagcatatgtggttttttcgtcgtagtaatcatcagatcatgtttaatcttcacattcagttcgtcaaggtacttttccttcttactaaaatcggttggcacaattcccgaggccaacctcgccaaccgatcaaactgcattgtatactcagtaacgctcatgttctctttctaggtcaggtgagtaaattcttttctcttggcacttctaacggcctcattatagtacttcacattgaaaagttcctgaaacttttcccaggtcatcgtggtgacatcgtgtatcaaagacaccatgtcccaccacaccaatgcgtaatcttgaaactgaaaagtggcacacaccactctatccattcccggtgacaaccataaaattcaaaatcttggtgataacagttagccactgctcggctttcatgacgttcgg

SEQ ID NO: 291185 - DNA, 636 bp, Cannabis indica
atggctcatttcacaagtttggatccacttttaatccattgttcttgctatgacaagacaattctcataagtgtaactctcatatagttcacttttcttatctcataatatgagatgattatctcttataatccaataaaagatgtaacttctcaaaagccatcttttattatctcataaagtgagatgttcaccaccaaattgaaaaagaatttaaaatattctttattcacaaaatagatgataataattctcacaataataataaacactattttattactatcaacattattatcatgctatgtaactcatatattaatataatatgtatgttactaatcaacatctcatatgtaacatacacataatatcaatattaaattcacaatatatatgttacatatctcatatatatataacatatatactataatatacatatcatatacacataatatatatatttattacacaactatatatgttacatacctcacacatatataacatatatatacacattaatatacatgatatatattatatacacatatataacatatattatatatgcatgtctcatataaatacataaaaataattatttctacatatttaatctcactaatatat

SEQ ID NO: 291186 - DNA, 550 bp, Cannabis indica
gatttcacaatgattcacttcacttttattccacaattaattaatgaggaaagtgacattaatactccaaaataaaccaaagtacatatttcataacaaatactgatcgtacaacattatagcttaaaatataaaataacataacttggacactaacacagtgcatcatttactgtttttgggagaagtatccactcctcctttgtccccaacttctatatcatctccatttcggtcctcacctttctcagtcgaatctttcacattgtcctgttcgggtgatttaattgcaccagaacattcaccctcatcaaacagtgagcaaacagaattaaggatagcctcttcatcattatcatcatcagaatcccacatgcagggaaactcattaacacagcaaagttctctaactttctgcccagtgaagcattctcccgtctctccatgtagacataaagcagaaaaagcttctatgaaagattcataacgaattatttttatggacgcatcagaagtagtgtttttgcttacagcatcttcgtacgtacta

SEQ ID NO: 291187 - DNA, 466 bp, Cannabis indica
tcgaacagtggaatgttgtatttaaagtttgagtttgtgcttttaatgttgaagaggtcaagaaggaggtacttgatgaagtttataccacaccttattcattgcatccaggaaccaccaaaatgtatcaggacttaaaaccctatttttggtgatatgggatgaaaagagaagtggtgggttatggttcaagtgtttaacctgccagcaaattaaagctgaacaccaaaggccggcagggttactgcaatctttagtccttcgtgagtggaagtgggaggacattgcaatggattttataattaaaatacctggaactacgggaatgtattattcagtaagggtcatcgtggacagattcacaaatcagctcactctctactagtgagagttacatattcagtggatcagtacgctgaattgtatgtgaatgaaatacttcgtctccatggagcccctaaatcta

SEQ ID NO: 291188 - DNA, 757 bp, Cannabis indica
atcaaagatggacaaatgaaaattgcaaaggatctatgactatcatcaaaggagttaagaaagaaggcctatactacatgataggggaacctatagctagaagcaacaacactgttggacagaacaacattttacaaagtcctgaagatgctaaagctatactatggcacaacagacttggacacttagcagaaaaaggtttacaaattgtaaatgaacaacaactactaggcaaagacaaaatcagcaaagtggaattttgtgagcattgcatacttggaaaacatcataggctgaagttcaaaacagggacacataaatctaaaggtatattggattatatacattcagatttatggggccctgaaaagacaccaactcatggaggtaatacctattttctgtctatagttgatgatttttctagaaaagtatggattttcttactgaaaaataaaaatgatgcttttcaaaggtttaaacattggaaaacacttgttgaaaatcttactaacagaaaggttaaaaacctaaggacagacaatggtctggaattttgcaacaatgaatttgacatgttttgcagagaaacaggtattcaaaggcacagaacagttaggctaacaccacaacaaaatggtgttgcagaaagaatgaacagaaccattctgaacaaagccagatgtatgttaatacaatctggtttgtcccatggtttttggggagaagcagttatgacatctgcttatttaataaa

SEQ ID NO: 291189 - DNA, 562 bp, Cannabis indica
gactcgtggactaaggctcattaacgccccaaccacgtaaaaatccttatcttgctttcttacagctcaatattataatcatattttaatagttgccgaaaatctcggtcaacacactcacattagttgtccaatatatatagatcaggaacacttttagaaatttgagtaatatacttgctataaactataatcctagatcactgaaaaaaaaaatatctttattcaaaagcggacacaacttctaatgagttaaaataatgaacatgtacaacaaattttgtagaaaaaattctatctaatgctactaatattgctacacattattcttaaattaacaaaaaagcttcattttctactcttaagtcaagagtggatgccttttttcactccaaatattctaaactgcataaaataacaaaaaaaaaaaaattaaataactaataaaaatcattaaaaaactagttctaatgaacgtgaaagtactataaaaaaaagattaaaatgtaaaatgatcttaaatttgaaaactaagctagtaaatattatttttttaaaaaaa

SEQ ID NO: 291190 - DNA, 677 bp, Cannabis indica
atatgaaaaaaaaaacttctatgatttgccactcacatttctcagtggtggaggtttaccaccgaccagtgtcatccattcatctctactttcttcctcgtcccatcccacaataccatgtagaaaacctagaaaagacaattaaaaaaataagatagaaaaaagaccaaaaacccttaaaactagttgcaccttgctctgacccgctccctaaactattctgtcagtcccaatctcaacacttccaaatgccacttcttctcgtcgcatccatcttcaagacgatctagtcacagggtttcacttctcagtgagtgaaagatttgtccttgggtgtacgttgaaagcttctatagtagaactcattcgagagggcttggtggtcttaagaatggttcgggctccttaaaagcggagggagagacccagagagggagtgactgaatgacccagtgtatagcagaccgagggactcatgggtatgagtcccgagggaccttgttaagaactgcactgaaatacttgatacctttattacccccttaattgcttcttttagaggactaatacttaccttctcgtactgcaagtaaactaaggttgttgttaactgtagtctaagggttgttaaggtgttgagagacccccgttgaatgcaatgcaaattgaaatgaaaa

SEQ ID NO: 291191 - DNA, 663 bp, Cannabis indica
tttcaaaaaaaaaaaaataccaagttagaaagttagaaaatttgaaagaaaaacaaactttttcctctcaacctctctctcttgttcggcctctttggagcagcaagagcctggatttttcccttgattttcaagccttttccctttcaatcttagtgttcttcaagctttggtaaggtttctaacctcttcctcttgtattttataagaaaatggttaaaagtggatgttgcatgtgaattgttgtggtacttgctgctgtattttattgttgttttcaatggattaatattgttattttaagtagtttagaggtggtaaatgcatgttggttgcttggattcaagctttgaagttttagctctagaatatgaattttgaaaaaatatatgttgaatctgtaattacttgctgtagttggttgttttcattttcagaggtttagttatgcatgattatgtaggtttaatctagtttgattgcatgttagtggattctaaccaagtttgagttttggaactcaaagcttggtctctaatggtgttttgtgaatctgtgagttctgggtagtcttgttgcctttgaatggttatttgggtcatatagaacaggtctggaagatcttgtgtgatttgggttggaattgatcgagttatgaatttt

SEQ ID NO: 291192 - DNA, 726 bp, Cannabis indica
tgctataggctgagacccaagataggctgctgcggtttggattcaggtgcaggggacctgtagcttgtgtgaactgcagttggaaacttgtcatcactattttttgagtgtagtgttgctggaaagtgtctacaggacttgaagtcttggctggactggcatgctcaaaccagcagcctccaacagctcctcaagtggattgggaagtccaaattgtcaaagtttaagaaaggagtcctctcggctgctgttgtaggactgctgtacaacatatggagagcccgaaatgaagctgtgtggcaaaaggctagagtaaacccgagccgtattgttgaagaaacaaagtgaactctcaagattcggattgatagggtaatgcctaaaaagattaagaacaatgatagagattggtttcttgctttgtaaatcataaaatcaatattgattctagattgatatattcgtgtacatagattttggccctttttgggtgcgcatagattgtaaaaagctagtttggtgcaatactattcattgatttatcaaaaaaaaaaatataactaaaataaacaatttgagaaaataagatatttgatggttaggatattatcaattttatttaataattaaataaaataaaatatcctgtttgaaaattttatggttagaaaccctaaaatttttattcaaaccaaaattaacaaatttttcaaaatttcatattat

SEQ ID NO: 291193 - DNA, 588 bp, Cannabis indica
gggggcaaagttagagtagagtgaagctctgccgcctcccatccggtggcccaagacttatacccctcctgggcaacgggacccagtgagacatcttcgagggtagccagacgcttaccactcttcttggatgactttgaaccagaagcagacatatttcgattctgtaaaaagaattaagattcaagcagttaggccccataccaaaccctaaaccaagaaaaagggaatgggggtcccctaaccgctggaaagaggccccctccggacatctgtcaaacaggaaaccctagaaggattttctggacaagagtcgggtgcaataaattcatagaagacgacattgtgcaccagagaaaaagaaagggcagaaaatcgaaagaaagaaatctctcctatgccctaaacgaccagtatacgaagaacatatggtcttctgcaaaaaaatagtaaaaaaaacgtgataagaataatcctaacaccagaaatggtgaatctagacctggtacgtgaaaaatctaaaagattgcattcccagaaacttaaaatacaaaacccaggaaaaaccagcagataagtaaaagcatg

SEQ ID NO: 291194 - DNA, 764 bp, Cannabis indica
gagctcgaggccggcagcctccaaagcattgaccttctccttcaaacggtctgcctcggccacctgagtgtccttatcttcctttagccgaagaaggacctgccgcagagaactcctctcatcgtgaagacgatcaacttcagcagataaggtctcgatggtttcctcaaagcgatcagcagcctcgaggtccttcgttagcacggtgatcttcttctcggcggcaaacagcttcttgttggcctcacccaactcatgacgaacagctgcagtctctgccctggcctcctcagcttccttcttggccaagtccgcctccgccctcaaggtgtcggacagagccacactcttggaagtaacagatttagcccgggagtaggtgtaagccaacttcataccggcctgcataaaggaaaaagtcagcatatggagctaagtgtgaaaagttaaaagggaagtatcaaaaaagactaaccctggtgagctcattcaagactccacccaccaaaacatccagagatgagtcgttgtcagcaccagccagttgctcactgacctcaggaaccagccggttcatgtagtgagccagcacctccttgcccttcttggcctcaggcagcacaggcacgggtggagttggtgcctgcacccgctcagggatcctcctgaccagttcggacccagttgttggtggcccagactccttagacttggcagatttgggagtggaaggattcgcagcagtcagtgtgggttttatgccc

SEQ ID NO: 291195 - DNA, 513 bp, Cannabis indica
tattttagaaaatacagggtccattttgtcatttaacaaaacacagggtccaattggtaacttttgtaaaacagagggtccaaaatggtatttaccctaattcaaatttgggagattaaagtggtagttgatagttctctttttccgcaatacggggaattatggggactttgttcaaaaacaacaaaaaaacataagttgggctatggtgcaaggaagtttggttgaattgggtgagatagacttgagagaataccaacagattttggtaaagaaattgagactaaaccgaatttttcaaaatatataatcaatagttctaaggtgggtacaacattttttttttttattattagtagcacattttcttaaactttgatatttatgacttttttaagtgttatatacttgtgtgtacctaattaaaaaattttaaaaataagagtactcgattaaaaataaatttatctaccacaaattattattttttttttttttttagttaaaaaataa

SEQ ID NO: 291196 - DNA, 667 bp, Cannabis indica
agaataatattttattttattttaataatcattttcccacgttattttgaattgcatttatttattttaaatgcagatatttcgaaatttttttaatttgaaaaattagattaagttggaaattaattttagaacaacttaaatcaagtaattttcattaatgatttaattaaaataaatagattaaaatatattattttaaatagaaaattagtaattagtttatgaattaaatagatagatattttctaggtagactttttggtatttttctagatatatttaattaaataagaaaattaatatttaagttgattatgttctagacacttaaatatttgatatttttcttaagagatttaattaaataggaaaattatatttatgttgaaaattaatttatttaattttagatcaacataaattagaatatttttttccagttttatttattttattttaaggtgatttcaaaaatgtatctttatacattggattttgaaattcagttatatatatttatttaaaattaaatttgagttgataatcaattatttaattttgaaccaacttaaattaagtaattttcataatatttattggaaaattaatactaaggatggaaaataatttattttatttttcagatcttcctaaagtataattt

SEQ ID NO: 291197 - DNA, 305 bp, Cannabis indica
agctatagattccatatctattattagcgctcccactcaattgaactatcatgtttctaagatgtacgtatctgccaagaccattggttagcttgcacgaacaacttgaagaacataaataattcaactaatattgaaccttacaatatcaacattaagatctctattaagccaagctcgaaggaaattatcatttcacttctaaatacttatagaagctatagattccatatctattattaacgctcccactcaattgaactatcatgtttctaagatgtacgtatctgccagaaccattggtt

SEQ ID NO: 291198 - DNA, 603 bp, Cannabis indica
gagcggattaggggttttgttataccggcaattaacttttctcagcgtttattattgccggcaaaggcatgttttgcccgcgtactgtttaattgcgccgacaaaaggtcttttatcgaccaagcatagcgaataacttttgccggtgcagttcagtgctggtaaaagtttgtcgacgcatatagtgtactttttccagtgcataaacacgccggcaaaagtgaactttcttgtagtgattttttttttgtacactattattataattaatatataaacaatttgtgatgattaatatatatatgaataacatttatgttgatacttaaatatttaatataaaatagaccattaaattaaatagttatatataattttattacttgataattagatctaaaaaaatacaatttgagaggatacataaatatgtatcatttttttatttatacatggtaattttgtaaaccaaaaattattttaaaaaagtaaaagatattttggtgaaaataataagaatttcatttaatttcatactataccaaatatcacaattcttatttagttattgattccatagtctttaccaaacaaaagaataaa

SEQ ID NO: 291199 - DNA, 682 bp, Cannabis indica
accataaggctatttttgtggaaaaacaaattttcaaatgtaaagtctactaatatccaaaactaattttaattaattaaaaaaacttaataaaaattaattttattctgataattagaattttaattgaaaatttagattctacacaaaattctaccaaattttgaattttgtttcaatgaaaaacgatttttgaatgaaaaattatgacgaaaataaaattggtgcacaggggtatgcattacatacccctgcgcgcacggaatgggaggagtggccgagaaagcgcgcacacgtgtgcatccgatttcagatattttcatccaaattcgtaaaaaaaatcataactaattcataaaaaatccaaattgggttctgtaaaagcctaaattcattaattatttgtctactttccagtaaaaatatttcaagaacgaaataaaaaatattttacaacagacattgcgatttccaaacaatcatcaaataagcacataaaccatcatgaaaccatccaaatcaatacgaacatcgttttaaatccatatttcatgaaagtaaatcattaccatggctctgaggcctgttgttggaatatgttttaccagtatctagatttactaccatgtatgttatttaacatcctaaatatgaatttctaagacaatataaataaacacat

SEQ ID NO: 291200 - DNA, 614 bp, Cannabis indica
tttttctttcttcctgaaatcggctggcacaattcccgaggcaaacctcgccaaccgatcaaactgcgtaatgtattctgtcacactcataaaattcaatattctcgtaattgctgatagccactgttcggctttcatgacgtccggacctccctgaaaaactggagatgcctgcttctggaacttttcatacaggggttccattctgttcgccgctaccactatctcggcctgagcacaggggcaggtgccactggaacttccggcaccggcactgcaggagcacctactgcctcaatctctgaatctcatgatcttgctcctctattatggctttcatttcagcaaacctagtttcccaattctgggcttcctgattggcttgagctgcctgggcagcctgtggcgaattatcatcaccccgaccacgagccctgcccctgggacctctaccatggcccctaacattcgggggaaactgagctccttgatcctgatttgacccgactgagctgccctgactcctggtatttcgtctggcgtccatctaatctgaacagcctcgaaacccaaagttggcacatcaggtcatgatcaacgagagcttactaatg

SEQ ID NO: 291201 - DNA, 1143 bp, Cannabis indica
tacttacatcttagaaacatggtagtacaattgtgatgagagcgtaatcatagatataaaatctctagcttctataaatgaatcgaagtgaaacgataatttcctttagctaaacgagattaattataggagtactcacttcaataattatattagtttactgatatatcatttacaagaacctaagtgttttaaggataaaataaattgaagggtataaaggtaaaattatccatactcgatgtgataaaggttcaaaatgatacattttaagtctttatttgtacacatataattaatataaattaaatatttcttatttttaatggttaatatatttcaattagaaatatttaatttactttatttttatgttatttttcacattggagaaagtggtaaaagcaaaatgtgaaagaaaaaatgtgttacctaagatacaaataatcaaaatcaaaagcacacatcaagatgagtgttaatagatacatttatgtatcattagtttgggtaaattgttcaattaacgtgggctttatttagccaaaattgggccaagttatattcaataactcatagaccaagcccaatatattgtccaattaaagataccaagtcacaccatgtgatccattctctcttaggccaagttattattttatttatacttcttttagtgacaaaaatgagtgtattaaaataataatattggtgaggttagagtgtagttattgtactttttattcttaatattgatattgattcttttgtgcttcatctccatatctcatttattaaattgtacttcattttcttatttttcttccaaagttaatagtatgtttggacgaataggaataattgcattttttttggattactcaaatacagttacttgtatagttagcaaaattaaaaaggatgtcaaatatagattgtatttactcaagaataggattggctccaaagtggaattagatttactaaagaggttgattgtaactaagtgagggagtggtctccttttggagagccttgagggtgtattgttggctgttggtgtgattaatgaagctttattcttcttgataaaaaaaaataaaaattcagtcatgcttttcttatgtaagttaggctattaat

SEQ ID NO: 291202 - DNA, 464 bp, Cannabis indica
aatgaggaattaataagttagttgatttacttggtaaatgctagatctgcttattggaagctcggttatgtaggcccatgctccccatacaagttgagataaactgcttgtaagactcagttaattgattttagttaatcaattataatgcaatgaggaattaataagttagtggatttacttggtaaatactagatctgcttattggaagctcggttatgtaggcccatgctccacatacaagttgagacaaactgcttgtaagactcagttaattgattttagttaatgaattataattctaaaattagactatgtctagtttatgaatttttcactaagatatgccttgattgtgaagaaatagtattttggattatatttgttaattaagagactttatggagtcacattaataaattttataaatgacaattttagttgataattattttaattattaa

SEQ ID NO: 291203 - DNA, 889 bp, Cannabis indica
gtggtgacatcgtgaatctgagacaccatgttggttgaaaaagtcagtgaattcttcgcagtcaaactgcgttccattgtctgagactattttgtgaggcaagccatatcgacacactatatttttgataacaaagtctagtgctttttagcagttatagtcttcatgggctcagcctccgtccactttgtgaagtagtctactgctcccatggcatactttacccctccatttcctgtcggtagggacccaataagatctattctccaggccgcaaaggtccagggactagtcatcagggtaatctcattgggaggggctcttggtatgctcgcgaatctttggcacgaatcacatttttggacgtagtctatacaatcttttttcatagttggccagaaatacccttgtcttagtattttctttgagagacttgggcctcctatatgatctccatagaaccgctcatggacctctagcataattttttttagcttcagggtccaatacacaccttaggtacgacatgctgagtccactttgatagataatattgtccatcatcacataacggtgcgcttggtattgtacccttctggatagttccttttcttggggcaagtccccttttgttatgtattcgatgatggggaccatccagttgagctcttgttgaactgttgctacgatactcttggctttaatgcttggctccgcgaggcattccacgagcactaaccccagtttctcaatttcgctgtctaaggctaacttagcaaaacagtctgcgtgagcattcttttctctggggattctttctactttgtaatctgtgaactcgtggagaaactcccagactattgctacgtatgcggcaattttctctccg

SEQ ID NO: 291204 - DNA, 332 bp, Cannabis indica
aattataattctcaaattatactatgtctatttgtgaatttttcattaagtaagggcgaaattgtaaagaaagtgttttaggggcatatttgttaattatgagaaaatcaattaataatttgtatggttcaattaataaatacgataaatgacaatattatttaataattatttatagttattaaatagttagaattggcatttaaatggttgaattagaaaattggcgtttttgagaaaatcagatgcagaattgagaaaactgcaaaatccaagtaaggcccattacactacatggccggccacttggaatgatttttcaaactgatatt

SEQ ID NO: 291205 - DNA, 1065 bp, Cannabis indica
catctccagcttcagttcctgatgggtctggtgttgacccatctgcagcttcagttcctgatgggtctggtgttgacccacttgcagcatcacagggtcctcctgttcccccgtcagcttctattcccagcacctcggaggctcgcgatccagtataccctgccattttggcaaggttggagactgtggagagggggcaggccgctctgctaagaggacaaacagcgattatggatcagttgaagaccataatgacgctcctgcaagatcctggaaggccggcagcagattcacagccacagccacagccacagccacagccacaaccggaagaggaggctcggacaccggaagatgacttcattctcccaaatgattaccaaccggatgatgatgacatgttctgtacacctgagaagacgaatatcaccagcatcggggatactcaggattctgaggtgcaggtgttagagacagctccagaagtcatggagaaccggaggaagagaaggcggcctaggtggttcgctgagtacactgaaatgaagaagaaggctagggctacttcgacactcgtgaatgcggacccacttagagtggttgatcggaagctgctcaagacttttcacaattgggtactcggccagattgggaacaattacccgagagagtgcttcaccggtcgataccattcgtcttggttcctcgaactgcatactccgaaattttggcttgggaacgatgtaagtttttaagacttttttactgcttttgcttttaaagactttatctaactcttttttatttaactctgacatatttaattttcatgttttagcatttggatgcggcattccatttgatgaggaggcggcaacacttttatcccgagtcctacccgaatagatgtgtcataatgccgtgtattttcccagcaggagttattgctcggtgggaagctgcgggtgatgaccaggctaactatcagtgggacgagggcatattagatttgatccgaggggatgaaagtcaattcttggccagttggaagaacaaggagagaat

SEQ ID NO: 291206 - DNA, 636 bp, Cannabis indica
aaaaaagtatcaccaaacaccacttaaatatatgtaattttataacagtaataattccgttctttttttttttttgctaattggaacatttcaattagccaaaacaaaaacaatccaacacaagtctagagcgtggaagtaacaaatagtgcaacctccctaagagaaggaaacgagtcacattacaggatgtcgctcacgcaacaatatcatgagttgcaacgttggagctttaggaaatcaaaaatactattacaaaagcaatcatctaacaactcaaacaaagatagaaaaacattagtaagtgtttaaacatgtgttctcctagcatcaatagccaacaccaattcgcggcagtcagagtagaaatttgtggaccttcacccacggctacagcgcaggcaagagcatggcaaagagcaaggggctttgtctcgagaggggaagacaacctaactttaactgaaagagcctcaaaacgaaaacatatttctacccaaaactgaaacagcaagaaaggcctcccaccatgaaccgcagcatcaacaaacacattgaagtcactggagcctgggcgggagatgtacctaccaccaacctcaatctgttacataagtcagcagacaccgtatgacg

SEQ ID NO: 291207 - DNA, 1029 bp, Cannabis indica
ttatttacctttcttgtagacaggtagcttactgaaagaaattaacaacacagtcttaacacttgtgctgaagcttaaatgcccaaacacagtgaaggactacaggctaatagcgtgctgcaatgttatatataaagtggccaccaaactgctttgttcacggctcaactgcttgcttcctaatttagtgtcgcaaaaccaaggggggtttgtacaagggcgattcattgctcacaacattatgatttgtcgggatctagtgcgccattatagaaggaaaatgacaaaagctagctgcataatcaagttggatttacagaaagattatgacacggtagaatgagacttcattgaagaaatgctacatggattgaatttcccgaaagcattcattcagctaatcatggtatgcattcgatctcccagattctcacttatgattaatggttcacttcatggctattttagtgcaaggagaggattgagacaaggtgacccaatgtccccattaatctttgtgcttggcatggaataccttaccagaatcatgaagaaagtgggtcgcaaaccagatttcagctttcatgacagatgcaacggatctgaagctgaatcacctcatttttgcagatgacgtccttctcttctgcaatggagattataaagtatctattatctcttacagggactcaaactgttttcacaaacatcgggattgcaacctaatcaaaacaagtcaactatctactgcaatggaatgtcaaattctgaggtacaacgtataattgatgcatcgagcttccagagaggtgttgctccatttacctacctgggaatccctattagtcctaaaaggctctccccaagagagtgtgatgtcctagtagacaagatgactcacataatccgaacttggagcaccaggcatattttttttgtctggtagagcagttttagtcaactcagttctcctcaccatacacacatactagagtcagatcatgctccttccaaagaaggttatcaaag

SEQ ID NO: 291208 - DNA, 541 bp, Cannabis indica
aatatacttgtgagtagatctaagatcctaggtaaaataatttccaacaactagcctcagagccatggtatgattgattgatgtttgtaaatattcgtagaaaaataattagaaaatatttttctgaattatttttattggatagtttgggaaaaattaagcaatttacttttttacagaactcaatttcgattttatttgaattagttatgattttttgaaaatcaaaaatatatcgggatggtgcaaccaccccacgcgcgcggatgaggggcttccctcggacaccacgcgcacagacacggatttgtgtttgaaaacctccttgcaagcggagaggctgctaagcagcctctttcgtcgaggtttctcggtcaggtcctcccgtgcacgcccatggaccaaatgcaatgcatactgttcgtacagctcgcaaattttttcgtttcttcgatttttcatgctatttcatggaattaacttccgattttgtgtgtagttttgtatttcgatttttacttttcaatttttcaaatctaat

SEQ ID NO: 291209 - DNA, 696 bp, Cannabis indica
actcggacccaacctagagcaagacccaggacgcgaacccacacccggagcctgatctggacctagactgaaatccggacacaaacccaaactcaggccaggactagaactccgacccaaactcaaacccaaactcgaactcagaatcgcaaatggaactagaaccgaactaggactatgaccaggacctaaaccaaaatcagaaccaatatcaaaacccagatatagacctaaacccgaaatgagactaggactcgaacccgaacctagaacgggacttaaacccacacaataaccgggacctggaccaagaatcaggatagggacctgggaaacagaactaggacatgaacctagtacccgacccagacccgtacttgaacctaggacccagctcgtgtcccggtatcagaaattgaaccagacttggacctgagattgggatccggatctggacccagagcttggacaaaacctgtagtcggtgtcttgatttggcacacagccctggacccgaaccctgacaaggacctaaacccacacccggaccggaacccagtcccaaacctaaaagtggacccaaacccgtaccctgtgacccaaaattgaaaccaaaactggaagttgaccggggctggaactaggacttcaacttgggatcataacttaaattggacctagatccataagcgtaac

SEQ ID NO: 291210 - DNA, 525 bp, Cannabis indica
gaaccagtccgacagggggtctaagtttagatcccacgggttctggtagttctgatcgttaagggtatttttcatttcatctcgcaaaaccctcctcaaggcctccacctcggcatacccccgagagtactcgtccatggcgtagttgtgcttggctatccggagctcctgccttgcctcatctccgggtattggagtcagcactatgttgggaggcacggtaaattcctctgcctcgggagggatcccggaatcatggctcggggccagagtgtccactctccgcggccgcttggatgccccctcagcaaccattttgcctttgcgcttgcggatcaaagcaacctcttgctcttcttcaccttcttcaacttcctcaggaagagcccattgctcttcttgaccttctttagctacctcaggaagtacctcctcctcatccacttagtcaatagtgtctggaggggcactggaagaagccttcgaaggggtaaccatctgggaagaagttggaggaaggggagc

SEQ ID NO: 291211 - DNA, 519 bp, Cannabis indica
aataatgtacgtgtaattacgtactcaatatataataagaaagtgttgttatatatatatagataatgatcaactctttcactttcacatgagaaatgctaaacctaattatcatatgctatgtcatcatattgttattaaatctctatttttttttactttaataatgatcgaaattaaaactattaacaattatatgatgacacctcattaatttggatgctaggcaataggtagatatagtaggcaggttaaattagagaaattacactctataccctttttatattgttctcttttatttttaccttcttttttaaaatctatcatttttaccttctttttttaaacattgtaccaattttgtctctgttacttcaagatactctccatgtaattatcttatataagggtattttaggtacaatacatataaaaagaggtatgtttcaaataaatataaaattagaggtaaatttgattaattgatgaataaaaaaagtatttttcaacttaccc

SEQ ID NO: 291212 - DNA, 569 bp, Cannabis indica
tattcataactccacatgatctccatatcacttagtaattgactatgatctctatatcacttaggggtggactaaactattgaaatatgtagttcattttgaactctagactatactcaatacaccacagtactctatggcacacatactttaattaaacatggatgtaatataatgaattagcaaattatcagaatatattcttgatcttaatttatgttccaattaatatttactgttgtaatagaagttgataccaataaaagttctttgacattgtatcacagtaccttatataagtgggaaattttaaaattctaaacccatcttcatttggttgacacttgtgataggaactttagaacacaactgagaaattaaatctaaccattcatatggatagaattcacttgtcaaaactttgagaataagatagtagaattcttgcatagtctattcgaatgacttaggcaaaaattcctaatcctcatgaaaagttttatggtatctctaataattacttaatcttaagcaagtattttacattaatattaatactagattgctat

SEQ ID NO: 291213 - DNA, 561 bp, Cannabis indica
caactagcgctacaaccattttagaaaccccaaaccataaatttgaaaataaaagttaaaaaaaaatagtatatggggtaattccccttttttttagggaactcgtttattataaaaatatgaaaatttttatttgcacccgacaaattaataagtacaccctaatattttataaaaaataaacttaaaactaatttttaaaaattactattaatatttttttgaattatttttctcacattattttgtgttaattttagtacttatttaaaaaaaggtcataattatttttcaaatttatatatatatttttagtttttttttttctaatagatctgcatataattttttattttaattttttttattattataatatttaaaaaatttttgatggatttattttttaacaatttgaattgacggaattttgataaaaaactaatataattacagatataaattttatttaaaataaaaattattaaaatatggtgcatttataaatttttagagtgcaaataaaactctcctaaagatatttgtgctcattgtccacat

SEQ ID NO: 291214 - DNA, 630 bp, Cannabis indica
gaggttgacgtgtgcttcgagtctccacgattgtggtaatgtagtgtgtgtttacagaagctttcttcagctctcaaagaaagcaccaaaatgttgatcgaggtttcgacaaccaataaaatagtaataatttagagagctgtaagaaattaagaaggagatttttacgtggttggggggttaatgagccttagtccacgagtttgtgtatttatgatagtatttaatacagagaatgttcttggtgagtttttactcctctagcacttgtgcaacccagaattctcgacccctctttaatgagctttggggggtatttatagtgtttttgtggggtgatccccagaattaaggtacatgcatttctgtaactatcagtaaagttgtacattcccaatgaatacatcatgggtaatgcatggtctaatccataggtgcggtagggattttatgagggcagtccttaatcccctttgactgatgtgattcttcacagagtagccgtcactagactttattggtcatagtctagtaggtatagatcggaggttgtgtcgtcagactttattgcgtgtggcagttccaatacgcctcctcccatgtggcattaaatgcgagatgactgctcag

SEQ ID NO: 291215 - DNA, 517 bp, Cannabis indica
atgcaaatcaagctaggaagctcatctacatcaagactacaaacaatcaaatggtataaatttgctttagtcttgttaaagtgatttgcatagtacactaggatttataagttcaaaagtttggctcactaacttgtgcgacaagttatttcacaaaaaatgatatctaaattttctaaattgatttttaagatcacatatcatttaactaagagaacgcaactggaatttttgaaatcggttgccaacggcaaccggaattccggttgtaaccaatccggaattccggatcacggctgaagtggcctcgaaaaatgtgctaacggctataaacggctagttttcattcctacactatataaactcgtttttcactcaaaaatggaggttggttgagcttctattcatcatataacatcattctaagtgttctaaactaaagagttatcatcttttcataaacacaccaaccacacacacttgagccaaacttgttcttatcttctctagtgtgctt

SEQ ID NO: 291216 - DNA, 506 bp, Cannabis indica
cctccagccacaggagtcgggacagctgcgactgcaggagtcgcaactactacggcgaggttcgctgggatagtgatcccagtattcgcagtcggtgcggtaggcgggttattgtgagtgtttataccctgatcgcccacatggggatcacggagtgtttcctcattatggggggcgcgagagcgcgctctaaaaactgcgttgaggtgatcacgcagatcacctcgatgtacttgatagtgtcccccctactgcatttctacagagccggaccttgtgtatctacttggtgtgcgaccatgtgatgacgaagaggctgattctgcgtcgttgtctctcgatggtcgactgcggggattgcgtcactcaggatcttcatcagtctgtgttccttggttaggatatctcacggattggtctctcgatgttggatgattcaagtccagaccttcagggttggctctttgttccctgcgaacacggtaactacgaggtctagaattttt

SEQ ID NO: 291217 - DNA, 609 bp, Cannabis indica
aaaaaaataaaaatattatcattgttttaaaaaaatatgtcaaaaaaatatacaaatatatgtatctatatctacaaagttacacacatacaacaacaaaaaaaaaaattattaggaataaactaaaaatatacaccataaaaattacacatgaatagaaaaaactattaaaaataattgttcaacaaaagaaatttatggaaaaaaaacataaaatagaaaacaaatatacaaatatacaacaaaaatatttttggaataaactgaaaaatatacacgattaaaaatgcacataaactaaacaacatctgtaccaaaagaaaaacataaaataatagtgttgggttttgtgccctaaatagaactcatttcaatataatcagatttactaattaataaagatcagaaatcgcattttatgttgcatggttcagataatttatttcattattgtttaaatatataaattctattaatttcagaacatatgtatttgttcatgattataatgttgtcagcacagtggaatataatcatgatcatatgttcaaaagtttaattccctgatttgtcagtttactggatttgaacttgcatgataatcagcga

SEQ ID NO: 291218 - DNA, 459 bp, Cannabis indica
agttttctctgaaggaatgagatgcatcatctttttccaaaagccatcactacctatttatagcaaaccacgtagggttaggttagatttatttggcattaaaataatgaaaaaaataaatgagaaataacctacataagtggcctaccatgtatatgataatgggctccacttttgcaaattttccattttatcatttctacatctcattttctcaacgctaattttccaatttaacaacttaaatgccaattacaattatttaataacgaaaaattaattattaaataatattgtcatttaatatatttattaattagactaaccaaagtctcttaattaacaaatgaaccctacaaactctttcttcacaatttagcccttacttagtgaaaatttttaaattagacatagagtaattttagaattataattgagtaatcaaaatcaattaactga

SEQ ID NO: 291219 - DNA, 361 bp, Cannabis indica
ggttctacatagttcttgtttttgtgagtaatcatccctaatagatgaacgttcattagcaatttaacatcgtagaatctcgaaagataagtattatttgtaagtattttattcttagtatggatcactctaatggtggctactattagttagacttacaaaagtatgaaataattgtggaagcccataagatagaatgaccttgactctcgcctaaatgggacaacgctggattctcatcttgatcgaataaaaggttgctagaatgtttgtcattttagatgagctgactactctattcaatggatgatatctttgactatcgcctaaacgggacattggtatcagtttgttggaaacc

SEQ ID NO: 291220 - DNA, 473 bp, Cannabis indica
atttggaaacatgactgttgaattgaatgtttttaatgttgctaaatctgttgagtgtgaggaaatacatgaagtaaacatgattaacacggaaaatatgtttgaaatggacatgaatgaatcttttgaaacttatgcaaaaatgtttggaatgtgcttaaatgttgatgattttattcatgatgtcaattctttgcttgagtctaccccactaatggatactgaaaaatggaaagccaaaattgaaccatgtattccattagagcatgttgagtcaactcctgaaccaccaaagttagatctcaaacctttgcccgacactttgaaatatgcatttctaggagagtctaacacctatcctgttatcattgcatctgatttagatgaaaaacaagaaacaaagttgttagatatccttagaaaacataaaaaggccataggttggaccatgggagacattaagggaattagcc

SEQ ID NO: 291221 - DNA, 469 bp, Cannabis indica
catgtatgtttcattaacatcctaaatatgaaatcttctaatacgatgaaattaaacacataagagttttgaaaaccttacattgattgcagcagaatattattactcattccgctcaaatctctaactctttttcctttctgtcgaagagtaataacaagatctgagcctggatctctttctctccttcgggttggttaccactgtcttccgcaatatgattaagtacttgacttgctatgtgtgggcatagcactctatcactatgggcgaattgacgaagaacaatgaaggaagtttcaaaatcactatagaaggtgtctctcatctactagttgtcggagaatgaaaactaggtttagtttggttgaagtgaatagttggatgagatgagagcatcatattccttttatagtatatcaactagggtttaggtttaaattacatggattaaaaaagaataaaatat

SEQ ID NO: 291222 - DNA, 598 bp, Cannabis indica
attaaaaacttatatacatttatgtatatatagtttgttatatataataaaaattaaaaaaaaattaaatttcatgttattaaagaaaattaaatttaaaattttttaacttaacattgaatcactaaatatatatttttatataattatattattattattaatttttattttattatatttaaaaaaaatcgtgtcaaacgtgtcacattcgtgttaagcggatcgtgtcgtgtttgacccgtttttatttcgtgtcaagtcgtgtagacccgttttcgacctacatctaattttcccgaccctaacccgtaaaattcgtgtcgtgtttgtgtgccgtgtcgaaacccgttttgccacccctaattacattgtatacccactttactttacttgttttaatttttacatctatttttatattttttttagatatacccacttttatggatgatgtttccattagaccccttaggttatgtaaatttactaaattatatgctagacttaagtagagagtgaggatatattagacaatccactcaaaaaaaagtgagtatattttaataaaaaaacaatatgagggtatttttgatta

SEQ ID NO: 291223 - DNA, 512 bp, Cannabis indica
cttgtttttgaggtgggttaccaaacaaaacaagggctgccttgtattttttttttctctgctggccgaatggttatgttgttcaaagtggaaggttgaaccacttatttataatgttgttgtttgttgttgtgtttgtttctgatctgagaaagtttgttgtaatctgttgagatattttccttgtaaagctgaaagttgttagagtcttgagatatttatgtgcttccttttattgttaagaaataaaagacctaagcctaggaaaacagaaccgacaactctatgagttataatggtctgttgaggctttatatagaggtctaatttatttcccttgtaactttatttatgggacaatagtatgggaatttatccaacattgttgatagcggtcgttgggatgagtattgttggggtagggagtcatttgaattgactattgattcattcaatggtagaatatagcatgggattaaaatgaaaaataagaaagaagagaagggaggtca

SEQ ID NO: 291224 - DNA, 795 bp, Cannabis indica
atgagggggcctcatcagcctttggatgacgaggactaggcttcatgagaatcctttgcaagaatagaacttagctaaaccataagcatttgagggcatcacaagaaatatgaagctttgaggacaagagagatcaagaacacgtcaaggcaaggacgagtctgtaggtacgaccatgacgcctgtaaaagttgggagagaatagtgggcgtacaaggacgtacatttgatacgaggtagtgggggtgtgatatcaagtgtcagtacgacctgaccctcgagcattactaccagaattccactactttaagcattttccccagccatacgcaacatagtacatggtccccctaatttcgtcagtaaaaggtgtgtattttaatgaggacaaattttatcagtaaaaggttgtatttcgtcagtaaaagtttgtatttcgtcagcaatgaatatcaatggcggcatgtcatcagtaaaaagtcgttggtgatacttcgttggtgataggtgttattactgacgacatttaaagtcgtcggtgataaaaataattaccaacgactttgttgttgggaaaaagaagcaattttttttttattttttttaattcgtaagtctatcaatgatgacgttttcgtcattgataatatcgatgatgaaaaattcgccattgatttatttattttaaagaaaattataaataaaaataataatttttattaaatattaatttttttacactaattaatttatagtaaatattttcttaattaaacaatattcaaaataattaaa

SEQ ID NO: 291225 - DNA, 895 bp, Cannabis indica
gaataaattgaaaaagttcttaaatcaattgaaactttaatctgttaaaattatgtttgaaagagaatcataataatttactatgacaatatagattatttatattcaaataaatctgatttttttaatatacctaaaaaatccgtaaaattctttaaaattgccagctgaattttgataacccacctaaaaaattaacaattgaaaatttgtaaatttgaaattaaattgataacaaaattataaaagtccaaaacttcaacttttattaattttaaaaaaaatcaaatcttcaaactaaatacaaaattgcagtgtcgtcgatgatgcagcaacttcggccggcgacacgcggaaaaaaatcaaagaaagacggtgagtgaaaggaggaagaaagaagaagctacgaagaacactcaccacttctcgacggctttgtaatgctttgagagggacttacgacaaacaactttcaaacttgggagatggtgaaggagctttcaaataaagttacagtggatttctaaaaccaaattcatgggtgtatgggtgagatcaatggggatttgagaagaagaagacgtggattggtttgtaaagtgagattgtaattttgagggaaaattaataagatatgggctttctaaataattttacacaaatatagtaaggaataattacaccacatactcaaattttttatttttttacttttatattgtgaggcagaatttttttaaaaaatattgtgtttttttttccaaaatacttgcattgtgttaagttttcactgttgttctactgttgtattttagttgttccactgttgtttttgtaacatccccgcttcaagcctctattgggtccttacacccacggaataaatggctcttat

SEQ ID NO: 291226 - DNA, 576 bp, Cannabis indica
gttgtcctggtagttttttcggtacttttttatgtgaattgctataagaatttttgttacgatttaggttgctttgttagttgctatagagatttctgtgtggaattttgtaaaaataacaaaaaaaaaaaaaaactatttaaagtaaataatttttattattattaaatatttttaatttctaaataattaaaattatgtgaattgtgaaaaaacttatcatagtgtacataagtatatacattaatactacatgttagtgttaactaaatttttgaataaaatagtaaataccaaaataaaattaaagtttgaaaaattttcaaataataataatagtacaaaagtgataaaatttggatagttttacctcaaataacccaataaacaagctagctcattcggctttatcacttgtgaatgctatggtttagtggttgggtttaccgattggatattaagttacttctctgattatcggctgttgtcgttttataaattttatatttctcttaaaaaaataaccaataacaaattaaccttgaattatgtagtagggtctaaacttcataagta

SEQ ID NO: 291227 - DNA, 541 bp, Cannabis indica
aaattaatatttttttatttttcaccttttacctgatgacatgacagtcatcttatttttcaaacccttattttttttttttggaaatttacccattatacacaactttactattttattagaatcattgctcctattttgtagaaatttgttcttggattttttttgggaacatttttgtttatgtctaaatcagtttaaagaatatggtggcattagatgatcatctttcctatgtttggcataacctggattatattgacaattattgtctaatttattcaattagtctgtcaattgaacagagaagacaacaggaaatgtgtaggagaattacatgagatagtcaaccaaggtttagggccaaaatccagagaataacataattaacaaggcattgaatttttagatttttgaattatatatgataactctagcatagaatttttatgcttatttattactatggatatgcatgacttcaattgttaaagaaatcagtgataaccttaatgctagatggactgctaccaataatgat

SEQ ID NO: 291228 - DNA, 1266 bp, Cannabis indica
ctgggtctagctttgcgtctaattcttggtgtgggtttgagttcgggtcggagtctgtgtccaggtttggagcccgatctgggtctaggttcgtgtccaagtccaagttaaggtcccgtgtgcatgtccaagtttgggtcttggtcagcatctcggtacagatctaggtccagcatttcgatccctatttatgtccaagtctgtgttggggattgggtcccacatttaggtccaagtccgggtctcagtttcggtctgggtacacgaccgtgtcagggcccgagtcccattctcagtttgggtctgaggctaggtctgtgttcggttctaggtctgggtctgggtccttgtcatggaccttgtcttgttctagggtcctagttctgcgatccttgttcaggttctaattttgggtcccaggtctaggtctaggttcagatttggttcttcgcctcggttctggtcctagtctgagtcccagataaagaaactgaaaactagtctgttctaggcctcgttaccggaatcccgagtcaagatctggatcactgtcacgggtctcggtctggttctggttcaggtcccaggtcctatttctgagtttgggttcgggatcgagactggggtgtggttctaggtccggaccttgttctgtgtccctagtctgttccatgtttgggtctgagttcaggttcggcttcgggtcccgagtctaggtttgtgttgggatccgggtccggctcccaatttgggtctatgtctgatttggagtccgggtcctggcccggttacgggtcgggatctatgtcaaatttcagttatgattccatgtccaagtcctagttccagtcccggtcaacttccggttttggttccaattttcggtcacagggttcgactccacttttgggtttttgactgggttcaggtctgagtgagggttcgggtccttttcagggtttgggtccagggttgggtccgaaatccaaacactgactacaggttttgtccaagccctgggtcagaatctggatcccaatctcgggtcccattctggttccatttcttttgccgggtcacgagctatgtcctaggttcaagttcgtgtctgggtcgggtactatgtcccgatcctagttctatttcccaggtccctatcctgattcaagatccaggtatcgattattgtgtgggtttgggtctaggttcgagttcgagtcctagtctcggttcgggtttaggtctctgtctgggttttgatctggg

SEQ ID NO: 291229 - DNA, 597 bp, Cannabis indica
aaatccgaattgataaaatttttgagagcaaacctagacgtttttgcctggtcactgcggatatggtcggaatcgactcttctattatttcacacgtcctgaatatcgatcctaacatccagccagttcagcagaaacgaagattgctggataaagaacgagtagtagccctgaaagatgaagttgaaaagctgcgcaacaacaacttcataattgaagctttttacccggcttgggtcgcgagtctgtactgatttcatagacctcaacaaagcatgccttaaagactgttttccacttccgaggatcgatcagctcgtagatgcaacagccgggcacgaattctaagcttcatggatgcttattcaggctacaatcagatcaaaatgcatccgccagaccaagaacatacaagtttccgaacagatatgggtctctactgctacaaagtcatgcggtttggtctaaaaaatgctggagctacatactaaagattggtaaacaagatgtttaaagtccagatcggcagaaatatggaagtgtacgtggacgacatgctcgtcaaatccaaaaaaggctgggggcacatagacgacc

SEQ ID NO: 291230 - DNA, 542 bp, Cannabis indica
ggatccaaatttaaatcccacggattctggtattccgggttgttgagagtattttgcatctcaactcgtaaaatcctcttcagagcctccacttcagcatacccccgggagtattcatccatggcgtagttgtgtttagctatccggagctcctgtctcgcctcatctccaggaaccggagtcagcacaatgttgggaggggctgtgtgttcctccatctcgggagagatcccgccatcaagaccatgggccggagtatcagctctccgttgccgtttgggctcctcctgggcaaccattttgcccttgcgcttgcgaatcagagcaacttcttgctcttcttcactttcttcaacttcctcaggaagagcccgttgctcttcttgaccttcttcaacttcctcagaaaagccccattgcttttcttgaccttctcccggaagcacctcctcatccactaagtcaatagtgtctggaggggcactggaagaagcctttaaaggggtggccatctgggaagaagttaaaggagggggagcttc

SEQ ID NO: 291231 - DNA, 556 bp, Cannabis indica
atatgtatatacatacgtaatagctactatatagggtacccaacaagttataatatgcattggataatgatgtaggactacatagctaagctaggtctacccattcataacaaaaacattgtttctttatctttgataatatcgtaacaattaaatccatgtaaaaagtgttgtgtcgtaacacaactatagtaattaacaaaatcgttggaaataaaaaaaaatggctttatttattttttttaattgattaatagaaattaaagtgtgagctaattgtttaaatttaaaaaatattatggatatatttatttatttataacagatgagtatgaaaagagtagtgttacacgttattaatagtgtttgataagagttttttgcggtttaaattctctcaactatcagtccgcttataagcttaaattttaacggtaaaatccttcaaactattgaattgctagtaaagttaaagtgtcatatatttttcagagttaataatcaatatagactgtttatgtatacacttttgtacatttatattggtacactgaat

SEQ ID NO: 291232 - DNA, 573 bp, Cannabis indica
aacattgtaccaattttgcccctgtcacttcaagatactctccatgtgattctcttatgtaagggtattttgggtacaatacatataaaaagaggtatgtttcaaataaatataaattagaggtaaatttgattaattgatgaataaaagaggcatttttcaacttaccccttgtgcaaaagaaagacctataatgttggaaggaggctggtctgaaatcacaattgcatggctcggcactcgatggagagctgggctggtaggaggaggagaggcatgggcttgggccttggttctcttgaattattcttgttttaaaaatgccaaatttttgctcttttttcactactttgttttttcttttaaagtacttcaataattattaattcctacaaaacataaacaaataaaattcaaatcacatattttaaaaataaaaatatatctcataaatttcataaaaatattgattttaatttaatttattttaaattttaagattaatttgtgtgcatgtttcaacattaatcacaaccatcaactagcttattgctagtccctagcaattcaagc

SEQ ID NO: 291233 - DNA, 618 bp, Cannabis indica
ggagcttgtccaacagtgagggttagacggattggcctagaggtgcaactctttgaccggagaaacaatagacaggctggaggcatggggttagatccttgagttggagtcccatctttcgtaagcagtcttgaacaaaatgttggaagaagctccattgttgatcatggttctggccaccattttattggctatctagacttccacgaccagcggattgttgtgcaaaaatctaattttgacagggtcttcatcgttaaaggttatggtcggctctcttgcttgtggaactttgggcttccttcttccacggccaggatgacttcttcttgctcgtgctgcactgttcgcgcatacctctccagagctttgcccgaatctccagcaatgtgaggacctccaacaatgacttgcagatgcccatctattggtggaggtagcaaatcttggttgttgtcgttcctctaaccttggtcggtcttaacataattttataggtgcgagttgtttttccttattaggaattcaatttaccgcttcaggttgcagcattcattagtttcgtggccgtagtctctgtggaaccgacaaaactttgtcatgtcccttttgttggta

SEQ ID NO: 291234 - DNA, 468 bp, Cannabis indica
ttcaaaaatttagagaagaaagagagaggaaagtggtggctcaggtattcactctgagaagaatgagatacagttctctgtcaaacctgaaacctttaccttctatttatagaataccacatagggttaaggttgaattacttggcatttaaaaatgaaaaataaaatgataaaatggaagcaaagtggccggccatagaaaaatggaaacaagcctctcacttttacaactttcctattttatcattcctagtttcccattctccaaaattgccaattgtctcattcaaccacataaatgtcaaatctaattatttaataactataattaatcattaaataatatattgtcatttattttatttattaataaaaactaatcaaagtttctcaattaataaatatatcctttaaactctctatatacttttttacccttgcttagtgaaaattcataaagtagacata

SEQ ID NO: 291235 - DNA, 563 bp, Cannabis indica
cttttttaacttgatgtctttaatttttaccatatttttcaaaatctatcatatttatctcttttttcaattattctactaattttacctctattacttcacgatagttttcatttttctctaatcaaaatttttccccaactttcccacaagcctacacatccatctacaaagaacacaaatctattatatttgaaattatgtcttagttatgtgagttgtgaggataatttaggtacaatactcataaaaagaagtatatttgaattaaattttatttgaaagtaaatttggttaatgtataaaaaaaaaaagggtaatcttcaacttctccctttatatttctacttttctagataaaaaaaaaagggggacttttacacaaaatagtcatttttggtcacaattttaatatttatattgttgaaaataaagttttatttgcacctcattttaataatttttattttgcataaagtatatctttaattatattagttatttttttttttcttttcaattcatatctattctatataaagtgtgcctatataactaaaatt

SEQ ID NO: 291236 - DNA, 841 bp, Cannabis indica
gtagatttatactttcttttataaaaaattaattaaaataatagtaaaatatcaattttatatttatgctttaataaaatattaaaattgagagaattaaggagagaagaaaaaaatagttttggagtgattttagaacgccacgtcatcgcctcatacttctcctttatatgtagatgtgacactttattgatcaactaacataatcataaattgagtgttaagtttagaaatttgaggatatcaataagaactacaatgatgatatcaactttatatgattggaatataaaaataatgcattatgaaaaaatttaattcataatctcacacttgtttctttttttacataatctcacacctattttctttttctttttgtttcaattcataatgtttgattcataataaatttttactataaaaaaaataattttcctatatatagttatgaatacatatatataaataattgaataattattttattttaatattattaatttaatttatagttattatgatgtgttttttaaaaaataattaatttaatatagatattttaatagaaaatttattaaaataatagtaaaatattaaaaaattgagagaattaaggagaaaaaagaaaaaatagtacttaaagagtatttaagaccgcgacgtcaccgttttgtacttctcctttatataaatatatatagatatttactataaaaaaatatttttcctatatatagttatgaatatatatataaataattaaataattattttattttaatattattaatttaatttatatttattattatgtgttttttaaaatataattaattta

SEQ ID NO: 291237 - DNA, 900 bp, Cannabis indica
gtaagtatcaacattcattcttctttgatttatttttgatatgtttccatttaaagattgatcttttatatagtaatgtgtctttaatcttgaaagattgacttatttttggaaatattgttggtaattctagtttccttttatcttttttttttttaaaaaaaaagggggaaagaagttgcaaggagtgggcagtttccttttgtaatcgtgggctggtggtttctcaaatatgttgaaattggtttcctttttgctaaactctcccatgtttatttcaaccaatttttgtcattcactctcaccacctacccgattctatttctttgtctctcttgcttgtttgctgttcattgtctctttcagatcaaaatggtggaatctaaacaagccccctcaaatgctcttcttgctgctccaatcgtcttgctgccatggaggaggttcagcaagagatgtccaagcagttgtcctcattgatcaagctttatggggcataagttttctttctttttgtttttgttggacatatttctatattttcatttctttttgtctttggcccttatagataaacaaaaagggggagtaattgtatactcaactgtctagggggagttgaggtttgtgtttgtgtttgtgtttgtgtttgtgttcatctttggtcaaagttagctttttattttggtttaatgttgtgcttctcagggggagtttttatgtttgttttgctaactttgttttgtaggtgtttgttaattaataatattttgattatctaaagtgccaaagggggagattgttaggtccttttttggcaatttagttgtcaaaatattttttaattaatgtgcattttattgagcattcaatttgtttttatcaactctagaccctttt

SEQ ID NO: 291238 - DNA, 652 bp, Cannabis indica
tctcttaaaaaaatgtacaagtaaaatgtttgtgatcgtgaaaaaaaattgggatatttacaccatattcagtaatttttcttcaaaatttacatttataatttgacaaaagaatttttacatttataacttttttttacttattttttatttgttaaaacttctttaattttttttctttttatatctgtttgtatttttttgattgacttcttttttttctttctcttctctctcttttatatataacaatatatataataaatttacattgttatatcttatttttcaaatactttttcactctgacaaattttatttagttttttacaaaatacaaacacttattattatacatatatatacttttcttatttacattttcttactattcacatgcactcaaactatttcattttaatttctttttaattaatcccattttataaaaaaaatatcttaattaatttcttttaacctttactaaaatatgattctttaattttcacattttttttcatattgttttaacattttttttttctatcttataaaaaaattaagagcattcctctataatgaagatatatttaaatttaggataataaaagcactaatttttatacttttaagttaaagttttttttttttt

SEQ ID NO: 291239 - DNA, 648 bp, Cannabis indica
cagttaccgaaagccaaatgatgctgaaagaagcatttatgtgggagatggcaagtcggtaaatgtggaagcaatagggcattttaggttgttgttaagtactggttactatttggacttaatagatacttttgttgtaccgtcttttagacggaatttggtttctgtttcttgtttggacaaattgggttattgttgttcatttggaaacaattgctttagtttatctattaattcaaatactgttggaactggttcacttatggtttatgacaacttatatttgcttgacactgttgcttcttataatgaaaccttgaatgtggaatcacgtggtactaagcgtaaaatggataatgaaaaatcaagttccttatggcacaaacggttaggtcacatctctagaaatagagttgagcgacttgtgtctgatggaattttagattcaattgatttttcagactttgatgtttgtattgaatgcatcaaaggcaaacagaccaaaacaaagaaattgggtgcgaaaagagctatagatgtcttagagttgatacatacagatatttgtgggccatttcctacaccttcttggaatggtcaacgatattttgtatcattcatagatgattactcaagatatgcgtacct

SEQ ID NO: 291240 - DNA, 517 bp, Cannabis indica
gtcctaggttcaagttcgggtctgggtcgggtactaggttccggtcctagtttgttgtcagcgtcggcctgctgctcacgtacctcatgaaccaaccggttcatgtaatgggcgagcatctccttgcctttcttggactctggttgcactagcaagggtggagtaggaggccgcatctgctcagatccgctcttgaccagctcggatccaccctttgattacacaggcttgttcgagcttcctcctcgagaatctttggacttagtaacttctggagtaaaggggttcgtaacagttagctcttcggaaaggtcaataacctccccggcgggtgccttttccttggaaggggtcgcctcaccgcccttggatttcttggccggaggagatgagcttgagcttcatccaactctcttctttagagcatcgagcatcttttcagacatgtctgcacgaaacaaaaacagcatggttagaggaaaaagacatcagaagcataaagcatagagctactttt

SEQ ID NO: 291241 - DNA, 610 bp, Cannabis indica
gattcgccggcgcgtgttaccggaacactttcctgatgtggctttacctattcgtgatgttcttcgttgtggcagctttgctgtgtttcataatattcgcttatgcggttacggataagggttcgggtcgacccgttataaatcgggcttacttggattattatttggaggactactcgggttggctggaacagcgtgtagcggataatagctactggtttaagattgcttcttgtgttagggattcaaaggcttgtggttctaagtttgggaggtttgttaatggtgttcctgaaactgctgatatgttttacaatcggaaactcaatccaatcgaggtaactaatattaactcctttatatatatatatacatatatttatgtattatttgataaaataggcttcttatttagtcatgaaaaataatctaccttaaaaaaataataataaaatgaaaaatatcattcaaaatcatgtcatgagttaataaattggtaggttttttttttttttttagttattttaatttttttttttctatttttataaaaatttacttagcaagtaaaagaaaaatttatatctcactcaaattcatttaagaactt

SEQ ID NO: 291242 - DNA, 643 bp, Cannabis indica
agagtcactttgattaactttgtgggtgtaaagatcgcttaactttaatttggaaattagtagataattagggtttaattacgaaacttgcatgttagttgtgaattattaatttacgatgatttatttgaattcagaatgcattttatatgtcatatataaaatttcataattttacatgttttgtgtccgacaacattggaacgcggtgtttggctattagaatcacatcttcgtatttctagtttagtgggacattatagttagacattggaatgttgggaatagtcaagattttagagttgacaaaaatacccctaagtgaccttttatgattttcgtgtgggaagggcaaaatggtcattttgcctatttgtgattcgtctttatgtgggtttaattaagtttaataatgtaattttatagagtttatttggctgagattactttttaataaaacatgtgttatttattcattttactaagctctctctctctttcgaccctcctagaaccacctaggattctggttttcttcaacaaatcttgagttctttccagcagctctaagtaaatccaagtcaagttaaagcctctaccaacttcctccttagtttcttaagtttcaagttatgagtttttg

SEQ ID NO: 291243 - DNA, 585 bp, Cannabis indica
aaaaaaatcaagaaatttaaaataatttatatttatagaaaatagtttttaaaaatccatttcatacttatggcatatttactaataagtaattagtaagataatcattcccttacatttgtttgcttacattattaaaattaggaaagggaaaaaaaaaaggagaacttccccaccaattttgtaaggaatgccattaagggtaatagatttttattatttttattttattttttaatattaaatatataatgacaattttgtcctttaaaatatgtcttgcaaaataactaccatataatatagtttaactcaaaagggcaatttagtcaatttaagcattccgattacgtttcctaataaagtaaacgagataaatcacaactattccatttctaaaaatttttagtaaacaacatattacaaatattgattctgattatttttcatttattctgttacatttctccattaatttatttcgattctgattactgtatagtaaactcgccattatattaaataaaagagtcatacgtgttgtttgaaattttcttaatatatttgtcttaaaaattttttttt

SEQ ID NO: 291244 - DNA, 736 bp, Cannabis indica
atgcaaattttatttggagataatttcaatacaatacatattcaagattcgattaatcataaggtaacttaagcaattatctaaagcataacagaatttaaggactacatttttaagggtaatgtactactaaatgtcaacatttcttttcaattaatatcaattaatacttaaatgaatttttttaacgaaattttttatgtataactcactatttacgtcataatatttctttataattatatttattttagtgtgatcattataatgattgatggtttatttttgtacgaaagattcttataaatgaattgaagtttatttatgaagggataaacaataaacagtgtgatattattagtaaaatatgtgaaaaataatataaaaataaaaaaatcttaataataagaatttaattatgggaaagataagttggagtatgaagtcattgcagaggccttggttttgtttgaaaaagcaaaataaggcgagaggtgtggagtctcaagcccttattttagaaaataggggagaagtcaaaacaaagaaggccaaaatagaaatgacaagttcagaggcagatcaaaatccagaagcaaaaattgatggctgctttcactgtggcaagccaggccacattaagaaaatttgtaggattttaaagcgagaaatgcaggaagccaacaagaaaaaaactaatggtgacacaacacagctacagccgccactacagaag

SEQ ID NO: 291245 - DNA, 531 bp, Cannabis indica
tactacaaaataccctttagaagcagtttttaaggtctttcagcgtcgattttgacaaaattcgctaccaaccctgatctaggtgatgctgtagggtctaaaataatcgacgccatacgggtacatatgacgtcggttcactaaacaaaaaaaaaaaaaaaataggtattggcacgattaaattagtgccaaaaaactcattttttagtgcccatctgttgattggcacgacatgtcgtgccctttagtcgggctaggggcggagccagaatgtaaagttaggggggccaaattattttataaatttaggtgataaatattttaaaaatactttattaactttataatttaaattaaaacgcagaattttttacttacatatcataaaaattatcgataaatgaatttatactaatttttttttgacaatttctcttttttaatatacaatactagcgagcaactacttaaatattcattttcatcttaatgcgaagtataattttttactatattcatagctgaaaaaaa

SEQ ID NO: 291246 - DNA, 527 bp, Cannabis indica
ttttctccttgaatttggaggagaaggaatatcagttagaataataccaccgtgtttctgtatttgctgtttaacatccttagccttctgggttgaaagtccagttagcagaaattgtattccttggaatatcaatcccttaccaacctgagaacaacaaccaaggaaacctttttgactatgatggtgtgaccttttgaaataagccggaacagtaacaacaacgttcttaatagtctgacttcatcttcaccaacaccattgaagaaatctcctcagctgcgaattgcttctcttcgcgtttatagttaactgacaatcattggcttgtctccaaggccgggaatgaccttaaaaggccagtgcctagaatcttcgcccaatcaacctcttcacatcaaagactgtgttttgagggttcatagcaacttggttcttcgccgcatcaccgattaaccgctctgcatcagtaaaagcaacataagaaggtgttgttcggttaccttgatcgttggctatgatctcaa

SEQ ID NO: 291247 - DNA, 645 bp, Cannabis indica
actaatattaggtgaagaagacagtaaagttttacaatcattagtaaccaaaccaaataccgaagacatttgttgtgtactaaagattgcttgaacagtgagtaagctgtcagtttccacctccattgtgctccaccctttatccttgatccaactaagggcctccttaacccctaaagcctcaacaacctccgccttgtaattcccatggtaatatttagcaataaaatcaattatttggccggttgaatcacgtgcaaccactccaaacccataggcattttccttctcaaatatagcaccatcgacattgatcttgaccgtattagaagcaggtgtcgtccattgctcaatgttactaccatcatgcaaaagagaggatgataataaacatgttttgtcttgagctttacgccaatgatcaagagtaacccaagccgaagtgagaatttgagtagaagaagaagcttttttgtcccaaactaaggtgtttcttgctttccaaagagcccagcaaatcataaccacacgacaaataacatcatcatcataattattaaacacactataaagccaatgaccaatagtgccttgcgaatcagcaagaggaatcagatcaaccttgtgccagcaacttaaagcaag

SEQ ID NO: 291248 - DNA, 434 bp, Cannabis indica
cggttcgttgcttgtgcatccttgaactcgtctttcaagttcaggatcttagccactccttgactgtggtaagtattctgtagtttactttttccctcattatttttcttgactttactcactcttgcatccttttccagcttgttgcataggtcggccgcctttccaagaacctaatcaaccacggcttcgtcttgtgcgaatttgggggcatagacgaagtcatgaagaccctgcaggacttgtctgctgaaaggcagactttccaagaggaggctgcgcagcaggaggcccttgccaaggccaagttcgaggaagaggttaagcaaagggaagcccaagcggaggcgatgatccgagaggaggtccttcggagggaaaggctggaggccaagcaccgggaggcattgagggcggagggcgaggctgttgcc

SEQ ID NO: 291249 - DNA, 506 bp, Cannabis indica
tagatttaccctatatatatatatatatatataacagagaatattgattttgttcctaagatgggaacatttttttaaatgcttgatcacatattcaatggttaaaatggtgtaagaacacaatagttataaaatgcttttactttttttttttaaatacagtaaattacaaaatttataggtttttaagaggaaattacaaattttacgggttattaaattttttatgtaaaaatatggctttttcttatgctgttttttttttgggctatttacaaaaatatgggaaaataaagataagttttgatatatatggcataaaaacttaattacactaaatatggcatttttttaaaaaacttacaaatatgggaaaaagtcttgagtaatgccataaaaaacttaaaatttgtgtttctttttatttattttttcttttttaaaaaaattaaaatactaaataaataaaaaatgatctcaactatagatattattttttttactag

SEQ ID NO: 291250 - DNA, 87 bp, Cannabis indica
tggtaaattcggtgcgacttattggaagctcggttatatagacccatggtcccatactagttgaggccatactgcttgtaagactca

SEQ ID NO: 291251 - DNA, 822 bp, Cannabis indica
ttcttccccgccacagacttaggagaaaagtcctcggggtaaagcccatacttcaccagattatcaccggaggtcaactggataatattcatgtcttcccccggcaaccgggtaagtttctgagctctatccctgagagcaagagtaaggggaggacggtgatatgtcggaatctgctgaaacgaagtccgggtaatgctcggatccttcaccatgaagtactcatcagcaaaacgccctattttgctgatggccttgtcatccgtgccggtcaaccacttgaagcctggctgagagaagaagtaccccgaccttccttgcttgggggtagacttcaggtcaaagaatcaggcgacctcgtggggagaaggagcatcccatccttgggaagcatagaggatgaagagggcggataaatacttgatgcccgtaggagtgatctgggctgggcagagatcaaagtagtctgccacatccctgaagtacttgtgcaagggcatcagcgccccctgcgggccgtgagcccccgaccaagcacacatccccttatcagggtttgtggcacgattgtcgtgggcgggaatgtagcagtccagctcgcccaggtacccgtcctggtcgagagtttgaaggcgcgcctccgtaatcttggacggaggacttacccacctggcgcccaaggcaccctgcctcctatgaggaaccgctgcagcaagctcgccactgacgtagtccacgccctcaaccaggacgtctccgtcagcatcgactggctgcccagcctcgttgtactccctgaagtttgggggtccaacctcttcc

SEQ ID NO: 291252 - DNA, 459 bp, Cannabis indica
tccgaacacaatcacagaaattaagtaatttacataaaatagcataataacatatatgatatattaaatatatttccaaaatatgcatttcataattattaatttaatctcaaacataaaccctaattatttaataattcaaggtattaatcatatgcggtctttacaattatccccccgttaaaaggatttcgcccccgaaatctacctgaacaactctggatgctgagttttcatatcagcctccaattcctaagtggcttcttccactttactattcctccagagtactttaaccaatgatatggttttagttcgaaggaccttttccttccgatctagaatttgcactggttgttcatcatatgataggtcaggttgtaattcgaatgtctcataactcaaaacgtgcactgggtcagacacgtactttctcagcatagaaacatgaaatacatt

SEQ ID NO: 291253 - DNA, 543 bp, Cannabis indica
catatgcataaaaacagatacgctcatatatttgcattgcctaatcaggcaagcccgtgtcataatgcaatatcatatataatatcattgcgacacctaatcaggtgagcccgtgccacaacttgacattaatatatcgcatcgtctaatcagacgatctcgtacctacgctcggtactcatcatatgccactgacgcccgtaccttttcctggtacgtccccagatatattgcatcacctaatcaggtgagaccatatattgtatccatagtatcattacattatcattgcctaatcagataatcaataatttcagaacctgtcatgccatgtggtacattatacttttcttaccttgagttccgaatcaggtatgttggctgacctgcttggagaacgatcgataatctcaggccctatgtcataacaacgataaaccaataaatgtttatcccaaaacactacttaacactcatgtaagataatctgggattttctaccaaattctgtggtatacatatactaaaataaaacttatattt

SEQ ID NO: 291254 - DNA, 643 bp, Cannabis indica
atgatgatgacagatgcatgggaaatattttgtggtaattaattgtggtaaaagctttaggttagaatctttcctgttttggaaaacggcagatttctggtgggcagagatggttgataaatagctaccttttcttaacaatcttcataattaatgtgaagaacaacgatgtgttagctagctggatttaaatcaacaaccagttgtgaagtataatgccttttaaccttagttatatagtagttagtagtacatgctttaatttgatcactgatcatggttctgggttttcagattcttttacttctttatttgaccatgagattaatgagtattaataaataacaaacacttcatctttgttttggttctaggggagattataggtttatttgtattttactcatatatttattaacttagaagattggattattttttgtctcctttactctaattattattattattttatgatttatttatttttatttattggtattctgactctctaccctaaacaagtgtgaatatcaaaaatccttaggcagattatttgagtgaaaaagctctcctctgatatctgtaatcattagaaaactgtctatatgtttattgtataagtttttgatttggtctctcc

SEQ ID NO: 291255 - DNA, 539 bp, Cannabis indica
gattgaagtttgtgggttggaaagttgcataacttgacacttcaatgtgatctattggagagaattagaaaagcacaattggaagatcctgagctagtcaaggtacgagatgtggtaatggctggtcggcctaaagaattttcagtctcgaataatggaatgttgttgtataaagctcgagtgtgtgttcctagtgtcgatgagcttaagaaagagatacttgatgaagctcacaccacattttattcactgcatccgggaaccaccaaaatgtatcaagatttaaagccctacttctggtggtatgggataaaaagagttgtggtggactacgtgtccaaatgcttaacctgtcagcagatcaaggctgaacatcaaaggccagtagggttattgcaacctttagtccttcctgagtggaagtgggaagacattgcgatggattttgtaattggtttgcctagaaccacaggaatttatgattcagtatgggtcatagtggatagatttacaaaatcagctcactttttgctagtaaa

SEQ ID NO: 291256 - DNA, 511 bp, Cannabis indica
attgctgcctccatattttctttctcactttctttcgaaccaaacagaaaaaacttgaatggagaaaagccgttgttatgaatatgatatgatgagatatgtgagaggaaggaataaacatttttcttttttcttttttttttacttttttttttttaaaaaaaaattatagttataatataaaaattattattattttttgggacacaattttcctactagagaagtaggcatgcacacgagttagagaatttgtgaagaatactttctatctcaatattatttgtgggaaaatcttccaatataataataaagtttgggtaaacactattttggattatgtattttgcaaaagttacggattttctgttttgttaaatgacaaaatatactctgtattttctaaaattgtacaaataggacctaaactgattttttgtcataataaaacttaataataatataatctagagatgttatgataaaactgattatattttctgtatttatt

SEQ ID NO: 291257 - DNA, 293 bp, Cannabis indica
taagttcggttaagggagttgaaattttagaaaacccttccacgaacctacgataatacccagctaaacccaagaagcttctaatttctgtcactgtcttcggtctcggccaatccctgacggattctatcttcccgggatccaccttgatcccatctttgctaacgatgtgccctaagaaggacacctgagatagccagaattcacatttcttgaatttggcataaagcttgtgttcccgaagccgttgcaaaaccatctgaagatgtaactcatgctcctcttctgattga

SEQ ID NO: 291258 - DNA, 603 bp, Cannabis indica
aagggagatttcctagccaacccatcccaaatcctaaaggccaatatgaagtaggagttcctagtcataaagaagaagccaaatctatttcaacacttaggtctggaaaacaaattgccaaacccgactacacacctcaagttgaaaaagaccaaagccaaagttccaacacaaatgacttgtcaaaagataatgatcaaattcttccttccattccaaaagctccttttccacaaagattatttccactcaaaaaaggcaaccaatatagtgacatcttagaagtaagtatcaacatcccattcttagatgccattaaacaaattcttgcctactccaaattcttgaaagacctttacactgttaaaagaaacactactgttccaaaaaaggcatttttaactgaacaagttagctccataatttaatataaaagccttgtgaaatataaagatcctggttgtccaacaatttcatgcatcattggtgatcattttattaacaaagctttacttgatttaggagctagtgtgaatttattgccttattctgtttataagcaacttgctctaggagaattaaaaccaacttctataacacttc

SEQ ID NO: 291259 - DNA, 512 bp, Cannabis indica
tgctcaaatttcccagagagaaaattctcagacccaaaacaacgcctttaaacactttgcaattttccccagttcctcttcgttcgttactatcagtccttcttgtctctattcgattcacagcaggacccccagtttcaacacttcatcgtaagttctttgcaccctttgctttattattgaatggcatgctgttacttatctgtttgttcttttctgggtttgcattcgaagtttctgggcatgcaagtgtttaaatccttcatataatcggtttgagtttactgctctagtgataggattgctgttgtcacgcctctgttgttattttttgtagaagaccatacgttcttcgtataatggttgcttagggcataggacagacttttttctttctgttttctttagcgtgtaaggccgtcttctgtgaatttattgcacccgactcttgtccagggaatcctcctagggtttcctgtatgacaggtgtccggagggggcctctttccagc

SEQ ID NO: 291260 - DNA, 801 bp, Cannabis indica
ggtcattttgccccattgatagtttgtcttttagtgacttaataaattgaaaaataaatattatttaatattaattgttggctgaagtgaataaataaaccttgttattttcatttttacaaagttggaaaataattagaaaatttgaaaagaaaagcaaaactttttctctcaactctctctctctatttcggccctcttggagcagcaagaagctagccattttcttgggatttttcttgtgatttcatctctctttaaggttcaattcaagctaggttagctcctcatcttttcttcttaaagattgttgaattttgatgaaaatagtgtaatgcatgcatgataaattgatgttgttactgctgtgattttgttgttaatttatgagatttaaacatgtttatttgaggttaattaagctacttgtggtgcttgatagttaggttgtttaaagttatgaattttctatgctaaagcttgagttttcaaagtgaaattgtgtgaattgttgctgtggttgttgcatgagttaggttttagtttctgcagttgttatatgcttgattatgagtttgaatcatggtttgatgcttttcggagagctttagccaagtttgagtttgaaactcaaagcttggagctcacatggtgtttttcaattctgtgcattctgggttgtgttattgctttaaatatgttatttaggtcctatagaacaagtctggaaggtttgaggttgtttgggtgtgatttggttgaaattgttgaaattttgtaatttctgcctgcgaggaaccg

SEQ ID NO: 291261 - DNA, 508 bp, Cannabis indica
gttgtttttcttgatcagatattgtatttcccgcttcaagttatgacattcattggtgtcgtggccgtagtctctgtggaaccgacaaaattttgtcatgtcccttttgttggtatctttctttatgggcccgggcttcttgtacggaattaacgactgagttgccatatacacactttctatatcttcagttagaatagtgaatgcagtgtgtttggcatgatcacggggagtctgtccggatttctcggtgaactttcctttcttcccgtttccttgcttgtggttgttgcttgaacgcttgccacttgaaaagctggaataattgggaagttgggcagatgttccaatggaaggagccttcattttgcctggcttttgctcaccttctgctcgttgaatggcttcttcgagcttgatgaagccttcggctgatcaaggaaatcactcatttagacgaccgacccattcttccttatatccttccatagttcaccaaggacttcaa

SEQ ID NO: 291262 - DNA, 527 bp, Cannabis indica
agacctgacatctgctatgcagttggaatcgtgagcaggtatcagtcaaatccaggtcaggaacattggaatgttgttaagtatattctgaaatacttgaagagtacaagagattacgtgttagtctacaagggtggtgctttaaatcccataggctataccgactcagatttccaggcatgtcttgaagacaggaaatctacatctgggatggtgtttactcttgggggtggagcagtggtttggagaagtgctaaacagaccgcgatttcagattctaccatggaggcagaatacatagctgcagcagaagctgccaaagaggttgtctggctgagaaagttcttcaccagtcttggtgtagtgcctggaatggaaaagcctctagtcctactttgtgataacaatggagcaatagccaacagtaaggaacctcgaagccacaagagaagcaaacatatagaaaggaaatatcatatcatcagagaatatgtggcaagaggggatgtactggtggaaaaagtgga

SEQ ID NO: 291263 - DNA, 684 bp, Cannabis indica
tgtctggattgaatttttgaggaacgttcacgttgcaccttactcaattcctacaatgccaaaaaaatacattagatacatgtacttgtatttaagagtttatcttagtgttaatataattagcgtaccagaaattcaggagttagtcgactttcaacaaatttgcaccaatcagcagcgtcgatctccgggtgcttttcagggacttgtgccagtcgtcccagatcattctctttcaacgcgggcattatgatgtcttttgtcatcctattcttgaagtctttcattaacttcccagctaggatgagacaatcatgtttgaaggtgtccggcacaatgaaccccgtctattttgaaggaaaacaaacacggttagagtcaacatttggagtaatagaaaaacaaatcaaaattctaacaaataatagcttacctgaatgtctttccaaactttatttttcagagtctggttgacttctttccagtttttataagccaaccctattgtctgccgacatctgactcctagagtggatacgagcttcgcgtagctttttccacagtattgacctttatcattaacttcgagggccactcttttgccctgatccattagtttggtatatttcaattcatttgtcgtcggccctccgtgtaggtagttgtggttggtacgactcattt

SEQ ID NO: 291264 - DNA, 707 bp, Cannabis indica
aaacacttaaaaattcaaaaatttttactaaacttgttattaattccaatacaacttcaagccaatatcaacattctatttaaaaagggacatccttcgaacgctttttgaagcaaattcatcaaccaactcttcatattttattgtctccaaaacctcattttcaatcgctatcgatgctaatccattaagccttcttgtaacatggtagaccgcaagtaggacttcaacaactttaactttgaaaaacttctttctgcagaagcaactgtcacaggaatagtcaacaaaatcctatatgcaataattgtattaggaaaacaatctacgcctttcaaaaactttaatatgtcgatagctctcattttctctctaggcaatatttaccttaatagcttcaactccacacataattcattcccatcaatatcagattgttcattatgtttcaatgcattttcaaaatgacaacaacaagactttaaatttgcgttgtctaatgattgtaacttgtcagaagtaaacaagaaactaaaatatttcatactcttgatattgttcaaatctcttagtaagagaagcaatggcttgatcaacaaggtaaagaaaataattaattctaaaagattcctctccagataactcaacagatggaatatttaaattttcatcaaattgtctttttcttcaaattgtgcgcctttgag

SEQ ID NO: 291265 - DNA, 725 bp, Cannabis indica
gtgtttcaactagggattaggactgaattatatgaattaaaaaagaataaaatattgggaaaaaattcaacactagggccagccatgtaatggaccaatctctagttataattttgccactttttttcaaccacatattcttctttcaataataccatattttcgaattcaatcctacaaatgccaaaattatttatttaataattataattaattatcaaataaaattatcatttatataatttattaattagaccatacaaagtctcttagttaataaattgaccccgaaacctcttttcttctcaattaagctttcttagtaaaaattcataaataagacatagtctaagtttagaattatcattgattaattaaaatcaattaactgggtctgcaagcggtattatctcaactagtgaggggacgatgggcttgtataaccgagatttcaataaatacatctagaatttaccaagtaaattctctaacttattaattccgcattgcgccactatagatttggaattgaatagcactctcaattatatagaatgctctatatgtaccacgatatagatatgttctgattattcattgttacaatcctaatagtcaaaggtcctctatagatgatctacactgaatagggatatatttaccgttctacccttcaatgtattttatccttaaaacatttagctacctataaatgatacttcaat

SEQ ID NO: 291266 - DNA, 654 bp, Cannabis indica
cacattacaacatttaaaaaaaacaaataacaacggtaaatagcagtaaataacaacatataatacttagttaataaacttacatcaccaaaaagccattctttgtccgtatttagcttcgagaaccaagccacgccacatagaccggtgaagacgtccctcggatacttgtttccgatggttcccactaaccaatttcgaaaactatgtagtagcttctcatcaacgggccgaagtgggtcaacattcacattggctattgatggcttcatcttcttcttcattttggtgtactcgtcaaaccaccttggccttttcttcggtctcttctccaccggtgttggaacggtctctaaaacctgtacctctgaatcttgggtatctccaatggacgtgatcgacatgttctgaggtgtctggagtacatcttccacatcattaggtctgtaatcattccgaagaatgaactcatctcctggagacacggcgtctggctgtggctctgcctctgcgctgggccttctctgatctcccataagagccaatagggtcttcaagtaacccattatctcattctgccctttcagaatatcagtctggccttgcttctaagcaagctgttccttctcaacacgctccaatcttgccaatatg

SEQ ID NO: 291267 - DNA, 604 bp, Cannabis indica
gttattacctgcgttgacaccctgatcgcccgcatggggatcacggagcgtctcagtattatgtgggccgcgggagcgtgccctgaaaactgcgttgagatgatcacgtagatcacctcggtgtacttgataacgtcctccctgttgtgtttgtacagagccggaccttgtatatctgctcggagtgcggccatgcgatgacgaagaggctgactctgcgtcattgtctctcgatggacgactgcgaggattacggcgctcaggatcttcgtcaatttgtgcgctctggttaggaaaccttgcggattgatctcttgacatcgggtgattcaagtccagagcttcagggtcagttcttcgttccctgcgtacacggttagtatgacgtctagaagttgttacctgagggttatcgttgcgaatggcgggaactcgaggagggcgtcgagctcgactctgtccgtctacctcggcttgtagtgcccgcagttgatcctgaattgcagcatattgatcggtggtgagctggaccattccctcggatactaccgccggagtgacggggggaaaatgcatggttgctggtggtgtggacgtgtccccg

SEQ ID NO: 291268 - DNA, 601 bp, Cannabis indica
atatgacaatgtgttgaattggtttaattttggggctgaaatttgttgctggtttttggtattgttggagagggaattaggtgtaattcctctctaaatacttggtttatgctaggtgaaagtttggtttgattgtgggttgatatagcatgaaatttggtgtttttggatgcattttcgtggctggaaactggtttcctgggtttttaaacccagtagccgcgaccattttatggcatcatattgtgtttttttttttggtttttgttttggtcataatttttgactcaagactccgtttggaacgttctgtatatcgttggaaagctcttttcgagctctatgtgaatatctagaatttaaatgcccagtttatcatttgtggaaatggatttagagattaaccctatacttgtgtatcccgaaattgtgactaggattacaggcacttggtcaggagtacccggggatttggaatctcaatatttgcagcacatcaggtaagatagtagttagcacgtagaaatatgcgcaatggcgcttatatgtaatgtgatatatatgagaaattagaaaccgggattagagttattactctaaa

SEQ ID NO: 291269 - DNA, 585 bp, Cannabis indica
gacctggaccaggacccgaaactaaaccaacccagccccaacccagccccggaacccaggcccgaacccggtcctggacccaaactaggactgagactcgaacttgaaccccaacccgaactcggaactcgatcctaaactcagaccaagcccctaacctaaactaggattcggacctgcacatggacacgaacccagacccagaccccaataccgacccagacccaaactagaatcgaaacatgggacctggacccagactaggttccaaaacacccgtaccaagactcggactaagacttgcaccccgaccccaacctggaccgagaacaaaacccggaccccgaattcaaattggaactgtgactaggacccagacttgagacgagaaccgaacccaaaccatatcccactaagaccaagacctggactgagatcttgactagggttgggacatgagacttgggatccgaacctagaccgggacctagacctgacctaatccgaaaccctcaccgagacctgagaccagcgaccgagaccagtatctagaccctaaaaggccccaaacttgaacccagacaa

SEQ ID NO: 291270 - DNA, 567 bp, Cannabis indica
agatcaaagttgcaatcttgttcatctacagctccattgaaatttcaaaaaatcaataattgaaaaaggaagattacgagtttgtgcgtgaatctaatgcacactaatacaaaatccccaaattgaaattggtgagagtgattgagaatgctttagattcacacacaaacctgaaatatgcctccttcttcttcttcttcttcttcttcttcttcttcttcttctactgaatcaactccattgagaattgagatcagtctaagcttttggaataacaaagaaatttgtggtggacaatactgaggcggaatggttgggtattaaattaatggaggtgaaaccctagataacaaaaatgcttccttttttttgaagggaaccattatccaaaaaaaaaaaaaagaatgaagaagaagtttgatgggctggacctgaactattgattgtggaggcccatttagatgaagagaatgtgggaaaattgatgaaaaattgaagggtgttttacccaaaaaaaaaaaatatatatatatatatatatatatttgtaaaagtttacaattttac

SEQ ID NO: 291271 - DNA, 437 bp, Cannabis indica
aaatcaagtaattttcattaatgatttaattaaaataaatagattaaaatatattatttataattagaaaattagtaattagtttatgaattatctagatagatattttctaggtagactttttggtatttttctagatatatttaattaaattaaaaaattaatatttaagttgattttattcaagacacttaaatatttgatatttttcttaagagatttaattaaataggaaaattatatttatgttgaagattaatttatttaattttagactaacataaattagaataatttttctagtttttattttattttatttttgtaggatttctaaaatgtattgttatacattggatattgaattcaattatatatttataaaaaaatttaatttgagttgaaaattaattttaattaatttttgaccaacttaa

SEQ ID NO: 291272 - DNA, 381 bp, Cannabis indica
tcaaagtttgaggggcatgatttggtagatatcaaagtctagggagcatggtttagtacataaacaatcactgaaacagtcaaattgaatgaaattagacaaaagtccttaaatctaacaatctcaataattcaggggaaatttttaacggccaaaaaagttcaggggtatgatttggtatatgtcaaagttcggggaaaaaattactaattagccaaaaaaaaacatagtataaaagatcatttaggaaaaattattaaaaaaaaataaatatcattcgtaaaaataataattaaaataataagaaaagaaaaaagaatcattattattgaggattcaattaaagcatactgaaaaatgaattccttatagttgacacgt

SEQ ID NO: 291273 - DNA, 507 bp, Cannabis indica
aatattttcttcactataaccttagataaataacttaatatctaattagttacaattcattctttttctcatcattaatgaatagattttagttggtatatttcttctataataaaattttaaattcatttatgtataaaagtgagtagttaattcattgtttgatttgttttgtatacacaaaaatatgttgggaatgatagtaaactacaagttagatatgacgatatataacaacactcttaaatgtgatatgttgactagaagtgagatacggtgatggaaacggttttaaaatcatatgatgagttttctataactttgtatattctcatgacaattcaccctcaaaataagggacaagcctaacatattattataattaataagattaaaatttgatataatttattagttagttatcattaaataaaattcataatttattttataatataatttaaaaaaatttaaatatccgccgcgaagcgcgagttgttcactagt

SEQ ID NO: 291274 - DNA, 551 bp, Cannabis indica
tatttgttatatattttttaattttgttataaatatgtgtagattggattggatcggttacttttacatgtaaatcaacatccaatccgcacaagtatggattttgaattttctaatccaatccaatccgcactttgcgcattggattggattggatcgtgcggattggatttgatcggttattttatgaacacccctatcacaccacaccaaccagctctatctattacacacactattgaacccgtggggcagtgcgcgtgtatggtgggtcaagtgtttgtcctcacccatttacatacaattgaccttttgggcccatactcaagtatcataattaattggttacatatacctttgtaaacaatacctcatattccatatacaactccatttattacacacactagaacactcgtattttatcaaaaaattattcaatttgtaaaaattccaacattttttaaagaaaacccaaaaacaaatttcctaattattaaagatgaaattacacttagtatgggattttaaaagttcttatgataaatatg

SEQ ID NO: 291275 - DNA, 619 bp, Cannabis indica
acaacatttataccttttatgtgattttaattactaaaataccacttatactatcatcacttacacaatcagacgatggttgcacggtggttgctgcgttgttgcacggtggttgcatcaaacgaatcagaagatggttgcaaggtggttggccgaaggttgcattagacgaaggtttcaataagacgaaagtttctaggtggttggctgaaggttgcatcagacgaaataactgttagcaaaatgtttaggcaactgtaatgcaactgttgtgaaacattaaaaatcaaaacagtgtttccacgtacgtaactctatctacatgtctcttaatgatttaatatgaataaattcaccattaaaaatttggaaaacaacaaaaatacaccaggataaatattttactatagtattgatgtaattttttttagattatacttgagttggattgtttgggaactctagctcaactttttgagatctgcctttcatggatctaaaaattcaagtcacaaaaggtttatgcaaattaaattgaatttccagttgaattttagtttcatagtagtttttctacaccttttttatgaattcgaaacagtccctgttttgattgatt

SEQ ID NO: 291276 - DNA, 543 bp, Cannabis indica
aaggtaatttggttttacttaagtcgttttattttgtagtgattcatattgttactttgtatatattttgactagacaaaaataatttcacaagtgatttcaattttggagagttgctcaccaatgtggtactagttttaatgtctcatagaacaaaagcttttggctatggacaaagacaaccattaaagtttttaccttaaaatattagtggatcttattgcctatttttggtttagttatcaaaatatttaaagagttaaatatgaaaattttaccattttggtttcttttatctaaatttagtataaagaatagtatattgacaaaatttttactatcatggtaaaaaaaaaatcaatgaatgtcattttcaagtttttttaggtctttacaatgtcattgtgtgttgactttctagtaaaaaaaatgctgactttacaaacaaaaaaaaccaaaaaaaaaaatgttaaactttatagaatctttgtacaacaacaactctcctagctcagttgtgaagatgaagttttatcaactctt

SEQ ID NO: 291277 - DNA, 714 bp, Cannabis indica
taaaggaatttatgagatactgttttttttttaaaaaattaaatttatgaagtattgattaatgattttatttttaataaaagaccaaattttatttttttgcccctgatgctctaaaattaattttaggtgtcgtttaattgaaaagaataaaaatataaaaataacatgagaatgagaattaaaataaaaatagaatcaaatcattttttttttagaatcatcaaatcaatcaaatcatatttaaaacacataaaaaattattaaaaatttatcatctcatatttaaaattgaatagttattcaactaaaaatgatgtaaaagttatttcatttaaatgacattctaatactttaaaatacagctaaataaaaaaattaataaaaaaattaattttcattttattctatttgaaccaaacactttagtctccaatatcactaattcaaagtcatgcacacaccgaccttaattttccttatttgttatttattatagggaaacttacaaaaatactggaatttgcattaacttttacaaaaatactgttacacgaaaaagttttcaaaaacactgtgtttttataaaacaccagtaaaacacaaaacagaacaactcaaaacaacagtagaacaactaaaaaataatagtagaacacgagtgaaaacttaacacagtatactgcagtataaaacttataaaaaaacacagta

SEQ ID NO: 291278 - DNA, 540 bp, Cannabis indica
gtgccaagagaaaagagttcacttacctgacccaaaaagaaaatatgagtgtgacagagtatacgacgcagtttgatcgattggcgacgttggcctcgggaattgtgccaaccgatttcagtaagaaggaaaaatacattgatggactgaatgtgaagatcatgcatgatctgatgattactaccgacgacaagaccacctatgttgagatggtggaaaaagcactgcgagctaagggtgcagttgggtgtatgactgagttagctaggactccagtgagtggcggggctcctacctctcctgcatcaggctttagtaggggaggtagtggttcggccatggattagaaaaggaaaacatccactgcaaccggtggcttgggacagaacaagaggttctgagggaaccagagtcgaggcggtcgtcagggtagtgctgagacccgatattcctacccagattgccccagttgtacaaggcaccatcgtgggtgagtgtagagggcaagggtgcttttagtgtgacatgcccggacactac

SEQ ID NO: 291279 - DNA, 646 bp, Cannabis indica
aaccggtcgaccggttggtactggtcccccagaaccggaattccggttctgtgctgggaacccaaaaatcatcccccttaattcaaatcaagcccaaaccttaccaaactctccagtacacctatacaatgcataaacatccatttccaaccaataaatcacagaacaaaccaacaaatccaattatgccattaaagctcaaagcttgagtttcaaaactcaagcttgcttagaactaatatcaagcatcaaaactagtagctagggacttaaatcaactcaaaataactctagaattcgaaccctaaacattttaaaacctaacagccccagaaattccattcacacattcaacctaagcttaaaacttgaaaactaagaagggtttcattagggcttaccttaatttgaatctcccaagctttctttgctgaaaacaccaagaatcaacagcccttcccccctggttttgccccagccgaaagagaaaagagagaaagagagagagttctcttgatttttgatttttctttgttttttctcaaatgaaaatggtttttccccaattaattctttgctgaaaaataatgtgctaggtgtcactaaaataaccagccacctaacctcaaataaaccaaatgactaa

SEQ ID NO: 291280 - DNA, 614 bp, Cannabis indica
ttttttttttgagaaaaaatatatttttcatagatttggatgccaattattgcatgttgttgagattagtggattttttgtagcttttgtgatctttaggttgtagatgttggtgtttgaatggtattagtgtttattacagggttgtcgatgacatatcgataggatatcgataggatgtcgatagattgggtgtctgtttgaattttgctgttatttgcatgtcgataggatatcgtttgtatgtcgataggatgtcgattggtggttttagtgtattttctgccctatattgtcgacgacttgtcgacagtatgtcgatacgttgtcgattatattaacatgttgattgttaggttgtattgtcgactgaatatcgacagtatgtcgatattttgtcgacatgttgtgaaattgttatctgattgaatttgtcgacaacatatcgacaggttgtcgatatgttgtcgattatattaagatgttgaatttaagtttgtattgtcgactgaatatcgactggatgtcgatattttgtcgacatgttgtgaaattgttgtctgattgaaattatcgaacagaatatcgaaaacctgtcgatatgttgtcgatta

SEQ ID NO: 291281 - DNA, 524 bp, Cannabis indica
catgcattactcatggtatattcattgggaatgcccatctttatggatattgacagatacacatgtacaagggatcaccccaccaaaaacactataaataccccctcaaagctcattaaatggggtcgaaaaatcttgggttgcataagtgcaagaaaagtaaatactcaccaagaacattctttgtatttaatacatccataaataacacagactcgtggactaaggctcattaacgccccaaccacgtaaaaattcttctctaattttcttacagttctctaatctaatattattttattggttgccgaaaacctcggtcaacaaaaatgattacactttattatacttcttgtatttcaatgtatcttaataatattctctattgtattgtcaatattgtactttatctgggttctgactatatttgttatcttattcttgtttaggtttgtttcatcatcaactatgtgtgcttgaaaaatatgtttttttatcgatccagcttgggtacagtttatgat

SEQ ID NO: 291282 - DNA, 477 bp, Cannabis indica
gagctagtttctttgtcggcctcctcatcatctctctccccgtccttatcactaacttccatcatttctttgtcggcctcctcatcatttctctccccgtccttatcaataacttccatcagttcttttagtagagattgcctcaactccattaacacggagtgcctcaactctttcatcactgtctgatgcaactcggctgtcacagattttctcacctcaggtaatatagattcacgaagctctggaataaaagattccttaacctcgtcaatgatagattgcttcatagtgacgaagccctttccgatgtccttagagatgtcgactttgaaagagtcaaataatcttagtagttcttgacaagtagtgtccaactttttatccctctccttcatttcatctcttaagatgcagttgcagcatgtagaggatgaggttcctccctagttggatgatggaatggaagtgtcttct

SEQ ID NO: 291283 - DNA, 624 bp, Cannabis indica
ctcataacggtaatgatcgtttctaccttaccacttgttatccacgagctgcgtatgtcactatcgtttcccggtaaagcaaacgataagtaagaaaccttctgaggtttcaagaatgattgctcataacggtaatgactgtctcttaattcattcacaacaacggtgataaccgttttcttccctcaatcataaacaattcacaaacagcaataatcgtttctcatcattacctcgattaccatcgagtcacaacaaatacatatcgttaacctcgattaagattaagtcacaataaacacataccgggatcttgatgataatcgagactgtaacaatcataacattaccatatacgatgcttaataattttcttacctcaagtctaaagtcaagtatgtgggccgacctgagtggaatgatgctcaaccatttcgggtcctcaaagctcttctaggttaacttgggcaagcatcagctttgaaatgaagggaaaaggctgaagaaaatcctcaaggctggctggtttggcttgcacaaaggggaagaagagaagaagaagcttggtgccttagcttctaagttaactcaaaaatatataaggtttttcttcttttttttttt

SEQ ID NO: 291284 - DNA, 692 bp, Cannabis indica
cccgaccctggttctgtgtccctagtttggttccatgttttggtcagagttcatgttcaggttcaggtcccgagtctaggtttgggttgggatccgagtcaaagtttgggttgggatccgagtcaagttacgattctagatctaggtccaatttcagttatgattccaagtccatgtcctagttccagtcccggtctacttccggttttggttccaatttttggtcacagggtacgggtttgggtctacttttgggtttgggactgggttcaagtccgggtgtgggttcgggtccttgtcagggttcaggtccagggctgggtcccaaatccagacaccgactacgggttttgttccaagccctgggtccagattcggatcccaatctcaggtcccagtctggttccatttcaggtgccaagtcacgagctgggtgctaggttcaagttcaggtctgggtcgggtactaggtcccggtcctagttctgtttcctaggcccgtatcttgattctgggtccaggtcccggttatttcgtgggtttgggtccggtctatgttcaggtaccagtcctagtctcggttcgagttttggtctccgtctgggttttgatctgggtttgggtttgggtttaggtcctggtcctggtcctagtcctagttcggttctggttccatttacgattctgagttc

SEQ ID NO: 291285 - DNA, 994 bp, Cannabis indica
tttaaattatatacagattacgttttctctctctgtctatatatctatctttctttccttctctctcttcaaatacaaaaagaaaaaaataacccataaacctccataaccaccacactccggcgacccacctccggccaccgcccgacctcacgcgccggactactccgacctcctagtgccggcgacctcacaccccaagcggcgccgctcctctcgccgccgttagcttaggatcgcaagtcaaagtttggggtttcaaactttgaacgggttttccggtcacctccggcgtccgtttgacgagaggttttcaccactacactcagctcgtcgaggagaacaacctacactaaaccatttttcccggttcgcaactttttccggtgacatttttgtagctccgcccctttccggcgactttccggtgacctcgtgtaccgttttgacaaacggttggcatgagtgtgatctactcgtcgaggtggtcgttttgatatatactactcctattttcggtgacatttccggtacaccaatttttaccgccaccgattgttaatgtgcaccgcttaggtgaggcttcgggactctaaattttaaatatagtcatattatatgtcgttggactcggttttgaatgtagaatgcgataatgataattatttaaccatttggtggtataggtgaaagtaatatgtaagtttggactaaacaattggagctcgggacttgagagcttaagatcgtcttttggaaaaagtttaacgactcgggagaggtagggactcaacttgatttttggacttgatttttatatgcgttgtataacattagacatattccaatttttatgatttacaaaattgtttgaaaaattgaaaacttaatctgcatattttctggactgttctggggcactgagtgccaaatatatttttgtgtgcaaatatttatgcaggttatgatttttgggtttattcaaaatacagct

SEQ ID NO: 291286 - DNA, 554 bp, Cannabis indica
gtgagttccgagctcgggtaatgattttacatgtcaaggcgaaagaaatcgtggagttggttggtcgtcgggacagcgggggatataatttgtagtcgctatgcgacaagttagaaaaaaaaaatatattcaaaatgtttataaaagtttttagcacgggatctcgattatataatatatatacatatgtatgcttataaagtttattatttattcaagttttgatttgacacaattttcgaagaaaacccttgattagcaaggtagtatattatttgaaaaatcactgtagcgcacctaagcatcagagcgttagaatatcgttgttgttgttgttttgtatatatgcatatatgcatatatacgattatgtataaccgtgccgtaacaaccgagatttttgtggaatgaaaatcattcctcttcggttgaaagtgatctttttgcttgggtttaatcacaatagaaattaggttttttgagttctaattttgtacaccaaaacagaggagagagagagagagagagagagagagagagagagtagagagaga

SEQ ID NO: 291287 - DNA, 470 bp, Cannabis indica
attcaggccttcgaagaggtggtggccacattcaacaaccaagctgacatcattaacttggtgagattgaagttctttcctttctcactcaaggataaagccaaaagctggttgtattccttaaggccaaggtctattgggacatgggacgaaatgacaaaagcatttttctctaaatttttcccaccccataagactagcagccttaagaggcaaatctctaccttcacccaaaaggaccatgaaacgtttcatcaggtctgggagaggtttaaagatttgatgggccagtgcccacatcatggatacgaaagttggcgtcttgtcagctatttctacgacggtctcacagccgacaaaagacaattcgtacaaatgatgtgcaatggcgacttcctacagaaagatcccgaagaagctttggaatatcttgaagaaatttctgaaaaatcatacacatggagtgcgcc

SEQ ID NO: 291288 - DNA, 502 bp, Cannabis indica
ttcaaaagtcatctttatcaatggtcaaaaaatgtcactatactatatagacaaaacaagggtacctaccatagaattttctataataatatgtgtgtaactaatcatatttagtgtatatgataataataatgatgatgatgataaaaagatgtgttcgtcatttttgagaataaagagttttggaattaattttccattagtggttttctctcatttttttgatatgagaaaatgaactatgagagttacttcttttttgggtttatcttgtccaaagatagatcaaagtggatctaaacttgtaaaatgagtcataattggaagagcaattttagactcatatcaaagtgaatcatggtggattcaaaaattgtgaaaagataacaaaattggagaatcaattttgaatcttaaataatcaagtagtgaacaaaattgatgagattttagtcaactttggtatattttaggctaatctcaatgaggagataaccttaaa

SEQ ID NO: 291289 - DNA, 714 bp, Cannabis indica
atgaccgtttgtggtgtcatgtttttcgagctaaatattacaaacgtggtgattccttttggagttcgtctcttccagatttggcctttaaatttgctcgaggcattatggcttctaggaattttattcgggcaaagacttgctagctctttgttgatggaaaaagtatttgatatatggcattcttcttagatccatagctcagttaggatgagtatacaactgccttcaatccaagaattcaacaaccaaaaatagttatgcttaacaatcttagtatcgaaggggcgggcgatctcgatgtgagccttctcggtgattggttcacgcctttggttagtttgaaaggtcataaactcgaggctatcattagcggggtcaagataagcttatttggtgagattcaacgtaacagatggttcattctctcttaggaaagcttatgttttgttgattaagtcaagacttggtggtttggatagcttgtggaaaagaatttgcattgcccctatccagaagcgtgtaaaattttttctttggaaggtgagaaagaacgttctcccatgtggtgatgggcttcgtgttgtatttgggaacaaatctcattgcatttgtgtaaaggtaatgttgattctctggtccatctatttctcactgcccttttgctagagcttgttggttttccagcccatatgcaattcgtagtgatttgat

SEQ ID NO: 291290 - DNA, 532 bp, Cannabis indica
aatacgaagaacagaactcaaaatcgatgttaatagttttttattaagaaaaaaaacctgaaagccaagcggcatagccaccgtctccaaggacgggaagaggtggaatccagagcttcgccggttgtggtgtttctagagatttcgttgccttgactgaaaagcccaccaaattctaatctctgctttctctttcttggcaaccaaccaatgaaccaagaaaatacctaaaaataattgtgattctatattccaatgccttatgtctatctattctatatttatatgtgtagtatatgcatagtagcgccagcggagatctctaatcacactcttctcacggtcctgattatctctctcctacgcgttcgttactcatcctacggttatatattaatcttctcttttaatttatctactaattttaattgttttttcttttaaagatgtagaatttacgtggagtatgggttttttaaaccttttatgataaatatggcataattaactatggacactttatatggctttt

SEQ ID NO: 291291 - DNA, 667 bp, Cannabis indica
gcgccaacctgtcagaacacacctgaaaaagacaacacaagcatactatataataatatagtccctaaagcacgtaattaaattaatttcatcattttacccttctcgggtcataattactaaaatgcccctggctcaccaacgaggtcttaacatagtataaatcaaataaattctcatatattgaactatataataatataattactcaattatttataattatctaattagggttttgctaatccacttcccaattctagggtattacaaattgtttctgatttcttatggtatcgttgacagtgagaataacgactcttggtcgtatttcttacagaagttgagggtagcaattagggtggttgagaacttagtgtttgtgtcaaatatgcatcaaagcattgatcatgctgttgaactcgtttcccccaaagcagtccactgtgcatgctatcaccacattgtcatgaacgtgaactccaagttcaagactgatgcttttcacaaccaaatatataatgttgcttactcatggtcaaaaattgaatgtgatagagagtttaagaagcttagaaagatgaatccggccattgctacatatgtggagagtatagggtttgaaaagtgggctcaaccttattgtttgggcgatagatacaacatc

SEQ ID NO: 291292 - DNA, 606 bp, Cannabis indica
ctacttatttacgtttacttttttcgttttttttttgtacggagtaaccgataaaggtaagataacacggtaacaaagttacacggaaggaaggattctccatccaagaagttcatttctatcctaagggcatgcttagccaatctatgagtctcaacattaaagttgcggctaacatgagaaagagatgccccaggaaaactagacaataggactttaatatcagaaaagataacccccagttcatctaaatatacagtctggccctccaaagctgagaccaaagaaagtgaatcagaaaaaactttctcactgcaggcacttgcttctgctactgtttttcctttcaaccaatcaccgccatctttatttctgttggttgcaatgttattatccagcacaaatggaattcgtatactattctctcgtcgatcagctacactttcccaggaaaaacttcccactttctcactgaaggcacttgtttccgctactgttttgcctttcaaccaaaaaatgtcatctttgtttccgttggctgaaatgttattatccggcatgaatgacatttgtaaactattctctcgtcgatcagctacaccttcc

SEQ ID NO: 291293 - DNA, 300 bp, Cannabis indica
ttaacattaagtaattttcataaaatctattggaaagttaatactaatgatgaaaaataacttcttttttcatatctatccagctatgtatataattttatatatattaaattaaaatttatatttagagttatataaattagtaattttaataaaataaatagattaaaataagtatcaaataaaactacaactctcttaaaataatgagctttaattataaggatattcaatctccattgttgattctacatagttcttattttagtgagattcgtccctaatagatgttcattcatt

SEQ ID NO: 291294 - DNA, 640 bp, Cannabis indica
ttttttctttcttccaccttgttaaggacatttcataattctgcaaggatccaatcagttcatcaagatccagttcctccacgtttctcatttcttcaatggaggttactttagacataaatctcctaggtagaactccaagaactttacgaaccaactttgcatttgaataagtctttcccaaagcataagactcatttgatatgtcacacaatttggcatggaactcagccaccgtttcttcttcctccattgataaatcttcaaacgcttttgctaaagcacgaagacgagatttctttactgcatctgttccttcatttttaattcgtagtttttcccaagcctctttggccatctcacagttcgcaatgaccttcaattgatttgtggacactgcattgaacaaagcatgcatggccttcgaattaaaattggccccctccatctcatctggagtccacaagctcataggttttggtttggtgacaccgttatccatcatcgttgggcatgtccaaccatcttctatggccatccaaactctttcattcaccgccctcaagaatgctcgcatttttggttttccagtatgaataatttccaccttccaacattgggggtcgtgatgtggaccctc

SEQ ID NO: 291295 - DNA, 183 bp, Cannabis indica
cccgaattgcgagccagacacggatcccagcagaaacttggactcgggactcgaacccgaacctgaactcagacccaaacatggaaccagactaggacctactctcacactaagaatttcaaaaattgaagagggaaggaggagagcaaggtggccgctaaagacagggagagagagaggctc

SEQ ID NO: 291296 - DNA, 665 bp, Cannabis indica
aaaaaaaccatattaaacattaaaaaaataaaaattaaataaaaaaactaaataactaaataatctcatagaaagttgagctttttttgtttcattatacacttcgtttccacatgcatgctttttttaaatattactgcaatcttgaaatttaaggaaaacaaacaaagactttccaacaatattataaagagaagttaaccaatataattgttttgaacgaaaagtgtagttttgttaaacaatatgtccagatgggaaaactgaggtgtgttatatagtttatttacaagatgaggatatgtaaatatgtataaactaaccatagccaagtaagatggaggtcatggaagctaaaatagcacaagccatggcaaagacattctttttgggtcttctcggaggatcaaaatcctcaatggtttttggttgtcgaccgggaacctcggcattctgtacagctttccggtcagccatattcttttttatttttttttcttagagagatttattgtatgggagacgagaagagagatatattctaattataatttggtagagagagggagagagagagtgtgtgtttaattaggatcagaccatagaaattggaaaggttgtgcattgcctagctggttgagcatagatcacttatatagacaaat

SEQ ID NO: 291297 - DNA, 596 bp, Cannabis indica
tgaagatttcaatcagacgaaagtttctgagtggttggcagaaggttgcatcagatgaaagttttcaattagaagaaataactgttagcaaaatgtttatactactgtaatgaactgcaatgcgactgttgtgaaacattaaaaatcagaataatatttccacatacgtaactctatctacatgtctctttatgatttaatatgaacaaatttaccatcagaaatttagaaaataacaaagatacatcaggataaacattttactatagtattgatgtaattttttttggattatacttgagttggattgttaaggaactccagtttaactttttgagatctgcctttcattgatctaaaaattgaagtcaggacattagttttatgcaaataaaactggatttccaattgaattttagtttcgtagtagtttttctacactttttttttatgaattcgaaacaacccctgttttgattgattctgatcgtcttctcaggtgaagtcgccgaaattaatggtggttctttttctggttgaatttttgttttggttgtgttggcttgctgcgtagttgcgcgatagctgcccaggaa

SEQ ID NO: 291298 - DNA, 508 bp, Cannabis indica
taccaaacacaactccccctggaaaaaagggtccagagttgataaaaataaattgaatgctcaataaaatgcacattaattaaaaaatattttgacaactaaattgccaaaaaaggacctaacaatctccccctttggcactttagataatcaaaatattattaattaacaaacacctacaaaacaaagttagcgaaacaaacataaaaactccccctgagaagcacaacattaaaccaaaataaaaagctaactttgaccaaagacgaacacaaacacaaacacaaacacaaacctcaactccccctagacagttgagtatacaattaaaaacccaattactccccctttttgtttatctataagggccaaagacaaaaagaaatgaaaatatagaaatatgtccaacaaaaacaaaaagaaagaaaacttatgccccataaagcttgatcaatgaggacagctgcttggacatctcttgctgaacctcctccatggcagcaagacg

SEQ ID NO: 291299 - DNA, 518 bp, Cannabis indica
aactccacgagatcagcactcaattctctatcttcaattctaattattactgacctaatccactttcttgaaataattaattctccattaggcaacagggttccaaaccccgtctcgagaatatcactaggtctatcaaactgatcaagaagtcttgatgacacataagaccgagtagcacccgaatcaaataaaacagtataagcaaaaccattgattagaagctgacctgtaactactgaaggactggcagcagcatctgcctgagttatagcaaagacacgagcaggtgcaggtacaggtttgacctcgggcttcggttcctctttcttcaactgaggacagtctttcctgagatgtcccaccgaaccacactgaaaacaggctctccggttacaagccccgggatgatgcttcttgcaacgcgggcactcaggataagaataagtctgacgtcctcctctattctggtttcctcgaaacctttttccttgccctgaacttcccgaagatggaaa

SEQ ID NO: 291300 - DNA, 478 bp, Cannabis indica
agaatactgtgacacacccaccatttggaatagcgattaataccctcgcaacttagcccgcgacatataaaaatcctaaaagatctagctaacagtcaaatggaagtaaatcttggcaatacgcgaatattcaagttgttcatccgaagatccgcgagtattcaagacgtgaaatagtgcctatgaattgtgtgcggttatgtcagtttacaggtcatattctatgaatttacccaggttttcttacctaaaacacatagcctcataagcacctacaagcatacattcctaaaaagcctttaaaatacccgaacccagaaagtaaagcatattttctccaaacagaaaacgaaaatgcaatgacttgaaaactaacctttagttctgatttctgcgattgctctcgatcacttctgagattgagaatattgtggaaaaagtggtagaaaatctggaaatggatttttgaagtttctgt

SEQ ID NO: 291301 - DNA, 338 bp, Cannabis indica
aacattttggtgctttcattgagagctgaagaaagctactgcaaacaaacacttcacttcacaaaaatggtggagactagaagtactcgtcaacctcacccattagaagatgctcaagatccaaatgaggaagatgtagcctcaagagcagctgagggttctgaggaagaagaaggaattccagatgatgacgacgagaaaaacctcgatgagtatgcctacgacgaaggtagttactcagagttggtgcttctcagacaaaaagctatcgatcacgaagccgagatcgaagcccagaaagcacaaaaccaaaaaatgcaagaagtgatgctggccat

SEQ ID NO: 291302 - DNA, 623 bp, Cannabis indica
gttttcttcgtacgagccatcatcctatggctgggtacggaatcagaaggagagttagcacgaagacgagggtggacttcgtgcagaagttgaagcagctcctggtcgatttgatgctcgggctcccaagactcacctgggttcatctacaaaagacaacacgcaagatgagtgttggacggagtatcaaacgaaaaacaagcaaatatgccgaccaggagtacccaacagattaaagaacgaccatgttcaaagaaaagtctaaactcaagaagtcagaaagtttttcttgagttagggcaaaaaagttcatgaagcttggaaaaagcaaaatggaaaacagacgcaatgcagttctaaaataagccttacggctgaaagctaacacaaggacatggaaaagaagagtcgcagaagtttcaaaccctagggtttcctaaagtgttctttctacaacgaagttacattcaaagcgtaagcatgcaaaggaaaagcataaagggaatcagaaacttactcaaagattcgaatgtccgggttcaagcaagccagaaattgtctgtaagcacttcaacaacattgaagccaaaaagttctctcttttcgctctgaagtttgcttaa

SEQ ID NO: 291303 - DNA, 563 bp, Cannabis indica
caccaaatcaggtttctagacgtgcgttgatgctagaaagtctactgatgagatggtgattactttgcgggtggagcaaagatttttggagaagtgtaaaaacttatctgaagtctctaactctaccagtgagactaaatgtcaaagttgcaggaatgatacttattcagtctatgaaaagttctataaagtttttggcattgtaccaataacgaattaactactagtgttatttcctaactaacacagaattagttgccaaaaagtaaagaatctagtatctctagaggagtaaacatatagagaggaatttcacaatattaaggattttattattaaggagatgtaatggtggaaaaaagttatactaaatacaacctgtcagatcctattacaaagacaatactacatattacacttgatctagatatcaaggtgttgagattatttaaaatgcacttttagttttatattagtgcaagtgggagtttgttggatttcttgccctaaataaaatacatttcaatataatcagtatttgctaattaataaaagatcagaaa

SEQ ID NO: 291304 - DNA, 581 bp, Cannabis indica
ttcactcacttgacccagaaggaaaacatgagcgttacagagtatacaacccagtttgatcgcttggcgaggttggcctcgggtatagtgccaaccgatttcagtaaaaaggagaaatatctggatggattaaatgcaaagattagacatgatctaatgattactacagacgacaaaaccacctatgctgaaatggtggataaggcactgcgagctgagggcgcagttggatgcatggcagagtctgttgggactctagtagttggcgggactcctacccctcctgcatcaggttttagcaggggaggtagtggctcgaccatggatcagaaaaggaaagcatccactgcaaccggtggctcaggtcagaacaaaaggttctgggggaaccagggtcgaggtagtcgccagggtagttctgaaacccgatacacttacccagagtgcccaagttgtaaaaggcatcatctgggggagtgtagagggcaagggtgctttcagtgtggcatgccagggcattacaagagagattgccctcaacttagaaccgaagcatcgaaggcttcagcgaaacccactcc

SEQ ID NO: 291305 - DNA, 839 bp, Cannabis indica
cctaagcatcaaaagcacaactacattttagtatctatgacacttgcatcttgttcatagttgttttgacaagatcattctctgcaaagagtcaatatgcctatatccacttgaaagtaggatcatctgtatttgacatatggatgtacattcaggggaggatatgagttatcgttaaattctttagacgagcactctagattttaccttatgcaaaaaaatttgaaatgtttgagaaatttcatgaatttctagcaatgttgaaaacattaaggtaagtggttaacgatattatgaactgataggggtggagaaatatttagtggatatgcagttcaaagatcattaagttgaacttcgaattatatccaaacttacctccctataaattcaaattgcatattgatgatagtataagatttatgattagttactagcagttgcctaagaccttctagggaaatactctagtgatagtgttagaatattagctgtatatgttgggattttatgccctaaataaaacccatttcaatctaatcagatttgttatcaataaaagattagaagtcatttatgtttacatgtggttttcatgtctactgtttaatatatacaaaatctgttaagtccagaacatatagtcattcacaattacagtgatgtcaccacagtggaatgtgattgtgattatatgcttcaaaagacaaagtccctatttcatcagtgcactggatatacactgatgtgataatcatcgatgaagtgtacttacactttgcataagtgttatgttctttccagagtattggcaaagtatactagtttcgaatgaatgg

SEQ ID NO: 291306 - DNA, 503 bp, Cannabis indica
aaaaaaaatctttttaataatgtatatattttttactaattttgcaaacatcatatttcttttttaaataagcgtttatttttttttatggccaactaaagtttaggactaatctgggcatcttaaggtgctaaacactatactgatgtagtgcgttgtgagtgattagtaatttcttgtattatttattaaattaaaatatgtagaacacagtattaaattgtaccaattgtcaaacccgaaaattaataaggcttattcgtaagattagtcaacgattagttttgagaaaggaaagaaatcaactttaagagttgcttgagaaataaccaagtcgacgcatgtatctcggggccattcgaccaagatgaccttgaagtcacttgatgaccaagcaattgaagagggtcactcagtcatgcttggccctaagtcactcgcccatgaccattcaagaggtcactcgaccaagatgaccttgaagtcactcagccaagccaagg

SEQ ID NO: 291307 - DNA, 492 bp, Cannabis indica
taaaataatatcgaactctactaggctcaactctatcaagtcagcagttaactttctaccatctattctgatcggcatagacctaatcatccttttggagataactatctctccgccaggtaatagggttcgaaaccctcattcataactatcatacggtctatccaatttactaaagattctggcagccacacaaaaacatccttgacctaagcactcacccggaggatgccttttacgaatgagacacttcggtagaaataacgggtctcaacactaccctgacgaccgccttgattctggttccctcggaacctcttgttctgccccgagccaccgaatgcagtggatgatttcctcctctagtccatagccgaaccactacctcccctgctcaaacctgatgcaggaagcgtaggagccccgccacatactggagtcctaactgattccaacatacatctaactgcgccctcagctcacagtgctttc

SEQ ID NO: 291308 - DNA, 165 bp, Cannabis indica
tgtttgttcttttctgggtttgtattcgaagtttctaggaatgcaaatgtttagattcttcatataatcagtttgagtttactgctctagtgataggattactgttgtcacgcatttgtcgttattttttgtagaagaccatacgttcttcgtataatggtcgtt

SEQ ID NO: 291309 - DNA, 518 bp, Cannabis indica
aagatctccacgctgcggtaaatttcgtgtttgaagaacaaaggcgcatgtttaccaagtggagagatagagagatggaagcgttaagggctcatcatacagagattgaaaatcgaagtcggcaagctaccgtgctgatacgaaaagcctaccaaactataggtcagcaacctccgagtgtcatccccctaggtgagacagacaaagaaccagcgatgaatacttcacagactgcaaatggtccgtcgtccaatccccggtcacgagttccacttgtgggccaagcggtaggcgggcagaccttgtctagtaattcatcgggagaggtcatacatgatggttccaaccaggtgaattgtgccattccacctgtcaaccaagcaaatcaatcgctaaggcagccaggcgcttctgtattcaaaaggttggggatgactcacgacctaagggaatggatctgaacagaacggagaggagtagacgatcagattgtcacgacgatcgttcagcccggagcc

SEQ ID NO: 291310 - DNA, 609 bp, Cannabis indica
aatagaacgaaaagactgagcatacaacaattctatttgaaagtatgatcatataaaagatatttatgttggaccaaaaataaggggcaataactcaattaaaagaaacaaaaaaaaaaatatataaaggggcaataactcaattaaaagaaacaaaaaaatatatataaaggtgaaatttgtcatgtggcagccattgtcgcgatctgacgctgcaattctgtgcgcatcaactttgatggttttgtcccctatttgtgtgttctcactggcctgcataatctacttgtgtattttactttctctttttgcgagtagattttgtctccaactgtactcttataaataagaaactttataaattctaattttgaaattagtaaatcgtatacacgtttatttcttattatgattgtaagaatatttattttgaaaagtattagccaaaatagaaaaaaaaaacgttttaaaagtaataaagtgaaaactttagcatttaggtggcgtttggttgaagctaatgaaatggaatggaattgtttgatttcatatgagtaatttgcggcaaaattccctcaactatcaatttacttgcaaaaaaccatctaa

SEQ ID NO: 291311 - DNA, 866 bp, Cannabis indica
gttttgactccaactgctcaacttccaagtcattgtgtgcagcaatggctaacatcattctaatggtcttgtacttcacaacaggtgagaagatatctgtgtaatcaactccctcaacctgtgtgaatcccttagctaccaatctagctttatatctaggtggttcaccctctgacattccttctttctctttgaacaaccatctgcaggagacaactttcttgtcttttggtcttggcaccagaatccaagttctattcttcttcaaggaatgcatctcttctcccattgcagcaagccatttcttctttgatttgcatgcaattgcttcttcataggtagttggttcaggttcactctcagattgtatcacagccagggcataggctatcaaatcagcttcagcatacctactgggaggtctaatttctctccttgacctgtctctagccaattgatagttggtcaaatctggttgatcatcttgactggtttccacctcagctgtatctgtaccagcctcagttgtgtctgcaccctgtgtttccacctcaagagatgtccttgcttctggtgtgtggggtaaatcaatggagacttcaatcttgtcagtgttgatctccaactcagcaaggtcatccctgttagtacctgcaacatcagaacctttgccttccttggctgtcaagtgcatgaaatcatgctcattaaagactacatccctagatatgataatcttaggttttccattttcaacatgacatagtctatatcctttaacacccttaggatatccaagaaagaaacatttaatagccctaggttccaatttgtcaagtttctggtgtgcatatgcagtgcagcca

SEQ ID NO: 291312 - DNA, 533 bp, Cannabis indica
gatgtctcattcaatgacatgttagcgtgaaacaattttttttacaaaaaattatattcatatcaatatatatttctggaaatgtttttactacacccatttgatatgttttggcatttaaaaaaaaaaaataggtggcatttggtaacacttttttaatcaattttctgtttttaaaagtggaaaagtgaaaatatttttcaaaaacatgttctataaaactgtttttattttttaatttataattagaaatcaaaattttaaaaacaaaaaaaaatcttaatcaatcttttggattacaaccagacccggacccaaattccctcctcacggccttggcgctgaacccggcttctgacccgaacccaaatccaaccccggatcttgacccgacttaaataaaatacaaaaaataaaaataaaaatgaactttacataacacacttttgttttttatttttaaaattaaaaaataaaagtggttagagaacgcacttttgttttttaaaaataaattttttaaaaacaaaaat

SEQ ID NO: 291313 - DNA, 302 bp, Cannabis indica
cggagaccttaaagaactatataaagaggttctgagaggaagcatcgaagaccaagaaacttgatgacggacaacagcttgcccttctccaggcaggcatccgtacagggactccattctggaacgaactacaacaagaaggagctgcaaaccttcaagacttccagaaaagagtccaaaaatacaccaatcttgaagaggcccaaatagtggcctatggaggatattatcccaccgggatagcagggtatatgccaggagcccagccatcgggtaccgtcccgacaacaactccaccaatg

SEQ ID NO: 291314 - DNA, 870 bp, Cannabis indica
ttcttcttgtttgttactgtcagtccttcttgtcttcatttgattcacagcaggaccccctgtctcaacacttcattgtaagttccttgcaccctttgcttcattattaatatgcatggcatgctgttacttatctgtttgttcttttctgggtttgtattcgaagtttctgggaatgcaaatgtttagatccttcatataatcggtttgagtttactgctctagtgataggattactgttgtcacgcatttgttgttactttttgtagaagaccatacgttcttcgtataatggtcgcttagggcataggatagactgttttctttctattttctgccttttctttttctttagtgcgcaacaccgtcttctatgaatttattgcacccgactcttgtccagggaatcctcctagggtttcctgtatgacaggtgtccggagggggcctctttccagcggttaggggaccccattccctttttcttggtttagggtttggtatggggcctaactgctggaatcttaactctttttgcagaatcaaaacatgtctgcttctggctcaaaatcatctaagaagagcggtaagcgcctgactaccctcgaggaggtctccctgggtcctgttgcccaggaggggtacaagtctcgggcgaccggatgggaggcggccgagcttcactccactctaacttgtccccatcagctggaaaacatcgtggaggtagctggaatcaagcgttccacatcaggaacctaccaccgcccacctcgtgacgcggagatgcccaatcataactacggcggctttggggcctggagccagacgcatttgatggccgggggccatgcttcctctccaagacta

SEQ ID NO: 291315 - DNA, 489 bp, Cannabis indica
caagtagaccccggggctacccgaaccaatccaccagcaccgcctccacctccgcaaaatccgagggataatacgggggttgttaatgctaatcctcctgctgactggcagcaaatgtttcatgaaatgcgaagtgtcatacttcgtcaagaagaagagttgcaacgtttgaggcaacaggctgcccaagttaatcaagggttacctaccacgctcctcgtgtccacgtggtgggtaaccgaacggtagtattatgtcgcactgtagactctgtgttcgtagcgatttgttgaagctgcaacctctggcgttttctttggtagggcattgtatattatttaaggtacggatctagtggatgagcactgttacccgtactctcaataatatggggtggacggaacgtgagagtgtgaattgtgcggcctttatgtttctaagatcatgcccgcgtctggtgggatatagtgaatcagactcgagatgtca

SEQ ID NO: 291316 - DNA, 339 bp, Cannabis indica
ttctatataactgagagtgcaattacaagttctatggtggataaatagttttggcatttaagtagttgaattggaaaaatggtatttttaagaaaataagataaatagttggaaaaatggcaaaaattgcaaagtggggggcccacatcctatggccggccactattgctctattttaccatttattttattttataaatgtcaaataattcaaacctaaacctaggtggttccctataaatagatagtgatggcctcaaattgaaggatgatgaacatactattggaattattttaccaggatctagatttactaacaagtatgtttcattaacatcc

SEQ ID NO: 291317 - DNA, 574 bp, Cannabis indica
gaaataagatcgatgtcaggtgatgatggacttctgagtcttgtgcgggcggtcaccttgcattttactttattttgttcttgagcttcttgattttcatgcattgtgtttctgatggctgttttctaaccatactgtttttattctgtgcagacatgtctcggcagatgctcgacgctttgaggaagagaataggcggaagctctattgcctctcctccggccaagaattccaaggtggggaggggtccttttagaaggaaaagagaccttctggagaggtcattgatctttccgaggagctgactgttgcaaacccctctactcccaagtctgccaagtccaaggaatctggaccaccaacggctgggtctgaacttgtcaggagtgatcctgagtgggtgcaagcaccaactccacctttgtcagtgcttccagaggtcaaaaagggcaaggagatgctggcccattacatgaaccggctggttcctgaggtcagtaagcaactggctggtgctgataatgactcatctttggatgtgttggtgggcggagtcttgaaggagttcactagg

SEQ ID NO: 291318 - DNA, 623 bp, Cannabis indica
caaacatttccaattcacgaatctctagataagtggaagagtgatcacacatgtaacaactccctgagacccatgatcatgaaagcccaatgggatttggtaaggcaagtgactaatgaaagtatttccttgatcactgggggcaaataagacatagtatacaagagttatgcacgtcacatgagcattcaaaaaatcatgatacacgagagccatgtatgtcacatacacctcgatataggggagtcaagtgttaccctggtatacgggagtcaggggttatagtggcattcaaaaaatttcgtacacctaagttagtatttctacagtttaatgaaatgttgacattatccctagttatcgagtttcttaatcctaaagtgctagtgcgagtgctggtaagttcattaagttgaaaaatttcacattcaaactatttcatgctagagttaagcactattatgatataaatgcttgaggtctcacaagaatataacaactgagtttataaatataaagtgctagtgcaagtgtttctcctcaaatctctaaaattaaaaacgaaagaaaagcatcatcaattacagaaagctctttgaaaagcaggatactacatctagtag

SEQ ID NO: 291319 - DNA, 608 bp, Cannabis indica
ttagtgggataacattttttgatctagtagttgccatatagttgattgagatttttttcttttgtttctttagaactcagtgaacctatcttaatttatttttttcacttttataatgattttagctctccctttggtgagttatgagctgtgactgtgttaaatcataaatgtggtatagtcattattatttttaattaaattggaatgacatgttatagacagccttttctcagtgtaagtttattgatttgatttgattagaaaagaatctgaatcatgtacgtagcatagtgccataattaactttcttctgtagtacaatatttcatgagttttaacattacataaataagtagtatactacagtatactccctatttgtgatcgagttttaactttatatgaataagaagtattttccgcattatgaagagttgtttaatttgtttttttttcttcatgatttaaaaaaaatagataattattttataaatttctaaataattatttattatgcacaataaaaaaataataatcacaactacaataaaatattatgtcttatatttaattgtgtctcatagcctaatcaccctaaactacgc

SEQ ID NO: 291320 - DNA, 860 bp, Cannabis indica
tgcatgcttacaaacatatttctatgaatgtcaccccacaagttcaaggactgatgtgtgtaacacgcaaatatggttggccgcttacgcgatggtcgaagaggggaatgtgatagacatttgcaggtgctccgacagatggatcctcccatcgctgcttatgttgacaatataggattagaaaaatgggctcgtccttattgtctaggagacaggtacaacatcatgacaaacaacgctgcagaaagccttaacaacgtgactgaagaattccgggcatatccaataactactctagttgagttcataaggttcacactacaaaattggtttgctaaccgtctcgagaaggcaagtaagtgtgttacccctttggcaactcattttgaggaagatttgataaagcaacacgaggatggtagacgtagaagtgtcctacgtaacggtgcacaattgtttaatgttggaagaggtgctgacggttctgactttgaaaaaggcggagatgtgaacttagttgagagaacatgcacttgcggcatgttccaattgttgaaaattccttgtccccatgcatgtgccgcagcgcttactcagaatgtcagtgtctacgctctgtcatccccctattacacaaaggagacgtggaagaatacttacgatgcaacaattaatgttgtgggcgaggaggatgaatgggtgcttccagaacacatgcagaacatgagaatcggtgtaccagtggagaagaaacctgtaggtcgtccaagaaagagcaatgcaggaagactacggactaaccgatttccatcgaacggtcaaaaagtcaaggaaccacgcaaatgttcaaactgtggcgc

SEQ ID NO: 291321 - DNA, 387 bp, Cannabis indica
accatgggcctatataaccgaggatccaataaccagatctagactttaccaagtaaatttcctaacttattaattcctctttgaaccactatagaacttggaattgcactatcagttatatagaacgctctatacgttccacgatatagatacgctataaagatttaaccatcactctaatcccaataatcaaagatcctctatagatgatttacaccgagtggggcaaatttattgtttcacccctcaatatattttatccttaaaacacttagcttcttataaattatatttcagtaaactaatataatcactaaaataagagctcttccatttatctctattaagccaagctcgaaggaagtcatcatttcacttctatgtcca

SEQ ID NO: 291322 - DNA, 480 bp, Cannabis indica
ttttttttgtcgtttttcctccgtccgggtgctgcccttggaggaccttttactcctcgagccttgggaaggaccggccaagctggcagtcggagcggagtgctagggggcttgtccatttatccccgagggatttctaaaatgggatgactcgggggccaaggcctggccctggctgtatccgggagtagcggagaattgtatgtcgctcattggtggagttgctgtcgggacagtgcccgacggctgggctccgggcacataccctgatattccggtgggataatttcctccgtaggccactatttgggcatcttcaagattgatgtatttttggactctcttctggaaatcctgaaggtttgcagctccttcctgttgtagttcgttcgagaatggagtccctgtacggatgcctgcctggagaagggcaagctattgtccgtcatcaactttcttggtcttcgaggcttcctctcg

SEQ ID NO: 291323 - DNA, 833 bp, Cannabis indica
caccatgaagtactcatcaacaaaacgccctattttgctgatggccttgttgtccgtcccgctcaaccacttgaagcctggctgagagaagtaaaaataccccgacctgccttgcttgggggtagacttcaggtcgaagaaccaagcgacctcgtggggagaaggagcgccccattcctgggaagcgtagaggacgaagagggcggacaaatacttaatgcccttgggagtgatctgggccgggcagaggccgaagaagtctgccacatcccggaagtacttgtgcaagggcatcagcgccccttgctggccgtgagcccccgaccaggcgcacatcccctcactagggtttgaggcgcgattgtcgtgggcgggaatgaagcagtccagctcgcccaggtatccgtcctggtcgagagtgcggaggcgtgcctccaaaatcttggacggaggactcacccatctggcgcccaaggcaccctgcctcctatgaggaaccgcctcagcaagctcctcggtgacgtagtcgacgcccgcaaccaggacgtccccgtcagcatcaactggttgcccagcctcattgtactccccatagtttgagggttcaatctcctcctctccctcagcaacgggagggctgcctggacgtgcctcgtccagctccttaacctcctggacttcagcgtctccccctcacggtcctcctccattgagaccgccaaataatgttcggcatcgggcagggtggcaagccgagccacctgaggatcagaagcatcagccagacgcgtagtttcttcgtacgagccatcattctatggctgggtacggaa

SEQ ID NO: 291324 - DNA, 488 bp, Cannabis indica
ttccctccgcttagcctcttcctcattagctttggcagcggcctcccggcgctcagcagcctcttggtaaagccgcctctcagcagtaagatcctgaagaatcttcctgacttcgtccatgtccccaaaatcagacaggacgaagccatggttgattatgttcttggagagacggccggcttcagcagcaagctaaaaaacaatacaagtataagaaagaatctccaaaaaaaaaagaaaacaataaggggaaaagcaaattacaaaacacttaccacagtgagggagtggctgagatcctggacttggaagatggagttcaaggatgcacaagcagcgaaccgcttaggtgcgcaccgggtaagctgagacgcaaactcgccagtcatctccgcagcaaagggagctaaggtgggcccaaggaagcgaccgaaccagtccgatagggggtccaaatttaggtcccacggattctggtactccgggtt

SEQ ID NO: 291325 - DNA, 557 bp, Cannabis indica
ggctaacctcgccaaccggtcgaactaggtggtatactctgtcacgctcatattctcccgttgggtcaggtgggtgaactctttcctcttggcacttctgactgcctcgtaatattttgcgttgaagagttcctgaaacctttcccaggtcatggtggtaacgtcgtgaatctgagacaccatgtcccaccagactagagcgtcttcttggaactggaaagcggcacacaccactctgtcattcccggtgatcaccgttagccactgttcggccttcataacatctggacctcccagaaaaaccggaggtgcatgcttccggaacctttcatacaagggttccattctgtttgccgctactactatctcggcttgagcagcaggggcgggtgccactggaacttccggcacaggcactgcaggagcaccctgctgcctcaatctttgtatctccaaatcttgttcctctatccttgcttgcatttcaacaaacctaatctcccaattctggccttcttgctcggcttgggcagcctgggcagcctgtggcgggttct

SEQ ID NO: 291326 - DNA, 568 bp, Cannabis indica
tcgtcaaacgcgagattcactccagcacgcagttcatcttgatcatgatgtagagtgttgctatgactctgcatgagtccgagcgcagcatggagatttcgcaatttggttgcgtctccgatggtcgtttgggcggtggttccaggcagaacaatcgtgttatgaatgccctggctgtgtgcagaactgttattcctagtctcttgcacacaaggcgcagtttcagtaacaggagctgtttcaccattcaccacgctttccgtctctccaggattgacagcaggtggaatccttgaactccctgggttttgtaatgttggatccagcgtctgtgaatttgctgggtcagacaggcctctgcgagtttgcaccatcgtgttgagtgttgaaaagagcgatctgtgatccttctctcaatgaaagcaccaaaatgttgactttgcttttagccaacgacaatgagtctttttgataagcgataaatgatatttcgtaatgaatatataataaagcaataataagacataggaattttatagaggtttagccccgagcagttcggtaatag

SEQ ID NO: 291327 - DNA, 787 bp, Cannabis indica
ttttatcaatttgatgaaaatcaaagttgggaaaaatggagggaaattgaaactttttatgttcatagtgttcttcaatattcaagaacaccaccaacctaaaagtttcaaatttccttattttttcatcaaattgaaccaaatcaaagccaaagacacattgcccatcacctatactacaaaacccaagcatcaaacactcacattatatcaagaaatccaagaatcccaatcaacatgtcaaattcggccatagcaagaaaaccaagaaaaagtttcaaaaataccaccaaaaacatgatttcaatgtaaaaaatgactatggaggtgttagaaatttacccatagtgaagaaatgttccaccaagtgtccaagaatcacttcaaagcttcaaaatctcctccaatggtggtaagatgtccaacccaaaaatgaagagcaaagtggagaagatgaattttttgaaatgtgagggttttgttttctttcctttcttacatatagaacattatattttgccaaaaagagggccttttaacccaaaaatgctattataaccctccactaccattgagggctaaagagcaatttccatatttttgttggttcattttctttgtaaataatcttatttctttgaaatttattattttctttgtaattttattatttttcttgggaaatttattattgggtctatattgtaaaatgtgaaaaaagtagtgagtgggaaatatttttttgaatttttttttaaaaaaaaaattgtaattttagtataggcat

SEQ ID NO: 291328 - DNA, 514 bp, Cannabis indica
ttatatcactcaaaatttaaaataattaatcaaattcttgaaagaatgaagaaagtgatacttacaacccgaaaacgctttactccacctccattgttgaatgttcttgaaagcttgagtttgagagtgacaacaatggtgatttttttggatttgggtattctttggtgtgggttttgatgatatgtgtagattgttgagtgaaattgggtttttgattagattgggtttaggaaatttgaaaaaagatgaaaagattgaagattgaagatgaaaaattgaatttttgagaggaaaatagggtagggtcggctgagagaattttgaaatttgaatttggtttgtgtagggttgaatgagggggaaagtgtgaatttatagaatttttcgtcagcaagtcgcgacttggccaaaggctagtcgcgactagctaacgaggaaaattcaggcctttctggaaaatcagcaagtcgcgactgaagtcgcgacttgagaaataggtcgcgactagcat

SEQ ID NO: 291329 - DNA, 501 bp, Cannabis indica
tttttttaaaaaaattttagatcaacttaaaatggaatatctttcaaaattgagttggttacaacttaatttgttatttaattaaatttttgtttgaaagtaatttaagttgaaaaatcaaaattttctagaacaacttaaattagatatttttcaaaatatttattttattatattttataatttttgaaattttatatattttattatataataattttcaaaaattaaacattaaaaattaaattaaagttaaaaattaatttttaattaattttggaccaactttaaattaataaattttcattattaaaatatatgaattaaaataaatgattaattaaaaatacactgttttaaataatgagctttaatcaagagatgttcgatctccattgttggtcttacaatagttaaatattttcaatataacctcgagacgctagacttcgtccccccttatggatagttattcgttgaaagcatttaacaccgtaagat

SEQ ID NO: 291330 - DNA, 611 bp, Cannabis indica
gaggagaaaggaacagttgttgcagcaggtgaatcttccattagtgaagccccaacagcagaaacatccatgactgatagtggaagtggtttgctatgcacaggattaaaggatttaccaatggatggaaccggaagaagtttgtcttgctcataaacaactggagaacctcttttaaccactctgttgatcaagctgggataaggtagggtatgtttgatacttttggcagaggcagaactcataattcgatcatacatgagtgttggaagatcaatgctgaccccagtacctaaggcatacagaaatctagctgtattgtagttgattgtggaaatgtgagaattggcccaccagttagacatggctattttatgaaggatcctgtaaaactcggagagaaccgtgacaggtaactccttcccattccatacaaaattaggattgccagtaatctcagctcctacaaccttaaactctggtttatattcatcattaaatgtgggatgggtgatggttttgattttcaggacacaactaatggtggagggagcaaaccgaaacctattacctctaatataagctagataaaggaactgactcttcctatt

SEQ ID NO: 291331 - DNA, 626 bp, Cannabis indica
acagcctgttatttaatcaacaggtgtccctcaacagcaatcaacttcaaaactccacaagaaatgtggactggtcaaattcctaagtatgagcatctaaaagtatttggatgcacagcctatgcacacattaggcaagacaaacttcaacctagagccatcaagtgtctattcctaggctatcctgatgggatcaagggatacaagctatggtgtcttgaaaatggttttaagaggtgtatcataagtagggatgttgtgtttagagaggatgagatggccatgaaaacaaccacaacacagactgaaactgctcctgctgcagacacaaattcaagcagtttacagcttgaggtggaaccagaaaatgattcagatcagacacaaggaattcagattgaagaaggacaagagagatcaggaaatgaccaggaggatctcagcaactatcagttggccagagacagagaaagaagagaaacaaagccacctgatagacttggatatgcagaattcattgcttttgcacttactgttgctgatgaaattgacagctcagtacctgcaaatttctatgaagcagtaaatggtaagaatgggaaggcatggttacaagcaattcaaga

SEQ ID NO: 291332 - DNA, 536 bp, Cannabis indica
gcacgtaataccgagattaaaagctacccggtcagcctgttgtccgtaaaatgaaaaataattccaagtttaaagatcgtttggccggtcatgatgtcttagaaaaaggccttatgtccgaataagatatataaaaaaagaaagataaaaggagaagcatttaaacagctggagtcccaggctcttggttcgggtcttctgggccagtaggagctagaggatttgttgtcggaatagaaggtacatcaacgttctggccggaagtagaagtagtcacctcgggttcaccataagcaacttgggaagcacagtactcgagatacatgtctttggcctcgcccaggtaatcgaaatttgcgtgagggttagccttccaaaagttgtaaaaaatcttgagactgactgtctctaaggcatgtactttctcttccagcctcgtcgcctccgatttgtacttctcgatctcagctgtaagctccttatccttagacttcttctcttcttccagctgacggaagacagtccgaagaactccc

SEQ ID NO: 291333 - DNA, 477 bp, Cannabis indica
aggaagaggatgagcggaggctctagtgcttcccctccaaccaagaagtccaaggtcggagaggggtcttcagagaagaggccttctggagaggtcattgacctttctgaggatttggctgctgcaaatccttctactccccaatctaccaagtctaaggagtctgggccaccaacatctgggtctgaactggtcaggaggattcctgaacggatgtaggcaccaaccccatccatgccggtactacctcaggtcaagaagggcagggaggtgatggctcatcacatgaaccggctggttcttgaggtcggtgagtagttggctggtgcggaccactcatctctggatgtgttggtgggcggagtcttgcaggagcttaccaaagttagtcttttcttttcgacacttcccttttagcttctcatacttagcttcatatgctgaccttttcctttgtgcaggccggtttgaagctgg

SEQ ID NO: 291334 - DNA, 643 bp, Cannabis indica
taaatttgagctgaaaattaattaaataaaacattaaattataatttatatttagagttatctaaatttaaatactaagaatggaaaatacttttttcaaatcttcctagctagggtataattttataaacattaaattataatttatatttagagttatctaaatttgtaattttaattaaataaatatatgttaaaataaatagattaaaataagtatcaaaagaaaatacaactctttaaaataatgagctttagttataaggatattcgctcgccattgttggtcttacatggttaattcttttcaatataacctcgggacgctagacttcatcacccttatggatggttattcgttgaagcatttaacaccgtaaagaactcgaaagataagtattttgtaagttttcgtctctattagactctcccttacggtgactacttagagataaatttatagagtatgaaacaatggtgttgttgggaatattttaccaagatctagatttactaacaagtatgttaaataaacatcctaaatatgaattctgtaaaacaatgaaataaacacataagggttcaagaaaaccttacattgattgcagcggaatgtaatgactcctccgttcaagatctctag

SEQ ID NO: 291335 - DNA, 756 bp, Cannabis indica
atatattagcaaaagatataaataattttctgaaaacaaaagtaattgattaaagtctaatgatgaaatttgtaggagtttcataatcttaataagacaaaaatgctaagagtttgatttattaatagctccataatcttggaatttcaacttcagaccatgctctgattcttatggtaaaagttcctgctgcaggccacaattctgttaagcggtttcggtttgaaaatgcaaggttgagggaacctctttattatcagattgtaaaggatagctgggagatttgtgagtctgttgatgttatgcataaaattcaatgttatgtggacaagctggctgtttagggtaaggaggttactggcaactttaaagacaggttgaagaagtgtaaaaatgaagtgtagaagtggaaattgggtcaagatgaggtctctgtagccaattacaaacaagctaagaagcacttggccgaatattatgtgcaacgagaagttttttggcgtcaaagatcgaagcaattctggttgcaagagggagataataatactaagtattttcatgcttctgcaactacgagacaaaggaataatttgttgcaaaacttaagatcattcgggtccatgggttgactggcatagtggtttggatgatcttatggtttcttattttccatgagctttttttcctctttcccaaacctgactggagagaagtcacaagtagcgtgcaaaactcgtgtatcatcccagcagaatg

SEQ ID NO: 291336 - DNA, 481 bp, Cannabis indica
agcttggaagtttttactcaaaaatatagttttcaaagagaaaaaaatgaagaatctgttgctgttgcttttgttgatgcttgctgttggtttctgcagtttctatatgcttgattatgtaattttattcaaggtttgatgcatgatagtgttgtttaatcaagtttgagtttggaactcaaagcttgatgctttaatggtgattttggtttgtttgcatgaagctcggttttgatgctttagaaatgttccttagggtctaaatagcaggtctggaaggttttgtttgaattgggtttgttttgagcaagttgtgaatttgtgaaagtttcttgcgaggaaccggaattccagttgtgcatctagaattcaggatggggttctgaaattcccaaaaccggaattccggttgggcaaccggtctgccggttgagagattttcaggaaccctatattttctcgtttttatgttatttggggt

SEQ ID NO: 291337 - DNA, 517 bp, Cannabis indica
acacccttgtgaacgcggctggctgctgacaacaccctttgtgcgccctagcagccccttgcgcccaagaatgtgcacctggatgtatgctttgcatgccatccgtacaactcacaattttttcgtttttcttcaatttttcatggtatttcatggaattaacttccgattttttgtatggttttgtatttagatatttactattcctatttcaattctaattatcagaattaaattaattgtatttttaaaaattaattttattttaatttttaaaaattaatttatgatattagtataatttgaacttgaaaataggtaaatatctatttttttttgcttaattatctatcttatttttaaattttgattattttatcttatttttaaatttaaggtcagatattaatatacatatatacatatattttttaaaattattctattttttttttaaattattttgtaccttatttaaatttaaaataagattactataatcatgatactttgaata

SEQ ID NO: 291338 - DNA, 769 bp, Cannabis indica
acttttcccaactggttgaactcagtttttgaaaaatggagtggaatgcgtcgacaacagattgctatgctctgttgggctctatggaagtgtaggaatgatctggtatggaaccagaaacatgttgaagtcaaggaagttgtagtattggctgttacggttcttaatcaatggttatatgctcaagataaaacttttgacccgtctttaggattactttttcctgaagatggtaatgagcattggactttaccaaatgttgatatgattaagattaatactgatgctgcaattttctcctcttctaactgttacagctactcttgggtagctagaactcatatcggttctttgttggagaccaaagccaaatgtgtaagaggagctgtatccccggaactggctgaggctattggtatccatgaagcgctgagttagatcaaggataaacaatggagccgtgtggaagttgagtctgactgcttagttgcaattcaagctatccgaagttctactaccatgtactcctattttggtagaatcataactaaatgcaaaaagttgttggatgagttgaaaaattgtctagtttctaaaaaatttgttaagcggtctgcaaacaatggagctcactatttagcgagatccacttgttttatagctgattgtagtttgagtgtgagcaatgctccctcggagttcatttctgtattgatgaacgatttgattaattaatgaagtttattcttcttttgtacaaaaaaaaaaa

SEQ ID NO: 291339 - DNA, 816 bp, Cannabis indica
acataagggtaatttgtctcggcgcctttcagttttcggctaagataatacacgggcttttctttcccttcgacttcttgtgctaacagtatcccgatagatgtctcggtaacagctaaatacaatagcaatggtactccttgtactggtgacatcataacctgaggagaagacaacacacttttaatcctgacaaatgaattttgttgtctttctccccaataaaatgatacacccttccgcattatggcctgtagtggatttgtgagttccgccaaagctggtataaaacgtcgtaagtatgatacttttccaaggaagctttttagttcttttgctgactgtggtgctcccatggctaatatagctttagttttgtcttcatctatgcttataccctttttgtgaacgacaaaccctaagaattttcctgcgctcacaccaaaggtacatttaagaggattcattttaagtttgtatctttcacacctttggaatgctctctcgagatcgcgaatgtgattaaatttattttgggatttgacgacgatatcatcaacatacacttctacgttctcatgtatcatatcatggaatattgccgtcattgctctttgataggtggccccagcgtttttcaaaccaaatggcatgacagtgtagtagaagtttccgaacggggttcgaaacgccgttttctctgcatcttctggagacatctgaatttgattatatccgctaaacccatccatgaaagaaaacatctcacaatttgttgttgcatcaattaaagtatcaagatttggcaatggaaag

SEQ ID NO: 291340 - DNA, 726 bp, Cannabis indica
taataataagggaacttagaaacccataagaaaattaactaagaaagcggtaaactaacactgagcgctctgagcgttttctctggatttttctgtctgaaactgaaactgtaactgaattctaaaaacctaagcttctatttatagaagggtaaaaggactaatgcgcaattaaacttattacaaattgcatgtgggtaaaaatgtaaatacaaaaaattaaattcggagtgccacgtgtcgcattttgattggctgacttgggcaaggcggtgccacgtggcaagcttctgttggctgaaaaaatagcaaattgagcctttgagtgacacttggcgcatgcagaaaagaggagaaagcttcctttttgaagcttggtgaacaaggtgggacgaggcccactcgcgcgcctggaaggtggcgcgcacgcacggccaaggagaagccgtgcgcgtcacgcgcgcgtgtgagcagagagaggcggctggggtcaagctcctgctgggcttctgcgcacgaatggcagaccgccacgtggcggggctgtctgctggtgaggaatttgggcccgtttttgggctgatttcttgggctttttgactttaaaaaatgctattttttattagtttttgggccttcatttttatcatctttttatttcttttccactctttcacaaatgctattttctcaatcaaacacaaacaaaattcaatccaaacaaaa

SEQ ID NO: 291341 - DNA, 600 bp, Cannabis indica
tcgctcacggtccatcagctttagccttgcctttacctaataatcatgcttcaaaaacaactcaaataacatctaacaaacatgctttgaacctcagaaaataaccacaaaacacagcaacaacaacaaccaaaaaacatgcatgcatcaacatcatactttcttaaaacacaagaaaacacaaagagaagttagaaatcacttaccacaatcaagagctcccaaattaggttgaatctagcttgaaaatcaaagaaaatcccagcccttgaaccccaagcacccagccgaaaagagagaggaaaaagagagagttttctattttttctaactttgatattttttgtaaaataaagaaatgaaatcaaatacacatataacattcatttcagccaattaataaataattaaacatttaattttcaattaataaactcactagaagacaaaacactaatggggcaaaaagaccattttgcccctccaccataaaaccacataaatcatactaaaggggtatttttgggacattctaaattcccggccattcccgacattcccaatgtctaaaacccgtccccaaaatactaacatactaag

SEQ ID NO: 291342 - DNA, 728 bp, Cannabis indica
attgtagtagccttttctctcctgcagcttttaattccatgttgagagtcttcatggcccagaaagctttatgttctaactccaccggcagatgacaagcctttccaaacaccaaccgatatggagacatgccaatcggtgttttgaaagcagttctgtatgcccacaatgcatcatctaattttcttgaccaatctttccttgatctttgcactgttttctctagaatcatctttatctcccgattagaaatttcagcttggccattactttggggatgatatggtaaagcagttcgatgtcggacaccatatcttgaaaggagtgcttcaaactgtttattgcagaagtgactcccttcatcgcttacgattgctcgaggagtaccaaaccgagtaaagatgttcttttgcagaaagcggagaactgttttaccatcattctgtggtgtagctgcagcttcaacccatttagacacatagtcgacagccaataggatgtattgattgctaaaagatgaaggaaaaggacccatgaagtctatcccccacacatcaaacaattccacttctaagattcctgttaaaggcatttcgtttcttcttgagatattacctgtccgttgacaacgatcacatgccttcacaaaggtactagcatccttaaatagcgttggccaaaagaatccactctgcaacaccttagcagcagttctggtcccactgaaa

SEQ ID NO: 291343 - DNA, 525 bp, Cannabis indica
ttagagacatgttgagtcaactcctcgaaccaccaaagttagatctcaaacctttgcccgacactttgaaatatgcatttctaggagagtctaacacctatcctgttatcattgcatctgatttagatgaaaaacaagaagcaaagttgttaagatataccttagaaaacataaaaaggccataggttggaccatgggagacattaagggaattagcccagctgtgtgcatgcatagaattcatttagaagaaaatcctaagccctcccgagaaagtcaaagaagattaaatccaaacatgaaagaggtagtaagagatgatgtaattaaaatgttagatgtagggatcatttaccctatttctgacagtccatgggttagtccagttcaagttgttccaaaaaagtctgttgttaaaaatgaaaaaaatgagttaatccctactagagtccaaactgggtggagagtgtgtatagactatagaaagttgaatagtgtcactaggaaagaccacttcccattacc

SEQ ID NO: 291344 - DNA, 761 bp, Cannabis indica
tgattctcttttgcttgctgaattttagttaaaaaagcatgaataggttgaagaagatgatatgtacatgattgtgagttcttgttaatttagcatgtggtactagaatctgttgggttttgtgtttgttgagcatggaatgagattctagggtattttctgggtttgatttcatgttaaagttggtatgttgctgctggatatatatttgagattaaagggagttaaagctcaagttctagagcttgaaagttgtatgttgagcatgattttaagttgattatgtaatctgaattttgagagttgttgttgatgttgtttgctctctgttgtgatgatttttatctgtaagaagttaattttgggtatggtttgattaaagttcgactgtatggtaaagtgggcatgtttagaccttcaaatctagttttctgggtttttcgaacccagtggccgcggccagatttatggtcgccgcgaccataaaacctagcagagcgccatctttttttcgattttgttttggccataacttttgactctggactccgttttagacgttctttatattgttggaaagcttgttccaagctctttatgattatctgtattttgaatgccaactttatatcttgtgaaagtggaattagggattaaccctatttgtgaaatcccggattgtgtgactaggattaccggcacctaatcaggagcacccaggggtttggaatctctattattgcgggacaacaagtaagaca

SEQ ID NO: 291345 - DNA, 448 bp, Cannabis indica
ttcatgtcttcatgtcgggtttacagccataaagcttgtctctaaactgcattgcgtccgtctttcatcttgcttattctatgcttcatgaacttttttgccctaactcaagaaatatttttgacttcttgagttctgacttttcttcagacatagccattctttaatctgttgagtactcctggtcggcatatttgcttgtttatcgtttgatattccgaccaacactcatctcgtgtgttgtcttttgtagatgaactcaggtgagtcttgggaactcggacatcagatcgaccaggatttgcttcaacttctgcacgaagatcaccctcgtcttcgttctagtcctccttctagtgaaggacattcttctaacattgtaccgagcaataggataatggctcgtacaaagaaaaccacgcgtcggctgacgctactgatcctcaag

SEQ ID NO: 291346 - DNA, 511 bp, Cannabis indica
aattgtaatatgaacctttgagaattagtagatgaatttaccctggttcggggaacccaagcactagtcaactgagatgtgttctcagtgcagatgaagcttgtaaattgttgtgtgatttactgcttgattattgattcatgtctataattcatatcttgaaatcaatcaatctaaagataatcaacttggtaatttggatcattaaaatcaacaagttggactttcaatattcaatatagtaataattaaccttatgttttaaggtaactaaataattacttggtacatataaattattaataattgtaaaaataaattattttcagactaatattttagttgtaaaagattattaacttttactgactaactattgttgggttttatgccctaaataaaactttttacaatctgattagttatcaatataagaaatttgaagtgattgatgtttgcatgaattttaacatgctaatggtttaatatgtttattacttttatacacaaa

SEQ ID NO: 291347 - DNA, 951 bp, Cannabis indica
acaaacttgcatttctcattccacaatggaagtggagtttatagctcttgctgccactgggaaagaggccgaatggttaagagatctcttaattgagattccaattattaaagaggatgtatctacaatatcgatacattgtgatagccaagcaacattggctagagcatatagtggagtatataatgggaagtctagacatattagtctaagacatggatatgtaagtgagttgattcaaagaggagtcatctcaatatcctatgtgagatcaagtgaaaacttggcggatccgtttacgaagccactaactagagatttagtggaaaagacttctaaagggatgggactaaaactccctaaaccggttcacaattgagggtaacctatcttaatactagtaactttactagtgttaggttcaataggtaagaacaaatcaatgtgtgaacaaatgtgataagtactatatgtcccatcctataaagttgtgaagtacttagtgagttaccaatttgagggttagacttttaaaagtctttaatagaattcagtttggaaaacaagtattttggtaacaaatactgtaagaattctacctatattgacctgagggtggtgccgccctaaatgagaaatagggagtatattttctcaacaaggtcaatgaatggaatgtgcacaaggccattaacagtgcaaagcgagacatgaggtcttgggtgaacctagcaaaggtgtgtgtgtcattaccgttttattataaagaaaagttggttcaatgctttgtcaaccaaattttcaataaaatttgtgatgattacactatggttaagttcaagttgaaaaacacttaactttatgcacttaagcaaggactctatagagagtgttgatttattcaatcaaagtgggggatatatgagatatttgattgattaaataaagtgt

SEQ ID NO: 291348 - DNA, 729 bp, Cannabis indica
ttttctttgacaagagccataacttttcattttaatattattttattaatgcatgtattattttatcgttcactataataatttacaaccttaaattttttatagtatattccatacattatagttttaaaacaaaaatttttcaattattaaattaatttaaaagttaatttaataataaataataaaaaaaaaatgtctttacaagggtagtaattcaattgtttatagtacgtttgaagaccttataattaaagttgtcataaactataaactataaaatttagtacaaaatttttcatcaatttataatgtatttttttttatttgacaaaattcattattcaatttttatttgataaattttttattcgagaattattattattattattgcatctgttattttattgttcactattatactttatgtaatacaaccatcattatatattaacaaataaaagtttaagactttccaccacaataattacaaactttaaaatttttataatataagaattgttccatattagtaaatattaaaaaaaaatgaactattgtttagaaaaaaaaataaaaaaattcaaattattaaattaatttaaaatcttaaatttaaaaaaaaatcatatcttttgaaaggattgaactcatgtcattgtacttgatatacaataattttaccacttacaccattattatattattggattgtattgattattg

SEQ ID NO: 291349 - DNA, 515 bp, Cannabis indica
agacccaaactgagactggaactcgagcctggacacgatcgtgtacccataccgaaattgagacccagacctggttcttaatttaggacccaatcccaaacacagacttggacctagatagggatctgggtacgaacctggactcggaccaagagccagactgggatcgaaatgttggacctagatctggaccgacatcttgacccggacccaaacttgcacccgcactcgagaccttaacttggacctggacccgaagttagacccagatcagggtccagacctagacacaaacccggacacagactcggacctgaacacaaacaccgacacctagactcagacccaaagctagatccagacccagacctaaactcgaacccacacgaggatcagatccatggacttagacccagaatttaatctagactcagattgggattggaacttgagactcggacccaacctagaccaagaccaaggacgcgaacccacacccggagcctgatttggac

SEQ ID NO: 291350 - DNA, 615 bp, Cannabis indica
ctttgaattcaaagctcaaagttgcataaaacctataccaaccatcaaaaccagccacaagaagctaataccaactcaattgaaccctataaatcgaaccctaagcacacctaaacctaacagccaccaattctcaaattcactatttcaagctaactcaaaacttgaaaatacacatactcaagggttttagggtttaccttactttgattctccttgaaatcttgatagaaaccacaaattcagcaagaaatcccctggttcctagctggttcgaagagagagaggtgaagaaaagagagcttcctttgaattttttgatatttcctttattttttcctttttcttcaaatgagagaaatgcatttcctatgcattgattcagcccacaaagagggcagctgtcacaccctcacacagccacataaacctcaaaagaaaaagactaaaatgcccctaatgtaaaattctaggttattttataacttaggggtaaaattgtcaaatttcataaccccgctcaaacccgataatttatttcctctaaaatatttcccactaagaaataaggttctaaacttacccatgtgatcaaactagccatccatcgcattt

SEQ ID NO: 291351 - DNA, 445 bp, Cannabis indica
ataagctgatctagaatttaccaagtaaatccactaacttattaatttctcgttgcatccactcatagaactcggaatcgcactctcagtcatatagaatgctctatatgttccacaatatagatacgctattaattatccattgttataatcctaataatcaatgatcctctatagatgatctacattgcatagggataaaattaccgttacagcctttcaatgtattttatccttaaaacacttggccacctataaatgatattacagtaaactaatattatcactaattgagcgctcaatcatttatctctatttagcaagtttgaaggaaatcatcgtttcacttctacatacctatagaagctatagatttcatatctatgattagcgctcccactcaagtgcactaccatgttcccaaaatgtacgtatcaccctgacc

SEQ ID NO: 291352 - DNA, 566 bp, Cannabis indica
accaccttatgcgccactaggtagtgtcttaatcgttgggatgtgtacaccaaagccaagcattgtttttcaacatagggataattagtctcagctcctttcatttgcctactgagatagtacacgggtttttcttttccttcaacctcttgcgctaacaatatcccgatggatgtttcagtaacaaccaaatataacagtagtggcactcccggtactggtgatatcataacttgggaggaagacaatacatttttaatcttgtcaaacgatttttgctgtttttctccccaattaaaagacataccttttctcattaatgattggagcgggcctgtgagttctgccaaagctggtataaaacgtcgtagatatgaaacttttccgagaaagcttttcaattctttggctgattgcggtaccttcatggctagtatagccttagtcttatcttcgtctatgcttataccatttttgtgtacaacaaatcccaaaaatttcccagcgcttacaccaaaggtacatttaagaggattcattttgagcttatacctactacttctttg

SEQ ID NO: 291353 - DNA, 622 bp, Cannabis indica
gctggtcggcctagcattacgttaaaggctgaaggaacatccaataccaggaactgtgccatgacagttatgctcgttggagcttgtccaactgtgaggggtaggcggatttgtcctaggggcgcaactccttgaccggagaaaccatagacgggctgaaggcatggagttaaatccttgagctggagccccatcttctcgtaggcagtcttgaacaaaatatttgaagaagccccattatcaatcatggttctggacaccattttgtttgctatctggacttccacgaccaacgggtcgttgtgcggaaaccttatctggacagcatcttcgtcgttgaatgttatggttggctctcctgctcgtggaactttgggtttcctttcttccacggccaggatgacttcttcttgctcgtactgagctgtgcgggcatatcgttcccgagctttgcccgtgtctccagcgatgtgcgggcctccaatgatgacttgcaagtgtccatctattggcagaggcatcagatcctggttgttctgaccttggctggccttgacatacttctgtaggtgcgggttgttcttcttgatcagaagttctatctcccgcttcaggttgtagc

SEQ ID NO: 291354 - DNA, 513 bp, Cannabis indica
aggacactgcagtggggttatgggaaaggttggcatcgatttatttgaagaaatcactggccaacaagctctacctgaagaagaaactgtatactatgagaatggatgaatcaaaggatttaaggaagcatcttgatgagttcaatcgaataatcttggacctaagtaacattggtgtcaagatagaagatgaagatcaaggaatattgttgctcagcacactaccaaagagttatgaacattttgtggacacaattctttatggaaaagaatctctgtccatgatagaagtaaaatctgcactaaattccaaggaaattcagaaaagaaatgaagacaagtcaaatggctatggtgaaggtttgtttgtcagaggtagatcagaaaccagagaaaacaaaggtggatttcacaaatcaatcacaggaacaaacagtacaggggttcaagtcaatcacacaagtcaaaacctaactcaaaggcagggaaacaatgctactactgtaagaaaga

SEQ ID NO: 291355 - DNA, 631 bp, Cannabis indica
gagacgattctgcatgtgctggtgcggtgctcttttgctagaagttgctggagcaaggttccagttactgttgtggcgcctgatgcaatgttgttctcgagttggttcgaagcggggttggtatcgtggaactcggccgaggctcttgaggctggtatggtctgttggtcagtttggactcgtcggaacgagttggtttggaacttcaagcaccctgatgcaagtgaggtagtggcaatggcaaagttaaattatgttgagtggtttaatgctcaaaaagttaatgtcacaaatgcaagcttaacctggatgacgacgttacccgtggagcaatggacaactcccgattttccttttgtcaaaattaatgtggatggtgcacttttttctgcccaagggcagtatggattgggcttgattgcaaggtctgctgcggggttggtcttgggggccagaagtttatctagagagggctctttgcaacctcatattgtcgaagccattggtatcaaggaagctctctcttggagtaaagcgaatggatggtcacagattgttgttgagtcggattgtttaagggtcattaatgatttgcaaaagttcaaacatatggcttctgttgggttttatg

SEQ ID NO: 291356 - DNA, 730 bp, Cannabis indica
acttagtatgttagtattaggggatggtttattagacattgggaatgtcgggattggccgggaatttagaatttcccaaaatacccctttagtgttatttatgttattttagtgtggaggggcaaaatggtcattttgccccaatgatgttttgtcctttagtggactttatgtgatgaaaattgatgtttttaattatattattggctgaaataaaggttgggttatgcattgttctctcattttcattcaaagtaagaaagttagaaaaaattggaaattgctttttctcttcctctctctttcggccacttcttgagcagctggaattggtgtgtttcttctgcatttccagcaagaatcatcttggttttgaggtgcttaaactttaggtatttttccttgtagcttttcttggtattttcttgtgttttaagaaaaagttagtgaattgcatgcttgattttgaagtgttcttgttgctgtatgttgtggttaatttctgaagtttattctaggttatttgagttgaattgagctgctggtaatgcatgattagtggtgttgtttaaagttatggattttctattcaaaagcttaagttttcaaagagaaattttgaaattggttgctgtgattgttgcatgagtttgtgtatgttttctgcagtttctaaatgcatgtttatgtagtttaaatcaagtttaaatgcttgtaggtgagctttagc

SEQ ID NO: 291357 - DNA, 404 bp, Cannabis indica
aaaatattaaacaacaatcatcatcctccttaaataggaaatttagttcataatcaaatccataaccattcctaaaacaatattcagcataaagaaattaaaaaggaatagagaaagaaactgttggtggaataactctggatcttcactttgctcttctttctgctattcttgccgctttctactgtgttttaggtctccaaattgcttcccctaattttcaattgcagttttctatttataactaatttttagggctcgtcggacgaaattgcccctggtcgtacaggctctcgccgcggccacaaggttcctcgccgcggcgacgatgggcttctgaaaaccgtgcctcgacagtgatctggccgcggcgactaggactgcaaaaaatcctcacttctgtc

SEQ ID NO: 291358 - DNA, 551 bp, Cannabis indica
ggtttgcctaacattattggtcgaaacaaaaactctattcttggcttcttaaagaataaggttttggctcggatcaatagttgggatggcaaattcttatctcgagctggcaaggaaattcttctcaaaactgtgattcagtctcttcctacatatgccatgagcgtcttcttaattcctttaggcatctgtgaggatatagagaagattatggcaagtttttggtggaaaactacatcaagtaagggccgtggtattacttggatgtcttgggaaagaatggcaaagcccaagctggaaggtggtatgggtttccgaatccttcatgactttaatcttgcaatgcttgctaaacaaggttggagacttctgtgtaattctgattctttggtgggtaaagtattcagagccaaatattttcctaccagtgactacctatcggccgatttgggaaataatcccagttttgtatggcgaagtatttgggctgctcaaagtgtggttcgtctcggggctgtgcgtatcattggaaatggtgaaactaccacgat

SEQ ID NO: 291359 - DNA, 654 bp, Cannabis indica
tttaatcctaaccttaagtgaattagtatatatatatatatatatatatataaagaatagttgcttgaatccaactaatgctttttaaaacctagtttcattctgtttagacaactagtgtttttgagacttcttcttctttttctctttcaaatttgaagtcctatagtgttcttcacaattaaaatttgagccttagtgattgagtacacgcccacccagagcaagttagtcctcaatacatagtgtgtaagactgtgaagaatccaaacaattgaaggagtgtcgggctcagatcttgattatactctgtgacagaaaggagacaagggttagagaactgagcaaaatagagtcatttaattaccgctgcaacaaatagtaaggactctcataccttatattgtgtttattttctatcatttagtagattcatatttaggatgttaaaaacatacttgttagtaaatctagattctagtaaaaaatattccaacaactggccttagaaccatggtaattgattttatttcaagaaatatggatttaaaatgatgtatgtgtgatttggatgtgattcgtgttaatctatgtgtttattgatgattgattgatgtttgcaaattttttacgtaaaataattagaattttatt

SEQ ID NO: 291360 - DNA, 377 bp, Cannabis indica
gaaggttggcttttataggccaaggcatgcgtgagacagctgtgatcagccaccatcgaacggctgggaaagcaatcgattcgcattctatagatccaacggtcagattggatcgtcatcaaggcggcagaaacgcttgagtacccatctaacacccgttaatgcgctgtatcaataaatggacaagaaacgaatcgacgcctgcaaaaagtgaataaaccgcagtaatgatggtcattaaatacgccatcacacgcccaaagcacgtgccaagaaaccgaggaggcaactggaggcatctaaagcaagccttgttcactccataattaaacaaggcttggggggtaaatgtgttggaatttattttaccaggatct

SEQ ID NO: 291361 - DNA, 540 bp, Cannabis indica
ggccatcataattccaatgagttgtgcacctccaatcctggagtaagagtgaaattaatgaacgtagtgagcaccgaagcctttagcttttgcctcaatgccatggtcaggcaaacaactcgcacaaatctccttcaaatttgagaaaagaaatttaccaaacgcattaaaaaatcgaaagctgaagcacaatcgttcgaatctaccaaaacaaaaacaaaacatagtaaaatagaacggtttgtttgacgataatcggttggggaaatggccatcatcatgtcctggcagtgccaccgcgcaaaagaaaacgcagagagagagagtgagagagaacgggagcaagagagagacaaggaagagggagaagggttggggttttctggttcatttgaaccactagcaccggctgtggccgactttggtgttgcgcaagtgtcacaatccacttctaactagctcaaatcaatactaaaaacctagaatagtggggggaaacagtgtcacgatacttgaaacatcaggtttgtcatcaagccg

SEQ ID NO: 291362 - DNA, 1182 bp, Cannabis indica
cattttatattattatactaacaaaattataacagccgcacgaagagtgacttatattgtactagttttaattataaacgtcaatttaataagcttcatttttttactttaatttgctgtggtatttaatagcaacaaacctaattttgggaaaattatagaaacattttagaatagtaaactaatatagtactttcaagccaaaaaaaaaaactaatgtagtactattgattgcaagcagggtctgttgaaggatgggacagtaggggctcacgccaaggtcccctatccaggacccaaaaaactctttaaaaaaattacttcaaatttattttttaaaaatactatttttattttactattatttattaggaaatataattatttttttataaataaaaatacttaatttattttttaagataccatatttaatattttattaagagaaaaagcttaattatattttcaaaatactaaatttaaaatttttactattatacatataaaaaaaaatataagcccaaaattttatataaaaaaaaaggaaaactataacaaatggcctcaaatcataggactatattagtatatgtcctcatttcaaaaaattatagcaaatggccctaaatcataggattatgttagtaaatgtcttcatttcaaaacttatagagaaatgaccattttaaactatttattatttatattgcctttcgtcacataaaaaatcatttaattttttgtttcaatttttttagaatttagaagcaaattattaaaagattatggtatatctatattagttttgttaaaattatttttatttaaaagttatattcaatttttttaattttttatgagttgttaagggttgtttgtatatagattttgttgtacggtatatttttattttgttgtatggtatattataattcttagatgatatttattttttattttgatacgtataatagtggtatataattttaatagcataataaaaatattttaatttatgtatataattttattggcatgctacatatatttaattattatttttatatattttgattgtatgattatttattttaaataatatttaattagtttttattttattatatacaatggtaatatataattttgttatcatggtacatattttaattgtggtat

SEQ ID NO: 291363 - DNA, 501 bp, Cannabis indica
accttgcattttactttattttgttcttgagcttcttgattttcatgccttgtgtttctgatggatgttttctaaccataatgtttttgttctgtgcagccatgtcttggcagatgatcgatgctctgaggaagagaatgggcggaagcattagcgcctatcctctggccaagaagtccaagggcggcaaggggtccttttcaaaggaaaagagaccttctggagaggtcattgatctttccgaggagctgactgttgcaagcccctctacccccaagtctgccaagtccaaagagtctggaccaccaacggctgggtctaaacggggccaggagtgatcttgagcgggtgcaggcaccaactccacctttttctagtgcatccagaggccaaaaagggcaaggagatgctggcccactacatgaaccggctggtgctaacaagaactcgtctttggatgtgttggtgggcggagtcttgaaggagttcaccagggtaagt

SEQ ID NO: 291364 - DNA, 567 bp, Cannabis indica
gactcggaccaagacccagactgggattgaaatgctggacctagatttggatcgagatactgacccacacccaaacttggaccagcactagggaccccaacttcgaactagacacgaacctagacccagatcagggtccagacctgcacacaaacccggacatagactcggacccgaactcaaacccacaactaaaatcagacctaaagctagacccagacccagaccaaaactcaaacccagatgaggaacaaaaccaaggacttagacccagaactgaatctagactcagatcgggattggaacttgggactcgcacccaacctagacaaggaccgaggatgcgaacccacacccagagcctgatctggacctagagtttaatccggacccgaacccaaactcagaccaagactcgaactccgacccgaactcaaacccaaactcgaaatctgaatcgcaaatggaactagaatcgacccagacccaaacttgaacccgcactcgggacccgaacttggacctagacccgaacctagaccctgatcagggtccagacctggacac

SEQ ID NO: 291365 - DNA, 437 bp, Cannabis indica
cctgccgcggagaagaccttccgggacgagatcatcgccactgccgagaagaagtaccaggactatctctaccggaaggctcaggagaaagcctactctaaggctcaagcagcttccgggaggccacttcgcgtggggagcccggtcgagaggagaagccaggcgatcgctgggaagccccttcatattgggaactcggcagagagaagggcttccaggccaaagccttcggctcaggagccgaacactggggctccgggcgccagcacttccggctccgatggtaagtctcctttagcagttcattacgtcccttctgttggcgaatatgccagtcttaggcctgtagggttcgatgagcgtctttataggtttaggatgccctcgacccggtggggagaccatatgaaggagttttatttttccaacttaggaga

SEQ ID NO: 291366 - DNA, 537 bp, Cannabis indica
taagttgaggaattctaggaattagttattgaagattcttggaatattttttaagttgaaagtttgttaaaattttggatcaacttaaaatggaatatttttcaaattaagtggttacaacttaatttgttatttaattaaattttgtttgaaaataatttaagttgaaaatttagttattttagaacaacttaaattagatatttttcaaattttattttattatattttaattatttatttaattttgaattttatatttatatataattttcgaaaattaaataattgaaaatttaattaaagttgaattttttttttaaaaaaaaaaaaattaaaaccaactttaatttataattttcattattaaaatataggataaaataaatgattaaataaaaagacattttaaataatgagctttaatcaagagacattcgatctctattgttggttctacatagttcttgttttagtgagtaatcctccctaatggaggaacgttcattaggaatttaacgccgtagaatctcgaaa

SEQ ID NO: 291367 - DNA, 591 bp, Cannabis indica
tcattcataagccgttcatcttcaaaacgtttcatgtcgtcaagcactttttgcatttgaggcgtaatttccccacaatcaggctcctgcttgatctcttcaggagtaagaatcgggtatttgcccttgttccttctagtagacattgctaagagaattatcttgtaggggtaaaaattaagaaaatatgtaacttatgagatagacaattggcttttatagagaaaactagtagttgggaaggtgggataataaatgtaaaaattgaattacacaattgtacacatgtttgtcatgcacaaagcaatctgggcaattttcgcgacatgtcacgacacagggcgacatgttatcgacatagtgaagtagttggttaggcgggataataaatgtcacacattaattaccatttaatgtggaaacgtctttcgtatcgacgtttcgcgacatatttgcgacatgttaacgacatcaactgaagagtcaaaacatgattttactatcgacattttaacgacatgttcgcggtgctttagcgacatgaccaaacactcagaactaaattttttcgacattacacgaaatgttaac

SEQ ID NO: 291368 - DNA, 617 bp, Cannabis indica
aagcaattcataatgaaaatttcttaaagagaaaatcttattaatatgaaatagggagtaaaatctcatactaataattgaaactaaattgttcattaactaaaataattaatttaaatattaaataaaagacgtagcttacatcttcaacttagacaatttccaccattctgtccaaccatccgactcaactcactaggatagcaatccaagtttaagcagctggagctgaaataaggaaaaaaaataaacatggttagtagatccataattaataacccaaggagataataattctctaaaacacatgaatttataacaaagttagatataccttgtttctttgccaaaaacttaggacactggagtttccagtgaccctttttgttgcaatagaagcacttttcctttttacctttgattttggatttagtagccttcttattcttattagctgtgttaatagcttttaagaggctttcttgctattcttatatttcttcttcttacctagacttttgaagtagaggcaatgttttcctcaggcttggtcgtaccatttgtaagcaatattagaactagaagctttatttcctcctatctatggacctccaatc

SEQ ID NO: 291369 - DNA, 815 bp, Cannabis indica
aaaatatatagtttgtctaaagtaaatatgaaagctcgaccatacttaatcatatgtgtagagctcgaccattataaataatatagctcaactgtatgagtagagctcgactgtatatggtcgagatttctaaagagttcaattgtcattagtaaagtccgacttttaatggtcgagatttgtaaacactaaacaaaagattagtaaattgttcaattatcattagcccaactatatgtgattgagatttgtaaatactaaacgaaattcaagttatcgttcatctgataagtagagctcaactgtataggtcgagatttgtaaacattgaacaaaagattagtaaataactaaacacaaattactaagggtcccattgttgacaaaaaatatctactgccatcttccttctgtagaatgccattctatcatctgataggctttcaaagctaagaccagccatgtcgaactcaatgaacttaattgcatacaccgcacaatctcccctgttataagaaatttttgaaatcaataatacatatatgtttgcaataaatatcgactaagaaagcatgtatgaatagacttataaatatacttacgttgaattttgtggaacatcaagtaatcgtttatatgtccatggattgctaaggcattgtgctatctcctgaaattgtaaagattcacgaagcataattggaatcatcgtctgaagtggcaacatcaaatcatccacttcttttgatgtggtcgctccaatactgcaatcatataccaactctagtgttcgtatgtctgctttaactgtaacc

SEQ ID NO: 291370 - DNA, 688 bp, Cannabis indica
gccaatactcatgctgcaccccctagtgctgcttatggcaaagctccagccgcctgacccgagttgagatgaggcaaccgattcttaatccactcgtagaggtgtcccaatcggattaagttttcgatctcgtctttgagatttttgcattcattggtgttgtgcccaatgtcgttatggtactcgcatctcttgttggggtccctccgggagctgtctttgtacagaggagatggtctccggtagtatgtattttgcctagtagcaaagtacacacgttcttgggagtccgttaactccgtgtattgggtatattggggagtgtaccccgtttctatcacttttcctccgtccgggtgctgcctttggaggaccttttactcctcgagccctgggaaggaccggctaggctggctgttggagcggagtgcgagggggcttgtccatttatccctgagtgatttccaaaatgggacgatgcgggggctagggcctggccctggctatttctgggagtagcagagaactgtatgctgctcatcggtggagctgctgctggcacagtgctcgagggctgggctccgggcacatatcccgctattctggtgggataatatcctccataggccattatttgggcctcttcgaggttaatgtatttttggactctcttctggaagtcctggag

SEQ ID NO: 291371 - DNA, 640 bp, Cannabis indica
ttttttttattaaatacaaatttattttattaaacaaaaaaaaattacatatatctttcttttttttgttataccctttaagtgtcgatttataaccgagaccaaaggattcttttagttcggttataaaccaacaattatactcaatctatatatttatttgtttttttaatttttttgtctcggttatacttttagtgtcggtctgctaactgacacttaactgacacttaaagttattatagttgtcagttgtaaacctagaccaaagagttgcggtggtttttagtgtcagtttttcaaaaaaaacgtccctcaaaccgacaccaaaagtctattttgtagtagtgcaattccccccacttagtggatgtgggatcataaatatagaatccccttagatatgggacgttcatgactcacttctaaaagactagcttaagagagaagagtgcgcaaaaaaaatttaaaccaccaaaccatacaacacttagtagatgcgggatcaaaacaacctctctggcaaaggttattaatttattttattttgtgaaaggcaattctatttagtagcaaacaattacataggaacatttaatgagatgattagtaacaaaaggaaggcccatattccacaaga

SEQ ID NO: 291372 - DNA, 533 bp, Cannabis indica
aaggtcaagaaaagcaatggggcttttctgaggaagttgaagaaggtgcaggagggctccgggctcttcctgaggaagttgaaaaaagtgaagaagagcaagaaattgctctgattcgcaagcgtaagggcaaaatgattgcccaggaagagcccaagcggcctcggagagctgacactccggcccacggtcttgatggtggggtctctcccatggaagagcatcctgctcctcccaacattgtgctgactccggttcctggagacgaggcgaggcaagagctccggatagccaagcataactatgccatggacgaatactcccgggggtttgccgaggtggaagcccttaggagggttctgcgggttgaggtgcaagaaaccatcaacaacccggagtaccaggatccgtgggacctaaacttggaccccctgtcggactggttccgtcgcttccttgggcccaccttggctcccttcgccgcggagatgactggcgagtttgcttctcagcttacccggtgcgcgcctaag

SEQ ID NO: 291373 - DNA, 666 bp, Cannabis indica
atacacacattgccaccaccggagctagtgttcggccgccttactcaaagggaacttgaaacccaaccaaagctctaagaaagtcattcctttaaacaataatgggtatgtaatttctttagtaattattgtttgatttagatgtatttatgttgaaagtaatagatctacacatatccgtggtttttatgtacccttttgacaccctttgtcaatgaaacacgaaatgcagcaagtctgcgagtttactggttttttttgcaattttagcgatatttttcgacatggttagcgacatttagcgattactagctgacaagaggttagggatgacatttagcgacatgtatcgacatgtcgcgacacaagtcgcgacacatagaattattgtgttatattgtggatatttttatttttctcgacaagttcgcgacgtttgtcgacataattttttttgtaattggttcgcgataagtagcgataggttcgcgatatcttgcgacatattggtttgttataggttcaaactgtggcgcattgggacacaacaaagctacttgcaaggccagggtttgagcagcattttcgttttgaaattgcatgcattattattattatggtttatgacatgttacttgtatttttttatgtatgactatgttttat

SEQ ID NO: 291374 - DNA, 599 bp, Cannabis indica
acattaataatgttctccagctggtgaggacaagtcagggttgatcgaagctcggccgcttcccaaccagttgcacgggatttatacccctcctgggcaacgggtcccagagaaacctcctccagcgtggccatacctttccctttcttcttcgaagattttgagccagaagcagacattttgtgttctgagaaaaacaaaaagggaaaaagaaaagtccagcagttaggtcccataccaaaccctaaatcaagaaaaagggagtgggggtcccctaaccgctggaaagaggccccctccggacacgtgtcacatgggaaactctggagagaatccctgaacaagtgtcgggtgcagtgaaatcgcagaaagtggttttgcaaaaagaaaaagaaaagagaaaagccatcctatgccctaagcaactgttaaacgaagaatgcatggccctcttcaaacaaagctgtatgactacaacaggggcatgataatggcgattctacaactaacgcagtaaacataaagcagaactcaaacactcacacacccagaagcctctaagtacgaacccagaaaacgaacgaagtaaatataagcat

SEQ ID NO: 291375 - DNA, 1080 bp, Cannabis indica
aacataaagaaattaaaaaggaagagagaaagaaactgttggtggaatgactctggatcttcactttgcttctttagccgctcttcactgcgttttaggtctcaaaatccttttcccccatttccagttgcagttttctttttatttctcatttttagggttcaaaagatgaaatcaccctcgcttgtacaggctctcgccgcagccatggcttactccgccgcggcgagtaatgacgtagccacagcggtgaaactcttgccgcggctactgactcgccccaaaaacgtctctctgttctcgagttatggccgcgaccatggttaggctcgccgcggccaaaattgccccgagcattaatttggcattttttcttggctccacttgtcttttattgcacttttgtaccccgagacttccataacttcgagaaacctgaaaacatagaaaacaagcgtaattctgtcctaaaacatcaaaaaccgaacataattgtgatccaaaacataggctaaaattagcctaataggtgtcacgtcagattatgcatggtttgtaccttgacgtcacggaaggtatcttatatcagaagctacctggaggctcttctagttagtaaaggcagagaggacttcaggattctcattaataaagctgctataaagaaggatcgaaaagttatgagtgctccatgatggtagacggtaggtccggtccgagagagctttagcgagattagattttgtttcctgcgtcagaccttggtagtgtgcatacgtgctctatagctccctttttatccaacgaatggtctagacaccaactttatgagttgaaaactttgggcgaaacgtgtccttagtcccacgaactagattgcagtagtcgaacaccacataatgaaaaggctccttacctaccaacggtcagatcaccatgctgtaacatcagctattgtcaatgtgctgagtacgaaaccctaggagtgtgaaggatatgccctcaaccacacatgtgcctataaactacccttattttttatgtgacaaagggtgaacaatttttacttacagaacctct

SEQ ID NO: 291376 - DNA, 661 bp, Cannabis indica
gggagtacatgactaaacaattcgtgccctaaagaactcccttgagcaagtggagactgaaaaaggaaagttagaagactctgtcaaaaatctcaaccgacttcttgatgaaaaggagaatgagatttacaaactcacagctgatctaatccgaaccaagcaagcgttacagttcattcccccaggcactgctgccatcaatcaaaccctacagcttcagaagccctatggtgatcgaacttcattaggatataagatgctttacaagcaagggaatgaattgtctgttgagcattccttaccctccaatgtcaattcatcaaagaaggaagatgggtctcctgacacctcagtcaccattaatgaatctgactcatctgagaggagacaggttccaactggacccaccaaactcaaatttgaaggaaggaggactgatgctgacaactttccacagaatgacaatttcattcctacatgtcatttctgtaataggagaggtcacattcgtcctaagtgttacaaattgcagaactacttgaaagccatgatcaatcgaccaaatagtttccctcctccaaataagtcacatggacgcaaacctcgtcgagaatggaaaataaagtccaaaccaaattctgatgttggtttggttgcaaag

SEQ ID NO: 291377 - DNA, 405 bp, Cannabis indica
gaagtccttggcgaactatggaggacatgaggaagaatggaccgtcgactcaatgagtgatttccttgaccgggctgaaggtttcatcaagctcgaagaagccattcagcgagcagaaggtgagcaaaagccgaaacaaaaagaaggctccttctactagaaagtccgcccagcttccacaatattccagcaactcaagtggcaagcgttcaggcaacaaccacaagcaatggaacgggaagaagggaaagttcgccgaaaaacccggacagactccccgtgatcgcgccaaacacactgcattcactatcctaactgaggatatagaaagtctgtatatagcaactcagtcgctaattccatacaagaagcccgggccaatgaagaaagataccagtaaggggg

SEQ ID NO: 291378 - DNA, 633 bp, Cannabis indica
gagatgattacctcttttcatgacttgcctataaatatcaaacagcattggcacataaactcattttcatcacccttctttgctaagtaagcttcagagcgaaaagagaagttcttggcttcaaagttgctgaagtgccttcatcaaagctgcttgttggattgacgttgcttgaacccagacatctgactctcgagtaagtttctgatttcctttatgcttatctttgcatgtttacatttcgaatgcaccttcgactttgctgtagaaaatatctaggaaaccgtaggtccagaaacttcttcgattcttctttgtcatgtcttcatgcgattttacagtccataatgcttgttttctgaactgcgtaacgtctgtctttcatcttgcttattctaagcttcatgaactttttggccctaaattgagaaaatttctgacttttctttgaacattctcgttctttaatctgttgagtactcctggtcggcatatttgcttgtttattgttcgatattccgaccaaacactcatcttgtgtgttgtcttttgtagatgagctcaggtgagtcttgggagaacgaacatcggatcgaccaggacctgcttcaacttttgcacgaggatcatcct

SEQ ID NO: 291379 - DNA, 828 bp, Cannabis indica
ggagttcaagggttccactcgctgtcaatctggacaggaggggaagcgtggtgaagtggtagggacaactcctgttactgaaactgcgcctggtgtgcaagagactgggaataacggttccgcacacagccagggcattcataacacgactattccaccaggcatcaatgcccaaacgaccatcggagacgcaaccgaattacaaaatctccgcgctgcgctcggactcatgcaaggtcacaacaatactctacatcatgatcaggaggaattacgtgccgcagtaaacctcgcgtttaacgaacagaggcgtatgttcgccaaatggagggacaaagagatggaggcattaagggctcaccatgcagaaatcgaagatcgtagtcggcaagctactgtgctgatacaaagagcctatcagactgtaggccaacaaacgcagagcgtcattcccctgggagaaacggaggatgacgcaacgatgaatgcctcccagaaaaccaacggtcagccgtccaatccctggtcgcgagttccacttgtgggccaagaggtaggcggacagaccttgtccgggaattcatcaggaggagccatgcttgacggatccacgcagaataatggagccattccacctacaaaccaagcgaaccaatcgctaaggcagccaggttcttctgtgttcgataggctgggaacgacccatgacctaagggacgatctaaacagatgaaggggaacagacgagcagaatactacaacgaacgtgcagcccggagcccactactcaaatccccgctccagaaagacgctgacgtaatccaaccc

SEQ ID NO: 291380 - DNA, 618 bp, Cannabis indica
atattattacttagtattattatatttgtggggaaataaatttaaggttttcaaatattaattttggggttaagattttgtatatatatatctgtgtgtttgtttatttgttggatttgaatttgtttgaattggtttgagcttggttttgttgttctctttttttttttttttgtgatttggatggttgtggtggtagcagatgatgaagaaaaagaagatggtggtgatggtggtaacctgttgaagggaaggaaggaaggaagatggtggcgatggctgggaaggaagagaatggtggtgggtggtgggtggtgggtggtggctaagaaggatttaggtttagggttctcatggtgggtggtggctgggatggatttaggtttagggttcatggtgacaaagaaaaagaaaaagaaagaaagaaaaaaaaagaattttttttaattttttaattttttttttatttttaaaataattaattttttatttttttaaataattatttacgtggaccaataaaattgtgccatgtgtatattgtgtccacgtggacaatccaacctggcatttaacagctaaatttggacggaagtgttaaattgctaacagttttct

SEQ ID NO: 291381 - DNA, 470 bp, Cannabis indica
ccccctaccttttcttcctgatctctgaaggactctctactgccatctatgctagtatgaaagccaacctttaagagtttccccatatgcagaattgcccttgtgatctcccacttacttttcgcaaatgatagtttgctttttgccactgtcacagttgagaactgccaagctattaggaatatccttaatacttataataaggccactgaccaagcagttaatttctccaaatcctccatccttttttcaccaaacactagcctcgctaataaaaatatcttcctaaatcatctcagtctgttcaataaagagttcataagtaaatacttaagggtccctcagtgtgttggtaggcttaagaactcttccttccattacctttttcagaatgttagtgttggaaattattttaccaggattttagatctactcacaagtatgttgattaaaaccctaaatatgaactt

SEQ ID NO: 291382 - DNA, 655 bp, Cannabis indica
agttctatggtttttaagattttatacacagaaggacagtatagtcttttagcaattctcctgcacttaaagccaaatatgggctttaacaggtaggcccaatagccgaaattgagcccaaatctacctcttaggcccaaataaaggaaattgaaacgcagacaaaagagagaaacaacgttaggctccgttctctttccctgcgccgccgtaaaccaatgctccactccggcgccggagttcatcttcccctcgacgaaactaataccagtagacgagcgccgtattcgatagagctacgatagatttcaatcacagaagagtctcgcgagtgagttttgtttccaaaccttagaaattttcttattattgtcttgaggtatttttgcattttgatgatagaattaataggaagcacattcattgaaaatccatgacaatttcattgagattcttggaaaattcttgtttccataaccttattttgaagtgatttttgcttgtatagtggctgattttttgtacagattcatatcttaagatgtccaatactgacatgacactataattgattgatggtttcatatataggtttaaatttttgctatgtattaaatcgaaaggctaattaagatttttttccgaattttaacat

SEQ ID NO: 291383 - DNA, 543 bp, Cannabis indica
aaattctaacaaaccaatggtttctccatatgggtttgtgattcatgattgtaaggcacttttagtagatttattgtctgtttcagttgtttttgttaagcgatccgcgaacaaagttgcgcatgctttggcacgtaattctgttcatacagctgattgtacattcagtgtggctactttgccatttgaaatttcatccttagttttggatgacttatgttaatgaagtttcttcttcttttcaaaaaaaataaaataaaataacccttacaaaatatgcaaaatgatatttatccattaaaatattacacatcaatataaaacaaagcccaaattttcttcgaaagcaataaccaacatgttaaaagcaataaattagctaaaaaaaagtaataaattagctaattgaactaaaaaaagtaaatatatatcatgggagtaaggtgtcatttttattcctacccgtagagatatctatatttttggcatttgaaaaaaattataatttaatttttttatatgacaaactacaacatacatgtt

SEQ ID NO: 291384 - DNA, 687 bp, Cannabis indica
ggatcgtgttttacttaagaaagggagcctatatgcctgaacccaaaaaggtgagaaaaccgtagattcaggggtgacattttgcagagcagtaggtgtatacaagacaatatgatgatcttgaaagtgccatggctccttccgtaagagctctaagtttttctccaatacaacataacgtgattaaaaacaaccctgaatgatgttaaaaaatgccttgaaccgcccatcccaatgttcagccatttgacgctgaagggtcggtgagccaaactttccttggtgataaaatgcgtacaacaagaacaaggtccaaagattcagcatcagtagaagtaccatcattagagatagctactacactgcgttcagtataagttaagttgattgttgatttcatttgatcaacaaggggaaccatacttaaaaggaacagtgaaggaatagacaaaacaaagaacccaacagagaacaacaaaaaaaaaaaaaaatagtagatttgaagttgcagttactgaaaatgaaagacaagaacataggatagaacaaagagtgaaactgggcaaaaccaacaaaaattagaaaataaccaaataattgccacggagcactaaagtgggcagacgctcttcaatttaactattcttaatttataccaatttataggtcatatccccaatatgttca

SEQ ID NO: 291385 - DNA, 499 bp, Cannabis indica
tgtaggtagctaagtgttttaatagaacgataattttgtctctactccatgtagatcatctataaaggatctttgactattttgattgtaacaatagataattcataacgtatctatatcttggtacacatagagcgttctatataattaagagtgcaattctgaatctattgtggcacaaggaggaattaataagttagagaatttacttggaaaattcaagtttacttattggaaacctgattatataggtccattgtccccacactagttgcgataatactccttgcagactcagttaattggttttaattaatcaattataattttcaaattatacaatgtcttatttatgaattttcactaaacaatggcttaattgtgaagaaaaaaggtttttgggtttatttattaattaagagactttttttaagtctaattaataaataaaaaattaaaaattaatttgataattaattataattattaaataaataag

SEQ ID NO: 291386 - DNA, 887 bp, Cannabis indica
tttttatgtcgtagaaatagctgaactcttctactgagggggccctatgaacatattccatgtacatcgcatagaaggctagggcagtgcgatagctgtttggagttagctgaaaaggtgatacatcgtatcgcctgagaatagctgcgatgaagggatggaaggggaccgataccccacaccggagaatgggtattgagactaccacatcctctgtgggaataatcgcagggttagtaaacggaagatgcgccctctgggacggtttaggtcgctgaaacgcaagtcgcagcaaatttaacctcacaaaggtagtgaaatctgatttggaaaccctcgaaatcagatcttcacacgcgaagggctcattcagctgggtatcgtcaaccgaatctgtcccactcccttccgcctcctcttcgtcctcacctgactcgcgaactggggtcgtccattcatcatccatctcctcgacctcgacgtcaggagcatgcctcgagtgtataaggtagtcgcgggccgacaccgtggactcgctgtctcgaatgtcgatggtcccaggttcggcgagttcctgcaccatcctttcgatgtctgcagaagacatcgggcctagctctattggagcggcctcctcttcggaaagcgaggttgggagaaagctgtcctcctcctggtcaacttcaccgtcgaatgcacggcctccagagccgagctgttggctatccgacaagtcgctcatctgaaagatagaagatcttttcagcgtgatggatgtgtgaaaagcaaaataagtgatctcacccgcattaaactataaagtcgcactcgatagaatggtcagcatccttgcgaatactgaccgccccatcaatatgcgagcagag

SEQ ID NO: 291387 - DNA, 1066 bp, Cannabis indica
  modified_base (70)..(70): a, c, t, g, unknown or other
atacacgtatgtgagtcatataccaagagagttaacaggtagaaataggtagtttgaaagaagatgtacngaggatactatgagcaccacacgctttacacagtttcctactgcatgagttacaggcgataccatttgtagaatcatatatgacacctgtcacatatatataatcatacatttcaaaaaaaaattaaacaaacaaatgatatatatatataaaacagtaagagaaatgcaaaaatggattttaaggtccaaaacacgcaacaagtggtatactgttattgatgcatattaatatcaaatctcaaacattttaatttaataaataatatgcgaaaccactaatcagttataagatattacatcggtgtggtgtttgacaccttgaattaccataagcaaaagtgaaatatatatattttatgtatagtaagtgtcaacaatagagaaaagggtctcgctgaattctaagatttatcaggttttggtttgcgaatgggggttcgcgattcatgtggggtcaagcttcgattcattttctttctttaatttccaccagccatgggtacaaagacaatggtggctccggaagtgagtgaaatttgggtcttggttccgtcaggaacgtgagaagacgagagagagagggaacaagagaagagggagagagtttgggtgagaattttgaaatgagaggggtaatttgggagatatgaaaaatagacttagtgatttaactttagtttaggtcgttatattttgcctaatgtaagcattttttagggatattagcggtaaaactactcaaactttatactttttaacactcaatcacaaaaactaaaattttaacggtaaaacctacttaatccaaatttcgttttgctcttcacactttcatccaaaaatcacagttaattgtcatattggattatccatgtgtacacaaatgtacacgtggaaaattttttagtggtccacgtaatattaattgctcaaatattataaaaaagataatttaaaaattataaaacaataataaaaaatatttttttttctt

SEQ ID NO: 291388 - DNA, 707 bp, Cannabis indica
acaaaaaatctcaaaattcaattaaaaatcgatcaaatccaattacatttatatataattaaaaaattatttatataataaaaaatattgaaaataatatatatgtacatatatatttattattatttttattaatgtttttctatgttgaatttgtaacacttgattgttatgtgtatttattttcatgatattttgttctattttattacttagaaatgttgttgttttaattatttaaaatttttggctacattacacttgtaagaataatatgtttatgaagtattaaatttaaataaaaagtgatatttagtttttacgtattttttttctatatttttaagttaatattaaaatttaagtgtttagttggatattcaattaaaaaaactgattcaatccaattagtaattggattggattttgaggtctaattggattggataggatggggaaaaaaaggttggattggatcggatgcccacccctacttcttatgatacaatgactaacgagtagaagaatacaccacttttactactccaataaactcgaattaatatattactctatcactttaagacttatgaaaaatcaaagaaaattaacacaagagagctttttaataagtgattcaaggtgaagtctcatttttataggcttcatatggggttgaatacaagtgtgaacgcaaaggaattaat

SEQ ID NO: 291389 - DNA, 768 bp, Cannabis indica
agaatcgggctcagatctgggtggtactctactacagaaaggatacaaggattagagatctgagtgaaatgagtcatttaatttcgttacaaccaatgtaaggtttcttgaactttatatgtgtttaaattctattgttttagaaattcaattttaggatgttaaacaacatacatggtagtaaatttagattctagtaaaataatccctaacaactggcctcagagccttggtaatgatttactttcatgaaatgtggatttaaaacgatataattgattaattaaaatcaattaactgagtaagcagtattgtctcaaccaatatggggaccatgagcctatataacagaactttccaataagcagatctagaatttaccaagtaaattctctaacttattaactcctccttgcaccactgtagatttggaattgtactctcaattttatagaacactctatatgtttcacgatataaatacgctatgaaaatttaaccatcgttttaatcccaataatcaaagatcatttatagatgatttacaccaagtagggacaaattcagcgtttcacccctcaatgtgttttatccttaaaacacttagcttcctataaatgatatttttgtaaactaatataattactaaaataagagctctttcatttatctctattaagccaagctcgaaggaaatcatcagttcacttctatgtccagatagaagctatagattccatatctgcatttagcgctcccactcaattg

SEQ ID NO: 291390 - DNA, 609 bp, Cannabis indica
tattgaagaggatttgacgaatgtcttaaatcttttgtaaaaagatggaacgattcaccataaccattgatgcaacaacttggttatatgaaacaatggaatggacacggaagtatggaggattgatcagaatatgcaaaagtatgcagtgtaatggctttcattgtctgaatggacatgcaacgttctctaagaattcgctagccctactagcttgtggaagaaacctatccttaaaacccactggttttgaatataaaattgtttaggtgttgatagttgttgagcacaacataaggtgttcatgctcaccttaacagagcatggatgattgatcacaatatgcgaaagtactagattgatcggctacgagatcgccataaccattgatgcaacaacttggttatatggaacaatggaatggacacggaagtatggaggatggatcagaatatgcaaaagtatgcactgtaggggctttcattgtccgaatggacatggaaggttctctaagaattcgtcggccctactagctagtggaagaaacctatccttagcacccacttgttttggatataaaaattgtttaggtgtttatagttgttgtag

SEQ ID NO: 291391 - DNA, 836 bp, Cannabis indica
taaatcacttcccagggacttaaacaagaaactaaaagcttccatatggataaaaagcatggcaatacccccaataacataaaaaggagaaaatctagggtttctaaaaatcacccaaccggcagaccggttgcccaaccggaattccggttctgggaatttcagaaccccatccggaattccggatgcacaaccagaattccggttcctcgcaggaaaccttcaaaaattcataattcattcaattcaaacccaacttaaaccaaaccttccagacctgttctaaataccccaaagaacaataccaaagcatcaaaacagcccagaacacacagataccaaaaatgccattaaagctccaagctttgagttcaaaactcaaacttggctaaacaacactatcatgcatcaaaccttgattaaaattacatattcatgcatataaaaactgcagaaactgaactcaaacacaatcaaactttacagcagctattttcacatttttactttgaaaaaccatagttttgagtataaaattccaagcttgaatcaaagcaactaacatgcatcaaaatagctctaatctactcaaataatcatgcttaaacctctgcaaacaacaacaaaatcacagcaacaacaccaacctaaactaagcatgcaaaccttcattttcttcccaaaatttccaagaaacaagaaaagaagctagaacaaggtttacctctactagaattactttgaacttgctgaaaatcacttgaatcaagcaagaaaacccagccctagcaactcccaagcttggccgaaaagagagagagaaagagttcttgaaa

SEQ ID NO: 291392 - DNA, 540 bp, Cannabis indica
gttgccccatctcaattcggttccggcagcaagaactctgcctcaaggggcaccagggggtgcagcaggagctttggccccaattgctccccccgaagatgcccagcatattcctggcttgccgccaagacccaacgggagagtggccatgatctcgggaggaccccacatcggaggaactacccgtaaggagctcaagcgatatgtaggggccgtaaaacacgatgagatttgggaggttactcaactcccagctcaaaggccccggctaatggaccagcccattacattcacagaagaagacgctaaaacagtgcgttttcctcaccatgaccctttggtcatagagactcccattgccaataagatcgtggccagagtcttgatcgacaacgggagttctgtgaatctattattcaaggaggccttcactgcaataggcctaacggaccgagatctttcaccaagtggatcccaactcacagggtttaatggagcaacacttatcccgatgggaaaggtgaggctcccagtcacctt

SEQ ID NO: 291393 - DNA, 648 bp, Cannabis indica
gcaaggattatttttaaaaaattatcatcgatcccaactgcttctctccccttgattgagagaatttttaaaaattgtgatatctaataatattaatacatttttatacaaaaaaaaaataataataatattaatacacctgtaggaatttcaatatatcacaatgaatcaatatttgtttaaactcatatatactatatgacattgaacttcacgttcaataaacttcaagttcaggttcaatagttatgaaattattttatttctaagaatgagtcatacgtttataattagaaatacataaatatacaaattttgtaaatccatgatcatataatcttatcatattgataagaagctatgcaataaaaatctaacaataactcaagattgctaaagaaatacaaattcaaatattttcttcaaaaatagtttaatatatattctagataaataaataaaatcacatatattaaaatgaattatattagcaaaataattatcaataaaaatataaatttataacaagcataaaagagaaactaaatgaaataatacatatatattttttttttaaaattaaaaatatgaaaatatactttcatttttttctatgtgcaaatatatgcgctatctttttttagcctt

SEQ ID NO: 291394 - DNA, 440 bp, Cannabis indica
tattggggtggacgttactaagaataaaacacttacaaataatactcatctttcgagattgtacgacgttaaattgctaatgaacgttcatctattagggatgataactcactaaaacaagaactatgtagaaccaacaatggagattgaatatccttataataaagctcattatttaaagtgtattttcatctaatatttattttaatctaattattttaaaatacatttatttaattaaaattactaatttagataactctaaatataaattttaatttaatatttatgaaattatacttgaggaagaactggaaaaataaaaataaatattttccatccttagtattaattttccaataaatattatgaaaattacttaatttaagttgatccaaaattaattaaaaaatttcaactcaaatttaattttctataaa

SEQ ID NO: 291395 - DNA, 808 bp, Cannabis indica
agatacaaacaacgaaagagcgaagataatctatagcaaacaacacacaatcaggtacaattacctataaaatcctaacatttaataattatcaacacttgaatatgtgtgttggaaaatccaatttaacctccatttttcattcttcctgtgctggaatggttgaggaaacaacgccaaagataaaaagcacaaacagggagcaagtggaaacgggtatccggaagagaattggtgaagcaattgttaaagagacatccttgaatgcaatggaggagagggcctgtaaggccaaaataatggaacccgatcccaacataaaagacactgctggaatcctatttgacgtccctattgtttatggaaccggaagtaactcacagaacaaagggactcgagagaagaggagaaagtttgttccaaagacaggaaaccatcaaagaatgaaacaggggggacatgaggagacaataaaacaactgaaaggggaactgggttctggatccagatttgaagtactcacaggggaagtttctcagctatgtgattcaacctcggaatagatatttgaagcggcgaactctgcatcgcagggtcgccgagagcaatgagttctcttttttggaatgttcaagggcttggaaacccttggactgtttcggctcttgccacccatgtcaaagaatacaattctggtttggttttcctttccgaaactcgctcgaaaaagtgcgtaaatggagatgattcgtgttcggttggatttcgatggttgtttttgtgtggatgctaaaggcaaaagtggggg

SEQ ID NO: 291396 - DNA, 514 bp, Cannabis indica
atcaaaaggtctttttcggttacaatatcatggcttaggtaaaacgggtagatgagaagtcatttaggctacattataccataagaaaaatataccgaacaagcacccacaattatccatagttttatcccaaaaaaactggtaatggattacattttcctctttatgtgcctttccattgttcatatttttttttcaagaagaataatcacatttattactttgtgtttcttttttttttctttttttttttatagatagtaaaggcacttcacataacaattttttcaatctcttacttttaaaatatttcccacttaaaacacttcattcccccccccccccaccccacccaaacttgactaaaagcttatggcataataaggtacattgagaatgaaagtagctaaagataacaaattaggctcaattaagtggtgagaatttcgaaacaggctaaggctcaactttgggtaaactaaggacaaaacttttcaggtaagcccgaaaggct

SEQ ID NO: 291397 - DNA, 647 bp, Cannabis indica
cttttctttttctctcaaactctcacccaaaatttcattctcaacccacaatgattactccatccagctccaactctcttgctatatgtaaaatatatattttcaaaccaactagataaagagagaaaacacaacaatatttttctttgattagggatggtacaccccaaacttagagttaaacctttctttttctttctctattttatttactactattgttatgcatatatgtatatatattttatttttctaataattttttttaatagttttttttatagtatatatatatagcaaaagatggactcttatcttatgtaaatcaaaactctcaccacctcgaactcacatcccatcatcatctccaatgtaaacttgtttcaccacattttgcaaagttttatcctcactttcctaaccccattaatgtttgatttgtccttgataacttaagcaattaggtttggattgtgacggataaaatttatgtgtgtgtgtgtgggtatattaactttgatgggtgttaagaaaataggctattagctcaaataatgtgactattgataagtaaatattcatgggttagcttgaaaggttcaatcgtccaaaaatagcctagatcaattctaagttgtaaaactagc

SEQ ID NO: 291398 - DNA, 836 bp, Cannabis indica
ttcctcgggcgttgacgatgaagcctagaaactttcctgagctgactccaaaggagcattttaagggatttagtttcatgttgtatttcctgaggactttgaaacattcgtctaggtcgtctatgtgccccccagcctttccggattttacgagcatgtcatccacgtacacctccatatttctgccgatctggtctttaaacatcttgtttaccaatctttggtatgtagctccagcattttttagaccaaacggcatgactttgtagcagtagagacccatatctgttcggaaacttgtatgttcttggtctggcggatgcattttgatctgattgtagcctgaataagcatccatgaagcttaggatttcgtgcccggctgttgcatctacgagttgatcgatccttggaagcggaaaacagtcttttgggcatgctttgttgaggtctgtgaaatcaatacagactcaccatttcttattcggcttgggcacgagtacggggttcgtgacccaagccgggtaaaaagcttcaattatgaagttgttgttgcgcagtttttgaacttcatctttcagggctactgctcgttctttatccagcaatctttgtttttgctgaaccggctggatgttaggatcgatattcaggatgtgagaaataatagaagggtcgattccgaccatatccgcatgtgaccaggcaaaaacatctaggtttgctctcagaaaatctatcaatctgattttactcgtagcacaaaccttttcaatttttagctttcgtcgggatagctgggtcgatctcgatctcttctaactcttccataggtcc

SEQ ID NO: 291399 - DNA, 595 bp, Cannabis indica
tatacttgtattgttttttagcttgctgctgaagctgtccgtctctccaagaacataatcaaccatggcttcgtcctgtctgattttggggacatgaacgaagtcaggaaggttcttcaggatcttactgctgagaggcagctttaccaagaggcttctgagcgccggaaggccgctgcgaaagccaatgtggaagaggctaagcggagggaagcccatgcggaggcgatgatccgggaggaggccctgcggagagacaggctggaggccaagcaccaagaggagctgagggcggaaggtgaggccaccgcaaaggccaggcgggagcttcgggatgccagggaagccttggacgagatggttgccaaggtgagatccttagaggaaactcaccaggcaaacttagaatccagggccactctggccgcggagctgaaggagctcagggacttcaaggaacaagcctcaaagaaggcaaaaagggctgagcttctttctcccgtttcctgcggccggtgccctaagcgcttcgacgatggcgtcttcatggcttggtctaccaatgaccagaatatcaagcttaccttctacccca

SEQ ID NO: 291400 - DNA, 655 bp, Cannabis indica
ctcactcacctatgggagtgaagccatggtcccagttgagacccaagtcccctcacaccgaaatcagtactatgaacaacaccgtaaccacctactcctggaggaggccctagacttacttgatgaaggaagagaggattcacaattacgtaatgccgctcaccagcagcgggtaaagaagtattatgactctcgtgttcggggtagggagtttataataggcgacttggtgttaagaagggcgttcttagcgacgcgtgacctaacagctggggtccttgggcccaattgggaaggaccgtatcagatcaaaactgtcttgaggcctggagtatacaagctcgctcgccttaaccgggagcaagtgccgcgagcgtggaatagtgagcacttgaggcgatactaccaataggtggaagtcctcctcggtcgggggtccttaccttactttgatgtttagtcaagtttcctcttagtttatttatttatttagttaattattttttttatgaccaagatctttattagattgtcatattcttagaaattcttaaagttgttattttcaacgcttgaataaaaatatttaattatttattcaaaatatagttacattgccaaacccaaaacaagtcaccaaggataataatcaaac

SEQ ID NO: 291401 - DNA, 197 bp, Cannabis indica
actaagcaggggtgaaattgtaaagaaaagagtttctaggtttatttatttatgtgatggctcagtcaaacatacatcttaacacatgctttcattatacctggccgaaccctctctcctcttttctccttctatcaatttcgaaccctagtgaaagagtaagtgcccacacacaacaagcagtaactcaatcatag

SEQ ID NO: 291402 - DNA, 771 bp, Cannabis indica
gatagctgtccgaaggccggaaccagctggaagaaatgtaagccgaagggtctaagggaacgggctccggaggaccagaacccatccgggaccgacctaggaaatctcctaagttggaaaaataatattccttcatatggtctccccaccgggtcgagggcatcctaaacctatggagacgctcatcgaaccctacaggcctaagattggcatattcgccaacggaaggaacgtaatgtactgctaaaggagacttacccgagccggaagtgctggcgccaggagccccagtgttcggctcctgaatcgaaggcttcggcctgggagccctcctctcagccgagtccccaatgcgaaggggcttcccagcgatcgcctggcttctcctctcgaccgggctccccacgcgaaggggcctcccggaagctgcctgggccttggaataagccttctcctgggccttccggtagagatattcctggtacttcttctcggcggtggcgatgatttcatcccggaaggtcttctccgcggcaggcaccctcacgttcggacaaataaccttagaaaggttagagtcctccactgattggtgcggcaggatgagcttggccttccggcaattctccgtcgtgactaggcccccgacgtcaagtttcgcccggtcgtaagttgcaaagacctgggccctccggagaaagacctgagtaggcgcggtccgctcataggggggaatcctaacccactttgtgagaagctccaggtgctcca

SEQ ID NO: 291403 - DNA, 609 bp, Cannabis indica
agataaagttatcttttaatttaaaatatgttaaatatcaaaatatcttatcttataattaaataatattatttatttaaaagatgacatttaagttcaaatatattaaaaaaataatattttattttaattttgggtttgaaaattagaaaaattcaaaattgggaaaaaaataccttaaaaaatcgaattttggggtaaggcagcagctaggctgcacgtgcagccttcacaggctgtaaattccccaggacgcgcgcgcatgggaggagacagccgaggaacctcgcgtcgtgcagggtgcatgtgcgggttttctcggcaccagcagccttcagacacggaatcagcagggtgctccgtgtcttcaaagaggggatatgtccgaactcccgttcgcgtgtgcctggttgtctgaatgcttggtgcacttgattcacccactcaacagccatggcacccaaatttcaaaaattcatatctttttcaatttttatcagaatcgagttccgtaaaaccaaaattgcttaatttttcacaaggaatccaaataaaatattttcagaaacaaaaaaaatatttttatttgaaaaattttgtacaacacat

SEQ ID NO: 291404 - DNA, 501 bp, Cannabis indica
gagagtggacttggccttgagaattgatgcaccgcctaaacccgttgatgatgccactgaaaaggacaagaagtcctatgaggattgggagcattccaatcgttgttgtttgatgcttatgaggtatcacatggatgagtccattcgtgtattcctcaaactgaaaatacaaaagattttcttgctgccattaaggaaaagtataagaagttctcaaagaatgagaaaaatgagtgcttaactttgttccatcgcactaactatgctgatacaggtgacattaaaactcacatcgacaagctcatgggttgttaccagaagcttaagggcatggggttggatcttggtgaggattacatggtgtggtttgtaatggaaaccattccttctcaatttgattcgatcagatcaagctacaatgctcaaaaggagcagtggaccattgaggagatgactgctatcttgccaaagaagaagaggacatgaaaaagggagagcaag

SEQ ID NO: 291405 - DNA, 509 bp, Cannabis indica
ttagagtatacctaaattttaactaattttttatcttgcaatttttttgaggttatacacaacccacattattttaatataatctgaaatgaaaaaaaaaattaaaaaacgaaaaatgaaaattaaaaaaaaaaaaaaagttaacctgagatggaggagatcgctgcgtctaagatggaggagcaccggtcgcctgagagggaggagctccgccggcctgagatgaagaagaaaaataaaaactaaatatttataaaaacaaactaaacaaaatcaaaaatcatcatacttacctcctttgatctttggaagatactctttgatgttggagggtgtcgccggcagcagggggagttatttggtggctggtatgaggtgtgggaggggttgcaggcgtctgtaggggagaagaggggtttgggatcgatgaagaaatgaaattgattgtttagggctgataatcgatatatggatttttctttttattttttttttataaataaagcggt

SEQ ID NO: 291406 - DNA, 599 bp, Cannabis indica
agcccttgttcttgatccggatcccaatctcgggtcccaatctggttaaatttcttgtgccgggtcacgagctgggtcctaggttcaagttcgggtctgggtcgggtactaggtcctgatcctagttctgtttcccaggtccctatcctaattctgggtccacgtcccagttattgtgtgtgtttgggtcccggtctaggttcgggttcgagtcctagtgtcggttcaggtttaagtctctgtctcgattttgatctgggcgcgggtttgggtttagtttctagtcctggtcctagtcctagttcggttctagttccatttgcgattctgagttcgagtttgggtttgagttggggtcatagttcgagtcctgttctgagtttgggttcgggtcaggattttagtctaggtccagatcaggctcctggtgtgggttcgcatcctaggtcttggtctggttgggtctgagtcccaagttccattcccgatctgagtctggattaattctgggtctaagtccttggttctgatcctggtcagggttcgagttcgggttcgggtccgggtctacctttgggtcttattcgaggtgtgggttt

SEQ ID NO: 291407 - DNA, 678 bp, Cannabis indica
gttctaaccagggagctcgtagatcccaaaaacgcatagtttcccctccaaaaataacttcccctgtcggtgaacgcattagatatttacctaaaccggtaggtccttgagcggatcccacgttagccccaagacgttggtctctaactagaaaagtaaatgcttgagcttgagaagcttctggaccagtgggcccgtaaaactcactaggataagcggtattattgaaccagacaaagcaacaagcaataaaaccaaaaactgataaagcacctaaactataagacaagtaagcctctccagaccatacaagtgcacgacgagcccatgcaaagggtttggttaagatatgccagattccaccaagtatacaaatggaacctaaccatacatgtcctccaattatatcttccaaatcgtccacactaacaatccacccctctccaccaaagggagatttgagtaaataaccaaatacaatacttggactaagggtcaaattggtaatttttcttacatctcctccccccggagcccacggtagtcatatacaccccaaaactaaaagaagccttaaacgactagaagaaaagacacctactacctaacaaaacttaaagtagaataccaaaacttagtagtcatttatttcttatctttcctatacataaccgaacg

SEQ ID NO: 291408 - DNA, 560 bp, Cannabis indica
ctattatttagtacttagtgaaccgtacttgacaattctataaagattacatattttaatacattaccgactcgttttattcataataatatagtcttaattcttttgtactcttacaaacataaacactaacatggaccacacgtgtaccccattcctatatatatatatatatatatattagatattagcagggccggccttgaaacaagtgggccataaggggaaaaaaatttgggccttatagttaaaaaatgtggtattttcaaaataagtaaaaaaatgtataatttaaaagaggaaaaaagaatttggccctgggctgggtgggccctaggcataggcctagcccgcctatgcccagggccgggcctggatattagtaacatgcaatacatagttcacgtatgttaatattattttagttttagtttttttaatatcataatttaaaattaataatattcaatgtgataatcattgaaatttgaaagcataatatatagtaatttaaataaaaacaaaaattactattatactttgtaagtataataaaaaaa

SEQ ID NO: 291409 - DNA, 902 bp, Cannabis indica
cgttctacgggagcaagagagatagagaaggcacatgcggaaaaggaagagagggaggagacatggtggaggagaggcagagaaggagaaaatttgggagaagggtgaatgaagaaggaaatgaggagagaagataatgagagaaagaaaatgaatgggtagctagatatttttctatatgtctaaaccattattggcggggtccggtaataataagcatttcgcgggtattatattttataataattactctgtatagatttagtaattcttatactatgattggcagagtagtgggtctgccactattaaatcaattattagaggcggacttactctgtcggcaataatttcgccaataatgatttgatttgttatagtgctcgtaaaatatttttttgtgtttttgttagtaattttttctttttaattttatgaatgatctttttttttttcgtttcaatatcatggataatagatgcgttaataatttccttattaattacatatctttattcattctaatttaaattttaagttttgttaaagttatacataacttcgtaagttttttagttttttttttttttgacttatttatactatctctatatagttaattgttattaggtgttttttttattatatataaatagcggcttcccatattatttattaaatcaaaatatatgagatatgatattgaaatgcaccaataacggtatgctacatcttttggtgcttggcacctcccttagtattttacttattaatatgtacatgtgtttgtttgctttaatttgaattttacctttttgtttaattatatataacattgtaagtttaacttttttagttatttcttgtttttgtcttatttatattgtcgataattaattata

SEQ ID NO: 291410 - DNA, 594 bp, Cannabis indica
tacaggtataggtgcccccccaagtgaccgagcagacgtatgactcttggtcacttgtcttttacaaatatattgtttatctgttcggtgttttgggtttgaccaaaccttttgtacgcattgtatcgtaaattagaaacattctgataattttgactcaatcaaaattttgaaagaactatctttattcattttttgatcgaaaagtgtatttgttaccgtagtaacttacatcagagctatttgatctaatctgatcttttagcttaacatgagataaaacaaagtgcagacataagaaactgtactttaaagtggtcacccgacctgagtactttgtttcttttatcgaaacctttgtgcatagtccgcccagaaggtcattcacttaaaagcaaatgttcatttagtacttaaagtggtcatccgacctggtactttattggtagtattttcttaaatgttctccattccaataccgtggtactagaatgagttgcatttttttgtcatacttacctaacttgtatgctccggagtcgagaacttcaaccacttgatatggtccttcccagttaggtccaagtacacctg

SEQ ID NO: 291411 - DNA, 562 bp, Cannabis indica
agtcccagatctagacaccgactattggtctattccaagcctcattacccgaatcccgagtcaagatctagatcactgtcacgggtttcagtttggttctggttcaggtcccaggtccaatttcggagtttgggtttgggatcgagattcgggtgcggttctaggtcccaacccaggttctgtgtccctagtctcgttccatgcaaggctaagtttaggttcgggttcgggtcctgagtccaggattgggtgggattccgggtctggctcccaattcggttctaggtctgatttggagtccgggtcctagtccggttacggttctggatctaggtccaatttcagttatgattccaagtccaagtcctagttccagtcccagttaaattccagttttggttccaattttgggtcacagggtacgggttcgggtccccttttaggtttgggactgggttcaagtccgggtgtgggttcgggtccttgtcagggttcgggtccagcgctgggtcccaaatctagacaccgactacgggttttgtcgaagccctgggtccagatc

SEQ ID NO: 291412 - DNA, 475 bp, Cannabis indica
aagtcgtgatcgacctagctgtttagctcgcatgtgttgaccttcaggagagatttgtcagcgatgagttccagtcgaaggttgacaagactcctactgaggagctgctgcctcgttccgcggagctagcttcgcagtttatggccatgttttcgaaggcttttgctactgggtccaaggacgttgaagtcacgaagaaacatattgctcagcttcaagaagacaataagaagctgaagcaagatgcgtcttctaaggacaaggagctcgaggaactccgcaaggacaaggagcaagtcgagctagaggccaagaatgcacaggcgaagatcgaagagatgtctcgcgacttagaagctgagaaggagaacgggaagaagcaatatgaccaggcggtctcggactacatctacaccactctctccaagattctgtacttcgacttttcaatccttggagcagaagccgctgaaat

SEQ ID NO: 291413 - DNA, 949 bp, Cannabis indica
tgacataaaacaaataagaaattgtactttaaagtggtcttgccgatctgagtaattttgtttctgaaacctttgcgcgtagtccacctagaaggccattcacttagaagcgaatgttcatttagtactttaaagtggtctactgacctgagtactttgaagtggtctagccgacctgagtactttgaagtggtctaaccgacctgagtactttattggtagtatttccttaaatgttctccattccagtaccgtggtactagaatgagttgcattttttcgtcatacttacccaatttgtatgctccggagtcgagaacttcgaccacctggtatggtccttcccagttaggtcctagtacacctgacgtgctgtctttggtgtttaggaatacccttcttaggaccatatctcccacgaagaatttctgagctttcacttgtttgttgaaataccgagctactttttgttgatgagctaccaactttaagtttgcagttgctcgtttttcttcgatttcatcaagtgattctgcaaggagtatgtgattggtaccttgatcgtacgtcaatcttctgtgggaaggtggctcgagttcgacgggcagcatagcttcataaccgtacgccattgcaaatggtgtctgaccggttgctgttttttccgttgtacggtatgaccatagaacttcggggagttcttctggccagtttcctttggcatcttcgagtttcttttttagtgtatccttcaaggttttgttgactgcttcaacttgaccgtttgcttgaggatgtgccactgcggagaaacttttgatgataccatggttcgcacagaaatcagtgaaagattggctgtcgaactgcttgccgttgtccgagactattttgtacggtagtccgaaccggcatatgatgttcttcactataaagtcttgaaccttct

SEQ ID NO: 291414 - DNA, 579 bp, Cannabis indica
gtaaggatctgccccacctcgctccgctagatcaaatactcgaatcggatcagatccgacccgacttatttgaattagatttgatctaaccagactctttttgtttaagaattttaatattaacttataattttatatccattttaattttgtattagtattattaaatacaatactatgtttggtattgacatatattaatagattgtgtaaagataatatatttttaataaactctaccccaacgggtcgggtccgggtccaagtttgagtcagagtccgagtttgggtctgagtcaaggtcctgggtccgggttcgggtctgggttcgggtccaattttggatccagatccgagtctgattttgggtcagagtcctgggtccaggtccgggtctcggtccaggtcctaggtctcggttcaggtacgggtcatggtctcggggtccgattcttgatcagggttcgggtccccgggttagggtccgggttcgagtctcggtcctaggtcttaggtctcggccccggtctcggtcttgggtccagtcccggtcctggtctgggtcccgagttcggtccc

SEQ ID NO: 291415 - DNA, 742 bp, Cannabis indica
taacaatcacaacactataagtgatacgctaaatcacttcccggggacttaaactaggaactaaaagtttccctatcgataaaaagcatggcaataccccaaataacataaaaacgaggaaatctagggttcctgaaaatcacccaaccggcagaccggttgccaaccggaattccggttctgggaatttcagaaccccatccgaaattccggatgcacaaccggaattccggttcctcgcagaccactttcaaaaattcataactcattcaattcaaacccaatttaacccaaaccttccagacctgttctaaacatcccatagaacatttctaaagcaacaaaaccacccagaattcacagaatcaaaaatcaccattggaggttcaagattgagttcaaaactcaaaacttgactaatccctccaaacagccactaaatcatgcataattcaacatgtttcaacataatttaacaccaggaaacactactcaacaataacagcaaccacagcaacgaaaatcaagaatttgctttgaaaaccatagcttttgtactagaaattcccaaacttaaacaagggtaacaagcatgcattacaacccctcaactccattcaattcaagcataaaaacacataaaacaacctagaactacagcagcaacaacctcttcaaaattaaacatgcaaccaccaacatttcttaattttcaagaattttaaagagaggaagagaagga

SEQ ID NO: 291416 - DNA, 560 bp, Cannabis indica
acggttcagtaagcttttattgctttagtagtttattttaatagaatgatttaagaaaagcttgttaagaagcatgttagtagcctgatagtagaatatgcgcatgtttttaatttccaaataaacgacattagtaagtttttctttgatcatgtttgaccagactaggtcttagttacgcaggctgttcaaattagtatggatgccaggcgaaacatcaggagtcagggcaattcggttggatcaagtggtggtcagagagctcagattcccctaaatattcgtggtcgtggtagaggtcttagaggcagggcacgtggtcgaggtgatggtaactcaccacaggctgcccaagctacccgagtttctcaagagtgggaaaacaggtttgtagaatgcaagctaggataaatgaacaagatgatgagatttcggcggttgcgacagcagggtgctcctgcaatcccctgctccagaaataccagtatttcctgcccctgctgtgccgaccgaacccgttattgcagtgaacccaatggaacccctgtatgaaacgtttc

SEQ ID NO: 291417 - DNA, 548 bp, Cannabis indica
tccctaagacacccgtcgaactatggaatggtcgtacacctagtttacgccattatagaatttgggggtgccctgatcatttcttgagaaagaaagaaggcaaactggaatcgcaaactgaagtttgcatgtttatcgggaattctaaagagactagcggtggactgttttatagccataaggataacaaagtgtttgtttctacaaattctatttttcttgaagaaaactatattaaagaaaacaaaccgaaaagtaaagttgtattagaggaaatgctttcagatataactccttccaatgttctgtcctcttccactcaagaagagaataatcccactccctcagtcgaaccaactgataaaactactaccaaagttcctgttcataagatcaccactcctcatcgtagtgggagcgttttcacaaaccagctcgttatggcttggatggtgaaatcaatatggtcgttggtgacggtattgatgacggcccatgaacctataaacagacaatggcaagtccgcaacggaaacgatggtcagccg

SEQ ID NO: 291418 - DNA, 585 bp, Cannabis indica
taccatcaggttttccctcacactaaagagttgttcatcaggaaattgctcatttatttgtacctcctttgtattctgactctcttgcagctctaatcttgacaaatggtctgctaccaggttctcggtgccctttttatcttttatctctaagtcgaactcttgaagtaaaagtacccaccgaatcagtcttggttttgcatccttcttggtcataaggtatttgattgctgaatgatctgtgtaaacaattaccttatttccaattaggtagggtcgaaatttgtcacaagcaaacactattgccagcatttctttctctgtagtggcgtagtttaattgagcatcattcagagttctactagcatagtagattgtgtggaatactctgtcaactctttgacccagaaccgctccaatggcatagtcactagcatcacacatcaactcaaacggcagttcccaatttggtgaagttactatcggtgctgtaatcaatttctcctttaaaatcttgaaagcttttaaacaatcttctccgaactcaaatggaactccatttacaagtaagctcgataaaggttt

SEQ ID NO: 291419 - DNA, 490 bp, Cannabis indica
aatttaacgccgtagaatctcaaaagataagtattatttataagtgttttagttatagtatggatcaccctaatggtggcgactattagtacaacttacaaaagtacgaaacaatggtagaagctcataagatagaatgtccttgactctcgcctaaacgggacaacactggattctcatcttgatcgaataaaaggttgctagaatgtttatcagtttagaggagatgaaacctctattcaatggatgatgctttgactctcgcctaaacgggacactgtatcagtttgttgaaaatcttggaaaataaaatatgtttcaattttggtatttttataaacatgtttgttttacttgttattttctgaatttgtgtatgaatttatttgaaccaaatcatttacttctgtttattgatatttgtagtgccaaaatgaataacccacaccccgacccactcctagtcgatgcctttgctaatgaactctat

SEQ ID NO: 291420 - DNA, 533 bp, Cannabis indica
ttttctccatggaaaaattggaagaggtagtgaagaacgattgtactccgaactcatgttgatgagcggaaaagattacgcccagtgatatatgatcgaacggagctctgataccactgatggtttgataataaatttgtattggtttagatttggaataggtggatatgtggttaatggtttgttgtggtaatgtagtgaagtagtgatgttgatgagtagttgttgatttagtatatgaaatgagtttggcttagaagagagggttgtttgagaaagtagtaaacttttattgatagtttggaactttggttttttggtgttggtttagctcctcaacccaagcttggtatttatagggagctaaggttgatactacaactttctagatttttcttattttgaattacaatttaactttctaagatattctagaattttctaagtttcttagcttacaaatatagtttctaagtaattctagttttctctaattttcttagctttgtgtagttaatactagaattttctag

SEQ ID NO: 291421 - DNA, 331 bp, Cannabis indica
atgactccttccattcagatctctagcccttgattcctttctgtagtagagcataatcaagatctgaatctggatctttttctctccttctttgatgtagagtggcagcttcatagagtttgagaaaataaacagtaaagtgtgtgtcaaacctgaagcctttaccttctatttatagaataccacatagggttaaagttgaattatttggcatttaaaaataaaaaataaaatgagaaatagaagcaaaggtggccggccatacattgaggaaacaagccttccacttttccaactttcctatttcatcatttctagtttcccattttct

SEQ ID NO: 291422 - DNA, 704 bp, Cannabis indica
aaaaaaatagaaaatttcaaaactctctctcttttcctctctcttttcggcctcttggtgcagcaagggacttgggattttttccttgtgatttcattcctctttggtgttcaattcaagctaggttagcttctaagcttttcttctttaagtttggtgaattttgatgaaaatagtgtaatgcatgcatgataaattgatgttgttgctgctgtgattttgttgttaatttctgagatttaaacatgttcatttgaggttaattaagctacttgtggtgcttgatagttaggttgtttaaaattatgaattttctatgcaaaagcttgagttttcaaagagaaattgtgtgaattgttgctgtagttgttgcatgagttaggttttagtttctgcagtttttatatgcttgaatatgagtttgaatcatggtttgatgcttgttggagagctttagccaagtttgagtttgaaactcaaagcttggagctcacatggcactttttgtttctgtgcattctgggttgtgttattgctttagatatgttatttgggtcctatagaacaggtctggaaggtttgaggttgtttgggtgtgatttggttgagttatgaaattttgaaaatctgcctgcgaggaaccggaattccggttgtgcatccggaattccggatggggttctgaaaattcccagaaccggaat

SEQ ID NO: 291423 - DNA, 652 bp, Cannabis indica
ttaatgaaaaaatttaaaatctggaaaaaaataaaaaattaaaaaatggaaaaaataaaatacttataaaaggatatttccatttataaaattcacacccaaaatatccaaattcacttatcgtgcgattctttcttcttctccaccgatttctcaacgatttctttccttctcctccgatttctctatgatttctttccttctcctctggtgtgattatcattcttcatcttattgttcatgttcctactgaagtcaaaataaacaaaagtaagaaactattgaatttgattacattcttgacgtagttaacatattatttaggaaaaatgataaggaattttaattttaggtttttattttggttctcatagtaatgtgttgtgttgtgattgtaattttaacaaaaaactctcatatcttgaaaaaattcacctcctagttcaattttagggttttatattgcctctgaatgtaacctggaactttacatttgaatatgattgtgtttgttgtgttgtggctgcaatttataggaaaaaaataccatgttttgaaaaaagttcaatcttagggttttatattgcctcttaatgtaacctagtactttacatttgaatatggttgtgtttttttgttgtggctgcaattt

SEQ ID NO: 291424 - DNA, 112 bp, Cannabis indica
ccctagtggaatgctataaatagatagtgaaggcttcaggaaaattacacttctcattcagaaaaacctgagcctcctctctctaccttggccgcccactctctctctctct

SEQ ID NO: 291425 - DNA, 407 bp, Cannabis indica
cttcacaaactttacagagattatgagaagaaatttatctctagtttagactctctctctcaaccatacactatcatgattttcactcaaacaaatctagtctgatttacacacaggttataaagatttacagctatatataaattttcattgttaccaaaaatctttattaagtaattttaatttatcaaaattaaattgaatgtctattttatattattttttaaaaaaatgtatatatagtctgaattattatttaataaaacaaaaaaattaattaataatttttaaaatacataattctctaaaattgctttaccaaaaaaaacaaccaaaagtaagtattaaatttaactattacaaatcatccttgacctttatatgaatgagtaacaatatatatatat

SEQ ID NO: 291426 - DNA, 606 bp, Cannabis indica
cgatcagcaaaccgagttgcccactttgtggctaggcgctatcggtttttctctgatcgtagcattcataggaatgatttccctaacgagctccaagctcttctgtacgatgaatgctaaatttcaatgaagttgatatttcatttttttttttaaaaaaaaaaggtcgtggctaaaagtattagtcacaaaaattacaatttgttagggactaaaactaaattagtgacaacttgtaactaaatactatgtttaagtcacaagtaatattttgttgtgattaaaagtcacatttagtcataaaaaaaggaaaacttacaaaaatactagaattttggttactttttacaaaaatactgtcacacggtaaagttttcaaaaatactgtatttttgtaaaacactagtagaacacagaatagaacaactcaaaacaacagtagaacaactaaaaaacaccagtagaacactagtgaaaatttaacacagtatactgcagtatgaaacttataaaaaaatacagtaaaaatgtaaaaaataccgcctgacagtatttttgtaaaaaaatagcaaaagttagtatacaatgtaaatttccataaaaaaa

SEQ ID NO: 291427 - DNA, 576 bp, Cannabis indica
acgggagggtttttagcaaacaaagaaaagttacaaggacaaaaactctaccagggtcatagtttaggaggataatactgattttttcaattatatattacctattatattatatacctcattttgaaattataaaattttattatttctattatttatgtaattatttatttaaattttaaaaaataaattatcattctagttgtacactaactacaaaaaaaaaaaaaagagaaaaaaaagttgaaagtatgaagatgtaccaacaaattccataaaaaaataatgcattacaaaaagataaatcaagttgtcaaaactaagtaaaaaaaaattcgtaatacaaaaacatattgaagagttgatattgttttgcatgttgcaataaggtcaatgattttttttttagttactttgtagttatctttttgttgttttatagttattttcatgttgtttgttaaattaatttttagctgtcttagttgtttatattttgctgaaacacaatagttttgtaattttaaaactttaacacaatatttttgaaaacttgatacagtaaaaatatatata

SEQ ID NO: 291428 - DNA, 699 bp, Cannabis indica
acaactaactaaacaaaaaaaaaaaaagaagaaaaaaaagttgaaagatgaagatgtaacaaacaaattccaataaaaaaataatgcattacaaaaagataaatcaagttgtcaaaaactaagtaaaaaaaattcgtaatacaaaaacatattgaagagttgatattgttttgcatgttgcaataaggtcaatgttttttttagttactttgtagttatctttttgttgttttatagttattttcatgttgtttgttaaattaatttttagctgtcttagttgtttatattttgctgaaacacaatagttttgtaattttaaaactttaacacaatatttttgaaaacttgatacagtaaaaatatatataaaaaaaaagtgtgctagtaaaaagaaaatttgatattatatggttaaaattaatttatccactaaaaacatgctagcatattttgcatcatgcaaaatatactcacactatttttctatccaattttacccttgaacaaataaaaaccaaacatccatgtctctctctatttctccggcgttaaccctgacctagaacctccactgtcgaacacacagacccagaacatcagtcgcaaggcctcgtcgtcatcttctctcacggcctctctcgttttctgcatttttttcttctagtttaccagttttttgcgatatttagcgatgat

SEQ ID NO: 291429 - DNA, 509 bp, Cannabis indica
gtaaaataaattccaacacttagctacgagaaacttgagctgcaaccaaatatgtcttatgaagaacaaccagttcagatccttgacagaaaggataaggttcttcggaacaagaccatagctccggccaaagtactctggagaaatagcaaggtgaaggaagccacctgggagttagaatcagacatgacagctcaatatccagagttgttcacgttagatttcgaggacaaaatccttttaaggggaggataattgtaaagaccgcttagctttaatttagaaattagcagataattaggactttattatgaaaattatttatgatgatttatttgaattcagaatgtatttttatgtcacatatagaaatttcataatttttgcatattttatgcccggcaactttggaacgcggtgtgtggctattagaatcacatcttagtattttagtagcgggatagtttagcattgggaatgtcgggaatgtcgggattttagaatttccc

SEQ ID NO: 291430 - DNA, 784 bp, Cannabis indica
tatgagtggtgtttaacatcaactaaaaataacatgttataaatatttaacatatttcgtaatagttattataataaataaaagaagaaagaagaaaaaactcaaattctaacaccaaaaatatttagatttttcaaatttgtttttatttccttaatacttattaaagatgttaaggtgttgtgtacttaagcttggtgattagttagttaggtgagctgtattgagctgtcatttttcggttatgagttagttatgtaactaactctctatctagtgtattctactggtttgagctgtataaataccctattttcaatccatgaaagatgatgaacatttttactcattcattccattttcatactctattttctgttatggtatcaaagccacatgatctgtgagctatttgttcatcgttcttctccttcttcttcgttttgcttctctgttcttctatggcaagaggaggaagcactcaaactcgaagcagtgctccaggaaattctgacgattcaaatcaattttctacactcgatcaagatcacagattatcccccaacacagatccacgcagtccatattttttatccaatgctgataatccgtcagctactctatttccaaagatccttacaagagctgagaattacagttcatggcaatgctcgatgatggtggctcttttagcatgaaataaagtgaagttcatccatgttaaacttctagctcctgaggaagacaatgaagattatgatgcgtggagtcgttgcaatggatt

SEQ ID NO: 291431 - DNA, 598 bp, Cannabis indica
gataggggcggagacacgataccgcgtcatcaaaaaacttgttttttgcctcctgatggcctcaagaaagttgaggccttatttccaagctcacctaatcaaggtgttgaccagtcacccactctggcaagtcctgcaaaagccagaagcatccggaaggctcctcaaatgggcaatggagttgagtcaattcgacttacactacatacgccgtatctccataaagggacaagcgttggcagatttcatcaccgaatgtaatgaagacgaggcaaccgcaaacgcaccgacaccatctgtcccaacatggaaagtatttatggacggagcctccaacgaaaattgatccggagcggggttgcaatgatatccccgagtggacttagactccaggcagccctatggttcgacttctcagcttcaaacaatgaagccgagtatgaggccttgatagcagggctgagattagcaaaggctgtgggggccaaaagagtagaggtctacagcgactcccaactggtcgtgaaccagaaatcaggagagtatcagacgcgcggcgaaaggaatggccggcatatgtgacgatagtccgggaact

SEQ ID NO: 291432 - DNA, 654 bp, Cannabis indica
gcaccattgacacttgggaagacctcaagaaagaattgaatgcccaattgctgccagaaaatgtcgcctacctggctcgacgccagctaagagagttgaagcaagttgggacagtccgagactatgtaaagaagttctccggattgatgctcgacattaaggatatgaacgaagtcgacagacttttctacttcgttgaaggactcaagccgtgggttaaacaagagctgcaaaggcagcgggtgtcagatctcgccacggctcaagctgcagccgagtggctgactgatgacacctctgagaattcgcagccgaagaagacgaatccccagaccagcaccaacaatgctgcgagtaagaagtcaggaaagcaatggccaagtaaaagtgggggaggggacaagaggactcctgaatctagctcctcctctaaaagtgatgctgcaacggggaagaagccccttaagtgttggctttgccaaggcccacatagggcagctgcttgccccaccagtccaacgttgagtgccactaaaggacgatccacttgctcaagaggagcaaggatgtggggaaggatgatgaagacgaagactgcgcgcacatgggcgccgttcgattgatggctgctcttaagaagcatggcgtcgaagg

SEQ ID NO: 291433 - DNA, 923 bp, Cannabis indica
gtattatttaatacataacacatagtctgtattagcttgtattataatatttacaaaggatttcggtcaacaccaatctccgacccgaacccgaacttgggacccggacctagatctgaacccagaacccgaacccggacccagaccctagacctacacctcggactcggacccgaatccaaactcggacccgaacccgggacccgagacccgggacctgggaccccgatccggccttgaactcgaacccgaacccagacccggacttgggggcccaaaccctgacccgaactcaaacccgacccaaacccaaacctaggacccgaaaccccgagacgtagttggtgttgggttgagtgtattgaaaatatattataattttacacggtcaattcatacaagtcaatactaaatattgtattgtattaaataatactaatacaatacaacagaacacaatccaacacgatacaatacgacataccaaacgaaccccatacattgtattaaaaattttgctcgtaataattaatacaacatattattttatctaaacataatattatttattatttaatatgttacaattcttatagagtgtaccaaacaaactcttacaatatatacatattttgttctttctaaattttttttttattttatatttttggaaccagatctagtatacaaagtggacctgttatttggtggggactgctttatttgtttatttatattaattaatagtactttggtcaagttgtttgaagtgggaaattcaagaagaccaggtccatagtgggagggattcagtgatatcacattttcttttccaattaataatatcagcccacttcacacactaacaaaatactcagcagcaacactcatgccacacgtatctcacttattatcaaattgtc

SEQ ID NO: 291434 - DNA, 999 bp, Cannabis indica
tcttgttctcttctgaagaggtacttctgataccggtcctccgccgaggctataatgtctgcctggagcaccttttcagtgtctgggtacgaatgtttgggcagagaaccttggagagattgaagtcatccactgattgactccctgagatgagcttggccttccggcagttctccgttgtgaccaagtcctccacgttaagaccatttctgtcaaaagtggagaaaaccttggcatgctggaggaaaagctgggtaagagcagtgcgaagcagaggggggatcctgacccacttcgtgagaagcttcgggcgatccacggcttggaagccagaagagaagaagaagcggtagcgatactccttaacattcttttgaaaattaaaagggaccgggcccttgttagtaggatgggcccggagagtgaaaaactatccttaaacttgtccccctttttggggacagacacaagttcataaaaatacaaaatttcagccgggccaggtgaagcccagtctcgggctacataaaaaataaataagcctcagagcaggcggtaagcttgtggaataagttggtaaggcgcaaggccaacaaaaacaaggaaattgatgaagtaatcctgaaggggaagcatggctccggacataaaatcggtctggctccaggctccaaaacccccgtagttgtgattgggcgtctcttcatcccgatgtaagcgatgaaagacccctgatgcagacaacttaatgctagctacagtcacaatcttctcaaactgatgagcgcaaatcagggtggagcggagttcacccacttccctgccattagaacggcaagtgtagttctcttgggcaaccagacccttcatgacctcctccagagtggccaaagcagccgcccccgtcttagaagacttggatcctaacgcaggggtagacattttttttgttctgaaaaaagaaagaatccaacagttagaccccaaaccaaaccctaa

SEQ ID NO: 291435 - DNA, 690 bp, Cannabis indica
aaaataatttccaacagttcattagggtaagtttttttgatacttccctttgactttccacacttagctcagtatgctaaagttttttctctgtgcaggccggtctgaagttggcctacacttactcccgggctaagtctgttacttccaagaacgcggctctgtccgacaccttgaaggtggaggcagacttggcgaagaaggaagctgaagaggccagggcggaagccggagctgttcggttggagttgggcgaggccaacaagaagctgtttgctgttgagaagaagatctctgtgctgactaaggatctcgaggttgctgaccgttatgaggagaccatcgagatcttatctgctgaggtaaatagtcttcaggatgagaggacttctctgcgagcagttcttcttcggatgaaggaggagaaggatgccaaggagggggagctttcggccgaggtggacaggttgaaagagaaggtcaatgccttggagacagccggtctcgagctcttctttgatttttggaaggctaatccccgggccaacttcgactacttgggcgatgctaaggacatgtaccttgagtactacgcggccaagtggcttatggtggaaccgaggcggctgcttcaacctccggtcaggctgcttcaacctccggtcaagctgctaatgcttctcccgttca

SEQ ID NO: 291436 - DNA, 673 bp, Cannabis indica
ataacggagcctcttcgaatatcttgttcaaaactgcttatgaaaagatgggactccagctcaaggctctaaccccatgtctccagcctgtctatggtttctccggtcaaggagttgcacctcaaggacaaattcgtctacccctcactgttggacaagctccgacgagcatgactatcatggcacagttcctgatataagatgttccttcagcttttaacgtaatgctaggccagccggacttgtatgacttaaaggctgtcaaatcaatattccactcatgcctgaagtttccaacaaagaatggggtagggtgtctaagaggaaaccagcagtctgctcgggaatgttataaccttgcagtggccaaggctaagaaggaagtatcctccagccagagcacacacaaggggaaaaacatttccaagtaaggaacttcccaaggcggggataaagatgtggatcctcgacttgggaacccaagcagcaatgttggacctgtggaaaagtttgaagagatcgagatcgatccagatatcctcaccagaaagctaaagatcggaaaaggtttgttgctcgtagtaaaatcagaattgataaagtttcagagagcaaacctagacgtttttgcctggtcacatgcggatatggttggaattgatccttctatcat

SEQ ID NO: 291437 - DNA, 571 bp, Cannabis indica
ccaaccacaaagtccattgcaatgtcttcccacttccattctggaagtgttaatggctgaagtaaccccgccggtcgttgatgctcagctttgatttgctgacaggttaagcatttagtgacgtagtccactacatccctcttcatcccataccaccagaaatagggcttcaagtcttgatacattttggtggttcctggatgtaatgagtaaggggtagtatgagcttcttctaaaatttcctttttaagctcactgatatcagggacacacacccgtgctttaaacaacagcatcccattgtcagaaattgagaagtccttagctttgcctgctaagacatcttctcgaattttaaccaattcagaatcttctaactgggccattctgattctttccaacaaatctgactgaagtgtcagattaaataatttctcagtcaccaactcaatgtttgctctagtcatttccgaggctagctgagaggaaatcatgaccatgttggatatctgatcaggtccttttctgcttaaggcatcagccacaacatttgcctttccaggatgataca

SEQ ID NO: 291438 - DNA, 529 bp, Cannabis indica
gtacggtatcaccattacctaagaccactagtgtaccaatgcccgctccagatgctgatgtgccacagaaccttccagtaaaggtgccctttcctcaggctttgaaatccactgggaaggtactggaaagtcatagtgaaatccttgactttttgacacaagttaaggttaacttgccattacttcatgtaatcaagcaagtaccggcttatgccaaagttatcaaggatctatgcactatcaaaaggaagcaccatgtcaagaaaactgcattcttggcagaacaagctagtgcggtgatcgactgcaagacaccgcttaaatacaaagatcctggttgtcccaccatttcatgtcaaataggggaacaggaatttggccaagccctcctggacttaggtgcaagtgtaaatctcatgccttattccatatacttgcaactaggcctaggagaacttaagcccacatctgtggtgctacaattggccgatcgatcagttaagaaacctcggggaatagttgaagatgt

SEQ ID NO: 291439 - DNA, 385 bp, Cannabis indica
acactattaattatccattgtttataatcccaataatcgatgatactctatagatgatttacattgcatagggaaaaaattaccgttacaccctttcaatgtaatttatccttaaaacacttagccacctataaataatattttagtgaactaatataatcactaaaatgagtgctccataatttatctctatttagccaagctcgaaggaaattatcgtttcacttctatgttcggatagaagctatatattccgtatctatgattagcgatcccactcaattgtactatcacgttcctaacatgtacgtatcactcaaaccaaaagatgttggaaattattttaccaggatcttagatctagtcacaagtatgtttattaaca

SEQ ID NO: 291440 - DNA, 517 bp, Cannabis indica
ttgttaaatttaaggacttttgtctaatttcattcaattttattgttttagaagtgattgtttatgtactaaaccatgctcaccagactttgatatttaccaaatcattcccctcaaactttgatatgaattaaatcatcccccttgaacttatattcatgttagaatttttttactgatagtagataaaagtccttaaatctaataatcttaataattcaaggggaatttttaacggccaaaaaagttcagggagcatgatttagggcccgtttggcacagcttttgaaaaagctaaaagctgctttttgaaaaagctgtgaaaaaaatgtgtttggcaaacagtcaaaaaacagctttttgaagaatttttggagaagctacagctaaaagctaaagctgctccaacccaacttttaaaaaaagttgttttgattaaaagactataataattttttttgtactaaaatcatatttacttatttattacacattaaaaaaaataaactaattataa

SEQ ID NO: 291441 - DNA, 646 bp, Cannabis indica
attttttttaaaaaaaaaatattggcttacagtaacacgccaaacgcgattggataaacataccccaacacacttgactcgtcactatatatatcatgtattaagaaaattttaagtggctaagtatacactacttaataaaaaacaattataattaatatattatttttatttaaaaatgaatgtctgtttaaaaaataagtgatacacacgtatacactaattattaataacacaccaacactttacctttaatttttttttaaataaactattttaactctcaaatgaaaagaaaccctaacagctagatatttctctcagtcgcctcttgattttctgcgttcatctctctcagtccagatgagcgaacaacctctctctctttaaaccgtcgacgacaacccaccaatatgttctcttcctctcaattctttgtgcgaactcagctccactgtcggtcgtcgccccacagaaacgcccaagacagtagcctgaagactcgaacaaagaccccccactgtattggcgtcgttattttccctacgaaaattacgagacccaaactcgtgctcttcttcctcccactctccgtctcgctctgtcgtggatcactagacgagtggctattcatggagatccgagc

SEQ ID NO: 291442 - DNA, 555 bp, Cannabis indica
ctttaaatccctaaaaaaaacaaaaaaaaaacatacctttgacattttcagagtgggtcagggttgcgagttcgtcggagtgggttgcgagttcgtcggagtgggttgcgagttgggctgtgtgctaaccgtggtggctgaaatgggttttttcagtttcctgggtttgttcggctgagagaaaccaagagagaggaagagagagggtttcaaatgagaggggtagtttaggaaaattggtaaagtggtcatatatgaccaattttaataactttgcatttaggggaaaaattatagggtaatttaagcatattaattcaaatttccctatcattattgtattgtgactaaaaggtccgtggctaaaagtcttagtcacaaaaattataatttattgtgactaaatgtatttttagacacaatatttgttgtgactaaaattaaattagtgacaacttgtaactaaatactatattttaatcacaagttactttttgttgtgactaaaaaatcacatttagttacaaaaaatgtatgttgtgactaaaaagttgt

SEQ ID NO: 291443 - DNA, 600 bp, Cannabis indica
cgacttcttgtgctaacagtgtcccgatagatgtctcggtaacagctaaatacaatagcaatggtactcctttactggtgacatcataacctgaggagaagacaacacacttttaatcctgtcaaatgaattttgctgtctttctccccaataaaatgatacacccttccgcattatggcctgtagtggatttgtgagttccgccaaagctggtataaaacgtcgtaagtatgatacttttccaaggaagctttttagttcttttgctgactgtggtgctcccatggctaatatagctttagttttgtcttcatctatgcttataccctttttgtgaacaacaaaccctaagaattttcctgcgctcacaccaaaggtacatttaagaggattcattttaagtttgtatctttcacacctttggaatgctctctcgagatcgcgaatgtgattaaatttattttgggatttgacgacgatatcatcaacatacacttctacgttctcatgtatcatatcatggaatattgccgtcattgctctttgataggtggccccagcgtttttcaaaccaaatggcatgacagtgtagtagaagtt

SEQ ID NO: 291444 - DNA, 593 bp, Cannabis indica
cctttcatgactaaattttagtctgaagcatagttttttggttgttaaaagtgtacaataaaattcaaatgaccaatatattaaatttattgtgactaaatttaatatattttgtgactaaattttagtcataaaaaataacactatttgtgacaaaatattttagtcactaaatcttttctacgaccgactttcagtgactaaatggcgactaaaaataattagtcgtaaaaaaatttaggtgactaattaatgagttttaatgactaaaaatttagtcattgaaaaagagttttcttgtacggccatgtgtgcttgactttgaaggatcgtgggtaaagtaccttcccctgattgagttctcttataataacaactatcaagcaacaattgggatggctccttatgaacttttatatggaagaaagtttagatcaaccattcactgggatgaagtgggtgaaagaaagttcttgggtcccgaagctgttcagagaacaagtaaggcagttgacaagattagagcgcaaatgctcgcggctcagagtaggcagaaaagttatgctgatccaaagcgtcgagatattgatttt

SEQ ID NO: 291445 - DNA, 704 bp, Cannabis indica
actagaaactaaaagtttccctatcgataaaaagcatgacaataccccaaataacataaaaatgagaaaaactagggttcctgaaaatcccccaaagggtagaccggttctgcacccgaattctggttctgggaattcctgaaccctcatccggaatttcggttgcacaaccggaattctggttcctcgcaaaaaactatcaaaaattcataacttgctcaaatcaaatccaattcaaacaaaaccttccacaccttttccaaatacccctctaaacatttctaaagcatcaacacagcccagaatcaaaaatcaccatgtgagctccaagctttgagttcaaaactcaaacttggctaaagctcacctacaagcctcaaaactagatttaaactacataatcatgcataataaaactgcagaaaccattctcaaactcatgcaacaaacacagcaaccaatttcgaaatttctctttgaaactaaagcttttgaaccaaaaactctaaactagattaaagccaaccaaacatgcaccaaacaaattcaatccactcaatccaacatgcttaaaacctctgaatacaacatataaacacagcagcaacaagcaactcaaaactagcatgcaacactcatcttttcatccaaaaattccaagaaacttaaaagagagctaatagaaatcataccaattaacttgt

SEQ ID NO: 291446 - DNA, 1553 bp, Cannabis indica
gtttcatgtgaggagaaatataatagccatcttctacatccaatgaaagcctgcagagatcaaaataagattcaaaaccatagccaccatgaatatcaggttcaaccaagtacagagttctcgaaattcgaatggaatccagagtccggatcaagaattgaggctttgcttgagcgaaatgcaacttagcgaaatgagattccgatatcagattgcgccatttcttgcaaactgatttgcagaaaacaatgcttatagttgtgagaccaaagaaaatttgaacaaggatttgatcaggaatatcacttatggtgaccgaaccagacatttgaatcagctcatcatcaaaatgactcttgtcgacatcacaaactatagatgttcgttttcttttcacggccatattctcttttgatttgatcaatgttacaagcataatgcatacacacaaacacattcatcagatacagaatatatatacatatatacatatatataaaatgaaattcttccaaaaaaaaaataatatataaaatgaaaaatgaagaagatagcggattcgtaagagttaatacaaaatggagaagaagtaagagattaccagagaggaggaagaagcagagtcgatagcagttgcagagagagagagaagagtgagtgaggattatatgttgagagactcaaatggttgaattttcccgctcgatttattaatctcaaattgattgattaaacaaattctgatttcaaaaacaaatttgtgttggttaccttgcctggccccaaccactatttcttcttttcaattgtttagtagttaaataatttataaattttttaatcacaaaaataataataaaatttttgtttttaaaaaacaacaatatatttttataattatttttattttttaattttcaaaacaaaaaaataaaattgtgttctgtaaattttagttttcatttttatttattaattttagagaaaataaccttttggattctgcgtttttgtaaaagttaccaattggactttttgttttgttaaatgacaaaatagaccatgtattattcaaaattgtacaaataggacattgaattaattttttgtcaaaataaaatttaataataatttaatctaaagatgttatgacaaaactagttacattattaacaaaaaaaaaattgttagaaatggagctcatgattcctttttaacctattttagaaatataaagtccattttatcatttaatataacagaaagtctaattggtaatttttgcaaaatacaagatctaaaataatatttaccctttattttatttaagttgagtttaaactagggcggggccgagatctggcattggggccgaaatctaaggttcaagttcaaggttaattcatctatatgacaaacataaatcaaagatgtccctaaaaagttggatagcaaactaataatatcctctaaaaagatcctaattcattaaaaaaagaggatcttactacaaaattcaaaaaccaaagctaacaatcaaactcaaaagagct

SEQ ID NO: 291447 - DNA, 634 bp, Cannabis indica
ttacaatgcaattaagaagaagagaaatttaatataacaaatgtgaaaatgaagaacaaagagaatcaatatattagaagaataaaaattgcatgaacttacacttgagtcttgccaaagaaattagcctagaaaaggcattgtctttacaccaaaattaataaagtaaaataaagaagaagaaaagaaaaagataaaattttggtataataactctaggtaaaatctgatgtttttacaatgcaaaatggtgcaatttatagtgaaagttggctctccaaaatggtatttttcgtgtaccatttagtggaataaatggcacaaaatactgaggaaagtgggagacaaactgtcccacttgcatcaggaaaagtggacatgtggggactgggtgttgaagagagaggggttggcgagtgggtccgtgtcaattgctgaagtgagaaggagccaacaaacacgtggcaagctcactaatgatatatgttgatcaatggcccaatagctcaatcttcccaaaaaaaacgtgatgagagccatcatatttggactataattctttgcatagaagcccatcttaatttggtgaagtccaagtccaaaaatattgctgaatacatttgacacttaattt

SEQ ID NO: 291448 - DNA, 517 bp, Cannabis indica
gcaggaatttttcaaaaatccaaaactcgatcaaatccaacccaaatcaaacaaaaccttccagacctgttctaaatgacccaaataaccattcaaaggcaacaagactacccagaactcacagattcacaaaacaccattaaagctcaagctttgagttctaaactcaaacttgagtaaaatcacctaacatgcattcaatctatgcttcaaactcataatcaagctaataacaacttcagaaactagaatcaaactcatgcaaacagaacagccaccaaaacctccatttttctttgaaaacccaagctttttacataaaaatctatccaactagaacaaggaactcaagcatgcaattcaatctacttaaacctaattaattcacattttaatcaaggaaacaacaacaacaataaacagcagcaacatcaccaaaatcatcatgcattactcaacttaattcatcaaaattcaacaatttttaaagaacaaagaagagaagctaacctagctt

SEQ ID NO: 291449 - DNA, 443 bp, Cannabis indica
aatacttgagctctaagtcctctaattgtatccaaataggcactaatttcacatcctctttcttaacacttgaattcgggtcccatggcttcataatgaccggtttcctattgaaaaaaatatagcccccattcaacacttcatctctttgctcaatagaatgaaatctgattaagaacactccatatgctaatagctttactttgtccactttctcagaccatttttgttttgcaaaaccttcaaggatgtgcaatggtggattagatccaagcacataacacaccaaagaaggcttccaatagttaatctcatcctttatgtcctctaaatctatcttcaccttcctatcctgctgagaacttttaaaagaattctctaaattcctcacaacactggcagatctcagaacagggggaatagggtgttgggttttatgccct

SEQ ID NO: 291450 - DNA, 818 bp, Cannabis indica
ctaggtctgggttcgggtttggttctttgtttgggttctagtcctagtctgagtcccacatctagacaccaagcactgttctgtttaggccccgttacccgaatcctgagtcaagatctggatcactgtcacgggtctcagtctggttctgagtttggattcgggattgagactggggtgcggttctaggtccggacccttgttctgtgtccctagtctggttcccggtttgggtctgagttcaggtttgggttcaggtcctgagtccaggtttgtgttcggatccaggtccggctcccagttccggtctatgtcttatttggagtcccggacctggtccggttacagttctagatctaggtccaattttagttatgtttccaagtccaagtcctagttccattcctaggaaacttccagttttggttccaattttgggtcacagggtacgggttcgcgtccacttttgggaccttgtcagggtttgagttcagggctgggtcccaaatccagacaccgactataggttttgtccaagccctgggtccagatccgtatcccaatctcgggtcccattctggtttaattttttgtgccgtgtcacgaacatggtcctaggttcaagttcgggagggtcgggtactatgtcccggtcctagttctgtttcccaggtcactatcctgattcttgatccaggtccaagttattgtgtgggtattggtcccggtctaggtttagatctcagtctgggttttgatctgtgttagggtttgggtttagctcctggtccttgtcctagtcctagttcggttctagt

SEQ ID NO: 291451 - DNA, 551 bp, Cannabis indica
ttgagtgttaaaaaattgtaaaaagttataaattcagagtaagtaacttgtgtgtgacaactggttaaagaagccaaaattgaagtctatgattagaaagtagaagtaccgctagaactttcctttgtttgaagtaatagcataataactaatatcttttattgcatactaataattaatttaagatgaactttccaaagtatttttgaaacatcgtgggatatataaatgcaatacttttgtataatagcatgtagcatgttgtctttattagtattttttaaattttaaaatgaaaattaaaattataaaatatagcttaagaaattataactaagtttataaactggtaaaggttgtgttggtaaatgttgtgttggaggctagggtttttgctctagagagagaaatttgttagattaaattttggtagcattatttagctaaaattaatcaattataattaacgttttctaatcagaacattttgtcaaatattagaatattctgttaacattttgacagaaaaataaataataacattaaaccaa

SEQ ID NO: 291452 - DNA, 531 bp, Cannabis indica
gccagaagcgccggtaacgctcctcaaatgggcaatggagttaagtcattacgacttacactacataccccgtatctccataaagggacaagcattggcagatttcatcaccgaatgtaatgaagccgaggcaaccgcgaacacatcggtaccgttggtcccaacatggaaagtctttgtggacggagcctccaactaaaatggatccggagcgggggttgcaatgatatcctcgagtggacttcgactccaggcagccctacggttcgacttctcagcttcaaacaatgaagccgagtatgaagccttgatagcagggctgagattagcaaaggctgtgggggccaaaagagtagaagtctacagtgactcccaactggtcgtgaaccagatatcaggagagtatcagacgcgcggcgaaagaatggctgcatatgtaacgatagtccgggaactgctccacgagttcacggattataaagtagaaagaacccccagggaaaagaacgctcatgcagactgcctggctaa

SEQ ID NO: 291453 - DNA, 511 bp, Cannabis indica
atagtgatagtgtcactactgcgagtgtacatcggcaccactaagtagaaccctatttctacatcgattagtgatttcgttgcaaaactggtgactccaataccctacacctaacttgattacatactttgtgtcagaggacccctaaacatctacaatgatagtgtcactactgcgagtgtacatcggcaccgctaagtagaaccctatttcggtatcggttagtgattttgttacgaaatggtgaattcaacacaatacacataacttgattacaacattgtgtccagaggacccctaaacatctacagagatagtgtcactactgcgactgtacatcgacaccactaagtagaaccctatttcgatatcggttagttatttcgttacgaaactagtgactccgatacactacaccaaacttgattacacactttgtgtcacgagacccctaaacatctacagtgatagcatcactacgtcgagtgtacatcggccccactaagtagaa

SEQ ID NO: 291454 - DNA, 640 bp, Cannabis indica
aaatgatatataaaccattcatccaatgatatactatttaagaaaatttgaaatgaataagctaagatgaataattaaaggataatttcgatttaaaataagaatccaacgatgaaagtcaaagttattcttatttttacacgaaatttacaactacaattaataacagaaaataacatgatttaatataaattcacacacaatttagaaattattaagtattagcaaataacaaagacatgtgaaaatacaaaagtatcatatcttaaataatttccaaggtttccaacaaactgatacattgtcccggtaggcgagagtcaaagtaatcattcattgaatagagttgtcagctcatctaaaatagacaccattctagcaaccttttatttgatcaaaataagaatccaacgttgttctggtaggcgagagtcaaggtcattcttaaattatgagcatccaccattgtttatgttgggaatattttaccaggatctagatttactaccaagtatgtttcgttaacatcctaaatatgaattatctaaaacaatgaaataaacacataagggtttaagaaaaccttacattgattgtagcggaatataatgactccttttgttcaagatctctagccctt

SEQ ID NO: 291455 - DNA, 308 bp, Cannabis indica
agaaaatgagatgcaagaaatgaataaaactgactaaaattgaacaaaaagtggacggacccaaactccatattgtatagggccggcccacttttataggttttttcatctgattattttcattattttaatgccaaataattcaaacctaaccctagtggaatgctataaatagatagtgaaggcttcaggaaatttacacttaactttcacacttttcattcaaaaaaacctgagccttctctctctaccctagccgacaacttctctctctctcttcttcattaagtatttcgaaacacttagtg

SEQ ID NO: 291456 - DNA, 675 bp, Cannabis indica
gtcctaggttcaagttcgggtctgggttgggtactaggtccctatcctagttctgtttcccaggtgtctatcctgattctgggtctgggtcctggtctcggttattgtgttggtttgggttccggtctaggttcgggttcgagtcttagtgtcgttttgggtttaggtctctgtctgggttttgatctaggttcgggtttgggtttaggtccttgtcccggtcctagtcctagttcggttctagttccatttgcgattctgagttcgagttttggtttcagttcgagtcggagttcaagtcctggtctgagtttgggttcaggtcctgatttcagtctaggtccagatcaggctccgggtgtgggttcgcgtcctgggtcttggtctaggttgggtccgagtccaaagttccaatcccgatctgagtctggattaagttctgggtctaagtccttggttctgatcctggtctaggtttgagttgggtccgggtccaggtctagctttcggtttgattttaggtgtgggtgtttgagttcgggtctaagtctttgtccgggtttgtgtccaggtctggaccccgatctaggtctaggttcgtgtccaggtgcaagttcgggtccggagtgcgggtccaagtttcgatctgggtcaggatctcggtccagatctagg

SEQ ID NO: 291457 - DNA, 531 bp, Cannabis indica
actctcacacaaggcccaaaggaaagaaatttaaccttaattaaacaactgttattcattgaataagcctaatactaattggacctaaataaaatctatcaatagtgaccattttattttagcaacctagtccattctaattataaaaattaaatgggctccctatatgcatctaagcccaaagcaaagatataggctcacataggcacacattgatttggatagatcctatcatgttactatgtttatacgcagatgaaagaagattgtaaatttacctgttacaaactatttatttgacctattaacatttgaactattggttaaaattagatcattggatttgtcaacaagttaaccatagcaatttggatcaaacaataataggttttataaaacaagttttgataataaacaatatataaaacacacaaacatgcaacaaactggatagatggatataggatttattgaattaaaattaattaaataattaaattaattttcaaaaactaataaataaataaataa

SEQ ID NO: 291458 - DNA, 653 bp, Cannabis indica
aaagaaacaaggtatttcttttcctataaactgatgtgttttagtgaattattatccatttggattattaattctggacctactaaccatgtttatttattttcttcttatttcagccacaactgcttgaactcggatgctatcttagcgagttgaatcggatagttggacaaaagggtggagatagtccaagatgaagatgaagctcaaaatcttctttaattttgaattaattgttttagtttaagaataatttggatttcaattattagcttggaattttatttcttttttttttcatattgttgcagacaattcctttaattttggagaattttataataaagttttctattttgaaatgaattgcatttatgaattgagcttcaatatcttatcttgtttataccaaaacaaactatatttatatgttttaatgtttgtgtatgtgttttattattgatacaaattctatagtattttcaactcttcaacgagataatactacataaacacttagaatttcatttctatatttatgaataattgttaattctaagacaattattaaaaatttgtttaatagaaagatcatttgatctgataggggtggaaaagttaagaataatatgcagttcaacgatcttttatat

SEQ ID NO: 291459 - DNA, 608 bp, Cannabis indica
tgccaaatttaacatatattttacattactattggagttaattttagcaaaatatttaaaaaataacaatacatcacattgtagatctctattgaagatgctctaatgtggtctaaatttagcacatgactaaaaattgtgccaaatttaatataaaatataacataaaccaaattttacactacaatattatcgctttttatttattttttatcactcgttaatataatgaataacttttatcaaaaaaatataatcgaaactttttacattctatttatttgtttaataggtttttatacacattcaattaatgtttaatgctttacatatttttatggaaaataaaattaattttactcataatacattaaagtagaatggcaaaatttaagtcaaatataacattcacttatttttaaccaaaattagtataaattttataccatctataggacatagtctaatatagatgcaaaattaaaatataactcacagagtcaaaaatgtactccaacaatatattaaaaggtgatacaaattttatatcataacaaatattgtgtcaaatttatatcactatttgctatgatgcaaaatttgtatca

SEQ ID NO: 291460 - DNA, 923 bp, Cannabis indica
cccactgatggcatctacagttttttccttttcttatctgtttttaatgtaaacatattaaaattaatataatataatatatatatatttatatatatatttatgtatttatgtatcacatgaacttggaaattaatgcgtgtaagatatatgtagttctatgtagaacatcccaatcagttgtataatttataacatatagcagtctagcttaattattttttgccaacaagacacaactttagttatagttatactttgctctcatatttaatttattattttttgtcacattacactgccttaagtgtatactagataagttaatgtgcttaatattatttgatttttttattttttaattttaattatgatataaattttttaaaaaaaatacaagtaaaagaaaaacatacattaaaattcctcataatttcaaaagtaaataataatatacactggcatttggttagaggtaatgaaatggaatggaaaggaaatgaatggaaacaattttcattctattcctttgtttggttgtatattaaagtgttggaatgtcattccaatggaatgacctttctaccattttggtggaatgataattccattttgaaatggaaggaaagaccattccaatatatgataagaaaaaaaattaataattttttcatcaattttttttttctgtatttaattttattctcattctcatttccatttttatatttttcattcctctcaaccaaacgctacctaataaatataagtatgttaggataatatatattaattataatttataaatattattatttaatactataatagataattctctaaaaaaaaatactagataaagccgtaaatgggtaaataattaaattatattattaaattataaaatatatcactatttttta

SEQ ID NO: 291461 - DNA, 481 bp, Cannabis indica
aaagtaagggagtataattttttttgaagtgagatcgaggaggtaaaaataaaacttaaaaaaaataaaaatattttaatgggattagaacgtttgtcctctaaactatatgctaagtaacttaataatttcactaaagttaatattaaacatataaatatcatcttttattacaaatatctattttaacaaactaaaatgcatatgtgtttttttctgatttttttttcatggtatgactacttcccctcgcttgtatgtggctccgcccgtatataaagcatcctgtgttgtgtagtatagtaagaggaatgacttttcttagtatctttcttatttgggttaaaggttcgaaatctactacaatttttcttgagagaattaaaaaaggttttgctctctgaaagttagctgttgtaggtagaactatttgtgacaatcagtagtctcgtgatccgtaacgggaaataccgggtaagct

SEQ ID NO: 291462 - DNA, 553 bp, Cannabis indica
cttaataattgttttagaattaacaattatgcataaacatagaaataatttctagtgtttatgtagtaataactctatgaagagtttaaaatattatagaatttgtaccaataataaaaaacacttacacatacaaacatataaatataattggtaattgttgtttaagataaagtagatgaagctcaactcataaattgcaatttatttgtaaaaaaaataattataaaattaaagaaaaattgttttgcaacattatgagaaaagaacagggaataaaaatcccaaactaataattgaaatccaaattgtttttaaactgaaacaattaattcaaaaataaataaacgagcttcatctttatcttggacgaactccacccctttgtccagctttcgattcaactcactaagatagcacctgagttcaagcagcttgggctataataagaagaaaaacaaataaacaaggttagtagtccagaattaataatccaattggtaataattcactaaaactcatcagtttatagaaagaaataccttgtttcttt

SEQ ID NO: 291463 - DNA, 787 bp, Cannabis indica
ctaggtccaatttcagttatgattcaaagtccaagtcctagttccagtcgcggtcaacttcttgttttggttccaatttagggtcacagggtacgggttcgggtcaacttttgggtttaggactatgttcagatccgggtgtgggttctggtcctcgtcagggttcgggactagggctgggtcccaaatccagacaccgactacaggttttatccaagctctgggtccagatccggatcccaatctcgggtacgagtttggttccatttcttgtgccgggtcacgagctgggtactaggttcaagttcgggtctttgtcaagtaataggtccatgtcctagttatgtttcccaggtccctatcctgattctcggtccaggtcccggttattgtgtgcatttgggtcccagtctaagttcgggttcaagtccaagtctcggttcgggtttaggtctctgtcttggttttgatctgggctcgggtttgggtttagatcctggtcctgaacctggtcctagtcctagtttggttctagttccatttgcgatttagagttcgagtttttgtttaagttctggtcagagttcgagtcctggtctgagtttgggttcgagtcctaatttcggtctaggtcaagatcaggctccgggtgtgggttcgcgtcctgggtcttgctctcggttttgtccgagtcccaagttccaatttcgatctgagtctggattcagttctgggtataagtccttcgttctgatcctggtctgggttcgagtttgcgtccaggttc

SEQ ID NO: 291464 - DNA, 844 bp, Cannabis indica
ttacctctgcattaaaccgtttaaaatagtcttgtaaagactcaccaggttcttgtttgatgttggccaaagtcgtataaggcggcctataggtcattgtagcctggaaatgtgtgaggaataagtcgacgaaggtttcccatgtcgatattgatgcctcaggcaattgggtaaaccaatcgtgggcgttctcctcgagtgttgccgcaagaatgcggcattttgcaagctgtggtacctgatccacctccattatagtattgaatttttcaagataatctatagggttagaagtacctttatactttagggattcggatagacgaaaccccttgggaagttgggcttgtcgcacttctgtagtgaagggcgaggtaccatgcaacttgtatatgggctttcgttgctgctcgagcattttcaaagcttgcagaagcatgctttggtcaatccctccagtcgcaggagtcggggctgctgcgactgcgggagtcgcaactactgcggcgagatttgctgggacattgatcccagtggtcgcgatcggcgcggtaggcgggttattgtaagtgttgacaccctgatcgtccgcatggggatcacggagtgtctccgtattatgaggggcgcgagaacgcgctctaaaaactgcgttgaggtgatcacgcagatcacctcgatgtacctggtaatgtcctccctgttgcgtctgtacagagccggaccttgtatatctacttggtgtacgaccatgcgatgacgaagaggctgattctgcgtcgttgtctcttgatggtcgactgcgaggattgcgtcgttcagggtcttcatcaacctgcgtgcc

SEQ ID NO: 291465 - DNA, 1009 bp, Cannabis indica
cccaaccggcacgccggttcccaaccggaagtccggttcctgggaccaaccggtcgaccggttgacacaggctcccaggaaccggaattccggttctggtctgggaaccaaaattccaacccccacaactcaaattaatcccaaacttttcaatactttccagaacacctgtatgcactaaaataaaccagttccaagcaacaaatctcaacaattcattcaaatttcaaaaacaccattgaagacctaacttaggttttctaagctctagcatgaataactcacaatctaaagctcaatcccagcctagaacaaataacactactcaacttcaaaaactgaacccaaattgaattcacacacacacagcccctaatcaagcttaaacaccaaaacatatccccaaaacttaaataaaacattgagtaacattaccaaagagatataccttgatttggattctataaacaagctggaaactctccaaattcaaccaaaaattccttccccttgctggatataggcagcacgaaagagagagagagagagagagagatttctaaattcactaacttcctttctaagcttctttctatttttagccttttctttctttctctttttttttttttaaacttatattcagcctaaggaataaacccaaataagacaaaatataacttgccaaaagacctaattgcccctttaaccaaaataaaatagttataacccctcaagggcaaaatggtcaaaaactaatccccgaaaattctaacgcctctactatttaacgataataccccgataataatctaaattataaaatgcaactctctaggcccaacgtcgctttccacagcttccgaacacaatcacagaaattaggtaattaaatataaaatagcataaaaacatatatgatatataaaatatatttctaaattatgcattccataattattaatacataagccttaaataattaataatacaaagtattattcatagg

SEQ ID NO: 291466 - DNA, 343 bp, Cannabis indica
catcaactatatatttatgaaaatttatgtagtctcaggatcttctctagctattttattttagggcctagaattttaaaaatgagttttttatttgagaaataaagtaaaattcaaattattctttacataatttttgtaggaaaaaaagttttttttttgggactttatagtctttttttttttttttttattttttttttttaaataagattattacataaatattacaatttttttttattttttctttattttttaatgaagattctacatctatcgctaatcttatttattattttttttctttttctattatttgctttaagtttaagtaactatt

SEQ ID NO: 291467 - DNA, 919 bp, Cannabis indica
aaaaaaaacttaaaaaactaaaatattatttatggaatttaaatatttttacgggttttaagattttatttatataaaaacaatattttatattgtatcattattattattattattattttttattttgtgttatttatatattattttgatgttattttttgttactttgacgtggtttttgtgttttataaaatatcattatgtaatttttccattaataatttatataaagatgagggtgcttctacaattttacacgtataatataaaaaagtcatatgtgcaatagattgtttgaactctattttcggtgtcttcaaattttttcgaaattttttcaaaattttacaaaatgtacttaaatcactacaatgtacacgaatatagaaaaaaatttagacttaaattttttctcggataccgaaacagataaaaatgtattagtgtatccatttcaagagatgtattttaagaagtgcattaaattttatttaacatgctattttctattaattttttttccttaattaattaaaacaatttttccaaaatcttttttctggagcagattggcaagattcttctatacaaacttcatcctctaagctcttcttttctccaccaattcacagtatacactaactgcttctttgtctcaatataaacactttcatccttctgtaaactaaatttcaataatttgcaagcttataacatttttggtcataatgcagccttgaaatattataattaacatttttgggcatatcttatatcagcaaagtttgaaggtttcattcatcaagatacacatttcaatgtatatatattatgccacaaacctttgagtcatgatattaacaataacaggatatttcactactttgttgcctcactactaggcattagaaaaggt

SEQ ID NO: 291468 - DNA, 636 bp, Cannabis indica
ttcatacaagctgcttgttggattaacgttgctcgaacccagacatctgactcttgagtaagtttctgatttcctttatgcttatctttgcatgtttatatgtcaaatgcaccctctactttgctgtagaaaatgtttaggaaaccctaggtccagaaacctctgcgattcttctttatcatgtcttcgtgcgattttacagtcataatacttgtttctgaactgcgtaacgtctatctttcatcttgcttattctaagcttcatgaacttttttgccctaactcgagaaaatttttgacttcttgagttctgacttttcttcaaacataatcgttctttaatctgttgagtactcctggtcggcatatttgcttgtttatcgttcgatattctgaccaaacactcatcttgtgtgttgtcttttgtagatgaactcaggtgagtcttgggaaaacggacatcggatcgaccaagacctgcttcaacttctgcacgaggatcatcctcgtctttgttctagtccaccttcccctgcgaaaaggcattcttcaaaccctgtatccagccatagaatgatggctcgtacaaagaaaccacgcgtctggctgacgcatctgaccctcaagtggctcggc

SEQ ID NO: 291469 - DNA, 768 bp, Cannabis indica
tcaaaaccctactgccattaaaaaaggcagtatataatctttcttttcctttttgcttagaaaccctagcaacaaaaattcctctcttcaaaacaaacaaccgacctccttcatcttctctccttcttctctttcctttgaacagcagaccaaacccagccgagcttcttcttctccttccttctctcttgctgcagatcaacaccaaccgaaacaccttgtgtttcttcctttcccttgctgcaacacaacccagccgaaacaccttgtgtttcttcctttcccttgctgcaacacaacccagccgaaaacacctattttcttcctcttctctttcaagctcttcaagagctttcacacaagaacctacacaaaatagacaaccaaaaaaaataataacaaagataaaataatctttgtttgttgatgagagtagacccgaaaacaaagtgcagaaaaataaatgcaaaagacaaagagattgatttcggagttcccctcaaatcaagggtacatctccgtcaagcttccctcaaagacgcttgattcttcactatgcatgtccaaaccgattacaaggatttggagattcctagccacaaagttcagtaggtaatctctattctttctctcttttcttcactttattttctgatttacataacatatctctcactaactctctctatttctctcttgtttctgaggtgggttacacaatgaaacacaaggctgctgccttttcttctctgctggccgaagtggttc

SEQ ID NO: 291470 - DNA, 515 bp, Cannabis indica
ttccaatcccgatctgagtctggattcagttcagggtctaattccttggttctgatcctgttctgggttagagtttgggtccgggtcaaggtctaactttgggtctgattctaggtgcgggtttgagttcgggtcggagtctgtgtccgtgtttgtgtccaggtctggaccacggtctggctctaggtaagggtcaaggtccaagtttgggtccgagtgcgggtccaagtttggttcttcgtcaagatctcggtccagatctaggtccagcatttcgatcacagtcttggtcttggtccatctccaggttcatattcgaatccctatctagatccaattctgtgtttgggatcgttcccagatttaggtccaggtccaggtctcagtttcggtctgggtacacgactgtgtccgagcccgagttccagtctcagttggggtctaaggttatgtctgtgttcgattctacgtctgggtccgggtcctggtcacggtcctagtcttgttctagggtc

SEQ ID NO: 291471 - DNA, 558 bp, Cannabis indica
agcccaaataaaaaaaattacacaaataccacttacacacaccttcaactcaggatacatgcttcttgggtaaccatcgtgcaactacgcagcaacccaacgcaaccgaaacgaaaattcaatgagaaagagaaccaccattaattccggcgacttcacctgagaagactaccagaatcaatcaaaacaggggttgcttcgaattcataaaaaaggcgtagaaaaactactacgaaactaaaattcaactggaaatctaatttaatttgcataaaactaatatcctgacttaaatttttagatccatgaaaggcagatctcaaaaagttgaactggagttcccaaacaatccaactcaagtataatctaaaaaaaattacatcaatactatagtaaaatgtttatcctggtgtatttttgttgttttccaaatttctaatggtgaatttattcatattaaatcattaagagacatgtagatagagttacgtacgtggaaacactgttttgatttttaatgtttcacaacagttgcattacagttgcctaaacattttg

SEQ ID NO: 291472 - DNA, 540 bp, Cannabis indica
gcacatttagacccgtaaacccagaaaacccgactacccaccccgacccgccgccaaaaaatcgattacccaaaaacccgtttggtcgggtcaggttcaacccgaaaagacgccaaacgggtttcgggttcgggtttgattatttgtttttcgtgagctattttctgaagctcgtgagtctgggcttcgactgatttatcatcagtcatttgaaacttcaggtagcggctcacaacatatttctttgttcccgcctcctcggtatcatattttttctgtaatgcttcccatatctccttggcagatttgtcagaattataataatcatacaaatcatcagacaaaccgttcaaaataaaattcttatacagaaaatcattctctacccaggagtccctttccttaacctgcgattcgtacttctcgacttcatccttcttctcggcaggaggtggagtctcagacataactggtttcaaaacagtaagcacaaacacaactattttcatagtcagaaaaaacagcatcttctgtctccaa

SEQ ID NO: 291473 - DNA, 537 bp, Cannabis indica
gttgtccaaaaaataaaaattaattctaagtttaaagaccgcttggccgatcatgatgtcttaaaggccttacggccatatataatatatatatatataaacaggaggaataaaaagatcaatgttcaaacggctggagtcccaggctctggattcggttcttctgagccgactggagcaggaggatctgttgtttgagcaggagaagcatcagcagcctgatcagaagcttggccggaagttgaagcagccacctctttcctaccataggcaacttgggccgcgcagtactcgaggtacatttccttggcatcgcctaagtagtcgaagttggcctggggattaggcttcaaaaaatcaaagaagagctcgaggtcgacagtctccaaagcacctaccttctccctcaagcggttcgcctcgaccgcctgagcgtccttatcatccttcagccgaagaaagacctaccgcagagatgtcctctcatcttgaagacaatcaacatcagcagataaagactcgatggtttcctcaaag

SEQ ID NO: 291474 - DNA, 623 bp, Cannabis indica
gcctcttcaagtttgatgaagccttaagcacggtcgagaaatcactcattgagtctaccgggccattcttccttatgtccttccaaagttcatcgaggacttcaatgccccccagtattacggacaactttccatcttcagttacccgtgagaccttggttgcttccgtcatgaacctactgatgtatgctcggagaggctcgcctggtctttgcttgacttcgaccaggtctcctaaatgcaatagaagttggcgagaggaggagaattgtgcatggaattctgagaagaaagtttcaatgagttgaactttccaggggctagcttgaaataccattgctgggcggcttccgagatggtggcaggaaaaattctgcaacatacgtcacctcgtactccctgcatccatttgcatctcgaaatacttgaggtgggaaagatgatcttctcttccagtgtacatcttccaagttggaattttaaacttgtggggtaacgccaggagattgatctcgagagagaaaggggttccacgtgctcggtccaactcgagatcattgtttctttgtccggccatgctttggaacatattctttagttcgtccagttgtgcctgcacagct

SEQ ID NO: 291475 - DNA, 481 bp, Cannabis indica
gacccccattccctttttcttaatttagggtttggtacggggcctaactgctggaattttactcttttttacagaatagaaaaatgtctgcttctggctcaaagtcctcaaagaaaagtggaaagcgcatggctactcttgaggaggtctccttgggacccgttgcccaggaggggtataagtcccgggcgaccggatgggaagcggctgagcttcattccaccttgacctgtccccaccaactggagaacattgtggaggttgctggaatcaagccttccacctcaggaacctaccatcggccacctcgcgacgcggagacgcccaaccacaattacggcggcttcggagcctggagccaaacgcacctgatggccggtgccatgcttcctcttcaggattactttgttaattttcttgtttttgtcggccttgcgccataccaactcattccccaagcttaccgcctgctctcaggctt

SEQ ID NO: 291476 - DNA, 708 bp, Cannabis indica
cagcttgtatatgggcttacgctgctgctcgagcatcttcaaagcttgcagaagcatactttggtcgattcctcctgtcgcaggaggtggagttgctacaacagtggggctcgcagccactgcggcaaggttcgaagggatattaatcccagtggtcgcgatcggcgcgataggcgggttgttaactgtattgacaccctgatcgcccgtatggggatcatggagcgtctccgtgttatgcgggccgcgggagcgcgccctaaagactgcgttgagatgatcacgcagatcacctcggtgtacacgatagtgtcctccttgctgtgtctgcacagagccagacctcgtatacctgctcggagtacggccatgcgaggatgaagaggctgactctgcgtcgttatctcgaggtggacgactgcgagggttgcggcgctcaggatcctcgtcgatttgtgcgctctggttaggcaaccttgcagattggtctcttgacgtcgggtgattcaagtccaagatttcaggatcagttcttcgttccctgcgtgcacggttagtttgacgtcgggaaactgttacctgagggttttcgttacgaatggcagggacccgaggagggcgtcgagctcggctctgtccatctacctcggcttgtagtgctcgcagctgatcctggattgcagcgtattgatcagtcgtgagctggac

SEQ ID NO: 291477 - DNA, 531 bp, Cannabis indica
aatttcggttctgggaattttcgaaacccatccggaattccggatgcacaaccagaattccggttccttgcaggcagaaagtcaaaatgtcataactcagtcaaatcaactccaaatcacataaaaccttccagacctgttctatatatcccctagaacatttctaaagcatcaaactcacccagaatgcacataaacaaaaagtgccattaaagcccaagctttgagttccaaaactcaaacttggttaatatcaactaacatgcatccaaaccatgattcaaactcatattcaagcatataaaaattgcagaaactaaaacctaactcatgcaacaactacagcaacaattcacaaaaaattcactttgaaaactcaagcttttgaacaagaaatctatccaactagagcaagaataactagcatgcaattcaacctaattaaacatacttaaatcaacattttaaacatggaaacaacaacaacaattaacagcagcaacatcatcaaaatcaatcatgcattactca

SEQ ID NO: 291478 - DNA, 582 bp, Cannabis indica
tcgcgtattctgacactgctaagtagatggataggacttcgccggtcatgggctttgataagattggaggttgccccaaatgcgtctttaaggcttgaaaagcctcctcgcatttttcggtccattggaacttcttattgccttttaaaatctgaaaaaactctttgcacttatcagaagatcgcgatataaagcgatttaaggcagcgactttacctgtgaggctttggacctcttttggcttagttggtgatggcatttccaccaacgccctgatcttcgcggggttggcttctattcctcgttggttaaccatgaatccaaggaatttcccggagccaactccaaagacgcactttagagggtttagccgcatcttatatcgacgcaatatatcgaacattgcctgtaaatgggcaatatgatccttcgcatgttgagatttcacgagcatatcatcaacatatacttccatggtgttcccaataagatctgcgaacatcatgtttacaagtctttgataagtcgcacctgcgtttatcaaaccaaaaggcattactttgtaacagtataatcctcgat

SEQ ID NO: 291479 - DNA, 529 bp, Cannabis indica
tctctgtctgggttttgatctgggttcgggtttgggtttaggttcttgtgctagtcctagtcctagatcggttctagttctatttgcgattctgagtttgagtttaggtttgagttcaagtcagagttcgagtccttgtctgagttatggttcgggtcctgatttcagtctaggtccagatcaggctccgggtgtgggttcgcatcctgggtcttggtctcagttgggtttgagtcccaagttcaataccgatctgagtctggatttagttttgggtccaagtccgggtctagctttgggtttgattctaggtgtgggtgtttgagttcgggtccgagtctctgttcgggtttgtgtcagggtctagaccccgatctgggtctaggttcgggtccaggtccaagttcgggtcccgagtgcgggtccgaagtttgggtgtgggtcgaggagtctcagtccagatcttggtccaacttttcctatcccacgtctggatcttggtccgagtccatgttcgtatccggatccc

SEQ ID NO: 291480 - DNA, 673 bp, Cannabis indica
agagagttatggccaaaatactatcagtcaacgcagcagaaaaaatatctcgtttgaggtttcccaaaaatttaaattcgaattggaatttaaacatgtgcgttttttccatttcaatgcctatataaagggaagaagggagttgatttcatcaagcaattttagagagaaaaacagagagaatacagatgcaaagtggagagatcaactgcaatattggaggcattcttcagagggttttcagcattcttctcttctctattttcatctcttttcttaaagttaatatgtgtgattgtgctctcatgaacatgtgtagctaaacactttattagggttagatggatattgtttaacattgtttatggttttaatatgatttattttccccctaatttctatgtattctattttatttgtgcttaattacttttaattgcctgatcaccaattaactgtctatgattttgatgcgagatctgagaagtgagtgtcaaatatgctatagtagaatagaactgaatttcgatataggacgagagtacctatatggtttagatagcttatagggtttctgtgtttaattgcctgttgcatgttaaatttatcacgagagtagaaagttttacatgtaattgagatttatatatctgagaagactataaattacctt

SEQ ID NO: 291481 - DNA, 482 bp, Cannabis indica
cgcttactttgtcccgaaccaccagatgttggggtaactttccttttctgatcagtggtggagtcaccaccatccctaccatagccagaagtaggaaaagtgggggttccaccaacacttggagtcactcggggctcctgatgaaatttgaccgcaccctcagctctaaaagccttttcgaccatttcagcatatgaggttgcttcagtggtagtaatcaccaaatcgtgcctaatctttgcactcaaatcggccatatacttttctttcttgctaaaatcagttggcacgattcccacagcgagcttggccagacagtcaaacttagtagtatactccataaccgacattccttcggtttgtaccaactcagtgaactctttccgcttagcaatgtggagggcttcattgtagtatttagagttaaacaactccttgaattcttccccggtcatcactatgacgtctcgagtgagggttat

SEQ ID NO: 291482 - DNA, 72 bp, Cannabis indica
tcttctttcatctatgtatgacctagcaacatgataggatccatccaagtgtgtacctgtgtgagcctatgt

SEQ ID NO: 291483 - DNA, 595 bp, Cannabis indica
gtggtttccccaaatatttgtttgacactgacttgttgtaaatttaaaatgattatatatatgtaacaaaaatcaaaaagtttcacaattgaaaaataatactcaaaaaagagatgtgaatgattttctacattgagttcgcacacaggacaatcaattaacaatatttttgttaaaagaagaaaggaagaatagaaaagaataaagaaaccccaatccttgaagcactgacagtaatttacgtttagaagagagaagaagaagtttgaaatttgaatattaagcgaggagaataggtgcggctgacttggttcttaccttgcatataattgccttttatattaaggttataaggagaatttttaattacaaaataatttcttaacaaaattagtttaagcactttttctaatataaatcattttattatattatttaagataactatcttttttttttttactttttaaaaaccctataaaattagttctttaaaattatttatttagaattctataaaatttatcttttaagaaaaatagagaagccattaaaattgttttcaaataatcaagtgaatgtcatttcactaaaa

SEQ ID NO: 291484 - DNA, 730 bp, Cannabis indica
aaaaagcatggcaataccccctaaaacataaaatcgaggaaatctagggtttcagaattttccccaaccggtagaccggttgcccaaccggaattccggttctgggaaaattcagaacccccatccggaattccggatgcacaaccggaattccggttcctcgcaggcagcaaactctaaaaattcataacttgctcaaatcaaccccaaatcacatgaaaccttccagacctgttctaaacaacccctagaacatttctaaagcaacaaaaccacccagaaagcacagaaacgaaaagtgccattaaagctcaagctttgagttctaaactcaaacttgagtaaaatcacctaacatgcattcaaaccaactcaaatcctcttaaacaagcataatatagcctctggaaacaattaaaaacatcaacaatatcacagcaacagattcaattcatttctctttgaaaaccatatttttgagttaaaaattcccaacttgaagcaaagcaattaacatgcattactaacaacctaaataacttcaaattaacaagcttaaatcacagaatcttacaacaaaacacagcagcaacaacatccaaataatccatgcataactcatattttcaccatttttattcaagaaaataaaggaagaagctaggaatcacataccacaatcaagagatcacaaacttaggttgaagctagctgaaaatcaatgaaaatc

SEQ ID NO: 291485 - DNA, 506 bp, Cannabis indica
ctagtttgaagaaattttataaaaagataaatatacactttttttctttttaatctttaaaatgatttttattaaaaaaaaaatagtttgttagttttttagtgtgttttattttttaaataacaattccatttataaattttttatttctattaatagttttatctattttaggaatatagagaataacaaaataggaaatattaattttttaatatttaattaatgattataaatatcaaccattagatatttgatccaatggtcaagaataaaatacccatacatgggtaatacccattaagagcatacccatatatatatatatatatatatatatagtatgtagcttggacgcccagtcttggccataaccagtctaggcctccacttaatacttactcagtactaataaaaaaaaatgggataatttcacaaatacacaaaaataataaaaaaattacaaaaatatgatatcacggaattttaaatatttttacgaattt

SEQ ID NO: 291486 - DNA, 518 bp, Cannabis indica
aaaaatttggatttcttggagggacaactagaaaggacctttgaagaagatggagttaaaagtacgatctttagttgtgaaggtagtaaggccttaggtcctgatggttttagtattacagtctttcaaactagctgggaagttattaaagaggatttgacgaatgtcttaaatcttttgagaaagatggaacgattcaccataaccattgatgcaacaacttggttatatggaacaatggaatggacacggaattatggaggattgatcagaatatgcaaaagtatgcactgtaatggctttcattgtccgaatggacatgcaaggttctctaagaattcgctagccctactagctggtggaagaaacctatccttaaaacccactggttttggatataaaaatcgtttaggtgttgatagttgttaagcacaacataaggtgttcatgctcaccttaacaaagcatggatgattgatcacaatatgcgaaagtactagattgatcggctacgagat

SEQ ID NO: 291487 - DNA, 590 bp, Cannabis indica
tcttacaatagtttcgcaccaccgaggactattaacctctttctcggattgttgtagtgccaatctcactataaccgggttgtttacaataccagtgccaacctcacctcaatcacaatatgaaaatgtgtttgaaattacaagcaaaatcactctagcgttatgataatacaatggaaacctagagtgacaagcaagcacactcaagatgaataaatacaaaatttggctcaaagtgtgtgaaaagtatttgttggattttaaacttggaagctcattaatctcacttagataggttaggtgtatgacataaatgctcaaccaacttaattttttgagtgaaaatcgagtttatatagtgttggggtgaaaaatagtcatttatagccgttggacacaaaaaacgagactgccactgggccaaccggttcactaatttccaaaccagttaacctgttttgggtgaaccggttaacctctttgaaatcggttaacctaattccaggcagtgggaaaaagtccaattttttgcactaaaacggccatagctctctactcgattatgcgatttcagaaattcaaattttatt

SEQ ID NO: 291488 - DNA, 564 bp, Cannabis indica
actgcgactaccgcatatttgactccacctttccctttaggtaactcgccgattaagtcaatcccccatactgcaaagggccatggacttgtgatagaatggaggttacttggaggttggtgggtatatgtggctattcgctggcacctgtcacacttcttcgcaaatgcgagagcatcttgtcgcaaggttggccagtaatacccttgtcgcatgatttttaatgcaagggagttacctccggtatgattgccacaaatccccccgtgtacctcgcgaagtatataaccacaatcttccccgctgatgcatttgagtagaggttgactaaaacttctgcgatacaacctttggtcatatattacataacgggcggctcgctgtcgcagctttcttgcttctattttgtcatcaggcaagagacccttttccagatatgcgacgataggagtcatccaggtgatctcctgaacggtatctatttccatgatcacttcttgatttatagttgggtgagccaatacatctaccggaattacatcgagcaattcggcttctctagtt

SEQ ID NO: 291489 - DNA, 620 bp, Cannabis indica
gttacatgcaatttttttaaatagataattaaatatataaaaggaataagctcaaatatataaaataataaaattcataaaatatataaaatatcataaaataataaataattaaatatttaataaataagttttattagttgaaaatagataattaataattgaataagtaatgagtttaataattaataaattcttacaataaaaaatattaataaataattagattaataataaaaaaaataatctaatattctattaaataaaaaattaatatttacttttagttttaaaaaaaaaaattgttaaaattttgggataataaaaaaattattgttgaatatgatgacgcagtcgcctcagacgtctcatgtgtcagagcctcggatgccacaaatgtcacagatgccacaaataggacagcagacttctcagatgatactgacacaacaagggcaacagacatctcaaatgatgccgacacaacaagggcagcagacatctcaaatgatgccgacactacatggggcagcagacatctcagatgatgacaagttcgcaaatgcccgccataataccccacagatgtcggatgttcttggagatgctagtgatgagga

SEQ ID NO: 291490 - DNA, 728 bp, Cannabis indica
caagcacctcaatgaatttccttgttgagaacaagatcctaaacattcattaacacaacaatacactcaaatacattcaagtatgaatctttgtactcatacagaaacttacgtaaaaatacgtaacacataaatcaatttcacttgcatgacacaccaaacacaatcatttatcactataattcacaccaacacattgcatgtacccatatgaatatttttaacgtaaaacatgaactcatacaaatactttttacgtaaaatttcactaaaataccatttattaacaaatatacaaatatgtaattatttatcgaaatcagaagctagcatatttcttaaccatttatacagatcataaaacatattcaatatgcttagaaatatgtgtgaaatactatccatgattatgtataaatttattgttaaaaatgaataaaatcctaaataattaaccaaaaatagcaaaacatctcaacatagtctcaaattaattccagacactataattatatcttagcattatattgaaggttccccaaacagtaaacacaattttttcactatttattctatttaaaatccaattaaatagttaattagtcacaaataattataataaatacctacagcaaccaataaattataaaaacctttttatttcgtaccatagatagtaaatagcattacaaaaatacattttactgttttagcatcacttaactatt

SEQ ID NO: 291491 - DNA, 820 bp, Cannabis indica
cataccaaataatcctgaccttcactagaggagaatccttctggttgtttcatgtatacctcctcctctagatcaccattcagaaaagcagtttttacatccatctgctccagctctaaatcaaaatgagcaactaatgccaagatgactctgagggaatctttctttgatacaggagaaaaagtctccgtatagtcaattccttcctcttgagtgaatcctttagcaacaagtctcgctttgtacctctcagtgttgcctaatgagtctttcttagttttatagacccatttacagccaatggctctcgccccattaggcaactttacaagttcccagactctgttgcacctcatagaattcatttcatcatccatagcattgtaccacaattttgattctctactgttcatagcttgtaaaaacgtttctggatcatttccaattccaatatcagattctaataaatacacaacatagtctttgtaaatctttggtttgataggtctagtagatcttcttaagacttcaccaacaggctcttggggagcagcagcaggttcagcaggttgttcaacagttgcaggcaactcttgaacattttgatctactggattatcattaccaacttgtggatcttcagtgattggtaatggttgttcaacattcgtttgaactacaggagtgttaaccattatcaatcttgcttttgaagtggaaggttctgaaggatctttctcaggacctaagtcctttgattgatcactcccactgatcaaggcattctcaagaaattttgcattccttgattccacaattc

SEQ ID NO: 291492 - DNA, 467 bp, Cannabis indica
tttggctcaaaaactatggttttcaaagagaagtgttgaaatctgctgctgttgttttgttgatgtttgttggggttttcagaggttaaattatgcatgtttaagtaggtttgggctgaattgattgcatgttggtgttgtttaatcaagtttgagtttggaactcaatgcttgaagctttaatggtgattttggtttgtttgcatgaagctcggtttttatgctttcgaattgttccttagggtctaaatagcaggtctggaaggttttgtttgaattggtttggatttgaacaagttatgattttttggttgaattctgcaaggaaccggaattccggttgtgcatccggaattctggatggggttctgaaatttcccagaactggaattctgattgggcaaccggtctaccggttgagtgattttcagaaaccctagattttctcgtttttatgttatttgggg

SEQ ID NO: 291493 - DNA, 615 bp, Cannabis indica
ggctccggaggaccagaacccatctggaaccgatctaggaaatctcctaagttggaaaaaataaaattccttcatatggtctccccatcgggtcgagggcatcctaaacctatggagacgctcatcgaaccctacaggcctaagactggaatattcgccaacggaaggaacgtaatgtactgctaaaggagacttaccggagccggaagtgctggcgccaggaggctttggcctagaagcccttctctcagccgagtccccaatacgaaggggcttcccagcgatcgcctagcttctcctctcgaccgggctccccacgcgaagtggcctcccggaagctgcttgagccttggagtaagctttctcctgagccttccggtagagatattcctggtacttcttctcggcagtggcgatgatctcgtcccagaagatctttttcgcgacacgcgcccttacatttggacagataaccctggagaggttagagtcctccactgattggtgcggcaggatgagcttggccttccggcagttctccgttgtgaccaggcccccgacgtcgagttccgcccggttgtaagttgcaaagacctgggccctccggagaaaaac

SEQ ID NO: 291494 - DNA, 507 bp, Cannabis indica
cctcatgaggctgcaaatgggcgagggagaggctgcaagcagcctgtatggggggcaaaccttggtcaggaggggaaaattcaaacagcgccttgtctaaaggcatcttgtccgagcaagcattcccatccgcgcgtgcacgtgtgttgctcggtttcaaatatttttatctaaattcaaaaaatcataattgattcatgaaaaaatccaaattgagttctgtaaagcctaaattcattaattatacgtctactttctagtgaaaatatttcgagaacaaaataaaaaatattgttacaacatatattacaatttccaaacaatcatcaaataagcacataaaccatcatgaaaccatccaaatcaacacaaaacatcattttaattcatctttcatgaaagtaaatcattaccaaggctctgaggccagttgttggaatatgtttgactaggatctagatttactaccatgtatgttatttaacatcttaaatattaatttctaaa

SEQ ID NO: 291495 - DNA, 667 bp, Cannabis indica
aactgtattagtctttctcatttctttccttgattctgctctcttttcaatattctgcaatcccttattaagtgacctggcttgttacaatgataacacttgatatcttttcgagacttggatcttcttctagaaccatgctgatttttagtctgacttcgtccccgcctgtcatgcttttcagtaacaagaaccccagaggaagaagaagattcaccttgtgctttccttctggcctcttcattaagcatatctttgaccaaatccatagtcaaagtcccttctggcgtggaattagaaaccgttatcaccaacgtttcccaactgtcaggtaaagaactgaggagtaatgatgcttgcatctcatcatccatattcatcttcatggcaactaactggtttgcaagactctgaaattgacttgtatgctcaaccatactaccaccatccttgtacttcaaatttacaagtcttctaagtagagaaattttattgccagccgttctcttcgcaaagagattttctagctttttccaaacaacatcagctctggtttcattagagatatgctcatgaagatttatatccatccatcgtctaatataggcaatggcttttctatgttgaacttcccattcctcatcatctaacttagacggcttctcac

SEQ ID NO: 291496 - DNA, 675 bp, Cannabis indica
atatatatatatatattatcaagcaaacttgaaagaagtaacgaggctccattgtagtacaatccattcatgcactcgaaggagcataggtagtgaaaattcaattttattatatataccatatttgttcagattaacctttcattattttctccaataattctacaggttttttttttcttcgtcttaacctacaaggcagtaaggttgttcatccgatccaatccacatcttttttggtcaaataacatccgatccacactaaatgcgaatttcatttttttggatccaatccaatccgcacactagctcaaatttaatccaatccaatccgcaaaagtgcgaattggatcggttactttagattggttactttttaatattaaattatttaatatttatgaaaaaaatatttttattttcacataactagcaacaaaataaaacaaattatagttattttatatctccaacaacatattaaataaatcaaataacaaataacaaattcaaaggaagaaaaaaattgtatatataaaaaaatatttaattttattttaaattgtatgtagaaaaaaaatatataagaatagaatatacattttatctataaaattttacaatataattgtattatatgtattagacttttaaattactattttctttacatta

SEQ ID NO: 291497 - DNA, 696 bp, Cannabis indica
tgatgtgatttagcaatatttagtggtgtttagcgacatcgtgaaaacaaaaaaaaatgctaaaaacgagtgatggattgagtactctgacaattttgaagattttggggtggttgagcttgtgaatttcaagactttagtgtggagatagcaaaacttagagagagaggccgttagaaaagacgccgactggggcttgtgattgaggttctgggtctgggtataatgacaggggttttgggtcgaggttcaatgacagagagtgtgagagttagagagagaagcttttttgaaatataagggtattttttaggaggaaaagatagtaaaaatatagatactctatttttaattgagtggtatattacaagaccatacttcacatttaagcatagtaaaccaatttttccaaaagaaaagtcacacttataaactaaaactatgtaaattctattttcaatgctataaattattaaattttttttaaataaaagaaataatattataactataatatagataaacagtcatattaaaaaaaaatatattataatttctacaagaaaagtaatggtaataatctaataaaaatacttcctataataaatataaatacattagcaatctaataaaccaatttagtttctatctagtattttccttatcttctaaaaaaaaaaaaacaaaaactaacta

SEQ ID NO: 291498 - DNA, 532 bp, Cannabis indica
ttttaaaaaaaaaactaatatttatattatttgatttatttattaaattaaaattttaattttgagaaaatctacaatacacctttttaaatgtaatatattgtttcggcacctcacaaatttttttagtctaacatttttatagtcgtgcatattataattatttaagacattttgtaaaattttgaaaaattcaaaaaaatttaacatgttaaaaataatgtatccttttaaaagtggtgcattgatatactcctacctattttcgcattcaagacacctttttagtctattattatttcatagttgtgtacattatagttattaaatatagcctgcaaaattttgaaaaatcagagaaatttaacacgccgaaaataaaattcaaactatgtgttgtatgcatcactttttcatttagagggatacattgttgtgattttagttaattaatatgatattaattttttaattttattaaaaaaataatataataataaaaaatatttttttaatataatttttggtgttg

SEQ ID NO: 291499 - DNA, 566 bp, Cannabis indica
attgacttattaaatctatctatttggtgattacataactgtggggatattatttttcttttatattgatgagtggtcctgattttgttactaatattttcctattaatataggagttaatccattacttttaagttagtattttgtgatataaattaaaggatcatttataagctttatctttcaacaagggtcaaagtgtgacctttgacccccaagttatggatattacatatttgccacggcctagggctcgggtcgtgacaagagaggtttctttgatttttgtattttcttttattttctctaaatgaagatgaaggttagggaaaatcactttcccttgctaaattcattttgctaggtgtcacttagctagggcagccacctatccttcactaaaggaaaagactaaaatgccctcaaagttataacataggtatttttcaaaactaggggtaaaatggtcaaattccacaaccccgcttaattctgatattttattttctctacagtatttcgcactaagaaataaggttctaaacttacccatgtgatcaaactag

SEQ ID NO: 291500 - DNA, 512 bp, Cannabis indica
tggtcgtggcccccgaccaggcacacatcctcttgtcagggttggtggtacgattattgtgggcgagaatgtagcagtccaactcgtcccggtatccgtcctggttaagaatacggaggcgtgcctctaaaatcttggacggaggactcacccacttggcgcccaaggcaccctgcctcctatgaggaaccgccacagcaagctcctcagtgacgtaatcaacgcccttaaccaggacgtccccgtcagcatcaactggttgcccagcctcattgtactgcccgtaattagggggttcaatctcttcctctccctcagcagcgggagggctgcccggacgcgcctcgtccagctcctcaacctcctggacttcagcagcccccctcacggtcctcctccgattgggactaccaaatcctgtttgacgtcgggctagagtggcaagccgagccacctggggatcaggaagcgtcagccaaacgcgtagttttcttcgtacgagccatcattct

SEQ ID NO: 291501 - DNA, 487 bp, Cannabis indica
gatgttaatgaaacatacttgttaataaatctagatcctggtaaaacatattctagcaactttccgttcaggtcggccaactcacttaaatctggaaagaaggtaagaactgtgtataatgtgtaatatgaatatgcgaatgtatgtatatgttaagtgtacatgcatgcttatatgtttgttacactactaacacttgtatggttatggtacagagtgcatgggtatattgtatattgttaaggagtatattacggtgataccaccacaagtacgggaaagtacaaggtgtgtgtggtatatcactcagtggtactcagggtacgaaacaaaccctaccaacactcgtacaatgaggtacgtagtgtatgtggtacagtggttgtaccgtagtatggaacgttcttacgcatctgttaagccttttaaataggtgtatgggcgcctagatacaagtcgatattatatgatatgttatatgcttttc

SEQ ID NO: 291502 - DNA, 573 bp, Cannabis indica
ttagactaatatgtctagacttcccattatatactccactatatgctctagccaatgttgcttggctatattgtagatacatcctctttaataattggaatctcaattaagagatctcttaaccattcagcctcttttccagtggcagatagagctataaactccgcttccattgtggaatgagaaatgcaagtttgtttcttggacccccaagaaactgcccctccacctagggtaaatacccaaccagttgtggacaaattatcccaaggtttgctatccaacttgcatcagtatatccttctaaaattgaagaaaatttggagtagtgaaggcataggtttttggtttcctttagataacccaaaactctccctattgccttccaatgatccacacttggattactagtaaacctactaagtttactcaccgcaaatgatatatcgggccttgtacattgggcagcgtacataaagctccctataacacttgcatactccaactgagccactgctctaccactatttttaactagtggtttactatgatcgaatggtgtgttggcctctt

SEQ ID NO: 291503 - DNA, 552 bp, Cannabis indica
ttgagagaagaatcacagatcgctctgttcaatattcgacacgatggtacaaactcgtagaggcgtgtccgacccaacacagtcacaaacgctggatccgatgttgcagaacccagggagttcaagggttccacccgttgtcaatcctggacagacgggaagcgtggtgaatggtgggacaactcttgttactgaagctgtgcctggtgtgcaagagaccggaaacaacggttccgcacacagccagggcgttcataacacgactgttccaccaggcatcaacgcccaaacgaccatcggagacgcaaccgaattgcaaaacctccgctctgcgctcagactcatgcagggtcacaacaataccctgcatcacgatcaggaagaattatgtgccgcagtaaacctcgcgtttgacgaacagaggcgtatgttcgatgagtggagggacaaagtgatggaggcattaagggctcacaatgcagaaatcgaagatcgtagtcggcaagccactgtgctgatatgaagagcctatcagacggtaggccagcaaac

SEQ ID NO: 291504 - DNA, 814 bp, Cannabis indica
gtgtcttgacatgaataagcccaaaaaaacgttcttgcacataaccatctttatcaacaaatcttaaaacaattgacatttgctctttcttagattcatctcgtgcttcatcaactattacagaaaattttgcatcaccaatttcttcacgaatcgcgtttctcactttatttcccaagacatgcaaaacttgtttttgcgttgttggtgatgtatatgtggcatttcgtggagctttatccaaaacttccgctaccttatcattataggaagttatgaaactcaataactctaaaaagtttccccgattaattgaagttttagattcattgtgacctctaaaagggcatgcttgaaatgctagccacctaatcccctcaattgatgttttcaaacgaagtctattgtcagcaatttcttgtgatgtgaagtttgcaaaccttcttccaatatgtgttggttggttcatgagatctgcaactgctttctcagcatttctatgaggtgaatttatatcgtctccaatatgtgctaaaaatgcacaattttttcctctcacctttttccatgatcgaaatccattaatagtaaatgcatccaatctaggatgtgcatctttagagtgaaataaaaagcatggtagacaaaatgcagcatgtactttaggagaatattccaaccaagatggaaatagcttaaaccaagatgactgaaaagaacgtgaatgagcttcttctgatttttgatagctagagagtataatctgatatggaccagctttaatgtaagctctgcgaacttcatcacgcttctc

SEQ ID NO: 291505 - DNA, 628 bp, Cannabis indica
attttaactactctttttcagaaccaaaatgtctacatccggttccaaatcttccaagaagggaggaaagcaactggccaccctagaagaggtgatggtgggtcccgtcgcccaggaggggtataaacctcgtgctacggggtgggaagcggccgagcttcactccaccttaacttgccctcaccaactggagaacattgtggtggtggccggcatcaagcttgcgactttcgggacgtaccaccggccgccccgtgacgcggagacgcccaatcacaattacggaggcttcggagcttggagccagacgcatttgatgaccggggctatgcttccccttcaggattatttcattaatttccttgtatttatcggccttgcgccataccaacttattccacaagcttaccgcctgctttcaggcttatttattttttactctgcccggggatggggctctcccagtccgacagagattttgtacttttatgaactcgtttctgtccccaagaagggggacaaacttaaggacggcttctacggcttccgggcccaccctttgaatgagggcccggtccctttcaacaagcaaaaacacgtcaaggagtatctgttggaaattatttta

SEQ ID NO: 291506 - DNA, 807 bp, Cannabis indica
tcataattaattgtcaaaatatttatacaataagaaaatttaattaggtaactgactacaacattatattgaatattttgtcaattatgtaataattaacttttattaacaaattaattatagtcagccaattcatgaatcgtcatcaattaaattaattcacctaattctttttgaaaaaaaaattacatattagatcaaaaattaaaaaaaaaatacaaaaatatagtagcatagaaaattttcattttttgtgctttaaattttttatttacaaaaatacatcttcagtagaaaaaataaactgttatttgtttgttattttataatttatttaagattgtattatagttgtcatgatattattttttgattattttatagtttatttatagttgatttatacttgttgtgatgttgatttctcgttgtattttggttattcttactttttactaagtaaagtgtatttttttttataatttttaaactttacctaacgtatttttctaaataaaaattttataccgtaaagttgtaaataaatataaaaaaaaaaatttttgtaaacttctccattcttatatatatactagggctgatcctaagttaaggtcagagtaggcccgcgcttagggtccgatctattttaaaggtcccaaataaaaaataatattttaaaaataatactatatttttttaataaatttttaaaagtttaaccatttagggtctaattttttgggaaacttacaaaaataactgaaatttgggtataatttttactaaaaataactgtcacacgaa

SEQ ID NO: 291507 - DNA, 522 bp, Cannabis indica
tcaggaggacctcacatcggagggactacctgtaaggagctcaaacgatacgcaggggccgtgaaacacgataaggtttgagaggttacgcaactcccagctcaaaggccccggctaatggatcatcccattacattcacagaagaagatgctaagacagtgcgtttccctcaccatgaccccttggtcataaaaactcccattgccaataagatcgtggccagagtcttgatcgacaacgggagttctgtgaatttattattcaaagaggccttcactgtaataggcttgacagatcgagatctttcaccgaacggttcccagatcacggggtttaatggaacaacacttatcccaatgagaaaagtgaggctcccagttaccttgtgcctggacacaccctaaagcactttcaaatactgcacatttgtggtggtggactgcccaacagcttataacgcaatccttgggcgaccggccctagtggattttggtgcagtcacgtcaaatcggcacttgtgc

SEQ ID NO: 291508 - DNA, 638 bp, Cannabis indica
ctttatttgacatgtttgaagtctaaattcgtgatcttggttcaatttggaaagtttccttttgtggtctgatttgctgcgacagaatctgtccctgatgctgcaaatcatgaattttttaagaaagttttgtacagctgggaaatcatttttgtggctgtctctaggatttctatgttctataaatatgacctagagagcagccaaacgattttatctcttctattctcatattttcatatctttctttgtgagaagagtgttttatttgtaaaaacctagagtgttcaactaggttttggttttcttattatgatctcatactattcatagaataggttgaagagaagctttgaacaagtgtgggtcttcaggagaagacttttccaagtctcatttcgggaggaagtgagcatatatcttaaggagaagatttgtttaagccttacttcgggaggaagtaagcacacatcaatagctgaagggagttcactacttggtgtatttcagagatcagattagcaaggtggattacaaagggttgcgacaaatcactagagaaagtctaaattttttaagtcaattacttttgtaatctttagatactttactaattgatttcattctactagggcgtg

SEQ ID NO: 291509 - DNA, 579 bp, Cannabis indica
atcgaccaaatggtggatgctacctctgaattcaagctattgccttcatggatgcctatgccgtctaaaaccagatcaagatacacattgcagaccaagaatgcactagcttcaagaccgataagggggtatactgctacctcgtcatgccttttggactaaaaaatactagtgcaacatatcaacggatggttagcaggatgtttaaaggccttcagggacgaaacatggaggtgtacgtggacgacatgttggtcaagtcaaaggcatgtgcaagccatgcagatgacctcgaagaatgctttgaagtggttcagagattcggaatgaagcttaaccaaaagaagtgcacttttggggtcaaattagggaagtttctaggatttattgtcagccaacgagggattgatgcaaacccgaaaaaattccaagctctcctgaatatgccttatcccaagaagcacaaagatgtacaaagattaaccgaaaaagttaccgccctcagccggtttatctccgatccatagacaagtgtattccctcttcaacatcctgaagaaatgccaaaaattcgaatgg

SEQ ID NO: 291510 - DNA, 887 bp, Cannabis indica
aatgctataaatcagctaaatggtctagtttctattttgaaaattataggaaagaaggatttgtttcagctatgattacaactaaagaaatttcaaatgagatgggaattgagcctaaattttgtgaaaagcgtgtggttcgtagaaaaaaacaatgtgatgaaaatattggtgatggtgagatagtaaagtctgccgaagaatcatttcggattgattattttattttcatggttgaccaaattatttgttcacttaaaaatagatttgaacagtttcaagagtatgcaaatatttttggatttttattcaatttgaaaaacctaaaatcacttgatgaaaatgatttaaaatatcaatctttaaatcttgaaaatgttttaaaatacaatggaatttctgatattgatggttgtgatttattttcagaattaaaagtgttgagagaaatttttccaaataaaagtggtagttcaatcgagatacttgattacataaaaaaaattgattcatttccaaatgcattcattgcctatagaatattactaacaattccagttacagttgcatcggcagagagaagtttttcaaaattaaaattaatcaagtcttatttaagaacgactatgttgcaagagagattgagtggattagctatgttgtcaattgaaaataatttgctagataaacttgaatacaatgatttgattaacaaatttgcatcccaaaaagcaagaaagataaatttttagatgaatcaatctgtgttatttttttctaataattttgataaactaatgttattattaagttttatagattggagattgttcgatatgacaaacttgaagaaggaagacatacttttgggatagatcgatcaacaa

SEQ ID NO: 291511 - DNA, 607 bp, Cannabis indica
gagccttctctttctaaaaccctagccgccactttaaactctcttcttccctcttgaatttcgaaccacttagtgattagagtagtgcccacacacagcaagtgatacctcaatcatagtgaggaagatcgtgaagaaagacattcaacaagaaggagtttcagcactaaagaaggagagaaagagatccaggttcagatcttgataatactctgcgacagaaaggatacaagggttagagatctgaacggaaggagtcatattattccgctgcacccaatgtaaggtttctaatactttatatgtgtttatttcataatcgttttagaagttcatatttagggtgttaatcaacatacttgtgagtagatctaagatcctggtaaaataatttccaacagttttacttgggaagcgtgcgagtgaggacaaagcacgctggaaacactcgtgttggtctgcagggtcaatcatcagtccatgaagcagccagagtgacgtactcgtttataagtagccagttcgattcgagtgggtgtaagggacccaagtggaggcttgaggtggggacgttacaaatggtatcaaagccttgacccagctggaa

SEQ ID NO: 291512 - DNA, 428 bp, Cannabis indica
tatatggccattagaatactgtgacacacccaccatttgaaatggcaattaatactcttaccactcagcccgcgacacgaaaagatcctaaaaggtctaatcaacagttaaacagaaataagtttggaaacatgcgattattcaagttgttcaaccgaaccctcgcgagtattcaaattgttcatccgaatgtccgcgagcatcagtagtgatcagttttttgcggttatgtcaatttacaggccctacactatgagtattacccagtatcattgaccaaaacacataaatacccactagcataccctcctaaaagagttttccataagcacccaaaaccagaaagaaagcacattttccccaaaaaacagaaaacgaaaatgcagggatttagaagctaacctttagtttcgattcctgcggttgtt

SEQ ID NO: 291513 - DNA, 479 bp, Cannabis indica
acacaatacaataattagtgggcttaggttgggccttcacatattggacctaaataaatataaaaattagtatttttatattatgcggtgcagtgcggtgcggtttgaaccgcatattagtaattgaaaatcgcaaaccgcatcgcaccacgcggtttagacaaaattcaaaccgcgaccgcaccgcaaagaatttcaaaccgtatttttttgcagtgtggtgcggtgcgggcggtttgagcggtttgatgaacacccctattagataccatgaaagagtaactcaaaacaaagtgcaagaagagaaaaagaaagaaatgaaaaggaaagcctcaaaaattatgacgaggaaagattttgtttatagtgattgtacacaggggcggacccatatagaggcgaggtggggcagtcgcccaccctgaaaaaaaaatcggaaaaaaatatatatgcattttagttaattacaacatatattt

SEQ ID NO: 291514 - DNA, 612 bp, Cannabis indica
ggtattgagattaccacatcctctgtgggaataatcgctggattggtaaaaggaagatgcgccctctgagttggcttaggtcgcaaagaagcaagtcgcaacaagtttagtcttgtaaaggtagtgaggtccgatttcgtaaccctcgaaaccaagtcctcgcacgagaagggctcgttcagctgagtgtcgtccaccgaatcagttccgctcccttttgcctcttcttcttcctcgcctgactcacgagctggggccgcccaatcgtcatccatctccttgacctcaatgtcaggggcatgcctggagtggataagataatcgtgggcttacaccgtagactcgctgtctcaaatctcgatggcccctagttcagcgagctcctgcaccattttctcgatgtctacggaagacatcggacctaattctatacctacagtaggtgcgatctcctcttctgagatcgaagtcgggataaagctatcttccctctggtcctcgtcaccgtcaaatgcattgcctgtcgagccaagcaactgactatccgacaggtcgctcatctgaaagataaaagatcttttcagcgtgttgaatgtgtgaaaaacaaaataa

SEQ ID NO: 291515 - DNA, 803 bp, Cannabis indica
ggacatgagttgcatcttagatcagttttgcaacggttatgggaccataagctatatgctaaattcaaaaagtgtgaattctggttatctcatgtctctttcctggggcacatagtagataaagacgggatcatggtggatccagtcaaagttgaagctgtttgggattggccaacaccaaaattagctactgaagttagaagttttctaggtctagctgggtattaccgtcggtttgttgagggtttctaaagattgttgtacccttgacggagctaacccgaaagaacctgaagtttgtttggactgatcggtgtgagaaaagttttctagagttaaagcaacgcttgattactgctccagtactaactcttccttcagataaggaaaaagtttgtggtttattgtaatgtctcgagacaaggtctcgactgtgtgcttatgcaagctagaaaggtaatagcctatgcttctcggcagttaaaggagtacgagtagaggtaccctactcacgatctagaactcgcagcagtggtatttgcgctaaagatttggcggcattacctatatggcgaaaaatgtgagatgtacactgatcataaaagtctaaaaaactttttaacccagagagatctgaatataagacagagacgctggctagagttggtgaaggattatgattgtgagatcctttatcaccctggtaaagccaacgtggttgctgatgccttaaatcagaaaggggcgaaagtcagataaataagtgtggaacaaaatctctcagcagctagcaaatgagatga

SEQ ID NO: 291516 - DNA, 698 bp, Cannabis indica
ttctaaaattgtacaagcaagatcttgaactgatattttgtcaaaataaaacttaataataatttgatttagagatgttgtgacaaaactagttatattttctgtatctgttcgtgttagaaattgttttaaagttggttataatttaaaaataaaattattaaaaattgagatcagggtcctatttttaccattttagaaaatataagatctattttatcatttaacaaaacagagagtccaattaataacttttgtaaaacataagattcaaaatagtatttactcgattttaaattataaaaatagcaaataataggaatatattattttgtaatctctttgttattgtctcttgttaattagaatgaattagctataccaaatcaattaatttaatagattttcagagaaattattccaaagtaaatcttagacaattaataaccattaatttgaaccctaaaacaaaattaataatactgttaattttaatactatactttgttaatataaaatttaaaaatcattatatatacaatatgctgcccactactatttgagattacttattataaagttgcaaatggattttttattttatttttacttttatgaagtaaacagttctaaatatgtaacgttccgctttaagtttttattaggtcctacacgagtacgttactctggctgcttta

SEQ ID NO: 291517 - DNA, 538 bp, Cannabis indica
cgacacgatagtataaattgacacgacacaacacaaaaaatatattcttaagcatgatacgatatgagaagtacgaaatgcacgatacgtaagcatgaatagactaacctaaaaaatacgacacacgacaagcctataaagcacaacacgccatattaaaaatcttataatatattaaataaaaataataagatatgagtttattaattataaataaattaaaataataatactttaaatataatactgaatattataattctataattaaaactattaaaatataaaaaattaagattatatattaattaatttataatgtgttataaaaatttgagtatttataagtaagtattcaaattcatgttaaattttttttaagattttttcatttatacttttataattgattttttattcatttataaaaatagatccaacataaccttgaaatggaatagcataacctcaaaatagattttttttttataaaattgacatagtataacctcaaaatagacagcataacctcaaaata

SEQ ID NO: 291518 - DNA, 516 bp, Cannabis indica
aatggcttaaaaaaatgtaaccatgatggttacaataaaaatgtaaccattgaaaccttttccatttaattatatatctcaataaaaaaaatactaatatttatcttaattatattgccataaatatattttcatcacatcaaaaaataatagtaaattactaagggccagtttggcacagctgtgctgtgggaaaaagcagctgtagctatgttgtgagaaaaagcagctgtagcaaaactgtagaaaacagctgagctgagtgtttggtaaattataaatttcaaagtactgtgagttgttaagatctattataatgataatgataatgttataatctagtttcttataatgacaaatatgtaaaaatttattttatataatattttattttttatatatatatattttaaaatataaatttatatgcatttgataaaaataatttatagtatttttttattatgttttatcaaatgtaaaaaaatatagaaactcaagtttataagaaaaatt

SEQ ID NO: 291519 - DNA, 671 bp, Cannabis indica
gtactcttagacaatattcactataccaatgcactctgtaccataaccgtacaagtgttggtagtgcaactaacatataagcatgcatatacacttaacatatatatacacactcaaatattcctattacatattatacacagctcttaacttatttacagattcaagtgtgctggccaacctgaacagaaagtctcgtgctagatggatgccctaatcacataacgaaaccgggtaaatcacatgatcgaaaccctaatctaggaaacccgaacctataacttcagactctgttatatacactagggattacactaactcaggagaaagggaaacacttaactcaagagttctagggtttaccttagcttgatcctcacaaagatcttgcttaatactcagaaaacaccaagattgaagatgaaacttcctggttttgcttcagctaatagagaaacagagagagttctcttaatttgtttttttttcctaattttcctaattcaataattctagataatgcatttactattcactaactaagccaaaaactaaagggcagttgtcacacctcacacagccacctaatcctctaactaaatagactaaatagcctttacggttataacttaggtattctctaagactagggtaaagtaagtcaaattcca

SEQ ID NO: 291520 - DNA, 752 bp, Cannabis indica
tatcctttatttcaaaattggaaaaattcaagaaaatcaaaacactttttctctcaactctctctctctctctctatttcggccctcctttgagcagtaagaatcttggtgattctttggttttcaagcagaattttgtgtgcaatttatgctttaggtattgttcttactcttttcctctttagtttcttgaaaaatcaagtaagaattggttgcatgcttagttttgttgttgtacttgctgctgtatgttgttgtttatttttgaagttaaaacatgatttaaaatgttgattcaagcatgatagggttggtgattagttggttttatcaagatatgaaatttttactcaaaactatgtttttcaaagaaaatgaagaatctgttgctgcacttgttgttgttgcttgctgatgttttctgagattattatatgcatatttaggaagatttgagcttgtttggatgcatgttattgatgtgtaaccaagtttgagttttgaagtcaaagcttggagctttaatggtgatttttaattctgtggtttctggatggttttggtgctttagaattatgctttggggtatatagaacagatctggaaggtttggtttggtttggatttgatttggttgagttttggaattttgcatgattcccgcgagcaaccggaattccggatggggttcaggaattcccaaaatcggaattccggttgggaaatttttaggaaccctagtttttctcgtt

SEQ ID NO: 291521 - DNA, 661 bp, Cannabis indica
gtgttaatggaggttagtaagtaccttaccttcttcattcattcttctacaaacatcttatatagactttggtgagtgtcagcgttaagttaagtcttgacagtacaacgcgtttcagccacgtggaggcccattcataattctactcccttgaaaaatgggcccccggttcaacagcccgtattcctatctagtgccctttgaagtgggcccacccacacggcccataatcctatctatttcctttgaaaattgaggatagacatctattttgttttggattatttaaaaaaaaaaaacaaaataataagtacaaaagggacatagctatgtagtggagtcaactttatttttatggacctagcttcgggctgcctcccaataacatcttctctttgccacatcacattcgtccaacttcacatggagcactccaatatatcacattacattgaaatgtagcttaattaattgcaccattactaagattcaacaaaattaattttattttattttttatttttatagtataactaattagtcttgcaataatatagaaacatataagaaaatacatattattactaaaaaaaaatatagaaaatacatatcattttaaaatgaaaattgttcatcatccgagaccgagtaatctgaggat

SEQ ID NO: 291522 - DNA, 712 bp, Cannabis indica
gtgctccatgacatccagctaatagggaaccattttcagcgccgcaaaattaataattaatcttgttggcttgaatattactgtgctcttgtatacataactatagtgtcaaattgaatattatagaaattcgaaattatatatgaatcagtctaatccaacatgctgatactaatgtatcccattacttcgatacttttgaagctataaacttattatgtgctttcacaattacacgtacagataaatatattattttttagttactgatcagtggacaacataggctgcaaagcataatacaaataataatatacaatatacatgaatttttattttatatggtgtaatatacaagcatctccctacctaccgaacaacatgttgcaaagtgatcagtagatatatagatatatatatatatatatacatataatatatcgcacaacatcctctaaaatttattaaaaataccaacctcaattatttgagtcgatctattgatcccaaatgggagaaaacattcttgtttgaacaaaaaaaaaagaaagaaaacaccaaatgggaaaaagttactgtgctttaaaaattacgtacaaagttttttttttttgaagagaaaaaaaaaattactaacttaattattatagacgagtaaaaaagttataatgaaataaaaaataattgccacttctattattattattattat

SEQ ID NO: 291523 - DNA, 446 bp, Cannabis indica
ctcgattagcagcctttttctttttaactattttcacagctttaagaggcttcttgctattcttccagttcttctttttgctgggtttcgaagtagaggggaatatttgcctcagccttggccgtaccattagcagtgccagaactaggagctttaattcctcctttccgtggtcctccaatcaaattttcaaatgtctgaaggttgttgattaactcgtggaagtcaagctccaacttgttcatgacataatttgatgtaaagggcagaaaagatggagtcaaactattcaagatcaaactcacttgagttgtctgatccataacagctccatgattctcagcctccttctggagtaggtgatcacgcacgctctgatgaggtttcatccctgcattgatgaaattcttggtcgcctcaaagcgagcttgaattgacgccatccc

SEQ ID NO: 291524 - DNA, 429 bp, Cannabis indica
acttggaattattttttatttttcggacaatgggctgaccgggcagcttttaatcccaatattacatgcttttgttatccttaatgaatttcattctctgtttataattgtcatgcaattgtgattgttttatttttaccaagtgctttttacaggtataggttccccccaagtgaccgagcagacgtatgactcttggtcacttgtcttttacaagtatattgttatctgttcagtattttgggtttgaccaaaccttttgtacgcaatgtatggtaaattggaaacatgctgataaattcgactcagtctgaattttgaaataactatctttattcatttattgatcgaaaagtgtatttgttaccgtagtaacttgttggattttattttaccaggatcttagatgtactcacaagtatgtttatt

SEQ ID NO: 291525 - DNA, 520 bp, Cannabis indica
atcaaaacttcaatcttcttcactagattagctagagacacataatatttggacataaacacaggacacaatattataactcaaactcagaaacacttagtcgaaacttgaatgaataatgccactcttttaagttttaagactgtatatgactaggcaattttggttattgtattatcattcctgctacatagttgatcatttttagatttttgatgtgaaatttcgtattgtgagctttttagagtttctaatagacttcaatgagtaatagatttatataattatacttggaataaattttgataatgttgtttggtggattcctattttgttattaggtaacataatattattattcgttaggtctgtcacaattattagaatgaatcaatttaaaaacctttcactatattgaaaggtgagattgattttaatatgagcttaattatattttttattttctatatctattgttttatttaaaaacaagtgaataaatgactacactatatacaac

SEQ ID NO: 291526 - DNA, 74 bp, Cannabis indica
gggttccaaaataccgggcaccggaaatgcaaaatatgtaaactactgaatgacataaaaatgcatttctgaat

SEQ ID NO: 291527 - DNA, 592 bp, Cannabis indica
ttaatgtaaatacaaaaaatcaaagaatattatttttaataaaatatggaaccaaacataaataatttctaactataaaaaatacgtgatattaaagatgaaagaaattattttaagaagtgaaaatcataagcatatattgtactgagaatcaaaataaaaataaatacttaattaaatacactaggtttcatcgtcctccttaataataagggaacttagaaacccataagaaaattaactaacaaaagcggtaaactaacactgagcgccctgagcgttttctctggatttttctgtgtgaaactgaaactgtaactgaattctaaaaatataagcttctatttatagaagggtaaaaggactaatgtgcaattaaacttattacaaattgcatgtgggtaattttgcaaatacacaaagttaatttcggagtgccacgtgttgcattttgaattggctgcctttgatgagtcggtgccacgtgtcggtcgctgattggctaaaaagagaattagttggccaattttgtgccacttgtcacgtgttgaaggaaagaaggaaaaaggcttttcagccttggagagcaaga

SEQ ID NO: 291528 - DNA, 426 bp, Cannabis indica
atcctggtaaaatattttccaacacaatcatgttatgaacgtcctggctgggtgcggaaccgtggtttccggtctcttgcacaccaggtgcagtttcagtaacaggagttgttccatcattcaccacgctccccgcctgtccaggattgacagcgggtggaaccgtcaaactccctgggtcctgcaacattggatccagcgtctgtgagtttgctgggtcggacaggcctctgcgagtttgcaccatcgtgtcgaaagagcgatctgtgattcttctctcaatgaaagcaccaaaatgttgacttcgcttttagccaacgacaatgagtcttttttataagcaataaacgatgtgtcgtaataagaatacgtaataaagcaaataataataataagaagacaccgaaattttatagaggttcagcc

SEQ ID NO: 291529 - DNA, 558 bp, Cannabis indica
gaagccttaaccaagaaagttgacgacggacaatagcttgcacttctccaagcaggcatccgcactgggactccttttttgaacgaacggcagcaagaaggagctgctagccttcaggacttccaaaagagagtccaaaaatatatcaacctcgaagaagcccaaatcgtggcttacggaggatactataccaccggaatagcagggtacatgcccggagtatcgccctcgggtactaccccgaccgcaactccacaagcaagtggcatacaattctctgctacccccggatatagccagggccaaaccttggcaccagcatcatcccattttggcaacccgtccggagtgaatggacaagctccttcacactctgctctggctgctagcctggcaggcccttcccagggatcgaggagtaaaagatcctccaagggcagaacccggacgggagagaagcgccagaaaagggagtacaccccccagtatactcaatacacggagttatcggactcccaagagcgtgtgtactttgctactaggcaaaatacacactac

SEQ ID NO: 291530 - DNA, 592 bp, Cannabis indica
cactggtttgccgcttaggtcgactaaaagaaaggacttgtaataatattttgtaaatgtttttgggatcccaacttctgtaacttttagattgtaaagtttaaattattacaagttttattttaattccgtttataattaaagtttaattttagcgctaatcttattagtaatcccaattaggggattaggatttcttaagtatcttgggcagcgtgcctaattatttagtgcgttacaatttggtatcagagcgccagggtttttaaactacctgtagaacggtcgaacatgtacattcatcgttagagacaagcttgactcatggtgcagcaagtattgagagtaaatactttactgtttgtgtgatcatcggtttaccgctttccattttaggcagtatgcaagcatatagattgtttatgtgttatgtgatgccatgctttaaatgctatttgtttatgtgtatattttatgaggtaaatagatgagttagggcttaaggcaataagtgcgtaagtgtggtattggtgcttaactcgctggggttgttgattacaggggtactagtaatggaccctccgcaatcatc

SEQ ID NO: 291531 - DNA, 511 bp, Cannabis indica
tattatacaatgacgcgctagccatgtcacgacacatttacccaatcacacctggcatgtcactataagttaacaatttttttttttaaaaaaaataatagtaattatggaaattactctatagtgacacttcatatttttagtgacacgtattgtaaaagtgagtgtgttaacacaaatctttgttaaccaaatatgagcctaattgtgataatctcacatagaaaaaataaagctataaaagtaaaaatatgaacacgggattttttttacgtggttttcaattaaaattctgcatagtccacgagtcaatcttattcaaaattctcattatttttctgggcctttttttgtatgagtttttgtaatatccagtttaaaatagtatttttttttttgttttggatattaattttgcgaggataattatcttcatttatttgtgtggttagtgagttgatattattgcttagagtagttgtaccaattttataaagaaagttaaagttgt

SEQ ID NO: 291532 - DNA, 629 bp, Cannabis indica
cgcattatgagtcatcaacaaaatccctattacttggggatcagattacagtgatatggcatacccacgatcccacgatcagtgtattctgcatttatcccacgatctttgtattccgcatttatcccacgattttttctgtttatacccatgggaacaagaagggaaacacttcctctccaagttcacaaccctataaatagtgatgcatgttcactgggcaaaaggttgcaaacagtttagtcgagactttaccctgaagatattatctaagaattcatattcagagatactgttgtaagagctataagaaaaggaatctttctccttgttcttaagtcaatacaaataacgaggattacgctattaccgaactgctcggggctgaacctctataaaatttttgtgcctttatatttgctttactatatatcgattgcgataaatcacttatcacttactaaacaagactcattgtcgttggctaaaagcgaggtcaacaatactgttgtcaacacagtggaatataatcatgattatatgttcaaaagtttaattccctaatttgtcagttcactggatttagactggcatgataatcagcaataggcatacttacaccttggata

SEQ ID NO: 291533 - DNA, 634 bp, Cannabis indica
ctctgtttcaatgtaatccagattattcaatattgattacagtgcaaaatttacatatatttatatgttatttggctgaataaatacaattaaattatttattttatgagcttaattgcataaattattttatttagaaatatttaatttaatctaatattatgttaattttcaaatttagtgcataaattagtaaaagatgaaatagaggatagcaactccaaatgaagattgacccaaatcatatccattggactgtgtgggaagcctcaattaatatgatgtcaataatagtttaagaagttcaaattgggcttgaggaaattaattgggctttactattctttactcatcacatggttggtaactctctttaatagaaagtggcgtgagaagctcatcatcatcaacatttacatatcaattacgtggccaatcattctccttccatcaattccccacttcagctttgtccaccacttgcggcccaactaggagctgactgaaccaatctaggccaaccaactctaccactcttcaccaaattctcagcactttgtgccatgttctccattatatggtacactaaaataccattttggagagcaaagtttcactataaattgcaccattt

SEQ ID NO: 291534 - DNA, 703 bp, Cannabis indica
attaaactcacattaattaacctaagtaagatcataatcttacttcattaccagaatattttgcatatttaataaaatatgcccaattaaatatcatagtattttccgggatattacacatagttttaagtgttttagtattgtttgtgtgatatagttttgttttgttttgttttgttgtcggttcttttttgttctttgataacttgtcatcaaatcgttgttagtagttggaaatgacaagttctttatgattgaaggagttgttagtagtgcagttacgtaccttacacaataattgagtgctcaagctacgaggttgaatgagtctgatgtaatagtttttactgttgtgtctttggatgaaacataatatacatattcttaaggttaattgtgatgctgcaatttttttatttgattttatgtcaaacgatctgaaaattagatggctgattatttgattcatttttcttttaatccaggtcgtgtctccaatgggaagatgtccgattagattgtagactattattttagttaattgtcattaataaaaatctattatttattcaaaaatatatctatgttatattaaatgtggctatataatataagtgttgttttacatatctttcttatcttctatcttatcttatattaaatgtggctatatatataacttaatgtgtgtgtgttttttaaa

SEQ ID NO: 291535 - DNA, 703 bp, Cannabis indica
gtgtaaaacacaaaattgctactgcctatcacccacagactaacgggcaagctgaaatatctaatcgggaaattaaaggcatattggagaaggttgtaaatcccaacagaaaagattggtcccaacgcctcgatgatgcactttgggcgtataggacagcatataaaactcctctaggcatgtctccatatcgcctagtttatgggaaagcatgccatcttcccgtggagttagaacacaaggcgttttgggcactaaaaaatctcaatatggatatttcagcagctggagaagcaagaaagttacagctgaacgagttggatgaattgcgtttgttttcatatgagaatgctaaattgtataaggagaagacaaagagatggcatgatgatagaatcaaggaaagagtttttgcaaaaggacaagaagtgttactctttaattcaaggctcaaactctttcctggaaaattaaagtcccgttggtctggcccgtttactgtgcaagaagtgactccttttggtgcgattacagtgaaagatcaacaatccgggagggaatttaaagtgaacgggcagcggctgaaacactattggagaggcgaggtcaaccgagagaagacctcgatttctttgaaagatgcttgatcattgtaatttggggtgcctaaaaaaaaaaaaaaaaagattgaaattgaaaaaaa

SEQ ID NO: 291536 - DNA, 659 bp, Cannabis indica
tttcggtaagaggtattagtggcaaaaagtgaaaaaaaaacaaaaaaacaaacccacttaatgataccagatctgaccgaatcagatcaaggggtttattaagaccaaacaaatgggcccttagtcaatttatctaagagttgagcctctcagatataattactgaaataagagctcttccatttatctctattaagccaagctcgaaggaaatcatcatttcacttctatgcaaacataaattaacaaattttcaaaatttcatgttattttgccaaaaattaattttaattaaaaaaatatatctaataagataaaagttcaaaacaaaatttttttaaatcttataatttaatttaataaaatatatttcaaaaataacaaatttcgaaaaaaaaaaaatatatggttagcaaattttaaaattcaaacaagattatttcaaatattattaatattttaatatcaaaataagatcattttaattttaataataaaataagtaaaatctgatcttattattaaaataaataaaataattaaaaatttaaaaattaaccataaggctattttgtggaaaattaaattttcaaattcaaagactactaatatctaaaactaatttcaaattattaaaaattaataaaaataattttatt

SEQ ID NO: 291537 - DNA, 372 bp, Cannabis indica
tttttaaataagaatcaaaattttgaaaaaaaaaattgttatataacactttttaatatataactaatttttagttagaaaagtgaaatcttttcaaaaaacatgctttataaaactgattttattttaattttaaaataagaattaaaattttaattctttttcattaaaaagaaaagtcactttaaaaatgatcattagagccattttagaacggaaatttgattattcatgcttaaaattggtgtatagtgttttaatataccactttaaaaaacataggaaaataatacttcaaaaactcttaaacctaaaaatatcctccccatatttaaaaagtttctctttttctattttccctctctctcagct

SEQ ID NO: 291538 - DNA, 646 bp, Cannabis indica
tcctcgacttggggactcaagcagcaatgttggacctgtggaagaactagaagagattgagatcgacccagatattctggccagaaagcttaaaatttgaaaaggtttgttggtcgaagtaaaatcagcactgataaaatttctgagagcaaacgtggacatttttgcctggtcacatgaggatatggtcggaattgatccttctgtaatttcgcacatcctaaatattgatcccaactatcgaccagttcaacaaaagcgaaggctgttggacaaggagcgagctctagccctgaaggaagaggtagagaagctacgaaataacaacttcataattgaatctttctaccagaattcggttgctaatcccgtactggcacccaagaggtttgtgtattgatttcacagacctcaagaaggcgtgccccaaagactgttttccacttccaagaatcgatcagcttgtggacgcaacagcagggcacgaaatattgagcttcatggatgcctattcagggtacaaccaaatcaaaaatgcatccaccggaccaagatcatacaagtttccgaacagatttgggtctatattgctataaagtcatgcgatttggtctccaaaaaacgctggggcgacataccaaagatt

SEQ ID NO: 291539 - DNA, 483 bp, Cannabis indica
tttatatgtgtttaatttataatcgttttagaagttcatatttagggtgttaatcaacaaacttgtgagtagatctaagatcctggtaaaataatttccaacagctactgcgttacttttaccagcgcatttcgcaaactgcgctgacaaagaggtcaaagttttaccagcgtacatttgcagtggttaaaatctaacttttcccagcgcatttttgccagcgcttttcattttatgctggcaaaagttctaataccaacattgatttgccaatcccctttcaccaacacatcacaagtaaattatattttaccagcgcaataccaacttttgccagcacaaaaatgtgctgacaaaagtgacatttcttgtagtgattgctggcactcaaagacaagttatcccttttgaaccatccccactaatctctataaaatacccctgagcaaaataggaaaaggtatcgagagagagagagagaga

SEQ ID NO: 291540 - DNA, 170 bp, Cannabis indica
ttaattaacaaatgaaccctactctttcttcacaattaagctcttgcttagtgaaaattcataaactagacatagtctagttttagaattataattgattaataaaaatcaattgacttagtcttacaaggagcttccaataagcagctccagaatttactaagtaaatt

SEQ ID NO: 291541 - DNA, 592 bp, Cannabis indica
tccgggcccaccctgctaacgaaggggtggtcccgtataacaggcaaactcacgttaaggagtatcgccatcgttttttcttctcctccggattccgggcagtggaccatccggagctccttactgagtgggtgaggattcctccctatgaacggactgcacctactaaggcctttcttcggagagcccaggcctttgcctcttacgaccgagccgatcttgacgtcgggggtctggtcactacggagaactgtaggaaggcaaaactcatccttccgcatcaatttgtggaggactctaacctttcccgggttatctgtcccaacgtgagggcgccggtcgcggagaagaccttccgggacgagatcattgccacggcggagaagaagtaccaggagtatctctaccggaaggcccaagagaaggcgtactttaaggcccaggcggcttccgggaagacacttcacgtggggagcccggtggagagaacgagtcaggcgattgccgggaagccccttcacattggggattcaacggagagaagggcctccaggccacagccttggttcaagagccgaacactagggctcct

SEQ ID NO: 291542 - DNA, 582 bp, Cannabis indica
taatatagataatataaaatacatataatattataaataaaaaatccattttgattattatttaagtttttttttttttttgaaagaaaagcttcaattttttttttattattattgggttgtactgattgaaccgaattttaaactaaaataatttattactattatttaagaattaattgggatgtattattcctaaatcctaatcttctttttcataaaattattataagaacaaaatgtgtaagaagacaaaaacccccccatattattgtttcaaggacatgattatttaatcatatatcctaaagaactattctaatacaataaaataaattttctagcctaggaatatatacataacttatatattataaactaaattataatagagttcataaactattttcattacttttatataaattcaaatgaattgatattgctataatgctatggactatgagcatctagtgagaattaaaaaataaaataaaataaaataatgtgggatcccatctaagtggagaatgggatggggatgctattcttgtgataataattatatatatgtatatattt

SEQ ID NO: 291543 - DNA, 605 bp, Cannabis indica
cacacggacagacaaaaaacaaactaagtaaaatatcctgacccaaagggcaggtcaaaatatcctgacccaaagggcaggtcaaaatatcctgacccaaagggcaggtcaaaaaagagtatgcacaaaaaagaaaaatgaaaagcatataagtaaacatcctgacccaagggcaggtccaaaagaaagatatgtgcatcaaaaaagatcatatataaatatataaaaatcctagccctaagggcaggtcaaaatatatacaaatggcccggggacaggccttaaatattgtctcccctttaaataaaaaagaaacagctatgtaaatagaaattgtcttaagtacaagataattagctgtaaataaaaaaaatagtgaaatccttgttgtaatgggttgaactcaaagcggcctaatcaatgcgaggaggaaggcgaggaccgatgcgcgcctccatcatggcatcaagctttttcttcttctcccggaactttgcaatcatctcctcgggtttcgggtagaaggtaagcttgatattctagtcatttgtagaccaggccatgtagacgccatcatcgaaacgcttgacgcaccggctgcagga

SEQ ID NO: 291544 - DNA, 662 bp, Cannabis indica
catctcaaagcaaaggggctttaccctcattaatactcttgaagtatgcctcttcactgggccggggaaacaagcacttcttcaccaccaactgaaacaaaaaagaaaacacagaataattaaaaactgtgaaaagaagtcaaaaattatgataattgtaaaaagcagcacaatgtcgctacatgtcgataacatgtcgcgacatatgtcgcgataagcgatgcagcaatttcttttgcgacatcgcataatgtcgctaacacatcgcgaacaatgtcgcgaatgttcattttcaataaatttaaataaaatactgaacagtaaagaaacatacccgactgttgaataacagtgcaatgtcggttgccttgacatcttgtttccgctggccctccggtgttttccagctcaacattctggggaacttggtcccgttgcagtgggcatacttcttccccaacttctcaattgcttcgtatgcccagtactgaaaggcacacatagccactaacagtgtactttgcctcctgagcaatcttcttccccttcttcttgtcaacattatccttgtaatgttgcatattctttcctaatgtctccatcagcttacgaaaagcgcgctcgccccacggatacttaaagaagaattcgagatcgttaac

SEQ ID NO: 291545 - DNA, 506 bp, Cannabis indica
aaatctagaagacaaaaaaaaagtggatggaagctggctgggaaaataaacaacataacaaatacagcaaatgtagggagctagggcacaacaagagaacatacaggagaagacatcaaaattaaaaaaacagaacaactaaaaataacactaaaacaatagaggaaaactgaacatatattggagcatataatattgaataaaataacttacatacaaatttcattatttttctattactattaaaaataaagcagtacaataatatttggaaaatatgattgaaaaaaatgaaagaaaacaacattaaaacaaccttaaaacaataataaaataaataccaaaataaaccagtaacagaaaagggtaagttggagaaagatggtggctttagaattacggtagagatggagccaacgctttgagaccaaagagactgaatgacatgaacttagtgggagtttctgcaagatttctacaagaagttcatcacagagcaagctctc

SEQ ID NO: 291546 - DNA, 1019 bp, Cannabis indica
atttttattgtaaccggttacattttttttaaccattggatcactattaaatggttgtgattaatttaggaaattaaataaaaaaaataatacatgacctgtaacctgatattaacctgttaatttatttcattttaaaactttgattaagattaattatattttaaaattaaattaagtataattattaattaattttttgtaatttattattaaataaggatcatttagcaatttattttttttacacttgaaattattttaatttatataacaaaattcttaataatttaaaattatacacatataatttcataattaaaattttattatacttataatattaatttaaaatgattacacttccttatacttcttgtatttcaatgtatcttaataatatcatctcttgtattgtcaatattgtacttcatctgggttctgactatatttgttatcttattcttgtttagatttgtttcatcatcaactatgtgtgcttaaaaagaatatttttttttatcaatccagcttgggtacagtttatgattgcaagataatgtgccataggaatgggagtcaattttaaatgttattgctactagtttccattgatgagtgcctttcaatgtaattttaattaaatattcgggctcaaggctgaatggtatttcattatgtacagggcaaaaaggttaaaattccaatattccttgacccagctacccaaaaggtttgtctcccaaatgcaatgctaaaataattggttgcttaatgttgtccataagaggagagaaatttgtctaacacatcctaatctacatgtgtggatggacttatatagtcttctaaatttttatcaatctgcaaaaaatttaaaaaatcactccaaacagctacattaggatcaatccatttatggctaacatcttcagtgtcatgctcaattccactgttcttcacatttctttttcacaaaactcatgaaatgaaaaaaattatcttcatcttcggacaaa

SEQ ID NO: 291547 - DNA, 338 bp, Cannabis indica
tacgatagacgctagacagaacacattcgatactcacactactcactggctcaagcagacagtcgccttttctaagcttttctcttaagcctcaccatcggagatactcctttagtttttgactataatcgtactgacttgagcgtcggagtccctttggctgacaaccccaccggtgcctcccaattgtaacttttgtctctctctttgttcttgacaggttgctggtgcccaaattccgtattgtagatttcaccctctacattatctaattcataaagtctgagattattatgtgtcaagtacttttatttatactatcctattaattgcttttg

SEQ ID NO: 291548 - DNA, 566 bp, Cannabis indica
ttttaaattatatataaaaaataaattgtgtattttaattaataataattactcaataaaattatattaaaattttaactttattattaaaaaatttgtgacataaatacttaaaatattaaatatgttgctaataaataccgaaattcaaaaaatagtaacataaatcctcatttatggtttaatttttattctaatgtgtgtgttaagttctgggttcgaattttattgtgtgtgtttttaatattttagttttagtgttttactggagttctaatgtttgagtttgtgtttatgaggatttatttttgtagattttgagaacttgaaatttaatgttgtttctattgattatatttataatttaatggttacatttttattgtaactatatggttacattttttttttacctgtaatagcaagttacgaataggtaaaaatttcatttttagaattaattaattataattaactatttttaagtaattaaataaatatttaacaagacttttttagcaattaaaatttaaaaataatttttttttatttatatataaatccat

SEQ ID NO: 291549 - DNA, 218 bp, Cannabis indica
ttatgtaacatttatattatataatatatataatatatacctgactttttttatgagaattgatggcagccaaaaactaaaattaatttaaaaatatgagaaagggagagaatggtactgatttttgaaaaaaaaaaaaaatgagagaaaaaagaagagtgagataaaaatgggaatgtcaattgtgtatttatataataattgtacataacattaat

SEQ ID NO: 291550 - DNA, 843 bp, Cannabis indica
ttataagagtgaaacactcaccaaatacattctctgtattaaatacatccataaataacaaagactcgtggactaaggctcattaacgccccaaccacgtaaaaatccttctctaattttcttacagctctctaaacttataatattttatcggttgccgaaaacctcggtcaacattttggtgctttcattgagagctgaagaaagcttctgcaaaaatacacttcactttacaaaaatggtggagactagaagtactcgtcaacctcgcccactagaagatgctcaagatccaaatgaggaggatgtagcctcaagagcagctgagggttctgaggaagaagaaggaattcctgatgatgactacgagggaaacctcgacgagtatgcctacgatgaaggtagctactcggagttggtgcttctaaggcaaaaagctatcgatcacgaagccgagatcgaagcccaaaaagcacaaaaccaaaaaatgcaagaagtgatgctagccatgcaaaaagccatggaggcggctggtattcacgtgcatcccaaggcaatgactgctggactcggcaaggaaccagaggaatcctcgcctagtacccaacagcaaaagtctagggagcctagccccataaggtatcccgctgaagggaaccaaaagaaaaaccctacctctacccctgggcgaaagaaaaaggcgcaggatccgcgaaaggtccgctcagatttccctaaagggaaaggtccgcagaggggcaagctccaaaaagggagtcttggccctcaggatcgagaggaccgaaaaagcgtttccgtgcaccaggagcccggaggtagagg

SEQ ID NO: 291551 - DNA, 485 bp, Cannabis indica
gggcggtgaggtggcccctaccaaggaaaaggttcctgccggggaggttattgatctttctgaggagctaactgttgcgaacccctccactgctaaagttgctaagtccaaggattctcgagaaggaagttcggacaggcttgagcaaccaaaaggtatctgaactgatcaagggtagatccgagcggatgcgagctcctactccacctttgccagtgcttccagaggccaagaaaggcaaggagatgctcgcccactacatgaattggttggttcctgaggttagtgagcaactggccggtgccgagaatgactcttctttggagctgctgatgggaggagtcttgaaggaattcacaagggtaagtctttcttgtcagtttccattaatcctctttatttggctcagatttcaaagtttttttctctgcacaggctggtctaaagttggcttacacatactcccgagctaagtctgctgcttc

SEQ ID NO: 291552 - DNA, 615 bp, Cannabis indica
attcaacactttctaaatatagtgtgcttgccctaaagcaaaacccccactatgccttgtaactttgatacccaaaatagtatccacttctccaaggtctttcattttaaaggttgaagaaagaaacctcttagtttcttctattcctttcatgttatcactaaggattaacatgtcatccacatataagcaaacaattatcacataatttttacaagtttttgaatacaaacacttgtctccattgttatgcctaaagccatttgaaagaatagcattgtcaaacttgacatgccattgtttcggagcttgctttaatccatataaggatttcttcaacttacacactttatgttcattgtttggtaggacaaacccctcgggttgttccatatagacctcctcatcaaggtcaccatttaggaatgccgtttttacatccatttggtgaacatacaagttgtgtaatgaagccaatgcaaacaacacccttatggtagttgttctagcaacaggagcataagtatcaaaataatcaataccctccttttgcctataacatttagctactaacctagatttaaaggtttgtatagagccatcagtgtgatattt

SEQ ID NO: 291553 - DNA, 709 bp, Cannabis indica
tggtgcagtcttcagtccagtttggtggactcccttctgaagaccccaatctgcatctatcgaacttcatggagttatgtcagaccttcaaagtcaatggggttagtgatgacgccatccgtttgagactgtttccattctcactgagagagcgagccaagagttggttgatctccttgccaccaaattctatagcaacatggacagacttagcaacaaaatttctgtctaaattcttccctccagcaaagtctgcaaagctgcgaggagaaataaacaacttctgtcagcaagataatgaatctctccatgaggcttgggagaggtttaaagatctaatcagaaaatgccctcatcatggcatagagaagtggatgctggttcacaatttctacaacgggttggttggtaacactagaactctgatagatgcagcagctggtggagcttttatgagaaagagtgctaatgaggcttacgatctattggaggagatggctctaaataatcagcagtggccaactgaaaggagtcaaactaagaaagtagctggtgtgctagaggttgatgccatcacaaagttgacagctcaagttgaggccttgacaaagctgattgcagggcaagctaaacaagcccaagttatttgtgagatatgtggaggcaaccatcacttttcagagtgtcaggcagatgtggataatttgcc

SEQ ID NO: 291554 - DNA, 587 bp, Cannabis indica
caggggctcctggtgccagcacttccggtgccggcggtaagtctcctttgataattcattatgttccttctgttggcgaatatgccagtcgtaggcccgttgggttcgacgagcgtctatataggtttaggatgccctcgacccggtggggggatcgtttgaaggagttctatttttcaaacttaggagattttctaggtcggtcccggatgggttctggtcctccggaacctgttcccttaggtccttcagcttacattacatccagctggttccggccttcggacagctaccttggagaggatgctgccagcattaaagttcaggactttgctagggccgaattaggaagttcgggtaggagtagtttatttgccatatcttgtgtaaggggtttcccacggatgtctaacacttgcctatttttgttaaacaggtacctccatggacgccatcttggaccagcttgccggagttcatactcttgaggctcctccggcctttacttcttccccaatagcccctgccctaaaggcctcttccagcgctcctccagacactattgacttagtggatgacgaggaggt

SEQ ID NO: 291555 - DNA, 570 bp, Cannabis indica
agggcacaaaacccaacatactcaacagattaaagaacggctatgtctaaagaaaagtcagaactcaagaagtcagaaagttttttttagttagggcaaaaaagttcctgaagcttagaataagcaagatgatagacggacgcaatgcagtttagagacaagctctatggctataaacccacatgaagacatgataaagaagagtcgcagaagtttctaaccctagggtttcctaagcatttttctacaacatagtgaaagttgcattcaaagtgtaaacatgcaaagaaaagcataaaagaaatcagaaacttactcaaagatttgaatgtctgggttcgagcaacgtaaatccaaccagcagttgtatgaaggcacttcggcaactttaaagcctgaaaactttcttttcgctctggagtttacttagcagagaagggtgatgaaatgagtttatgtgccaatgctatgggtatttataggcaagtcatgaaaagaggtaactgtctcaaagaaacctcagacgcctcagcttcccacctcaaaaacgaatatgggaaatcaaaagta

SEQ ID NO: 291556 - DNA, 447 bp, Cannabis indica
atatgagttatgatgatgttgctgctgtaattgttgttgttgtttccttgattaaaatgttgagttaagtaggtttaattagattgaattgcatgcttgaattccttgttctagttggatagatttttatgtaaaaagcttgggttttcaaagaaaaatggaggttttggtggctgttgtgtttgcatgagttagattctagtttctgaagttgttattagcttgattatgagtttgaagcatagattgaatgcatgttaggtgattttactcaagtttgagtttagaactcaaagcttgagctttaatggtgatttttgctattgtgctttctgggtggttttgaagctttagaaatgttctaggggatatatagaacaggtctggaaggtttcatttgatttggagttgatttgagcaagatatggatttttatgtttgctgcct

SEQ ID NO: 291557 - DNA, 778 bp, Cannabis indica
ttaagtttatcagaatatatatatagcaaaaagattacagtaggacctagcaaaagtcctttactggtaggaaactttttttgattattgattttagatcatgtggttattataatgtaaaatgtatactcttacaataggactgcatgtatacaattaaactttaaacatattataataatatttaatttattttttttaaaaaaataatactaataattaaaaatttatattttttttcaattattattatttttttaaaattactttgaattatttttatattggtatttatttttttaaaaaaaattattttttctactcattttctttttggcttctcataatttactgatagcttttttatgtttacacttagttttttatttgttttgcttttaggctatgcgtagttctagtgttattaactattttttcaatagtttttatcttgttgtttggttactattttgagacgccacttataaaaaaaaaaataattaatttagttagatattattttttctgcccaaaaaattgagtttaaaagaagcaagttggtacggttcaaattaaagagcatctaaaatcattcaagtaagcctacatcagaggaacttttgaaaataaatatctatataaaaataatttaagttataaagtcaaatagcttctttttgtttttcaatcaagtaaatatgagtacaagtccaaaatatttattattatgataaatctgatttaataaattataaaacaaagaactgttacttaatct

SEQ ID NO: 291558 - DNA, 610 bp, Cannabis indica
cgtagcatgaaagaatttgctatttttatctccctcttgcaaccatagttgcttcgagcgttggcgccaaaaaacctccttttgagtgagaacttcgaaaagctcagtctcggcctctttgtacttagtaatggcatcagggtcacggccattcttccatcgtctcacctcatttttccagtgtttaatacgagaagcaaagtttccggagtagtcttttccccactccgagagaatctccccacaccgctgaattttctcttgaatccccaccgaaggatattcctcccaacactcctttacaacttgaaaacaaagtggttcacggagccaacagttttcaaaccgaaatttacgattaagagaaacaaactttttaacagccatatcaagtaaaataggacaatgatcagaagaagagacctcaagattaataagcttagctgaagggaagcgatgaagccaactttctgtcactagagcacgatctaaacgaacctcaatccaattttcagtaccacgactcttctcccaagtaaactgatgaccaacaatatctaaatcaatcaacccacacacccggatagtatcacgaaaaccatcaagaagc

SEQ ID NO: 291559 - DNA, 623 bp, Cannabis indica
tccggtgacatttttgtagctccgcccctttccggcgactttccggtgacctcgtgtaccgttttgacaaacggttggcatgagtgtgatctactcgtcgaggtggtcgttttgatatatactactcctattttcggcgacatttccggtacaccaatttttaccgccaccgattgttaatgtgcaccgcttaggtgaggtttcggaatcccaaattttaaatatagtcatattatatgtcgttggactcggttttgaatgtagaatgcgatgatgataattatttaatcatttgatggtataggtgagagtaatatgtaagtttggactaaacaattggagctcgggacttgagagcttaagatcgtcttttggaaaaagtttaacgactcgggagaggtagggactcaacttgatttttggacttgatttttatatgcgttgtataacattagacatattccaatttttatgatttacaaaattgtttgaaaaattgaaaacttaatctgcatattttctggactgttctggggcaccgagtgccaaatatatttttgtgtgcaaatatttatgcaggttatgatttttgggtttattcaaaatacagctgttatgctgcc

SEQ ID NO: 291560 - DNA, 622 bp, Cannabis indica
tttagcgcttttcatacttagcttcatatgctgacattttcctttatgcaggccagtttgaagttggcttacacctactcccgggctaaatctgctacttccaagagtacggctctgtccgacaccttgagggtggaggcggacttggccaagaaggaagctgaagaggccagggcggagactgcagctgttcgccatgagttgggtgaggccaacaagaagctgtttgccgccgagaagaagatcaccgtgctgacaaaggacctcgaggctgctgatcgctatgaggaaaccatcgagaccttgtttgctgaagtcgattgtcttcaagatgaaaggacttctctgcggcaggtccttcttcggctgaaggaagataaggacactcaggcgaccgaggcggaccgcttgaaggagaaggtcaatgctttggagactgctggcctcgagctcttctttgatttttggaaggctaatccccaggccaacatcgactacttgggcgacgccaaggacatgtacctagagtactacgcggcccaagttgcctatggtgggaaagaggtggctgcttcaacttccggccaagcttctgactaggctactgatgcttctcctgctc

SEQ ID NO: 291561 - DNA, 856 bp, Cannabis indica
gccttcgagacgagctcattaaaagttttgggttctgctgtgcccacaaaagttgccacctcagggttgaggtttttggcgcacattgaaaccgccgcttgttccgatatcctttctggacattggagattgaggtttctccacctggttatgaactcattagcgctttcactaattcgttgctttgtttccaccaggtcatggagacttatggtcttctttgagctcacgaattgtgccaggaaagctttttgcatgtcatcccaagtagttatcgatcctgggggtaactgagtataccaggtgaatgctgcctcttttagagattgcacaaattgccggatcaatagtgcatctgattgggcagattcaccacatgcagaggtgaaataggccaaatgctcatgaggagaaccattaattccatcaaacttttcaaacttttgtctgatgtagtttggtggaaatggaatttgatcatagtaagccgggtatggcttatgatatccaagaataggcattgttgcagcctgatattcccgaataccctccatgataagagccttcaggtcctgctgaggttggacaccagctagtggtggttgcacaccttgtggtggcggttgtgtgttgcctacaggcggcactgaggacgaggattgttgcccaatctcactctccttttgtctcatattaacttgatgagataattctgttgagagtcgggctacttcttcgtccctctcagccaataacctttgcagttcctgaatcttctcttcattactgattgtcccagttactaacactggcatatttttatcattgccaatggttagtgcttcgaactgagtaa

SEQ ID NO: 291562 - DNA, 588 bp, Cannabis indica
tgtttaagtcaattgtctttgtaattttgatactttattaattgatttcattctctgggcgtggccccgtggactaggagtgttcgggagaacactgataccacgtataaatctcttgtgtcaagttatttatttttctgcaaatattttatattctgcctgttcagttttgctgtagcagaattactttctgctgctgcaaacgcgtacaatttttatattttcttatatacaactgacatttgcaaaaacacggtttttgaagacttaaaatatttgacattagctagagaagcaagaaagcttagactatctctaataggaaatgtaaaaattgtgcaatatttgacataaaaagtagttttttagaaatttataccaaattttagttttgtgctccaatgcacaattgtaaaatttaatatttaattaatattttttttaaaaaataaataaaatctaataactttataattaattgctttataatttaatgtaatagtcaaatatattaataaataatagaaatgatataaatgtaatgaaaaaatagtgcattattgtggtgtaaattttacatcatagtaa

SEQ ID NO: 291563 - DNA, 1015 bp, Cannabis indica
gtatttgtaaataattaatataaattattatttataatatataaaatttgaattaaaataattaattattttattttttttttaaaaaaatatttaatatagtggcacttttggtgtgtcactataactctaaaaatattaataaaaaagaaaaaaaaagaaaaataggatatagtgacactctttgtgtgtggttgttacctttttagtctggcaaaacctgacactatatccctatagtgacgcgcaaaaaacgagtgcaataggtttcagtgacacgtgtggagtgtcactaaaaactgcctttccagtcagcctcattagtgacacgcgttgaagtgtcactaaaaggtttcagtgacacgtgtggagtgtcactaaaacccaattttctagtagtaattatttcataacactaccccttggatgtctataaaaactgtttcattaaaaaccttgctcaaaaacttcgtcaaaagaaaaagagtgcagtgtgaattaactctcccttatttaggcattcgtggagatcttttaatcgacgaattccaatcttgtatgtcgccttctcaaatattgatgttggtaataactttgtgaataagtcttcaagatcgacacttaattgagtttgttgaacatcaatatagtcattctcttaattaagatcatgaattaagaagaatttggtaaaaaatgcatccctttagctctatcttcttcattatagctttagtttagcaagtgttaggggtgttcatcaaactgcccgaaccgctcaaaccgcccgcaccgcaccacaccgcaaaaaaaatgtggtatgaaattctttgcggtgcagtcgcggtttgaatttttcctaaaccgcgcagtgcggtgcagtttgcggttttgaattgttaatatgcggttcaaaccgcaccgcactgcatattataaaaataccaatttttatatttatttaggtccaatatgtgaatattcaacttaaagtctactattctttcaaaaaaaa

SEQ ID NO: 291564 - DNA, 590 bp, Cannabis indica
ctatatctaagagccaaagcttccataacttcaggtttgaaacaaccaggatgaggcttagacattgcagccaccacttgaccatcagagtcacgtaggattgcaccaaaacctgaaatacggttcacagtatctactgctgcatcggtattaagcttcagtcgaccagaaggaggattgagccacttaggcgctactgtaggttcattgtttcggtgaacctcattcctgagatgagtgggagaagcctgtcgagatgcttgatactcccctaaatatgaaagagcagatacaaggagcacttcatgaggcttaggcttggttccatgatattctttatttctctctgtccatatactccatagaatacaagcaaattgttccaattcttgttgaggccatgtttccgaagctttaaagaaaaggtccttgaaagttgaggattcatgaattattctatccaacgaaaaggaggatcctctccaaactttcttagctcttttacaaaggaaaaaagaacatggacaatggattcattgttagccacggcaaagggtaacagatagctgtagccttgcaatatggtcgtt

SEQ ID NO: 291565 - DNA, 1059 bp, Cannabis indica
agtaggcaaagagatgaaagaaagagagaggaggcgcagagatgaaaaggctattaatttaaaaccctaaaattatttttaacataagtgtctttttttttcttttcagtaattattttttaaaatgtccttaatttttccagcgtatagtgacacgccagcaattacataagtgccttttaattattttttattaatgtcattattaataaaaaattaataatatatgtgttttttaattagggttgagtacatatagtgacacgccaggcatgtggggacacactttcccagtctctcctggcgtgattctattggtcaatattttttataaaaaaataaatagaaaaattacgaatattactctttagtgacactttatgtttttagtgaccaacattacatgaggctaacattgaaagtttagagtctaattgtgtgtgtcactaaaaatccttcctagctctttagcacttttgtgcatgtcactaagagtgtcactaaaagcccaaattgtagtagtgacactagatttacactgactagataatctacgatatgatctacttacacttcacaagtgttatgtttttttccagaacattagaaaagtagataagattgaatgtatttgttgcattagacaaggccgatctagacttcatattttaacaaagaatattgttggttatcttatcctttcaaatcacaatagttgatcataggttagttaaacctaaatcctgaaacaattaaactttaagctaattatgttattcaagttcttttgatttgtctatttaccatcttaccttactgtctagtccatacatacatgttaggaactcggtagtataattgagtgagagtgttaatcatatatatggacatctatagcttctacaataagaagtgaaacgatgatctcctaagagtttggttcaaaggtagctaaattatagagcactcatttttgtaattatattagtttacaaaaatatcatttacaatgagccagatgttttaagaataaattataatgaagggtagaatggtaat

SEQ ID NO: 291566 - DNA, 513 bp, Cannabis indica
aattgataagccccgagatctctaaactcaagaacacaataaaacagtagcaataataggagtagaacagtagcaaaacagtaggaattgtatattaaatgtattgagaaatccaattacaaaagataggagcccttaggctcctttggtgcaattagagtatttactcaaacattgcctatccaccaatcttcctaagtattctatatatactattgtaatctcactcaaacactcttcttaatacaatgacccaattacccttttatttaatatatgttagaacaccaccctaatcctaggtcctaacattaccggccgcccgaaattcaccttgtcctcaaggtgattgatcaattcactcaagtctagagccctatgttgtatgcgacctctgtcaaagaaccaagttagtaatgtggtattttgacatgtccttgatgcacccttggctggctggagtagtgtttggtcggccctctatcaaaaaacccatacttgaatggcactagt

SEQ ID NO: 291567 - DNA, 505 bp, Cannabis indica
cgctctagtcttgtgggacatggtgtctcaaattcatgatgtcaccaccatgacctgggaaaggttccaggaactcttcaacgcaaaatattataacgaggcagtcagaagtgccaagaggaaagagttcacccaccggacccagcgggaaaatatgaacgtaactgagtatactacccagttcgatcggttggcaaggttagcctcgggaataatgccaaccgatttcagcaaaaaggagaagtatttggacgggttaaatgtgatgatcaaacacgacctaatgatcaccactgacgacaagaccacctatgctgagatggtggagaaggcactgcgagcagagggcgcagttggatgtatgtcagagtcggctagtactccagcgagtggcgaggctcctacccctcctgcatcaggctttagcaagggaggtagtggtttggccatggactagaagaggagaacatccactacatccggtggctcgagtcagaacaagagg

SEQ ID NO: 291568 - DNA, 453 bp, Cannabis indica
gtttgaaaattgaaaaaatacgaaaataaaaaaaaaaaaatcccacaaaaatcgggttgggtgaggtggctgcccaggaggctgcacttgcagcctaaacaagctgctagcagccttggacgagcgcgcaggagggagtgacggctcctagaggaggatttgaagcctcctaggcgtgtctgaatgcccataccgtgtctgaagacaaaggtttctccccagcaatctgcgcgcgtgtgccgtgttgtccgagtgcctggtgcacttcgatgcacccactctacagccatggcacctaatttttaaaaattcccaactctctcaatttttatcggaatcaagttttgtaaaaatcaaaattgcttaatttttcacaaggaatccaaataaaatattttcagaaagaaaaaaaatattttcatggaaaaagtttgtaaaacacatacattcatc

SEQ ID NO: 291569 - DNA, 666 bp, Cannabis indica
ctacgttgatgtgtaggtaaaggcaaggctagagctgatggaccgtgagcgagcttatgaaggttgtacatgtcggggcagttaggcctggagcgtacgatcctcgggacagcaaggctgagtttttgtaactggtcgttagacgactttattttgatgtaacagttaaacagttaaactttttgtaaatgattttataaatcgggatcccgagacttttataatatggtttataagtttaattaaaaagcaaaattttaattaatcacgtttttccataaacctcgttgattagcaacgagctgcacagtacgtttaaaaatcacgtaatacgcctaaggtagttagggtgttacaaaaaccatatgaaagtaataagaaaaaaatatcaaaataacataaaaaaaaaataaatataacaattgacaataaaataacaaaggtagttttaaaggttgaaaaggggacgttagacaaaaggaactcgttatccctttcgcctttttgttctaatcatggactacttgactagaagtcttcaggttgcgtacccactaaactcccttttcctaggttcctaccctcgtaacgcccgtatttaaatatttttaaactcaaaaaaataacttaatatagttcataacttcatacttatataggtcggga

SEQ ID NO: 291570 - DNA, 584 bp, Cannabis indica
tcaaaggctagtgaatatgatgttcgcagatctcattggaaagaccatggaggtatatgttgacgatatgctcgtaaaatcacaacatgcgaaggatcatattgcccacttacaggccatgttcgatatactgcgacgatacaagatgcgtttaaatccactgaaatgcgtctttggagttggctctgggaaattccttggtttcatggttaatcagcgaggaatagaagccaatcctgcgaagatcagggcattggtggaaatgccatcaccgaccaagccaaaggaggttcagagcctcacaggtaaagtcgcagctttaaaccgctttatatccagatcttctgataagtgcaaggagttttttcagattttgaaaggcaacaacaggttccattggaatgaaaaatgcgagcaggcctttcaagctttaaaaacgcacttggggcagcctccgatcttgtcaaagccattgtccggagaagtcttgtccatctatttggccgtctcagaatatgcgattagttcggtactaatacgcgaggaccaaggacgccaatacccagtgtattacgtcagtaagc

SEQ ID NO: 291571 - DNA, 563 bp, Cannabis indica
ttcgggttcgagtcctagtctcagttcgggtttcggtctctgtctgggttttgatctaggttcgggtttgggtttaggtcctggtcctggtcctagtcctagttcggttctagttccatttgcgattctgagttcgagtttgggtttgagttcgggtcggagtttgagtcttggtctgagtttgggttccggtccggatttcactctaggtccagatcaggctccgggtgtgggttcgcatcctcggtccttgtctaggttgggtgcgagtcccacgttccaatcccgatctaagtctagattcagttctgggtctaagtccttggttctgatcctcgtctgggtttgagttttggtctgggtctgggtctagctttgggtctgattttagttgtgggtttgagttcgggtccgagtctatgtccgggtttgtgtgcaggtctggaccctgatctgggtctaggttcgggtccagttccaagttggggtccctagtgcgggtccaagtttgggtgtgggtcagtatctcgatccaaatctaggtccagcatttcgatcccagt

SEQ ID NO: 291572 - DNA, 859 bp, Cannabis indica
gttaagcttgtggagaaggtctattatgtattttctttaagacaggtacattccagttgagtctctataaacttctatttccaagagtagtttagtgcccccaaatctttaagagaaaaggccttattcaacctttgaatggagttgttaaactttatagagttatttcctgagacgacaatgttattcatataaattagagccattattataaaatgtgcactactacaaatatcgaaattcgtgacggtcttaaaaataattttttttttaggaccgtcgctaaaaaaattaagtaactatttaaaattatcgggaaaaatttagtattcctgacggtttaaaatcatagtaaacaaaataggtgatgtttttttaataaaatacgaatttttaggaagctcttatacctaaaactgtcgggtatagtatcgtaatcaataatattataagcaactaaaaaattacattttcatttagaaaaataaaaaatatcgtgaatttagtatttcatgctaacgttacactaatattattgtaaataagttggttgtaggtatttttataattattttacattctatctatataattgtaagttttcttatattttataattgaatatatatattttgaatggataactcaaaatatttaattttaatttactttatgattatttgtttacgagaaattatactttgacaatgtgaaaaacaagaaaattaaaataagtgaaaatatggcccaaaccaaagaaactgatagcactttttatattacatactcaaatttctaaatttttactttttttttttattgtggaacagaatttttttcaaaaatactgtttaagttt

SEQ ID NO: 291573 - DNA, 617 bp, Cannabis indica
atttttgtaatttttttttgaaattttagttaattatgtattttttgaaaaagaatgtcaccatttcagtagaaaaaaaaatcccgagttacatcgtatgacattagtggtcgaggcctgcaaaatcgtcggggagaaatgacattgttctaagtaaccaaaaattttcagctatgaagtatcattcatcatcatcatgatgaagtgatgaagaagcccaagtaagttgaaggtttgtagtgaagtcattttctctaccaaggattatagtgttgtgattggcacctcttatgatgttaatctctgcatttggagccattctcttgatgttgtaagtacattcaacaggggcaattttgtctttatcaccatgaattacacaaatcttgactttggcttcactcaaaactcttaagtacttttccattagcttgtttcctccacacaacacattgtgcattgaatgccaagctgagtggtgtgtgtgtctagccaagtccaaaatcatgaaatgtaggctcctacattgaaaataaaagtcataaccaaacccaagaataaatttgaaaagtaattgatagatttagttcatatatatatatagatgtaatagttta

SEQ ID NO: 291574 - DNA, 725 bp, Cannabis indica
gactacacagagattttttccccagttgtcaaacaagcttcaataagagcaatgatggcaaaggcagctagtttggatctagaaattgagcaaatggatgtgaggacagctttcttgcatggagaattagaggaagaaatctatatgcaacaacctgaggggtttgaaaatggtaatcctaatgatgtttgcctactcaagaagtccctatatggcctcaaacaagcaccaagacaatggaatttgaggtttgacacctacatgcagagcattggatataccaaaagtaagtatgactcttgtgtatatttcaataatcaaacatacctattgctctatgtagatgacatactgattttcagtaagtctaaaccagaaatcagcaagcttaaaagcaaactcagtgaggagtttgaaatgaaagacctaggcaaggctaagaggattctaggcatagacattaagagaccttcaataggagttattgttttgtctcaagcctcctatctacagaaggtactctccaaatttggcatgtctaagagcaaaccagattgctacacctattgcacagcatttcaaactgtctgctgcacaatcacccaaaacagatgctgaaagagcaaaaatgagtaagattccttatgctagctgtgtaggaagtctcatgtactctatggtttgctcaagaccagatttagctcatgcaatgagcatggtaagca

SEQ ID NO: 291575 - DNA, 729 bp, Cannabis indica
gtattgtgttttgcttcaatgaatctggtgcaatcgcaccacccttttcaccaaaaaaaaagaaagctatacatatagttgaaaaagaaagagactatatcttatctatgatattcctatttttcattgtaataaaatattgcttctcattaaagatcttgttcctcaatgagaaactatatatttatatatagcttaattagcttattttttttgggattttttctataataaactaaaaatggaacaagtttacatttatgaccccaaaaagggaaataaacaaaaataaaaactaaaagttgttaaattacaaaaatatcagccaaggaaaatggaagcctccatcttcttcgtgacccagcggacaaatcccaacaacccattctcaaccattttccttccaaaactagaaaaatcagatctaaaaaaaatatagatctcaagggaaaacaacttaaatcccgaaaatccaaatacaaaaacagaaagaaaaaaaatcatccaacctccattcttgtacaaaaaaaactcaaaaacaacattcagtcaaaaaagcaaatcgcgttcagagatgaagaatcaaatagaaggagatctggaaatcattgaaactcacccatgattgaatcagagaaagaattgaaggtaataaaatatgaaaaaacaaacatcatctaagctttcagaaaaaaaaaccagaaagcaaccacaaaacaatattttaaa

SEQ ID NO: 291576 - DNA, 852 bp, Cannabis indica
gacacttttgtatgcgaaatataaaagttagttaaaattctatttcatttacatttttgtttatttaatttttattttctaaataattattataaaaatttatataatttaattcttacaatcataataaataataatgacttttcttgattactttattttatacagtatttttcttaaatttttaaaaatttaaacagtatttttttattttttaaaaaactgttcacaatgctttttagtgtaataacatttaaaaatgatacacataatttatttttcttttgttaaaaagttaaaataaaataagaataatagttacgtggtattaattataagtatggacagattaagagataagcagattaataattaattaaattattaaattattaaggaaggaataagaagattaatttgactatttgagagaaaacaaaacaattatagtgtggtatgttataattaataatattgttgttgaaattgatcaagttgcattatattatataataaaagcatgcatgtgagtagtagtttttcctaaaaaagatttatttgtgttatgtgataaattagagtccatcattaaaaataatttttttttcttcaaattttactataattcaaactttcattgaaatgaaaaaatacatttaaggtttttttttttaaaaaaaaaaaattaatagtattctctatccgaattcaagataacttatggaaacatataaattttttattaggataatcagcgaccaaaactcttttacgttttagtttttatacacataactacttgttatatttttttttttttgttagctaacacttctttaacttcaacttctg

SEQ ID NO: 291577 - DNA, 669 bp, Cannabis indica
gagatctggattctcatggttggatcttggagctgaagactcaaactagggttttctccttctctctctctctatttctgtttttctctgtattcaatgttgtagatctaggtttttctgctttgatctgtatatttatattgttgttgtgtcggttgatcaaagccttaggagttagttacaacatcagttgtaactaactactaagtcttgatccactagaggcgaagccaccctaggatcgagtcttacttgctttttaaactgtttgtattttgctgatgtggatatttgtaaagaggactggttataagtggattttattcaacaagaatatcttgatataagatgtgttttccattacatgatatttgatgattagcatcaagctaatttgtttgagtaatgcaacgacatttttggatttttattttatatgactattatggaagtatatataaaacatatatatgctagcagtatttttttttttttggtcggaaaaatattttaagaataagtatgaaaataaatatttctttttatttttcaaaaaaatgatgaaatattttgatgaaattaattaaaaaaatgtaatataaacattgaagagaaatgtgtagaatagaaaaaaaattttacttaattttttttaaaaaaataggttgt

SEQ ID NO: 291578 - DNA, 500 bp, Cannabis indica
agtaccgagtataggctggattcgcagttaatcatactttgtcatgcacatccctgattcagttagggttatggtcaggtatatgggcccttgattataactcaggatttagtatgtttattatattatgcttttcttacaaagccggccaaccaaaaggccaatgtttatgtgtaggtaagggcaaggccaaagctgaggaaccgtgaggacgagccgatgaagattgtacatgtcgggggggttaggcctggagcttacgatcctcgggacatcaaggcttttgtagttagtcgctgggcggcaaatattttataaagaactagtaaacttttgtaaagtattttgtaaacgggatcccgaaatattttgtatgtaatattataagttttaaataaatagcaaaattttaattaatcacgattttcattaacctcgttgattagcaacgagctgcacagtacgtttaaaaatcacgttagcacgcctacgctagttag

SEQ ID NO: 291579 - DNA, 569 bp, Cannabis indica
gcgtatttaagagtccttactgactcagcctctccaaacgggtctaaggtatttcgtgcatgtgtaaatttaaaaaaaaaaaattatcactatgtgataatacaattttactatcctatctttggtgtataaccaaagagatcaagaaaagataataaaaatttaattttatgctattttaatatcttatgctcatttgtacttactttataattacacttactttatgctaattagattaaattcttactataattactttaaaattttattttattttatttttaaattataagtataaatatttaaaatttataaatatcacttcattacattttaaattttataataaacattaatttataactttttatttaatttatttaaaatacccccctctcactctcttcgtctctctctctctctgaccgaactgaaaaaaaaacaaatatagtccgatggtcggaccacatggtccgatggtcggacccaatcggaccatgtggtccgaccatcggatcatgtgcattgtttttttttttgttcggtccgagagagagagagagaga

SEQ ID NO: 291580 - DNA, 586 bp, Cannabis indica
atacaatacaaatacacaaaatacacaaatagtatatacacacaagatatatataaacacatattcaataataaaacacaaaatatatacatatatattatatatcaagttaataaatatttaccttataaacgcaatccggcgataaaatgctacaaaaatccgaccacctctagaacacacacaatataatattaataaaataaaaaaattctaaaaaaatttacaaaaacgaaataataccaatgtacataaataaaatgaatagaaagcatatttataccttaatggacgttgagactcaacgttttctccgctaaaatcggtggccggagttatacccaccacctttctttataataggttcggtttggtatatagaggggaaaaaaactaaacttttttacagtataggtttaggtatagaaaatagaagattttaagacaaaaatggggtaaaatggttaagaaatgagggagaatgaggttgttttagtggtggttggcgagggttttttcgtgggtttggggctgctgtgggtggctgttcttcgtgttcagcaaggtgtgaaatgaggaagtgagg

SEQ ID NO: 291581 - DNA, 721 bp, Cannabis indica
atgcgtgacaagagtaatcctatcaccagaatggtgaacctagaccgattacatgaagaagctaaaagtttgcattcccagaaacttcaaatacaaaacccagaaaaaacaagcagataagcaacagcatgccatgcatattaacaataaagcaaaggatgcaagaaacttacaatgaagtgttgagactgggggtcctgctgtaaatcaaacgaagataaggactgacagtagtgaacgaagatgaactgggaaaaattgcaaagtgttcaacagtgtttctcttggtctgagaattttttctctctgggaaatttgagcaaagttggcaagaaatgggaagtaaccgaaatgaaggaaaggtggtggcttttataggcaaagctgcatgaggaacaggcattatcacctaccaatcaaacggtgggggaaacgcacgattcgaattctcaaagatcaacggaccagattgatttgcaattaaggcggtggaaacgtttgagtatccgtctgacaccattaatgcgccgtatcaatcaatgggcgtgaaacgaatcgacctctgcaaaaagtgaatcgctgcattaaaagccatcattaaatacaccctcacgcgctcaaagctcgtgccaggaaaccgaggagtcaaccggaagcacttgagcaagccttgttttatttttcaaataaacaaggcttggggggtaaatgttgcccctga

SEQ ID NO: 291582 - DNA, 437 bp, Cannabis indica
cgggaacgcaagaccctaccacactccgagggagaggattagtaggcggcgtagcctccgaattcccaacttttctcaccttggtcacgaataatggcataaactctgtatttgacattgttgccctcatctctaagaacgttctcagttggcgttctctcttaatgacctctggtgcaaccatttgtcccttcatgtacaaggaacaaatctccaactttaaatcatacgctaccggatcaacttccaactcttcatataacatttgtcgcagttcttgtagggttgtctcagttttaactgtcaacgtcaagctgctatttgctttgtaaatccaattataattctcacataaccaaacaccatcgtacgatacaacaaggaacactttctctcctgcaattgcaaaccaaaaaaacaaggtgagtaaaggaaaa

SEQ ID NO: 291583 - DNA, 573 bp, Cannabis indica
attatggaattattttttaaaatctgacattgcaagtgttattcataacttattggaaatagtgaaactcaatggcacatattcggtcaacatagttccattccaaataaaatttaagtttacagttacaaagacatacacaatagaacacaatttgtacataacatagttgtatcccaaaataaatttaattaggatgctttattttacactgtaaatatagattgtattgagatatactataatatcggtactgttattacatgatgctttatctgacctaagactttagttttcctccccgcgtctcgattttgttccagtgtttggcgcaccgacggttgtgtcaaatatgataacactcatccctcgatggccttgtggactgcgggaggttgggtgaggttcggttggatggcatatttggcggcgtctcaagtagttccgtccagcctaatccacccatccgaacccttcgtcaacattacctgaatatacatgtagtacatacataaaatttctaagaatcaatttgtaataatatactattgaaataaatagacataaagagtt

SEQ ID NO: 291584 - DNA, 704 bp, Cannabis indica
catatcgtttatgacggtatgcggggtcggctatcatgcttggccccaccattgccatggctgaggaggttgagaataacttcgctctaccccatccacaagttgatagtctgttaaaagatgtgggatcacttgagctaccagaagagccaaaacccgcgtctaacaaattggaagaaattaatttatcagaaaatcccgaagagaaaaaacctgtgttcatttctgccgacttacctgtagctatacgagctgagttgatggagctattatacaaatatcgaaatgtgtttgcttggacatacgaagatatgcctgggctagatcctaaactagtcactcacaaattgagcacgctacaggaagcaaaaccagtaaagcaaacctcaaggaattacaggccagaggtacaacttcaaatcaaggcagaaattgaaaaattactaaaagcaagatttattcgtacatgcaagcatccgatatggttggctaacatagttccagtaaagaaaaagaatgggaaaataagaatctgtgttgattatcgagatcttaataaagcttgtccaaaggacgactttccattgccaaatcttgatactttaattgatgcaacagcaaattgtgagatgttttctttcatggatgggtttagcggatataatcaaattcagatgtctccagaagatgcagagaaaacggcg

SEQ ID NO: 291585 - DNA, 1013 bp, Cannabis indica
gtctaaaaattaatatatatatatatatattttattttgtatagattattgaatatttcacttttgcccagttaattatatatatatatattttttttgaatttgattaaatttatataaattaatatctaccataaaaaatctatacatttgattatttttctacacatttacttataatttttgtaatttttttattttataattacgtttagtatatatcttaattaatttatccgtaatagttaaaaaaatgtgaaactataaagtagaagagacaaacatatctattaattataatactaataataatttaacttattagatcactacaaaaagtttcatattgatattataaataataatagcaaagaaaagataacaaatcaatgaataataatctcgaattactaaataatatttttgaaatatctacctctgttgaataatgtttaaatttcttaatattaaaaatataagtcagctgattttgtgcccatatgtgcaaaacacggattggaatccgttgtacggcagggggttcccaccgtacttttaatattttttaacttttgaaattttggtggtaaccggttgttgtaggtgtggttaccggttgggagtttatttttttaattaaaaaataattaggtacgaaaaaagtacaaaatggtactgtttgtgttagttagagtacaaaaaggtacagcagtcttcactgttcctggcagttgatggtacgaaaacactgtaggcagtgggtccatgttgtcggattgaggctattttggtattttccttcattcataagatcatatgtatttgtgggatggtaattaagtacattatatagagtaccgtgtacattacttgtttctgcgtgatgtttagtaaaattagtgtacataatatcacgtaccgagtacaaaatttcacgtaccgagtacgttcatttacgtttcgtagtatattgtttagaaatttttttttagtgatgaatttatttgttgtta

SEQ ID NO: 291586 - DNA, 550 bp, Cannabis indica
tcatgggtaatacccattaagagcacacacacatatatatatatagatatatagatactctatttaagaataaattacatcacggaacgaaatttgaaaacaaattttaaatataaccttctttatcatcaatatcaatcaatatcaatatctatatatatactagtaaacatcccgcgcttcgcggcggatatataaaatattttaaattatatataaaaaaataaattgtgtattgtaattaataataattacttagtaaaattatattaaaatttttattttactattaaaaaatttgtgacataaatacttaaaatattaaatttattgctaataaataccgaaaatcgagaaatagtagcataaatcttcatttatggtttaatttttattctgatgtgtgtgtgttaagttctgggtttgaattttattgtatgtgtttttaatgtttgagttttagtgttttgctggagttctaatgtttaagtttgtgtttatgaaatctgtttttttatttatttatttttatagattttgagaacttaaa

SEQ ID NO: 291587 - DNA, 793 bp, Cannabis indica
ccagctcaaaggccccggctaatggatcaacccattacattcacggaagaagacgctaaaacagtgcgttttcctcaccatgacccgttggtcatagagacccccattgccaataagatcgtggccagagtcctgatcgacaatgggagttccgtgaatctgctattcaaagaggccttcactgcaataggcctaacggaccgagacttatcaccaagtggttcccaactcacagggttcaatggaacaacacttatccctatgggaaaagtgaggctcccagtcaccttgtgcccggatacaccccagagcaccttcaagtactgcacgtttgtggtggtggactgcccaacagcttataacgcaatcctcggccgaccggccttggtggactttggtgcagtcacgtcaatacggcacttgtgcctgaagttcccaacccaggaggctgggatagggaccgtcaagggaaaccaaggggaggctaggcagtgctataaccttgcagcccacctacccgtattgatggtccgagaaactattgagccagaaatggcgaaagaagatgagtcggatccccgtgtgggattcaaaaaaattgtaaaaccaatggaggacgtcgaggaagtgtcagtgtgcgacctcgactccaccaaagtcctccggctaggaaagagcctagaaccagaggaaaaagaaaaaaataataaagacattgagaggtgccagtgatgttttcgcatggtgcgaagaagacatgactggcataagtccccacgtcatcacccatgtc

SEQ ID NO: 291588 - DNA, 641 bp, Cannabis indica
atatgcaagacattatactaatcttacattgattccgaattcaggtgtgccggtctacctgagtggaacgaatagctcggcgaattataggctcctaagtcataataaccacaacagtgataagtgacacgctgaatcactttccggggacttaaactcgaaactagaagtttccctatcgataaaaagcatggcaataccctaaacaacacgaaaatgggaagaactagggttcccaaaattatcccaaccggtagaccggttcctcaacaggaattccggtttggggaaaaattcctggaagccaacaggtcgaccggttcttactggccttcctgaaccggaattccggttcagtgcaggaatttttcaaaattccataactcgaccaaatcaaacccaaaccaattcaaactttccatacctgctccaaatactccaaataacaattcaaaagcaacaaaacaacccagcatgcacagaatcaaaatccaccatgtgagctccaagctttgagttcaaaactcaagcttggttaaatcccactaacagccactacaactagcttaattcagtctaaaacaacataagaaacatccagaaactaaactcaagcatacacaaccaccacagtagctaaa

SEQ ID NO: 291589 - DNA, 394 bp, Cannabis indica
aggttacagagaaagagtattacgtatcgataattaaacgacaagtccatataaaacgatttgtcgtatttagctccaaactttgatggggagtagtgatatttttaaattacaattagtcatagaactagaggagtttgcaatgacgcacatagttctcaatcccccaaatagagtcatccccttttaggttcttgataacaatctctgaatcactctccaccaaaacaaaaggatgatacaatgagaccgctgtctccatggctaaatgacaagccacagcttctcgagtgagtgggtcggagaatttgtagcctttttgccacaacccacaaaactaattcgttataggtctctcgcaatcgccagcacacatagtttcaccttcgacttt

SEQ ID NO: 291590 - DNA, 551 bp, Cannabis indica
tgtcgacagtatgtcgatattttggcgacaatgtgatgtaattgctttctgtgattactaagtgtgatatcgattgaatgtcgacatcatgtcgatattgtgtcgacaaattctcaaataacttatgtatgttaattttctttttaatcgacatgatatcgacaacatgtcgataatggtcatccctgacctttcttagcaggatatcgacatagcatcgatattctatcgataaactgtcgataacatctggaaaacccagatttcgacagaaaactagatctgcaagatctctaccatttcaaaccaaaaaataccagtttcaacaaatacgacacatataacgaaagcaaactacataaagtctaacaaaatgcttaaaacacaacttatccattataatggtgtaagattcttgagtgattggggtgtgctccggttttctaccaccgcccaccgagaaataaacattcgacagggaagagagagagggaagagagagagagagagggtaagtttttcaatttttctagagagagaggtgcacgaga

SEQ ID NO: 291591 - DNA, 611 bp, Cannabis indica
attagaataacattctaatattttaaaatacaactaaataaataaataaaataaaaattatatcatttatattttattttattttattacctctaactaaataccaccttaatcttgaggttaggagcttacattcaatggtgaaaagaaccttacctaaggagaaaataggaaaaacataatgaacattgaatgctagttgagctctcaattttggttattctattttgtctttatctggcttctttttcttctgttattttttattttttatttatttatttttttttattgtagaaggattttgcttctttatttgtaattaactattagtatgaaaaaacgagaaattacgccataaactatttcttttttacagtttgagttgctctagtagttgttgtgtaaatttaggttacgatttaagttgctctattggttgctatgtgaatttctataaaaaaatcaaaaaaataagctcctttcaaatgtaaaaatacaaaaacccttaaaaaattaatagcaaatttgtataagtaaaattattttctaaaaataaatatctaatcaaaaataatttaaattaacttcctttttttaaaaaaaaactt

SEQ ID NO: 291592 - DNA, 430 bp, Cannabis indica
aggcaaaaacgggaaaaaattcaacaatatggacaaaatggatgactcggatgtctactccccattaataaattcaaatgggaagatgtcagtagagctgacatcaacgcactctgggatagacttgaggtatgccttaataatttttttaatttataaattactatactcttattaaattgtaattaatgtattaatgtgtaactttttgtcagaccaagtttgtcctcccaccgagataaccctacattcgtagactacggtgagtacgagatgtcaaagggtttacgtgactggagggcagactgcaagaaaaagtggatacaaaacattgaggagcttggacaggagagggtcgacatgtcacctcctgagggagtaactcaagaggtgtggagtgactgtatcgcttattagagcacagacaaac

SEQ ID NO: 291593 - DNA, 830 bp, Cannabis indica
tagtgggaaatattttagagaaaataaattatcgggattgagcggggttatggaatttgaccattttacccctagcttttgaaaatacctaagtttgatttaaagggcattttagtcttttatggggggattaggtggctgattgtaaggatgacacctagtcatttttgggcagcaaaggatttaattaaatcctttttccaatttaggaaagtcaaaaaagaaaagaaattagaaaaaattagcaagcttgaaagagaagctctttcttctctctctctctcttcgaaggcagcaagaacaaggggaaaggggctgtgatttttgtgtttgcagcaaggaattcaaggggtctttgaagctaaggtgagctctagtttatatccctctttattcttgaattcatggatggttattatgagatttctaggtttagtggctgttaggttttgaaatgattagggttcgaattttatagtttatttgagttaaattaagttcctagcagctggttttgatgcttggtgttagttctaagcaagcttgagttttgaaactcaagctttgagctttaatggcaacttgaattataatggtttgttctgtgaaatactggctgaaaattgttgtttatgccctaattaggtactctggaaggtttcattgcatttggtggaggattgagcatagaatgaaaggttttgggaaacctggtgcaaaccggctagccggtttgcagggccacaaaaaccggctagctggttttggcagtgttccccgagcctttcattttctcaattttcgccatttcgatgcctcggttgggtgtt

SEQ ID NO: 291594 - DNA, 922 bp, Cannabis indica
aggtcatgtgtcatcgcttgaacattgaccccgaggtgcgaggtgtccgacagaagcgccgcaaaatggaccccgcgaggtaccaagcgctaaaagaagaagtcgaccgcctcctagcctgcggctttatacgggagtcgttctaccccaactggttagcgaatcccgtactcgtgcccaagcctaacggctcatggcgcacatgcgttgactttacagatttaaataaagcctgtcccaaagacagcttcccacttcctagcattgaccaacttgttgatgccactgcaggtcatgaacttcttagcttcatggacgcatactcgggatataatcaaatcccgatgtatgaacccgaccaggagcatacctcgttcattactgatcgaggcctatactgttataaagtaatgccttttggtttgataaacgcaggtgcgacttatcaaagacttgtaaatatgatgttcgcagatcttattgggaaaaccatggaagtatatgttgacgatatgctcgtaaaatctcaacatgcgaaggatcatatcgcccatttacaggcaatgtttgatatattgcgtcgatataaaatgcgactaaaccctctaaagtgcgtctttggagttggctccgggaaattccttggattcatggttaatcaacgaggaatagaagcaaaccccgcgaagatcagggcgttggtggagatgccatcaccaactaagccaaaagaagtccaaagcctcacaggtaaagtcgccgctctaaatcgctttatatcgcgatcttctgataagtgcaaagagtttttttagattttaaaaggcaataagaagttccaatggaccgaaaaatgcgaggaggcttttcaagccttaaagacacatttcgggcaacccccaatcctatcaaagcccatgac

SEQ ID NO: 291595 - DNA, 633 bp, Cannabis indica
taatcctcgaactatataatcttttaagtcgaggtgtcaacggaaagtatcgcatgactttgcaaggaactttttttgcttttccgttctcggaagtaacccaacgactagttccgcaaactggacaagcctccttcgatgcattctccttataaaataagcaacaattatacaaacagaaatggatagagtcataacccaagcctaatttcttcaatctcttttttgcctcgtagtaagttgctggaatattattttccttcggaaatgcaaactttaaaagcttcaacaattcttcaaagatgttattaggaatttttcctctaacttttaaatgcaatagctttgctaaaaagttgagagacgaaatccaatcacaaccgggatacaattcagcttcaatttcctcaaataagtcatcaaaatgagggtttgtggttggttgttcatcttctccttgtacatcctctgttgtcgagggaaagaagtcttctagaataggaatcatttcatcctctgattcaacatcgccaactgctacatcatcgacagcatcctcaggctccccgtgataaatccacttctcatatccttgcataaaacctcgatcaaatacgtgtgctctaccctatc

SEQ ID NO: 291596 - DNA, 505 bp, Cannabis indica
cagattaattctatgctatgaactgaatttaaaatcaaagagcacagaatttcctctgcattggaaacgcattccaaccgagtagtgcttgggttcccttgaaccgggtgcagtaacttccactataaaatcaattcaattacaaattccagttctgattcttcaaatcaaacaatgtaatctaaattgacttttatacaaagttacttaacacttgaacaacctcaagctttgagatctaaactcatttagatctctatacacaagaacacttagcatacacacagctgaaccaccttcagcacagtaatttgaactcccttacagatcaagcacattcgaactccatcttcaacctcagaaagatactctggaatctctctctacaaacaacaaaacaaaaacaaagatatattgtgccctagcagagcaagaatcaagaagatgattctaaccgaagagagttagataagccaaaaacagacacaacagaatatatatcctg

SEQ ID NO: 291597 - DNA, 498 bp, Cannabis indica
gtttgacagttttttacaaaaaaatttaccatcacaaccccaaggtagcgcgtccagttcaggcccccctccaacatcagtgccacaacaacaacaataacaataacagcaagaacaacaacaacaacaacaacaaccacgatcgcctcagatgcctcagttctttcaacaacaacaacaaaattctcccaacatgtctgctggctcttcacaatcgcctcagttacattacatgttcgggcttccctcacagtctcctccaatatttttttcggatgccgcaggaggatctcagacacaacctatgcttggcaatattggaggctcatcccaacaacaataccctatgtatggttatttgggtcatcccaacaacaacccgtgtacggtcaatttgggttattgttccagcaacaacctgtgtatggttaaataggaggatctccacaacagcctatgtatggtcagattttcagtgcgcagagtcagcaacaacag

SEQ ID NO: 291598 - DNA, 690 bp, Cannabis indica
tcttcaatcaacaaaaaaaaaaacactttaagaagaaaaaaaagtgaatcatatcagatcagtaaggagtaggacccatctttggaccaaattcattacattctcgacctaagatttcccaataagctctacctaaacaaatagtaagaaacttttcttttaaaataataataaaaaaaaagtaatcaatgtcacataatgttgtagattttggagcccaccagtgctcaaaattgccgatctcattgaaaatctatttactttgtattacgctggttggtatatataaaatatgcatcacctaccctacctagctatttaaattccccaaaatatatgtcacgcttgtattataagatttttgaataagccatacgttactcagcaaatcatcatttattttgggttatcattttcattacttccttaaaggaatatagtgacccacctcattacacttaaaaaaaataatcataggtccattaagcttgagaatgtgagctaattctccttttttttcattttcttttctttccagtttttctcttattttgcttttacttattgcggctataccccacgttattcacactagatatggaaattagaacaatatacatatattaaatgatatcatgatttgagctaaagttttggaatgaatttcttaaattaaacaactttcatcat

SEQ ID NO: 291599 - DNA, 712 bp, Cannabis indica
ataatcattattattgtcaaattactaatgatatttttttcaatgttaattacagatattgttgcagttgtattaagtgctgatccaataaaaaaaatccacacaaagtctggacctgcaaatattcaagaattcctccttgttgatcaaaggtctaaaactaatatgttttatagttttaaaaaattactgcatatgttatgttaatttttaacaaaatatatttgtgcagcttgcaaccaaaaactttaactatgtgggacgaactaactgagaccgttggaaaaacaatatgtgaaattcttccacaaaatcctattataataggaacacgcctgaaagttgtttcacacaacggttagatttatttcaactaattatttagtattattaaaagacatcttataatatatttttttaacaattcaataggtatatctttatcatccaagcaacaaagttcatttatcattaatcttacaaatattccacaaataaatgagcttcgtcaatggtaaactaattcatacttattttttataaattattctttattacacctatccataaataattcttatatatctaataattttatcctataaattaataggagcattaacaatgaagaatacctatctgccattatcaatgagaagagactcttcccaagccaaactgctctaagaactcctcaatataataataatca

SEQ ID NO: 291600 - DNA, 899 bp, Cannabis indica
tgcggagcacgtatagtctcacttaggggtatacgtcgatcggtttagtcgagttataatatattttcatcaactcaatacaaatattgggttgtaaatattcaattgtaaccagcccaattaaaaattaaaaaaaagtgcaacccgcccaataattttgttagtttggtcaggttaacccgtccaacccgttcttcacttttttttttttttataattattattcttagtttctaattcaaaaaattagatttaaaaaaaaaatacatatttatattttcagttaaaaaatactatagtctaaattaattttaaaaactctaatatatatatatatataaaaaatagaattgaataaacatgaaataattgaataaaaaaataaaaaaaaataataatattatataaattttaaacttcaacttcaatatccaaacttcaaatacaaaatagtttgactaataaataaaatttatgtaatatattatatacacttttttttaaaaaaaatatattaatcggtttaattcggtttattcgggttaattgagcgattagaataatttgtaaaccacccaatatatttatttggtggtttagattttcattatattatttagggttgtatttgttgtcggttaatttattcagtttagttttggcagtttattcagcttggtcgatctgtaaattttgttaaacttttctagtctcactagtaattattaataataaaaataaaattaacaaccttaataaaattaagggcttttttcataaatgtactacaaaatcaaaataattacaaaaaatgtgaaaaaaaaattattttaaaaatttatacattttgaaaacttattacatgaaaccatacatttctaatatgtttattaaacctc

SEQ ID NO: 291601 - DNA, 365 bp, Cannabis indica
aatataatgactccttccattcatatctctagcccttgattcctttctgtagcagagcattatcaagatttctagcccttgattcctttctctccttcttgagcctgattctccttcttgttgattggattcttcatagtcttacacactatgattgagataccatttgatgtgtgtgggcactcactctatcacttaaggtttgaaattatgaagagaagaaaaaagagaatgtggtttcggcttaatagaaagaaggctcaggaaaatttttctgaaagtgaaatttcaacaatcattaagtgtatgccatcacaatctatttataggcaaccacctaggtttaggttagatttaattagcat

SEQ ID NO: 291602 - DNA, 529 bp, Cannabis indica
ttcttttgcaaaatggcgctacactcctcagttaatgccactgtttcatagtcctccatttttctcttcttagacaatatctccttcatgaacttcacataacggggcatttgttccaaggcttcagcaaaaggaatgttgatgtgtagtcttttgaagacctctagaaattttgtaaactgcttgtctagattggtctttcggagtctctgaggataaggtatcttcacatgatgatcaatactgattggtggagactgttgtggtggtgcagggctatcagtagttttcttttctattgatgttggagttggtgctgattgatctttaacttcttcattgaatggttgtaccacatcaggcccatcataattctttccactcctcaaggaaattgctttacattgctcttttccttttgcctcactagtgctagctgaatttccttgagcttggtttgccacttgagtagccaattgttccatttgagtttctagagttttaatagaggctctagtttccatcatga

SEQ ID NO: 291603 - DNA, 467 bp, Cannabis indica
aaaatgattattttttagaattcaaataccaaagagagaaaatctcataataaaatgaaaatttgcacatgaaagttgaattattaatatattatggtataatattctaatatgattcagatttcagttcattctcataataaactcccaaaacattggaaagtctttaaaattttaaacaaaatcaaagtgtaatctaacaagagggtctaagcaaactgtaattactgtcgacatgatcaatgtaatctttcaatgtctgacttatacaatatgtattatgaatgtggaggtatttaatctgatcacttgttaagaaaaattaatccaaattaaatccatttaaatgatctgatgaaaaataataagtacatcttaaataataattaatattgaccatattagttaaaaaaaaaagtaaaaaccaagcagactaggcaagttttttttttattttttgtttttag

SEQ ID NO: 291604 - DNA, 439 bp, Cannabis indica
aactcaaacttggttaaacccaaataacatgcattcaattcaccccaaatcaacttaatcatgcatagaataacctctgaaaacaatagcaaccatctacagcaagcaattaacaaattgaacacatttctttgaaaatcatattttgagctaaaaacttccaagcttgaaatcaaagcaattatcatgcattaactagctctaacctacttaaaataacaaaactaaacctctgaaaataacaacaaatcacagcagcaagaacatatcaaaatcaagcatgcatcatcatctttttaaacattttctaaaaattacaaaaggggaaggtttagaaactttaccaaagcttgaagaacacttagattgaaggaaaatagcttgcaaaatcaaagaaaacccagccttagagcaccatgcagccgagagagagagagag

SEQ ID NO: 291605 - DNA, 580 bp, Cannabis indica
catttttgcttatttagtatgtttgtcatattttctaattaattaattgataaataacatatatataatgtacgaggataaattaaatttcaaatatagtcttctttttgaggttatggaaggatataatactaattaattttgcctaaataactgtgattaattatatgtaaggagtttagttaataaagtgacaaggcaattactatataaatatatatagatatattcgatagaagaaaaggataagaggaaatatttgtagcatatatatgaactttaataataataaaaaaattgtcccattatcggttcactacaagaaatgtcacttttaccagcacattttgttactgcgctggtaaaagtagttatttttaccagcacatttcacaaactactctggcaaagaggacaaagttttatcagcgtacatttacagttgctaaaatctaacttttaccagcgcattttcgcgctgggaaaagtcatttttgccagcgctttttattttatgctggaaaaagttctaataccaacgttgatttgtcaacccccttttgccaacacatcacaagta

SEQ ID NO: 291606 - DNA, 666 bp, Cannabis indica
tattgttttatggttgcaagaatcttggttggttgcgccttctccggtcaaattcctggcacaataggatctctaaaggatctggtctttctgtaagcattatacattttcacatataagactactaattaagctatcagtgtttcttttcattaaaaaaaaaagctagaaaaatgtcttccacggaactaactcattccattaaatgtagatctctgaactctaatcgcttcactggtcttattccaccatccattggaagtttatccaaactttattggctagatctagcagacaaccaaatagaggggactatcccggtgtctcgtgggaacacacctggtcttgacatgttacttcactgcaagcacttgtatgtaaattcggttttgtcatcatataagttagctactttcttataatgataactcttctttcaataatctgacagttgaaaacttctctgttttcaacagccattttggaaagacaagctcacaggctcaattccagaaaagcttttcaactcaaatatgactttgatcatgtgtaagtttgacataaattcagttctatgacaactcattcttctgtgtcaaaacttataatttctggctgttgctttgatcaaatcgcatattaactcatttgaacatttaccatgca

SEQ ID NO: 291607 - DNA, 1200 bp, Cannabis indica
atttgcatcgactataggaaactcaacaaagcaacacgaaaagatcacttcctttgcccttcattgatcaaatgctagacagattggcgggtagatatactgctttctcgatggctactctggatacaaccagatagctatagcacctgaagatcaggagaagacgactttcacatgtccttacggtacctttgctttcagaagaatgccattcggtttgtgtaacgcccctgctacttttcaacggtgtatgatggctatcttttcagatttgattgaatcctgtattgaaatttttatggatgatttttcggtctttggttcctcctttgatcattgtttagaaaatttagaaaaggtgctaaccaggtgcgagaagtctaacttggtgttaaactgggagaagtgccactttatggtgacagaaggaattgttcttgggcacaaaatttcgaaagcaggaattgaggtggataaggctaaagtttcaacaatagaaaatttaccacctccagtttctgtaaaaggagtgaggagttttctaggacatgctggtttctatcgacgattcattaaagacttctcaaagatctctaagccattgtccagcttacttgttaatggtgtacccttcgagtttggagatgactgtttaaaagcgttcaaagttcttaaagagaaactgatttcagcaccaatagttacttcaccgaattgggagttaccttttgaattgatgtgtgatgcaagtgactatgcaattggagcggtcttgggtcaaagggttgacagggtgtttcacacaatctactatgctagtagaaccctgaatgatgctcaactgaattatgccacaacggagaaagagatgctggcaattgtgtttgcttgtgataagttccgaccctacctgattgggaataaggttattgtctacacagatcattcagcgatcaagtaccttatgaccaagaaggatgcaaaaccgagactgattcggtgggtacttttacttcaagaatttgacttagagataaaagataagaagggcactgaaaatctggtagcagatcacttgtcaagactagagctggaagaaagtcagaatacgaaagaggtacaaataaatgagcaatttcctgatgaacaactctttagtgtgagggaaagtctaatggtaccatggtatgctgactatgt

SEQ ID NO: 291608 - DNA, 653 bp, Cannabis indica
gaagtcaaggtgccgcacgggcgttccgctgcctgaaaaggtgagcctgtgacagttggtatcagagccaagttcatctcagtgggaggtgaacctggtttggcctatcctagagaggatgtaggcgggtggacggatcgagatggtctgaatgttggaacaagacgtcgttgagccagttagtcttttaaagaggatcagtatgctgtgatggagttaagactggattgcttttcttcatgggaatactggacatcctagagaagggacaatgatggttgcttcgagttaagttcagagatgctagaaagaaaactaccacgtgaagttgtggagaggcgcaagagaatggttgaaactcgttggcatagtacaagattgaggggatagtccatgctgtatgcttggtacactaggtcaggtttgcctgagtgacatcgtaagccgcaggagacgcttttgttgaaaaggaagcttgttggcaggagtgtggaagtagtgcagggaccgtcaaattcttgttagtcacgacagaggtcgagagttgatgaccgagatggttcagattgggatagacatgggatgcttcagttgctacgttgtgtgtcaagagggacgcacatggagaccaagggggcagaggccgcaatcgt

SEQ ID NO: 291609 - DNA, 673 bp, Cannabis indica
gcacagggtttgtattcactgtgttgggaagctgtgtgagttggaaatcgaatttgcaaaaagttgttgcattgtcatccacagaggctgaatatatggctttcatgagagagatcaaaacacattgacataaagctacactttattcgagatgtagttatgtcaaagcaagttcaagtaaagaaaatttgcactcatgataaccctgctgacatttttacaaaaagtgttaccagggacaaattcattcattgcttgaacctattatacatactagattgcaaggacatgatcaattcagccagatttgtccagacagtgaacaagtgaatcaaatcagatggatttgactcaatggttcactgccacatcagcaatcatctatcctaagtggcatgcagttagttatttcagttggagcctacaagctacaacaacatataaaaggcagtcacttccactagtctgaaaaaaaaggctttcctagatttgtttgtacatagacttcatacagaaaagagattcaattgtgagaaattggagggttgtaaaagtctttcttatatatttgattgagtagactcaagtgagattaagttttgtaatgtgttgtttttctgtattgaattctttcttgtacctatgattttcaaatcattctacatgtacattc

SEQ ID NO: 291610 - DNA, 791 bp, Cannabis indica
gtatgattttgtttttcataaagctattaatttataatgtctttttgcatttattatcattatttttaaaaccataattaaattttattaaattaattattttaccataaataaatgtattttattttagttgaattttgatttaaaaattcttaaaaatattatatataaatattatattttgtgggatattttaattctaattaagatgttaattactccttgttttgactattatagtattaatatttgtttaaaagtatatatgagatcacacgggtttttgcactatttttgatagttttgataccttttacgacttttgtgccttttatggcttttgtgccatttttatggcttgtccctatttgtttagggtagttttgtggtttggtcaattggcaagagaagtgatcctactcatgatttctatttaaacgactttttctcttttgaaagataagtatttcaagtttaagtccattatagtaaatatggattagtttactatcgttatttcacattatctttttcattatattgtgtggtaatagagttttattttttgctattttgtaggttattttgtggagggcgcctacaattacagagaatttctgataattctaattttaaacttaatttgtttgatattgtttttcaacatttttatattaggatgctagtttgttgttactagccaaagggtaatacatttggctagttattcttagaaatttggttgattttttagtttttttagaattttgttgatagctagagttataaag

SEQ ID NO: 291611 - DNA, 508 bp, Cannabis indica
tatattttgttggttttaattaaattcaaaataagatagtaatagagaaaatttaggaattagatttttattatttaattttatttactttaataaaaaaatttaataaaaaaaaaatgagagatatacatacaagaatataaaataggatagtaatagagaaaatttaggcttttaaattattgggcaccaataatttctcataaacaaaaaattctattatataggcacattttatatctatctatattctaaagccattaaaacccatcacgaatcatcatggaaacaagagcacaagcggatctgaagatgaaatcatttttcattaaaggaagcaacactttttggtattgagttgagtgtagacgaaaaacaactatctcaattaaaggaacccaaaatgaatttcatatgatcttattccacttcatattcatactttaacaactttttaggcatgatagaagtagcctcaatccatccaaattttcacacattgatcctc

SEQ ID NO: 291612 - DNA, 628 bp, Cannabis indica
tttattatcgtgacttttctgacctccccatcaagttccacagttccaggcccaaaaatattttattcaaattatggtatctacgatacccacatattccaatacaatctccgtaattaataaattacgctttattattcattaattcatatttccctaatcatctcatgattagcttaagtaggattataatcctactctaatacccacataatcacatatttaataaaatatttccaattaaaatatcaatatatttttcgggatattacagtctcaccaagtcctgacaaatcataatgttatgccctatatatcttcctttaataaaaccaccttgggaaggagagattatttcaggcaagatatttttgattctagaactcaagagcttagttgcaattttataaataacattacaacaagcaattggtctaaaatccttaatagtgtttggacatttcaccttaggcaccaaggtaattattgtagaattgatttcttttaaaatgttacctgagccaaggaaagataagactgcattggtgacacctcctccccaatgatctccaagttatcctggaaaaaatagtctcgagaatccatttggacaggtagattttgcccc

SEQ ID NO: 291613 - DNA, 638 bp, Cannabis indica
ccgatatgatcttggttaagatattatagtacttaccgttgtatctttaccaaatcaatatcactagttgatcttagatcaaagatcttaatcctgatatgcttaggttcaatctgaggagtgttattcatattctttgatttacttttaagaaatttggaactcaaaaaaagtttgtgtgtgatttggatggtttcatgtgtatctgtgtgttatatgatgattgattgatgcttgtgaaattttataaaaaataattaaattttcgtttatgaaattattttttattggatagtatggaaaaaattaagcaattcacttttttaaagaactcaatttcgattttatttgaattagttatgattttttgaagttttgaaaaaggataaggtgatcaccctcatctcacgcgcgcggatggcccattcacacggccaggagcgtgttcggacaaggtgttgtccgagcatcacgcccagggatgtctgaatccctctcctgcgcgcgcggaaatcatgccaggagtcccttgcgccgagttttgtcggctggtcacctaagtggcacgcgcggatgagtatgcaactgcataccatccgtacatctcacatttttttttattttcttcgatttttcat

SEQ ID NO: 291614 - DNA, 502 bp, Cannabis indica
atgggaaacagaaatgaataaaaaggaagttgcaaatgtgaggcctattgtcatatttccatggcctgccacattattgcatttaacatttaattttttcaatttttcaatgccaagtaatgcaaccctaaccctgtgtggtattctataagtagaaggtaaaggcttcaggaaacacacacaacacaattgcattcttttcctttcacagaaattttcctgagccgccactctctctccctctctttcctcttctcagtttcgaaatctcttagtgatagagtagtgcccacacacagcaagtagtacctcaatcatagtgaggaagacagtgaagaattcaaattcaacaaagaaggacattagttcacatttaggttgttaatcaaaatacttttgaatagatctaagatcctggtaaattaattccaacaactggcaccagagccatggtaattgatttgcttgcagaaatttggacttaaaacgattgttgtgattt

SEQ ID NO: 291615 - DNA, 1080 bp, Cannabis indica
ataaaaatatataagaaaaaaatgatgcattattagttcttaaacaaataaattttggaaaaaaaaaaaatttagatataaatatatatttttttttaaaaaaaagttgggtcggatcagatccgatccgtataaggcgggtcggatcagatccgatccgagtatctgatccagcggggcggggcggggcagatccgtatatgatctggatcaggtcggatcagagtcggatcagatccgacccaccccattgacattcctagtattcgtggcttctacaaacgacttttgagatttgacagataagtatttcaagtcttgatattattatataaattgttttacaatctttattcacattacatatttttcattaaattgtgtggtaatagagttttattgttagtttataggtcgattttgtggagggcctactgttacagagactttgctgataagtttttaaatataatttatttgagagttgtcatctttttactattgagattttcttttattagtttttaatatcatcgtcaggagttaatccattttttttttttttattctttttgttttgtagatattttgtggagcagtttgatatgttaacgagttggcgtgtagttttcaatgttacaagttgaagctctagccatttcggtgtgctatttgaggacattatagctttattgtctaaattttcgggggcagtttgtctcatgttgctcgcttactttagcagttcatggtttgacaagcatgctcttcggttagacaatgagctatcttggttcgaagaggttcctgcacaatttgtgaatatctgcatcataaatttatgagtgattctaataactacgtcaaaaaaaacgaatgaacagtattctttattgcatctctacatctaaaaaatgcaatagtagtttcttcatatgtttttaattaatattttattgtttttaatgttgttttcaaatacttgtaagtaatatattattgttatactattatgagtagataatatttaaataataaaatataatatgaagaaagttgatatatgatgtaatataaaat

SEQ ID NO: 291616 - DNA, 506 bp, Cannabis indica
aataaataaattttaaaatacttgtaaattttaaaattcaaattataacgataatcatattataatttaattcattataatcataaaaatatataaataaacttattttatgcatttgataaaaataaattaaaaatacttcatattcaaactatatttatcatatatgtgagtatataagaaactctaaaaatatgagacaaaacaaattgatcccttcaaacaacaataagaagcaaaaatagcctcatatttagctataaaataagtaaaatatataactttatcggtaacatctttttttttttgttggttattaccttctttaaataacttaaaatttacaaagactttttttttcagatttttttgagtaactgttcaattcaaaatattacataaaaattatttaaaatttttataactaataaattacaaaaataaaaattcaagaaaataaatatatatatatataaaaaaaaaagaaaaaaaggtacttttatgag

SEQ ID NO: 291617 - DNA, 568 bp, Cannabis indica
agtttagtttttttttttttgacgtggtgaacaaagtcacacatgataaacaatgcagcacaccacaatcggcggtggagcccctcgaaccaggatagctcattgtctaaccgaagggcatgttttgccaaaccatgagctgcgaaaaacaaaacgcaagccacataggacaaaactgcccccggaaatatagacaataaagctataacgtatttgaacaataccccatcaccttgaaaaacaccttccctttattaatagttgtcgccagagttagcaagactgaaaaaatatcacaacaccaaaccaaaaaaacagttatattagaatgacaatcttcaaaataaaatctaaaatacaaacttaaaatttaacacacaacccaaatcactagctcaaattactaaaaaactaaaaaaccaacaaaatttcaagaataactagccaaaggtaataccctttggctagtaacaacaaactaacacccttataaaattgctaaaaatcaataacaaacagattatatttaaaattaaaacttatcgacaaattctctgtaaatatagac

SEQ ID NO: 291618 - DNA, 721 bp, Cannabis indica
agcaatatttacatatatatataaaaaaaaaaaaaaaaaatcaaacaagagcaacatttctctgtcagcgtagcttggtcaaaattcaaaagataccaaagaaaattttgctacggtaaataattattgtggatattgcccttaaaaaaaatacatatatatcatataaagagcaatatcttagttttaatcatttagcaaagtaaaaaatatatatcggtaaaaatatatatatgcatatataatatatatagaaaaaaaaaaataatatatcatcatcaatcaaaagagactttgctatagtttatttttcataaatattagtcaaaaaaaaaaaaaatcgttgtttatttctttattttggctctaggtactgtaatgaaatcccgaaagttaacttgtcatttgaatttcaaaatatttttggttagcctatctatgggtcaataattgtttacattgttcgtcctaaaaatctttatccatttgagcgtcaattaatatatctttccaactccaagagtgacaacccttcctcttttcaaatatttcaatacctgtgaggatttggagttgagactttttactttaaagatttttcaatattatctgtgttatggattaaagcaaagaatatgatttgaaacacacacacacaaaatctggaattatatctattgtaattttttttatatagtattttctagagtttacaccaata

SEQ ID NO: 291619 - DNA, 839 bp, Cannabis indica
ttattgcaattttattaatcagattaattcaccgtgattctcttttattttacgatcttcttagatcagttgataaaaaatcgcgtcaacaaaaactatctacataatttttatttttaaatatatatacaataatactataaaatcaattaagaatattctgttaaataataatatattctgttaaaattaatcttttatataattttgttacataaccacactataaagatatatatatatatatatatatatatgatatattgcattagttatttttttttttttttagtactattgaggaagaaagaattccaacttgggacctccttttatgagaagtatgaaactaataaactaaacttatgaccacatatattgcactagtattaaattgattaaatataacacaaatatatttagcattattatagaatgttatttatttctaagtattagaagtaattaatcgtactattaatataaaacatgtacaccgatttttttttaaaatacattatcaaaatctcattttttaaaaatattgtcccttacaaaaataattattaaaattcaaaacaattaataaatatgtttagagcaataaatagtattttataaatatagagcatgaatagtaaattttttaaaaaaattataataaaaaatgagtttaaagtatttatcataatgtgtaattactagatagggtaattactagggtggtaattacacagtttagtaattacactatattttaaaattcaaggtgtgtttggatatgaagtggtagttacatatgaattcctaatatattgtttggcaaaatagttagtaac

SEQ ID NO: 291620 - DNA, 714 bp, Cannabis indica
tttggggcccaagtcccccatctaggtctagatcttaggtcctggtcaaggtccgagttcaggttttggtttgaatctcaagtttgggtccgagtctaggtcccagtacgggttcaggtgttagtttgggtctgggtccaaaatgagtccaagtccctatttgggtctaggtcagggtccgaaactgggcccactcaaggtctaggtcacgaacaaggttttggtctgggttttggtccgagtttaggtcttgagtttgggtctaggtttgggtctggatctgggtctgggtctttgtcctgggttccaatctcggtttaggtatgggtctgggcccgtgtccagtttcggtttagggtttagggtttagtatttagggcttagggcttagggttttgggataagtgtaaagagtttagaatttagggtttaaggtttaggatttagagtttaatggtccgcttccagatccgtttctgatttcgggtcacagggtacgatttaaggttcgcgtgtgcgtccgggtctgagtcctggtttaggtctaggtccaggtccgagttttggtcttaggtgcaggtccaggtctgggtctgggtttatttaacggttcgattctgaggtcccgcgtttgagtatcgtgtcccggtcccggtcccagtctgagttctagtcctagtccaagtttaggtcttggtcctagtctgggtctaa

SEQ ID NO: 291621 - DNA, 532 bp, Cannabis indica
tctcatgattacaagagaggaaatgttgataaaacacttttcatcaaaaacattaattctgatgtgattgttgctcaaatatatgttgatgatattgtgtttggctctacctctaactctgaagtgcaggtttttgtttcccaaatgcaaaaggagttcgaaatgagtatggtaggtgaactcacttattttctcggtcttcaagtgaagcaatcagatgagggaacttttgtcactcaaagcaagtatgcaaagaatttggtgaaaaagtttggtcttgagaaagccaaacataccaacactcctgcacaactttgaaattaagcaaagatgaacaaggagtaaaggtagatcaaactttgtatcgaagtatgataggtagtttgctttatcttactgctagtcgtcctgacatttgttatagtgttggtgtttgtgcacgatatcaggcaaatcccatggaatcccatctttctgctgtgaaaagaatcattcgctatgtaaatagcactattgattttgggatttggtt

SEQ ID NO: 291622 - DNA, 590 bp, Cannabis indica
acacagcctaacccgccttgaagcgtcacaatacaccacaaacttttcttgatcagatggcaaggctagaacaggagctgtaatcaatcgttgcttcagctcttgaaaactcttttcacacttatctgaccatataaatcgctgatttttcctagttaactcggataacggcatcgcaattttggaaaatccttccacaaaacgccgataataacccgctaaaccgatttcggtgcctgttttaggtctaggccaattctttactgcttcaatctttcctggatcaaccataattccatcttttccaacaatatgccctagaaaagacacttgtgacagccagaactcacactttttaaactttgcatagagtttatgatctctaagtcgctgtagaaccattcgaagatgttgctcatgttctgcttctgaccgagagtatacaagaatatcgtcgataaacacaattacaaaattatcgaggaaatccttgaataccctattcatgagatccataaaggctgctggtgcatttgttaatccaaaagacataaccaggaattcataatgaccatacctggttcggaaag

SEQ ID NO: 291623 - DNA, 135 bp, Cannabis indica
tggagaaaaagttaagaataatatgcagttcaacgatcttttatatctaatgaactctggattatattcaactccacataatctctattacacttagagaatcatgatctctacaacctttaggggtggatcata

SEQ ID NO: 291624 - DNA, 623 bp, Cannabis indica
aatagcggagaaattttgtattgaatacaacctgtcagatcctattacaaagataatactacgtactacacttgatctggacatcaaagtgttgagattatttgaaatgcacttttagttttatattagtgcaaatgggagttttttaggttttgtaccctaaataaaaccaatttcaatataatcagatttactaattaagaaaatattagaaataatttatgttgcatggttcacataatttattttatgattatatgtttaatgtataaattttattaaatccataacatataattattcataattatagtgttgtcagcacagtggaatataatcattgattatatcccatgatttatcaatacactggatttagactgacatgataatcagcaataaagtatacttacaccttagataagtattatgtcatttctggggtattggcaaagtatgctaatatcagatgtatggagtatggatcgaattagaccgatattgaacataaataagataccataaacttaccgttatatctttttaagtcaatatcactggttgatcttaggtcaatagatcttaatcctgagatggtaagttcgatctcaattatattattt

SEQ ID NO: 291625 - DNA, 638 bp, Cannabis indica
aatgatgacttgcaagtgtccatctattggcggaggcatcagatcctggttgttctgaccttggttggccttgacatacttctgtaggtgcgggttgttcttcttgatcagaagttctatctcccgcttcaggttgtagcattcgttggtgtcgtggccgtagtctccatggaaccgacaaaattttgtcatgtccctcttgctggtatctttcttcatgggcccgggcttcttgtacggaattagcgactgagttgctatatacacactttctatatcctcagttaggatagtgaatgcagtgtgtttggcgcgatcacggggagtctgtccgggtttttcggtgaactttcccttcttcccgttcccttgcttgtggttgttgcctgaacgcttgccacttgagttgctggaatattggggaagctgggcggacgttccagtagaaggagccttcgttttgttcggcttttgctcaccttctgctcgctgaatggcttcttcgagcttgatgaaaccttcggcccggtcgaggaaatcactcattgagtcgaccggtccgttcttccttatgtccttccatagttcgccaaggacttcaatgcccccacgtatcgcggagtaactttcctactcct

SEQ ID NO: 291626 - DNA, 580 bp, Cannabis indica
catacattacttctttgaaagtatataaagagtaaattattattactattaataatttacatttgcaattttcaattggataataactatatacttttaaccaccgtgatatatggagacaacaattcagagaaaatctcaattatttcatatcttatcataaacaaacagaacccatctttcttctttcttttcttttctaaattgaaaaaaaaaattctttaatttattcgtcagatattttctaataataaaataaatatctgtgtgatagacagtcaaaagtctaacctttataattttcttttagtaatatattttgctttctctttgcttgtgttccaaagcttttttcaataagtccttaccggaaaaaaaaaatgcttttcaaattttgacgtaatttcgttattatgtatcaacatgttgataaaataaaataaaactaaaattgagtagtcatatgatttcgcatcattgtttggttgagttacagcatctccaacgaactcatcaaatttggtattatactattactaaatttagtgttcaaaaattatttctactctaaccacaacac

SEQ ID NO: 291627 - DNA, 505 bp, Cannabis indica
ttgagtttcaggggctgttagggttagagttgtttagggttcgaattttagggttcatttgagttgatttaagttcctagtagctggttttgttgattggtttgagttttattcaactttgagctttgagttcaaagctttgagctttaatggcaacttgagttttaatgttttgttctgtgaaatactggctgggttttattgtgtatgcccttattaggtactctggaaggtttcatggcaatttgtggagaattgagcaacaaatgaagggctttcggaaacctggtgcaaaccggccagggccacaaaaaccggctagccagttttggtagggttccccgagcctttcattttctcaatttctgcctttgcgatgcctcagttgggtgtttccccaattccagagttagaataaccctttgagagcatagcagaacctagggttttggttttgggtttctcgggattggggttttaatcatgtaacttacccggtttcaaa

SEQ ID NO: 291628 - DNA, 524 bp, Cannabis indica
tattgattcttcagcatcttcgaattccaattcttgtatccccaaaacagcatccatagatcgagtcttaatgactctatcagaggatgagggaccaggtttcttgcccttcgatttgcctttcccggccattttcgctctttttgccataactccggtggttccccatatttgaccgaaggagatgttctgagccgagcaccgtgtatacctgtacggacgaggtcctcccaaccgagcagtggacaatccgaataacatatcaatacttagcaattccagcatttgcatcgtgaagcacaagagcaatcccaacaaatctgggatcgtatcacagggatatggcaagctgtccaaatcccacaatctgtgtattctatagatgtaatgtgtaatcttaccaattatagacattgtaagaaaaagggaaatcttccctcaaacatatagccctataaatagtgatctattctcactgggcaaagggtcgaaagaattatctaagagagcatactcagagatgt

SEQ ID NO: 291629 - DNA, 604 bp, Cannabis indica
aattatgctcgattcttaaagaagaacttcaagaaaactaatcctagcaataaggaaaatacttctggaaggaacttttctggtcctaaccggcagtctcaacaatcagaaaaaaaagggaaagggattcaatgtcacgaatgttcgggttttggccacatacaggcagaatgtgcaaatacacttaagaaaaagaaggccttggctgtcacatggagtgatagtgaagaagaagaggctagtgatgaatcaaaggatgataagtctgtaatggcatttatggtcagggaatctgtccctgaagaagttgagggagatgacacattgtctgattctgaatcaacagctgatgagaaaaataaggcttatgaggaaatgtttgcacaatggagctatatggctaagagagtgaaggaactacaggatctgaacaaagctcttgatgatagtaaatgtgaactagaagataagctcaagaagatgacattggagttgtgttccaaagacagtgagatatacaaattgacttctgaacttgtgagagcaaagcagtccctttctcatgttccctcgggcactgctgcactgaatcaagctctccaaa

SEQ ID NO: 291630 - DNA, 598 bp, Cannabis indica
acagtgttataataaataaaaacaaataacacgaaagaactcaaactagttatagctaaaatagaatcgtttatataacataatgaatacaaacaagtaacacacaataactcaaactgagtacaattaaaaacaaagaagaaatcggttcctaaaacaatgaaataaaattaaacacaaaactagtttcataataaaatacttcataacacataatacctcataaaaccgtttataatttttttttaaaaaaagtggggatcaaatgtctcctaaaaatagaaccggttctataacataatgaataaaaataaataacacaaaataactcaaaccggttataattaaaatataaccggttctgtaacataatgaataaaaataaataacacaaaataatttaaaccagttataattaaaatagaaccggttctgtaacagtgttataatgaataaaaatcaataacacgaaataactcaaaaccgattataactaaaatagaaccggttatataacataatgaatataaacaagtaatacacaataatttaaaccgattacaattaaaaaataaaggggaaatcaattcctaaaaca

SEQ ID NO: 291631 - DNA, 658 bp, Cannabis indica
actgatttacagaagaattgaccttgggagaaacaacaacgatttccatggttaaacatggggttgtcgatttttagcagatacaagcccttactgaactcagcatagccaatcatcttccccgattccacatcctgaaaaacacaaaacttagcagcaaacttaacttcacaattaagatcactactcaatttgcttacagaaagtaaattgcaatcaagctttggaacgtaaaggacagaatttaagacaagacttggtgagattgttatagttccaattccatcaattctagaagacgaaccatcagctatgcgaacagtcttttcatgagagcacttacttagaaaagaaaatagtgatctatcacctgtcatatgatcagaagcaccagaatccacaatccaagggtcatgagggatttgcataacctgaagtgcatgagtattgcactgtcttgcaactaaagagatgatttgttctgccatggagaaagacaacaagacaaaacaaacaagtatagaaacaaagagagacaacgctggaaaaacgtcgctggagttggagaagagccagagatggagaaacctgagagaggcgatgctggaaaaacgccgttggaggctgccacgcgcgcccacgcgctggcgcgtggaga

SEQ ID NO: 291632 - DNA, 557 bp, Cannabis indica
aacagatttactgggaacacgatttaaaaaaaataagttgcagtcataagtgtttcaccccatcaaaactctgaaagatttgttctactcatcatgtttttaaccatatccatgagagtgctatttctcctttcagcaacgccattttactcaggtgaacctgacatagtgtattgagaaactacaccattttttggaaaatattcagcaaaaggcctcatgtgtagtccagattttgaataacgatcataatattctcctccacgatctgaaagaataactttgatgactctttctaattgtttctcaagaacatttcgaaagattttgactttatcaagagcattagatttttcttgaatcaagtggtaaagccataacgagaaaaatcattgataaaagttataaaatacttgtttttgcataacgtggtggaataaggtctactgatgtcagtgtcgataatctcttataaagagtgactacagttagcagtctgctttcttattgtagtcaattttccacaagtacaatcaacacaagtatcccaactagaa

SEQ ID NO: 291633 - DNA, 542 bp, Cannabis indica
atgagtttggggtcatagcagcaatgtacatatcagccgcagtgtttcggcccagtaatcaggatgctctattttgaaagtattttgggagtacaaagtttatgttgtaaaacactattaaaacagtttgtgaatattttgaaaacagggggaccccatagttaataccacttatcttttatcatatagtctatgtgtcaaatttttaattatcaaaatttaattaacaacacttttggtataattatatagtatctatataagaattttattaaattgcacacacgtggcgtcccggttggacagggcgttacacatataactgtatagattatacaaaaggccttgattaaggtgcttttagattgtaaatgttgtaaatggttgtttgtgcaatgagagttctgattcatcaaaaaaaaaaaacaagcacttcaggcaggagtcacaactgacttatccacggttggaggtgaattatgggatgatctctagggtcgccctgtgaggaacattaatgagttcaatgaaagagcacaagt

SEQ ID NO: 291634 - DNA, 491 bp, Cannabis indica
ggaaagttcaccgagaaatccggacagactccccgtgatcatgccaaacacactgcattcactattctaactgaagatatagaaagtgtgtatatggcaactaagtcgttaattccgtacaagaagcccgggcccatgaagaaagataccaacaaaagggacatgacaaaattttgtcggttccacggagactacggccacgacaccaacgaatgctacaacctgaagcgggaaatagaatatctgatcaagaaaaacaacccgcacttacagaagtatgtcaaagccaaccaaggtcagaacaaccagcagctgttacctccaccgatagatggacacttgcaagtcattgttggaggcccacacattgctggagatacgggcaaagctcgagagagatatgcccgaacagctcagtacgagcaagaagaagtcatccgaaccgtggaagagaggaaacctaaagttccacgagcaggagagccaaccat

SEQ ID NO: 291635 - DNA, 523 bp, Cannabis indica
attaaagctcattatttaaacaaatgtatttttacttaatcatttattttaattatattttaataatgaaaattataaatttaaagttggtccgaaattatttgaaaattattttccaactttaatttaattttgaaaaattatatataaatatataaaattcgaaataaataaataaattaattaaaatattataaaataaaatttgaaaattatctaatttaagttgttctaaaataactaaatttccaacttaaataattttcaaacaaaatttaattagataacaaattaagttactaaccacctaatttgaaaaatattccattttaagttgatccaaaattaacaaactttcaacttaaaataatattccaagaatctttcaataactaattctagaattcctcaacttaattatgaatttcaaaaatattcaaattcaagttgattcaaaaattagttataaataactaatttacaacttaaataaaaatatttaatgaaatattaaataattaag

SEQ ID NO: 291636 - DNA, 734 bp, Cannabis indica
taacccattcatcacccatacagtaaacacaacaaaagcctctctctctcaatttcacctaaaacagaatgcaatcatcagttaacaaatgcaacatatattataaccttattattattattaattttgtaatatttgtttttccaggtcaaagatgttcttgctgctattattttaagaactggaacaaatgcaacatatattataaccttattattattgtttccaatatgtttttactggacataaaagtttaatttaaatttattattcaaatctctctaaattaaatattatttatttttgattcatttatttccttccgaactcataatataatacttaatataaaacatagcatacgtgcatcgcacgtaacaatatactagtatatatatatatgctgatggtaaattcttattattaaacataaattatcaatatgtacattactattttttaataaatattttataaaatactaaaatatctagcatttgttctcaactttatttttttttattttttattttttaattttttattaagtttataaatattaaaataaagttataattaaactaaaaacgttatatatatatatggtaggttttatttttttttaaattttttattaaagcataaattatcaattcgtattttactatttttttaataaatatcttacaaaatacaaaaatatctagcataaattaattattcaaaaattatac

SEQ ID NO: 291637 - DNA, 526 bp, Cannabis indica
gaaaagtgtgagatttacaccgaccacaaaagtttgaaatactttttcactcaaaaggatctgaatatgagggaacgacgatggctagagttagtcaaggattacgactttgaaatcctctaccatcccggcaaagcaaacgtagtggcagatgcacttagccggaaaggcccaaggcaggtttatgaagtgaaggaaatctctccaagattggctgaggatatggccaaggctgagattgagtttgtagtcgggaagttggcaaatattacattacagtctgatttaccggaaagaataacgattggccaacagaatgatcacgaattgattgaactcagaaagaaagttgagattggtgctacaaaggatttcactgtgactccaagtggactactaagatataagggtagaatttgtgttccggttgatgattagatcagaagagaaatccttgatgagttccatactactccgtattccctatgtaatacccggtaaaaatatacatatattttaaatttta

SEQ ID NO: 291638 - DNA, 541 bp, Cannabis indica
cttacctcgattccgaattcaggtgtgccggtaaacccgagtggaacaaactgcacggcgatttacaggctcctaaaccataacaaccacaacacagataagtgatacgctaaatcacttcccggggacttaaactagaaactagaagtttccctatcaataaaaagcctagcaataccctaaacaacataaaaatgggaaaaactagggttcccaaaaatcccccaaccggcagaccggttctgcaaccggaattccggttctgggaatcctggaacaccatccggaattctggttgcacaaccaaaattctggttttgagcaagaaataaacaaaatttcataacttgctcaaaacaatcccaaatcacaccaaaacttccagacctgctatttagaccctaaagaacatttccaaagcaagaaaaccaagtttcatgcacaaaatcaaaaaccaccattaaagcccaagctttgagttcaaaactcaaacttggttaaactccacaacatgcattcaaacctggcttaaaactactca

SEQ ID NO: 291639 - DNA, 499 bp, Cannabis indica
ctaagtacggattttattttttgttattacaatagctcaaatccaatccgctaaagtacggattggatatgttattttggattggttactttttaatattaaattattttatatttataagaaaaatattttttttttacataactagcaacaaaataaaataaattattgttattttatgtcttcaaaagtatatattaaaataaataaaataacaaataataaataataaatttaaaggaagataaaaaaaaattatatgtataaagaaatgtttagttttattttaaattgtatgtagaaaaaaaaattatatataagaatcaaatatacatattatctattaagttttaaaatataattgtattatatgtattagacttttaaattactattttttttacattaaattgttatttgtatatataatttttttaaaaatttttttaaataaatatgtgtagattggattgaaacgattacttttacatgtcaatca

SEQ ID NO: 291640 - DNA, 433 bp, Cannabis indica
gttattttcatttttaaaatagtttctcaaaagtctttttttgagagaagttacaaatcttaacttcttccaaaatgatttttaaattaaaaaagaacttcttattttttatctaaacacatataggactatttgaattttaaaagctaaaaaaaagattatagaagaacatggatgcaatatcttttttttttttgataacatgtaatatcatttgggaaatttgaatatctatacattaattgggggataattttttccctaattgaatacatatgaaaattgaaaatatgtgacaattttatctaaaacccaatactacccctcccataactcaaccccatctctctctcttccccatctctctcttcgtctatctctctctctctctcaccaaccgaaccacaaccccaactcccctccaccaccgccc

SEQ ID NO: 291641 - DNA, 640 bp, Cannabis indica
tcaaggtatcgaagggagttcgactcttggagttttatcaagattcggttagtaggtggaatacatcaagcttgcggcatacaataagagggagtctatttatgcataagtcaattactttgtatttttgataccgatctaatgaatcttatctctgggcgtggccccgtggactagtaacaatctgaaaggattgttgaaaccacgtacaaaaatcttgtgtgtttttacttttatgcactgtttgtttttctgggtttctctggagttacagagttgcattctgtaactacagaaaactgttttcagtaccagttttattattccgcatttaattaatcatttaattaaataatcaaactgggaatattaaaatacggaatttcaattggtatcagagcaagtcactaaattcttagtgagatcttgaggttattccgtttaacttgttttgtgtgagatgtctttgtttgcagaaggaagttctatctctagacctcctctattgaatgagtcgaattatccttattggaaggtcaggatgagagcattcatcaaatcgcaagatgagaaggcatggagagctattcttacaggttggtctcaacctactgaaaatgatgaaaaaggtaatactcag

SEQ ID NO: 291642 - DNA, 203 bp, Cannabis indica
ataataaataaataataattataataattataggtcaaaatatcttaaattaagcaatattcaaatttctaaaaaaatatctaagttatttaaatatttaaaatataattataaatatctaataagtaaaatgatataaaatagtaaaatatcattttaaacttataatttataaataattaaatatttaacaaaatgacaaa

SEQ ID NO: 291643 - DNA, 683 bp, Cannabis indica
gtgctaaataaaatattcaacctatcttaatgtttgaatatttctaaatatatctagcactataaaaggaatttatgtatagcatttaaatcatacaaatctaaattaattgcattaaacataaatttgtcaaataaatacaaaataatacaattaatgtatgatcattaattaaatgctaattccttaatatgaaattaatggcagatttttcaaaattaatttagacaataaattgcataaatttggtaatatataattaaatgcacaattatacaaattagcataattattacatgcctaaataaatcatgtaataaattaccaaattaaacaaatttccattttcaatttatactatatatatgtattaaacaaaaatggaaaattaactaaatgcaatttattgactaaattaacacaaaataggaaaataattaatattccaaataaataaaaaaaatttggtaaattttccttttttttttttgttaaaaatggcactgcataaacgacatgtcgtttttgcaaaagcaaaatgacacgtcgtttcaaaaaaaaaatgaaaaagctgatcactcatgtaaaaaacgacatgtcattttcctacaagggaaaaaacgaacaacgtcgtttaacaatctgaaggtctgcccaaaacgacgaaaaacgacatgtcgttt

SEQ ID NO: 291644 - DNA, 761 bp, Cannabis indica
gccctaatcacaataattgtaacacagttgagtgactcgctaaatcactcgtccgggacttaaacttgaaaacttaaaacgtttccctatcgaataaacctcatggacaactaaccctaaatatctactaaagtttcggaccaaaacgttagggttttggaaacttcccccaacaggcagaccggttcccaaccgaaatccagttttgggtcaccaaccggtcgaccggttgccatacggtccccagaaccagaattccggttctgtgctgggaacccgaaaaatctccccttgaactcaaaaactcaaccaaactttatcaaactctccagtacacctatacaatgcatacacaacattttccaaccagcaattcacagaaaagaccactaaatcaaattatgccattaaagctcaaaccttgagcttcaaagctcaagcttgcacactaccctcaccacagcccaaagctaataaccagagctcaaaatcaactcaaaatagacttagaattcaaaccctaagcatacctaaacctaacagccacttattctcaaaatcacaagttcaaactaagtaaaaagcttaataacacataaacaagagttctagggttacctccacttcaagagtacttgatctttagcttaattccaaaaaattgaggaggaaaagttggcttcttctttggttttgtctcagccgaaagaggggaagagagcttcaaggataaagcccttttttttttcttaatttccttc

SEQ ID NO: 291645 - DNA, 513 bp, Cannabis indica
atgactcttggtcacttgtttctcataagtatacttgtttatatgttcggagttttgggttcgactagaccttttgtacgcacaagatggtaaattaccaacatgttagtaatttcgactcaatttgaattttgaaataaacatctttattcatttattaatcgaaaatgtgtttgttaccgtagtaacttacatcaaagctatttgatataatttgatcttttagcttaacatgaaataaaacaaattgcagaaataagaaattgtactttaaatggtggtcatccgacctgagtactttttcatttttgtcgaaacctttgagcgtagtccgcccagcacgccattcacttaaaagtaaatgttcttttagtacttagtgtggtcgtccaacatggtactttattggtagtattttcttaaatgttccccattctaataccgtggtactagaacaagttacattttttcatcatacttacctaatttgtatgctccgaattcaagaacttc

SEQ ID NO: 291646 - DNA, 499 bp, Cannabis indica
ggtaacttttctaagcaaatatgtgctaacaaccatcttaccacaaatttggcatgtgcaatttgtaactctagaaaaattctaagtaacaaagatagcaaaaattggcttgaaaataacattttacaagaataaatgagtaatttttgaaaaatttgaccatgaaaatattaatagacaaaaattaagaaacatgcttgaatatgctcaccacccccaactaaaataagacagtgtcctcaatgtctaaagatataaaaattaaaagaatagggaaagagaacacctggagagcaagcaaccatggatagcagcgatattgatcctctaaaaaaacaaaacaaaaaaaaatgataacaaaggaaataaatagcgaataatatataaacataaacaaaaatagaaacaacctgatcattccgggtaggccagagtcacaaaggtgatctcctcaggtaagcctaccctcctaccaaaatttgtcaatatcgcacatgga

SEQ ID NO: 291647 - DNA, 521 bp, Cannabis indica
taaaatttttacttacatgtcgatacaacatcgataacatgtcatttaatgtcgaaaaaatttagtttctgagtgtttggtttcatgtcgataaagcaccgcgaatatgtcgttaaatgtcgatagaaaaatcatgttttgactgttcagttgatgtcgttaacatatcgcaaatatgtcgcttaatatcgatacaaaagacgtttccacattaaatggtaattaatttgtgacatttattatcccgcctaaccaactacttcactatgtcgtgaacatgtcgcctggtgtcgcgacatgtcgcgaaaattgcccagattgctttgtgcatgacaaacatgtgtacaattgtgtaattcaatttttacatttattatcccaccttcccaactactagttttgtctataaaagcaattttctatctcataagttacatattttcttaatttttacccctacaagataattctcttagcaatgtctactagaaggaacaagggcaaatacccgattcttactc

SEQ ID NO: 291648 - DNA, 684 bp, Cannabis indica
atatacacaaacatatattattgtattcaaatattgaatagtagaatctaaataaataattacctcaaatttttttaacggtagtagaagttactattttaataaatggaccaccatctttcttatataaatttggattgaacatctcatccaatttttcctataaagctttaatgtgatcgaactataaataaaaattaatagaatttaataataagtaaaaataaaaataaataaagtaaattgtatataaaaaattacaaaacttactaatctattataactttgatgtcttctttttttaataacgacttccaacaaagaaccttcactcaatagtttcttaagcttagaaaccaaattttttcgtattgtttcatgcattagattttcttgtaggataaatggtagacacattgagtatttaataattgataaataattaaaaattaaaaatcaaacgtgatgatatttagagttgtgatggtacttttaaatattagttaaaaaaaatataaaaaaacaaaaagaatgaaaggtgatgatacttgtaaatatcatttttttcttaaaaaaattaataaataaaaaacaacaggcactacgtgatgatatttttaaacatccatttttttcaaaaattcaacacgtctcaatatcatttataattaatattaaaaaaaa

SEQ ID NO: 291649 - DNA, 537 bp, Cannabis indica
aattcctggaccctcatccggaattccagttgcacaaccagaattccggttcctcgcaggaatttttcaaaaattcactactcaaccaaatccaacccaaatcatctcaaaccttccagacctactccatataacccaaataacatttctaaagcattagattcacccagaatacacagaaatgaaaaacaccattaaagcccaagctttgagttttaaaacccaaacttggctagaatcaactaacatgcaatcaaaccagattaaacctacataatcatgcataattaaacctctgaaaacaactacaaacttcaacaacatcacagcaacagattttaaccatttctctatgaaaaccatagttttgagctaaaaactaccaagcttgaaatcaaagcaattaacatgcattcactagccctaaacaacttaaaataacaagattaatccactgaaaataacaacaattcacagcagcaagaacatattaaaaatcaagcatgcatcatcctcttttcaaacattttctaaaaa

SEQ ID NO: 291650 - DNA, 612 bp, Cannabis indica
atcatctgatattttcattattttaatgccaaataattcaaacctaaccctatgtggtatgctataaatagatagtgaaggcttcaggaaatatacaactttcacatcttgtttccttcagagaaaaacctgagccttctctctctaaacctagccgccaccttcaccctcttcttcttccttgaataatttcgaacctcttagtgatagagtagtgcccacacacagcaagtgatacctcaatcatagtgaggaagatcgtgaagaaagacattcaacaagaaggagattcaacactaaagaaaggagagaaagagatccaggttcagatcttgataatactctgcgacagaaagatacaagggttagagatctgaacggaaggagacattttattccgctgcacccaatgtaaggtttctcatactttatatgtgtttaatttataatcgttttagaagttcatatttagggtgttaatcaacatacttgtgagtagatctaagatcctggtaaaataatttccaacaaatgaatcttattaatcaagcaccatctcaaaagttctacctgtagagcttcttcaatcaacctcaccagtcaaagatttat

SEQ ID NO: 291651 - DNA, 490 bp, Cannabis indica
tatcatttttttttcaaatttgttatttttgaaatttaatttactgattaaattataagattaggaatatgttagttttaacattttatcttattagattttttttattaaaattatttttggcaaaaataacaggaaatttgaaaaattggttagtttaggtttgaatagaaattttagagtttctaaccataaaatttttcaattattttattttttttaataaaattagaaatattctatccataaaatatcttatttttcaaatagtttattttgtaatatttaatttattaaattataagactaagaatataatgttaggaatatctaaatttttttaaaattcaagatattatattatattatattatcttattagatatttaaataatttaaaatcttgaataaacttgaaatttgaaaaattggttagatatttttgaatttaagttagaatttaagaaatttaggagttttttagtttttt

SEQ ID NO: 291652 - DNA, 639 bp, Cannabis indica
agggcaacatgtcgttattctgttggacttgtgcctagttttggtcgacttggacatatcgacgtaggtgaggactgttccttcttatcaagaactcgatctcttctttcaagttcttacactcattagtgttgtggccaaaatctttatggaatcgacattacttagtaggatccctcttactgatgtattttttcatcggaggggcttcttatacagaacaatggcctgtatggctattaggatagtctcgggggtgtctgtcaggacggtgaagcatgtgaacttcttctccttttcctgagggtgctattatgtagggggttattagatttcccttccttttttttttttatttttccatttccgttggtgggaaccaattattattttgtttccctccactattgttgttggttttaagctgaacagtattgcctcccctagctgtggcaggtgtgttgctaggggtagtctatttttttgcacgccaatttatacctttcaaacaacttcttcaagttttgtgaaaccattagctcggtctaaaaactcactcatattgttggttgatcttttcctgatgtccctcgaaagatcactcataggtaggatacctcctagaatgaatgtatactt

SEQ ID NO: 291653 - DNA, 575 bp, Cannabis indica
tttttaattattttttaaaactaataattaatttatttatttttagtgataatcaaaatgtgtgattctatttacttgcttatttattttttagacaataaaaaaaaacataattaaattatattttttatttattaaatttcttttttttaatagataaaataaaccataatgaatcattattttaatttcttttataataaatattggctatttactttataaggaatggaaaaatatttcttttcataaattttgcaccattttttttttattattattaattttttttggcttcgtatcattctttaaaataaaaattatgttttttgtttttttactattctattcaattgttctcaaatttctctctaatcaaatatgtatatatatttatgttaaatcaattagttttttgcctattcatgaaaagaattttttttacttaaaaaaataaaataaaagtaaatcgatctaacacatactattaacttggtcataatcatatttagtttatttttttctcttttgttgtttctttatattatattactaacgaatatgaaataaaaaat

SEQ ID NO: 291654 - DNA, 624 bp, Cannabis indica
aaaactatcatatcttaaataatatcaaaggtttccaacaaactgatacagtgtcccggtaggcgagactcaaagtaatcattcattgaatagagttgtcaactcatttaaaatggtaaacattctagcaaccttttattcgatcaaaataagaatctaacgttgtcccggtaggcgagagtcaaggttattcttagtttatgagcttccaccattgtttcatacttcgtaaatttatctctaagtagtcactgtaggggagagtctaatagagacgaaaacttacaaaatacttatcataagagatcgttacggtgttaaatacttcaacgaataaccatccataaggggaacaaagtctagcgtctcgaggttatattgataatatttaacctagtaggaccaacaatggagatcgaatatccttataactaaagctcattatttttaaggagttgtattttcattctaatattaatttttatctatttattttaaatatatatttatttaaataaaatttccaatttatcataaaattctaaatataaatttttatttaatatctataaatttatacttaatttgatctgaaactaaattaaattattttccatcttagta

SEQ ID NO: 291655 - DNA, 667 bp, Cannabis indica
ttatcctaaccaatttttcctttttccctatttaattaatttaaaaaataaattatttattacaaaaataaataagtattattttgctgattcaaaatagatttttctaaacaatattatacaactctttattcatacccttgacaatgtttcaaggtggtgattccggatctatagacctataattctaagcaataaactatattatttattgagtatcatcaaccaaataatcttattaattaagtccatgattacttcactataaatatggaataaaattattatagaattatatttactgagtttcactgtagtgtctattgatataataaaattccagtgattagtcctccctatgtcggttcgtaattagttttggtcaaattaccgttttacttttttaattacttatttatcctttagtactgttaattcactagtgaaagtataatttagatccaatctaaatttgtgtacaacttttttaacttcagaattaacacttaaatagaactaaaattcaatctgctaggtaagtcatatgattctaatattattgtagaccatgttcctaaccattgacattattaaattccaaaaatagaagttgtaagtgttcggtaaatttagtgcaagtatacacaatcgaatcaagtaatataat

SEQ ID NO: 291656 - DNA, 532 bp, Cannabis indica
tacaaatccattcaggcaagcttgaggatcactaaaggttctttggtagtgatgaaaggagaaaagatcaatggtttacatgttctccaaggagaaactgacccaaacggacagacaagtatggtgaaagggctaaagtcagatatgaagttgtggcatcacatacatatacatatcagtgatcaaggcctcaaagaactgaacaaaaaaaggtataattgaaaatttaaattcttgcgccttaccattttgtgaagcttgtattttaggaaaacaacataagctgaaattcactctggcaaggtataccactaagaagatactcgaatatgtgcatgctaacctttaggggccatacaaagtgcctactagctcactccagtaagcaataatttcttttaatagttgatgattatagtaggtgtgtttggacctacttgttagcaacttaggatgagtacctgaaatagtatagaaattggaaaactcaagtggaaaaccaaacacatcttaaaattaagaaccttaggac

SEQ ID NO: 291657 - DNA, 639 bp, Cannabis indica
aaacaataattaataattaaaaaataattattaattgataataaaatataattaataattattactcaaaccataaaaaatataacaataattaataaaataataattaataataattcataattgatagttaataaaataactaaaaataaataaataaattcttaaaacattaactaaaataataattaataaaaaaataattaataacataaatattaataaatcaatacaaaataaattaataatattaaataaaaaataataataaattctaaaaaaaaaaaattcctgtagggttcgattggtccgaccatcggaccccaccacagatcattggaccttattttaaaaaattaaaaaaaatataaaattaattccaaaaacaagtcgggtccgatggtccgaccatcggacccatatggggaccatcggacccaggttccaaaaaataaaaaaaattccaaaaacaaatcgggtccgattgtccgaccatcggacccatatggggaccatcggacccaggttccaaaaaataaaaaaaaataaaaaaaataaaaaaaatatccatcggacccgatgggggtccgaccatcggacccagtgatggaccatcggaccatcgggtcttcgcccctg

SEQ ID NO: 291658 - DNA, 753 bp, Cannabis indica
gcatttgatgagtaaatctcgtcgactacaaaccttgcatagttttttggattgcttctgtaacaccctaactagcataggcgtgttagcgtgatttttaacgtactgtacatctcgttgctaatcaaggaggttattggaaaacgtgaataattaaaatttttcttatttaattaaaatataacatataacttttataaacttttgggatcccatttacaaaatacagttacaaaagtttactacatatttacaaaatacttgtcgcctaacgacaaaataacaaaagccttgatgtcccgaggatcgtacgctccatgcctaactgccctgacatgtacaatcttcatctactcgctctcacggctcctcaactttagctttgcccttacctacacatagcaataggactgtgagtcgacagacttagtaagaaaagcattacatataacatacatataacccgggttataacctggcgcccatacatccgatcataaccctaatccctgagtcccacacggtgctgagtccagaacgttcgtacgacggtactattgaccataatatcagcctatactcggtacactagtcataatctaggtgtaccgatgtgatactgtcaagtagtacggtactatcgaccataatatcagcctatacttggtaagttagtcatactctagtcgcatcgatgtgatactgtcagatagtacaaaagccaacatacatatctaatgtaatctaacatgc

SEQ ID NO: 291659 - DNA, 531 bp, Cannabis indica
ttctcatactttatatgtatttattttataatcgttttagaagttcatatttcggatgttaatcaacatacttgtgagtagatctaagatcctggtaaaataatttccaacaatttaaacacatataaagtttgagaaaccttacagtgggtgtagcggaattaaaatgactcattccgctcagatctctaaccctagtatcttgtctgtagcagagtattaccaagatctgagcctcaatctccttgaacttggattcttcacagccttacatactatgattaagtaccacttgatgtgtgtgggcacttactctatcactatagggttcaaaattatgaagagagaaagagagaagagaggttcgaatagcatagggaagaaggctcaaatttttgactgaaggcaagtgtttgtattatcctttaatttgaggccatcactatctatttatagggaaccacctaggtttaggtttgaattatttggcattaaaaaaataaaaaaaattgtaaaatagagcaatagtgg

SEQ ID NO: 291660 - DNA, 722 bp, Cannabis indica
gttcatcaaagaaagttgttgcctgagacaagtacaattccatgcacaattagtaaaaccaggtttgatcattgcatgatagatttaggagaaattattaataatatgtcttattctaattttgcttcttaaatcttggtccatcaagaaaaactcaggtttttattcaattgactgatcaaactaatgcttatcctttagggatagttaaagatatttttgtgcaggcttatggacttgtcattccaggtgattcctacataattgagatggaagatgagggtgatcccaatcctacatcaactctatttgggagacccttcttactcactgcgagtaagaagttggatacaaaagcatggatacttagaatggaatttgatggtgaaacactcaaattcaatgtgttagattccattcataaatacataaagaatgtgtctttgttagaagacccaacgtgaagatcacatgagcacaacatgcagtcgagctaacgacgttaaacaaagcaaccttacgggagtttttcttacccttttctttttattttgcattgattttatttgattgagccttgaggacaatgcttatattaagtgtggggggagattaactgtcgtgtctatccaattttttttttagttgtttagttgtttatttgtttatttttatcgtttttttagtttatattattttcttgctttaattttagtaagtgt

SEQ ID NO: 291661 - DNA, 517 bp, Cannabis indica
ccccaagagtaaacaccatcccagatgtagatttcatgtcatcatgacatgcctagaaatctgaattggtatagcctatgggatttaaagcaccacccttatagactaacacgaattgccttgtactctttaagtacttcaagatatgcttaacaacattccaatgttcctgtcctggatttgtgtgatacatgcttacgattcctactcataacaaatgtcaggtctagtgcataacataacatacattagactcccaagtgcagaagcataaggaacccttctcatgtcctctatctcttaaggatcagtgggacattgttccttagatagacggatactaaatctagaaggcatggatgcccctttggtgttggtcagtgagaatctctctaaaaccttatctatgtaggttgtttgagagagagcaagggatctgttcttccagtttttgataatctgaatactaagaacataggcagcttcacccaaaattttcatttcgaattgagtgtct

SEQ ID NO: 291662 - DNA, 280 bp, Cannabis indica
acctgctatgggtggttataaatactttatcaccttcatcgatgatttttcccgatatggccatgttgagctcattcgtgaaaaatctgaatctttagatgctttcaagattttcaagacgaatgttgagcttcaaaagggaaagaaaattaaagctgtcaattctgatagaggtggtgagtattatgggcgttatgatgaaactggaaggagccccgggccttttgccaaatacttgcaagaatgtggtattgatgcaagatatacaatgccagggaca

SEQ ID NO: 291663 - DNA, 543 bp, Cannabis indica
cgaccaggcgagccactccgggcatacatcagcagattcatgacggaagcgaccaaagccttgcgggtaaccgaggatggaaagttatccgcgatactggggggcattgaagtccttggtgaactatggaaggatataaggaagaacgggccggtcgactcaatgagtgatttccttgaccaagtcgaaggcttcatcaagctcgaaaaagccattcaacgagagccgggcaaaacaaaggccccttctactagaacatccaccctacttcctaactattccaacaattcaagtggcaagcgttcaagaaacaaccccaagcaaggaaacgggaagaaaggaaaattcacagataaatctggacagactccccgtgatcatgccaaacacactgcgttcactattctaactgaagatattgagagtgtgtatatggcaactcagtcgttaattccgtacaagaagccggggcccatgaagaaagataccaataaaagggacatgacaaaattttgtcggttccacggagactacggccacgac

SEQ ID NO: 291664 - DNA, 810 bp, Cannabis indica
aaggcatatgcaatgtcttcatcccaaatattaaaactatacttaggattaggtcttggtacccttctgcccctgtccctgactaattgataatcccccaagtcttcttgagtgccttcatcaacaatgtcagtgttgtcttcatcaggttccacctgaacctggttcccaggttccacctgaacctgatctccctggttctgttcaggtgtgttcactgtttgttccacctgaatagatccagttccttcatttgcagtgttacctgcattttcagtgtcttttgtacctgcactagggttagaagaaataggcaaacatggaaatatatcttctttaaatattacatccctgctattaatagttttaaaacctttttgttcccaaacccaaagtctatatcccttaactccttctggatatcccagaaaaacacatttcatagccctaggttctaatttcccaacactttggtgtgcatatgctgcacaaccaaacactctaagattagataagttaggaggtttaccagaccatttttcctcaggagttttgaatccatttgcactggatggactcctgtttattaagtatacagctgttaaagctgcttctccccagaaaccttgtgatagtccagattgcaacagtaagcatctcactttgttgagaatggttctgttcattctctctgcaactccattctgttggggtgttattctaactgtcctgtgtctctgtatgccatgttctttacagtaattgttaaactcatcattacaaaattctaatccattgtcagtccttaga

SEQ ID NO: 291665 - DNA, 514 bp, Cannabis indica
catagaacatcaaaattagaaaggacaaaaaaaaacataacaaaaacttaaaaattatgagtagatacaaaacttcaacttgagtataggacattatatataaacataaaccaataagaacaatgcaaagaatacaaatagtttttttttttatttaatggaagaatatgaatagttttaataattaaatatagaataaatacaaataatatttgtttaatgaaggaatacaaataattttaatatttaataatgaaatcttaatataatcataaatgaaaagagttagacaaagaatacaaatagtttgttttttgttacaaacttttatttttatgtaataataaaaattctaaataataagaaaaatgaagattttagaaaaaaaaaaaataataataaaaaaagttcatatgtagtaccacatcaacctcctatatcattctccattattattattattattattattgatagaaagagtaaaagatgatgatagttacaatttataatt

SEQ ID NO: 291666 - DNA, 564 bp, Cannabis indica
ctcggttcgggtttaggtctctgtcatggttttgatctgggttcaggttttggtttaggtcctggtccttgtcctagtcatagttcggttctcgttccatttgcgattctgagttcgagttcgggtttgagttcgggtcggagttcgagtactggtctgagttagggttcgggtcttgatttctgtctaggtccagatcaggcttcgggtgtgggttcgcctccttggtcttggtctaggttcggtccgagtcccaagttccaataccgatttgagtttggattcaatttttgagtcccaagtcccaagtccctagttctgatcctgtgctagtttcgtgtttgggtccaggtccgggacaagctttggttctgattctaggtgtgggtttgagttcgggtccgagtctgtgtctgggtttgtgtccaggtgtggaccctgatctgggtctaggttcgggtcaaggtcctagtttgggtgccgagtgcgggtccaagtttgggtctgggtacacaaccatgtcctggcccgagttccagtctcattttgggtctgaggctaggt

SEQ ID NO: 291667 - DNA, 428 bp, Cannabis indica
atgacaatattatttaataatctattttagttattaaataattagttttgacatttaaatggttagaattggaaaattgacattttgggaaaatagaaataaaattgtggaaactgcaaaatccaagtgaggcccatcacacccatggccggccactagtgtgtgtatttcccaattattattttcattttttaatgcaaaataattactaacctaaacctagcagttatctataaatggaaagtgatggctcacaccaaataaggcaattaagcaattactcagtaattcaagaaactgcctatttcagatagttgagcttcccttttctctatatatagttgccccatctcttcttcttctctttgaacaatacacagcacacatacaagaaagatacaattttgaaatcctagtgagagagtagt

SEQ ID NO: 291668 - DNA, 503 bp, Cannabis indica
caaagcaaatatatttatattcggcttgaatacttaactgaatattctaaaagcaaataaaatttaatggaagatcaatactactataaattctcaagaattaatttagggatgctcttgataccacatgttagaatactgtaaactcagaatatagccctaattaattcatgagaatcaaacaatagaatatagattagcggaagcgtaccggagtccatagaatcgatctttgattggtatgatcttccaattttgcatcaaaacctttgaaaccttattttcctgatgatggggattcaagaactctggaaaaatactgatacgatgcaaaatggggacccatacctgttatattaccaactgttacagttggtaatatttattaataatttctaatttggcccctcatcaaatcagaaactatctaattggtatccacatattaaaatcatgacaatcatgcccttaagtcataaactttattccaaaatagaccacat

SEQ ID NO: 291669 - DNA, 664 bp, Cannabis indica
aaacaccattaaagctcaagctttgagttctaaactcaaacttgagcaaatccctctaacatgcattcaaacctgaataaatctacttaaatatgcatgactaagcttctgaaaacaactaaaaatatcaacaacatcacagcaacagaatctaaccaattctctttgaaaaccatagttttaacatagaaaaatcataactttactcaacctaactatcatgcttcacaacagttcaaatcaactcaaataaacaagctttaaacctcagaaatcaaccacaaaacacagcagcaacaacctcaatttatcatgcatgcattacatcaatttcatcaaaattcaacaaattttaaagaaacaatgaagagaagctaacctagcttgaagaatgcttagaatggatgagaaattacttgaaaatcagagcaaaacccagctccttgcagcccaagacttggccgaaaatagagagagaatgagagttttttttttgaaaatttctttcttttctttactttgtaatttttgtaaaaaaagaataatgaataaaagacacttaacataaacccatttcagccaaataaacattaaaataaatatttaattttcaaataataaagtcactaaaagacaaaacactaatggggcaaaaagaccattt

SEQ ID NO: 291670 - DNA, 663 bp, Cannabis indica
gacctaaatcagtagttccccgtaaataacgaaatatatgttttattccattccaatgcctcttagtaggtgatgaactaaaccttgataacaaattcactgcgaaagcaatatcaggtcgagtacaattagcaagatacataagagctccaattgcattaagatatggtacttcagtaccaagtatctcttcattattttgacaaggacgaaatgggtctttttcgacattaagtgatctaacaaccattgggttacttaaagggttcgctttatccatattaaagcgtttcaagaccttttcaatgtagtttgattgatgcaacattatcccattgtgggtatgttcgatttgcaagccaagacaatatttggttttccccaaatctttcatttcaaattctttcttcaagtacaacattgcctcatgtaactctttatcagtcccaatgatatttaaatcatcaacatagacaacaataattacatatcctgattttgttttcttaatgaaaacacatggacaaattggattattattgtatcccttctttaataaatattcacttaaacggttgtaccacatgcgtccagattgttttaagccataaaatctctgtaactttatcaaacatatctctttaggcttaaaggttgatgctt

SEQ ID NO: 291671 - DNA, 796 bp, Cannabis indica
agtaaccaaatgaaggaaaggtgttggcttttataggccaaagtacatgaggaacatgcgctatcacctaccaatcgaacggctggggaggcgcacgattcgaattcccaagaatcaacggttggattggttcgtaattaaggcggtggaaacgtttgagtatccgtctgacaccattaatgcgctgtatcaatcaatgggcatgaaacgaatcgacgtctgcaaaaagtgaatcactgcattaatggtgatcattaaatgcaccttcacgcgcccaaagcacgtgccaggaaaccgaggagtcaaccggaggcacttgaacaagccttgttttatttttcaaataaacaaggcttgggggtaaatgttgcccctgattttgcccaatatacgtggaccaaccggacagggacacgtggatcaaaacatcttaatacttgaattatttgctaagtctttatgaaataaggcagcatccgggacatgcctcccggagaaggcatacggagccccctatgctcccggaagcctaagtaacattaaagcatctccgcgaggtgtcaggcttcccctgagcagtcatttcgcatttaatgccgcatgggaggaaacgtgttgggactgctacacgcaataaagtctgacggcacaacccccaatttgcacctgcgaagtaatgatcatttaagtctattgacggctacactgtgaagagtcacatcagtcaaaagacaataaggacattccacataaaagccctacagcacctagggatttgaccatgcattactcatgg

SEQ ID NO: 291672 - DNA, 699 bp, Cannabis indica
aaggagtaccgccaccatttcttcttctcctccgggttccgagcagtggagcacccggagcttctcacggagtgggtaaggattcctccctatgagcggaccgcgcctactcaggtctttctccggagggcccaggtctttccaacttatgaccgggcagaacttgacgtcggacgcctggtcacgacggagaactaccggaaggccaagctcatcctaccgcaccaatcagtggaggactctaacctctccagagttatctgtcccaatgtgagggcgcctgccgcggagaaggtcttccgggacgagatcatcgccactgccaagaagaactaccaggaatatctctaccggaaggctcaggagaaagcttactccaaggctcaagcagcttccgggaggccacttcgcgtgggaagcccggtcgagaggagaagccaggcgatcgctgggaagcctcttcgcattagggactcagctgagagaagggcttctaggccaaagccttcggctcaggaagcgaacactggggctcctggtgccagcactttcggctccggtaagtctcctttagcagtacattacatcccttctgttggcgaatatgccagtcttaggcctgtagggttcgatgagcgtcttcataggtttaggatgccctcgacccggtggggggaccatatgaaggaattttatttt

SEQ ID NO: 291673 - DNA, 574 bp, Cannabis indica
atatactaatcatcaagttattagattgaattatctctaaaaattaatataatatacacttatattacatacaattgttttcatatgaaaataaaaataaaattatattgtaaaaattggtaaactttgtaatgtatagtgtagtacaatttgaactgtaataattaacttcaaaccgtaaatcgcactgcacagcgcaatttagtaaaaatgcaaaccaaaactgtaccccaaaagatttcaaaccgtatttttcatgtggtgtggtgcggtatgagtggtttgtgcggtgtgagcagtttgatgaacatctcttgtaataatgccaaataaatgttaataagataaaattatttaaacaaaatcaacccgatatattatgagcattgggcaccttactgatgtggcatgttttagagattttttattttatttattaaattaaaatgtgtggcacctggtattaatttgcaccaatagtggtatgccatcttttgtggtgcttgagaccttaaggtgccccttagcattttttcatatattataggctattttaagattttttgtcccccct

SEQ ID NO: 291674 - DNA, 709 bp, Cannabis indica
atttatgctagtaatgtatgtaagctttgacattatatatttctattgggtctatatttttccaacgaaaaacagatatctcctttagattcattggagatatataaaattagtttacattcctataaagacaaagacagatttgaatgcatttaattcctaaatgccctataccagtttgaatgcttagccaaaattgtggatcaaactaaaagaatatgtatccatatattataatcaagttgctatgtgactaatttgtgagtaatctgtaatgtatacatttccttagttaattctagtgaaatttttaccacaataactctattattgtacagtattttacccaaagtggcctgattaacatcaactggagtagtagacgatctctattattgtacagtattctatgatattttatttcttcataaaacaaaattaaccaaatgacagccataacatacccgaactccgaactgacgaagagaagagaagagagggttggtgccgttgtcgaccacctcagaccacgcgtgcgacagagaacggagaaccgacgaagagaagatggggcagtgccgtcgtcgacggagaattgacgagaggggagaggtagtgccgagctacgtgctagagagatggggttacgagagagagtgggcggcaaatgaaatggggcggtatatgactaggttattttggctgaaaa

SEQ ID NO: 291675 - DNA, 620 bp, Cannabis indica
attaccttttaattttaccttgtaaactccccctcaatttttacttatgataaatggattagataccaaaaaaaatttgaggtgatgccaaaaattaatcaatagttgttctcccccttttgattcatcaaaaagggtggcaaggaattcacaaaatataaaagaaaagagaaaaaaaaaaaataaagcaacattccaatgcattaaaaaaaaaacataacatccaaaataacattcaacacacaaaaaaaaaaaaaataaaataaaaagaaccaactaacacaaagtcaagaggcatgaagcctttgcacacaaccaaaaacaaaataaaaaaaaaactaaatatagacaaaaaaaaaaaaaattaatgcaagaactagtttggtggggggccaaagcgatccatgtatgccctccattgtgccatctcctcttgaacatttgcaaacccatgaaccatgtcactcctcatggtgttgatatcattgttaaggttggtgagttgtgagttgagatcattcctcaaggtttgaaattgattgtcaaccgaagtgtgaagacgagtaaaagcttcctcaaggttgaattggggaaagttaggcatgggaggagcttgagga

SEQ ID NO: 291676 - DNA, 383 bp, Cannabis indica
atgagatgaagagaagatattctgagagaaagaatatcaggcacacgtggtttcaggaacattattctggggatccaaatgatttggcaagtgttattgaagcagtacctgatcactgcactacagagagttggaagcaaatcattgacttatttttgagcccaaaattcagggcgcgttcaaatcaaaacaagaaaaatagaggagaaatgcagtatttgtcaacgcaaggctcgaggtcgatggcagcgtctcgaaatgaacatgtaagtaaaattatcaactttctattagaaatttcttttacttaagacataaactaactaccatttttaaacaggacgtccccgaagactacacaattgatacttggaagaaaggcc

SEQ ID NO: 291677 - DNA, 731 bp, Cannabis indica
atttacaaggatgatattgtaactataatgaatactactatagaaaaaaaaattgaaaaaaaaaaaaattagccatgtgatttcggatgtgaatattaactaagaggttgtaattagtattcctcttacatatatactaggttattgttacgtgcaatgcatgtatacttagtaatatttttagtttttatttttgtttatgtgtatttttaaaattttataaattaaaggaaaccacttattaatttattaaaataatatattaatattgtatattaaacatactctcaatattaaaatacaaataaaaaataatattgttataaataatatattaatatttatatataaatttaaattggtataaattcaattaacttaaaataaataatattactatttatatatatttatttttaaaaaatgtttatttatattgaaattaatctaaaataaataatattaatatttatatatttatgaaattaaatcctacaatgttaatttaataaaatatttttatattcttaaaatattttgttaaactattaaaagttaaacagtcacaatttatatataaaagtatatattatattatttgattatactttattgatgaaaatttattagaatataataaaatttattaatgagttgtgaatacatgcctgcaccagaaataattccttggggtgttacgaatgcgtttactcttatccaaaaatgttgat

SEQ ID NO: 291678 - DNA, 595 bp, Cannabis indica
caatgcgcataaacagaaagatcgtgggatcaatgctgaatgcaaggatcgtgggattgaggctgagtacactgatagtgggatcgtgtgtatgccgtatccacgtaaattgatccctgagttatagggattgagctgatgactcatgatgcgaaagctgaattcgctaagtgttgattgctctgcacgaatcgctgaatatcttactcaggacatgccagcgaggcatcctgctcggcctatcttcccaagcagatgttccaagtggactcaacgtgtcaccattctcgtgatgccacatcagagtgcaaaatttgggataacattcgccccccaagtttgtacgggacctgtgaggttgcgtgtagacttcttccgagatggttctgcctatggatggggacacgtgtcgagcgtcaccgttcgagactcgatgtgaagcttactggacgtcccttcagttttcggctaataaatgctctgacaattaatatttcgaaatctgattttctctctccatggctgatagttgcactcaattacttttgatttcccatattcgtttttgaggcgggaagctaaggcgtctgaggtt

SEQ ID NO: 291679 - DNA, 685 bp, Cannabis indica
aaaatggcgttgaaactactcccagaacgaccgggttatagttaaaccatctccggtgagagataaattttaatgcatgctttataaaatttctcttctattattaagcttataggtaaataatgacataagtacttaattttaagtttataattagcacaaattcaataattattttagcagctaaagtactctttttttttaataaagtacccaaaatttttagaatgtaattctattaagatctgtctaagttgatgactaatataacaagtgtcacaatcatattgtttggtcaacttgtaattatttttgaaaaactaattttaattaattttaaattttaagaaactaattaaaatccattaagtattttacaatacatttaaaataaataaaaaaaattaaaagtatgtagaaacctggtgtaaaaaagaaaaacaaaactaagttaaaagtctttcaacaaaaactattatttattcctataacgatataggatattatgcatgggtatgcatttctctattaaaaatgatttcacattttaaagtagcattataaggttataatataagaaaatactcaaccaccataagggtgtgtcttagagatcctgggatcgagtccagtaaacatgattgaatatataaaagcttaaataaatgttggataaattcccata

SEQ ID NO: 291680 - DNA, 651 bp, Cannabis indica
atcattttcaatagatggtgtataatttgagctaaaaataagtcaaattatatttgccccaaatttatataaaaaatctattaaatatataaataaaacattaaatttttactaaattatataaaaaatctattaaatatataaataaattgtaaaaaaaaataattaattacattaataaatggcaaagaataaataacaaaatatttattatggtacaaaatttgacttatattttgtgttaaatttgacataatttttagcatatgttaaatttggaccactttttatacaccactattggaattcacctttataaagatggccttaaatatatacataagccacattttcagctcttctttagagatgatcttaaattcagtgacggacctagaatttttacttcgtgggggcttatttataattaaaaaatatttatacatacattataatcactcttactagatttatttaattttatgggggctttttctattattttagtctataattatcaaattaaaaaaattacatttaattttttagaaggcaatatttttgttatgggggctatagcccccacatttttacttgtgggtccgtccctgatcttaatatgcacatccttaatcactttaattataattt

SEQ ID NO: 291681 - DNA, 501 bp, Cannabis indica
tcttaaactttatatgtgcttaatttatcgttttagaaagttcatatttagggtgttaatcaacatacttgtgagtagatctaagatcctggtaaaataatttccaacatctacttgcctaagccccctagacggcgcaatgctaccaataacatccccactaacattaatcatatgtcacaattgaaacatatctcataatcaaatcaatccaccaaaggtgaaaacccaacttttccatcataactcaaagaaaagtccaatcaacttgatcatagaccttaaccatatactccttataagcaagaaatcctttacggccactcaagaccaatcatgacactatcagagataagtctcccagatataaaggcactttgctcctcaaaaataacatcatttaagacctcccaaaacctattcgtaatcatcttagcaataatcttgtacaacacattacataaattgatagacatgaaatcactacttaaagtgaacgat

SEQ ID NO: 291682 - DNA, 594 bp, Cannabis indica
tatgcgcatgatccaatccaatatgcaaagtgtggatatttgcacttgtgcgtattagattggatagaaaatctaaaatttacacttgtgcagaatggatattgatttacatgtaaaggtaattaatccaattcaatccacataaattaatatatattttaaaaagggataattgcggcaaaaagtcccccaaagcttgaggttgatgccgattagtccccaacctcaaaaattgacggtaataatccctaaggtcacactttctgtaagtccgttggtccctaacttaactgaaccgttaaatccaaataaaatgacacgtgtcaatttttaattggtttaaataataatttaattaaaaaaatttaaataaaataaaaataaaaaaactaatatattttaaaaaataaattatttatttcattttttcttttcctgtcatcttcttccccagatccccttccattgacctctccacccttcttccttagcttcgaccttcttcccaagctctgacgtctcaatcccaatccattgtcggttgcatcttcgttagctccgacatcagatccaagcctcaatatgatattccta

SEQ ID NO: 291683 - DNA, 610 bp, Cannabis indica
atatgatgaaggccccatgcactatttattcatatatggagtttgtgtctctatatatatatatgaatgaatattattattctaatccaaaataacaatgtacagggtctattttagactttgtatagctagttggatttttcatttctcctagactacgcatgtcacacccaaaaaaattaaaaatgaaaagagtttaggataattatgtgcactttaaaataattaagtgtatgtttgatattataattaaaaaactctttattatttttaaaaataaaaaattattttttgaaaataaaattataaaaaataagaattttgagaccaataaaatattattttctgttctaaaaaataagtcacttttagacaatattttttttttcattttatctcattattatattaaaaaaaaagtagaaattagtgaacacaaattattacactataaacataattttttttcttttataacataattattcaaaaatatgttagcatattttcactttcctaaatagtaaacactatacattgtgctttcaaaaaaaaatactagacattgtcatatatatatatatatatatttgttaaggtatataattag

SEQ ID NO: 291684 - DNA, 907 bp, Cannabis indica
aggcattaaatggcaataaatgcacattcccaggtgtcaaaacgttttttttttaaaaaaaatataataataaataataaataaatataataccccccccctctcccacgtgtaaacgaccataatgaggaaaataagattaaaacataaatccatggggaaaaatccttacaaacctttaaacaataaacgaaacaaataaataaaaagattgttccataaatttgtccttgaacaaaaacgataataaaaaaaaacataataatgataaggaaattgtccataaaacttgtcatacacgcataaaaaaagggagcagtaaggaagttattgaaatatgagtagggaaaatcccctcccatctctttaggctccgtcgtcatcctcgcccccgctgccttcgtcggactccgaagaagaatccaccaaatcttcatccttcttaaactcggagtatttcgcaaagaattcgtccagattccaggcatcggatttgccctccttaaactcggagtacagtttaaaggacgactgataactcccactaaggaacgcctttttgacttggcccgtcaggattttaacctccttggccaaggattccttctcagcaaccagaaccttttgggcctcagccgacgccttctcgacttcggacaactttccactcaaggaagaaagtttgtccttagctgtctcggcctcagaacgagaagcatcacgttcttgcaacaaagtggccttctccaaattcaccgctgacagactagtctccagagaagccaccttgccacttagagtccccttttctgactcaagggccgaccgagtaaggtcccaactccttttttccgactcaagattgtcggctttgctcttcaaaatcttaatgtcgacctccaaagcg

SEQ ID NO: 291685 - DNA, 563 bp, Cannabis indica
ttgatatggaggaagattcaactattcccattattttgggaagaccattcttagccacaggccgagcattaatagatgttcaaaagggagagttaaagttgagagtgcaagatgaagaggtcaattttaatgtttttgccccaaccgacattcctacctgttgcaagattgagatggtgaagggttcttttgttaaagctgataagaagaaagcaaagcctaaagagcgacttcgaacgattcggcgtcattggaaaagattgatgtgtggtagttctgaaggtgagcttactcttgtgcgaaactctgaaatcaacacgattggtggtaaattttcttcatttagtacgagggctcttttggatgaaaagggtccgcccaaccccttctgatgggggttcaggtaagtccttctcaccttgagtataatagcacattggggacaatgtcatatttagtttggggggagagacttaaaatttttaaattctgcactttaatttctgcattttaattatctgttttagtttttttttgttttagttaaggaatggcaataagct

SEQ ID NO: 291686 - DNA, 373 bp, Cannabis indica
tacgagtgttggtagggttttttagttaccctgagtaccactgagtgatacaccacacacactcagtactttcctgtacttgtgctggtatcactgtaatgtactctcaaataacattcactataccaatgcactctataccttaactgtacaagtgttggtagtgcaactaacactttaagcatgcatatacacaaaacatatacatacactcagacattaatatcacacatcatacacagtccttaccttctttccaaattcaagtgcgttggccgacctgaacgaaaagtctcgcgctagatggatgccctaatcacattatgaaaccgggtaagttacatgatcacaaccctaatcccaggaaacccga

SEQ ID NO: 291687 - DNA, 804 bp, Cannabis indica
aatatgattttcttttaattttatttttatacattttcataatgaataattaaatttttattatatttctctccttcaatcactagctttaatttttattatcttaactattttgaaataaattacatacatttatattaattttagtgctgtcttttgattttttttaataatttacacaatagaacgaatgcattgaagattatatattagtattttttttagtaattttaattatttaactttctaaaaaaatatcacatacctttatattaattttttatcattttacaccatttaattaatatattgaagactgatatatgtactatttttttaattaatcttaattatttaactttctaaaaacgtattaatttaagaagtttcttttgttattgataaatttaattttgaattattaatatttaaaaaatttgtattctaattgatctatttatctatatatttttatatctacatagaaatctgaaagaaaaataagtgtggtgactttatctccttttaatttttactttacctaatttgcagtttttttataattcttttcatttaataatattaaaaaaaagtatatgacaacccgattaaatatatactcagatcttactacttcttcatttatacaattaactaaattaatatcacccttacatattgcacttccactgaaatcaatgagaaatttattgactactatttatatttctctgtccattaaattcctacaattttttttttcttaataaatatttttgaacttttaatcatgcaaagtagtat

SEQ ID NO: 291688 - DNA, 995 bp, Cannabis indica
agtaagtagatgacttcatcaattttagtgcctttgtagtatagacaggtgtcataatagctcctagagaaccctttcttgatcatgaactcatcaaaccttttgttccattgtcttggtgactgtttaagtccatacagggacttaatcagtttgcaaaccaagtcttccttgcctttttcctcatatcctttaggttgttgcatgtagatttcttcctcaagttccccatgtagaaatgcagtagttacatccatttgatcaacttctaggtcaaattgagtagctatggtaagtataattctgatggttttatacttagccacaggtgagaatatctcattaaaatctatcccttctttctgtgtaaatcccttagccactagtcttgccttaaacttcttaggatctgtctcagtgagtccttctttgtgtttgaaaagccacttgcatgaaactatgctctttcccttaggtttcttcactagtatccaggttctgttctttctcagagattccatctctgtgtccattgccttggaccatttcttggcatctttatcagtcatagcttcttcataggacttaggttctgtcatttccactcccatagcacaaaagaatgcataggctagcacttcttcccaagctgtgaagctgaatctctgtgtaggtctaggaacccttctagttctgtctctggtcagttggtaatcttgtattgcctcattttcttgtccttcttcagtaataggttccacctgaatgttgtcatcctgaacttggtcatttccttccaagttttcatctccctgagtattttccacctgttctggttccacctgaacagtattaggttgagtgttccttgtttgcatgtccacagatgtgcctgcagggttagtgtctaaagtaggactagatatagcattattattagtaatacaaggaaataaatcttccttaaaaacaacatccctactgtttatagcttt

SEQ ID NO: 291689 - DNA, 697 bp, Cannabis indica
tatttatttaattaaatttcaaatttagaataaaattctaaataaaatttaatttaacttttataaaattatacttagatggttatgaaaataaatgaattatttccatcttagtattaattttccaataaatattaagaaaattatttaatttaagttgtattaatttaaattaatttgcaactcaaatttaaattttctataagaatatatattgtatttcgaaaaattaaagtataaaattatacaattttcgaaatacttaataaattaatctttaccaaaaaatacttcaagcaaaaatattatctatctagatttttctttgactaattaattcaatttctaataataatatattttagttcatttattttaaattaatcattaaatgaaaaaatcattgatttaagttggttcaaaaattaattaaaataaataattaatttacaactttaatctatttttcaagataaattcaaaatcatcttgcataatcaaatgcaatttcgaaaattgattaataaaataaataaaatatattttgaaaattattcaaatttaagttgttatagaaaaatttccaacttaaaataattttctatttaattaaatgtcatgaaaataacaatatttaagtatcatgatgaaaatcaacttagatatttaattttcaatttaattaaatgtattaaat

SEQ ID NO: 291690 - DNA, 540 bp, Cannabis indica
atcttaacttattttcgtaatttttttttttcaaattttttgtctattatgtaaaaaattttagaaaaatttagatgatactgtaggggtattcatccaatccaattcgcacttttttggtcaaaaaacatccaattcgcactaagtgtgcattttatattttggatccaatctgatccgcataacagtttaaatccaatccaatccaatccgcaatagtgcagattggatcgattattttggattgattgttttttaatgataaattatttaatatttcatagaaaaaaaagttaaagaaaaagactattatttcttaatctccaataataatctatttccatgtttatttatatataaacaaaccaatatacatatatgtcaatatatatgtactcatctttagatttacactaaaatatatatgtattcattactaaaataaataagttagtatatatatttaaatttatgtgtatgtgtctatgtgaataagaataatttttcttgtgtttttatcataaaacaaataaaatacac

SEQ ID NO: 291691 - DNA, 740 bp, Cannabis indica
gtgttaaccttaccagtaagtgatgaaaagtttgtgatatactgtgatgcatccaaacaggggttaggttgtgttcttatgcagtcagggaaagtgattgcttatgcatccaggcaattgaaagagtatgaacagcggtatcctacccatgatattgaattggcagcagttgtttttgcattgaaagtttggcgtcactatctgtatggtgagaagtgtgagatttatactgatcacaaaagcctcaagtactttttcactcagaaggatttaaatatgaggcaacgacgatggttagaactggtcaaagattatgactgcgagattctctaccaccctggtaaagcaaatgtggtagcggatgctctaagtcgaaaaggaccagggcaagtttgtgaactaaagaaaatttcagcagagttggctgaggatatgactagagcgggaattgaatttgtaattggaaaacttgccaacattaccctgcaatctgatttattggaaagaattagagtagctcaacaaagtgatcttgagctacaggggcataaggagaagttagaggccggattggcaaaagacttttcatgtttatctgatgggttgttacgatacaagaacagaatttgtgtaccggttgacaaagatatcagacaggagattcttgatgaatctcatactacaccgtactccttacactcgggaacaaccaaaatgtatcatgatgtgaaagctttata

SEQ ID NO: 291692 - DNA, 729 bp, Cannabis indica
aattgaccattttacccctagcttttgaaaatacctaagtttgatgtaaagggcattttagtctttatggggggattaggtggctaattttatgaatgacacctagtcatttttgggcagcaaggatttaattaaatccattttccaagttaggaaagtcaaaaaaaaaaaagaaaagaaaagaaattggaaaattagaaaattggtgagaagctctttcttctctctctctctcttcgaaggcagcaagaacaaggggaaggggctgggatttttctgtgttttcagccaaagattcaaggggaaatcaaaccaaggtaagctctagcaactcctagccctaatttttgaatttaagcttaggttgagtatgtgaaattgagtttcaagggctgttagggttagaaatgattagggttcgaattttatagtgtatttgagttaaattaggttcctagcagctggttttgatgcttggtgttagttctaagcaagcttgagttttgaaactcaagctttgagctttaatggcaatttgaattacaatggtttgttctgtgaaatactgcctggattttattgtttatgcattgaataggtgctctggaaggtttcatggcaattggtggaagattgagcaacaaatgaaaagtttggggaatactggtgcaaaccggctagccggttttggcagggttccccgggcctttcattttctcaatttttgcc

SEQ ID NO: 291693 - DNA, 708 bp, Cannabis indica
tttttagttgctaaactgtttatattttttcttttttctgtttttatagtgattgcggagcatatgttgctgcatttgccgagttctttatccacggaaaggatgtccctgcggactttgatatcgaagtttatcgtactcggcttgctgcacttttcttctcatatggccaaaggaaaattgatgaaagcattgatagcgaggatgagaagcaaagcaagtcttctaaggcttctaaattgaaaaaataggatcttttattttggtgactattttgtgttattggttgaatctattatcagacaatagttagtgttattggttgaatataggtattatatttggttttatactctggatctggtttaaaacttttaggatatttgacatttagtccttataatatgtttattgtataggtttgtatcagcaaaagttgtatgtttttctaattgttcaagtttttatatacagtcgcacaactatagagaaactattatccaactgaatacaaacaatgtacttatatttctaaattgtgctatgaatgtatttttattctttgtttttccattgctcctttttcctttatttagttatgttttatcaattcttacctgactgcttttaaaactgtaaagaagaagttattcctgtacttaatatttacgaagtgtcgcaactgtaacaaaacgattttgcaactat

SEQ ID NO: 291694 - DNA, 524 bp, Cannabis indica
ggaagcaatctggttatgtagaaataattatgtcttctgcagtccagttccttctatcacagacaatataagaaatatatccaagcaagctatggaattgtccatggttgctgaagcaaacaacttttaggaaactcatgtaaccccttctccagcacaaacgcatcaacagactaattttgctgcctgtgcctcgtgctgtttccaagtcgatgcctcggttgtcgatggggtagaagggatcggagttgttttgaagaagcctgaggtagctggttatgaatcctgtcagtcacattgctcagtctctaatattcttgaagttgaacttgtggcaatcttaactgctctagagcatgcttggagtgaatggcttgactctgttcttattgaatcggattcaaaaattgttgtggatgctttaaacttgggggagctgcccatggcgtggggtgttggaaatattttaccagaaccaaaatttactaccatgtatgtttcattaacaatgaaataaacacata

SEQ ID NO: 291695 - DNA, 554 bp, Cannabis indica
ctcatgtgagggactgagattcatgtagtcttcagtgtcactatcgtcctcttgccacgctgatgaagtatttgctcttttgttgccacttgttgatgcaatgggctcgttgttgacaggtggagaaatagacagtcccctacatatttcttcatcaaggtcattgagtgagaatggacagttacaggcagtgtctgggaattgcgaatcttggaagattggatcattccagtcaacctcgttttcttcagcatagtgttttttataatgattcatatcttcttctagtcgttggagatactctggtggatagtattcccatggtgcgtcttcgtcaggttttggccagatggcgtctggaattaccatgttaatggcaaataggtatttttccagctgtcttgcttctgagctacctatcacgacgagtgggtgttcacttgacttgtgtattttgacacttgctgtaaatgacatatccggatagcctgagtagcaaaattgtgaagcagcgcaatgggtttgccatgttttcagtggctgggcaattgagt

SEQ ID NO: 291696 - DNA, 847 bp, Cannabis indica
gttcggcgattcttgttcaggttctaatttttggtcccaggtctacgtctaggttcgggtttggtttttcgtcttggttttggtcctaatctaagtaccagatctagacaccgactactagtctgttccaggccccgttacccgaatccaaatatccggatcactgtcacgggtctcggtctggttcaggttcacgtcccaggtcccatttttgagtttgggtttgggatcgagacagtggtgcggttctaggtcccgaccattgtttgtgtccctagtctggttccatgtttgggtctgagttcaggttcgggttcgggtcccgagtccaggttagggtggggatccgggtccggctcccaattcgggtctaggtctgatttggagtccgggttatggtctggttacggttctggatctaagtccaatttcagttatgattccaagtccaagtcctagttccagtcccggtcaacttccggttttggttccaattttgggtcacacggtacgggttcaggtccacttttgggtttgggactgggtttaggtccgggtgtggtttcgggtcctcgttagggttccggtccagggccgcgtcccaaatacagacattgactacgggttttgtccaagcccgggatcaagatccggaacccaatctcgggtcctagtgtggttccatttctggtgccgggtcacgagctgggtcctaggttcaagttcgggtctgggtcaggtactacgtctttgtcgtagttctgtttcccaggtccctatcctgattctttgtccaggtcctggttattgtgtgggtttggtcccggtccaggttcgggttcaagtc

SEQ ID NO: 291697 - DNA, 604 bp, Cannabis indica
tttcttcttttatgtttaattgtatttgagccctctctctcatgttcttctttttcttttgtgggtatttttttgtgtttcaaagtccatggttattattttttttgttttttttttcaccgtcttcttcctcaagttctttctctccattaacatataagttttttttggaagagattttaatggttacattaaatatgtaaccatcatggttatatttttttttagtcattagattatcattaaatagttgtgattaaattaaaaattaaattaaaaataaataataattaacttataacataatagtcacctaataatttatttctttataaaactttaatgaagattaattatatttaaaattaaattaattataattattaattaattttttcataatttattattaaataaagatcttttaacaatttttcccctgaaattattaaaatttttctagcaaaattcttaataatttaaaattatacacatataatttcataattaaaattttattatacttataactttaatttaaaattattacacttaattataagttttttttttaatttaaatatttaaaaagtaaaaagtaaaa

SEQ ID NO: 291698 - DNA, 870 bp, Cannabis indica
gaagagaaggatgacgtcagcgacagttggatgggacgtgcgtcaggaggtgcagagcacatgatcacgattttccaaattttccataattttttaatacctccttctgtaaacctcctttgtaaacatattttgcaaagctgcctcttataaatttcaatactttttgttgctttcatatcaagttagatgttcacaatcaacatttttttaaagctgatatgtttacaattattaatggtgtttataattttctttttattttcaaactaaatattgaatatattcatgatattggtttacaaaactgatatacaaaagaaacatagatcatatacaaagtaattcatatagaaaacatactattagttatgctaataaatctattagtttatttttgcatattaaaacaaattttatttttcttttgtatattggaacaacaatttatttcatttcatatagcctacattatgttaataaacctactagttattgtttgttggaggaataatattttatttttttcaatacagagtaaactataatcaaacataatgatatacgccaagaaacacattagtctaattttcgtgtatattggaacaacaattcattttttgtttcaaacacaatgtgtgaatataaaataacaaactaattagtctattttttttcaagttgagacatcaaatctggttgtatacaaagtacattactgtaacatgtcttatatagtaaacctgaataacaatatatgcacttgtcaaagatttgaatatgatgaaattccttgctcataagtttatttggcatatatgcctatactcatatatgcctaataaacttattagtttattttgacatatt

SEQ ID NO: 291699 - DNA, 842 bp, Cannabis indica
ttaaaaaaaatgagtttctttgagctggtaggcctaagacagtcgcccttactatatgtaccgttcttaattggtaccactattatttaaattttttattttttaatttaaaaatttcaatttaaatatattaaataaaaaaatggacacatgaatattaatttaactaaattttttatttttttttactttaatttagacagtttatacttaaattttagtaatttcatctaactgcttttgttttaatatatgcacgcttttacttaaaaaaaaaaaaaaaaaaaaaaaaacaaccaaaccaagtacccttctattttctggagcatttcagcttaagcttgacttttttaaaatactactaatttagacgccaaaagtggcgttggcttatgcaatatgcatgagctgaccacacgctaattctaagggacgggaatggtccaagtccaacgatgtggcttcataaaattataaatacttataaatttatgtaaatttgagtttgacttctttactttttagaatttaaaaacttttaatattttttggtcaaactatacttttctcttcccctgtattttaattttattaataatgcatgagtaccccaattttcttataataataaattatagagggtaccctattcaataatgaagaaccttactatcctttatttttatttgggtaaatactattttggaccctctgttttacaaaagttaccaattggaccctgtgttttgttaaatgacaaaatggactctgtattttctaaaatagtacaaataggatcctgaattaattttttctcaaaataaagtttaattataattcga

SEQ ID NO: 291700 - DNA, 672 bp, Cannabis indica
taattaatttaatatatcaaagtggatttatttattgacaaaatattctaaggttaatggtcaccatttactgagttacctaatttaattattttccccaaatattctaaaatgtaatagtagaagagatttgataaaatgtgtcacgtatataaatgtagagtattattggtctccactctccaagctcctatcaagtgcacaatctcaattatttattttatatatgttcaatccataaattcatataagatttttctttcatatatatatacctttaaattcatattaatctaacatatatattacaataattatcttaaagtaaatcttatattgcagtttcatatatatactactctttatttatttatttttgcggcaagcttcacattgtactgttgttttcagttagggctcgtttagtacacaggattggattggattagacaggttaatttatccaatttaatgtttgggcatgttagaagtctgaataactaatccagctaacctcatctgtctaggattatctcatccagcatggtgggataaataatctcatgcaggtgagatttttttttcattttctaattttaattttattgatatattttaaatttaataagaatttaaaggaaataattatcacacatttatttatacattttt

SEQ ID NO: 291701 - DNA, 725 bp, Cannabis indica
aaactgttggtcttatggacagggaaatatttaacaaaaaatgttttggtcatttcttcccatgttccgatagacctagatctcaaagaatacaaccaacttttagctttatccttcaaggagaagggaaaaaactttaagcgtgcagcatcattgatggttgctcggtcataaaaagtgtcaacaacttcctcaaactccctaatatgcacgtatggattttcattttctattccatgaaaagttggcaaaagttgaataatgccgggtttgacaccaagacttggcatattaggtggaaatatgaagcatgatggtatggaagtttgggtggggtgaaggtaatcattaagtgttctctgttgtatttcattattattattcattgcgaaaggattaccgattatcgtgtgaatgggagaaggagtagtggatggattggacgaagtttcactagaagtggtttcgtcagaagaagagttactcatccactcttgtttgcttttttttttttaaatattaatttaattttttttttgttcaacttgttcccaggttactttggaggtttttagaatggtccttcacaacttactagaactccccggggttaccaggtaagtgtgaagggttcactaaccttttcgaccaaagacctttctaagcaaaaatgagttgcttatttttgataaaacaaggttgtttttgttatagtaaatagcaca

SEQ ID NO: 291702 - DNA, 592 bp, Cannabis indica
tatgtcttatttatgaattttcactaagcaagggcttaattgtgaagaaaagagattttggggtctatttgttaattaagagactttgtatgatctaattaataaataatataaatagtaattttatttgataattaattataattattcataaataattttggcgtttataggattgaagttggaaatatggtattattgaaagaagaataactggttgaaataaagtggtaaaattgtaatggttcttttagtggccgaccactctagtgatttttgcccaatattttattcgtttttaatccatataattaaaacctaagccctagttgaaacactataaaaggaatatgatgctctcatttcatccaactattcacttcaaccaaatcaaacctagttttctctgtcagacaactagtagatgagagacacctcctatacagtttttaagcctccttcattgttcttcgtagtcagtccttagtgatagagtgtcatgcccacacatagcaagttaagtactcaatcatagtgcggaagacagtggtaaccaacccgaaggagagaaagagatccaagctcagatctt

SEQ ID NO: 291703 - DNA, 527 bp, Cannabis indica
tcgtcgggtcatcctccgtttctcccaggggaatgacgttcggtgtttgctgacctacagtctggtaggctcttcatatcagcacggtagcttaccgactacgatcttcgatctctgcatggtgagctcttaatgcctccatctctttgtctctccattcagcgaacatacgcctctgttcgtcaaacgcgagattcactgcagcacgcagttcatcctgatcatgatgcagagtgttgctatgactctgcatgagtccgagcgcagcacggagattttgcaatttggttgcatctctgatggtcgtctgggtgttggttgcaggcggaatagtcgtgttatgaatgccctagctatgtacggaactattattcccagtctcttgcacaccaggcgcagttcaaggattgacagcaggtggaactcttgaactccctaggtcctgcaatgtcggatccagcgtctgtgaatttgctgggtcagacaggcctctacgagtttgtaccatcgtgttgaatgttgaaaag

SEQ ID NO: 291704 - DNA, 556 bp, Cannabis indica
ttcctttatcaagaaaacatatatttatttctatttaaatggaaagattagctgttttggaccaattaggttattttcaaagacaaaaaagtatagttatatgtggtgttcataaaatagttaagagtattgctattgggcaccagtagtactcaacatcttttataggtgataacctacaattagttagcgatatttcttaaaagttatttttttaaaagtatatgagactcaatacttaattacaccaatcaacgggaagggtgctaggcacctatggtgccttttagcaattctcaatatttaatcataaatctgcacaattcaatctaatctgcatgatttgatctataaagtatggatatccgcacctcattatattaaattgaaaaatctaattgcgaattagatgttgattgacctgtaaaataattaattcaatttaatcgacacacatttatatatatatatatttaaaaatattatataaatatttatttactatttaaaaaaattaataatttaaaaatctgatacatataatataaatatattt

SEQ ID NO: 291705 - DNA, 717 bp, Cannabis indica
agtacccgtgtactgcgaaaaatattaaacattaattatccccgcgaggatatgaatttgtccaaaataaattgcaaatatgtctaagtacagagtgcgagtacccctgtaccgcataaaaaactaactagcaaattcaaaagaaaactagttcaaacataaaagagaaaaattaagcgttgggagcagcaagaacagattcatccgcgcctttactggccacctcgttctcgacctcctccacctccgcgacttcagtctcctcgagaatgttccctccaccaccttgagttggtgtgggtgacatagcgcgaaaagcctcggccatttctgcggcttccgctccaagaatcgagaagtcaaagtctggaatcttggaaagagtagtatagatgtagtccgaaaccgcctggtcgtactgtttcttgccgttctccttctcagtttccaggtcgcgagacatctcttcaatcttcgccttggcttgaagctcgacctgttccttggccttacgaagttcctctagttccttggctttggaagacgcatcctgcttcagtttcttaacgtcttcttgaagctgagcaatatgcttcttcgcgatttcaacttctttgggccctacagcaaaagcctttgcaaacgtagccatgaattgcgaagctaactccgcagcacgaggaagcaactcttctgaagatgacttgtcaatcttcg

SEQ ID NO: 291706 - DNA, 839 bp, Cannabis indica
gaaattcttggaattacttttagttgatttaacattatttagtaaaaagtccctgtggagacgaactttgattacttatcattgtattacttgtttgtgattgtgtacacttgcgcaattataaagcaatagaattttcacaacaagtttttgtgaaaattttgtggggtcacagtgctttaccaacctccatgacagctaaggagaagactgagatgttcgagaaagctcacagtgccttgattctaagtcttggagataaagtgttacgtgaagtttcgaaggagacaacagcttctggggtctggaagaaattggaaagtctgtacatgaccaagtcactagcaaatagactatttctgaagcagaaattgtatgcattcaagatggtaacagggagaagtgtagaggatcacttggacgaattcaacaagatcattcttgatcttgagaatattggaattaggatcgaagatgaggatcaagccatcatagttctaaactcattgcccactgaatcgtacgagcattttgtggatacaatgatgtttggaaaggaatcattgactctcgaagaagttcagaatgccttgatgtcaaaggagcttaagaagaaatctgaacagaaggatgaagttgatggagatggtttgtttgttcgaggaaagaattccaagaaaggaaacaaggatcacactggacagaacaaagatcaaggaaaatctaattctaagttcaaaagaaaatgtttcatctgcagcaagactactcatctcaggaaagattgtccaattctgaaaagctacaatcagaatcgatctggtgatgcagggttaatt

SEQ ID NO: 291707 - DNA, 293 bp, Cannabis indica
tctttgattattgagattagaaagatggttaaatgtttatagtgtatccatatcgtggaacatttagagcgttctatatgactgagagtgcaattaccaggttttgtgagtggatgcaataaggaattaataagtagggaatctacttggtagattctagttctacttattggaagctcggttgtataggcccatggtccccatactagttgagattatactgcttgtaagactcactaggttttatttattaattgaaagactttattatgtctaagtaataaatatattaa

SEQ ID NO: 291708 - DNA, 935 bp, Cannabis indica
aattaattttcctaaaaaaaaaattgtaacaatcaaattagtttttttagtagtggagtaaaaataattattttggttattttactaaaggttaaatatgtaaatatattattgaggtgtaattattattagggaaattttatttacaccccaaaaatttctaaagacaccccattttaataatttttattttatttaaaattaatatctttaattatactatattttttttaagttttttcttacaatttatattcttaaaaaatatacatatcaaataaaattaaattacattttaaatattatggaaaaaaaaattaaaataaaaaattatatgaaattttcttagaaaaaaataagaaaaaatatatacatgagttagaaaaaattaatgaaaatgaaatcaaaataagtattgaaattaacataaaataatgtgaagaaaaaaaatttaaaaaatattaagaatactttttaaaattatttaagtttattatttttttttttaataatggggtgtatttataagtttatagggtgcaaatagaactcctcttttttttttttaagagaaacttaatttatagtaaataaaaaggggtgtgcttatcaaaaataatatttaaataaataaaatggagtgtatttagattaggggtgtatttataatttattggggtgtaaatataagcatctattattattttatgatgtgtaaatataattttccatatatatatggaatgaggagaaaatagaaagaatagataaaaaataacttccatgtcatcaggtaataggttaaaataagaaatattaaatttaaaaatttaattaatagttataaatatcaaccattagatttgatccaatggctaataatagaatactcattcataggtaatacccattaagagtatacccatatatatata

SEQ ID NO: 291709 - DNA, 660 bp, Cannabis indica
aactactaaaaattaacaccacgaaatatacatctgctatgtgggcatggcgaagttcgagccagattgcatcatggtcttccagaagaacctcttttttctcaggctgaccacctgttttactgggaacctaatgtacattccatgttatacatatatacaacaagaagaagaaaacaaacaagaaaatgcgtagagaatcaccaaaagaagaaaaacaagggggaaaacatggtgaagacctacctcaaacacgtatttgttcccatccatctccaacagatcatgacacatggcatcataagtccattcatgtatgacaggagcaatctgctcaggaaagcccaacacgataaacaatgtccaaactaaaattataggaacaagaaagcttttagtgtatttggacgattacctgatcaatagacctatccaaaataagtagttcacatgtttcagttttcggaaagtttggaacagtagatttatagtttgatatacaattccaaactgcagatgcaagttttgttggtatagaatcacgcaatttttcagcagcagacagatcatcttccctggcagcacgatatctcacacatggcaactcctgaaaaaatgcaaaaaaaaaaaaaacaaaaaaactaaggtagacattgcagc

SEQ ID NO: 291710 - DNA, 741 bp, Cannabis indica
gaaatgataatcttaattaatttcctagctagctagtcatcacttcattcacgtactttttctaatatatattatttggtggcaaataaatattgactacatgcatataattaattcacgtgagaaatttaattaactggttataaattattgcgtggagtgttattatttttatttttacaaactttctttgattatatttatattaatacacttatgttgttaagtttaatgttttttaataaatttttgttttgtaatcgatctatcaactttataattcataattttatcaaactcttgttttttttttcttatgaggcaagagtttagtagtcaaaattatctgaatttatttaaatttttaaatttattttaacgttggtttaataataattaagatcaatcttcttattattaagatcaccacttattaatttttcacctaaattatacatataatagtatgtggcgtataagttaagccaatggtgtataattaatatttttatattatttgtagcatatatatatttatatatataggctatagctatacatataggttcaagattttgaaatgctcatctgtgcactgtacgtatacatgtgcatatgcgttttaaattttaatatttaaatgttaaaaaaaatattctgcctatagaccaatcataattgaacaatataacacaaaacttatattaagttaagtgtcataaaatatataaagtatatatt

SEQ ID NO: 291711 - DNA, 611 bp, Cannabis indica
acatatttcaatagtatagtccacccctaagtatatagagattatgatccacccctaagggatatagagattatagtccatctctaagtgttatagagatcacatggtgttattaatataatccagagttcaatagatataaaagatcgttgaactgcatattattcttaactttttccacccctatcagatcaaaatatctttctattaaacaaattctcaataattgttttagaattaacaattactcataaacatagaaatgaaattctaagtgtttatgtagtattaactctttgtagagttcaagatactatagaatttagtcaataataaaaacacatacacatacaattattaaaacatataaatataattggtactggcatactcaagataaagtaaatgaagctcaattcataaatgcaatttccaaaatagaaaactttattataaaattctccaaaattaaaggaattgtctacaacaatatgaaataaaataaggaataaaatcccaaactaataattgaaatccaaaacgttttgaaactaaaacaattaattcaaaaataaaaaaaatctgagcttcatcttcatcttggactaact

SEQ ID NO: 291712 - DNA, 590 bp, Cannabis indica
gattagtaaaagcaattagcactaattattggtaattttataattacttatgaatttaattatttgtgggccccatttttagaaatgggcattagagttataatgtctcaattccggagattttattaaactctaagtgtattattttaattatatgtgaaatatgttatttttataatttgtgctcggcgacaacggaaaatgcgatggatggctagtttgatcacatgggtaagtttagaatcttatttcttagtgggatgtatattgaaggaaattaaatgtcgaggttgtgcggggttatggtttttgaccattttacccctaagattaaaataggctcaagttatgtaacaagggcattttagtaaatttccatatgagtgttaggtggctgccttggggtgttgacacctagcttcattttcttttcagcaaggattaacttagaaaatccttaatcattttgagaaaactaaggaaaagccaaaaaaaatcaaataatacctctctttcccttctctctcttcgaaccagcaataaaccaaggaggaatcactttttcttcctcatttttctggaattcagcc

SEQ ID NO: 291713 - DNA, 530 bp, Cannabis indica
gtggggtgtcagccaaaaggactccaacgctcaagtcagtacgattataagtaaaaaaataataataaacggaaaataaatgtaatttaaatggtagccggacggatgagtggacaagcggacagacagactaaaagagtaactccgatggtgaggcttaagagaaaagcttagaaaaggcgattgtgtggttccttttatcgtgtgttttcagtgccgttgccctctgtccacgtcacccgttggactcgttcaaattggttacttccctaattattagggagtagtaaccgtcttcgtgactggttccatatttacttgatttcactcgtttggctgactggctgggctcggacccggttgcgggacgatccggcttgtggcccataggctcactcgttagtctatttcaaggcctagtgagttcgtctgactgtcttattggacccaatattgttggatccattattgatgggctcgtctgacttgcatattggacttctcaaaaaatatcataaatattaagcaaa

SEQ ID NO: 291714 - DNA, 710 bp, Cannabis indica
agtatactgcagtatgaaacttataaaaaaatacagtaaaaaagtaaaaaatactgcctggcagtatttttgtaaaaaaatggcaaaagttagtatagcatgtaaatttttctattttaaaagtatattctgttaaaccaacaaaaaatagttagatagccattttttatatataaagattataccgaatcataaaaataaagcccactgaattgtgaaaacacaccctgccatttttgttttttttcttcctttttgtttttttttttttttggttttattatatataaacctctctctttatttcattttttttaaaaaaactataatagttacacaaaaaaaatactaattattttattttagttaaaaaaaaaaatactattgtaatttacttttcgagtacaattattttggaatatagtgaaaaaagataaagaaatttttacatgaaaaatccattttacacaatttattacaaaattactcacacacgcctatgactacatttttacttacaaagttgcttttattacacaattaccacttactcatcattccatgcatacacgtgtgctctccccatccatcatcaatcaaatcctactctcttccctctcttttttcattttcttttcatttcattttcgattcttcatttctgttttctaagttcatttgaattcaagtaacctccattaaccacccat

SEQ ID NO: 291715 - DNA, 763 bp, Cannabis indica
tggttggtaacggtgattcccctcccattgctaatatttgtacggtttctccttcggaccctcgggttcttctacatttcctctttcgagagtgttacatgttcctaccatgcatccaaatttgctctcagttgctaaatttacgaaagatcattttgtaagtttcacaccttggggatttttggttaaggatctgcgaaccgggaaaatctggcttcaaggccaatgtgaaggagatctctatcctatcaagccgaatacagcaactatccagccgaagacaggacccttctctgccctctccgcctcttctgtttcaggcgatctctggcatcacagacttggacatccttctttttttttttttacgtttattaatttccaataagtttctagaccttcctgctagaatttcttctactagtttttgcaaagattgtgctatgggaaaatctacccaacagcccttttcttttgttgacagacgggctcatgtccctttttatttagtgcattctgatgtatggatgtatcctatttcttctctttcgagttttcgctattatgttatgtttacggatgattgtacccgatattcatggatttatgcgacataaaaattcagtcttttcttgtttcactcggtttatggcttttgtggaaaatccatttggtatgacactcaagatctttcagagtgatggtggtcgggaatctgataactctagttttcgcagtctttgtgatgaaaaagggattcacc

SEQ ID NO: 291716 - DNA, 812 bp, Cannabis indica
aactgcccccgaaaatttagacaataaaactataacgtcttcaaacaacaccacatcacattgaaaaaataccttcccattattaactagttgtctttagagcaaagcgaaactgaaaaaattgcaacaccaaaacaacaagtacacttatattagaatgacaatcttcaaaataaaataatatataaatttagaaattaacacacactttataactctagctatcagcaaattctaaaaaactaaaaaatcaacaaaatttctaagaataactagccaaaggtattaccctttggctagtaacaacaaactagcaccctaatataaaaatgttgaaaaacaatatcaaacaaattaagtttaaaattagaattatcagaaattctctgtaattgtaggcgccctccacaaaataacctacaaaatagcaaaaaataaaactctattaccacacaatataatgaaaaagataatgtgaaataacgatagtaaactaatccatatttaatataatggacttaaacttgaaatacttatctttcaaaagagaaaaagtcgtttaaatagaaatcatgagtaggatcacttctcttgccaattgaccaaaccacaaaactaccctaaacaaatagggacaagccataaaaatggcacaaaagccataaaaggcacaaaagtcgtaaaaggtatcaaaactatcaaaaatagtgcaaaaacctgtgtgatctcatatatacttttaaacaaatattaatactataatagtcaaaacaaggagtaattaacatcttagaattaaaatatcccacaaa

SEQ ID NO: 291717 - DNA, 511 bp, Cannabis indica
tgatggtgtagtggaaaatatggaaatcggtaagagagatagcggcaacattttttttgttgtagagaaaagataaataagaaagaagaattgagagtttcagatctgaaattaggatttgtagacctatgtcttcgttattttctaaaaaaaaaaaacgaaagaacttaggcctccacgtatatctgatatggagctagggtaatggagacctatgtcttcggttatttcaaataataggtctgcgaatttttctttttttttttcttccttacttttatctttgctttttatattggttattgcaaaaaatcgaaaatatacaccatatttttagtaatgaaaggtgcacaaatattactaggagacaaccaaattgtcagccaacctcttcaagcaaaaggctcaaagctcacaaaagagctgctaaacaaagcctaaagccaacaccactaaaaggctaattacgattcctcccctcccccaaactttgacatgtactaaaccatgc

SEQ ID NO: 291718 - DNA, 516 bp, Cannabis indica
agagagaggtgcacgagagggaagagagagaggaagagagaggtgcacgagagggaagagagagaggaagagagagggaagagagagggtaagttttttagttttaacaattttcttttttaatttttaaaaaaaagggtaaagtgggaagttcatgtaatcaatggaattaatttgtacaaattagtgaagggtctaaatttgatattgggggttttattaggggcaaaaaatgaaatttcccttttagaaccggttgtattcactatgttattattagcaagattattatagaaatgatattgtcaacttcttatatttcaatcttttctatattttcctatccaaaagttatatggaagaattttttttttttttttgagttaatggtgttcgtttagttatggcatcctttctataaattttaaaaaaaatatgaataaagcttatgatatttttatttactatatttgttcaataaaaaaaattgtcactataattttttttaaaagtaaa

SEQ ID NO: 291719 - DNA, 562 bp, Cannabis indica
tttggcgttatgaattattcaataaatcccaattctcaaataaatttataagcatagttatatacaattaaaataaataaataaacgtcaaaaagaaaaataaataaattatttttttaagttatcattaaatactaaatcacagtaaatatattaaatttttaaaatatactaaattattgaaatcatgtttataatgtagaagattaaatgatggtttatggttataaaaatttaagtaaatatttttgtttttttaaataaaatttaaagttaaatatcgttggttgaagtttattgcccctgattttgcccaatatacgtggaccaaccagacaaggacacgtggatcaagcaacttataatccaaactattcgctaagtccttatgcaatgaagcagcatccgggacatgtctcccggagaaggcatatggaaccccatatgctcccggaagcccgagtaacgttaaggcatctccgcggggtgtcaggtttcccctgagcaatcaagtcgcatttaatgccgcatgggaggaagcgtttagggactgctacacgca

SEQ ID NO: 291720 - DNA, 652 bp, Cannabis indica
acaatagtgcccgaaggggcactggaggagttcctcccgggagtgaccaattgagaagcagcaggaggtggggaagcatcaggactgtgggctccagcaagagtggccaagagttcatccatgggtctggctactgcacaagaaaataagtcaagtgttagaacattcatgaggacagcatacgcttaacaaaaagcagcaaagctagtcctaccctgactctctaattcggccctagcaaagtcccgaatcatggcactggcttcatcatcctgaagaaagctatccgagggaaggaaccaactagaggataaatgggctgaatgctccaagggaatgggcgccggaggtccagaacccatccgggaccgacctaaataattgcctaagtgggagaaataatattccttggcatgattcccccaccgggtggaaggcatcctaaacctacagagacgttcatcgaaccctatacgggtatacatacggacgggaggaacatagtgtattattaaaggggacttaccagaacccgaagtgctggcatcgggagctccagtatttggtactgggaccacgggcttgggtctgggggtcctccgttccaacggagctccaatacgaagggcccttccggcggtcgcctgggcct

SEQ ID NO: 291721 - DNA, 556 bp, Cannabis indica
cgaattttggggcatgctggcagcaaggctgcacgtgcagccttcacaggctgcaaaaggccctggaacgcgcgcagaaggaggagttgcagcctccttgaccgagatttctcggtcagctgcagggtgcgtgtgcgggcgacgtgggcgggaagcagggtcagacatgggcgcttcagacaggatttgtctgagcacacgcgcgcgctcggcctcctgtccaagggtctggtgcgcatgagcagctccctcgacaccatatgcacccgatttttcaaaccttcataacttcttcgttttccatcggaattgagttttgtaaaaacgaaattgcttaatttttcacaaggaatccaaataaatattttcagaaagaaaaaaaatatttttaatggaaaaatttcgtacagcacaaacattcatcaaataagcacataaactaacatgaaaccatccaaatcaacacaaatcatcgtttaaattcatatttcatgaaagtaaaatcattaccatggctctgaggccagttgttggaattagtttttaccaggtatct

SEQ ID NO: 291722 - DNA, 383 bp, Cannabis indica
gaaaatgggaatgaaaaataacaaaatgggaaaattgcaaagtaaggcccaattcccttgtttggccgcccactatgcataggcgattaccattttatttttttaattattttaatgccacacaattctaacctaaacctagagggcattctataaatagaaagtattggcttcaggaaactcatgactttgaacattgtttccttcagacaaaagccaagccgccccttctctctcttttcttctctaaaatttcgaaaacccttgagtgatagagtagtgcccacacacatcaagtggtacctcaatcatagtatgtaagactatggaaaatcagcatcaaagaaggagagaaagagattcaggttcagatcttgattatg

SEQ ID NO: 291723 - DNA, 560 bp, Cannabis indica
tttttgatccactcgtagaggtggcctaatcggattagattttcaatctcgtccttgagattcttacattcattggtgctatgaccgatgtcgttgtggtactcgcatctcttgctcggatctctccgggagctatctttgtacaacggttgtggtctccggtagtgtgtattttgcctagtagcaaagtacacacgctcttgggagtccgacaactccgtgtattgagtactgggggtgtacccccttttctggcgcttctctcccgtccgggtgctgcccttggaggatcttttactcctcgaaccctgggaagggcctgccagactagcagccggagcagagtgtgaaggagcttgtccattcactccggacgggttgccaaaatgggatgatgctggtgccaaggcttggccctggctatatccgggggtagcagagaattgtatgccacttgcttgtggagtggcggtcggggcagtacccgagggcgatactccgggcatgtaccctgctatcccggtgggatagtatcctccgtaagccacgatttgggcttc

SEQ ID NO: 291724 - DNA, 732 bp, Cannabis indica
tgaagtgctgatgtagttcaacagctttggagacataagcagccatcttttctctttttatttgatattctctagatatttggcttacaactagctgagagtcactataaacttcaatatttttagctctgacttccttggataggtgtaaaccagcaatcattgcttcatcttctgccttattattggaggtaacaaatttgaaccaagagaactctatagttggagcccttgaagggagattagcattatcccagcttcaatacctttctcattcaaggatccatgatcaacgtaaactttctagacctcttattctggaattggttctttcgaattgtcatttattttgatgcattccacaatgaaattggccagggcttgacctgtgattaagattctcggatgacaatgtatatcaaattgactaagctctatatattgcatacttaagtagtctccctaaggaatctagtttttgcagtacttgccaaagaaggtggttcgtgagtaccttgatggcaagggcctgaaagtacagtcttcacttccttgaggctatcagtaagcaatagaacaacttttctgtcatcagcacctggactccctactcagaaatctcttgcttacataataacctgaaagttgtaccctttctttttctcgcactaagttgtactcatatatgttaggtaattttagtataaattttagattaagtttagtatattt

SEQ ID NO: 291725 - DNA, 525 bp, Cannabis indica
aagagcagagtcttattcacgatcaaaatcaccacgtgtaaacaattagaacaagcaaacaaaatagatacaataattttgttagaggttttggcccccttgttttaacgggtaatgacatactcccttttttagtttgtattgatatgagagactatacaactcaaatcacaagtgttacaagttctagagtggctttctctaaattacaatagggagaatatagagtagatctcaagtaagtgagataaggaagactagtctctcacacactgtacgtggcgtataggagagaaatgatatggttcgagtgcttgaactcaagaacttaagagtgagaacttagaactttttggtttaacctagtgctctttatataggagagagcttacagaagttctaagccaaagtcgatttatatcacttaaaaagaggagctatcaactcttttttacacattaaatatataagaaaataacctattaattattctttaagaataggtaaatatcagaagttgaaccc

SEQ ID NO: 291726 - DNA, 518 bp, Cannabis indica
aaataaatacaattaaaacatgtttccataaaatgaaaaactaaaagaaaaaatgtacaaggattcgaaaaaaattcgaagaaaaaatatgcccccctttttcttttatttttcaaaaaatgccccccaaagaaaaattgcaaataaagaacaagagaacacaccaagacacaaaaagcactaatcaccacttaagagcaaaaattgtgtctaagaacataatgaaacataacaaaaaaataacaaaatttttaacaaagctcacttgacaactcgatcacgaacccttttttttttttttttgattaaaagacagaaaaataaaataaccttgatatttttgcaactagaattcacaatgtccatttgtctttgtccctgatgaaaaaatcaaactcataagaataatcagaaattattttatcaaactaatgaagtaatagaatgaggtcataccggttcacaggaaaaattgactccatcaccaagaatattaaagcacatcaaacagtatgtaa

SEQ ID NO: 291727 - DNA, 520 bp, Cannabis indica
tcttaatttaaagttttttttttaaaaaaaaaaagaaaaaaagttcgtacggtattttttttatgggcaattcattcaatcacttcttttaccttcaaactagatttaacaatatttgtaatcacatttattttttgcttaatgatccatattatttacatttatgaatattttcgacaattaaaaaatagtgtatactgttgtaatagcacttcttggcagctcaatttagcatcactctagttcattttagtgttgtgccttttggaatgaagcaatagaattttgttaaaaaaaaaaaaaaatcaaagcaatagaatgggagacgtgtgttttgtaaaaataatctttatgaaaatttttattagcaaaataacctataatcgcaaaattacacgtgcgactataaatgaccattatggtcacaaaacgactatggatttacactatacgatcatcataattacatagagtaaattaaatgaagttattttgcaaattttagtatttcaaatggtta

SEQ ID NO: 291728 - DNA, 502 bp, Cannabis indica
ttaattaagctacttgtggtgcttgatagttaggttgtttaaagttacgagttttcatgcaaaagctatggtttttcaaagtgaaattgagattttggtggctgtgattattgcatgagcttgtatttgttttctgcagctttagtatgcatgtttaggtagttttaatcttgttttgatgcttgtaggtgagctttagccaagtttgagtttgaaactcaaagcttggagctcacatggcactttttgattctgtgaattctgggtggttttgatgctttagaaatgttctataagatgtttagaacaggtctggaagttttgggattgtttggatttgatttggttgagttatgaattttggaatttctgcctgcaaggaaccaaaattccggttgtgcatccggaattccggatgggttttgaaaattcccagaaccggaactccggttggacaaccggtccgccggttgggtgattttcagaaaccctagatttcctc

SEQ ID NO: 291729 - DNA, 739 bp, Cannabis indica
acctctccctttcacgcattcttgatgacagtctcacagtcaggccgagagtccagacttccaaaaagcaaagggggtatcgtgagcttgggtgcctcacccgtggtctgaaggcaaatcagggcatgatctgatcccaaaattgggaacttactaccctggctttttggaatcagtacaccaattcgcatccgcaatgaccctatccaggcgcttacgaattcgaccatggaaatttcttgaatttttgccaagtagcgaaacctccttcacaccccaaatctactccccgagtatcaaagagaaagtcctgaataagctccccttctttactattgaaatgtttgcacccctccttttctgaagtgtctaaaatgacattaagatccccaatgacgacccatgaagaattacaacaaataaccttacttgtaagccattcccagtaagagttgttcatagcctgatacggagtaccgtatatacaaaagaggcaccaaggatatacatccccagggggctgcatccttacacaaaaccagcatcaaaaacttctgtgattacacaaacaacaccaatcctccaaaacacacaaaagcccccagcaacgccaactgctgaaatacagcacgagttaccaaaacccaacctattaatcacatccaccatagtgttttcatctacctttgtttccgaaagaaagaccatatcaacattactatctcgcaccaaaccccgc

SEQ ID NO: 291730 - DNA, 851 bp, Cannabis indica
ttggagtatactgaacctctatcagagactatcgtctttggaactccatgcaacctcaatatctcctgtacgtacaagtcagcgtactgctctgcgttgtaagtagactttactggaacaaagtgtgctgactttgtgagtctatctataattacccaaattgagtcgtgttgcttggttgttcgaggtagtcctgtcacaaaatccatggctatatcttcccacttccattcagggatttccaggggttgcaacatccctgctggtctctgatgttcagccttaacttgttgacatgtgaggcatctagctacaaattcagctacatccttcttcatccctggccaccaatacaaggtttttaagtcattgtacattttggttgaccctggatgcattgagtagggtgtagtgtgtgcttccatcatgatctttcttttaagctctatgtcgttggctacacacactcttcccttatacctcagcatgctgtctgtaccttcggagaaatcttctgcctccttctctggcaagcctgctcttttcttctgtaagaactcatcaacaatctgtgcatctttaagttcctgtagcagcgttgagacaatggttaggttagctagtttttgtgtaatgatctctataccacttctttggagttcctgttgtaggggcttctccatttgtgccagtattgccaagctggcataactgcgtctacttagcgcgtctgctactacgttggccttccctggatggtagtggatttcacaatcatagtccttaacaagctctagccatcgcctctgcctcatgttgagttccttttgcgtaaagaagtacttcaggct

SEQ ID NO: 291731 - DNA, 740 bp, Cannabis indica
caactagtcgatgctgacggagacgtcctagttgagggcgttgactatgtcagtgaggagcgttgctgaggcagttcctcacaggaggcaaggtcgccttgggcgccaggtgggtaagtcctccgtccaagatttcagaggcacgcctccgcactctcgaccaagatggatacctgagcgagctggactgctacattgtcgcccacgacaatcgtgccacaaaccctgataaggggatgtgcgcctggtcgggggctcacggccagcaaggggcgctgatgcccttgcataagtacttcagggatgtggcagacttcttcggcctctgcccgacccagattactccaaagggcattaagtatttgtctgctctcttcgtcctctacgcttctcaaggatgggatgctccttccccccacgaggtcgattggttcttcgacctgaagtctacccccaagcaaggcaggttggggtattttcacttctctcagccaagcttcaagtggttgagcgggacggacgacaaggccatcagcaaaatagggcgttttgttgatgagtacttcatggtgaaggatccgagcagtacccggactcgatttcagcagatcccgacatatcaccgtcctctcctcactcttgctcttagggatagagctcaaaaacttgcccgattgccggaagaagacaggaatatcatccagttgacctccgatgagaatctggtgcagtacggcatt

SEQ ID NO: 291732 - DNA, 785 bp, Cannabis indica
acaagtactatatatagccctctacctctccttactccttcacacctcaatttagtattgttttctttgctagagaagtcactccctttctgtagacgtatgtatagggataatatataaaaaaataaattatgtattgttgttgcaccgaagtgaagatgtgtaaacagaaggattggtatgcactacaaccgtgtgttgtaggtgcatcaagggaatttcagcaattcaatcaatcatctcataacaaatttgggtaataactcaactctttatgtctatttatttcaatagtatattattacaaattgtttcttagaaattttatgtatgtactacatgtatattcaggaaatgttgacgaagggttcggatgggtggattaggctggacggaactacttgagacaccgccaaatatgccatccaactgaacctcaacctcccgcagtccacaaggccatcgtgggatgagtgttatcatatttgacacaaccgccggtgcgccagactctcgaacaaaatcgagacgcggggaggaaaacgtcaacgtttttaaagtcttaggtcagataaagcatcatgtaataacagtaccgatattatagtatatttataaattcatctcactacaatctatatttacagtgtaaaataaagcatcctaattaaatttaatttgggatagaactatgttatgtacaaattgtgttctattgggtatgtctttgtaactgtaaacttaattttatttggaatggaactatgttgaccgaatatgtgcca

SEQ ID NO: 291733 - DNA, 506 bp, Cannabis indica
ggtattacccatgtatgggtattttattcttgatcattggatcaaatatctaatggttgatatttataatcattatttaaatattaaaaaattaatatttcctattttgccacttcttctttgattttgttattctctatattcctaaaatagataaaactattactagaaataaaaattttataaatggaattgttatttaaaaaataaaacacactaaaaaataacaaactattttttttaataaaaatcattttaaagattaaaaaaaaaaaaaaagggtaatatttatctttttataaaatttcttcaaattagaattttaaattgcattactgagaacaaaaaaataataattttaagctttaagctgtaatatatataaaatgtataagattttttctaaacctaaaatctttagtttcataataattaacaattatttatatgtttttaattttttttatatacttgagcttaccaaaatttataagaacaaaaaccaa

SEQ ID NO: 291734 - DNA, 1205 bp, Cannabis indica
aacaacaacaacaactataacagaaaaaacaagaacacaaatagaaaagacaagtgaaaaataaatactgaagctgaaagaaaaagtactccctctgtctatccctcggggtcatcctctgaagcgctagagtcttccggagcttctggatcagcccatcgagcaaacacttcttgtgggaacactgggaagtcaactatcggccttggcgccattcgctttagagattttgctaatgcagtgtcacgcgcctgaacatagcgaaagtaggtaagttgcttctcctcaaggtgtgctaggcgatccatgatttgttcgtgctgagtgcgaggaagattggcggaagtcgtctgactgctagatggctggtgacgtttgggaggagcagtcgagggtgtgcaatgagtggcaacacgctgaatcgagaccaaatcaatgctgatccgctctcttagaagttcttcatcgtccccaatagcggcattacccgctaggcaaatctgagtgatgagagctgggaaaaataacttgccgccttttttctgaaaacacttccaaatttcctcataaatgatcttgcccacatttattttcttgcctgccaggatgcaatacaataaacagaggcgtgtttggctcactgtggtgtcatgtgttgtgggcatcaaagagcacttaataaaagcaagccaaacactcgcttcaggccgtagagatgagtgtaacaaggtgcggtggccggaagacgagatagaccattcagaacccgggtgagcaacagcacgaagcacggcgtcatatggaatagaagctgggttaatcctccaaagagcaaactcatcctcaagcggagctctcaatccatataagtcgttaatcacatcaggagaaaaggggacactctgacccctcactctaacgacatcaggatactttggatcaagagcagcataaaatgcaggggcaaccgaggccacagcgggcttaggaattgcacaaaatttctcccacttgtgctccgcaatcaaattggtaatatatgcaggtaaagcttccggggcagggagaaagccgcgctcggccaactggctgcgggttcgtaatatctcaaaccgctcttgatgacggacggggtcggctttggctctaggacgagtagtggggttctgtttaggtggtggagatgtggaagtggtgcgcttagg

SEQ ID NO: 291735 - DNA, 512 bp, Cannabis indica
ttacttacgcttcaaggcaattaaaagaatacaaacagagatattgaccgacacatgacctagagttagccgcaatagtttttgacactaaaaatttggcgtcattatctctatggagtgaaatgtgagagtttaaagtactttttcacccaaagggagttaaacatgatgcagaggaggtggttggagttagtcaaagactacgactgcgagataatgtaccatcatggtaaagccaatgtggtagccgatgcactcagccgtagaggtctaggactagtttccactttacaaggagtatcaacggaattattagaagccatggaccgagctggtatagagtttatcacaagccagcttgcaaaggccacactacaatcaatcttgttagaaagaattaaggaggggcagacgacagatcaaaagctcagttaactaaagcaagaaattttgaatagtaacgccaaagattataaaatattagacacgggattaattcagttcaagggacg

SEQ ID NO: 291736 - DNA, 837 bp, Cannabis indica
tatcccctgtgtgccttgggcgccaggtgggtaagtcctcagtccaagatttcggaggcacgcctccacactctcgactaggacggatacctgggcgagctggactgctacattcccagcccacgaaaatcgtgctacaaacactgataaggggatgtgcgcctggtcgggggctcacggccagtaaggggcgctgatgcccttgcataagtacttccaggatgtggcagacttcttcggcctctacccagctacgattactcccaagggcattaagtatttgtccgctctctttgtcctctacgcttcccagggataggatgctccttctccccacgaggtcgcttggttcttcgacctgaagtctaccctcaaggaaggccggtcggggtaattttacttctctcagcctggcttcaagtggttgagtgggacggaccacaaggccatcagcaaaatagggcgttttgttgatgagtacttcatggtgaaggatccgaacatcacccggactcagtttcagaaaattctgacatatcaccgtcctcccctcacccttactcttagggataggactcaaaaacttgcccggttgccggcgaaagatagggatatcatccagttgacctctgatgaaaatctggtgcagtacgggctttacccagaggacttttcttctaagtccgtgacggggaagaaggggaaatctgctgctgcccgacgtgaacgagctcatccggagaatgagttgattcaattgaagtatgaagctaagttgaagggaggtgcccgggcaaaagcagtatgctcaggagtccatgaatcctgaagatgaag

SEQ ID NO: 291737 - DNA, 377 bp, Cannabis indica
tccaccatttattctcgtttggtcaagctcgaaggaggtcatcctttacttactattcgcaagatagaagctataaattccatgtttatgttagcactcccactcaattgcactaccgtgttcccaaaatgtacgtatcaccccctcacatgaactaccccaattgtgaaggcccatttgcttgatttgaacaactttattaggtaaattaaactagtttaacctaataaaattgaatagcaacatagttaatttcatttactttgggtcagggtgtacgtacattttgggaacacggtagtgcaattgagtgcgagcgctaacataaacatttgatcacactaggattatagcaatggataactaatgatgtgtct

SEQ ID NO: 291738 - DNA, 241 bp, Cannabis indica
tcgagggcatcctaaacctatggagacgctcatcgaaccctacaggcctaagactggcatattcgccaacggaaggaacataatgtactgctaaaggagacttaccggagccggaagtacttgcgccaggagccccagtgttcggctcctgagccgaaggctttggcctggaagcccttctctcagctgagtccccaatgcgaaggggcttcccagcgatcgcctggcttctcctctcgac

SEQ ID NO: 291739 - DNA, 595 bp, Cannabis indica
aaatcaaaatgcatccaccagaccaagaacatacaagtttcccaacaaatatgggtctatactgttataaggtcatgccatttggtctaaacaacgctggagctacctaccaaagattggtaaacaaaatgttcaaagatccgatcgaacaaaatatggaggtatacgtggatgacatgctcgtcaaattcaggaaggctggggggcatatagatgacctggaaaaatgcttcaaagtcctcgaaaaatacaacatgaaactcaatcccttaaagtgctcctttggagttggctcgagtacgtttcttggttttattgtgaacgcccgaggtattgaagccaatccagagaaaattcaagccctcttggatatgaaatcgcctataaaaaccaaagaagtccaaagcgcaacttgtcagatagtcgcactcagtagatttgtttcaaactcaatagacaagtgtgtttctttcttcaacatcttgcgaggaaataagaaatttgaatggacagaggaatgcgagaatgccttttaagaactaaaaagacaacttgcaaaacctcatgtactttcaaaacctctagacggagaaga

SEQ ID NO: 291740 - DNA, 479 bp, Cannabis indica
gggaaatttaattttctatactttcatacacctaatattttatctagggtcgtcttaaacatttttgaagccctgttctaatctttaaatttaggcccttaaaaaaatacaataaaaaactaataatattttcaaatattattatattacgattatataatttacaatattaagcaccaaaaaatttaaactattttattaaaattattatttatcccattgtaactttaagctaacattaactttctacttaaaattcataatttttttctcttaatttttaacttttaatagctaattgcaaagaattatatataagataaaaaaataatatttttggaatgaatagaatatgcatttttaaaaaataaatgaatagaataaaaaaagtttgataaaatagttataaattaccattaaatgtgggattgaaacaacttttttacttgaaaagtggaaagtaataattgttttttatt

SEQ ID NO: 291741 - DNA, 482 bp, Cannabis indica
taatactatagtaatagtacttttttatcgctatgtacctggttgttgacttcggaactaagtcgtgagtggctcgagtcgagtgcatttttggaagcaccgtgatgtcactgttagctaacgccatgatctggttgttatgtggaaattccccggttgcaaggattagcgagggcagcagttctgcccaaatcttcaggatgggttccatggcggtccaatgacagacgctggaatcacagtcgtagacattaattttccacagctctatgtcgacttcaactgtgacccagtgccttgcctcgggaaggtgcagaacgaagtaaataaactcgttacccctccatctctcaaagacttgggactgtaattacagagaacaacgaaacaattaacaaaccataataatcctcccaaacaattaacaatcgaagttataatcatagttcaacatttaaaatcttactaaaacaataccttat

SEQ ID NO: 291742 - DNA, 651 bp, Cannabis indica
ccagaacccagacgaagaaccaaacctgaaccaaaacctagacctgggacccaaaattagaacttgaacaagaatcgctgaaccaagatcctaaattaagactaggaccgtgacgaggacccagacccagacctacaaccgagcacagacctagcctcaaactgaaaatgagacttgagctcgtgctcggacacggttgtgtacccacaccagaactgagacccggacctggacctaaatctgggacccgatatggatccagattcgaacctggacttggaccaagacccagactaggatcgaaatgctggacctagatctggaccgagatcttgacccagacccaaacttggacccgcacttgtgaccaaccttggacatcgacccgaacctagacctagatcggggtcgtgaactgtacacaaacccggacagagactcggacctaaactcaaacccacacctagaatcaaacccaaagctagacccggacccggacccaaactcgaacccagaccaggatcagaaccaaggacttagacccagaactgaatcaaaactcagatcgggattggaacttgggactcggatccaacgtagaccaagacccacgacgcgaacctacactcggagcctgatccggacctagac

SEQ ID NO: 291743 - DNA, 1209 bp, Cannabis indica
cagaaaagtactcaagcgtttttaaccgccctgattagcattatcccatccattggatttgcagaatgcgaatcgattgcaattcccaccgtacgatgacgcctgatcacagctgctttgcacccgttttggcctataaaagccagcctttttcccttcactgggttactttcaccacttcgccattccacctcaagaacacttactagagaaaattccagcaaccatagatttcttactgctatttctccgtcgctctcgatccacattctaccgtcgatcgacaccaacccccagctctcaacctttatgttagttttctgggtacttaacgttttttgtgctagggtagaacttttagttaagtgcttgatttgtgggaaataggtttggcgaagtttgtcatgtggtgtatataccctctcttatttatgttctgttacttctctttcttcttctttgcaatcgactcctctgtcgaaacattatttaagatatggacatttttcgttccacgttctgcgtttttcactttccctctgcttttgctgcttttgagatatttgcacccaatattttcctaggaaaaccctttgaatttccatctttggcaaacatctagagggggcctctttccagcgttagggggctaactactggatttcttccttttacagaatcaaatgtctacttctacatcaggaaccaattcttcccacaagggggcagtcactctggccaccctggaggaagtgatgaagggtcctgttgcctaggagaactacacttgccgatctaatggttgggaggcggatgagcttcgctcaaccttgacctgtgcccactagttagaaaagattgtgaccgtggttggcatcaagccgtctgcttctggggtttttcaccgttttcctcgagacgaagagacacccaatcacaactacggaggtttcggagcttggagccagatccatctcatgtccggagccattctttctcttcaagactactttataaattttctagtttttgttggcctcgcgccttaccaactcattccccaagtgtaccgcctagtttcaggtttgtttatattttatgtagcccgaggctgggcttcacctagctcggctgaaattttatatttttacgaacttgtatctgtccccaataagggggataaatttaaagacggttttttcacgcttc

SEQ ID NO: 291744 - DNA, 549 bp, Cannabis indica
gtggtaaatcatgtatccggcgaatacgaggctcggggagaaaaaatgatagcatatctgagcaaaatacatgacctgctcgcacaattcaaaagctacggtctcagacaaattccaagagaagaaaatacaactgcagacgcgctggctcgatttatcaagcaacaatataagtgacaaggaaaacttggtccctatctagttccttgaagagcctagcatcactggcacggaagaaatcgaaatgatcgacacatccccaaactggatgacaacaatagcggcctacctcaactttggggaacttctagataactgaaatgatgctcagataatgagaagaaaggcagcacggtacatcatagtagaaggggtcatgtacagaaggattctcgatgcaattactcagatgtcttacacaagatgaagctgcacggcttctatttgaagttcacgatggattctatggaaatcacgcagttggacagagcttatcaaagaaaattctaaggcaaggctactctggccaacgatgattgaagactcgag

SEQ ID NO: 291745 - DNA, 700 bp, Cannabis indica
aagagggcaagattctggcccctttggaccggaagcgcaagggcaagatggtggaggctgagtctaccaagaagcccaagagggtcgatactccggctcccagctctgactcagggatagcccttgaggcagaggaatatactgtgcctcccaacatactcttgactcccgttcatactgatgaagagagacaactgcttcggatttccaagcacaattatgctatggccgaatacacaaaggggaacgcggaggtgggggctttgaaaaaggtcctaagggaggcccatgacaattcctcacgtactgagtactttaagaacgtctgggatctaaacatggaccccctgatggactattcaaccgcttcatcgggcctaccctcgctccttttgcctcagagctgacaagccactttgtctccaatctgacccaactcccagccaagagatatgcagcctgcgcttctacgaactcaatctaccaaattcaggatattagcgttgccatgattgcgataagtctatctgttcgtgatctcgggtctcgttttaaggcgcctgtcctcccatacttacacatttttctcatattgccaaattgctgcagagactggtcgcctctcaaagactttaattgaccatgggtacatcatgtccgagtttaggggcatggatcaggccatgaagagtctaagaga

SEQ ID NO: 291746 - DNA, 572 bp, Cannabis indica
atgttccttcagcttttaatgtaatgcttggccggccggccagccttgtatgacttaaaggctgtcacatcaatatttcactcgtgtctaaagtttccaacaaagaatggggtagggtgtctgagaggaaaccagcagtctgctcgagaatgttatagccttgcagtggccaaggctaagaaggaagtatcctccagccagagcacagacaagggaaaaaacattcccaagtaggtaatttcccaaggcggggatgaagatgtggatcctcgacttgaggactcaagcagcaatgttggacctgtagaagaattagaagagatcaagattgatccagctatcccgaccagaaagctaaagatcggaaagggtttgttgctcgaagtaaaatgagaattgataaaatttctgagagcaaacctagacgtttttgcctggtcacatgcggatatggtcagaatcaatccttatattttctcacatgttctaaatatcgatcccaatttccggccagttcaacaaaaacgaaggctgttggacaaagaacgggcagtagccctgaaggatgaagt

SEQ ID NO: 291747 - DNA, 525 bp, Cannabis indica
ttcatgaccactcgagcatcattcttcggactagcaattgcctctacccactttgatacgtaatccaccgccactagaatgtagagattcccaaaggattgtgggaaaggccccataaagtcaataccccacacatcaaacaattccacctccaaaatacaattaagaggcatctcattcctagcggagatatttcccactcgctggcagcgatcacattgttgaacgaaagcatgagcatctttaaaaatagagggccaataatatcctgattgaaagactttggcagccgtgcgttgtccaccaaaatggccaccataaggagctgaatgacaatgctccaagatgcttctaacttcactcattggcacacatctccgcattatacgatctgggcactgcttgtacaagtatggctcatcccaaaaataaaacttgctatcatgaaggaactttttgagctgctgcttggtaaaatcaggtggataggcacctccaactaagtaattgacaatgtctgcatac

SEQ ID NO: 291748 - DNA, 340 bp, Cannabis indica
gacaaatctcttcctaatcttcttaaatctaaccttaactaacagatttcacacaaaattacaacatattattctatttcatgaatttaagcacaaaaaattaaaggaaaaaattgaaaaaatcactaaaaaaattgagggggcggtcggcgtgggtgatatgggttgaggggggcggtcgaccgtgggtcacgtagtccggtcggtcgtgggtggtctgccgtgggtgggtggtctgcgtgtgtgggtggacggcccgagcgagagagaaagagagaaagagagaaagagaggcgaaagagagagagaaaatggaatattttaaaattaggtggttaca

SEQ ID NO: 291749 - DNA, 638 bp, Cannabis indica
cttagacccagaactgaatccagactcagatcgggattggaacttgggactcgcacccaacctagagcaagaccaaggacgcgaacaaccaccaggagcctgatttggacctatactgaaataaggacacggacccaaactaaaaccaggactcgaactctgacccgaactcaaacccaaactcgaactctgaatcgcaaatggacctagaactgaactaggactaggaccaggaccaggaccaggatctaaacccaaacccgagcccagatcaaaacaaagacagacacctaaaccaaaaccgagactaggactggaacccgaacctagaccgggaccaaaacccacacaataacagagacctggaccgagaatcaggatagggacctgggaaacaaaacaaggacatggacctattaccagacaaagacccgaacttgaacctaggacccagctcgtgacacggcaccagaaattgaatcagactcggacccgagattgggatccggatctggacccagagcttgtacaaaacctgtagtcggtgtcaggatttgggacccagcccaagacccagaccctgaagaggactagaacccacacccggacctaaacctagtcccaaacccaaaagttga

SEQ ID NO: 291750 - DNA, 672 bp, Cannabis indica
ctacttgattattaatttgagaagatgtgttatatattcaaattgatacattaattgatttaatacctaagttatcataaaagattataagttgttgaattttgtatctctaatactagggtcacctatcttaatcatttaatgagacaaatttacttttgattgaacaaataatcaattatatatgttattacaaatttttttttctttaattatagcaaaatttgtgattaaaaataaaaaagttgtgattaattataaatcactattcttatgttgtaactaaaatattcgtagctaaaaatattaatcacaaaaattataatttgttgtagactaaaactaaattagtgacaacttgtatctaaatattatatttagtcacaagtaaatttttattagttacatttaatcacaaaaaatttttgttgtgactaaaaatttatcactaaaaataacaattttttataaaatgtatatatatattcatattatatatgtaccccatggatataattatttattctattataaaaaattatccatatagattttagtattgtttattaaatttatatcatcaataaacgacaaatatacaatataattaagtaaatttcaatggaataagaatatatataataacattatataaatataattaactaagtc

SEQ ID NO: 291751 - DNA, 584 bp, Cannabis indica
ggactcttctaattatcgtccgaggagttgttagtagttactttctttttttgttcgtaaagtgatgagaatcaagtattcttattagtgaaaactcataattattccaggtaaaaattaaagggcttttttcataaatgtacaacaaaaacaaaataattacaaaaaatgtgcaaaaaaaaaaattattttaaaaatttatacattttgaaaacttattacatgaaaccatacatttttaatatgtttattaaacctcaaaataaacaatttcgtaaaattaattaaacagatttataaaaataaacaagttaaatatttttttattaaaagataaatgtttattatctattttagtatgaattattataatttaataagattttttttaataaaatacaatatcaaaattataaacattaatgtatataaatataaatcaatacttaaaattactaaaaataaacatgacacgtagagtgatataataaacatatgtgaatattattattttgtttattaaagtagtatgtttaataaatagaaaacaaaataaacatatatatacaaagtattttatatta

SEQ ID NO: 291752 - DNA, 630 bp, Cannabis indica
aataaaaattggaatggtcttagaatcaaacctcaatgacaatcactctttagtcaacctccattgatgagaaccttgaagctttagggaagaagaagatgaatagtgatttttctgaaatttgggtgaggtttagggattttggaatggatttttagaggaaaagagtgttagatgagagaaataagagattatgatgatttgggatgaaagtttatgggtaattttgaggaaaattggtttgaatgggattagatgaagaaattagggtgaaaaaggatggttttcggctgggagaagagagggtttgaatgaggtgtgattttgaaatgttagggtttttgggatttaaaaagggaaactgaccatctcgccgcggcgaccatgtagcctcgccgcggcgagaatccgtgaatttaagggtcgttctgtaagtgttatctcgccgcggcggtatataccctcgccgcggcgagaatccgtgaaaatcagcctgtttctgtaggttcaacctcgccgcggcggtatgtcccctcgccgcggcgagaaatctcgaaaataggcttgtttctgtaactctattctggccgcggccagacatctcatggccgcggccactgaccccaaatc

SEQ ID NO: 291753 - DNA, 674 bp, Cannabis indica
gcccgggaatggggctctcccagtccggcggagattttgtatttttatgaactcgtttctgtccccaaaaagggggacaaatttaaagatggtttttatggattccgggcccaccctgccaatgatggggtggtcccttataataggcaaactcatgttaaggagtatcgccaccgtttcttcttctcctccgggttccgagcagtggagcacccggagcttctcacggagtgggtcaggattcctccctatgagcggaccgcgcctactcaggtctttctccggagggcccaggtctttgcaacttatgaccaggcggaactcgaagtcgggggcctggtcacgacggagaattgccgaaaggccaagctcaacctgccgcaccaatcagtggacgactataacctctccagggttatctgtccaaatgtgagggcgcctgccgcggagaagatcttccgggacgaaatcattgccactgccgagaaaaagtaccaggagtatctctactggaaggctcaggagaaagcttactccaaggctcaggcagcttccgggaggccacttcgcgtggggagcccagtcgagaggagaagccaggcgatcgctgggaagccccttcgcattggggactcggctgagagaagggcttccaggccaaagccttcggctca

SEQ ID NO: 291754 - DNA, 493 bp, Cannabis indica
ttttggtctgttctgaggttaatttagtttcagtacctagaaacacttggtggatagattctggtgctactactcacataagtgtttctatgcagggttgcctgagctaccgaaagccaagtgatggtgaaagatacatctttgtgggcgatggtcaatcggtggaagtggaagcaattgggcatttcagattgttattaggaactggttcttatttggatttgaaagacacttttgttgtgccgtcttttagacggaatttagtttctgtttctttgttggacaaatttggatattgttgttcatttggaaacaatcagtttactttgtctttaaattcaaatattattggaactggttatttgaatacttatgacaatctttatttgttagaaacaattgcatcctataatgaaaccttgcatgtggaatcacgaggtactaaacgcaaattaaataaagaaaattcagcgtcattatggcataaacgctt

SEQ ID NO: 291755 - DNA, 695 bp, Cannabis indica
aaggagatattaattccgctgcatcaatgtaaggttttcttaactttatatgtgtttatttatcgttttagaaagttcatatttaggatgttaataaacatacttgtgagtagatctaagatcctggtaaaataattcccaacaatgtgatggtgtatgtggatgatttctccaaatttacttgggtgaactttctaaaagaaaagttagatacattttgtgccttctttgcgctttgcttgaaactacagactgagaaagatgttacaattggcaaagtatatcgtgttagaagtgatcatggcaaggaatttgaaaatgtcattttggcacatttctgtgatgaaatagggatttttcatgagttctatgctcccaatactcccaaacaaaatgggatagtggaacagaaaaataggacacttcaggacatggctcgggttatgctttatgctaaaagttggttctactcatttttgggctgaggcattgaatacagcttagttgtatctgcaatcgtgtccatttgagacctggaactactcaaactttttatgaactatggaaagggaagaccctgtaacgccccgatatttttccttactttacaaaaatattattttaaatgcataatttgaaaacaaaaaaaaaatacttaaaatacaacaatgggatttagaaatcaaaatgcaata

SEQ ID NO: 291756 - DNA, 761 bp, Cannabis indica
ttatattagtttactgaaacattctttataggtagctaagtgtttcaaggataaaatacattgaaggatgtaactgtaaatttgtccctactcaatgtagatcatctatagaggacattgattattaggattataataatagataattcatagtgtatctatatcgtggaacatatagagcgctctatatatttgagagtgcaattctaaatctatagtggtgcaaggaggaattaataagttaaagaatgtacttggtaaattttaaatctacttattagaagctcggttatataggcccatggtccccatactagttgagcaatactccttgtaagattcagttaattgattttaataatcaattataattctaagattagactatgtctaatttatgaattttcactaagttatggcttaattgagaagaaaagagattttagggttcatttgttaattaagagactttgtggagtctaattattaaataatataaatgataattttatttgataattaattataattattaaataaatagttttggcatttataggattaaaattagaaaatatggcatttgtgaaataatagataaatggttgaaaaaattacaaaaatataattaatagggcccacatacatggtcggccaccaagtccctatttttgctattattttattcattttttattccatataattcaatcttaaccctaagagaagttagtataaaaagaataggatggtctcataat

SEQ ID NO: 291757 - DNA, 666 bp, Cannabis indica
tatcttgtttaatttatttatgtgtttttttgttgatttttgtttgttgttttgttggtgttgtttcgttttattttagggcaagggtaaatcccttgtcaaggtgttgccatccacaggtgtggctgaggaaatttctgccaataggattgttgaggtgtgtgatgttatgcattctgttctctgttttttttttcattgtttttgtttttattgttatttcgtagtgttttatgtgtgttttagcagtgtttttattgttctgtttttaggattgggaatgcaagtacacccgatctcaattctaccattctagagtagtaacatctggttattactctgtaattggagacatcaaaagaattctaactgaaagccaactagaaattttttcaaaaactgtgtttggttattttcttcggattccagagtacataatccattaccaactgcttcattgtttgctgttgagggaggttcagcagcctaatgggttggagttttgggtttgtgtccaagggaaatatcttaggtttagtatcgaagagttttcgttggttaccgggttagattgtcaggttgattctgatttttatcagtttaagcaagatgataatgaattggttaaacattgttttaaggggtacaaaaaaattaccaagggtg

SEQ ID NO: 291758 - DNA, 572 bp, Cannabis indica
cttgagcatgaaggcaaaaatgagtgtggacaacttgttgccactatttgtgactaaggtgaagaagaatgtgaatttggagcagactccccgaaatgtaacccctagaagtgttgttgggacctttgtcccagaaactgatctgggggttggtttggacgagcaagttggcactaatgtagatgatgagagagtgggtatcgaatttcatcattcagatgagttcgatgctcccttttacaacaatgatcctgtggttgatttgggtgtggatgatgatgtggctacagatgtacctcccctgaggatggaactaactccaagcaaccaagtagagcgacaaagaagacccccccgtagtgagaatcgccaaacaccaggaactagtagcagtcggccaggtccttctgatagtgctcctgtatctgaatttgtaagttactactaaaattacaaacctacttgtgtggacgaagggaaggacatagaggaaaagtaaatgtgtatacaacatctcttagtggtacgccttcaggggaggatatatcttggtcgaagttagttacaaaaac

SEQ ID NO: 291759 - DNA, 623 bp, Cannabis indica
cgccctaatgctaaggcacgctacagtactttttcaattacagtgtaaactttgctaatcaaaatattatcttgaaaaatgtgtcaaattaaaacttttacattaaatattaaactttataatatatcaaactatttacaaaagtcgggatcccgttttcaaacttttaaacttaaaactccaaaataaaaataatccaggtcgcatagcgactacaaaatataaccacagatgtcccgagaccaaacactccaggtcacgcctcttcgacatgtacaatcccatcctagctcaggttcactcctgttcagctttcgcttttcctttacctacacatgaaagcagaactgtgagtcgacagagtcagtaagaaaagcatataacatatcatatcatatccaacttgtatctaggtgcccatacacctatttacaaggctcaacagatgagtaagaacgttcaatactagggtacaaccactataccgcatacactacatacctctctgtacgagtgttggtagggtttatttcataccctgagtacctctgagtgatgtaccacacatacacagtacctctctgtacttatgctggtataacggtactctcagacaacaatca

SEQ ID NO: 291760 - DNA, 473 bp, Cannabis indica
aaaaatttcaaaaatcaaaaaaaggctctctcttttcctctcttcctctctcggctggtagggtgattctagggctggaatttctgaattttcaagctatttctattgcattctaagtgttcttcatcctaggtaaagtctctaaacttttccttttgtaattcatgaaaatgtgtgaaaatgtgatgatgcatgttggatttttatgtgattcttgctgctgtgatttgaggttagttgcagaggtttaagcttgttagattagggtgctttaatgttgttttgatgcatgattattaggttgagcaagccataactttttatatgcaaatatgtgattttgaagatgaattgtgtaatctgttgctgggttattgttaatgtttttgattgttttcagaggcttagttaagcttgtttaagtaagtttagatggatttgattgcatgctagctaggtttgctcaagtttga

SEQ ID NO: 291761 - DNA, 630 bp, Cannabis indica
ataaaaataggcataagtaaacaaactatttgaaccttgtttttggcatgttaaattattttgaatttattgaaaatttgcaagatgttttaaaaaaaaaaactacaatgtacactttcatataaaataattaagattaaaactatttggatatcgaaaatacgaaaggagtgcttggtacacttaattttagagagtgaaacatagaatttttccaaattaattatagtgttgttttattattatctttcattatctatatttaatttctcataactcaaaagttgtaagtttatttatttttttcataagtttatttttcagctttaattataaatttaatagaatgagaatataatgttatagattaaaaaataaaatatccttggcctcacaagtttctttcagccattcatatacctttgaaaatatagaaccttaaactcttctttttcctgtgattcttcatatacattttcttatgcattctaagggaagttgctaaataaatagtgttcataaataatgagcaacatcccctatttgtaatttcttatgtggtactttaaaacaaatatgctatatatccaacccatattgcttttttgtttgaagtactcagaaaagggc

SEQ ID NO: 291762 - DNA, 554 bp, Cannabis indica
gatggagaatgaaatcgttatcactaaacctatgagccaatggaccacagttgaaatggaaagagctaatttcaactcgaaggcccttcatgctctgtttaatgctgtctccactaatcagttgaaggtcattgccaattgtgaaattgcaaaggaaacatgggagaagctgaaaattaaaaatgaggtaactgatgctgtcaagaaatcaagattgcgtgccttggccaaggcctttaaaatctgaccatggaggaggatgagtccgtagctgaatttcatgcaaaattgtgtgatatctccaatgaatcctacgctgtggggaagacttactcaaattcaaaattggtttgaaaggttcgtggttttctccccagaagattcatgtccaaagttacctcaatcgaagaaatgagaaacattgagaaactcgatcttgatgaactcattgggtccttgcaaaattatgagctgccactgtccaggtggaagaaaaccaagaaacggaaggaggtggtgaaagaaaaatcagatgcgagtattgcacttattca

SEQ ID NO: 291763 - DNA, 596 bp, Cannabis indica
taaggaatatctaaatatatataaaaagatatttttataaaagtaagttaaagaaagcataccttatactaaaaattatgtacttgacttccgataaagtgacttccgataaaattataacaaccaagtttaagagaaactaaaatcaaatattatcctaattctaccaaaatttcgacacataacggctataattgaacgttttcgaaaaattcaaacctattaataacaacacaacacaattcaaaataatataaaataataatcacaacaacatttagcaatataaaagtttactacccatccgactgcaatacatgtattcacagaacctaattgactacggatgaatatttaagatattcaaactctactaagcattcataattaatttataatagaagttagtttatgtatacctcgagctacctagaaatcgatcaacaccaaataagtcggatccttgcaaattgacctcacaacctacaatataaagaaatagagtaatttgcagcataaatacctatgtttaaatcccagttgcaaataaatacccaagtttaatttttggctgtaataatacctaagttatattt

SEQ ID NO: 291764 - DNA, 566 bp, Cannabis indica
aaatcaattaactgagtctggaagcagtattatctcaaatagtgaggggaccaggttcctatataatcgagctttcaataagtaaatttaaaatttaccaagtaaattctctaacttattaattccgccttgcgccactatagatttggaattgaatagcactctcaattatatagaacgccctatatgtaccacgatatagatacgttatgattatccattgttacaatcctaatagtcaaagatcttctatagatgatctacactgaatagggacaaatttaccgttctatcattcaatatattttatccttaaaatacttagcaacttataaattatattttagtaaactaatataattactaaaatgaggccttaatcatttatctctattcaaccaagctcaaaagaaattatcgtttcacttctaaatacttataaaagctatagattccatatctatgatcagtgctcccactacattgaactaccatgttcccaagatgtaaatatctgccagaaccatttgttagcttccacaaacacctcaaagaacataaataat

SEQ ID NO: 291765 - DNA, 579 bp, Cannabis indica
attttaattacaaaaattaaatgggctatctatatgcatctaagcccaaagcaaacatataggcttacacaagcacactgatttggatggatctgatcatgttactaggtttatacacagatgaaagaggattgtaaaatttacctgttacaaattatttatttgacctattgacaattgaactattggttaaaatgagatcattgaaaattttgatcaaacaataataggtttaaaaaaaaaaaaaagtttaataattaaacaatatataaaacacacaaacatgtaactagttggatacttggatataggatttatttaattttaatttaattaattaatttattaatttacaaaaaaaatattatttttttttggaataaaaggaataaattaaattatttaattttttttaaaaaaaaatgaaaccaataatttttcaaaaaaaatgctaacaactttttcaaatttcatgttattaaaataaaattaaatatttaataaaataaaatgacaaataaatattatttttctaattttataatttaatttaaataaaataacaaaatttaaataatt

SEQ ID NO: 291766 - DNA, 532 bp, Cannabis indica
gagttggaatttgatacttaattatttttttacaataaaaaaggtctccatcttcattcctcaactcgatttcgtcaattgctaaaagaggtgccatctgaagcattttctctaccatccgtccctcgatgcaaacattgcaaagcaaagcgtttcatttatgaaacaacaggcttttgttgtgccgatgaaaattttatctcgcaacaaacaatgtgccgaataaactttatgaattgtttacttccagtagcgaagaatctacacattttcgaacatacattcgaacttacaacaataaatttgcttttacatcaatggaagttacttacgacaaatcgatgtgtcgaaggaataaaggaatatatatttttcgaaaccaagggcaaatctatcacacaataaatactaccatctgatggacgtccttctaatctgcaactatatttttacgacaccgagaatgaattggagaaccgacttaatgattcaaaatgcagactggatccatctgttataactcaactcatga

SEQ ID NO: 291767 - DNA, 499 bp, Cannabis indica
tccagcctgtccctccgaaggacctcctcccggatcatcgcctccgcttgggcttccctctgcttggcctcttcctcgaacttagccttggcaagggcctcccgccactcagcatcctcctggaacgtccgcctttcagcagacagatcctgcagggtcttcatgacttcgtctatgcccccaaattcagacaagacggagccatgattgattaggttcttggaaaggcagcaagctgaaaaaggatccaagagtgagtaaagtccttaagaaaaataatgaggaaaaaagtaaactacgaaatacttaccacagtcaaggagtggctgagatcttgaacttgaaagacggagttcaaggatgcacaagcggcgaactgcttgggcgcgcaccgggttagctgagacacaaactcgccggtcatctccgcgacaaaaggagccaaggtgggcccgaggaaacgattgaaccagtcggacaggggtccaagtttagatcc

SEQ ID NO: 291768 - DNA, 920 bp, Cannabis indica
attaaattagtatgtttaatagatagaaaacaaaataaacatatatatacaaagtattttatattattagtatgtttattataattgtaaacataaaaatagacatagctaatttatactatactaaaataagtatattttttttttctattgtttctatatattgattattttttaatgagttagtgaacgaattttctattgaaatataattcttacatcaaaaaataaataaacaaacataactttataaactccaaaaattatttaattagaaaaaataaacatgacacaataaacaaagaaaaagataaagataaacaatttttttatatatatattatttattttttaaaaaattactagaaaataaacataacacacatagagtgatataataaacctatgtgaatattattattttgtttattaaattagtatgtttaattaatagaaaataaaataaacacatatataaaatattttatattattggtatgtttattataattgtaaacataaaaataaacatagccaatattaccatatatataataatcaataattattaccatatatatattataaaaaaaattgaaaaaaagttttttagttatatataaaaatgtatgagaaaatgataataagttttttttgcacatattttgtaattaattaaaataatgtatacaaaattgtaaaatatccttaaaattaatgactattttcaaatgtcaagtttttttttttttaaattgaatatttttaacaatataaaataaaaatattacttttaattaatgttactaaataaataaattttttaagcaattcaattaagcaatttgagggttacagtaattgagaaccaagcgaccccaggcgaacgacaacaacgtggctttacgtgtgatcatctc

SEQ ID NO: 291769 - DNA, 525 bp, Cannabis indica
taaggaactgtatattagttatccttatatctacaccaactcattaagaatttgagatggtggttactctgggggtggagagttattctagaagagtgtaaaaacccatctataataattcaagctccatcagagaagatatatataactttgtaaattcgaaattaccagaaagttattctactgaagaaaattctacactgtattatctcagttccaaattttaaagtatgagagatatgtcttctgtttgttcagatgtacttaataagcagtaaggatttcagtatcccttgatgagtaaagcatatagtaaaggatgtttcataatgttttatgaacctggttccagaaatttgggtggagtcaaatatactacacttgatctgaagatcaagacaacagattgattggaatgcacaacttgttttatgttagtgcaagtgggagtttgttgggttttgtgccctaaataaaacccattacaatctgattagttatcaatttaagagatttgaagtgatt

SEQ ID NO: 291770 - DNA, 792 bp, Cannabis indica
atcgtttttggctcaaatctaattgcttagaaaagtaaaaaacaacaaactatctctagatccaacactgaggctgaatatagaagtgttgctagtgttacaacagaattgacctggttacaatacttgtttttctgaactctagatacaactatctcaacctcctaccatatggtgtgacaatctaagcaccataatgctaactcagaaccctgtgctccatcaaaggacaaagcacattgaacttgacttgtatttcatcagagaaaagattcttaacaagactgttcagattaggcatctctcttcctatgactagctagctaatgggttaaccaaagccatatcaagtcaaaggtttgctgagtttagacacaaactcaaaattgaagatcgttcaattatgagtttgagggtaggtgttgaagacagttaaaacaattggtgttagttagtgatcgttgaagttagttagtattgattaaacacgtgctgatttctgttgagagttagttgtgatattcttgttatgagttgttatataagctgtaacacttcattttaatcaatgagaatctttcctcaatcttcgcatctctttcttccttcttcttctctctctatttctctctgttactagttctagtgttcatcaatggctcaaaacttcaacaaacggtagcactcctcttatttttttataagagtattgctataaagcaccaatagcaccacctagaggtggcattttttgattagttagctaatactctataaaatttattacaaaaa

SEQ ID NO: 291771 - DNA, 553 bp, Cannabis indica
acgatacgtgtcctccttgctgtgtctgtacagagccagacctcgtatacctgctcggagtgcggccatgcgaggatgaagaggccgactctgcgtcgttatctcgaggtggacgactgcgagggttgcggcgctcaggatcctcgtcgatttgtgcgctctggttaggcaaccttgcagattggtctcttgacgtcgggtgattcaagtccaaaacttcaggatcagttcttcgttccctgcgtacacggttagtttgacgtctggaaactgttacctgagggttttcgttgcgaatggcaggaactcgaggagggcgtcgagctcggctctgtccatctacctcggcttgtagtgctcgcagctgatcctggattgcagcgtattgatcggtcgtgagctggaccactccttcggacactaccgccggggtgacggggggaaagtgcatggttgctggtggtgtggacgtgtctccgacttgaggaccagttgtttctgggaataggttgagaggtctgatgttgctcctccctaccccgccgttgatgac

SEQ ID NO: 291772 - DNA, 292 bp, Cannabis indica
gaaaaactagggttcccaaatttgccccaaccggtagaccggttccccaatcggaattccggttctgggaaaattcctagaagccaaccggaattccggttcctacaggcctccctgaactggaattccggttcagtgcaggaatggttcaaaatttcatatctcgaccaaaacaacccccaaccacatgagactctctagacctgttctaaacatcctagaggtcaataccaaagcaataaaatatagcttcatgcataattacaaaaatcaccattgatgagtcaagctt

SEQ ID NO: 291773 - DNA, 780 bp, Cannabis indica
accaaacatgccatattgaatcaggtaatgtgagctttaaaatgtatgatggtattgtaagaactcttacaggtgtaagatttgtgcctaacttagctagaaatttaatttctataagtatgctagatgaccttggtgttgtgagtaagattgagacaggtacaatgaaactaagcaaaggttcaatgaccataatgaaaggctacaaggaagaaggtttatactacctaaagggagaaccaatttcacattatcacaacacaacagaaactcttgaagattctaaggcaatcttatggcatagaagacttgggcacatgagtgagaaaggtttgcaaattatgagtgaacaaaatcttttatgcaaggataaaactcttaggaccgataacggcctagagttctgcagcgatttgtttaacatgtattgcaggaataatggcattcaaaggcataagactgtaagattaaacccgccacaaaacggagtagctgagaggatgaacaagactattttaaataaagccaagtgcatgatgttccaagcagggttagctacgggattttggggagaagcagtactcacagcagcttatttgataaaccgaagtccatcaagtgctgtggagttaaagacccctgaagagagatggtccggcaaaccaccagatttatcccacttaaaagtttttgggtgtgcagcatatgcacaccaaggagatggaaagttagagcctagagttctaaagtgtgtatttttgggatattcagaaggaacaa

SEQ ID NO: 291774 - DNA, 553 bp, Cannabis indica
agcttgaaataccattcctgggcagctttcgagagggtagaaggaaaaattctacaacataaatcacctcataccacctacagatccctttgcatctcgaaatacttgaggtgggaaagaggatcttctcttccagtgtacatcttccaggttggcattttaaacttgtggggtaacgccaggagattgatctcgggagagaaaggggttctgcatgctcggtccaacttgagatcattgtttctctgtctggccatgccttggaacatattcttaagttcgtctagttgtgcctgcacagttggactgacctgttcagcattttggtcgatctgagtcacatcagcatcttttgaagcgggaatttgagcacgggttccaggctgcacgatcggcgtgccaagctgatcgtctactcatctccttatgttcagatcatttctgagatcatgaatcgtccccaacctttggaatacagatacgcctggctgtcttagtgattgattggtttggttaacgtgctgaccggcaccattaacctagttggaattat

SEQ ID NO: 291775 - DNA, 500 bp, Cannabis indica
agtcccagatctagacaccgactattggtctgttctagtccctgttacccgaatcccgagttaagatctggatcactgtcacgggtctcggtcttgttctggttcaggtcataggtcccattttggagtttgggttcgggatcgagactgggttgcggctctaggtcccgaccctggttctttctccctagtctagttccatgtttgggtctgagttcaggttcaggttcgggtcccgactccagggttgggatctgtatctggcttccaattcgtgtctaagtcttatttggggagctggtcctggtccagttacggttctggatcttggtccaatttcagttatgattccaagtccaagtcctcattccagtcctggtcaacttccaatttttggtcacagggtacgggttcgagtccacttttgggtttgggactgggtataggtccaggtgtgggttcaggtccttgtcagggttcgggtccagggctgggtccca

SEQ ID NO: 291776 - DNA, 86 bp, Cannabis indica
gcttctatctggcgaatagtaagtaaaggatgatctccttcgagcttgaccaaacaaaaacaaatggagtactcatttcacataag

SEQ ID NO: 291777 - DNA, 258 bp, Cannabis indica
aagctgaaccgaatttaccaagtaaagtccctaacttattaattccttattgaatccactcttagaacttggaattgcactctccgttatatagaacgctctatatgttctacgatagatacgctattatttatcaattgttataatcctaatttaatcaatgaccctctaatagatgatctacattgaataggactaaattaccgttacacctttaatgtattttatccttaaaacacttggctccgtataaatgat

SEQ ID NO: 291778 - DNA, 1064 bp, Cannabis indica
tatattaatatagattgttctaagcatgaaaatccactttgaaaaaacaaagaaatctcaaaattatttttcagaaaattttggtgatttttaaagtctttgttttatgtattttcgatgcataaaatctatatgaatgtcttaatttttgcatttagattcatttggaattgatttgggcctttttggtcgtctaaattctctttccgatcgggtttgggtcgggtccgtcgaacccgcgtgcagaaaaacgggtcaaaatgacccggattggctgaaggagacgacccaaacgacgtgtcgttttccacaaacgacatgtcgtttttcagtgtttttggctgctgtcgtttgatcaaacgacatgtcgttttttattttgaaaaacgacgtgtcatttttcaggaatgtgctgctgtcgttttctcaaacgacatgtcgttttttccctatggaaaacgacatgtcgtttttcaattttgagatcagccctttagtttgtaaaacgacgtgtcgttttgctttttgcaaaaaacgacatgtcgtttgtgcagtgcatttttccaaaaaaaaaaaaagggaaaaattccgaattttttataaattttttatttatttggaatattaattagtttcctattttgtgttaatttagtccataaattgcatttagtcaattttctatttttgtttaatacatatatctagtataaattgaaaatagaaatttgttttaatttggtaattaattacatgatttatttaggcatgtaataattgtgcaatttgtataattgtgcatctaattatttattaccaaatttatgtaatttattgtttaaattaattgataatctgctattaagtacattctttaatttgcatttaattcatttcatataattaattgtactaatttgtatatttaccttatttatacaaattaattattagtgcaaatatttaagatattatatggttataaatgcataattaattacatatattatggaattaagcatttaatttattatcatacaataattgtattaatttgtatttat

SEQ ID NO: 291779 - DNA, 751 bp, Cannabis indica
gttgttgttgttgttgttgttgatgttgtagtgaaaattaagggaaatttagatagtatattaacttttgttatttttttattaaaaatactgtcaggtggtattttttatttttttacttgtgtttttttataagttttatactgcagtatactgtgttaagttttcactagtgttctactggtgttttattagtgttctattattgttttgagttgttctgctttgtgttttactggtgttttataaaaacacagtatttttgaaaaaatttctgtgtaacagtatttttgtaaaaattaacccaaattccaatatatttataaattacttgtttgattttgtgatgaaattgtaacattacagactcactcatctcgcgcggggcccactcctttacccacttccataattgcattccatgcaataagccgccctcacctcgtgactttttttttttttattaattagataagatatttaaagaatttttatacatttttacagtttttataaaataatattaaataataaaaataaaaaaaaaagattgcaacaatatgagaaaaacagggataaaataatccctaactaaaaattcgaaatccaaaattgtctttaaactaaaacaattaattcaaaaatagataaatgagcttcatcttcatcttggacgatcttcaccctttgtccagctttccgatccaactcactaagatagcatctgagttcaagtagcttggcctataag

SEQ ID NO: 291780 - DNA, 439 bp, Cannabis indica
ttgtcgccaagcgactaactacaaaagcactgttgtccagaggatcttacgctccaggcctaaccgccccgacatgtacaatcttcattggctcgtcctcacggttcctcagatttggccttgcccttacctacacataaacatagcactgtgagtcgacagactcagtatgaaaagcataatatattaaacatactaaatcccgggttataaccaagcgcccatacacctgaccataaccctaactgaatcagggacgtccatgacaatgtatgattaaccgcgaatccagcctatactcagtactctagtcttatcgatgtggtagcagttaatgcatactaacagatagcctagcatatatctattggcatctcggtgcaactctatgtacacctcacttgtaatgaccgctttagtaatttggattagtaaaggc

SEQ ID NO: 291781 - DNA, 555 bp, Cannabis indica
cgcattgacgagaaaccatacaatatcagtagtgcaaggcgaggcatcaacctcgctacgcatgacgagacatgatgactgttaatgcacttagcatattatacacattacacaaactaagtataacagttgttaatgtagattttcgttaaacaaatttgaacctcacggtaataatttcacacagaaaaaataaaagctatagaaaaaataatatttgaagacagggttttttacgtggctttgcagttaaaattctgcatagtccacgagtcaatcttattcagatctttgattgtgtttttcagggaaaaagatggctctctgcaaggttttatggccgcggcgaccataaatctggccgtggccactgggttcgaaaaatccagaaaaccagattttaaggtctaaaatgcctacttttccataatttcgaacctcaaccaaaacaaagggtaaaatcacaaaattcatgcattaatccacaaccaaaatcaaatttaaacaatatacaatataggtccaaacttgacccaaaaattccatacaacatca

SEQ ID NO: 291782 - DNA, 550 bp, Cannabis indica
aagttcgggtcttggtcggtacgatgtcccgagcctagttctgtttcccacgtccctatcctgattttggatccaggtcccagttattgcgtgggtttttgtcccgctctaggttcgggttcgagtcctagtttgagttcgggtcggagatcgagtcgtggtctaagtttgggtcgggaactggatttcagtctaggtccaggtcaggctccgggtgtgagttcgcgtcctgggtcttggtctaggttgtgtccgagtcccaatttcctatccagatctgagtctggattcagttctggttctaagtccttagttctgatccttgtctgggttcgagtttgggtctgggtccgtgtcaagctttgggtctgattctaggtgtgggtttgagttctagtccgagtgtgtgtctgggtttgtgtctaggtctggaccccgatctgggtctaggttccggtcaaagtccaagttggggtcccgagtccaggtccaagtttgggtcttggtcaggatctccatccagatctaggtccagcatttcgatcccagt

SEQ ID NO: 291783 - DNA, 548 bp, Cannabis indica
agatcgcatccatgggaacggctgctacaacaagagaaaagagtcaagtgttagaatatatgtgaaagcagtgtacacttaaaaagcaatcaagctagccctaccctgactctctaattcggccctagcaaagtcccgaatcttaacactggctgcatcatccccgagatagctgtccgagggacgaaaccagctagaagacagataggctgaaggatccaagggaacgggcaccgaaggtccagaacccatccgggactggcctaaataatcgcctaagtgagagaagtaatactcctttgcatgatccccccaccgagtggagggcatcctaaacctatggagacgttcatcgaaccctataggcctaaggctagcgtactcacggacagaagggacgtaatgtttcattaaaggggacttaccagaaccagaagtgctggcatcaggagctcccgtattcggcccctggaccgtaggccttggtctgggggtcctcctctccactgggctcccgatacgaaggggcctttctgttggaaattatt

SEQ ID NO: 291784 - DNA, 527 bp, Cannabis indica
tttttaaaaaaattatattttattttaatactaagaaacgatatcaactcagaattttttcttatatatttaagtttcgattttttttttatttacatttgataaaatataatataaaaatattaaaatttattttttatcaaatacatataaatttaattttaaaaaaataattaaaaatatatagaaaataaaaatattatataaaataagtttttatatatttgtgattataataaactagattataacattattattatcattataatagatcttaacaactcacagtactttgaaatttataatttaccacactcaattcagtttttttttacagttttttctgtccgttgttttttttttcacagcacaactactatgctttttcacacagcacaactataccaaactggctcatactcataatctcatctcacatcaaatattataaatcatttatgtctttcttattgattcataaattaatttttgagaatctaacatgagtttaagatctataaata

SEQ ID NO: 291785 - DNA, 667 bp, Cannabis indica
ctaggctaagtaggccctaggcataggcccaacctgctatgctcaaggcggggcttggatgttataacacccttacaatgaatgagaaacccaaaatttaagttcgagggaagcggacttttgtaacgcctcaattttttaagacatttcgctcgatagttcgtttaaaattatctacgataaaaatattaaactcatttataaaaaaaaataaacagaacatgggatcttattattataaacaaaaaatttaatttatatattcataaacttcaaacataaaattttatttacaaaactcgtgagttataatctttaacagaatatttaacaccaatacaacaatctcttaatatatttgaacttatgaccttatttcagtacgtatagaatagcttaagtactataatactaaattactatatatattttaattaacttaaatacataaagactgtccccattgattggaaaaaaatcttctgtcccaaatttccctatcccaatcctgtccctccaattaataattaccacctatttttattttttccaccttcatttattaatttctcaaacaaactgctaccatttatcttcctcattgattacattcttcattaattactttactatcatcactttctttacatcataataataataataa

SEQ ID NO: 291786 - DNA, 592 bp, Cannabis indica
ggatgttaattcaacatacttgttagtaatctaaatcctggtaaaatattcccaatattttatctttaaaatacttacatacctataaatgatatttcagtgaacaaatataatcactgaaatgaatacttaaccatttatctctgttaagtcaagctcgaaggaaatcatcatttgacttctatatccagatagaagctatagattctgtatctatgattagcgctcccactcaattgaactaaatgtccttaatcacgagaagatccattggtcgactttaacgaatagattgaagaacacaaataatacaattgaactataacctaaccatcttaggattgagatcatttgattaaagatcaactaggtaatattgaattgaacagatattacggtaaatttatcatatatagttcaagttcaatatcgatcccttccgatgcatactccatacatccaactcaagcttactttaactaataccctggaaagaacataacacttatccaaggtgcaagtaaactacgttgtagattatcccatcagttaaaccttgtgtactgataaatcataggaatacatttaatca

SEQ ID NO: 291787 - DNA, 740 bp, Cannabis indica
gcatatctggaaaaagggctcttgcctgatgacaaaatagaagcaagaaagttgcgacagcgagccgcccgttatgtaatatatgaccaaaggttgtatcgcagaagttttagtcaacctcttctcaaatgcattagcggggaggattgtggttatatacttcgtgaggtacacgaggggatttgtggcaatcataccggaggtaactcccttgcattgaaaatcatgcggcaagggtattactggccaaccttgcgacaagatgctctcgcgtttgcgaagaagtgtgacaggtgccagcgaatagccacatatacccaccaacctccaagtaacctccattctatcacaagtccatggccctttgcaatatgggggattgacttaatcggcgagttacctaaagggaaaggtggagtcaaatatgcggtagtcgcagtagattacttcacgaagtgggccgaagccaaagcactcgcaaccatcacagcaacaaaattgcgcgagtttgtctatacctccatcatttgtcgctttggcattccatacaaactcatctcagacaatggaagacagtttgattgcaaagagatgcgacaactatgcgacgatttgggaatcaaaaaggcattctccgcggttgcttacccgcaaagcaatggacagactgaagctgttaacaaaataatcaaacacactattaaagggaaactagaagatcgcaaaggggcttggccaga

SEQ ID NO: 291788 - DNA, 575 bp, Cannabis indica
tttaattagtaatcccgattaggggattagggtttcataagcaatttttggtagcgtgcctaattatttagggcgttacactaggactcgaattcgagcctagaccgggatcaaaaccctcacaataattgagaccttgacccacaatcaggatatgaacgtgggaaaaagaacttggaccgggacctagtaccagacccagacccgaacttgaacttaggacccagcttgtgacccggcactagaaatgaaccagacttggacacgagattgggatccagatctggacccaaggcttggaaaaaacccaaagtctgtgtctggatttgggacgcagccctgggcccgaaccctgataaggacccggaactcacacgcgcacctgaacccagtcccaaaccaaaaacgtaggacctgaacccgtaccctcgtgacccaaaacttggaaccaaaacgggaaacgttgaccgggacgtggaactaggacttggacttggaatcataactgaaattggacatagatccagaccgtaacacgaccaggacctggactctaaatcagaccttgacccaaa

SEQ ID NO: 291789 - DNA, 337 bp, Cannabis indica
ggaagggaccgatattgatcttgcataagatatcataaacatatcatcatatctttctaagacaatatcaatagttgatcttaggtctatggacattaatcctgatatggttaagttcaatcttagttgtattatttatgttcttcaatttgttcgttaaattcgaccgattggatcttcttgtgacatacagattaggaacatggtagttcaattgagtgggagtgctgatcatagatatggaatctatagcttctataggtatttagaagtgaaacaatgatttccttcaagcttggctgaatagagataaatgattgagatctcatttcagtaa

SEQ ID NO: 291790 - DNA, 839 bp, Cannabis indica
ttcatatttttattttccttttgctttgttaaaatatatatatcactctaagtatgctctgtggtcgcagttccaatgaacttccacgttagaaattgactcttgtaattttcttttaagtattgtgtgaaatttgcatgcatcattggcaacgagattcaaagaatcgtttggttaaaagaagactacattagtttgacattgaaagtgttagtgaaaatttaagcataatggatctccctgtcgttgaaaatgcattgcaagagaaaacccttcttgaacatttctctcctattgtttgtaattgtaaagcccgcttagttaatttggaaattatcagttaattatgattaattatgaaattatttatagctatttaaataatttattactgttatttatggaattcagaaatgcatggttatgttattcagtagttttcatattttgcatttccggtgcccggtattttggaactcggcgtttggctcagtagaaatcacaacttagtatgttagtagtttggggacgggttttagacattgggaatgtcgggaatggccgggaatttagaatttcccaaaaatacccctttagtatgatttatgtgattttatggtggaggggcaaaatggtctttttgccccattagtgttttgtcttttgtgattttatgaaatggaaataaatgttatttgattattttttggctgaatgagtatatgttaagtggctttattctatttaatttattttttacaaaacattacacttagaaaaaaattacaaaatttttcaaaactctctctctctttttcctctctctctctcggctgtgc

SEQ ID NO: 291791 - DNA, 526 bp, Cannabis indica
agcagctaggagctgaaataagaagaaaaacaaacatggttagtaggtccagaattaataatccaaggggataataattctctaaaacacatgaatttatagcatagaaagaaataccttgtttctttgctacaaacttagagcattggggtttccagtggcccttttcattgcaatagaagcattttccttttggcttatctctgggattagcagcctttttctttttaactgttttcacagcttgaacaagcttcttgctattcttccacttcttcttgttgttgggtttggaagtagaggcaatgtttgcctcagccttagccgccccattagcatttctagaactaggagctttagatcctcctttctgtggtcctccaatcaaattttcaaatgtctgaaggttgttgattaactcgtgaaagtcaagctccaacttgttcatgacatagtttgaagtgaagggcagaaaggctggagtcagactgtttaagatcaaactcacttgagttgtctggtctat

SEQ ID NO: 291792 - DNA, 441 bp, Cannabis indica
atgccacatagggttaggtttgaagtatttggcattaaaataatgaaattattaaatgataaatcctacataagtggccggcgatggcttgtggatatgggtcccacttttgcaatttcctgtttatcatttcaccatctcattttctcaaaaacgccaattttcaaattcaatcatttaaataccaacttcaactatttaataattataattaattattaaataatgttgtcatttattatatttattaattagacttactaaagtctcttaattaacaaataattaattattaaataatgttgtcatttattatatttattaattagactaactaaagtctcttaattaacaaatataccctagaaactctttctttacagtttcgcccttgcctattgataaattcaaaaactagacattgtctcaactagtgtgggg

SEQ ID NO: 291793 - DNA, 597 bp, Cannabis indica
atttaaaattaatcaagtaatttgaagaataataaatacaaagatattgtaataaaaggaggtgggaacattaattgtcaaatgctaatttattgtgttcagatatatttggaaagtcaaattttatggaatttggtttgtaatccatgtcgtataggaaggtatcatataaatatttttatggtaacttaaaaggatataatttttggaagttttacaacctatcttttggaaattaaaataagaataattatgtcataataactgaattcgattattttaagtaatattaatttaatatagattgattataatcaagttttaccataaataaatatgtataaaaattacttttttgggataagtacaataaaggaatttgtaatattttagaaatggggacattaataatgaattaaaatggttgattttgtctattttgggaaggattatggaataaatgggtcattaatgcttaataatcaaggttattttgtttcattgtattgaattacactaatcattgataatcaaggttattgaaatatattattcgttgcttactttattattgcgataatttttaaagtaaacttt

SEQ ID NO: 291794 - DNA, 650 bp, Cannabis indica
aggactggctgcagcatcagcttgggtgatagcgaacactcgagcaggaaccagttttacctcagctctcggctcctctttctttgcctgagggaaatctttcttgaaatgcccaccatgccacacagaaagcatttcttccggttacactctcctagatgatgtttcttgcaatgagcacactcaggataagagtaaccctggcgtccacctctgccttggttcccacagaaccgcttgctttgccctaaaccaccagatgttggggtaactttccttttctgatcagtgatggagtcaccaccatccctaccatgtacaagagtaggaaaagtgggggttctaccaacacttggagtcactcggggctcctaaaggaatttaaccgcacccttggctctcaaagccttttcaaccatttcaacatatgaggttgcttcagtggtagtaatcaccaaatcgtgcctaatcttcgcactcaaaccggtcaaatattttctttcttgctaaagtcagttggcacgattcccacagcgagcttggccagacgatcaaattttgtagtatatccgtaaccgcatcccctcggtttgcaccaactcagtgaactctttccgcttagcactacggacagcttcattgtagtattt

SEQ ID NO: 291795 - DNA, 857 bp, Cannabis indica
aatgcatcttcttattatttgatcggggcaatatttaaacaaataaggatcatcccacatgaaatttttcacttcagcataaaatttagatttatcttgtttagaccaatgagaaggaatttcaccagtgaccaaataattgacaatatcagcataccaaggaaaagaagatacatgcatgagttgttcatcaggaaaagtttcaatgatagtggtggaatcatgattagtttcaacaacaattctagacaaatgatcagctacaacattttcagaaccttttttatcacgtatctctaaatcaaattcttgtaaaagcaagatccaacgaattaaacgagatttagcatcttttttcgacaagagatatttcaatgcagcatgatcagaatagacaattattttagatcctaacaaataagacctaaacttctctaatgcaaacacaacagcaagcaattctttttcagttgtagtgtaattcaattgagcttcatttaaagttttgctagcatagtatattacatgaggtaacttgttaattctttgtcctaaaacagcaccaattgcataatcagaagcatcacacattatttcaaaaggaacattccaatcaggcgaaataggtgcactagttaaaagggatttcaatttttcaaaggcaacatggcaatcattatcaaagacaaaagcattttcttttccaagtaaatgacataaagggcgtgaaattttgctaaagtcttttatgaatcttctataaaaaccggcatggcctaagaatgatctaatttcttttactgtcttaggtggaggaagttttgaaataagatctacttttgctttatcaacttcta

SEQ ID NO: 291796 - DNA, 764 bp, Cannabis indica
aaacatttcaagaatcccatctatagctcacactaaacccaatccacttaacaaaactcaagctcttgaacaagagcttcatctctaacagctcaaataaattccagccatgaaaacatcattttaaacatgaaattccaacctagaaataccatacaatctctgcccaagctcaacaacaaatcatacaataaatagaagctcaatttcacaagattaacatcaattcactcaacatgcaacaagaacattcaaaactcaaagaacatgcttttgacctaagaatttcagcaagaattcaacaaataattccatataatttcagctagaaactacctcaatcccttgcacaatcaagctccaagcttctaacacccttttccaacaatcaagctccaaatcaagtttaaattttcacaactcaagttgaaatacatcaagagggtaagagaaggagagggttcgggtgagagagagaattaaccagaaattacattgatttttcttaataaaatccaattttccaaatgtaatataaagaggtcaaatgaccaaaatgcccttagcgccaattaatcatgcatacacattttcaagggcaatcttgccatttcacactcaattatttccaaataaatttcagattatcacttatcaaataaaattccaattaaatcaatcccatttgcatttcgagcccgaacccggttcggcccgaaatttccggttgtgactataccgcgccaacctgtcagaacacacct

SEQ ID NO: 291797 - DNA, 546 bp, Cannabis indica
cccagatcaaaacccagacagagacctaaacccgaactgacactaagactcgaccccgaacctagaccgggacccaaacccacacaataaccgggacctaaaccaagagcatgatagagacctgggaaaaagaactaggacagggacctaatacccgacccagacctgaactttaatctaggacctagctcgtgacccggtaacagaaatggaactagactaggacccgagatcgggatccggatctggacccagggcttggacaaaacccgtagccggtgtctggatttgggacccagccctggactcgaaccctgacaaggacccgaacccacacccggacttgaacccagtcccaaacccaaaagtggacacgaactcgtacctgtgacccaaaattggaaccaaaactggaagttgaccgggactgaaacaaggatttggacttggaatcataattgaaattggacctgaatccagaaccgtaaccgaaccaggacccagactccagataaaacctagacccgaattgggagccggacctgg

SEQ ID NO: 291798 - DNA, 667 bp, Cannabis indica
tttggggagttttcaatattatacttaaaattgattttatttataaaaatacctttaagaaaattatttgcacaaataccgttgtgccacgtcagcatatataccgaaatttaaaataattaccgaaaatagaaaaaactgaaaaaatctcgtttccagatttttttcgcttttttaggagttttgtgaaaagcaactatttagttacttttgatgtgaataagatatcaattagttacttttctattaaaaatttattttagaattttacacatataaataataaaataattattttaatatgtgagaaacatatatttttttatctcctaaaaagacgactaatattaaaagaaacttttttgtttcttttttatatttttaggctatattatgttattttattcttaaagatacattgaggttaccttttttttttaatgtaactcatacgatgttttagatactattcaatttattattaaaatagttttataaaaataaatttatattgtaatgtttaaatataaataaaaaaatatattttttagtaacttattaaattgtttgatacattaaattttatttaaatttaaatattgtttattcatttattaacaaaatataaaaaataaaatacttttagtaacttatgaagttgtttgat

SEQ ID NO: 291799 - DNA, 478 bp, Cannabis indica
aataaaaaatatacaataacatcataaaatagagcaacctcattacagaactcttaaaacctgtaaaactagtttcgaacttatgaaccctgtgaaaccatattcgacactatgaaaaatcataacaaaatataaatgataaacaataaagttaatcgaaacaagtcatcgaaattggcatagtcatcggagttgctgccggcaccaggaaagtcaccagagttgctgccggcgcaaaaaagtcattagaattgttattattgccggaaaaaaaacaaaaaaatcaccaagaaactggtttcttcttgcggcaacgccagtttccgacgaatttcttggagtttactatcagtaccgaaaaagtcactggagtagctgccagtgtcgaaaaagtcgtcagagttgctgccaacgccaaaaaaatcgtcaaaattggcattgtcatcaaaaaaatcatcgaaaaaattaccaagaaact

SEQ ID NO: 291800 - DNA, 504 bp, Cannabis indica
atcaccaatcttcaaacttttcatattttcttaaatttctcaaacccaatccattcaaaaacccaatttcactcatcaatctacacatatcatcaaaacccataccaaaaatcacccataacaccccaaatccgaaaatcaccattgtcttcatcttcaacctcaagctttcaagaacattcaacaatggaggtggagtaaagcttcttcgggtttgtaagtatcacttccttcaatctttaaggaatttgattaactttttctagattttgggtggtataattgtgtgttgtgcaagaatattgttgatattgggtttgttattattgtattgtggtattgagtatttgagaatattgtttgagtgattttgaatttttgggatatagaaaaattaaggggaggtgctgctcaaatttttttttagcattagttagaaaagaaatgaaaagaaaaaaaaagaaaaaaaatcagatcagaagaaaaaaaaacgaaaaaaaaata

SEQ ID NO: 291801 - DNA, 768 bp, Cannabis indica
tgaaatttaccctccactttaaattgtatttttatagttttatttctgttcaatctcaacatatataacttacaatctatattatatagctactacgaaaaaaaacaaaattacaagtttatgaacttagctcttgctataaatgtatctgactttagtgtatgtatttattgatatgtatattaatttataagtattgttattaaatattagtggtggtggctaacatttttatatgtgatactttataattagttagcgttattctttaaaaattattttcttaaattttatataattcaatctgctacttaattacattaataacaacacaatacaaacgaatatactaaacactaataatatttttaacgattctcataaattaagtattataaataccgaagtatttaataataaaatatacctccattattcgattagtaacatttttccccggttaaaaaagtttgtaaattataaaagatgagaaacttctacaattttcttgattatataaatgtatatataaaaatttatagaattttgctactctggagaattagaaaaaatcctcaccggtggagatttattttagagtgggactcatatgatctgatcaagtgggtattgctgcatgtgcatatttaatgcggttggatacgttgtagtagattatttttcaggtttcttttctatcctttgaactcacatcattgacttatttgttgtatctaaaaaaaattatttttatttacaataaaattt

SEQ ID NO: 291802 - DNA, 701 bp, Cannabis indica
gctaaattatgatgcaaaaaatctcacataattaaaagaaattcaaaatttgcatcacaatatagcatgatgtaaaatttacatcacaataaatgctatatttttatattttacattatgttatttttaatattttattattaaattttagctaacatactcatttgtattaaataacttgtattattattattttattattaaatttacatttaattttgcaatattattattattttataatttttaataaattattaagtgagcattaaatagcatattaaattttgtattaagatttataattatgtattggagcacaataataaaaattaatgtaaaaatatcacaaaattactttttgtacaaaatataatttaatttttacatcttgtctaaaatagcactctccaataccattttatataaatatgtataattttaaataatataatatacaaactttataaataatcaaaaataatttataataaaaaaagtaagtctaattatatattttattttatacatttataaaataaagaatataaatagatattttgtttgctatttttttttaaacaatattttgttattattgatgatgttaaatatttgtttttagaattataactattttgagtatttagccttcagatacactatatattatttttaatttttttaaaatttataaaata

SEQ ID NO: 291803 - DNA, 629 bp, Cannabis indica
gtcatcttcttcatcgaaaatattggatttggagaggacttctaccaagattctctcacatttacggtgtacacttcattttctctcaatttacagtgtttttcactgaaattttgttagattcatcaaattaattcctttatttaatataatagttaattcactctaaatgtttgtagaaatgtctcactgatttagttctaaacccataaaagtaggtgaagaacaaagaagacaaaaaggaacagctggttgggagaaaaattctttatagcttttgggtactaaatcatgctttttataaataattaaatgggtttacttgaagctttgagtaaatttgtattatgttaaccagaatatgctcaataattgtaattttgatttaatttcagcgatgtaatctcagtaattacatgattgtaagaaggataattgagtgtgatatatttttgtttacaatatttattaattgttatttagacttttattttatgtgaattaagatactctacaggtctaaattcgaagaacacaaatttaattttagttagttgcttacagtaggaagataatcttaaaatattgcatatatcctgaagattatgcatcctcgataaaatattgca

SEQ ID NO: 291804 - DNA, 726 bp, Cannabis indica
ctaccgttctaagagaattttttaaatttcgcgctaatattaatttacgtttttttttttaaattttgttttgtttaataataattaatcgctaccccacgtgaaaaatcatataataacttattataaacaggtaaccctttcaaaatataatagtaataataatatttaacagtgtacctcatttgtagtttgaaaaatcattatatggttcatagagtaacggatataaatatatatatttatatgtatataaaaactgacaaaatgaagtaataataggttgataccacgttatacgttaagtgagcacaaaaaacggcacaagtttcttgagttcccacatgcacccttgtccagtccagtcttttaatctctttttacccttttacgtaatcctcttgtagactttaattttaatatatttacttttgaagattaatatgtattaatctaaaatcaaacaatttttttgtgtacttgttacttgtgattcaagttttgtttttttacagggtttggagaaatgtcaattacgtaattattattattattattcattagaataaatagaatttttgcttttcaattttttttcttcagttggaaatatctctttccaattacattcttctcatttttttataacaatttgctttgcatatgggttatgaattacaagtacaattatgctacaagagcttatttaataattttaaactactt

SEQ ID NO: 291805 - DNA, 519 bp, Cannabis indica
catcaacaaaaagtagctcggaaattcttcgtgggagatatggtcttaagaagggtattcctaaacaccaaagacagcacgtcaggtgtactaggacctaactgggaaggaccaagtggtcgaagttctcgactccggagcatacaaattaggtaagtatgacaaaaagatgcaactcgttctagtaccacgatactggaatggagaacatttaaggaaatactaccaataaagtacaaggtcaggtagacaactttaagtacacaaggtcggcatgacaacttaaaagtactcaggtcgggttgaccattttaaagtactaatgaacatttgcttctaagtgaatggcattctgggcggactacgcacaaaggtttcagaaacaaagtactcaggtcgggcagaccactttaaagtacagtttcttatgtctgcaatttgttttatttcatgttaagctaaaagatcagactggatcaaatagctctgatgtaagttactacggtaacaaatacattt

SEQ ID NO: 291806 - DNA, 727 bp, Cannabis indica
gtcgcgaatctcgtactcgtgcctaagctgaacaagaaatggcgagtctgtattgacttcacagacctcaacaaatcgtgccctaaagactgtttcccacttccaagaatcgatcagctcgtcaatgcaacagccgggcacgaaatattaagcttcatggatgcttattcggggtacaatcaaatcaagatgcatccaccagaccaagaacatacaagtttccggacagatatgggtctctactgctacaaagtcatgccattcggtcttaaaaatgtcggagctacatatcaaagactggtcaaaaaaatttttaaagatcagatcggcagaaacatggaagtgtacgtggatgatatgtcctcagaaaatacaacatgaaactgaatcccctaaaatgctccttcgaagtcagctcgggaaagtttcttggcttcatcgtcaacgctcgaggaattgaagccaatccaaaaaaaaatccaagccctcctggatatgaactcaccaacaaaaaccaaaaaggtacaaagcctaactggtcgaatcgccgcactcagtagattcgtgtcaaaatcaacgaataaatgtgtcccattcttcaacatcctgcgaggaaacaaaaggtttgaatggacagaagaatgtgaaagagcttttcaagatctaaagatctaaatgcacagctcgcaaaacctcccgtcctctctaaacctctagacggtgagga

SEQ ID NO: 291807 - DNA, 636 bp, Cannabis indica
gttgtttctctttttcagtttcagcaacacgcaaggcccacttgttccactccacttacgcccataacaccatttcatcagctttttgaagtcatttctccactactcatactacaaaaataccagaattaaggagaaaattgacactataaataggagtcaatacaatgtaaaaaaatatcagattttagagagagtagaaaattattttgtaattttatttttctctcttattactattttatctatacttattttagtgacaaaaatgagtgtattaaaatagtaatattggtgaggttagagtgtagctattgtactttttattcttaatattgatattgattcttttgtgcttcatctccatatctcatttattaaattgttcttcattttctaatttttcttccaaaattaatagtatcttttatataagttcagtcatgcttttcttatgtaagttaggctattaatattttggtatatttattatattgtatgtcgtttactgcattctgccaatagtggtattttgtcgatttatgatatataatatgatatgctgttaagttagaggtgagattcaatttatgcaagattaattaatttgtgctttttaacatatatatatcttcc

SEQ ID NO: 291808 - DNA, 699 bp, Cannabis indica
caaaaagtgccattaaagcccaagctttgagttccaaaactcaaacttggttaatatcaactaacatgcatccaaaccatgattcaaactcataatcaagcatataaaaactacagaaactaaaacctatctcatgcaacaactacagcaacaattcacacaaattcactttgaaaactcaagctttttaacaagaaatctatccaactagagcaagaataactagcatgcaattcaacctaattaaacatacttaaatcaacatttaaaacatagaaacaacagcagcaacaagcagcagcaacatcctcaaaatcatccatgcatttactcattttttcatcaaattttcaagaaaactaaaaagaagagctagagagaacataccacaacaagagttcacaaaattagattgaaactagcttgaaatctcaagaaaatggccagcttcttgctgctccaagagggccgaaatagagagagagagttgagagaaaaatgttttgcttttcttttcaaattttctaattattttccaactttgtaaaaatgaaaataacaaggttaatttattcacttcagccaacaattaaaatcaaataacatttatttttcaattattaagtcacaaaaagacaaactaacaatggtcacactaaaatcacataaataacgctaaaggggggtatttttgggaaa

SEQ ID NO: 291809 - DNA, 1060 bp, Cannabis indica
ggttccttttgatatagttacccctttgcctataaatactcatcgtactggcacataacccattttatcacccttcgttgttcagtaaactccagagcaaaaagagagttttctggcttcaaagttgccgaagtgccttcagacgattactggttggcttgagctcagacattcgaatctttgagtaagtttctgatttcctttacgcttttctttgcatgtttacgctttgaatgcaactatgctgtagaaagaatgctttagggaaaacccctaggggttcaaacgtttaacgtttcgacgtaccttcttttaccctttaacctagttcgtttccttactagttggggtcgggtttcctttaacccgtaaaccggtaaggacgtttttttttttttcgttttttttttttaaccggaacccgacttagtttggttcgttcgtacgtttcccttacctactttcgttcgttacttttactttaacgtaacgttccttactagtaacgtttttaacgttttttcccgtaaacccttaaccgtaacgaaagaaaagtttaactttttacgttaccttttttcctttttcgtaggttttacgttttttccttaaaccaaaactaaattaacgtttacgtttttaaattttaacttcgtttggttaggtaacgttacccttccggttcggggtccggactaatttttagtttccgtccgttttagtttttagttttcgttaactaaattaccctaacccccaaaaacccaaaacctacctactactttcgtttggttggtttggtttcgtttttactttttaagtaagtagtaacccgtaacccggttgggtaggttttagggggttttaagggggaacggaaccgaaacccgaaaccgttaagttacgtaacggtaacggttacgttcgttcctaaccttaacctttcgttacggtaacgggaaggtactacccctaccccgttccgttttcgttttggtccgaccgtaccggtttcccgtttcctttccttaacgtaaggtacgggaaccggtttaccctt

SEQ ID NO: 291810 - DNA, 641 bp, Cannabis indica
tcctcacccatctcttccggcggcggcatattcaaattgaagtcgtcatccattcttattgaagatgatgatgatgatgatgacgtgaagccctagatgaacagagcaggtagtaattgtagagagagagagagagaattgaagcgtgaaaatggtagtgaagctctgaagtttgaagaaagtggaaagagtttagattctagagacttctacaagcaagggtttagacattagagtgagctgaaatcaagggctgagatgattttgttacttttctttatttggggaacactgagatcaacggttgaaatttcgtctggacgtatttcgataattaaatgccggcctagtatatttatttatttatttatttatagctgctaattaatttgttttattataagctgttatttttgttgggtagatatttatttggtgtgtttatgaactaataactactgcttactttttttatttttaatcaacattattttgttatatttcatacattttagataggagaaatgctaaagggcaatgtgtcactattgctattggtcaaactaagtatcgggtctcatataatttaatataatagtttttaggtaaatatcgttaaccaatcgcaacgtgacatgtcg

SEQ ID NO: 291811 - DNA, 1502 bp, Cannabis indica
atcattattattatttatatgacggtatataatatagttacagaaaataatataattacaaatataaatatatacaggagcttccatttgatcaaagagctgatgcagtgagtagtttagtgtatgaagcaaatgcaagaatgagagatccagtttacgggtgcgttggggccatatcgtacctacaaaaccaagtttcggagctgcaaatgcaactggccttggcccaggccgagattctatgcattcagatgcagcatgatcaggcaaccatagttgatagtggcggcaccgttggcagggggtcggcttcaccggtagagatggacccatgttactttggctactacgataaatcctgtttttcgggtcaaaataatagcaatgatactactctcatgatgatgagcccacctgatcatcatcatcaatatcacaatttctcctcttccacctccagtattgcaattcatgactctcttaagcgagagtctctttttggaaatgactatggtttcttaaatataaaaataatcataataataaatataaatatgtcaaaaattatgtcaatttttcttaccagtttacaccttaaaatgctattgtacattatatattaaaataatttttttaaaaaatatactaaatataatatttgctcattataaaaaagagatttttacgcttgatgtcctttttttgcctttttttttacatttttatttattctcagttatttaaacctttttacattttttatttttcaattttactttttcaaaagttcaataattacaaatatacctttaccatgcatatgtcatgttttatccattctaacaccccacctcctccatatctgccctattcttcttctttttttttttcttttttttttttctctgtttctctttcctctgttcttcaacctccatagcccacgatcacccagtcgaagcccttacccacattttttctcaacctcccatctatgccactatctccattttgttcgataatctctgtaagttcttcctcccccattgtgttctcttcttctataaatgaccaccactagaagtggttcgaagtccccatctccagctaaaaaaaattctaaaaattcaaagaaacctcctaaaaattcatataaagttgatcttaagatgggtttgaagcgcattgctaagaaagtaatgggtgatgttccagagccatctgctactaagaaaagacccattccaaataaggtcgagtctcgtaaggcaaagagagcgaaaccttcgaagtctacaaaggatgtaagtttggttttgttgtttttcaatttttgtttagtttttttctagttgttgtgttttttcgtattacattttgtgttttaaattttccccccttgttgttctaggttatatccgattctgattttgagaacgaaatgcatgatgggagagaaaagcctaaagttaaatccaaggtattattaccttgatttttat

SEQ ID NO: 291812 - DNA, 442 bp, Cannabis indica
tagagtttgcaacgggctatgggtaccaaactgaagttcagtactgctttccatcctcagattgatagacattctgaaaggacgattcagatactggaagatatgttacgagcctgtgttatggattttaagggcttctctggagtaagtacctatcgttggtagagttctcttataataacagttatcaaagtacaatagggatggctccctctgaactgttatatggcaaaagtgtagatctcccattcactgggatgaaacatgggagaagaaatacctaggtccagaatctgttcaacagactaatgaagcaattgaaaagattaaagccagaatgcttgcctctcagagcaggcaaaagagttatgcagatccgaaacgcaggaatgtagaatttcaagtaggggatcatgtattcctgtgagtctctccgatgaaa

SEQ ID NO: 291813 - DNA, 601 bp, Cannabis indica
atggtatttgatatgctatatatgtaattaggttttcaaattccatatttaatatttttatttgtttaggaatttttatttgtcattgatgccggaaaaatcaccggagtttgctgtcggcgccggaaaaattgtcggagttgctgtcggcaccgaaaaattcgtcggaattggcattatcaccggaaaaatcactgaaaaatcaccaagaaaccggttcttcactaagaaactggtttccaagaaatcggtttcttggtaatttttccgttgacaatgccaattctgacgactattctgacgctagcagctactccggcgacttttccggcatcgacagcaaacttcagaaaagtcatcagaattggcatagtcgctggaaaaattaccaagaaactagtttctggtttcttgatgaaggaaccagttttttggttatttttctggtgattttttgacgacaatgacaattctgacgattttttggcgttggtagcaactctgatgactaatacacaggcagctactccggtgactttttcagtaccgacaataaactctgggaaattcgtcgaaaaaattaccagaaaaatcaccaaga

SEQ ID NO: 291814 - DNA, 787 bp, Cannabis indica
atttaatcagttcattttatatccaagcgcaaccaaattatcaatacctatcttgttcttttcttcttatttccccacttctagtctgattatcttcaattgtttgtatagacgtttgttaatggagtattctgactttggaaagtccatctaaaagtccccacgactagccttccaggtcgagaaaatctcctaatatttttcaaaattcttaaatctcaatggctttatctttctaagagatttgttgtcattctcttctcgagcactataagacctaaaatgccacctctttaaccaaaaattggcactcattgaaagtttacctcttaattctccttgcggtgacactccaacatacttatgctattttccatgaatcataagtagattgtagtatcatttgattatgttgttccttgaatccatgtatgttgcctgagaatttagtaatcccaacacttctctgaaaccagtatcgtcctttccatgccataaaaattcttcaagacatgtcactttagtcttagttgtgtctaccttgtctctcatccctaagcgaggctttccaaacctctcctccttgagtgatgctccacacagttgttgttgtatcgatgagtattggaatctagggatgtcaccttgaatgtaaatttatccttttcctcaagttttgaaattgcgatctactctctaacttcttatcttagattctattcagcatactacactcctttacatgatggcattgtcctccttggactaatttctataacagacttat

SEQ ID NO: 291815 - DNA, 588 bp, Cannabis indica
ttttttgggcacgccttatttagatcagaaaaatcaatacaagttctccaagttccgttaggctttgggacgagaacaggattggctatccacgagggataaaacacctcgcgtataaagtcatggactaataacttgtccacttcctgttttagtgtcccttatatctcggaatccaagggtcttcttttttgcctcttcactgggtagtttggatcaacatttaaatgatggcaaataatgttagggtcgatccctatcatatcaccatggctccaggcgaattgatcctggttcgcctttaagaaacttattagttgctgttgtacccaaaattcagctggaggacacgtgtcaaggtaaagggaatgtgaatcggtgcaatatatttttatggaataactcattaattgcataagtatcagagtatatttataacccggtgactgtaaggtcttaagcgaggaatcaatgtacgaactggcacttagtgtattaacgagaaaccatatatcgctgaaggagaatagcgaggcactggagaaaagtaacacataccttagcttgcaataagcaaactaagtgtaa

SEQ ID NO: 291816 - DNA, 514 bp, Cannabis indica
gattgtacagcttacccggtgttccccttacggatcacgggactactgactgtcacaatcacccccccatttaagcccgacactttcgtgagtctcttcctagtatacccgtgatcaatcctttctcatagttaaaatctttctaactagaattaatgctatgaagtaagagattatctgagtgacactatagtagaacctgtatggttgatttcgggcagcgcaataatggagaatgatactaagctagaccgattggcaaagttttgttaaaatgcaacgactactaaggccgctaggaaggctttaaggtggaacaggtatattgttcagaatgtagatattatggttaaataattaggagttttctagttttatgctcaggtgattgagctaacccttactgttgagggtataaggattagatcacaaaagaaataatatgaagagagatattcatgaaagtaaatgtccagtgttggattggctaaaggatgttaactttaatgatctt

SEQ ID NO: 291817 - DNA, 464 bp, Cannabis indica
agttatgattttttgaagaatcgaaaaaagataaggtgacagtgcatcttcacgcgcgcgcggatccgagtcatcctcggtcacacgcgcattcagacaaggttttgcctgaaaatgcgcgcggacatctgatgatccccctctacgcgcgcacaaaggctgcaatcacccctgtccgccgaggtttctcggcctgtcacccaaggatgcgcgcgcggacggtatgcaacgcataccgtccgtacagctcccaaaattttcgtttttcttcgttttttcatgcttttacatggatttaagttccgattttttgtgtagttttgtatttatagatttactattcctaattcaactctaattatcataatgaattattttaatatttttttttaatttaattcatgatattagtgtaatgtgaatttgaaattagtaaatatctatttttttgcttaattatctat

SEQ ID NO: 291818 - DNA, 817 bp, Cannabis indica
ggctgcttggattaaagtgtgttggttgaagctaaaagttgaatttcttcacttgaacatgtgattttgagttagagattgaattttgtgttttgaagcttgagttatgttatatttatgttattatactgttttggaaggtttgagcaggttggtggaggtttgattggtgtttggggagaaaaactagaaatcaccatggctgccaggaaaaaaaggcaggccgttttctaggtgtctgaaaacggccgacggtttttcccaggaaaggggattttgggttttctcccaagttcgatttgattcggggtttctttcgcagtggaattcagggtgttttagagatggttaagctagtttgatctgggggaaagtagggtgtgttcgattgtgaaaatttgagttgattatcagaaatttgattaaggtatttatttgagttgattatcagaaatttgattaaggtatttattaaattgcacacacgtggcgtccctgttggacagggcgttacaacatggtatcagagcgccaaggtttttagatcctgaagactggcttgacatgtacattggctgcaaggacttgatagactcatggttcagtaagcttttagttaaaagatagtttgttaattttctaattgcttgattatctgaattgtgttgatatcggaatggtgtgggcaggactataatatatggaaatacttattagtattgttattaccttgaatgtgaccgcaggtgtatagattatgcacccgaggcatttgctaactacgtttaaaaattaaatgttattttaaaaataaaaa

SEQ ID NO: 291819 - DNA, 517 bp, Cannabis indica
atagtagaaaaaaaaatgagttgttatgcttaatttttctatttaattagaaaaatctctcatttttacatattatatggactgagattgttctatcgactgaaaaataataataaaaaaataattttgacaaaaaaataataaaaaaaaagttgagtttgacttaaatattttttatgtaaacatatttttaatatagtgtaaaaagaggtaatttttgatattttctttaattaagtagctaaattaaacatataaattcaaatttttcttttgttactcgtcatcggatcaaaatttaatggtttaatgtttttaaaattaatatttataattaaatttgtttcgtacccatcaataggtaatacccattaaaaagtgttccatatatatatactagggtagatgttacctgcaatgcacgtataattagatttctttttaattaagtcaaattatgtgatgttaagtgtaatacatgtatatgtttaaacttttttaatttagataatgtatt

SEQ ID NO: 291820 - DNA, 566 bp, Cannabis indica
gggggtcacctaactatgatggttgtcatctaactatgatggtggtcaccccccctcagcgagagtctcggggtgttacccccaagtatgggcttaatcctcaaaggtggttgacgaccatgtcacacccataagggacccttgtcatcagtgactccttcaaatgttcaaatcccgcgaaaggctcaaagacaggtgtcaatccacgaaaatagcgggatattatcctaaatatcagactccaaccgcctccgaaaatcaagaagatggttgagatagctccgcgttggtcgcgtctcctgaatcgagaagcaccgaccccctcccctatataagtggtcacccatgacctgggaaggggatccacaatctgaaacacttagaaaattaaagatttctcattctttgcaatcaagagcatgttcttgactattgcaactcagatcaataaaactcaaggggagtaggctattaccgaaatccgaggccgaacctctttaaattctggtgtcttttatttacatttattacgaattcctgcgttattaattgcatttattattgtg

SEQ ID NO: 291821 - DNA, 432 bp, Cannabis indica
aactcatatccacccctgaatgtactatccatatgttcgaatacagatgatcctacttctcatattccatacataaacatacagttcggatccattgatagaaaaatgaatattaacaacttgtgaaagtcataatgtattgtctaatgtaatctaggaagctgaaaaaaaaaaattctatttggaatctaaaatttaaagtctaagacttaaatttatgccaaattattctagctactactaatctatttctaagtttaggttgcctttaataagtcatatacaagtagaaaatctctaagattgaggtatttatatcatttcggggatagaatatcgagaatatagtcatttgcactgcaccatttaatttcataaagaaaattggatgacatcataagcaaatgatttataaactatctattcaatgat

SEQ ID NO: 291822 - DNA, 540 bp, Cannabis indica
tactggctttgtagcacgcggctgtgatggtcgaataattgaggtgttttttaacattttcttctgttagttgccgacccgaaattatagaaattctaaacgtcaaggaggcacttagttggataaagaggaataacacaagtcaaatgtcatttttagagacggatttcattttagttgttcaagctattcttagttcggtctctatgccttctatttttggtttatttgttcaggattgtcaatttattttattcttctttaagtaatgtttctattggtcatgttaaacggtctgctaacaaagccgcacactgtatgacacgtggtgcttgttattggtcaggtcgtctttttactgagagcgatgttccctttgctattagctgatgtttctgtctaataaagattgctttcattaacaaaaaaaaaaaaaaaaaactaatattgttaaattaatcaattgagtattttattgaataaatattaggtaaaattacatgttgcacgttatgctttgtttttttaataataataata

SEQ ID NO: 291823 - DNA, 895 bp, Cannabis indica
ccattttacccctagcttttggtttatcctagttttatgtgtaagggcattttagtcatttagtaaaatggctaatgagggttaggtggcagccttgggtgatgacacctattttatttcagcataattgaatgaaaagaggggttttactttgaaagaaagcaaattagggaaattagaaaaataccaaaatttgaagaagaagctctttcttctctctctctctctctctcttcgaagccagcaagatcaatgggaagggctgtgatttttaagtttacagcaaggaattcaaggggtctttgaagctaaggtaagctcaagtcatatccctctttatttcttgagttcatggatgattgaatatgagatttctaggtttagtggctcttaggttttcatatgcttagggttcgaattttagggtccttttgagttgatttcaagtcctagtagctggttaatgggtgttgttggttttgtgcaactttgaacattgagttcaaagctttaagctttaatggcaagttgagtttctttggtttattctgtgaaattctggttggaaatggttgtttatgcattgtataggtaccctggagagtttggttaagtttgggattgaattgagttaagggggttggtttttgtgttcccagcacagaaccggtcgaccagttctgggggacctgtaccaaccggtcgaccggttggtgtccagtttttggacttccggttgggaccggtctgccggttgggagaatttttcgaaccctagtttttcccaattttgagatatttacggtatttccatgtggtttatcgatagggaaacttttagtttcaagtttaagtccccaaaaagtgatttagcgagtcactcatcagtgttaca

SEQ ID NO: 291824 - DNA, 575 bp, Cannabis indica
aaaatatactcaatattaaaaatatctaatcttataattaaataatatatataatattgacaaattaacaaatttttaccatctgaccataatttaaaacatataataatcaatttttaaacttaaacctcaaaatataaaaaattaataagaatctattaaaaattaaatattttttaatttaaaaaattgatatttaagtttaattattaaaataatattttatttagatattagagtttaaaaattgaaaaatccaaaattgggtgaaaaatcacccatgtgcgcaccaggaggcttcatgcagcaatttacccgcgcgcacgaggggttcagtgggttgatccgtgcacagacgaccctcctagcagagtgatgtgcgcgtgtgtcccctattcgagatgtcgagctgaccgagttcagaaaagatttgcctgaagtatccgcgcgcgcaacctcgtcttgtttgagtgtctctgcgtgcgatgctcaaccctcgacactcaatggaccccaattttcaaacaccataactccttcattttttatcaaaattgagttctgtaaaaaactaa

SEQ ID NO: 291825 - DNA, 685 bp, Cannabis indica
tcaaagaaattttcctaaaaaacgtgtacaattaaaacttttaagattaactatgaaattttataaactttataaaaatatttacaaatgtcgtgatcccgttgataaaatttttacaaaatattaagaataccaaagtttggtcgcacaacaactacaaaataataaccccagatgtcccaagaccaaacactccaggtcatgctgccatgacatgtacaacctcatcctagctcaagctcactcatgttcagcctacacatgaaagtagaattttgagttgacagactcaggaagaaaagcatataacatatcacataataccgacttgtacctaggttcccatacacctatttacaaggcttaaaaaacgcgtaagaacattccatactagggtacatccactgtaccacatacactttgtaccaacagtgtacgggtgttggtagggtttgtttcataccttcaatatcactaagtattataccacacacaccctgtacttcccatacttgtgctggtaacactgtaatgtatttcaaaaatatacactataccaatacactatgtaccatatccgtacaaatgttggtagtgtagcaaccataacaagtatgcatatacatttcacacatacatacattcgcatatatatcacatattatacgctgctcttacctctttt

SEQ ID NO: 291826 - DNA, 565 bp, Cannabis indica
gcaacaaccacaagcaagaaacaggaagaaggaaagttcaccgaaaagtccggacagactcccgtgatcacgccaaacacactgcattcactatcctaactgaagatatagagagtgtgtatatagaaactcagtcgttaattccgtacaagaagcccgggcccatgaagaaagataccagcaaaagggacatgaagaaattttgtcggttccacggagactacggccacgacaccaacgaatgctacaacttgaagtgggaaatagaacatctgatcaagaaaaacaacccgcacttacagaagtatgtcaaggccaaccaaggtcagaacaaccaggatctgttgcctccaccgatagatggacacttgcaagtcattattggaggcccacacatcactggagacacgagcaaagctcgagagagatatgcccgaacagctcagtacgagcaagaagaactcatcttggccgtgggagagaggaagcccaaagttccacgcgcagcagagccaactataactttcaacgatgaagatgttgtccaaatcagattcccgcacaa

SEQ ID NO: 291827 - DNA, 596 bp, Cannabis indica
tttttaaaattatccctatttgttagtcgggtctataaggctcgatattactctcatgggtcgtttttgactgcttctcttggtccgaatcctagttttatttggaaaagcatcttcgaaacacaagagctgatcaagaagggcgctcgacgggttgttggtcctggtacaagtattagtgttcagtttgatccgtggttagaagatacttctcatccgtgggtcactactatcgctaatggtatggagcagtggaaggttaacaatctcatggtgccaggagaaagatgttgggatttggaagtgatctccgatattttcaatgatcgggataaggagttaattttgaagaccaacattgttcaggagtctacaattgatacgtggtattggtctctggatctgcatggtgtttacactgtaagggaggcctatcgcttgctacatcaggctgatgtcactaacattagtgactttgagatgaaaatttggaagatcgcttggaagcttcaagtccccccgaaagttcaccaacttatgtggcgtgctttgacaggctgtttggctactaaagttcaacttaataccaagcacat

SEQ ID NO: 291828 - DNA, 685 bp, Cannabis indica
tggttggtcggtgcacacccgaataggatgagcttgaaaataaggtcttagctttcttattgctaagatgaggcagtacacgagcttttctatcaacgaatatcagccttcggcctcgatgagtcttttactgatgtaatagactggatgctgtacaccatcttcttctctgattagtacggcacttatggcatgctctgttactgctaggtatatccccagttccccaccatccagagttttagagaggacgggaggttttgtaagctgtgcctttaagtcttgaaaagctctttcacattcttctgtccattcgaactttttgtttcctcggaggatgttgaagaacggacacatttatccattgattttgacacgaatctgctgagtgcggcgattcgaccagttaggctttgtacctctttggtttttgttggcgagttcatatccaggaggacttggatttttttcggatgggcttcaattcctcaagcgttgacgatgaagcctagaaacttacccgagctgaccccgaaggagcattttaggggatttagtttcatgttgtatttccagaggactttgaaacattcatccaggtcgtttatgtgctccccagcctttctgatttgacgagcatatcattcacgtacacttccatctttctgccgatctaatctttaaa

SEQ ID NO: 291829 - DNA, 558 bp, Cannabis indica
tagacatgagaatatgatgttattgtaggttgattaaagaataatgtctggtcaaatcggttctaattctgaggatgatgttgattttgtgccatcaactaatgttgaagaaatacaatctgttagtaatacattagatgaaaatcagaatacagggagaaaaagaacttctcgtgcatgggatcattttactcgacaagaaattgatggtaaaattaaagcggtttgtaatcactgcgggcgtaagttggtgggaggaagtactgcggggactactcatttaaatgctcacgtgaagaggtgtccagttagaaaggcccaacttgccgctaatccaactacaagtccttcagttcctttcaattttgatcctgatttagcaaggatcaaattggctcaaatgatcgttaagcatgagtatccattgtccatggttgagcatagcgggttcatcgaatattcaagtactctgtgtcctacatttcaaatggtgtcaaggaatacggttagatctgacatcatgaaaatgtataaagctgagaaagaaaaatgtaggca

SEQ ID NO: 291830 - DNA, 433 bp, Cannabis indica
aatagggttatgcgagtaaggcacaaccaggttagactcggtaattataactgagataaaccctactaaggccttatgtaaatagacgtgtgagcgtaacacgtaagtctatgccatatagacatatataggcatgtgagtgtaacacgcaggtctatgtagaatagacaaatagtgcggtggcaccattaattatgtgatatatatattgagattaagggttatgcgttcaaagtataatcaggttggactcggtaaccagaaccgagatgaactgttctagggccttattgtacctagacatctgagcgtaacacgtaggtcatcgtcacgtagacataattacgcgtgtgagcgtgacacgcgggtctacgttaaatagacaaatatgaatggcattattatatatatgtgatatgtgttgggttttatg

SEQ ID NO: 291831 - DNA, 677 bp, Cannabis indica
gtgagctactaaactcagtaaggaaatgcttgtcacgtagtcacataaataaaaaaaaaacttaactaaaacttagatgcacatatttagacaaatagcaatacatataagcttaatcttatcactagtaactaatcactagttcctaagctaagtcacataataatggttacgcccgagtccgactttggcaaataaactcgaactattagactaaatggcggagggctgggttcagtaaaatcgtacccactactagatggccccctatctaccatatagacccaacagtcaagtatttaaccattatcttgtcggtcaaaccatgtcacataatctacaataaatctaatttaaataatgtttaactactatacattatttaaatagcgtatcataattatatcctaatcatatcataatcatattataatcataccataaccatatcataattatatcataactacataataatcatatcataacaatatcataatcatatcatattcataccataatcatatcattgtttaaataatgcgaatccattgtaccgtccattatctaaacaacataactagtttaaataatgcgaatccattgtaccgtccattatccaaaccacataatcagtttaaataatgtgaatcttataaacacactatttacataca

SEQ ID NO: 291832 - DNA, 551 bp, Cannabis indica
ttcacacatggaggaatttgtgaagcttactcaggggaaaatattagtggtcgaatacacgatggagtttgatcggctatctaagtttactagtgatctggtgcccacagatttcaccaggaaacaaaaatatctgagaggactgaatgccacaatcagtcgggacttgaagattaccacttcacatgacagtttgtacaagaaagttgtagagctagccttgattgctgaggaggctgagcaacatgttgcaaaagagcagactgtaaacgatgccgtcacggtatcgaacccttctgctagtggtaatgttagtaagggggctgacagtggcaaccctgatcacaaacggaaggctgaggctttccgagcatcaaggggtaacagaaagtttcggggaaacagaggtggccgtcagggccgcgggtcctcattccgatcatatcgcgagtgcccaaaatgcaagaaacaccatccaggtgagtgtcaggccaagacatgtttccagtgtggcatggtgggccactttatcagagattgtcctcaggcta

SEQ ID NO: 291833 - DNA, 562 bp, Cannabis indica
aaagaatatggccataaggagagaccatatattttggcttttgtaaatcactaatgacttttaacaatcaaactcaactataacacttgtccatccattcatcttactccacgacaaagcctctttaataccaatgacttaaatcactacaatgtacaatatattataggaaattactctatatactattttttaattttttttttttcttaattttacaatttgggtttcttaggtagtttttctggtggtttatgtgaattgtcatacggattttggttacgatttaagttgctttgttagttgcaatagaaatttttatgtgaaattctgtaaaaatacaaaaaaaaaattaattttgaagtataaaattaaaatagtccctatattatatttatatatatatatgactattcaattattacactaaaaatataactatgataattatatatttttttttttttatgatttgctatataacagatatactaacatgaaaaatatttatttttaaactcaagttaattataattaattatatacttatattaaattaatt

SEQ ID NO: 291834 - DNA, 510 bp, Cannabis indica
aagttgatgtgatatataatcaaaaggggaaaggaagagaccaatattcttatgttatcaatttcatcataaagattttttatattttaccttcgatttcactagacttcagaaaataagtcgatatgtgatatataatcgaagagaataatatgaatctttatggcgttatgttgttcgatttatttgatttcccttttggttcaccagactttagaaaataaatcaatatgtaaggaaaaaaataaaagttttttttttaaaaaaaacagttgtcatgccatcaaacgtctttattcgaaaatatgtatcaatgtgatacgataaattgatctcatagtttattgaaaagagtcaatttatagacaaaaggattggaagatatctttggcctatgactagttcattctttgggacatatataattaaagatttatatatatggaacacttcttaatgggtaatactcattgatgggaactaaaaaaaattaataaggtaataatccaa

SEQ ID NO: 291835 - DNA, 746 bp, Cannabis indica
tttcgtcattttctgtttagatcattgcaggtcttcttttccagttgatttcgccagaattaatggttgtatttttctcgttttggtttcattttggttgttttgcggttttgaaacgatcgcagtattttcatcttcaatgtttgctctgtacagctgaaggcttagtgcatgttgactgtataaatgtttaatgggccgacccatagtatttttgtaatttttttttcctttttgtatttttctgtttttttcccatttttttatgcattttaaattttattccattccattcttattccgattccaattcccattcctattcctatatttccattccttccaaccaaacgccaccttaatttttaaaagtactcttttttttatgttttatttacaattttatgacctaatatttttatttacaattatacattttttaagtttcaaaattgtaaaaatatactttgctcagcaaaatatataaaataaactaaaaacaaccaaaaattaatctcatgacaaccggtggcagacctaaaatttcaattgaggggagttgaaattttttttttgtaaggtagggagcaaaagtaaatttaaaaagaaaaaaaacttagctcttgggatttgaaccattcacatttgcaatatatcttaactattacactaaaattaatattatgtatgtaaattttaatttttattacaaatatatgtcgtaactgttttggccggaaaacagt

SEQ ID NO: 291836 - DNA, 736 bp, Cannabis indica
acagattggtacaaggtgtatgtggtacaacacttaacagtacttaaggtgcggttcgatactctacctacactactacgatagtagtactgagtgcatgtggtacattggtacatggtcgtatcttagttagaacgttcttactcatttgtaaagccttgtaaataggtgtatgggcgcctagatacaagtcgatattatgatatgttatatgcttttcttactgagtctgtcgactcacaattttgcttccatgtgtaggtaaaggaaaggcgaaagctgaaatgagtgagtctgagctgggatgaggttgtatatgtcatggcagcgcgacatggagtgttcggtctcaggacatctgggaattattattttgtagtcgttgtgcgaactggttattgtattttgaatattttgtataaaagttaaaaaaaacgggaacccggtacttgtaaatgattttgtaagctataaagtttaatatttaatataaagattttaatttgacacgatttttgagtaagttctttaattagcaaagataacactgtaattgaaaaatcactagagcgtgacttagcattagggcgttacaatatatacctgaatggaagagaaaggggccaggcttggccttcgacaaccgatttggtggcaccaccgatcaaatagagagagggagagaggggggagggggtccgggtttaggtttcgtattgagagagagagagagaga

SEQ ID NO: 291837 - DNA, 114 bp, Cannabis indica
ctaggtttaggttagatttaattagcattaaaagaatagaaaaataaagtggcaaaatcaatccctagtggccaaccatgcattggattgggccccactttgcaattttgccat

SEQ ID NO: 291838 - DNA, 532 bp, Cannabis indica
tttcacagatattctaacactcaactctttcctcttgttgcagcagctaatcccatggaggcgatcttggccactcttgctggagcccacagtcctgatgcttcccttccccctacttcttcctagatggttacccccgggaaggcttcttccagtgcccctccgaacactattgacttagtggatgagggggaggtacttcttgaggaagctgaaaaaggtcaagaagagcaatggcctcttcctggggaagttgaagaaggtgaagaagagcaagaggttgctcttgtgcgcaagcgcaaaggcaagatggtagcagaggagtcctccaaacggccacggagggtggacactctggccccgagccatgattccgggatccctcccgaggcggaggagtttacagtgcctcacggcattgtgctgactctggtccccggagatgaggcgaggcaagtgttggaatttattttaccacgatcttagatctactcacaagtatgttgattaacaccctaatatgaactttcta

SEQ ID NO: 291839 - DNA, 553 bp, Cannabis indica
cgttgcaagaaacatcatcccggggtttgtaaccgaagagcctgctttcagtgtggttcagtgggacatctcaggaaggactgtcctcagttgaagaaagaggaaccaaagcccgaggtcaaacctgtgcctgcacctgtgcctgcaccaacacgagtacccagggtacgtcgtgttcgtggtacaacacttagtaattcccgggagtacagttagggctctaccaacacaagtacagagttggtactttagtgcatttggtatagtagtcgtactacccttaagaacgttcttaatcatttggtgagcttcgttgttaagctcagggcagcttaatcataaagctggcagcgtgctacttttatatatttcttgcatatcttactgagtctgttgactcatcagtttgctaccttgtgtaggtaaaggaaaagcaaagctggaggaacagtgaggtggaactcggcatgattgtacatatcgcggcagtgcaacctagagggtttcgatttattagtattttggagtctgtattttgattatgcttgtccgc

SEQ ID NO: 291840 - DNA, 594 bp, Cannabis indica
atgcatatagaaagcccatttatttctagatatttaaatggactaggttgctaaaataaaatatcacccatgatagtattatttaggcccaattagtattgaacttattcaatgaataacagttatttaatgaaaggttgaattaggggggccattagtagtgggtacgacatactgaacctaaccctccctcacatgaacaaccccaattgtgaaggcccatttgccctttttaaataactgtattaggctaattatactagtttaacctaattaaaattaaaacagcaacataattaattttaaaataaataaaattaatttttcaatggattattttaagattaatttagataaatacacttagtttaatgaaatattctagatagtgatttctagtaactaatttatattttctaatatttaattaagtagaaaaataaatttgagttgagaattaatttaattaaatttgggccaacttaaattagaatatttttcatagaacttaaatagaattaataattaagttgattttattcaagagacttaattatttatttctatttcatgacatttaattaaattagaaaa

SEQ ID NO: 291841 - DNA, 743 bp, Cannabis indica
tgtattttaaatggaaaatttgatattatatgctttaaaagtaatttatccactaaaaatactgctagcatattttgcatcatgcaaaatatacttacaccatttttcttcatccaattttacccctaaacaaataaaaaccaaaacatccatctctctctctctaggatactcacaccacacacaccattttttttttctagtttttttttttttttttgtcgatattttacgtatatttagttaatgtatttactaatgacgaaccaaactactgagggttaggaaataaattttaagtcgataactagcgatatctggcaatatttttaaaattagtttagcgatgtatttagcgacatttagcgatgtatttagcaatattgtgaactagagatctttagcgatattttgtgacattgtcaaaaactaaaaagaaaaaaataaacatagaaaacgagcgatttgagaactccaacgatgggtagagatttcaggggttttaaggtagttgagctcatagattttgggggctttagggtggagactagggctgagcaaaaaatccaaaaaatcgaccaaaccgagtacaccaaccgaccgaacaccgaaaaattgctttcgattaaattacctttgcacggtcagttttagtgtgaatggcaaactaactgattaaaccgagaaccgaccgaacatatatattgtacactatacatattatatagttttttttgtacata

SEQ ID NO: 291842 - DNA, 557 bp, Cannabis indica
ccagtcctataaataaaaaataaaaaaattttaaaaaaatccaaaatgggcatctgaccatcgggccgaccatcgggccctacatcgggcccatcgggccagtcctataaatagaaaaaaaattaaaaaaatccaaaatgggcatcagaccatcgggccctacatcgggccatgcatcgggccttcatcttcaagctcatatcaaaccagaaaatcggattttcttgcccagaaagatcacagaccctagatctactccatctaaccctagatctaatcaagaatgcacatatccaacctaaatctatcaactaacaacattttcaccataatcaataagaaaaaaaaattaaaaaaccgaaaggggaaaggctcgtcgcgtgctcagtggatgggttccctccgtggggtggtgggttcggtgggttcttcgttcgagtggggaatcgtggtggtgcaatttcaaacgctagagagagagagagagagagagagagagagagagagagagagagagagagagagagagagagagagagagagagagagagagagag

SEQ ID NO: 291843 - DNA, 506 bp, Cannabis indica
aaaccaaagtaaaaaaaaaccaaaaaaaaaaaaatatatttattttctatatatatttatgccttaaaaaaaaaaaaaaaaaccctttggtgatatcccctttttcctatgataatacccttgattgagtttgattttagtttatacaaatatgaatctcttttaagctttatttttaattcttgggtcaattttgctaaaaaaatcaaattttgaaaaaaaaattatttatcttgttatgtgaaataaatattttgttacaataatttttccaaaattcacataataatttgatgaatagattttagatttataacttaaattatattttcaaagcaagattgactattgaattaattacatgagtttaatttttattcatattttatataagctattttcaatgtgcaatttttgaggacatttttgatatcaccaaaataaaaaaaaaaaaaatgtgtgtttttaatttttcttttgcttgaggactagcaaaattttaagtt

SEQ ID NO: 291844 - DNA, 761 bp, Cannabis indica
tttttcttgatagtatccttcaaggtcttgttaacagcttccacttgtccattcgactgaggcctagatactgacgagaagcttttgattatcttgttcctctcacagaactcagtgaataattcaccatcgaactaagtctcgttatctgatactatcttaatgggtattccaaacctacaaattatgtttttgataacaaagtcgagaacttttttgtaggttatggaaactagaggttcagtctccgtccattttgtgaagaaatcgacagccaccactgcgtactttgctcctcctcgccatgtgggtagtgccccaattaaatcaattccccatattgcaaataggtaaggcgaggtcatcattctcagttttgttggtggtacaagaggtatatgcaaaaatctccgacacttatcacacttcttgacaaattcatgggtgtccttgtttatggttggccagtaatatccttgtctaataatcttttttgatagactttgccaacctgcatgatccccacaaaagccttcatggatctccttgatgatctcgtttgcttctgtgggaagaacacatcgcaggagaggcattaaatagccccatcctatacaatttgccttctactatcgtgtagcgaggcactgaatacaggagttttgtgcctcattttttgtcaattggaagttgtccgttaaagtgataattgactatggatgtcatccagtgtggggcgagctatctatcatctcgacatc

SEQ ID NO: 291845 - DNA, 749 bp, Cannabis indica
ggcattggtttagtggcaagagatagacacagccctttagtggaagctcgtacggaatgctttattggtagagttaatcctgaagttgctgaggctattagtgcgagggaagctttaagttggatcaaaaatcgtaactggccaagagttgttgtggaaactgactgcttaacagtggttcaggctctacgcagctctatccatatggtttctttatttggtcaaattatcaatgaatgtaaacaactcatgttagagttgggtcatgttagtgtttattttattaaacgatcagcaaatgttgtagctcataatttcgcaagggcttctcatttatattctggttgtatctttggtttggaggatgttccaaccaatttgttaccttgtttggtaacggagtttgatggttaataaaactttaactttccattcaaaaaaaaaaactagatgatatcattatttaacttgttattacatcggtgcatattaacgtcatgtatgtaattaatttaaaaaaaaagtttaaaaaatctcaaattaagccttttttaaattcctactaaaatatctaagttgtttaaatactatttataaatttctgataaataaaatgatataaaatatcatttttttaacttataatttataaatagttaaatatttcacaaaataacccatttttgaatttgaaaatattatggttagaatatctataaaactatctaggttaatttcaaatttattaa

SEQ ID NO: 291846 - DNA, 224 bp, Cannabis indica
gccactgttcgaccttcatcacatctggacctcccagaaagaccggaggtgcttgcttccggaaccattcatacaaaggttccattctattggccgccacaactatttcggcctgagcagcaccagtggaactactggcatgggcactgcaggagccccctgctgcctcaatctctgaatctctaaatcttgttcctctatccgggcttgcatttcagcaaacc

SEQ ID NO: 291847 - DNA, 970 bp, Cannabis indica
atctcaaagtcttcggctgcatatgctacagtcacattccaaaagagaaaagaggcaagcttgatgagaaggcagagaaaggaatcttcttaggctatagtactcaatcaaaaggttatcgagtctatagcttagaaacaaataagctaataatcagtcgagacgtaaaatttgacgaagatgctgcatacaactgggagacacaagaagttgaaagaaagacagtcaatattcctctaccgccaagacaagaaactgatcaaaatgaagttcttactcaaccaagaacacaagaacctgcacaagtcatagaatctccgccagactcaccagtaaggcgaacaagaccactatcagaaatctacgagacatgcaacttagtacttatggagccagaaagctttgaagcagctcataaacaagaagtatggagaaaagctatgaatgaagagataaagatgattatgaagaatgagacttgggagcttgtagatcgtccacaagacaaagatactataggagtcaagtgggtctacaagacaaagctcaacgcagatggctctatccaaaagcacaaagcaagattagttgcgaaaggatactcacaacaatacggagtcgactacaacgaaacatttgctccagttgcacgccttgacactattagggctttaatagctctagccgcacagaagaaatggaagatttttcaactcgatgtgaagtcagcattcctaaatggttatcttgaagaagaaatttatgtggagcaacctcaagggttcgtggtacaaggacaggaagataaagtcctcaaattgaaaaaggctttatatggcctaaagcaagctccacgagcctggtatagcagaattgacagctactttaccgagcaaggattcaggaggagcaagagtgagccaactctttacatcaaaactcaaggtacgaatgatacactaattgtctc

SEQ ID NO: 291848 - DNA, 436 bp, Cannabis indica
attttgatatattgacaattgaactatgatttaatttagattattagatctatcaacaagttaatattagcaatttaaatcaaataaataatatgtttattaaaataaattaaataaacaattaaataaataaacatgtaacaaacaaggaaagttggttgagatattttcatttttaataaataaaatattattaaaaaaatatgataatttgaatttaaattaggtagttaaataataataaaaaaaaatgttaaatctaacaatatcctaaaatatttcaattcaaattaaatatacaattaactttcaattttctagcttatttaaataaattgtaataaattaaataactaaaaagataatatgatataatatcttcatttgaatattaagatatttaatcttataatttaataaattaaactgaacaaaa

SEQ ID NO: 291849 - DNA, 505 bp, Cannabis indica
actgatccacctcaagattgactctgctatatgactcttctgtctgcagtgttggatttggtaatggtttcatggccatttcttcttctctgaaagtgacatctctgctgatgatacactttttgaatcctgattcaagacaccaaagtttgtatcccttgacaccttcaggatatcccaagaacatacatttcactgccctaggcttcagtttgtcttgcctcacatgagcataagcagtgcacccaaaaacctttagatggtcataggtttgagcttctccagtccacttttcttgtggtgtcatgaaattgataccagtggagggacatctatttattagatagcatgctgtgttcagtgcttcaccccagaattttctttctaaaccagctcctttaagcatgcatctaaccctttcaagcagtgtcctattcatcctctctgccaggccattttgttgaggagtgtctctaactgtcaagtgcctggctatcccttcttt

SEQ ID NO: 291850 - DNA, 788 bp, Cannabis indica
atagcccaggtccatttacgggttttgttttgggcctgggcctagagatctgaagtacattccaagcccaaaatattattatatcataatattcttggtacatatgtaaacaaattattattatctgttaaattatgtaaagactattgttaaataggtatattttttccactaattacctcaaaaaaaaaaaaaaaaggactggaaggaatatattttctatgtatacaattgaaacttcagttgaattcaatgcaaagtagttttgtgtatatttttcttactgacaacatagctttttcattgtgtaactactaactattataaaatattaattagtaaaatttttgactaaaaactatgtacaccgatcgttgacagtattaaaagtggtatatataaatatatatatatacatataattactcagatttttcatatataattccactattttctgtttttttctttctattcatctagcagttcaacaagatttttcaagttcctagtatattattttcagcctttaataattttttaaactatatatattctctcccactatgtatttattggtttttgaatattattaatattattattattgtgaaaattttatataaatacattatttgtaggaaaatttgattttatatacttaaaaaattacaaaaaaatttattattaaaccaaaaacctaaaccctaaaaaattacacctttttttcaaaaccccaaaaatacccccctcacaattttctctctctgcatcatctctctctctat

SEQ ID NO: 291851 - DNA, 884 bp, Cannabis indica
tcggccagctgcgtgttcggacaggattttatccgagcaacacacacatggggtgtctaaaatcccattcccgcgcgcagaaatcctgctgggatcacctagcaccgagttttctcggccagatcactcctgggcacgcgcggatgagtatgcaacaacataccatccgtacaattccacaatttttttgtttttctacgttttttcatacttttccatggaattaactttccgattttttgtgtagtttttgaatttagatatttactattactatttcaattctaattatcagaattaattaattgaattttttaaaattaatttatgatattagtataatttgaacttgaaaataggtaaatatctaacttttttgcttaattaactatcttatttttaaatttgactattttatcttatttttaaatttaggtcagatattaaatttttttaatctcaattttttaaaaaaattatttgaccttatttaaatttaaaataagattactataatcatgatattttgaatagatataagatattttgctaactttttaaaatttttgttattttatttaaattaaattattaataaaaaaaaggatatttttttttgaagatttaatttataaaataacatgaaatttaaaaggtagttagcaagtttttttttaaatgatatttaggttagtttaaacctaattttttcaaaaatattgtaggtttaaattttttttttatttatttaaaaacaaaaataataataattttatttatttatttttgaatttttttaattaattaatttaaaataaataaaccctaaatccaactatctaattcaacttgttgcaggaatatgtgttttagcttgtgtgtaa

SEQ ID NO: 291852 - DNA, 531 bp, Cannabis indica
cctcccgtcaattgaaagattatgagcaacgacacccaaatcatgacctagaacttgcctcagtagtgtttgctttaaagatttggcgacattacctctacggggagagatgtgaaatctatactgaccataaaagtctcaaatatttctttactcagaaagatttgaatatgagacagaggcgttggttagagttggttaaagatcacgattgtgaaatcctttaccatcctggaaaagccaatgcagtggttgatgccctgagcagaaagggtcccaggcaggtagctagcatggttcaaatttcacctcagttggctgaagatatggtcagatcaagaattgagtttgttgtaggcaaacttcataacttgacattgcagtctgatctgttagaacgtattaaagctgctcagttaaccgatcccgagtaaatcaaagtcagagaagaagttttagcttgtcaggctaaagactttatagtctcagatagtggaatgttgttgtttaagaccagagtctatgttccta

SEQ ID NO: 291853 - DNA, 590 bp, Cannabis indica
ctcgcctaaacgggacatcgttggattcttatttaatttgaaattatcctttagtttttcctcttagtttttcatttcgaattatcttaaatagtatatcattagatagatggtttataaatcatctacttatgatgtcagtctaatttctcttatgaaattgaatggtgcaaataactatattcccgattctctatttcgaaatgatataaatcaccgatcttagaaaatttcatacttgtatatgcttacttaaggcaacctaaacttagagttagattagtagtggtggtccaagaaagaataatcattcattgtatatttagtttaaatttaagtctttggctttcaattttattttctaaatagaaatttttaatttcagtttcctagaatacattggacagtatagtatgactttcacaagttataatatccattttctgtcaatggatctaaactgtatgtttatgtatttaatatgagttttgtattctgcgaccagtatccacttgaactattctaagaactcattattgtcactagacttaagtcatcaaaagaccacacaaccacattctaatatatct

SEQ ID NO: 291854 - DNA, 837 bp, Cannabis indica
actaaaataaatatattttttttctattgtttctatatgttgattattttctaatgagttagtgaacgaatttatctattgaaaaacaattcttacattaaaaaataaataaacaaacataactttataaatttcaaatattatttaattagaaaaaataaaatataaattgtagataagtggaaattaagatttttaaaaatcagctaataatgatattggacatagttaatcaaaaaaattatgattatatatgttttgaattttaaaaatatatcatttatgttgttgacctgatttgtatgataaatacaaattttattgtttattattagtatattattatgttttgtaattattaattttacaattttatgtaattagggcccgtttggcacagcttttggaaaagctaaaagctgcttttcaaaaaagctgtgacaaaaaggtgtttggtaagcagttaaaaaacagcttattgaagaaattatggaaaagctacagctaaaagctaaagctggtacaacccaacttttagaaaaagctattttgattaaagactttataataaattatttttactaaaaatttatttaattatttattatatatttataaaaaattaaaaatattttttaaaatgaaaaaaatatttaaaaaataaataaatatttaaaatttctaaattttttattttatttttaaaaaatattttatattgtatatttttattatttaacaaataatatcaatttatgtttcttataaactacaatttttatctttttgcaaagttgataaaaatataaatttaaaaatattaaaaaattattttta

SEQ ID NO: 291855 - DNA, 580 bp, Cannabis indica
caccatccggtcgaccggttggtactggtcccccagaaccggaattccggttctgtgctgggaacccaaaaatcatcccccttaactcaaatcaagcccaaaccttaccaaactctccagtacacctatacaatgcataaacatacatttccaaccaataaatcacagaacaaaccaacaaatcaaattatgccattaaagctcaaagcttgagtttcaaaactcaagcttacttagaactaaaatcaagcatcaaaaccaattgctagggacttagattaactcaaactaaccccagaaattgaaccccaaacatttcaaaacccaacagccactaaacctagaaatttcatagtgaaactaaactacaacttcaaaaacttaaggggaaaagaaactagggttaccttgtcttgattcctcttgaatcctttgctgaaaacacagaatttcagctcccaaaaccccttgcctcagctggtttcgaagagagagagagaaggagaaagagttcttcaatattttggtttttctttctttttttttacaaaaaatgagataattccaaattgggaaaact

SEQ ID NO: 291856 - DNA, 677 bp, Cannabis indica
tgatctctggtgagaagggagtttcgcgagcacggtctaactcaagatcattgttacactgtccgaccatgccatgaaacatatttttcaactcgtcaagctgggctgtaaggctgggctgacttgctcggcattctggtcgacttggactatgtcagcgtctttctgagcggggatttgagtatgggctccgggctgcacgatcgttgtagtattctgctcgtctattccccttcttctgtttagatcgttccttaggtcatgggttgttcccaacctatcgaacacagcagagcctggttgtcttagcgattgattcgctaggttgacaggtggaataatgccattattctggttggaaccgtcaggtatggctcctcctaatgaattcccggacaaggtctgcccgcctacctcttggttcacaagtggaactcgtaactggggattgggcggctgaccattatttgtctgggaagtattcatcgtcgggtcatcttccgtttctcccaggggaatgacgttcggcgtttgctgtcctacagtttggtaggctcttcgtatcagcacggtagtttgccgactgcgatcttcgatctctgcatggtgagctcttaatgcctccatctctttgttggaaatattcttaaacaatgaaataaacacataagagttta

SEQ ID NO: 291857 - DNA, 516 bp, Cannabis indica
aaagcaaagaaagaaaaaaaaaacttagtctctgtaaagcttgatcaaggtggatagctgctttgacatctcttgctgaacttcctccatggcagcaagacgattgttcaccagctgaacctcatttttgacctcctggatttctgcagcagcagaactcgagcttgcagcagcagcagcactagctttaggcctcttttgaaacacgccatcaaaatactccgagggttggaatgttgttccagtgagtgaaggctagagtgtttcatgagattgtgccctatttttctgagaggataaaaccttaaagattaaatttggaaacacaagcttaaaagttggctttttacctcttcgaaatgaaataatttggttcaaaatgtgggaggccaagtcaatagatgctccagaggtgatacgatagaggaatgaggccacatcttgagacaccacagtcttgttggagtttggaacccaattgctaagagcataccgcataagagatgcatgagcaaa

SEQ ID NO: 291858 - DNA, 534 bp, Cannabis indica
attgggaaatttacaataaaaaaactattttccatatctcaattacaaaattaatgtaccaatctcaattaaatattaataacgttgcataacgttacatttttccttcttttttttttcaaatttattgttcaacttttttatcttaattctcttaaactttaaaaattatttttgatcacatcgctattcggttgagtttaaaaatatatcgttataatctactcttcaatgtgatcatttcaaaatgtgggaaacatatatttttttacaacttttaaaatcaaaagaactatttagttgctcataaaaggaattgttcactaattagttaccattatatataatcaaatattacttttaaaaatttaataaacatcaaaacaacataatataatctaaaaatgaacacgtaattttaaaagtaactaaacaaaaaggtaaccaaatgtatataaaattatttttatcttaaagaggatgttttcacgaaaaaataacttattttttcgaacaaaatgaaaatataactta

SEQ ID NO: 291859 - DNA, 624 bp, Cannabis indica
tgtcaaagttcaatatcggtcccttccgatgcatactccatgcacccaacccaagctttactttaaccaatgctctggaaagaacatagcattttaccaaatgcaagtaaactctgttgtagattatcatatcagtaaaaccccgtgttctgataaatctaggaatctttattcacatagtcatgtttactttccactgtgttgacaacacaataaacaggatcaagtatgtgaaaagggttttagatgaatttataaatcaaatagacaagcaattgataacatgaaccaaaacatacaaatgaatgaaaaatacttctgtttctttattgatattgaataaaatggattacattgaaatggagttttatttagggcataaaacccaacagagatttctcggcagatggggctgcaatccctcttttccgcgcgcgtgccaagctatttgcagcccatttgggctgcacgtgcagcctgtctaggcagccaacacccatttgcaatttttgtgggtttttccccaaaaatctgattttttatgggattgtttcccaaaatccgatttttccaattttaaaattttccaattttaaatatttccaattttaaatatttccaatt

SEQ ID NO: 291860 - DNA, 522 bp, Cannabis indica
tcttctccttcctttattcatttcatttttttttttcgattttcaatccaaaacttagcgatataagctccggtagtagcaggatagcaaatccttgaaaaatgaaaacttaaggtatgatttaatttcattttatgtttaaaaataattagtttcgtatagggattttgtgaattagaatagttatgaaggttctaaccttatagaattgttctcgggtagtcatgggattagttccgatattttcttgttgaatttgagttagaaatcgagtttggaactttttaaagcttagtccgaacgttaatggcatttttcatttaaggggtcgatttttatttctgttacgtaaggatggtaatatttatggtatatatgggccctgtgaagtttggagtgatttggataagttttggtagtgtttcgatgagtgcgaaaattaggatttttgagttttatgtttttaaaaaatttctaagagatcagaaatcgtattttgtcataacttttgactcgggtatc

SEQ ID NO: 291861 - DNA, 782 bp, Cannabis indica
catcaaccttgatatccttagtcaactcagtgatcttcttcagagcaaaagctctgtgctcacccaactccaaccgaatagctccgactccgcctggcttctcagcatcctcctggccaagtgcgcctacaccctcatggtgtcggacagagccgtgttcctggaagtagaagacttagcccgggagtaagtgaggccaacttcaaaccggcctacacaaggaaaaaactttaacatttgagctaagtatggaatattaaagggaagtatccaaaaagacttaccctggtgaactccttcaagactccgcccaccagtaattccaaagaagagtcattgtcagcaccagccagttgctcactgaccttaggaaccagcacgttcatgtaatgggccagcatctccttgcccttcttggcctctggaagcaccaaaaaaggtggagtaggtgcccgcatccgttcaggatcactcctaactagttcaaacccaaccttcggtggtccagactccttggacttgtggtttgcagcagtcagctcctcgaaaagatcgatgacctccccagtaggcctcttttccttattagaggacccctcaccgcccttagacttcttgggtggaggagaggcgctagagcttccgcctattctcttcctcagagcgtcaagcatctgccgagacatgtttgtacagaacgaaaacaacttgttagaaaattgacataaaaaacataaggcatgaaaatcaagaagctcgaaaacaagacaaagtaatatgca

SEQ ID NO: 291862 - DNA, 189 bp, Cannabis indica
acttacaaaaaaaatacttatcttttgagattctacgtcgttaaattgctaatgaacgttcctccattagggacgattactcactaaaacaataactatgtaaaactaacaatggagatcgaatgtctctcgattaaagctcaaaatttgaaaaaaatatctaatttaagttgtactagaaaaaatcta

SEQ ID NO: 291863 - DNA, 650 bp, Cannabis indica
agtatactttactaatgtcctggaaagaacataacacttactccaagtgtaagtacacatcatcgctgattatcacattagtgtaaatccaataacactgatgaaacagggaccaagtcttttgattcatatgatcacaatcacattccactgtgttgacgatactgtaattgtgaataaacatatgatctggatttaactgattttgtgtgtgtgaatgtaataaacatattaaaccattagcatgtaaaattcatgcaaacattaatcacttcaaatttcttatattgataactaatcagattgtaaagagttttatttagggcataaaacccaacactttatatatgtaataactggtttctcaacttattataaataacgtatcattttttttggtacatacctggtacttcattcccttaacaagattatctctaagtactgtttcagcttcaacagatacttctgtgaatattccattagcttcatttccattcttccacacccatttttgaactaaacttcttagacattcaatcattaatgtaataggcaccgatcttgcagctgtgattgcagaattgattgactctgctatgtttgaagtcatcatagtgtacctccttgttgggcagtggcttctagtc

SEQ ID NO: 291864 - DNA, 515 bp, Cannabis indica
cacagcaaaagggatctaaagctcataattctgggaatgccaatgtggcggctaaggctgaggaaaactttgcctctacttccaaacccaagaacaagaagaagtggaagaatagcaagaagcctgttcaagctgtgaaaacagttaaaaagaaaaaggctgctactactggtgatataccaaaaggaaaatgattctattgcaatgaaaagggccactggaaaccccaatgccctaaatttctagcaaagaaacaaggtatttcttttcttataaactcatgtgttttagagaattattatccacttggattattaattctagacctactaaccatgtttgtttgtttttcttcttatttcagctccagctgcttgaactcagatgctatcttagcgagttgaatcggatggttggacagatggatggagatagtccaagatgaagatgaagctcgaaaacttcttttattatttttgaattaattgttttagtttcagaaaaatttggatttc

SEQ ID NO: 291865 - DNA, 101 bp, Cannabis indica
taaattttagttattaaataattagaattggcatttaaatggttgaatttgaaaattggcatttttgaaaaaatgagatgcagaaatgataaaacagcaaa

SEQ ID NO: 291866 - DNA, 629 bp, Cannabis indica
aagagcgatgtgatggcttcgcttgtcgcagactcttccaagaagctggccaagaccactcaggacaaggggaagaaagtcgtcattgaccctcctgttcgcgctcgcgacttcctggccatgcaggaaaagttcctggctgagatcccttacgaggatctcgttactcgatccactgaactggccgcgcagtccatggctttgttcataaaagctgcggctactccttcgaaggaagccgactcgctgaagaggcagaacgctcattttcaggagaatataaaaaagctgaagcaggatgtggcgaggatggagaaagagcttgaggaactcaacaaggccaaggagaaggagctcgaggaactcagcagggcgaaagaacaggcggagctcgaggtcaagaagtcgcagacaacgatcgctgagatggctcgcgatttggaggctgagaaagagaatgggaagaagcagtacgatcaggctgtgtctgattatatctacaccactctttccaaagtccccgacttcgacttctctcttcttggagctgaagctgctgagatggctgaggcctttcgcgccatgtcgcctacccagactcaaggtgggggaggcaaccttctggacga

SEQ ID NO: 291867 - DNA, 695 bp, Cannabis indica
cgagtttcgggtggtcgggtacggcgggtttcgggtcggatttggcgggtttaatgtgtccgggttcgggttttattaggcagtctgaatgattatttttgggccaaaataaaacttgatttttaaaaataccatttttttttatttttctatttctattcagcaggtttaaataaaaaatgtgtaatataaagaactaaaaattgaaaaatgtataatataaaacatataagttaaaataaaaaattacattatatataatataaattataatttattaatgtatataatttatgaatataaaactgaaaagagagatgagagggcagaggagaactcaagaacaaatctcggaccgacagtgagcaggcgggcatgggcggacacgggcaggggcaccggcggtcagatctcagaaaaatagaagagggatgaggagctgaagaggcaccgggccaccagcagcacagttcgcctgactgagctgaccgctgagatgagaacccgccggagaagaagaagcagccgctggttttcttgggttacgatttagtttacgaatggtaatatactctttttattttattttgttgttgatgctgctgttgagagaagaggaaatcattggttttacaaacataaagagagaaccaaagaaatgggcaaccatgaccacgatccaacctattaagtat

SEQ ID NO: 291868 - DNA, 631 bp, Cannabis indica
agcccagcaagacagtataaaacactgataagcatatttattacactatataatcagtaatgccattcacatatgtctgtatgacacagacctgcaagttacgctcacatgcctatttatatctacgtagcgtagacctacgtgttgcgctcacacgtctaattacaataaggccttagaatggttcctctcggttctagttaccgagtccaacctggttatgccttgaacacataaccctaaatctcaacatattcatatatataacatggcatagcatttacacaacatatatcactagggtaataaccctaggctatcaaaccgctcacattagggtaataaccctaatcccggttattaattactcacatatcccatttccaatataagcgccaccgcgcataactctacgtgctaactactatcttacctgatctcccgcaatagtagagattccaaatccccgggtgctcctgaccaggtgccgataatcctatttacaataccgggattttacacaacaagggttaacccgtgatttcacattcataaaatattaacatggcatttaaaattcagataatcatatagagctcggaacgagctttccaacggtataaagaacgtc

SEQ ID NO: 291869 - DNA, 620 bp, Cannabis indica
tgtgtgagcctatatgtttgccttgggcttagatgcatatagggagcccatttcatttttgtaattaaaatagactaggttgctaaataaagtgatcacttatgatagattttatttcggcccaattagtatttgatcctattcaattaataacaaatatttatttaaggttaaattcctctcctttcgaccttgtgtgagagttagggggccatataagtgggtacgacatattgaacccagccctccctcacatgaacaaccccaattgtgaaggcccacttgccacatttgaatgactgtactaagttaattaaactagtttaacctaataaaattgattagcgacataaataatttcaaaatagataaaattaatttttcatttgaatatttcgaaatgaatttaattaaaacacacttagtttaatgaaaatttgttttaagttgaaaatttgttaattttggatcaacttaaaattgaatatttttcaaattaagatgatgagttcaagatacttaatttgttatttaattaaattttttaaaataatttaagttgacaattttgttaatttagaacaacttaaatttgatatttttaaaatatttattttatt

SEQ ID NO: 291870 - DNA, 521 bp, Cannabis indica
aaaaaaaaaaaataaataacttaattatttctaatgacatttgaacaatgcagtcaaacatataagcctaactttgagatcactcacgactattttttttttttttggctaatttaggattttttgccccctaaattttgacatgaaccaaattatgctccctgaattttttaaggtcgttaaaaatgccctctgaactattaaaattgttggatttaaggacttttgtccaattttagtaaaaaggtctaacattgatgaaagttcagggggcatgatttagtacatgtcaaagttcgaggagcttgatttggttaatatcaaagtctggggagcatggtttcatacataaacaatcactgaaatagtaaaattgaatgaatttagacaaaagtccttaaatttcacaatctcaatagttcatgagacatttttaacgatcttaaaagttcagaagacatgatgtggtacaagtcaaagttcagaggttaaaaatcctaattagccttttttttttttta

SEQ ID NO: 291871 - DNA, 523 bp, Cannabis indica
tttctggtgatttttcagtgatttttccggcgaaaatgccaattccgacgaatttccggcgccggcagcaactccgacgacttttccggcaccgaccgctactccggtgacttttccggcaccggcagcaaactccggtgacttttccggcatcaatgacaaataaaacttcctaaacaaataaaaacagtaaatatgggatttagaaacctaattacatatatatggcatatcaaataccatacaaaaacctaaaaacaaaaaaataccatataaattggccaaacttaaatgtgccatatttatcataagaacttttaaaatcccatactaagtgtaatttcctctaaaaatattattttttactatgtactgttttcttatatttttttttttacttttgggctacaacccaatcacaatatatatatatatatatatatatataaataaaaatttgaatacttaaaataatattgtcactatgctgtcacaaaagtgaaaggttttttttttttctttt

SEQ ID NO: 291872 - DNA, 1031 bp, Cannabis indica
gcaaagctaaacataaaatttaataataataatacaagttatttaatccaaaaaaacatgttaattaaaatttaataatagaatattaaaaataacaaattttgtatcatgctatattgtgatcagtgatctaaatttaaattactttttagtgtaatatatttgcattataatttagcacactagagtagagttttaacaaaataaattatattttgtatttgcatcttaattgaatttaattgaatatgcttgtgtatcatatttgtgtgtatatctactaattaagtacgatgaaaaaaaaaaaaaaaacaaaagaagtgaagataaagtgattatttgatatcctgatttattactgtaagataaaacacattcctaatattctatttattattattcaagacaaaatatattttttcccaaaaaagaagagaaataatgaaataaaattcttatggattttattcttttcgggaaggagatgtttagtggattttctttttctttttctctttttttttagagggtaattaatgtttgaataatggatttttaacaccatatttgattattatctaccatattaaatgttgtagggggatatttaatgaattttattcttttcttgcaatgtttagtggattttttttgagaaaggaagtttaatgcatggatttttatttgattattagctagcaaataccataattttatcaaaaaaaaaaaaaataaataattaaaacataccatattagttaaaggtataaattatataacatctttaaatgtttaaatgtgatcatatatagaaggatttttttttttgtcaaggtggaaggatgtttagatatgtgcatatatttatataaattttgttttggaagatatatatgtatagaattttcaagattattgtttttaacattaaggtgtcgattaatatagtgaggtaattagctagtgatttattatattatttgttaaaattaaattgtttaaagaacctaaaaatctaataacagtatatc

SEQ ID NO: 291873 - DNA, 535 bp, Cannabis indica
tggacaagtgtcgagtgcagtaaattcacagaagacggctttacgcgataaagaaaacagaaagaaagaattctgttctatgccctaagcaaccattaaacgaagaacgtatggccttctacaaagaaaatacacaataacaacagaggcatgacaatggcaatcctaccactagagcagtaaattcaaacagactacatgaagaacttaaacacttgcatgcccagaaatctcgaatgcaaacccagaaaagaacaaacagaataagtaatagcatgccatttagtaatagagcaaaggatacaaaaaacttacgatgaagtgttgaactgggggtcctgatgcaagtcgagtaaagacgagaaggactggtagcaacgagcaaagaagaactgggaaaatcgcaaagtgcttgaaggccttgttctaggtctgagaattttctctctaggaaattcgagcaaagttggcaagaaatgggaagtaaccgaaatgaagaaaagatggtagcttttataggcaaaaatgcatgagg

SEQ ID NO: 291874 - DNA, 714 bp, Cannabis indica
taaagattttgcaaactgataggggtggagaatatatggatatgcagttcaaagatcatttaattgaacttggcattgaatcccaatttactgcccctagcactccacagcaaaatggagttccagaaagaagaaatcgcacgcttttggaaatggttaggtccatgcttagctactcaactctacctacgtccttctggggatatgctattcagatggcaactgacattttaaatgttgttccatctaaatcagtccctaagacacctttagaattatggaatggtcgtatacctagtttacgccattacagaatctgggggtgccctgctcatgtcttaagaaagaaagatggcaaactaaaaaagcaaattgaggtttgcatgtttgttggaaattctaaggagactaggggtggactattttatagtcgaaaggatgataaagtgtttgtttccacaaactccacttttcttgaagatgactatattaagaatttcaagccgcaaagcaaagtagtattagaggaaatgctttcaggtataactccttctaatgttccatcctcttctactcaagtagaggataatcccacttcctcagttgaacctttgcaggttgatacaaccgagaaatctaccactaatgttcttgttcaaaagatcctggctcctcgtcgtagtggaagggtttccacaaaaccatctcgttatg

SEQ ID NO: 291875 - DNA, 620 bp, Cannabis indica
aaaaaacgcatatgttcaaaaaataaaattaaataaataataaacagtttaatataataaatatactattttttttgtatagtataaatgtttattatccattttactataatttattataactatatatatatatatttatttttacaaaatatttaataaaaataataaacaataatgtattaataatttatatctatgtttatttaaaattaaagtaaaaaaaaacgtatatttttactagtcataaatatatattttatatttataattaatctatatttttttatcaatatatttatctttattatttgataaatcacatgtttaattaaaaaaaataaacaatttcatcaaattaatgaaatatttagaataatcatgattatctatgtattgattttgaaaaatatacctgcctaatacaaattttattatttattagtaatatccttatattgattatggtttgtaattattaacatataaatttggttatttagaaagctttctcattaatataatacaaattagccataaaaatagttataaaaaggataaaaatctaattatggtaatcattcacattaatacatccaatataattaaattaagaattt

SEQ ID NO: 291876 - DNA, 867 bp, Cannabis indica
atctcagattccatttttgggtcactgttcaatgtgatttatgatgtggctctctctctctctctctcttctagttctacttttgtttagaaaagaataaaaaggtggtatagtaaaaatattacctgctgtgctgacctaaacaaatatgaaacacctcctctctctctttctctcttcctccataccccaactcccaaggccacaaataaaagaatttgcgtaatttagatgctgacatcagcttaaaattcctttcatttattgaattttaaagttgtacaacaaaacccaacctttttttaccccatttgtcaagatgaaagaaacaatgctttccactttccactttccactttccacccccaagttatattttggaccttttttacgttcatatgatgtagacatagaaaagaaattaacaaggtacgagtagtagggtgtttttattaccaaaaataggagtaacaacagatggacacacataaaggcgagcagggacaacagtccttaaaaaaatattagaatacgtacattttaattagttataacatatatttataataaaaaatttatcttttagacataatatttactttgcataatagtcaagttagattacacatatcttagagattaatggcgcgtttactaaactgtaattggaatcagaataatcaataagagaaatatatcggtttaaaatagaaaataatcggaaacaatattttattatgatgtttactaaactgtccggaaagaaaccagaaccatattattttgtttacataactaagaaaggtaatcggaaatgttttaatttaacaaaattgtcattattagaacatgcaattattttctgtt

SEQ ID NO: 291877 - DNA, 1055 bp, Cannabis indica
aatggtaaagctgaaagaaagaatagaacttttactgaatctattgttgccatcttacttaattctggtgctgcttctcattggtggggagaaattctcttaactgtctgctatgtgcttaatagagtacctaaatctaaaagcaagatttctccctatgagattttgaaaaatagacaaccaaatatttcctattttagaacttggggttgtttagcttatgttcgtattcctgatcctaagagaattaagctagcaagtagagcctatgaatgtgtatttttagggtatgctgttaatagcaaagcctataggttctatgatcttaatgcgcatgtgatagtggaatctaatgacgctgattttttcgaagatagatttccatttaaattgagaaatagtgggggcgcatcaactagcaatcttccagtaattaggagtaatgaacaaactaaggatttagaaactgaacctagaagaagtaagagagcaaggttagctaaagactttggttctgatttctgtgcttataccttagaagaggatcctgctaacctccaagaagctttgacttctttagatgcagatctttggcaagaggccgtagatgatgaaatggactctcttgtgaccaacaaaacctggcgtgttgtaaaattaccccctggctgtaagactataggttgtaagtggattctgaaaaagaaattgaaacccgatggaactgttgacaaatacaaggctcgtttggtagccaagggttttagacagagagagaatgtagatttctttgacaccttttcacctgtcactaggataacatccattagagttttaatttctttagctgccatacacaacttagttgtgcaccaaatggatgtgaagactgcattcctcaatggtgacttagaagaggaaatctacatggatcaacccgaagggttcgtgatccctggccaggaacatatggtttgcaagttggataaatctctgtacggtctaaagcaggcacctaaacagtggcatgaaaaattcgacactttagtcatttc

SEQ ID NO: 291878 - DNA, 510 bp, Cannabis indica
gaatcgccgaaccaggaccctagaacaagactatgaccatgaccaggaccttgacccagacctagaactgaacacagacctagcctcggacccaaactgaaacttgaactcaggcccggacacggtcgtgtacccagaccggaactaagacctagacgtggacctaaatcagggacccaatccaaaataaagacttggacctagatagggatccagatacgaacctggactcggaccaagaaccagacagggattgaaatgctgaacctagatctggaccgagatactgacctggacccaaacttggacccgcactagggacccgaacttgcaccaggaccggaacctacacccaaattaggttccagacctggacacaactcggacgcgaactcaaacacccgcacctagaatcagacccaaaggtagacacggacccggacccagacccaaacttgaacctagactaggatcagaaaaaggaacttagacccagaactgaatccagac

SEQ ID NO: 291879 - DNA, 713 bp, Cannabis indica
acgtggacaatctaacatgacacttaacacctaaaatagatgaaaatattaaattcctaacagaacacaggtattgaaggttttaccgccaaaatttgagttttgagggttaagtgcaagcaaagtgaaactattaggggttttgccacaattaactctatataaaatggttacataaaatatgtaaccagcatggttacatttacttttaatcgttggattattaataaacacttgcaattaatttataaattaactaaaaataattaataaattaccagtaatttgattgtaacctatattattttatttacttataaatttttttaataaaaaataaaaatatttataaatattaaaattgttttattaaaaaattttaattaaaaaataatttcttaaatatatagttaattataatcaatttaagtctaaaaatataatttttaccacttagttacatgttatagcaggtcataaaaaaatgtaaccatcatagttatatttttaatgtaaccataatagctacatttttaatataaccattgaatagtcacccattgttattattattattttttgtaaatcgacttttttttattctcctatttatttatttattgtagagaaagatcaaactttcattcaacagagaactaaatgacatagttcattacatagctcaacgataagaaaaagtaaaattaatcctg

SEQ ID NO: 291880 - DNA, 749 bp, Cannabis indica
ttgtggatccaggtccaagttattgtgtgaattttggtcccggtctaggttcgggttcgagtcctagtctcggttcgggtttagatccctgtctgggttttgatctgggttcgggtttgggtttagctccttgacctggtcctagtgctagttcggttctagttccatttgcgattcttacttcgagtttgggtttgagttcgggtcagagttcgagtcctggtctgggtgtgggttcgggtccagatttcagactaagtccagatgaagctccgggtgtgggatcgcatcctgggtcttggtctaggtagtgtccgagtcccaagttccaatcccgatttgagtctggattcagttctgggtctaagtccttggttctgctcctggtgtgggttcgagttttggtcctggtccgggtctagctttgcgtctaattcttggtgtgggtttgagttcgggtcggagtttgtgtccgtgtttgtgtccaggtctggaccccgatctgggtctaggttcgggtccaggtccaagttcgggtcccgagtgcaggtccaagtttgggtcttggtcagcatctcggtacagatctaggtccagcatttcgatcccagtctggttcttggtccgagtccaagttcgtatccggatccctatctaggtccaagtctgtgttggggatcgggtcccaaatttaggtccaagtgcgggtctcagtttccgtctgggtacacgaccttgtctgggcccga

SEQ ID NO: 291881 - DNA, 398 bp, Cannabis indica
taagatcctggtaaaattaatagggaaatttgaatttctatgcttacattagggaataattttttccctaaacttaaaatagggaatattggtaaaatgggataacattttcttaattaattcccacaatacccccccactttgaaaccatcagccctctctctctttcacctctctttctctctttctctctcgctcggtgccgcacccacacacccacggcagaccacccacggcagaccacccacggccgaccggactacgcacgaccaccgttcgaaccacgcacgacccagcctcttctctcggacccagcccctctctcttcctctctctcaaactgaaaaaaaaaaccagaggtccgatggtcggaccacatggtccgatggggtccgacc

SEQ ID NO: 291882 - DNA, 638 bp, Cannabis indica
atttaaggagtcgattttattttgttacgtaaggatggtaatatttatggtatatatacaccctgtgaagtttggagtgatttggataagttttggttgtgtttcggtgagtgcaaaaaattgagattttcgagttttatagttttttagaaatttctaaggtatcagaaatcgtatttttatcataacttttgactcgggtgtccgttttggatattctatatactgtttcgaagcttgcaatgagctctacaatatggtgtatattttagagccaaaatataagttttattttagtgtatttatacctcagagtttggtagaaaaccctagattttcttatgtgactattaagcagtgttttgggataaacacttatttgtttaccgttgttgtgacatggggccgagatcatttgggatagttctccacttgggttggctaaaatgtatgagcctgaattaaaggtaagaaaagtatattgtactgcatagtacattgtatgtaatataattagtattgttatgaattgattaatattgagatatagttaatattgttatatattgaaaagactgattggttgagtattgataatgtgataatattatgcatgtgatatatgggctcacctgatt

SEQ ID NO: 291883 - DNA, 536 bp, Cannabis indica
gcataaaattcacaatttcagattgcataaaacacataattcatgcctcaaactaacaatacccaagctcaagaacttgagctaaaaatccaacaaccacaattattttccagcagccacatatcaaaatagcatggatttcaagctagaaaataacctaaaatcacaatccaagctcacaaacatgaatcccaaccaaatcatgaaatttctcactcaatttaccaaaattaaactcaagatcaagcacatgcaatcctcaagagaagaacaactcaaaatatgcttttatcccaataatttcagcaagaaattacaacactaaaactcaaaatatactcagcaagaaattacctcaatcccaagcttaaaattcttccaaatcaagtaacaccaagcaattttcttcaattcttaaaattgaaaatcaagagagcaagagagggagagagggttgggtaagagagagggataacaccagaaattaatcccattttttttccaaaaaatctcctttatccatcatagaaaataaa

SEQ ID NO: 291884 - DNA, 604 bp, Cannabis indica
cttcccttttcccatttatttttcattttttaatgccaagtaattcaacaaccctatgtggtcttctataaatagaaggtaaaggcttcaggttttgtaactctttgaaagaattttctttcactcaaaaaaccttgctcaagccgccactctctctctctctctctctaccttctcttgttttacgaatcctctaagtgatagagtagtcgcccacacacatcaagtggtacctcaatcatagtctggaagatcatgaagaatccaaattgaagagaaggacattcagactcagatcttggtgatactctgcgacagaaaggatacaagggttagagatctaagtggaaggagacatattattccgctgcaaccatgtaaggttccctaaacttatgtgtttattatcgttttagaagttcatatttaggatgttaaacaacatacttgtgagtagatctaagatcatggtaaaataaattccaacagttcgaaccgtctacccttaatttgctcagtcgggaaaactctatccatgcagatgtatgctgagctttgttcggaatatctcttcagctagatgtaggaaataggagccacgtgt

SEQ ID NO: 291885 - DNA, 646 bp, Cannabis indica
gaggcctagggcagaatttaaaatgaggccttttctctttacaaaaatttaaaatatatattatttaaattttgacacaatatcaattttaactcttttatctccgtataataaatcatcacataattgctaacttaaagtaatatttgattataatatcatctctattgtgggaaagttggagcaaaattttgattagagaaaaatgaagactattatgaaataataggggtaaaattggtagaatgattgaaaaaagaggtaaacataataattttaaaagagggagtaaaaattaaaggcatcaatttaaaatatgtaagtagtgtaatttcctctaataattaataaatatactttttatttaagttataatgttgtcattaaatttttaagttataatattctcaacaattatttttttgaaatatatgatttatttattattatcgtaattatttttttttatcagttagtactactactattacattagagtaatttctaaaaatattgtactaaatataatatttgctccttatcaaaaatatatataacataatatttattttattttttttaggttaatgcatttttatttttataagaaaattttattacctccttatagagcaaaaaattaaaa

SEQ ID NO: 291886 - DNA, 552 bp, Cannabis indica
catcaccaataataattacaataacatatattctagattagtttatacttttcaatatcaaacaataccacctaacaaatctcaagagaccaacaaccaataaccaatattttatcattttctttttcattttgatttttgacttttatatataatatcccaatatctttcctctctcccagtggtacaagaaaccactacactacctttgagtctgagcgacacacatacgaggcgaagagagatcaatcacaaagggagagggatcgggcattcgattcagcggagagagaggggccttgttttagtctccagcgccggcaacatgatttttttttatataacgctattgtatattagtgaaaataaatgtttttggtaattcaaaatctttggtatttactctgtaaaaagaacaaaacaagaagagagatacatatacagagacatataaattatatatattcttaaatcacattcttcaaaaaaaatcaaaaaaactctgtagcagttaaaattcatttctattttcatggctgcaagttttatttc

SEQ ID NO: 291887 - DNA, 526 bp, Cannabis indica
taaaaaatgtattgcttctaaatacattggatttcaaattcaattatatatattatagaaaattatatttaagttgaaaattaatattaatattatggaccaacttaaatgaaataattttcataatatttattagaaaattaatactaagaatggagattttttactttttcagatcttcatagggtataattttataaatactaaattaaaatttatatttagagttatctaaattagtaattttaattaaataaatatatattaaaataagtatcaaaagaaaatacaactctttaaaataatgagctttagttataagaatattcgatctccattattggtcctacatggttaattgttttcaatataacctcgagacgctagacttcgtcccccttatggatggttattcgttgaagcaattaacaccgtaaagatctcgaaagataagtattttgtaagtttttgtctctattagactctcccctacggtgactacttagagataaatttaagaaatatg

SEQ ID NO: 291888 - DNA, 762 bp, Cannabis indica
agaaaaatagtagcggtactagggatgtatatttctcccataagaatgggctccgcaagaatccacttctaatggagtgaaaattcctcatctaaatggagaacagagcgaagacggagtattttttttgttcctgaatgttaaacggagcaggaacggtaattgacattcacgactactactttaatattttgatttatttttattaatttatattttataaatgtatttgttttttattatatttgtcatttttataattttttaagttgagttttgtatagtaattagtatattaaataatatataatatattaattttatgtaattcaataatttttttatacacttaatttttttttaaaaaaaattaatttttacttttatttcccattagtagatttcccctttcgtctctaataggcagggagattaaaatcctaaatgagaagaatcaggatggagcacccctcgtcaatttttcgccacgtgtatatcccgaggctgaacactatttgacggacaaaaatctgctgtcccattttctctgtcccaagcctgtcccaaccaattaagtactgacatgtcatttaatttgacacatcatctaacgaaggttaagagtgaaaaccttgttccctcttctgttaataccaaacatttttcccgtcatttatattctttgggtatgctatgccataataatatcccttcaaaccttctttctttattgtcatctttcttatttttgaaatcagagag

SEQ ID NO: 291889 - DNA, 593 bp, Cannabis indica
cattgagttcaacgagagggctcaggtgtttgtccgaaaagaggaagctcgaaaagagatgaacttgttaaaaaactggctcaggaggcaaacccaacaatgtttcaacaagtactgtctcaactagagttgataactcaggggcctctcgctcaaagagaaaagacgattctaaggagtcatcaaaggacaagaagaaacaaaagaagcacgataagtacgtgccagtttatactattaataccaagcttaatgaaacttgggaaaatatttacctcgtgcctgagcacaaggttgccttcagcaagcccgagcccatgaggcatgtgaggcataaaagagatcctactaggtattacaaataccataaggacattgggcacacaaaagacgagtgccgtcagttgaaagatgagatagaaagtctcatcgctcggggccacttcaagcagtatgtgaagagacaaagcaatggacataaccaacccaatcagcccaacaaaccaaacaaccagggattacaacctctttgtgttgaaggagaggacatcctggttatttcgggaggccgcatattgcaggagagagcaaca

SEQ ID NO: 291890 - DNA, 751 bp, Cannabis indica
atgttcacctggtgagtttcctctaaggatctcaccttggcaaccatctcgtccaaagcctccctggcctcccggagttcccgcctggccttatcagcagcctcgctttgtgccctcagctcctcctggtgttgggcctccaacctgtccctccgctgggcctcgtcccggatcatggcttccgcctgagcctccctccgtttggcctcctcctctttggccttggcagccgcctcctggcgctcagcagcctcttggtagatctgcctctccgcagtaaggtcctgaaggaccttcctgacgtcgttcatgtccccaaagtcagacagaacgaagccgtggtttatgatgttcttggagaggcggccagcctcagcagcaagctgaacaataacacaagtgtaagagaaaaattcccaagaagaaaaataaagggaaaagcaaaattgcgaagtacttaccacggtgagggaatggctgaggtcctggacctggaagatagagttcagggaggcacaagtggcgaaccgcttaggcgcgcatcgggtaagctgagaagcaaactcgccggtcatctccgcggcaaagggagccaaggtgggcccaaggaagcgacggaaccagtccgacagggggtccaagttaaggtcccacggatcctggtactccgggttgttgatactctcctctacctcaacccgcaaaaccctcctaagggcttccacctcggcatacccccgggagtactcgt

SEQ ID NO: 291891 - DNA, 843 bp, Cannabis indica
tggacagggcgttacaacatggtatcagagcgccaaggtttttagatcctgaagactggtttgatatgtacattggctgcaaggacctgatcgactcatggtttagtaagctttaagttaaaagatagcttgttaattttctgattacctgattatttgaattatgttgatatcagaatggtgtgggaagaattataatatatggaaatacttgatcggaaatacttatcagtattgttattacttggaatgtgatcgcaggtgtatagttatgcacccaaggcggactggtaggggtgcccgcgagctagctgggctcggggctgccggtgagggtgagaaccctttaccaccacctaattgggaacagttatatgctgctatgcaagaaactattcggcagcagggtgagcaaatcagagaattaagagagcagcgagctcagcctgctctaaatcttaatcctgatcctccggcacctctagtagtgccaccggatgcagggaatcgtttggaaccattatatgagcggttcaggaagcagaacccgccagtgtttgagggtggtgctgatccactcaaagcggagcaatggatgagtatgataacatccatttttgattttatgcgagttgaagataatgaccgggtcaggtgtgctacctatatgctacgagatgatgcccgtatttggtgggagattgtatctcagggccatgatctgaataatatgacctgggaaacttttcgggccttattttttgagaagtattataatgagtctattaaggcagcaaaggcagaagagtttatacggttaactcagggtagtatgactgtgac

SEQ ID NO: 291892 - DNA, 566 bp, Cannabis indica
taacaagtaatactcaggtaagtgagatcgttcccacgaggactgtagctaagtaccaatcaattgaattcttgtttctatttggcagaatcaataataaggttgaataattaaataactaaaaattaaaaagcaggataataataataaaaagtgtaattaattatggatgaatatttagggaaaagaatcctgttgatttaattacccaattgttaatgctaattactattctctttctcaatgtgaatgacagattataaaaattaacctaactcttttcagatcttttaggtcctaaatcacatgttatctaatcatctctgggatagattaacatataatcagcattaagcaataatctaaatgtcacaaaggctatgcaaatactttcgtttcacatcaaaacctagtttatccaattttagcattcccaattctcacttttcagattttgaattaggatcatagaacatgtagaaggtgatcaatcttaaacatgtaattaaacacaaatatggataaattcacaatcaagaaaggagaaatagcaattatcattaacc

SEQ ID NO: 291893 - DNA, 215 bp, Cannabis indica
ttttgaagttttgaaaaaaacgggggtggtgacacacccttgtgcgcgtggctggctgctggcagcaccctttgtgcgcccaagcagccccttgcgcccaagaatgtgcacctggatggtgtgctttgcataccgtccgtacagctcaaaattttttcttttttcttcgatttttcatgctatttcatagaattaacttccgattttgtgtagtt

SEQ ID NO: 291894 - DNA, 976 bp, Cannabis indica
  modified_base (914)..(914): a, c, t, g, unknown or other
tatatttccaccattttgtcaagaaaaaattgaaccaaaaaaaaaaattggcaagtttaaaatatttttacttttaaaaatgagatttgtaatatgtgttaatagtttgaaaatgagttggtaaccaatccaatgagattgcttacctcgtagttattgggaaaatgagcatttaatttaacttgttaaattttgtttgatagtgaaagtatcacatgatttatattgtggctgaatttttaagcttcttgtatatttttaattaatgatagtaattatttttatatgtcatgtatttaatatgtcgtatacaatgagttgtaatttttttatatgatgtagagaatatctcacataaattttcattgtttttaaataattaagatactaaaattaagattcaaataatttattttacaatcttataaatatcaaacacttatttgaattataattttgatatccttaatttaacttagatatgttagagaatctattataaagtttaacctagattgtatataccaaaataatgaaagaaaacaaacaaaagcagttgttgttcctgtctatattcttaaaatggcaatgtttgtcctcgtctgccatttgacataaaagcccttgcatttattaatattattatttattattattattattattattattattattataataacattatttagactatgataaatgcacacatcaacattatattataagtaggggtggacatccgattcaattcaacatttttctccttatccgttccaatctaattagtattagatttagtaaaaatcaatcattgataccaatcccagttagacctcaaaaatctaatccaatccaatctattactatttagatttggatcggttttttaatttatatctaatctaacncttaaattttaatactttcatataaaaaatataaaaaaaaaaaaacgtaaaaaaattaaaat

SEQ ID NO: 291895 - DNA, 561 bp, Cannabis indica
aaagtttaaaatatgggaaataaaaaaaatataaataaatttgataaaatttttaataataagtatcaccggaaagttgccggagtcacatcagtcaaaagacaataaatttaataataattatcattcaatggtcatccaaatatatttatatattttaaaaatacatttataaatttatacagggtaaattgcggcataaatacataatgttttagattttatacacttaaatacctaatgtttatttttggaggcaaaaatacctaacattacaattttcttacaccgttactaccacttccgtcaatatagacacatagaggacacaaatgcattacatttatttattttattttaaaatttaatattcttaatatcaaaaactaaaaactacttgtttaaaaaaaataagagagatgcaatactaaattaccatagctgagtaaatcagtgcagtatatggaacatgattatcgaattgaagtgctaatatcatgtgaaaattgttatgagaactggtttttttttttttttttttttttagttaaacaagttagt

SEQ ID NO: 291896 - DNA, 935 bp, Cannabis indica
tacatatatgtatcagacaaataaaaacaacaacagaacaacagtggaaaaacaaaagaaaactacacatacgttttgagaatgagatattgaggaatttaaatttctgaaatacaaagggaatacagtttttatttgaaaacattgattacattgggatttgatgatactttagactttttttttcttttatactctaaacaccgaaaatgagaaacaaggtctccatcttctacactcacatacagaaccaccacaacaacaccagaacaaccgaaaaacaaccattaaatccggtgagatgaaacaaaaacattaaaactattaatattaggactatcatggtttttctagtgttgtttttgggttgttctactattgtttcgtatgtttaacaattgtaggtttttaattacacatgttaaaccaaccactgaatatttgtttgaggtaaccagaatgaaagaatcatggacagtaatagtcttaccttccattaaagtggtgaaatctagaagaccaaaaaaaaaaagaggacaaaagctggctggaaaaaaaacaacataacaaatgcagcaaatgtgggaaactggggcacaacaagagaacaggagaagacatcaaaaatgaaaagaatgagaacaactaaaaaacaacagtggaacaacaaaggaaaactgaacatatattgcagtatatgatactaaagaaaataacttacatacaaattttattatttccctattgctattaaaaatagagcagtacaataatattaagaaaaatgtgataaaaaaatgacagaaaacaacagtaaaacaacattaaaacaataataaaataagccaaaagccatcaaacgatacaacaccaccactcaaaaaaacagagctaactataaccccaaaaaaggaagaaaaaaaaacataattagt

SEQ ID NO: 291897 - DNA, 531 bp, Cannabis indica
gaagagagtccttcagcacaaatcaagaacaagtacggagatataggatccccttgacgaatcccacaagcaggaacgatcggtcccagcttcttccctccataagtgacatgataagagaccgtagacacacaaaacatgataagagcaacaaatcttgaactgaatcccatacgagtaagcatggcttccagaaaagcccaactaactcgatcataagctttactcatgtcgagtttaactgccataaagccatctttacccttcctctttcgtttcatatagtgcatcacctcataagaaatcataatgttgtcagaaatcaaacgacccggcaaaaaagcactctggtttgtagatatgacactaggcaagacaactttaagcctatttgcaagtaccttggaaacaaccttataaaggacattacaaagagaaataggccgaagatcacccatttgttcaggattcttcttcttcgggataagcacaatattagtctcattcaaaactgaagggaactcaccagta

SEQ ID NO: 291898 - DNA, 1230 bp, Cannabis indica
aggaattttcaaaaattcaattctcactcaaatcaaacccaaacctcatgcaaccttccagacctgttctaaataccccaaagaacattcccaaagcatcaaaacaacccagtaatcacagatacgaaaaatgttgttaaagctccaagctttgagttcaaaactcaagcttggctaaaccccactaacatgcatccaaacctgcttgaacctactcaaataagcataactaagtctctgaaaacaacagcaaacaactacaaacaacacagcaacagattgcatcatttcaccattaaaatcaagattttgagtcaaaattccaaactttgaacaaaagtaactaacatgcatcaaaacctatcctatttcactcaatcaaacatgattaaacttttgaaaacaaaaacaacaattaacagccaacacaactccaaaaactaagcatgcaaccattttcttacttgattttcaagaaactaaagagagaaagagtaagagctatacctagagcttggattgtactcaaaatgaaagcaaaacacagcttgaattaccaaggaacaccactttcttgctgctcaaagagggccgaaagagagagagagttttgagagaatgaagttctttaattttttttctaattttctaattttgagtaaaatgaaatagagagaagattttcccaattaattcagccaaataaacatcaaataaatcacataattactaattaataagctcactaaaggacaaaacataattggggcaaaatgaccattttgcccctccacactagaatagcacaaaagaggtactaagggtattttgagaaattctaaattcccgactaatctcgacattcccaatgtctaaataaactgccccaacatactaaaatactaaattgtgattctactgagccatacaccgcgttccatgttaccaggcaccgaaaaagtaaaattataaaatttcactatatgatataaaaatgcgttcagaattcaaatataacaacataaataattatttaaatatctattaataatttcataattaaatcttgattaactgctaatttccaaattaaactaagtggtctttacatcttataagcgatctaaaccatacaggtactctcgtcctatatcgaaattctattctatttcacgatagcataattgacactcacttctcagatctcgcatcaaaattatagatgttaaa

SEQ ID NO: 291899 - DNA, 349 bp, Cannabis indica
aaaaaacagaaacagacccaaaatcgggcacaattttaaaattgttcaaataacttgttaatcgttggaacaacttattttgaacagttttgaacaaagttttcataaaataaataaggaaacaatattttcatttaatttgtaagatatacacaatttattagtcaataaatcatattaaaagatttaattaaataaatataatttttataaatataaatatcaagatatttattgatataaaatatatatatataaatactaggttgatgttacgtgcaataattaattttcttttcaataaagtttaattagatgatgttaagtgcaatacatgtatgttaatttt

SEQ ID NO: 291900 - DNA, 596 bp, Cannabis indica
atattcaagcttaaatcaagataaaatcaatctaaatatgaaaaagataagttagacaagaacttggggtttacaggcatcatccattcaacagtgttctacaaacataataacccgaccaccaaataatacttatcatattaaaaagaatatatttagcaaaagtgtgagctatcatattagcaagttcgagaacaatacataaaataaatattctaaaaagaattacaattataaataatctcatcaagaacaaagcctaaagaagaatcaatgggagaccaattttgtaacttgagcatcgcgctttggcagttatagactcaaaatgcacctagtgaagcccaaaaataagacactgatccacaacctttccaagagccatggtcttccatctctgaatcataacaccctaaaggcaccccacatacataatttcctaattggtagctaagatagcacaccccaatagtgcatgggtgtgtagttcccatgtgagcagtgttagatatttatatgtataaactgaaatatatatgtttatgtataaaatgcggaattaaatcaaacatatatacactatgaataaggatcga

SEQ ID NO: 291901 - DNA, 651 bp, Cannabis indica
aatttctgtaggtacttgactgttaagtttcaagttattattcgtgttattttttaattagtatatttaaataaataaaaaataaaaattgaatgatctggaccaatcaggaaccgtcatgtggtcattgactcgacacttaacgatcaggtacttacaaaaatttcagaaatataatctaggtattattattgtcaaaaattaaatttaagtatttatcagcaatcaggagttaaatttaaatatttatgctgtaaattactcttttatttatattttttgttaaaaatgtttaaaaaaaaaactattttttgtagagtgagtagggaaaattcgaacttgataattttattttgtgaagattggtgtattatcattaagttatgcatgtttgaagaaaatagttaatagaagtgttaaaataacattttggtttataaattttgaatttaatgttaaagtgtatattactatcatttaaaaatctataccaaaccaatttcattgtaacaaaatgaaatcctcaaataaatcaaatttattacatattaatcaaaatagtcactattcaaattaaatgtcaaccacaactagaggaatttttttgaagaaggtcctttaatatattttttttttttgtaacaaaaagaa

SEQ ID NO: 291902 - DNA, 68 bp, Cannabis indica
atcctttacttactactcgcgagatagaagctatagattccatgtttatgtcagcgctcccagtcaat

SEQ ID NO: 291903 - DNA, 507 bp, Cannabis indica
tttcttagacattgggaatgtcgggattggcggggaatttagaatttcccaaaaatacccctttagtgctctttatgttattttagtgtgaggcggcgaaatagtcattttgccccatttatgttttgtcctttagtggacttagaaattggaaaattgatattatgctatgcttcttttggctgaagtaaatggttattgcatgtatttctctcatttattcaaaaaaaatctcaaacatagaaaaattagaactttcaagaactctctctctctcttttcggccaagcttgggaattgctagggctgggttttcttgcttgattcaagtgattttcagcaagttcaaagtaattctagttgaggtaaaccttgttctagcttcttttcttgtttcttggaaatttttgggaagaaaatgaaggtttgcatgcttagtttaggttggtgttgttgctgtgattttgttgttgtttacagaggtttaagcatgattatttgagtaga

SEQ ID NO: 291904 - DNA, 706 bp, Cannabis indica
actattttttatttatttatttttacaaaaattcacatagcaaccaatgaagcaacctaaatcgcaactaaaatcaacatagcaacccacatataaactactgaagcaacttaaatcgcaaccaaaatctacataacaagccacataaaaaccactgagcaaccatcagagcaacccaaatcataaatcaaaaaaaaattaaaaaattgtatatagagtaataaaattacgtgaaataataaaccagaaatttcaaaaaaaataataaaaatatattaatatggagaaacttttatttttacggtttgagtttatttatttataaaaaaataaacttcaataaactatttgatattctttattggtgtgtttgatgtttatttatagttggttttttcattatttttttgttattttataattattgtgaggttgatttctggttattttttagttgttttcttattttttgttaagaagttttatattttttgaaacatttaaaagcgtatttttgtaaataaaaactttaaacaataataaaacatagaataaaaatgtttttgaaaaaacctctaaagaaatagtaacaatataagcttacaatatttctttcttttttcttttgaatggataagctctccatattatatttttcaaaagttattgttttttaataaaaataaaaaaaaataaattaatatct

SEQ ID NO: 291905 - DNA, 1189 bp, Cannabis indica
  modified_base (22)..(22): a, c, t, g, unknown or other
tagatgctatggttgaatggcngacaaggaagcatccaagaacatgcctgtgttcacactttgtatgaagtctagcatacatttacatgtgacaagcttttatttgtcaaaagaaacactcaaatagtattccatatcatgaagagcatatacatatacatatatatacattacttataataattattttgttaatatgttccacaacatagaaatttataacctatgaaacatgttattttcacttaagagatgttttgtatgaatccaaagtagtgtgatggaaaaactagaaggttgtagagatatctatccattatttaaaaagtgtatgacacagaatcaaagatggaaaaagaaaagaagtgcctcaaaataaacaaataaaaataatagagaagacttgaaagagactgaaaggatcgatcatctcatctttcttcaatttccaaacttcaatagttttttacattagagatttctaaaagctcaactttttcactttagtgaaacaatgtaaaaagcaaacaggagaaatgatgagtaaaaaacagaaaagataactattctcctagaaaaagataaaaaaggtaatgagatgacctgttttaagtttggggaatatggaaaaagacctgatcaattatttgatgtaacaaagtttggccagaatttgctttcatcatttttttttatctgcaagtatgatcagacattttcacatgtcatataaactgggattaataaaatttaaacaagatgaagaacattaatgtttaaataaatatactttcaggcttttacccaatatatatttatatatgaagaagagaacaaacaagactcactctcaaaactaataccaatgaagattcacattgaactaatgacaatactaatctttaccttttcattcttaagggggttagaagaattaacaatctccaagaacatattaatgtgtacaagaactaaagaaaaccatgggcccaataatctcctatggtactttcctaagagaaaacaaatgtacatgagaagaaaagaaaaagaaagaatttttgttcttgttttttacagatgaaaagaaagaaaatcaaatcaaaaggagtaagctacacgatgaaccactcgatctctaagaattccattgtacaaagctgctctgttagcaggcattcctttatac

SEQ ID NO: 291906 - DNA, 607 bp, Cannabis indica
ttaatttttagtttatttttgaattatcttaagaacatattacagttaaactatcaagcattcttaaatactaatatattgcattcaatatttacttttaattatcaacattataaattacattatttagatttacataataataatcacttaataactaataatatttatttttcaattattaattgtatcacttttaaataaagtagattatacctaacataaaatttaatatacgtgcctcgcacgtaattttttactagtatatttaaatgatctaatatatttatttatttttgttacaatataataatatgcaatactaaaaaaattatgtaacttaattttgttattatataataaattcatttttataatttttattagtctaatttattagatttggctattttcttaattttttttaaaaaagtggtacatttactaaacttagtttaccaaatttagggtcattttgctatctcaacccttaaaaaaaactaatctttttttgaagtattaaaaaatttatttttactttagtaaataaatagtaattttcaaatatttttagttgagtattttaaaaacaagtcattaaccctaa

SEQ ID NO: 291907 - DNA, 430 bp, Cannabis indica
tattctcacgacctgaggttgttactcgtggtctttgttgggatggagggcgctcgctcctcccaccatggttgtcgttctcacgagaaggtcgttgtggtatggcactagcatcacgaccttgggttgttggtgacctagatctctcttgaccttcgggagggtaacgtgttgaacgactcccacggggtcgtccccttctcgctgtaccaagacgcccgcgggttccttctttgtggccttgtggcctcctgggctccatacctctcttgccactctttgttgagcctgagagtctcttctaaacgctggcgcaatgcctcgttctccatgtacacctcatggacgctggtagttcgccgtacaccatgggatggtgacgatgagcttcctgcatcttggacccgaccttcttcgtcaggcattgctt

SEQ ID NO: 291908 - DNA, 598 bp, Cannabis indica
tttcctccggttctaggctctttcctagccggaggacttggagtcgaggtcgcacactgacacttcctcgacgtcctccctgggttctacaattttttcgaatcccacacggggatccaactcatcttcttccgccatttctggctcaataatttgacggaccattaggacgggtaggtgggcagcaacgttgtaacactgcctggcctccccttggttccctcttatagttcctatcccggcctcttaagtggggaatttcaggcacaagtgccttattgacgtgactgcaccaaaatccaccagggccggtcggccgaggattgcattataagctgttgggcagtccaccaccacaaatgtgcagtatttgaaagtgctttggggtgtgtccgggcacaaggtgactgggagcctcacttttcccattgggataagtgttgttccattaaaccccgtgagctgggaaacgcttggtgaaagatctcagtccgtcaggcctattgcagtgaaggcctctttgaataataattcacagaactcccgttgtcgagtggactctggccacaatctattggcaatgggagtctctatgacc

SEQ ID NO: 291909 - DNA, 638 bp, Cannabis indica
ttatatagaaataatataattgacaaaataacacttatagtaaaaaaaaaatagtatatcttagttatatttttaatgacatatagtatataaaaaaaaactaaaagtttaatgaaatagtatatagagatatccatatttataaaagagagaaatttaaagacataaataaataataaaaaactaaacatcaaaacaattgattggtatatattatcttgtctttgtgatttacttaaaaaaaatagttggctaggctacagagaaagaggaaaaaaaaaagtgatgctgaggaaaccgaggaggaaacacggaagtgtggatgagtatatattaatttgtattttcggtaaaataatgtattaaaataactggcgctatacatataaatattattagttttatgtatatatttaaaaaattcccttgaaaaatcatagaagaactcaccggatgggctttatccatgttaaattatgttaagtgttcaatttgtatttcaattatttcggtaagggtaaataacattttagaccctgtgttgtgtaaaagttatcaattggaccatttgttttgttaaatgacaaaatagaccctgtattttttaaaatagtacaaataggaccctgaattgattt

SEQ ID NO: 291910 - DNA, 375 bp, Cannabis indica
aatatcactagttgatcttagattaaaagaatctaaatcttgatatgcttaggctcaatctcaggagtgatattcattgttcatatggaatctatagcttttataggtgtttagaagttaagtgatgatttccttcgagcttagctaaatagatgtaaatggaagagctcttgtttcagtgattatattttagttcactaagtcatcaattacaggtagctaagtattttaaggagcaaaatacattgaggggtgaaaccgtaaatttgtccctactcgatgtaaaccatctatatagaggatctttgatcaatgagattataacgatggttaaatgtgatagcgtatctgttggaatttattttaccaggatct

SEQ ID NO: 291911 - DNA, 555 bp, Cannabis indica
tcaatggattttgggacctttgaaccttgctcaagaacacaaatgggtcctcactttttgattcaagagttgccacctttcttttcaatcgatagttgcattataccttgcaaattaattcaaccctagtataatattagatttctctaaattcagcacaactgaaacaaccaactatttccttgccctcacaatctgggaagggtttagaccacatactggaaaataaccagttctccagtagactaaaaggtaccaaaactactcagtaacacatcattaagtttacacaaactcttaatcattcttccattcccactactgtaaccatgggcagtttctttttcaaatggcctactaccccacgttgaatgcaggctctcatgtagcgttcattttactagtgtcccttgcatctcgaccctctgaatgggtttacaaatcttttgttcccaccatgtcggaaactttggttaccttaaattctcccactaggacccataactggtgggttggtaactttttttttaagatcattagggttaacacttttta

SEQ ID NO: 291912 - DNA, 755 bp, Cannabis indica
aagaactcacaaagctcttacccaagtcgtgggtcaccaactatgaaaaacttcacaagccacagcctgtggttcagaccacaactgaaccttcctaccacacaaaagaagatgggtctgtcgaaattatttttgacagaagccaaacaaaaacacctagctgttttcacacccaatatgtcatcacaccaatccacccaatagatgcagaaatcttgtacttcgattcccaaggaaagccaatttatgcttttgaatcctccgaggggcataaatactgggatgtttgtaactgcaaaagttgtttaaaagatgatgagccctcaccacgtccaactccaggaagacgactaaagaaaaaattggaaagaagcgacaaaaccatcggtctattaggccaaccatcgggaaaattcgactacatagtcaaatactctgcaccaaagagctacaatcagcctatgccagaacctaccggatgggattcagacgatgcttcacaagattcacagcctaagatagttttgccttgttacaaagacaagcaaaatggatgaagaagcatggagaaaaatttccaacaccagctgttcaacaatcagttcaatcacttcctgacgaaacatgatcacctctagcccatccattgattatgatgcacattttcctcctctcaagaggtttgaaaaaactgaagatcagggcaccacttcccaccatccaaaaatcaaaatcctacaactaggaatgctgat

SEQ ID NO: 291913 - DNA, 426 bp, Cannabis indica
aaacgaaaaaaaaaatgcgagctgtacggacagtatgcattgcatactgtccgtgggcgcgcatgagggtgcttgggcgtgaaacctaggtgccgggggctgctagcagcctctccgcgcgcgcacgtggtgcagtgacaccaccccgatattttcgaaacttcaaaaaatcataactaattcaaattatatcaaaaaatcatactatccaataaaaataattccagaaatagatatgcaattaattttcacgaatattcacaaacatcaatccattatcatataacactcaatacaacatgataccatcaaaaacatcaaacaatcgttttaagttcaaatttcttgcaagcaaatcaattaccatggctctgaggccagcttttggaaatgattttaccaagatcttagatctactcacaagta

SEQ ID NO: 291914 - DNA, 412 bp, Cannabis indica
acacttccggctgggtcaaggctccgataccatttataatgtccccgcttcaagcctccattggacctttacacccacggaatgatggctcttatacacaagtacgtcactctagatgcttcatagactgatgactggccctacagaccaacacgagtgtttccaacttcccaggaggtcacccatcctaaaattgccccaggccaagcatgcttaaccgtggagttctttcgtgatgggctatcaaaaaacaagatgcaccttgttgatataggtagtaccaatcaatcaatttaagccctcttcaactctgtagtcccatacctacacagtctcagaatcatcacacttgaccttccccaagcggtgtgggattacacagcttacccggtgtttccccttacggatcacg

SEQ ID NO: 291915 - DNA, 505 bp, Cannabis indica
cggtagaccggttgcccaaccggaattccggttctggaaaattcaggacccccatccggaattccggatgcacaaccggaattccggttcctcgcaggcagcaaactcaaaaattcataacttgcacaaatcgactccaaatcaattcaaaccttccagacctattccatatgacccaaagaacatttctaaggcaccaaaaccacccagattgcaccaaagcaaaaagtgccattaaagctcaagctttgagttctaaactcaaacttgagtaaaatcacctaacatgcattcaaaccaactcaaatcctcttaaacaagcatattataacctctgaaaacaattaaaaacattaacaacaacacagcaacagattcacaacatttccttcaaaaatcacatttttgagctagaaattccaaacttgaaacaaagtaatttacatgcatttctaacaacttaattaacttcaaattaacatgcttacatctcagaaattatcaa

SEQ ID NO: 291916 - DNA, 619 bp, Cannabis indica
ggttcgtactatttgacgtatcacgtaagattgttgaattttgatgaaaatagtgtaatgcatgcatgataaattgatgttgttgctgctgtgattttgttgttaatttctgagatttaaacatgtttatttgaggttaattaagctacttgtggtgcttgatagttaggttgtttaaagttatgaattttctatgctaaagcttgagttttcaaagtgaaattgggtgaattgttgctgtggttgttgcatgagttaggttttagtttctgcagttgttatatgcttgattatgagtttgaatcatggtttgatgcttgttggagagctttagccaagtttgagtttgaaactcaaagcttggagctcacatggtgtttttcaattctgtgcattctgggttgtgttattgctttagatatgttatttaggtcctatagaacaggtctggaaggtttgaggttgtttgggtgtgatttggttgaaatatgaatttttgagtttctgcctgcgaggaaccggaattccggttgtgcatccagaattccggatgggcttcaaaaattcccagaaccagaattccagttgggcaaccggtctaccggttggggaaatttca

SEQ ID NO: 291917 - DNA, 832 bp, Cannabis indica
aataataggttttgaaaacttacaaacaagctaaaacacatactcctgcaacaaggttagctggatagttggatgtaggatttatttaattttaaattaaataattaatttcgaaattaattaattaaataaaaaatattttcgaaaattttaaaaaaaatatttgaaaaattcgaaattttaaaaaaaatttaaatttaaaattaaacctacaattttgaaaaattaggtttcaaccaacctaaatatcatttcaaaatttgctaactacttttaaaatttaaatgttattttataaataaaaattaaataaaaaattaaaaaagataaatgaatatctttttcagattttaaatgtaatttaaataaataaaataacaaaatttaaaagttagcaaaatatcttacatcattttaaaattacatgattatagttatcttattttaaatttaaataaggtcaaattatttaaaaaaaaatttaatttaaaatatttaaaatctgaccttaaatttaaaaataagataagatataatcaaatttaaaaataagatagattattaagcaaaaaagatagatactaactattttcaaattcaaattacactaatatcttgaattaaatttaaaaaatattaaattaattcaaaatgataattagaattgaattaggaatagtaatagtataaatacagaactacacaaaaaatcggaagttaattccatgaaaaagcatgaaaaaacgaagaaaaaaaaaattgtgagctgtacggacagttttcgcgatcgcaggaaaatttcagcacaactccgattttttcgaatcttcaa

SEQ ID NO: 291918 - DNA, 683 bp, Cannabis indica
gaagtaaggcttaaacaaatattctatcgaagatatatgctcactttctcccgaaaagagacttggaaaagtcttctctcgaagacccacgcttgttcaaagcttctctccaacctatcctataaatagtatgagatcataataagaaaactaaaacctagttacacactcttctcacaaagaaagatatgaaaatatgagactagaagagataaaatcgtttggctgctctctaggtcctatttatagaacatagaaaccctagagacagccacaaaaatgatttcccaactgtacaaaactttcttaaaaaaattcctgatttgcagcatcagaatcgggtttcgcagtagcagatcaggaccagaaaggaaactttccaaattgaaccaagatcacgaatttggacttcaaacctgccaaataaagataatttaatttgttctaataaaggcaaaatcaaaatcatccattagaaaagggaaagtcaagtttcccaaaattagacaactttccataagagaatttcttctcttacaagaagtttccaaacaaagaaaagtccagctgaaaaatgattctttcctaagatagaaaagagcaataaaatgcacaaaatcaatgtaataaaaacaatttaaatgctcaataaaatgcacattaattaaaaaatattttgacaa

SEQ ID NO: 291919 - DNA, 706 bp, Cannabis indica
aaatttatcatctattgctataaaaactttcctactatacaaacaaaactaatgttcctattatttacatgtccaatatacattatgaaaaaaataaatgcaaaagtttgttataagtttgtgagtagtgataaaggcatgagacactaattgttaatttgttacaaaaaaaaaaatggtggggtccaacaacatttaataaataaaaaatattaattaaattatgtaaaagaaatcatattctttgccacgtaggtaagcagtggcagagccatccacgacaaaaaaaattttaacatataaaaaattacatttataaaaaaaaatattatttttattataaaaaaaaatagattttataaatataaagtagatatataagaataaatataaaaatgtgaagataaaaataaaaaaaaaataacaaatttatatgaataaatttataatatgtgatgacaaaattaaaataaaaattaaatttatatcagcaaaaatacaaatatataaaaaagtacatacaaaaataaattttaaaaaatttaaagtggggtcgatgtgcccccatataatcccatgttccaccgctactttaggcaggtacttggcacttctggtgccgaataataatactcgcaaggggtattcatccaatccgcactattttgtcttctagtgcatccgatctgcattaagtgcggatttc

SEQ ID NO: 291920 - DNA, 525 bp, Cannabis indica
ggacaagcagaagcggtcaacaaaatcctaaaaggtcaccgtaagaaaaagctgctggcctagcaaaaataattggcccgaagaattggcaagagtgttatgggcctaccagacaaccccaagaaccacgagtggccacgcgccattttcaatggcgtacagttgcgaagcaatggtcccagtagaaacgttattcctgtcccacaggagaacaacttacgatccaacaacaaacaaggctttattacaagaagcgttggatcaaattgaagaacttcgggatgagtctcaaatacgaatggcagcttatcaaaagaaggtaactaagtactttaactctaaggttaaaagtagaaaatttactatttgtgatatggtcttaagaagagtcttcccagccactcaagaacccggagtgggggtacttgggccaaattgggaagggccatatgaaattgaggatgagatcggctccgggacctataagctaaaaagaatggacggaatcattgtgccaagggcctg

SEQ ID NO: 291921 - DNA, 580 bp, Cannabis indica
atcaagaagagaccgtggtcaacacggaaggagaacaaagattggtcatactcatcaaagtggactgaattttgaagcttcattatatgtgtcacgttttatttaattttatgtgtcacgtttttatcatatggtcgtagttgtcacatttatatgtgtcaagttcttttgtgtgggagttacaagagtggagtcaaaaggtcttcattatggagctttcattatgaagaccaagagtcttatttagtatgcttttattggaaagaccaaaggtcttaggtgtgttaatgttgaagtccaaaggtcttgtaggtgtcattttcgtcctataaaagggactacctttccattgtaaaaatcagattatcatatatgcaaattgtgagttttatcttctagagttcttgaagaaacttgtgaacttatcaaggaggtatccttgtggcgttcaacttgacttatcaaacggatttccatccccgtttgtggcgtcttccttataccaaggttcgtgcttcgctaagcattgggtcgaggttccattccaacatcgtttgttcttggtggctgttccatattt

SEQ ID NO: 291922 - DNA, 515 bp, Cannabis indica
gatctcgaggttgctgaccgttttaaggagaccatcgagaccttatctgttaaggtaaatagtcttcaagataagaggacttcccttcgagcagttcttcatcggatgaaggaggagaaggaagccaaggaggaggagctttcggccgaggtggcaaggttgaaagagaagatcaatgccttggagacagccggtcttgagctcttctttgaattttggaaggctaatcctcaggccaattttgactacttgggtgatgctaaggacatgtaccttgagttctgcgcgtcccaagtggcctatggcaaaactgaggcggctacttcaacctctggtcagactgctgatgtacctcctgttcaaacaacagatcctcctgctccaattggcccagaagaaccgaaccaagagcctgggacttcagctgcttaaacacttctctttttatctctttattttatatatcttattcgggctcagggccttttctaagcatcgtgactggccaagcggtc

SEQ ID NO: 291923 - DNA, 644 bp, Cannabis indica
gaatgatttagatttttactataacaactcaaagaccaatgtttgttcattagaaaccaacaagaaagaaaaaaaaaatcattttttgagagagaggaaagtctttttcaaagaaataataatctaacctcaaaataataattaaagaaaaagaaaaaaaacgagtagacatgacatgaaggaatggatgattaatttgcatgttttcacccctattagagtaacacgaagcttctattctctttctttatgttttgcttttatattacttcttaattaaaatgacttattttaattatttcatagttttttaaaattatattcacaataaaactcttacaacaacccaaactctcgaaatgccacaatctttacaatcaacaaaattagagctccatttcctctgagtctcttttttcacttttatccctctcaaggcaaagttacagctatttaaaaaataaaattaatgaacggaaaatagaaaattaggccaaataaagaaaattagaaaattgagagagagagagagaggaacacagagaacaaaaaggttaaaaaaaaaggaaacaaaccaacccaactatggtttcttcttcattttcatctactactactactactactactactactactattat

SEQ ID NO: 291924 - DNA, 237 bp, Cannabis indica
atggttcgcacaaagtacagtgaagattggctatcgaactgcttgccattatctgaactatcttgtatggcagtccaaccttgccttagaattttcttagataagctttgcccggcggcatgatttccacaaaatccgttgtgcacttcagataggagccgtgcagcttcttcttgagtaacacatctgagcaatggcatcgagaatcctcttctgtacataattccttctactatg

SEQ ID NO: 291925 - DNA, 400 bp, Cannabis indica
agatattactgtaagtttaatatatctgaatcaaagttcaatatcggtaacttccgatgcatactccatgcatccaacccaagctttactttaaccaatgctctggaaagaacatatcacttatccaaggtgcaagtaaattatgttgtagattgtcatatcagttaaaccctgtgtacttatgaatttaggaatatatattcagtcacataatcttgattactttccactctgctgacgacacaataaacaagaacataaatgtcaaaagggtttggatgaatttataaatcaaataaacaagtaaatgataacatgaaccaaatgacacacaaatgagtgaaaaaatacttctgtttctttattgatatttaaagaataaagattacattgaaatgga

SEQ ID NO: 291926 - DNA, 693 bp, Cannabis indica
acaacatgtctaatctaatcttaatgttatgtctaattcaatgacatctatttttacatatttttaaatttaaattaaaatatataaactcaaataaatacaaaaaaacatattgtatatatctcatcataggatagggtattagtcatagtgaattagtgttaaataagaatatatgagattaatttgatatcaaataggttaatataattttgaacattctagtttgtaaattatttattagatctcatgttttattaaataataaatctttactttttaaaatagcataaatagtaatttttgtcattttttattattaattataatcaacttaaaattaattttcagcacaaacataacatatcttgcaacttggtcatattacctccaagtgaatttattattaaattttattttaataaaaatttaattcataatattattcttttacaattttaaaaatacaagatcaaaattattatttaacaaaaaaaaaattcaatcaataattatacaaaaacatatccaaataacttttataaatatatatataaaataatatatatatatatatatttgagttggactcttaataagtattactaattttgaatggatagtattaaaaaaaatttaaagtttttaatgtcttagtttttttattataattaaaaaaaattacttattttt

SEQ ID NO: 291927 - DNA, 456 bp, Cannabis indica
ttcgaattagctcaataacatatcattggatgaatggtctatatatcatttcatgtcattctattttttttctcttaagaaattgaatgacatttttgattattttcccgaaattctatcctacaatgatataagtcctcaatcttagaagtctcctacttttatgggcaatctaacttagaattagtagtggtggtccaagaagaattactcgatatatttggtataaatttaagtctttgactttaattttagattccaaacaaaaattttcttatatttctaattccaggatacaatacagttacactttcacaagtgtttaataaccatcttctatcattagtttcaaactgtatggaatttgagtttaatattctgtgagcaggatccacttgcactattctaataactctttgatagacactaccacttcttttaatctatggcatttgt

SEQ ID NO: 291928 - DNA, 675 bp, Cannabis indica
atactggaaaagtcgtcgaaaaaatcattgtcgctgaaaaaagtcaccgagaaagtcatcagtactagaaaagtcatcgtcgtcaaaaaaatcactgaattcagatgtctcagatataaattaaaataaaaccagttctataaaataatgaataaacaaagaacacagaataacccaaatcggttataattaaaataaaactagttttataacataataaataaaaacaaataactcaaattagttataattaaaataaaatcggttctataacagtgttataatgaataaaaataaataacacgaaataactcgaactagttataattaaaatagaattgattctataacataatgaataaaaacaaataacacgtaataactcaatccagttataattaaaaaatcaagagaaaatcagtttttaaagcactaaaaaataaaattagttccacagtaaaataagtaaaaacgaataacatataataccttataaaaccgtttatattttgaaaaaaaaaaacgtaggggatcagttccaaaaataataaggcataaatacaaataaaaccggttccataataaaataaataacaaacaaaaaataacaacacaataactcaaaaatataatataaaaactgtagggttttatgccctaaataaaactcaaaat

SEQ ID NO: 291929 - DNA, 1287 bp, Cannabis indica
cgtaaagaccaataagaatcagagggatccccaaacaaaaaaagcaaccataattgtctaatgacaccacaagtagatggacatttgcaagttattatttgacgaccccatattactcgagatacacaaaaatcccaagaaaggtatgctcgtacaatcaagtaagaggaaaaaggagaagtgttggctgtggtggagcgagctcctaagcagccgtgcagaaacgagacacttatattagtcggtgtaaaagatgtcacccatgtccattatcctcacaacaaccccctggtcgtcaaagtagaaatcacaaacatgatagtgtcacagagtatgatagataatggagccttgttgaacattcttttcaagtcaacctatgagaaattaggctccaacttaaaaatatggttctttacgcaaaatcaatttatggcttctccaaaaacagtgttgtaccctttggggtaacctgcctcccttaaactgtgggaaaagcacctaccagacagacagtcatgacagacatcagccttcaatgtcttgatgggccttcagctttcaatgtcttgatggggtgacagacattgtatgacctcaagatagtaacatcaatctaccacatatgtgtgaaatttccaaccaggaatggggtaggatgcataaatggggatcaaaggatagcctgtttggccaaagctccaagaccaaacaaacatagaacaaataggaatctgccaagacagggatgataagattgatactctttttagggatcctaacacacgaatttggcctgtggaataattggaagaagtagagatccacctgatggaatttattttaccaggatcttagatctactcacaagtatgttgtttaacaccctaaatatgaactttctaaaacgataattaaaacatatataaagttaagaaaaccttacattggtagcaacggaataatgtctccttccactcagatctctaacccttgtatcctttctgtcgcagagtattatcaagatctgagcccgaatgtccttctctttgaatgtgatccttcacggtcttgcaatctatgattgaggtaccacttgctgtgtgtgggcactactctatcactagagggttcgaaattgtgaagaagaaaagagagagaggtagggtcggctatagagagaaaaagtggaaggctcagtttttctgaaaaggcaatcttaagaaaacttgttaaaaacttattattttgactgagccatcactttctatgtataggcaactacta

SEQ ID NO: 291930 - DNA, 621 bp, Cannabis indica
ttacggtgttaaatgctttcaacgaataaccatccataagggggacgaagtctagcgtctcgaggttatattgaaaacatttaactattgtaagaccaacaatggagatcgaatatctcttgattaaagctcattatttaaaaataatgtatttttaattaatcatttattttaatccatatattttaataatgaaaattaaataatttaaagttggtccaaaattaattaaaaattaattcaactttaatttaattttcaatatttaattatcgaaaattattatataataaaatatataaaattttgaaaattaaaaatatataaaataaatatgttgaaaaatatctaatttaagttgttctaaaataactaaattttcaacttaaattatttttcaaacaaaaatttaattaaataacaaattaagtggtaaccacttaatttgaaaaatattccattttaagttgatccaaaattttaacaaattttcaacttaaaaaaataatcctaagaatcttcaataactaattcttagaattcctcaacttaattttgaaatttcaaaaataattcaaatttaagtttgataaaaaaattaagttagaaataactaattta

SEQ ID NO: 291931 - DNA, 586 bp, Cannabis indica
gattctgagcttggataattgttttattgcttggaatatgtttgttggggtataatatgcaggtctggaaggtttggtaaggtttggaatcgaattggttaggatttgaatttttttgtataaccagtttttgcagctgggattcccgaaaaaattcaggttgtcgattcgtgttagtttcaggtttctggtttgttaattccctgctagtttagggtatttccatattaagttgctgtagatagggttttggtttaaaacctaagtcccggttatgatttagtgtgtcacttatccatgttgttatcgatgtgatttaggagcatgtaattcgccgagccgttgttccactcaggttggccggcacacttgaattcagaattgaggtaagattagaataatgtcatgcatatgttattacatgtttagcatacatttttgtttatgcctgttagattacactgatagcagtaatagtatacttagagttgtactgaaaactgataaatgtatgttggctgaatactaatcgatgttgtcacatcaatatggctagagtatgactagcatattgagtataggctga

SEQ ID NO: 291932 - DNA, 486 bp, Cannabis indica
atggctcacaataaaataagagatttttcagtaattcaggagattgtctttcagaaaatttagccatccactttctctctatagccgaccctctcattctctcttttcttctaccaaatttcgaaataaccttgagtgtgtgagtagatctaaggtcctggtaaaataaattccaacaaactattcatttccaagaacattttaggtatttgcgatgataattttttattgcaaatacctcaaatgtcactgtaactattttttaacattagtttaaactataactattttaatcttgaaaggcatatattatacatttatttttttcaaatcaattatttgaacaccaaaaattaataacaatgaaaaaaaaataaaaaataaaaatcggtttaaacgggttaacccgaccaaactaacgaaaatcattgggcgggttagactttttttttttttttttattggacgggttacaattagatattt

SEQ ID NO: 291933 - DNA, 427 bp, Cannabis indica
ttttttttttttactttttgtttacaatatttttgttactggtttttttctttaaaaaaaaaattaaaagggtgcataaaataagatgaaatagacaaacaattaaactaggtggtgagtaaaggtactactttgacacattataggtcattaaattataagttcttaccttattacaaataaacaacatacaaaggaaggattaattcttttacaaaataagaggtagttcacaatttctcatttaaagtccacactattgaaaaaattagatcattgccttaaaatacgctttctacaataataaatttgcaacatttatccttagccaacttcaaagccaagcaaacagaagcgaccacaaagagtgtttggaattgtggtttgattatatatttttttgtttgtttatgtgttatattataat

SEQ ID NO: 291934 - DNA, 707 bp, Cannabis indica
atcttcgcacttttggttgccttgcatatgcttctattttggacagctcaagtcataaattttccccaagatctcgggcttgtgcattcattggatacccagttggtatgaaagcttatactgtacttgatcttgaaacacatagaatatttcactctagagatgtcattttttatgaacatatttttcctcttcaaaatacatgttctaatgataatattgatgagtttttttccaaccctaatggttcacctagtggtctttcacaggctccttaaaggctgcagcccctgggcctataaaccctccaccgccgctcgaacatgtggccactcctgccactattcctgctgaattaccacaaccaccagtggctattccagcccctacaagtgactccaacatcaccacaacgtctggtcggacggtcattcgtccatcccatctctaaaactacatttgtgagtattctacctcacatcccatttccaatttcatctcctatgacaaattttctcctaagtttcgtgctgtcatttcaagtgcttatttggtttctgaaccaacttcttattctcaagcttccaaatttcccgtctgggtaaaagttatggatacagaaattgttgcacttatagcaaacaaaacttggactgttgtctctcttcctgctggccatcaaatcattggttgcaaatggggtatat

SEQ ID NO: 291935 - DNA, 919 bp, Cannabis indica
tgttggctttgccaaggcccacatagggcggctgcttgcccccaccagtccaagttgagtgccataaaggcatccattgctcaagaggagcaaggatgtggggaagatgatgaggatgaagactgtgcgcacatgagcgctgttcgattaatggctgctcttaagaagcatggcgtcggagggaagaaagcccttgggaagggattgatgtttgtggaggccactttaaacggtaagcaggccaagagcgtactgattgacaccggcgcaacacacaacttcatctcagaaattgaagctaagagggtgggcctaaaactggagaaagatgcgggtcgcatgaaggcagtcaattcgaaggccatggccacaactggagtggccagaaaggtgaatgtcaagattgacggatgggagggacaacttgacctcgtagcggttcgcatggatgacttcgatgtggtgttgggaatggagtttctagcagagaagggggccattccaattccagcaacagggaatctcctgatcatgggtgagaatccttcaatggtgcccgctaaagtgagacagcccccagaagtcaagctactatcagccctgcaactgaagaggggcctgaagaagaagaggccaacatttgtcatcgctcccaccgtgtacgacgaaaaagtggaggagtccactccacctataatcgagaaggtgttagatgaattcaaggatgtgatgccagacgagcttccaaagagactgcctcccaggaggggagttgatcaccaaatcgagctggtgccaggtgcaaaggccccagctaaagcagcatatcgaatgtctcctccggaacttaaggagttgaagagtcagctaacggagatgctggaggcagaattcatcaaaccctcaaaggcaccttttg

SEQ ID NO: 291936 - DNA, 547 bp, Cannabis indica
tgaacaagcctctaccgcttttgatatgtggaaaatgcttgaagttactcatcaaggaactagtgttatgaaagagactaaaattcaaatttattccactcaatatgagaactttaagatgaaggcggatgaaaccattgctaacatgtatactcccttcactacaattactaatggtttgaactctcttggcaaggtacttactcaaaaggatatggtgaccaagattttgagaagtctcaccaaggcttatcaaggaaaggtggttgccattcaagaagccaaggatctctcaacacttcccttggaagaactaattggctcactcatgaaccatgaaattttcatgagtgctcaagaagaagaggaagttgagaagaaaaagaagactattgcattcaagtcttcctcctcccatgccattagtgaagaagatgaggaaagcttatgtagtgacatggaggacttggcactcttctctaagaaatacaaaaagttcatgaaatttcaaaaagaactttgggaagaggccacaaagagggagtga

SEQ ID NO: 291937 - DNA, 615 bp, Cannabis indica
tttagaattaaagtttttaaaataatggtagtgtgatatataattgattatatatgtatatatatatattttttttaaaaaaaaataactatagaaattagtaactagtaacttgctactttgtttaataactagtaagtaatttaataattaaaattttaatttggttgtatattgcattatgttataggttgtgtgctaatatttgagggtcgacatatttcggtgttgatcggatttgcaataggtatatccatccgctaaccttttgttattataattaattatcaatgcatgcttagttgagtttgaatatcttaaatattcatccgtagtgaagtaggttctgcgaatacatgtactgcggtcggatgggtggataaattttgtattgtttatgttagtttgtttgttctgtattgttatatttgttttgtttgttactttaggcacttttaaaaattttgggaacgtccaattacagccgttatgctgccaaaatttcggtagaattagaataaattttacttaaaaaacataaatgttaaaggaaaaaatgttgggaatattttacgaggatctagatttactaacaagtatgttgaattaacatcc

SEQ ID NO: 291938 - DNA, 378 bp, Cannabis indica
ttagggcataaaacccaacaaacaaggcttgcttagatgcttccggttgccttatcagcttcctagcacgtgctttgggcgcgtggcggtgtattaatgaccatcattactgtagttatttgctttttgcaggtgtcgattcgtttctagtccattattgatacggcgcattaaatgggtgtcagacgggtactcaaacattttctaccgccttgatgacgatttaatccaaccgttggatctgtagaattcaaatcgatcgtcatcctaaccgttcgatggtggctgatcacagctgtttcacacatgttctggcctataagagccagccttcttacttcatttggttactttcagcatttcaccaaatttcctcaa

SEQ ID NO: 291939 - DNA, 711 bp, Cannabis indica
gcacttgtcaaatttcatggagtgatgtcaaactttcaaagtcaatggagttagtgatgaagccatccgcttgagacttttcccattctcgctgagagagcgagccaaaagttggttcatctccttgccacccaactccattgcaacatgaactaatttggcgacaaagttcttgtccaagtttttttctccagcaaaagctgccaagctgcgaggtgaaattaataatttttgtcaactagacaatgaatctctctatgaggcttgggagaggttcaaggatctcatcaggaagtgtccacatcatgggatcgaaaagtggatgttggttcataatttctacaatgggttgattggtaatacaagaacaattatagacgccgcagctagtggggcatttatgagaaaaagtgtaaacgaggcctatgatctgctagaagaaatggccatgaataaccaacaatggccaactgaaagaagccaaacgaagaaagttgctggtatgcacgaggtagacgccatcaccaagttgacaacccaagtggaggccctaacgaagttgatgtctgctcaggtgaaacaaggtcaagttacttgtgagctatctgggggccctcacacatatgacacctgctcggtggatgtgaacagtttgccaatgagtcaagcaaaggccattgggaactattctcaaaacaataattatgggca

SEQ ID NO: 291940 - DNA, 676 bp, Cannabis indica
cgagccagatggcaattccaaaagatatgcaacgagtcttcattaccaaagaacatagaggacaatggatcattaaggccaacaagagttgaagtttacctcgagttaataggcaatttgagagtattctccaccaaagcattttcagtctcgggtgcatcttagccccccataaaattcgccatttttcattaccagtgattccttgatcaaggtcttttatggttcggtaggctgagcggatagtgaatttaccattgctttcgggagtccacaaccaagagtcttccactgggtggtttggtaaggtaatattcaaaattcttctgccatcttctggctggaaccattggtggacaaggtcctccctccaggtggagttgtgaataaagttgcacactaaactgatggattgaatacgtgtattattatttgatgagtatattatgagtacattaattgatctctaaatttattaacaaaattctaccctaacactaaaaaaaatgtagaattagcaactttgttaatttgtggtgctcattaaaagaattagcaccacatatttgaaaagagaaataaatacataaatagagaattttttttaagataacaacttacacagcaactatcatggtaactcaaactgtaaaaaattaaaaaaaaaaaacgaata

SEQ ID NO: 291941 - DNA, 483 bp, Cannabis indica
agacatgctttataccacagaaaacatccacaacatacagcagcaacaacaattaaaaacatcatgcatgcatcaccattttcatcattttttttcaagaatttaaagaaggaagaacaagggctaacctagcttgcaatggaccttaagatgagatgaatcaacaagtaaaatcagtgaagaaatcagctccttgctgcccaagctttggccgaaaaagagagagagctttgagtgtgtgagttttgaaattttctttctaattttgactaagtgtggaatttaagagaaaaaaggagtttataaagcatttaacacattatttcagccaagtaacattagaataaataattaatcttcaattaataaactcacataaaacaaaacactaatggggcaaaaagaccattttgcccctccaccataaaatcacataaaaaatcactaaaggggtatttttgggaaattctaaattcccggcca

SEQ ID NO: 291942 - DNA, 681 bp, Cannabis indica
gaagcatgggaaatccttcaaattcaatttgaaggtactcctgatgtaaagagatcacgatttaccatgttgcaaactagatttgatgaattgagaatgtcagatactgaaactttaaatgatttttatgaaagattatctgatatttctaatgagttctttgccttgggagaaaaattagatgaatctgtcttggttcgaaaaattgttcgagttcttcctgacaggtttgatacaaaattgcttgcaatggaagaggcaaaagactttggcaaaatgaaggttgaggaactcatgggatctttaagaacttttgagttgaatcaacagatcaagaaaaagagtaagcaaagtctctcgaatgagaaaatcaatggtaatgctttcaatgattctgaaattattgtttctgatgatgaaaatgatgatgaaatggccttgttagcaaaaaatttccaaagatacatgaaatctgttggaaataaaatgaacttttcaaagaactcaaatggtaacatttcaagtaacaatccctctaaacctttttcatctaacaaaagtattcgttgcagagagtgtgaagggtatggtcatattcaatctgaatgtgccaataccttaaagaaaaataaaaagggattgaatgttacttggagtgatgattctgaaagtagtgaagat

SEQ ID NO: 291943 - DNA, 591 bp, Cannabis indica
attcctttttgagataattgttttgtgaatttttttggttgatcatgctttaattaaataaaataaaaacacttgttgataactatcccataaatgatgatgaccaaactaaatcatatataaaataaaattatttgcagaagattatttcgaccttgtaaaagattttgtgaaacaaaaatttgttgggacaataaattaaataatttgtaggttctttttctcaaatttaaaatgttgttcattatttcttctgttgaatctgatgacattgataaagtgaagaagaggattgttgagattcatcggaataatgaagggatacaaaattagtgttttttttttttttttgttattatttttaatttttttaagttaaaaaacattttctttttatttttaatctttagatgattgtttaaaataaaaagaataaataaatccacctggatcaatcacaacgttccacgtgcgtactgacctgacacttaacagttagacacttatggaagttataggaccctaaccgaaagtatttttatcgctaaaaaaatgagagatatttaactgcaactcagagttaaacttaag

SEQ ID NO: 291944 - DNA, 763 bp, Cannabis indica
caatctcaaatacaaaattgattaaacgacttagcactttattaggcaaactaagataatcaacgcactaattgagccattagaaaagtattccagaaaattagtctagcatgtagaaacaaaaagtaagcaaagatttaatgggtaatcccaatattttaattaataacatgggtcttccatatataacacaataagattccaaaacaaaagtccagccattttcataattaaaatcctaacccaacaataattaaataaataaaaagataccagcgactccagctgcatccttgcaaattgtaaagagcgaatgtgaaactgaaagaatcatgaagaagatgtgcaataacattttcatacataatattttaaattattctatcttttatgttttccagaaagaattttatgaccttcaagaaggtatatacgatgagcttataaagaagttttcaattttttttttataatacagagaataacattgtgaatacagaggataacatagtaattctaacctgatacaataaatatcccaaatgtgtttaactttgagagataatatttatcaacaatgcctaatgctactccaccaaaaatagctgcattcaatattcattaaaaacagaaaaattttaatcaatattgtactgccaaacataaatggaaaggaaatcacttaaacaattaaataagaagattgggagttcacctaatgaaagataatttgttgatgcataattcaataataatgttgctg

SEQ ID NO: 291945 - DNA, 553 bp, Cannabis indica
atcacaatactaaaaattatactaaaaaaaaattttattacaccaaaaatttgatattaaattaatattttatactaaaaaatattttgttctgagcaactcggagcgggttgggtccaaggggagagatcaatttatccccttcatttcggagttaattaaccgtcatgcgttgattgatttgcctattaagggggatatcatgacttgggacaatcatagagcggtcctaatcacgttaagtcagccctggacaaagctctggtaaataataatgggctgcaaatctttcctaagacggtcgttcggtctctcaccacctgtaattctgaccatcgacccctctttattaataccgtcactacagtctctaacgccagaaggcctttccgctttgaagcttggtggactagggaccctcgtagctccttggtggtggatcaggcatgggggtcgatttcccatgattgggcccctgctagagtgtttaataaagttggtgcgactcgcctggccctgagtattggaaccgggtgcaatttggcaagttgga

SEQ ID NO: 291946 - DNA, 610 bp, Cannabis indica
ttaattaattaatatgatattttaattaattgatatgatattttaattatttttaatgtatgaactttccatttttctatcaatcatcaaaaaacatggttggattgtattagcatgttgtgtacttcacaactttattcgcaagtggaattgggatgatgaatttttcgaagaggacatggaaaatgaaatagctaggaaattgtgaaagtttgaacaatattgattttgattcagattcagatgaagaacttggtgacgggccaacagatgatgacaagcaatatatgtttaattttagagatataatagctcaaaatatatggaacgcaagaccaattagatagtcttaaaaaaattattttaaatatttgctactaaattgttatagttttgactttattttatgaaagagattattatttatttatatattattaattgaacgaaatttatttctaaatattataatattaatttaatgtgtaattactaactatcatgcaaaaacatgtatattaagaattcacatgtaattaccacttgacatccaaaacacaccttgtattttaaaaatacaatgtaattactatacagtgtaattactacc

SEQ ID NO: 291947 - DNA, 583 bp, Cannabis indica
gtctactacccggaatggctagccaatccggtcctggtgccgaaacctaatgggacctggcgagtttgtatagacttcactgatctaaacaaagcttgcccaaaggattgtttccctctgcccaggatcgaccagatggtagacgccacctccggattcaaactactgtccttcatggacgcgtacgccggttacaaccaaattaaaatgcacgtagcggatcaagagtgcactagcttcaggaccgataagggggtatactgctacctagtcatgccttttggactgaaaaatgctggcgcaacttatcaaagaatggtgaaccggatgttcaaagacctcctggggcgaaatatggaggtatacgtggatgacatgctagtcaagtcaaaagcatgcactagccacgcggacgatttagaagaatgttttgaagtggtccggagatacggaatgaaactcaacccgaagaagtgcactttcggggttaagtcagggaagtttctgggcttcatcgtcagtcagagggggattgaggcaaatccagaaaaaattaaagctctcctgagcatgccatccccaa

SEQ ID NO: 291948 - DNA, 985 bp, Cannabis indica
agagaaaactgtgactgttttctctggtgtgtgtcgagtaccatctgagctgtgattgctctggttattgtaattgtattgttgctctcttattcacatattaatgaagaattggtgatgtttctcagctggagtatggccagggatcatgttgatctctaggaccggaaccaggataaaatcttgtgttgttctttgtttgatttcgggtttgattcattgtgttgattaattggtttatgttcattattactgtccaagtgttgagattattgcaggtttatgattgaatcctcaaagttatttccgctgaaattacaacaaaatcagagcttaggttcaagatccaattgaggaagtcaagaatcaagattcaatcaagactcatctgcaaccagttatgacaggatcagcaagatttgaacttgagaagttcaatgggacaggggactttggcctatggagggaaagtttgaagggaattcttgttcatcaaaaagttggccaaggcattgaaacccaaggaagaactcactgacaagttgcagaaggaagaacttgaagatatggaggaattggcatattacactatcataatgtacttgtccaatacagtgagaaggaaggttcagaatatgaagacagctcgagaactatggagcaagcttgaagagatttacatgaaaccctctctaactaacaagattaatttgttagaatctttatatggttttaaaatgtcttctcatttgtctttagatgataaccttgatgtatttaaccaaatcattataggattggctaacttgaagcacactgttgatgaagaaagccaagctgtcattcttctcagatcattgccacctgcataccaagaattgaaggttgtgatcaagtatggaagagatactctcacccttgatgatgttcttggagccttggagtccaaagaacaagaaatgtccaaggagaaagacaatgtcaa

SEQ ID NO: 291949 - DNA, 914 bp, Cannabis indica
aagcaaacttaattaatactttgatgataatatcatcaattccattctcagcattccaatcaatccttctaacagcgattgccttatttggaaacatcacccttcaggttgcttcactgtcaattctgcctaccatttggcaaactctcattcctctgctcctagttcctctaatcctgttgcccttaaatcttggtggacatctgtttggtcttccaatataccccctaaaattaagcattttgtttggaaagcttttaaccatctccttccttccaatcttaacctttttcatcataaatccatgttttctccttcttgctcaatttgctcaactcatttagactctaacactcattccctaattacttgttccagagcaggtaagttttggaagaactattctttctctaacttttattttacaaataataaatgtgatattaaagaatttttgcttcgtggctttgaacattttgacaaggataatttcaccctctttctgggttctgtttgggcaatttggaatagaaggaataaagctatttttactaatcacaactacactgacttggatgtggaagcatcagttttaaactacttgcaggagtacagggatgctcaattgaagatcaacactccatcctccctcactcatctagcagcaccaatttgcagcctcctagcggtatgttttcaacttaactgtggatgtggctcttttctccagctccaacaatcatggttatggtgccatagttactgattccacagggcaagtcattgcttggttttttggcatcttcttcctcaggcctctccccaatttcgccgaagcagaagctctacaacgtgtctttgttttggtgtcaggctagttcgttttcctctcagcactattgtctccgactgcc

SEQ ID NO: 291950 - DNA, 134 bp, Cannabis indica
tttaacattttatcttattagacattttttattaaaattatattttggcaaaaataacatgaaatttgaaaaattggttagtttaggtttgaatagatattttagggtttcaaaccataaatttttcaaactta

SEQ ID NO: 291951 - DNA, 569 bp, Cannabis indica
aacacaataaatactaacactatgtaaaaatagctgtaagagcatctccaataactgatataaatgtaaaatatagtccattttattaaagagaaatattaaaggacaccagtggtgcctaacacctttctatgtatcaatatcactattagttcaactaagtatcgaatcgcaacacgacatgtcgagaagatgctaggcaccactgctgcctaataacaatgctctttattaaaagtctactctaatagtatactaaattatgatacaaaaatctcacataatcaaaagtaatccaaatttatatcacaatataacataatacaaaatttacatcacgatatatttttatatttactattatgtcatttttaatattttattattaaattttagctaacatactcctgtgcattaaatgattacattattattatttaatttattaaaatttacatttaattttgtattattattattttatatttttttaataaattattaagtgagcattgaatataacatattaaattttacatcaagatctacaattatgcattgagaaatgc

SEQ ID NO: 291952 - DNA, 671 bp, Cannabis indica
tttacttgatgaaaaacgtactgactcgtagattactaatgcatcataccaacaacgagtaacaagatacttcaacaaaagggtgaaaaagaggctcttcaacatttgagacttggtgctaaggtgagtatttgcatatacgagagatgcatctgcaggagtattcaacccaaactgggagggtccttatgtgatcgaagaaatagtatgaaccggggtttacaatatggctcagctgaatggctcgctgataaataactactcgaacgtggaacatttctgaccctactaccaataaattgatgttgtaactcacaatcctgatgtaatattttgaacttcagttatgaataaagttaatcattttttcaagtaattacaaagtattaccctttaaaattgggcatatgtgtatgattaactagaatttatctggaaatacatggtatattgcaaacccaccactttaaaaaaatttcaaaattttttaaagttctttttgattgaacctttctgacaagaaaggaaaatcaaaaattgtgaatgacgttcgattaaacctttctgacgagaaaggaaaatcaactcataagccacatgcaaaactgaatgctaacggctcacattggataggaaagtattaaacaagacaccaagatgccttgaaaaaa

SEQ ID NO: 291953 - DNA, 591 bp, Cannabis indica
aaaaagaaggcaacaattgaatgatgggatggtttaagttcaaaatgagtggcattagtagtaggcaaaacaatgcatgatggagcattagatgaaataggtgaaaaatattcaagtagcgttttttcttgcgcaatattaggttcttgttccattatgcttaatttttcaaaaacactttcaatttcacctaaagttactactctttttaccaaacaatttttagaatcacgttgccaatgatgcatgcaatgtcacaaatttcacaaatttcacaaagaaacaccaagtaacacaaaatattctcaagaagacaaatttctgatgtggaagatcagttataaaccgcaaccacagagcatacttataacacaaagagattatgatttttttgtaaagttttaatttttcaatttttttggtttgacttgttcccagacctatttgattccacttactcacgacttaataacaactcctcagggttaattattaagtgtggataggaactttgccgaatttcctttaagcaaaaattgcttatgttgaaagaacaagctttgtttttaatttttttttcaagtattttct

SEQ ID NO: 291954 - DNA, 951 bp, Cannabis indica
gtttctttgtctttgtatgcctgtcctttttccacttcggggtgttgcttgtctgttattaactttgcattgttgatgtcgatttctggatccagttttttactggtgttttcaagttgttctaccatttcttcagcaaccagatttgcatagtcaattatgtcgaatttgtcctcctcatcttctattgtttctgactgttccccttcttctgtttgctgtcccgttgtgtatgattctgttgttgttatgttgttttcaagcgttgttgtgttgttttcgatcattgccacattatattcatacggtgttgttgtggatatcgaatttggtgttgcagcaggtgttgtgttgttgttttgctggttgacacatagtggatatgtcgtgaaatctgtttccttcattttcaattccaagtaaaagtagaggcttcgatcgttgcatatttttatcggtggttgacacatagtggatatgttgtgtttacctctgtttttttggggacaatcttctgtaattcttgttcttcgattatgcttccatttaccaaaagctcttcgccggatttaatggttttttcttggttatctccgactccgacgactccacaaacacgaagtagcccgtttttttgtgttttttactgttcacagtataaatgttaagtttttgggcttgggcagtataaaagtaaagaaaacgggcttgggcagtaaaaaagttgtttttgccgtgtcccagtatttttgtaaagtttttgtcaaaaaatagtatatatgtaaatgtgcctatataaattttgttgtcaaatatatttttatttttgttgtatagtatatttatatttcttagatacattttattttttatttttcctatatataaatagtggtatataatttttgttagtcaaaattgttgtgaaaaattgtgtacgcaagtatacgt

SEQ ID NO: 291955 - DNA, 790 bp, Cannabis indica
tattattctaatttcttttaattgattaggatatataaagaagcaaccactactagtctactactagctagaaaagaaaaacaaaaagaaagaagaagaagaaaagaagaagaagaagaagaagaagaagaagtagagaggaatagaaaagatcttaattcacattaaaatttggttacgtacgttatattcttaatttggaatgcatgcatataattatttatttgtcgaatataaaaatgtagtagaaatgaaataataaggcagtacaagaaatgttacttttaccagcacagttcgctattgtgctggtaaaggtaacttttaccagcgcttttcgcaaactgtacttgcaaagaggtcaaagttttaccagcgtacatttgcagtggctaaaatctaactttgaccagcgcatttacgtgctgggaaaagttatttttgccagcacttttcattttatactggcaaaagttctaataccaacattgatttgccaaccctcttttgccaacacatcacaagtaaattctattttaccagcgcaatactaacttttgccagcacaaaaatgtattgacaaaagtgacatttcttgtagtagtgatggtactattattagtagttataaattatttttaagaattatcatcatctatattgtggacattgtcccacataaaataaatggtaaagtattgagtcgtatataagaatatatgctactctacttgtaacgtccccctattcatggattgattggtactacctatgtcaacaaggtgcatct

SEQ ID NO: 291956 - DNA, 743 bp, Cannabis indica
atctatagtgttccagcgaatttacctgctgctgcaaatttaagatctgctgcaacaaaaatgtcgtctacagaagcaaagtctccagtaagttcaaaaaggataagatctcaggtaagaaggtttgttccaatctgtcatttttgtggtattaaaggacatatcaggcctaaatgtttcacgttgcaaaatatgtttaaaacaaattattttggtaatttgaaattttttcaaaagaaacatagtgctttgaaacaaaaatggattgaaaaagaaaaatgtctagctggtttttctgataaaagtgctgcttctcaaatgtggtattttgacagtggttgttctagacatatgacaggtgacaaggattttttagtgaatatcagaccaatgcaatgtggtgaggtcacgtttggtaatggtttaacaggaaatgtcattggtatgggaactctcaattttgaagggttaccaaggttgaaaaatgttatgcttgttgagggactaaaagctaatttacttagcattagtcagatttgtaatcaagggtataccgtcaattttgacaatgatcattgttttgttcttaacagtgataaacaatgcattttacaagggtttagatctgttgataattgctatactctcacatctattcttacttgtcattctgcatgtgaaaataccagtgccataaatatttctaaaaatcctgttcaacattctagaacaaagcacattga

SEQ ID NO: 291957 - DNA, 325 bp, Cannabis indica
tttttcctacttaatttttcgtatttatttaaatgttaattaaatctaacctaacctaagcggttcctataaataggtagtgatggctaaagggaaaagatgatgcatctcattccttcagtataaatttgagcctcttctcctataccaaaaccgaaaccctatctctctcttcctctcttcaaaaccgaagccacatagtgaaaagaaggagattcggactcagatcttggtgataccctgctacagattggatataagggttagagatctaagtggaaggagacattagattccgctgcaaccactgtaaggttcctgatac

SEQ ID NO: 291958 - DNA, 607 bp, Cannabis indica
agaaaaaattgtctatgtgagaatgatgaatcgttccttgtaaagggtatatggattcataaaaaatgacatctcgtgagtgaaaaatgtgtttggtctcaatgtcaaggagggtgtatgctttcatatgttcaggatagcctatgaatatgcaagctttggcccgaggggcaaatttatgagggatgtggatgttggaagcataagcgagacatccaaaattccttaaatgagtatattcgggtggcttgttgttaagtaattcaaaagatgttttgtccttgagcagaaccgatggtgttctgttgagtaaatatacggctgttttgaccatatagctccaatagggtagtggtaagttagattggaaagctaatgctcgagcaacatttaaaatgtgctggtgctttctttccactacagcattctgctgtggtctgccaacacaggaattaaaatttgttgttccttgctgagtataaaaagaattgagtgttaattcctttgcattgtctgttcgaacagacttaatgtttcttttgtagtgaacttgtacaaaagtgaagaaatttttaataatggtgggagcatcagattttgctcgaag

SEQ ID NO: 291959 - DNA, 538 bp, Cannabis indica
atagtaaatagatcctggtaaaataatttccaacatcatattcgacccagatactataagctacagaactacttgaaagctatgatcaatcgacctatgagttttcaaaaacccaataaaactcgaaaggaaggatctcaatgtgagtggagattgaaggctgatcgtgaatcgaatgttgggttggtagctcaagtttcactgtctccatttctggaaggacagtggtacttggatagtggttgctctcgacacatgacgggcaacaagaaattgttagtcaattacaaagaagcaaaggagggagttgtcacttttggtgatggaaataagggccatattattggaaaaggagacttggtgatgagtagagctgcacctcttactgaagtactgtatgtgaaaggactcaaggcaaatctgataagcatcggtcaactttgtgatgcaaattacactgtaagtttttctaaaactcattgtttagtttcatttgatgggtgctcagtcttaacagggaagagatctagtgatggta

SEQ ID NO: 291960 - DNA, 708 bp, Cannabis indica
acctatatattactctcgaataaagaaggaaagagggttgtgactctcgaataattagcatcaaatatcagttcaatattaatgggatttgttttatttttattttattattttattatatataaataatattttattattttattaaatataaataaaaagtcacccatgaatttctcataaaccaagaatttagttatataggcacactttatgtagaatagatatatatatattgttaagtaatttgtgagaattttaagcttaaagattaaagttttatgtgattaaattatgaaattaattttgtaattttgtaattttattgattatataaactaaaattaattgtgcttaaatgatttctaattgtttaataatgttccttaatattttaattaccgattcagtggaaaaatttataggtatcataataaactttctctttgaaaattttgaattacacaaattaactctaccttcagtttaagtgttttactacaaattgataccatatatctcttcgaaattggatcttgagcaaaattcctcaattttcctattgtttttgtctaatttttggtccaaaattttcatcccgacctgttaggtacaaatcaggtcacgtaacccgcttcagatttgctagaggttgaagttaacctctccccagtcgatgccccactcttggcagcagcgcgtgtgggc

SEQ ID NO: 291961 - DNA, 499 bp, Cannabis indica
tgatggcattagtgcctcctagcttttatttttgtttatcattttagttgatggcatcttgtgcctcctaaaatcttattattattactactactactactattattattatagttagttgatggcattttgtgcctcctaactttaatataactatctatcattattattgtcatttttttattgtatttatttagttgtaattttatttactttgcttaagaaaatacttgaaaaaaaaaattaaaaacaaagcttgttctttcaacataagcaatttttgcttaaaggaaatttggcaaagttcccatccacacttaataattaaccccggggagttgttattaagtcgtgagtaagtggaatcaaataggcctgggaacaagtcaaaccaaaaaaattgaaaaatttaaaatttacaaaaaaaaaaatacataatctctttgtgttataagtatgctctgtggttgcggtttataactgatcttccacatcagaa

SEQ ID NO: 291962 - DNA, 572 bp, Cannabis indica
tctctcaactctctctctctctctctctctctttcggccattagaggcagcatgatttagaatgttgattcaagcactgattgtgttgatgatttatggttttcaaagtgaaaattgagaatttggtggctgtagttattgcatgaattagggtttgttttcttcagtgtttttatgcttgattatgtagttctaagctagttttgaggcttgtaagtgagctttagccaagtttgagtttcaactcaaagcttggagctcacatggtgatttttaattctgtgctttctgggctgtattgatgctttagaattgttctataggatgtttagaacaggtctggaaggttttgtgtgatttggatttgatttggttgagttatgaatttttgaaattctgcctgcgaggaaccggaattccggttgtgcatccggaattccggatgggttttgaaaattcccagaaccggaattccggttggacaaccggtctgccggttgggtgattttcagaaaccctagttttcctcgtttttatgttatttggggtattgccatgctttttatcgatag

SEQ ID NO: 291963 - DNA, 590 bp, Cannabis indica
gtatgatattgctaaaacttaataaatacattaatggtatgtgtgatattatatggtattgtttgataagcatttccttactgagcttttagctcaccccccttactttccccctacaggtattagacagggaagtatgtatagtgagcagggtcagttctggtacgtatactgtgagcggctacggacggacaaacgatctagaacgccggtggtgccttagttttattttaagcagttgataaatctaacacagtggaaatgcattatttaaaattatttacttactgtatcttgttttacaaatgaaggatccttctctgttgcatttttgattttttaaaatccactgttgtatttaaatttttttttttttatcttttcaaattatgcatgaaaatagtatttttgtaaaataaggcaaaatatcggggcgttacatttagggtgttaatcaacatacttgtgagtagatctaagatcctggtaaaataatttctaacatgatccttgtaaacaatacctcgttcggggttctcctttcaactaacacaaaatttgtgtaaagctgccaatgatgaattgttaga

SEQ ID NO: 291964 - DNA, 545 bp, Cannabis indica
ctcatccacttttgacaatttaactattgcgttcaacctagatgagagagttccttctatagtgatttcacctccttcattgttctccaccatatttgaatcttgagtgatagagtgccatgcccacacatagcaagtcaagtactcaatcatagtgagtaagacgctggtaacaaaactcgaaggagagaaagagatccaggcttagatctcatcgatcggaacatggaggtgtatgtggacgacatgcttgtcatgtccaaaaaggttgggggcatgtggaggacctaggcaagtgcgtcaaaatccttcacagctacagcatgaagctcaaccccctcaaatgctcttttggcgtaggcttgggaaaattccctggcttcatagtcaacataaggggaatagaagcaaatctagacaagttccaagcccttttagacatgaagtcgcccacaactatcaaggaagtacaaagcctaactggacgcattgctgcactaaacaaatttgtgttcaaatctaagacaaatgcgtactcttcttca

SEQ ID NO: 291965 - DNA, 547 bp, Cannabis indica
tgtatgtaaaaggttactaagggcagaatctagatatccccctccagaaaaactcacgttgtgcctagtccatgcgtctcgcaaactacggccatacttccaggcacaccccataaaagtgttaaccgataagcccttgagacaagttttatcgaaaccagatgcttctagaagattgataaaatggtcgattgaactggggcatatcgacataccagaccatccttaaatttccatcaagggccaagctttggctgacttcttgatagaaggtataactctagaagaaattccacctattcagtgagacgcggaaacttggaagttatacgtggatggtgcatccaacaaatagggttcgggtgcaggggtaatattaatatcaccagaaggctttaagtttcactatgctctgaggttccaatttgacgcatccaataacgaggctgagtatgaagccttgatcaccggcttaagatagcagaggcattgaaagtcaaagatctcacctgtcatagtgatttgcaactgatcgtgaaccaggtcc

SEQ ID NO: 291966 - DNA, 701 bp, Cannabis indica
catcacgctgaaaagatcttctatctttcagatgagcgaattgtcggatagccagcagctcggctcgtgaggccatgcattcgatggcgacgatgaccaggaggaagacagctttctcccaacctcgatttcagaagaggaggccacaccaatagagctaggcccgatgtcttctgcagacatcgaaagaatggtgcaggaacttgccgaacctgggaccatcgacattcgagacagcgagtccacggtgtcggcccgcgactaccttattcattcgaggcacgctcctgatgtcgaagttgaggagatggacgatgactggacggccccagctcgcgaatcaggcgaggatgaagaagaggcggaagggagtgggatagattcggtcgacgatacccagctgaacgagccctttgcgtgtgaagatctgatttcgagggttaccaaatcagacttcactacctttacgaggttaaatctgctgcgacttgcgtttcagcgacctaaaccgacccaaagggcgcatctcccttttaccaaccctgcgattattcccacagaggatgtggtagtctcaatacccattctccgagtgtggggtatcggtccccttccatcctttcatcgcagccattcttaggcgatacgatgtatcaccttttcaactaactccaaacagttatcgcactgccctagccttc

SEQ ID NO: 291967 - DNA, 594 bp, Cannabis indica
ctaattggtatcttttttttctctgaacaaaaaattaaatggtatcttaaacattataaaatttaaaaaatttattttagttaacactatactcttttgctgtttaagatgcttttacgtttttttttttttggtaataatatttaaattaactttaaaatccgtttgagagtcaaacttaataacatcaaaatattaccagaatcaaaagcaatattttgattttttttttttaattatattattaagagatatgtaacaaaattttaaattaataaaattttatatattaactaaaaaaagacttaaactcaaataattgtcagagtaactaaaaagattttaaaaatcataatatagacaatataatttccataaaaagtaaattattataatacacagctcaaataattaatggttcaactaaaagaatttgagcaatttgcggcgaaacccccttatgttttgatttttatacacttaacccccttatctttatttttggtggcaaaacccccttatgttttaatttttatacacttaacccccttatcttttttttttttgtggcaaaactcccttatgttttaattt

SEQ ID NO: 291968 - DNA, 669 bp, Cannabis indica
gacataacagtactttcaataaatgagctaagatggttcaacatttaaattacaaaattgaatttttaattaagtgagctaaattttagctatattatatatttttttagcttaataaataatatttaactgaatgtaaagataaaaataaatatatttatcattttcttaactttttaatatatttatggtaatataatttatttttataccgttaaaatgatataagaaaaaaaatacataaattgatgtatggtgtaatataaaaatttaaagtaaaataaataaaatgggattttggcgatatgttttaaaaagagaattactaaaaggtactaataatgctctttaagtcgaatctcatataatttaatataatagtttttaaaaaaaaaattactaactaataataaaaaagattgaattaaaaaaatgcagcatccaattaatatacttttaaaaaaatatatagtaaaaaattattaaaaattagtagaagtgctctaacatgaattaactagcacaactaacataatcactcttccctcaacaaccaaaccaacaaagaaatctctttcaaaaaaaaattcagccatcaacctcaaaagatttttaaaaaaaaaactctaaagctttttttttattaaaaaaaaataataaatctataaa

SEQ ID NO: 291969 - DNA, 391 bp, Cannabis indica
taggcgtgtggacggatcgagatggtccgaatgttggaacaagacgcgttgagccagttagtcttttaaagaggatcagtaggctgagatggagttaagacggggttacttttcttcatgggaatactggacatcctagagaggagacgttgatggttgcttcgagtcaagttcagagatgctagaaagacaactaccacgtgagactgtggagaggcgcaacagaatgtttgaaactcgttggcataggacaaggttgaggggatagtccatgctgtatgcttggtacactaggccaagtttgcctgagtgacattgtaagccgcaggaggcgcttttgtggaaaaggaagcttgctggcaggagtgtggaagtaatgcagggaccgtca

SEQ ID NO: 291970 - DNA, 740 bp, Cannabis indica
atgagtgaggtggttgagtatatgttggggtttttgtttatgctaaaaagtggtcaattctgtatcgtctgataagtgatagtggcaataaatagaaagaaaagaaagtaagagcgcaccgcaatttatagtagttcactccccgtcttgtaacgataatggagctacgtctacttcgaacttttattaatttcaaaaatgtaagttgcgcacaagaaattttgactaaggagagctccctctcacaatttcaagaaagagaaacacgtgagttctagagagagaagctattgacgctaaaaaatagacaactgtacatcgtctgataatcgatagcgataaataagaaaataacgtaaaataaagagaacaccacaatttatagtagttcacttccccatatcgtgatggtaatagagttacgtctactttgagcttttattatcgcaaaagctaattgcgttacaggagaactcgggaaaaataactaagtctagcttcacttcacaatttttagagagagaaagtgtgaagagagagaagccttgaccttgtagagataatgaaaagtgtgaatagtaagctaaggaagctctcattttatagagaaggaggtcctattaaaatacaataaaataatagaaagaaggtctaaaaaaatccaaacattaaattacttttgaacgtatcaataggattggagaaataaatacactcactcagagaaactaccgcgctat

SEQ ID NO: 291971 - DNA, 728 bp, Cannabis indica
ctttgactttaaattttagattccagatagaaattttatgtttcaatttccagaatacaatacagttcaactttcacaagtgtttaatatccattttctgtcaatggattcaaactgtatgttaaagtatggaatatgagtttagaattctgtgagcaggatccacttgcactattcgaagaactctttaatgtaactagacataagtcatcgaaataccacaaccacatattttataaatctatggcatttgtatcttgttcatagtggtttagacaagatcattctctgttgtgaaaattatattgctttataattgcgcaagtgtacacaatcacaaacaagtaatacaatgataaataatcaaagttcgtctccacagggactttttactaaataatgttaaatcaactaaaagtaattccaagaatttcaaataaaaataaaataaagtcacacattaattcaccaaaaaaaatttatagccttgattctaaacttgagaactaactttttaaactaaataaactaaaaataagaaactaaaagtgaataaagtggtagtaatttcagattagggaaataggcttgggtgattaatttccacttgtatgtcccagttgatactaacaatgacccacgcaatgactcagcaatcctggcagagttaacaaatttcaaaaaaatcagcaagctttttccaaaacttgcaataaaccattcataat

SEQ ID NO: 291972 - DNA, 714 bp, Cannabis indica
catatataaattacaaactcaatgaaatcctaacttttattaattaaaaagaatgttttttttttactttttttaaaaaaacttccttttactatactaaaaaagtgttttttaattagaaaggaaataatcctaagccacgctctaaagaaaacgcgtggaaaataatcaaaccaaagatgtcacaattagagttgataacttagtacagtattaatgtactttagagagacacagaactcaatcgagtaaaacagcgcgtggaatgtactgtctagtgaagagaagagggtccacatagagaccatgggtgtaaaccgaccctaaaaatatatataatattttaattaattataacatgtatttttaattataaaagtgatattttttaaaaaaaattaaactcttaccattaagactcatatttactaccttaatcattagattcaaatttggaattatttcaaaaaaaaatataaaaattactaagatatagttatatagaattttatttacataaaatacgacttttttaatatatttttatattgtacttttaattaattttttattatttatatattattttttatgttttttatgtaattttttgttattttcttgtgtttttataaaataccataaaaatatataaaaaaactttaaacataaaaatgtaattttttttattcaaaaaataagtagtttatatta

SEQ ID NO: 291973 - DNA, 626 bp, Cannabis indica
caacaaaccctcaagaattcatgcacaaccatggcaaaaccaagctcttgaacaagagttcacttccaacaactcaacccattttcagccatgaaaatatcccaaaaacacatgaatccactctagaaaataacctataatcaaaatccatgctcaacaataaaattctcaaccaaatcatgcaatcacacactcaattcatcaacatcacaataacatctaagaacatgcaatcacaagaagaacacaactcaagacatgcttttaccaccataaaattcagcaagaaactcaattagaaaatctgtaaaaactacctcaattcacaccaaagcaagaacaataatcttcctccaaactctagctccaaatcaagccaaaaccaagtattttccttccaaaattcaagttgaatacaaagagggtaagagagggagagggagagggtgagagcatgaaacaaccagaaaaaatcaattcatttccctcaaaatccatttaattccatgtaaatcaattacggtcaaatgaccattttgcccccatggcttaatattcacacctacaccctcacaagggtaaatatgtcatttcatgcataataattcacaataatttcagattat

SEQ ID NO: 291974 - DNA, 475 bp, Cannabis indica
atcagaaataatactctaaagtataaaaccataggaatagagctacgtaatgcttgcaccacagtaagactatcaatttcaatgacaaccttcctccaatctttccgtttaacccaactcagtgcctccttaacacccaaagcttccaccatttcgggttgcaacacccctgaccgacagcaggtaaaagcttccaccaatgcgccagtttcatccctaatcacccctgcaaagctataagttgcagttcctgaaaaaatggcagcatctacattaatcttcaaggtgttttcagctggtttggcccaagtttcagcaccatcgacatcagtaaggaatgcagtcgtaggattaaatgttgaatcttgagcccgagtccaatctgcgagtaaagcttgagctaagtgagcaacactcgcaacagtaggggacttatcagaccatactagctcatttcgatgtttccaaattgccc

SEQ ID NO: 291975 - DNA, 521 bp, Cannabis indica
ccgaccacttaagcttgatttttccctattgatttatctttttaatccatataattaaatcctaaaccctagttgaaatactataaaaggaataagatggctctcattctcatccatctatgttaagctagttttcattctttgtcagaaaactagaaaatgagagtctccttctatagtgatttcgaattccttctattgttattcgtcgaattcgagcctttaatgatagagtaccatgcccactcatagcaagtcaagtacttaatcatagtgtagaagactgtggttatccaaaatgaaggagagaagatccaagttcaaatcttaataatgctcagctatagaaatgaatcaagggttagagatctgaacaaaatgagtcatattatttttctgccatcaatgtaaggttttctaaactttatatgtgtttattatgttgtattaggatattcatatttagggtgttagattatagattacaataaatatacatgttagcaaatctagatcctagt

SEQ ID NO: 291976 - DNA, 501 bp, Cannabis indica
tctgattctaggtgtgggtgtttgagtaggggtccaagtctgtgttcgggtttgtgtctaggtctggaccccgatctggttctaggttagggtccaagtccaagttcgggtccagagtgcgggtccaagtttgggtcagggtcaggatctcggtccagatctatgtccaacattctgatcctagtcttggtcaatgtttgagtccaggttcgtatccacatccatatttaggtccaagtctgtgtttgggatccggtcccagattttggtccatgtccgggtctcagttctgttttggtacacgaccgtgttcgggcccgagttccagtctcagtttgggttcgaggctaggtctgtgttcggttctatgtttgggtctgggtcttggtcatggtcctagtcttgttctagggtcctggttcgacgattcttgttcaggttctaattttgggtgttaggtctaggtcttggttcgggtttggttcttcgtctgggttctgg

SEQ ID NO: 291977 - DNA, 624 bp, Cannabis indica
accccaacttggacctggacccatacctagacccagatcgggatctagacctagacagaaacccgaacacagactcggacccaaactcaaacccacacctagaatcagacccaaagctagaccttgaccaggagcctgatctggacctagactgaaatccggacaggaacccaaactcagaccaggactcgaaatgtgacccgaactcaaacccaaaatcgaactcataatcgcaaatagaactagactcgaactaggactaggacaaggaccaggaactaggacataaaccgaaaccccaactaagatcaaaatcacagagacctaagcccaaaccgagactaggactcgaaaccgaacctagaccgagatccaaacccacacaataaccgtgacttggtcccagaattacgatagggacctcggaaacagaactagaactgagaccgagtacccgacccagacacgaacttgaacataggacccagctcgtgagccggcaccagaaccaagggcttgggcaaaacctgtaatctgtgtttggatttgggaccctggcctagacccaaaccctgaccaggactcgaacccacacttggacctgaaccaagtcccaaaaacaaa

SEQ ID NO: 291978 - DNA, 372 bp, Cannabis indica
attcaatcaaactcattagtattttacttagttaagatgctaattaggtttatgttgttatacttaaaatatgtatgactatatataaaaattagtattaaaattttacctttttgtttagattgaattgaataaaatctaataaatattggatctaaaaaattagatggatccgatccgatctaaaaaaatactaggtctaaaataagatgaatccgattaaatgcaatagatcaattttggcatgaagttctttgaaagcatcgagcacatggtctttagatttctaagcaaaaacccaaacctttctagaatggtcatcaataaaagtaacaaaataaagtgcacctccaagagttctagtttgcatag

SEQ ID NO: 291979 - DNA, 496 bp, Cannabis indica
attgtaaaactaagaatcatttacatgtatattaatgtgtttttttaataggagaataagagcttgattgtgaaatccaattgtcttaatattattcatgctcttaaaaataaaacgctacaatacttcttagttcttacttagggtatcattgttagagaaatattattatcatctaatgatttttttgacattaccatgcatcattctcctagaataactaatgaggtgttgttcattatttatattattaggattggaagatcataataaccaggggcagagccagaatataaagttaggggggggcaaactattttctaaatttaggtgataaatgttttcaaaatactttattaactttataatttaaattaaaatgtagaacatctttcttacatatcataaaagttatctataagtgaatccatactaaatttttttgataatttttcttttttaatgtataatactagcgaacgactacttaaatatt

SEQ ID NO: 291980 - DNA, 524 bp, Cannabis indica
ataaatatataaaatatgaatatgcatgtataatgtgatcaattattatatatattattgatctccaacatagttctctcaataattgtcactatatataataaaataattatatttaaaaataaatattaagtgaaaagaaatagaacaactagctcgtataattatatatatagatagtagacatttttatttaagaatacatttgggacaaaataaattatatattctaattgagatgttataactaaatagaattacactaatataattaaccttttagttaatttacctcttattattattaatggatatcattcccaataacataaaataaataaataaataaatgacaaccatgatattaatgtcaaccatatctttcttcttcctatataataattatatggtgaatgatctgaagagaagaagaagtgatataagatatatatacttaaaaagatatgggattaaatttttggtgtctccttcttgtccccttggtaatttatataagaatattt

SEQ ID NO: 291981 - DNA, 386 bp, Cannabis indica
catgctcaatagggggttctatacaaacaaaagctttatgtgatctgggagccagtatcaacttaatgcccctatcaatgttcaaaagattaaaattaggggaagctttacccacaacagttactttacaaatggcagatcggtctttgactcatcctcggggtataattgaagatgtcttggtaaaggttggtaagttcatcttccctgctgatttcttaatacttgacatggaggaagatgagaatattcctatcatcttgggaagaccattcctggcaacgagaaggacattaattgatgtacagaagggggagttaaagttgcgtgttcaaaaagaagaagaaactttcaaagtatttgctgcaactgaaattcctacttgt

SEQ ID NO: 291982 - DNA, 366 bp, Cannabis indica
taattaatttttagttattaaataattagaattggcatttaagtggttaaattgaaaaattggcatttttgagaaaataagatggaaaaataacaaaatagaaaaattgcaaagtgggccgaatagcaatccatggccggccacttcacaagggatttgccactttatttttctattattttaatgctattaaatctaacctaaccctaagtggttttctataaataggtagtgatggcttaagggaaaaagatgatgcatctcattccttcaattaaaatttgagcctctcttcctatacctagccgaaaccactctctctctcttcctctcttctaaaaccgtagcctatagtgaaagagtgag

SEQ ID NO: 291983 - DNA, 517 bp, Cannabis indica
tctaatcgcatctaaaactcctcttggatgaaataaaactcaaagaaatattctagagcagcccagtaaattcatcaacctttgctgctaacactgctgtgttataatatttctcattaaagacccttttgaaatcatcccagttcatggtatttacatcctttgtttgttccaccacctcccaccagatacgagcatctttcctcaacatgtatgatgcacacttcactcggtcattcccattgacccttagcatctgcaaaatattttctatgcgactcatccactcttcagccaccactgggtctatgcctccctcaaactcgggtgggtgttgttttcgaaacctctctgctaacatctcatgtctagcctctgcagcaggatataccaccgcagctggtgggtctctattttctggctctggcggctccggttgatgtctcagctgacgaagttcttcattctgcctacgaatagtttcttccagtgcagcaaagcgctcttcccatccctg

SEQ ID NO: 291984 - DNA, 860 bp, Cannabis indica
ctactaatccactgaatatgtagttttcactagtagaaagtgagctgattctgcaaatccgtccactatgccccttactgaatcatacattcccgtagttctaggtattccaattataaaatccattgcaatgtcctcctacttccactcaggaaggactaaagattgcaataaccctgccgacctcaggtgttcagctttagttgctggcaggttaaacacttgaacacataatccaccacttttcttttcatctcataccaccaaaaataggattttaaatcctgacacattttggtggttcctggatgcaatggataaggtgtggcatgaacttcttcaagcaccttcttcttgacctcttcaacattagaagcacaaactcaaactttaaatatcaacattccactgttcgaaactaaaaagtctttaagtcaaccgaccattacatagtctcgaacttcaactagctcagagtattccaattgcgcttttctgatcctttctaattgatcagattgaaatattaaattgtgtaactttccaactatgaattcaacccatgcgttaaccatttcagaggctagttaagggctattaaaacagtagtacaaacttgcctgcaattctttctactcaacgcatcggccccatcgttggcctttccggggtaatacaaaatctcgctattgtagtctttaaccaaaaccagccatcttctccacctcatgtttaaattcttctggatgacaaagtatttgaaactcttatgatcaatataaatctcacacttttaccataaagatgatgtcatcatatcttaaaaacaaaaccaccgcagcatgacctaactcatgagt

SEQ ID NO: 291985 - DNA, 701 bp, Cannabis indica
gcatttcttaaatgctggaatttcgaattttatttgaaaaatagattaaagttgtaaattatttattttaattttggaccaacttaaatcaatgattttttcatttaatgattaattaaaataaatgaagtaaaatatattttattagaaatttaattaattagtcaaaggaaaatctagataggtgatatttttgcttgaagtatttttctagtgtatttaattaaatagaaaattaatatttaagttgattttcatcatcatacttaaatatttgaaatttttcttatatatttaattaaataggaaaattatattttttgttgtaaattaattttattaattaattttgggccaacattaaattagaataatttttccaggatttattttttattttaacatgcattttcgaaaattgtattcttaaatactttaatttttcgaaatgcaaatatatatttatagaaaattaaatttgagttgtaaattaatttaaattaattttgtaacaacttaaattgaatatttttctaaatatttattggaaattattactaagatggaaataattcatgtatttaccagggtaagtcttttaggatacttccctttaatttttcgcacttggcttaatatgctaaagttttcctctgcgcaagccggtctgaagttggcctaaacttactccttggctaagt

SEQ ID NO: 291986 - DNA, 511 bp, Cannabis indica
tatgaactttagaatacaactgaaaatgtaaatctaaccattcatatggatagaaataacttattagaactttgaggataagataggaaattttgcaaagtctattccaatgacttaggcaaaatccctagtcctcatgaaatgttttatggtatctttaatgattacttaatcttaagcatgtattttacattaatgtttatactaaaatgctaagttgataacttagtcttgaagaaacttatagtttcagactaagataatatgtcacaacaagatgtctctgagaaacaatagtaagaggtcaaatgtacttttatttacgaatttaactagactcctactattgactgggagccatctaagatgtaatcaaacaaggaaaattaggagacagtcaagaaaaatctctgtaagtgacctatatgttagattataacggtgtatattagaatccttatatctacaaaacctcataacctattcgagatggtggttactctgggggtgg

SEQ ID NO: 291987 - DNA, 193 bp, Cannabis indica
attaaatgagtcttacaagtagtattgtctcaactagtatggggaccatgggcctatatatctgagcttccaataagcagacccagaatttaccaagtaaattcactgacttataaattccttgttgcatccaccatagaacttggaattgcactctcagttatatagaacgctctataagttccacgatata

SEQ ID NO: 291988 - DNA, 632 bp, Cannabis indica
attttttattagtgtaccatattgtaactttcaaatataacataacgaaagactttatagtaatttataatgtacttgatatgttgaattttataagtgtaaaaattttatgatttttgttaaaaaagttataaaaaaagaaacgaaaaagttacttttaatgttggtcgtcctttttaggagacggtaaaaaaatatatacttcctacatatattaattttaatttttttaaaaaaaaaaaactttatttcaagataattttgtcttaaatatatttggctacttatttcatagttaactttaaaattatagttttaatttaaattttttttaagttatatcatgttattttattgtttaagatatcttggtgttacttttttcaaacatcgtttacattaattttaaacataattaagaaataaataagttataataaagtataaaaaattattataaagtttacaagtaaaattagtgcaatttttttaatgtaactgatgtttaaactattttagaagtctatcaaaattaatttataaaaataagtttaaattggaatacaatacttatattttccaaaaaaaaaaatatatttattacttattagttaactaaataaaaaaaaact

SEQ ID NO: 291989 - DNA, 496 bp, Cannabis indica
atgacttcttcttgctcgtactgagctgtgcgggcatatcgttcccgagctttgcccgtgtctccagcgatgtgcgggcctccaatgatgacttgcaagtgtccatctattggcggaggcatcagatcctggttgttctgaccttggttggccttgacatacttctgtaggtgcgggttgttcttcttgatcagaagttctatctcccgcttcaggttgtagcattcgttggtgtcgtggccgtagtctccatggaaccgacaaaattttgtcatgtccctcttgctggtatctttcttcatgggcccgggcttcttgtacggaattagcgactgagttgctatatacacactttctatatcctcagttaggatagtgaatgcagtgtgtttggcgcgatcacggggagtctgtccgggtttttcggcaaactttcccttcttcccgttcccttgcttgtggttgttgcttgaacgcttcccacttgagttgccgg

SEQ ID NO: 291990 - DNA, 526 bp, Cannabis indica
gaggccgaaggccgatattcgttgatgaaaaagcttgcctactgtctcatcttagcaacaagaaagctaagaccttactttcaagctcatcctgttcgggtatacaccgaccaaccactacgaaaaatactgcaaaagccagatgcctctgggcgattactcaagtgggcggtggaattggggcagtacaaaatcaacttccaaccccgaacagctatcaaaggtcaagccttggccgactttgtggtggaatgcacaggaaaaactaaaagtagcccagaagacgatctcgagtcaacaccacagtcgagcagcactgaaaacaagcacacctggaagctgcatgtggatggatcggccacaaattagctatccggcgtaggaattgcccttgtcacacctggggggcaacacctgcatgcagcggttgaattcagattcaaagcctcccacaacaaggccgaatacgaagccataatcgctggctcaaactagcgaaggagatgaaggccgagcacatcgagat

SEQ ID NO: 291991 - DNA, 471 bp, Cannabis indica
tctggcagatgcattttgatttgattgtagcctgaataagtggccatgaagcttaaaattttgtgccctactgttgcgtctacgagctgatcgattcgtggtagtgaaaaacagtatttagggcatgctttgttgaggtctatgaaatcaatacagactcgccatttcttgtttggcttgggcacgagtacgggattcgcgacccaagccgggtaaaaagcttcaattatgaaattgttgttgcgcagcttttcaacttcatctttcagggctactgctcgttctttatccaacaaccttcatttttgttgaactagccggatgttaggatcaatattcagaacatgtgaaataatagaagggtcgattccgaccatatccgcatgtgaccaggcaaaaacatctaagtttgctctcagaaattttatcgaattttacttcgagcaacaaaccctttccaatttttagctt

SEQ ID NO: 291992 - DNA, 566 bp, Cannabis indica
  modified_base (49)..(49): a, c, t, g, unknown or other
cttatttcttttgttctaatgtttgtacaataactaccctacaaaaaanaaaaaaaaaaaaatgtttggcaataacaattcaattagaggttaaataaattaaaaccaataacaataattacaggtcttatgcgaaatgaaagaaaaaatacatcgaaatgttacgatccagtgatttcaagactaaagttttttgggatattctaaatctattaaaaaaatttgtaatggtcatgatcattatcatgaaatagaagaagaaaaaaagggatttatttttttttttttttggttataaaattactttgatattctatatatatagacgaagaaagtttttttttgttcaatcactattagaaattttgtatagagttatttttttcttcttaatttattttattttagaaaaaattacagcataaacattgatttttatttttattagaattgttcatcaagaagagttttagagatatagcaaggtctcacaataatagagagatgagaggtaaataacatggtaacaaatttattactttttttaactttcttcttcctcatga

SEQ ID NO: 291993 - DNA, 551 bp, Cannabis indica
atagcaagccatcttttttatataccaattatttcatatatttttttgttattttgaaagctaattagttattctataatataatataattcaattaacgaaattctataatgaatgttaatttggatataaaaaaattataaaataataactaatcattatattagtaattaaatgatttttttctaaaaatagcgaaacaatatatgctccttatattttaaaatgttcacatcaattaaagagaagagtagatcaaaatggtattttttcttaagctcatccgagtaacgatgtgacccaaaaattatttttaaagtttgagagtaggaagagaattaaaaaagatagagagaagaaagagaaagaaaagtataaataagggtattgaaatatgactgctcaatttttttttacatttttgatttatattaaaatatttttttaattatctcacttattttcaaataatttccaacgaaattttatcaaatattatatacatataatttattagaattaataaaaatttaaatatttactaataaata

SEQ ID NO: 291994 - DNA, 547 bp, Cannabis indica
ctattttctaaccacactgttttagttctgtgcagacttgtctcggcagatgctcgattctctaaggaagagaatgggcgtgttaggctaaaattagtctaagattcgggtcatattttcggttagttttcactctttgtttctagttttagggctattttacgcttgattcttttgtttcaggtccttgggtgtttaaagaaagtatgtacaagaattgaggaaaaatggtgaaagaatcgagaagaaaaaccaaatattgtgtcgctgcctgttccagtcgcgacggggaatttgccagtcgcgacgggaactggcagaaagtttttcaagaattcgaagttgaaccccgtcgcgacgggggctttgccagtcgcgacggggacccttatgacgggatttttgggcagtttcgtaatttcacgaattttaaagatgagaattggtttaaatagtaagggttcgtgaaaattagagagtattcagaattggaaccctagaaacaaaggaggaggctagaagagcggcttgtggcgacccggatcaa

SEQ ID NO: 291995 - DNA, 865 bp, Cannabis indica
atttcggaggcacgcctccgcactctcgaccaggacggatacctgggcgacctggactgcgtcattcccgcccacgacaatcgcgcctcaaaccctagcgaggggatgtgcgcctggtcgggggctcacggccagcatggggcgctgatgcccttgcacaagtactttcgggatgtggcggacttcttcggcctctgcccggcccagatcactcccaagggcattaagtatttgtccgccctcttcatcctctatgcttcccaggaatggggcgctccttctccccacgaggttgcttggttcttcgacttgaagtctacccccgagcaaggcaggtcggggtatttttacttctcttatccaggcttcaagtggttgagtgggacggacaacaaggccattagcaaaatagggcattttgctgatgattacttcatggtgaaggatcctaacatcaactggactcggtttcaatagattctgacatatcaccgtcctcccctcacccttactcttagggatagggctcagaagcttgcccggttgccagcggaagacagggatatcatccagttgacctccgctgcaaatctggtgcagtacaggctttaccctgaggacttttcttctaagtctgtggcagagaagaagggaaaatctgctgctgcccggcctgaacgagctcatttggagggtgagttgattcaactgaagcgtgaggctaagttgaaaggaggtgctcgggcaaagcagtatgctcaggagttcatgaatcctgaagatgaggccgaggctgaggctgaggctgagcaggtgactcctttaaggaggaagaagaaactcccagccacgcccaatcccgttg

SEQ ID NO: 291996 - DNA, 530 bp, Cannabis indica
tcatacaatggaaaactctaatggaaaatttaactaatcaaagggttaaaaccctaagaactgacaatggcttggagttttgcagtgatgaatttaacaggtactgtggttctgttggaattcaaaggcacagaactgtgaggatcactcctcaacagaatggggtagcagaaagaatgaataggaccttgatgaacaaggtcagatgcctattaatgcaatctggacttactaaaggattttggggagaagctgtgttaacagcagcctacctggtgaacagaagtccatccagtgccattgaattcaagacaccagaggagatctggtcaggtaagcctcctgatctttcaaatttaagagtgtttggatgtgcagcctatgcacatcagagtgttggtaaattggagcctagagctctcaaatgtgtgttcttaggctatcctgaaggcactaaaggctacagattatgggtaagagagaaacaagggtttaaagctataaacagtagggatgttgtttttaaggaa

SEQ ID NO: 291997 - DNA, 563 bp, Cannabis indica
ttgtttgcttgaggtatatttatagatctagggtttgtattttaatttctgcatgtgtttaatttggttagttactgaaattagttaggtgtggattttcctaatccattctaactaatttcagttagggaattagaggccgaaggccaacttagggattttgcatgtatttccttttctgtcctttgtatcaagttgtatttggtcttaatatcagtgtaagtggaggtttattttttaacaatttccacctaatccttcactgagctgatattatagtggtcgagtcaattctgagggtcatagctctgtgatccaaaggatcaccttatccttgatccaaccctattaagtttaaacaatgtttaaacttagatagggtgatcactttagttcccatgtctgcagggttctcttctgtaggcaccttgtcaatgtttatgtgtccctgtgtcactttgtctctgatgaagtgatactttatctctatgtgtttggttctgtcatggaacattgggtttctgcataggtgtacacaactctggctatcagagtaaattact

SEQ ID NO: 291998 - DNA, 765 bp, Cannabis indica
catgtcaaaatggtcaaacaagaattgttttgtctcagccaacaggtcagaattattagatgcaagaaggatgtcatcaacacacagtaccaagaaaaagaaactgctcccactgaccttcatgtatatacattgatccaccatgttctcccactgacaatcatatcaaacttgagataccactgccttgatgcttgtttaagcccatatatctacttcttgagtttgcaaaccatgtgttcttcgccagacttctcaaaacctacaggttgagtcatgtacatcctcagataggtcaccattcaagaaggcagtcattacatccatttgtttgagttctagatcaaaatgggcaattatagccataatgattcgcaacgaatctttggtggaaacaggcgaaaaagtttctttgaaatcaatgcccttctctgactatagcctttagccacaagtcgagccttgcacctctctacttgcccatttgagtcacgtttgatcttatacacccatttgcacccgatgggtctacaacctttgggtagttcaaccaacacccaaactttattttgtgacatagaactcaattcttctttcattgcatccacccacaatgcagatttaggacatcttaaggttcaccatgagcttctattggaacttgttcaatcacagggtcattagtaggattagaagcagaagcggaagcaacaggtacagggacatagacacactcttccctgaatacaatttcctgacccttga

SEQ ID NO: 291999 - DNA, 488 bp, Cannabis indica
ttttgtgctcggacgatgaggacgaacaactaggtcctttatactagaccatctattctaaacaattgatagtttcctttaatttccatattttctgcttttacttattttattagcatacaatttacttcaaattattattattattattatttattattccaatagactaatgacttttctattaaaattactattatttcgtagaaatttatcataatatttctgttaaaatcttaatgtaaactgcttctacattttatatattttttatatatataattaagaatgctaatttttaagtacctaagaaacatatgccttacactagcttttggaaccaaaaattagattcttttctccattaaaaaaggcttagaaactgggtgccatttaacagcctcatcaatgagaattaccattctttttttagtaaattcagtatatcactttctatctttcctttcatggaatcattcaaaggatta

SEQ ID NO: 292000 - DNA, 543 bp, Cannabis indica
gtcgagggatgatgattgcttgtcatcctttttgtctaggttgatcactggtgtaatggactcttctacccccaagttatctccttgcttatacaacatcttgtatccgatagaggttcgatcaccataaggtttttgaagttgaagagtttgattgatggcagccgttcctggagggataaactctaaagcctgtttagcgagttcagctgaaagcttgtagatctcattgtccttctcatcaagaagtttgttgagattcttaacagtgtcctccagcttgactttttcagactctatctgctccttggcactattcagacctctaatctgcttggtcatatattcccattgagcaaacatctcttcatatgcattttgtcttccattactgtcgacttcagacacagtggagactccatcatcctcagattcaacagactgatgactttgagccatgaaagccactacctgtttatcctcattagaacttttgcttgcaatagagtctttttcttcgtcactatcgctccaggtggcaac

SEQ ID NO: 292001 - DNA, 523 bp, Cannabis indica
ctccagaattgagaaattataactctaatatttatttctaaatattggggtccacaaataattaatttcataaataatcataaaataatagaaattagtgctaattgcctttactaatccaaatcactaaagcagtcattacaattatccccccgtttaaaggattttctccttgaaatctaacatgaatagctctggatgttgagtcctcatattagactccaactcccaggtggcttcttccaccttactgttcctccagagcaccttaaccagagcaatagtcttgttccgaagaaccttttcttttctatcaagtatctgtacaggttgctcttcataggataagtcttattgcagctcaagggcttcataactcaagatatgagtcgggtctgataggtatttccttaacatagaaatatgaaatacgtcatgaacagccgacaacgctggtggtaaggctagctgatacgctacctgtccgaccttctcaagtatttgaaatggcccaatgaaccta

SEQ ID NO: 292002 - DNA, 981 bp, Cannabis indica
aataatatttaaatattttaataaatatttgtaaaaaattctgttatagaaatttattagaagtcaaatattttatttaaactaaatattttataatcaattgagagaatttctcaaccacttagaaagaatatctcaactactttacgataacatatcacccatataaaaaatatataacaactttatcaactatatcaaactcaaataaatatttattttttaaattaattaattaatgtaaaaataaatctagtggggcccacaattagtgataggcgcctatcactgttattacaccatgattggccccacttgtaacatttattacaagttggtgtttgtgttatggtttatgctctgaaaagcctgtaaaagcatttatgattattaataaagagttgaacattttgatatatgcatgaatgttaaattattaatatttattattgaataatttatataaatattaaaaaatttcttattcatacatgaggctgtgacttgtagctgtacagagaactaagatcactaaagtatgaataaaattgttaacaatatattaaagttataaaatctttaatcaatggttgctagtatgattcactgatgttcgttcctcggtacaagtaatctcggttcagactactaatgtagtatgacatataagtgaaggtgttgtatataataaatgttatatatgacaatgatcgatatgaataaagttaactttatcaaacatgtcatttactataaagacataatccatatcataacgatgataaatagtagatcgacctcaatccttagtaatcatgaaatcatgttcatgttattagtctctttgattcaatcgttaaagtctctcagagagaatgattcttacaacttctatttcgggaatctaataatgtggatggctaaaaacatgatctacaattattatttttttaatactaatctttaaacaattcctcggca

SEQ ID NO: 292003 - DNA, 523 bp, Cannabis indica
aaacaagcacctcgtgcttggtatgagtgtctaactgagtttttgctttctcatgattctagaaggggaaatatattgataaaacactttcatcaaaaacattaatactgatgttattgctgctcaaataaatgttgctgatattgtgttcggttctacttctaactctgaagtgcagatttttgtttctcaaatgcaataagagtttgaaataagcatggtaggtgaactcacctattttctaggtctccaagtgaaacaatcggatgagggtccttttgtctctcaaagcaggtatgcaaagaatttggtaaaaaagtttggtcttgaaaatgccaaacatacaatactcctatgaacacaacattgaaactatccaaagatgaaaaaggagtaaaggtagatcaaattttgtatcgaagtatgatcgttagtttgctctatctcactgctagtagtcctgatatttgttatagtgtgggtgtttgtgcacgatatcaaaggaaatcccatagaatctcat

SEQ ID NO: 292004 - DNA, 639 bp, Cannabis indica
attttttatactgtatcagtatcttagaattaatgttgaggtgtttaatttaccatgcacacaaatttcgtaaattttaagtaatataagagcctatatctcctaagacaaattagtatgtaatttcatgtacatctttcttttctataatgtgtatcctttaaattaactttatcattcaattcattttttctatttatttatgattgctaattaaataattttatattccaacaatctaagaacacttcaaacaaaataataaattattttatatgattaatttataaaaaacattatatatttatatatatatccaaataaccaaaataatttcttataaagaatttaaacaatggatagtaatattgttggttttaaaagccagtaaaaaatttgttacattaaagaataaaatgaaataataataatttttaaatctttttttttaaaaaaataataaatttttaatcttaattatatatgatattaactatttttctacatctaaattcttaattttattttctaaaatttgagaaaatcgtgataaggaaacatgatttactaatatatatatatactagatgaaagttacgtggcgagccacgtaaatattagttttatttaagttctagt

SEQ ID NO: 292005 - DNA, 539 bp, Cannabis indica
tgatcagagccatctgcagaagagctagacacaatccctggggtattaacagctggagaaacttcagattccttgaggacattggccatagcagtgagaacatcaatgactgatttttcaaagcgacgttgcctgagttgatcacgagcataggaggtggccagatcagtaactgtggtgagcaattgagattgccaaggagttgaagcagcaccatctcgagaggatgacggaccagttgatgcagatggtaaatcttccataagtgatgccccaacagcagagacatccattactgacaagggcagtggtttgctatgcactggattgaaggatttaccaatggatgggacaggcaggattttgtcttgttcataaacaactggagaaccccgtttaactattctgttgatcaagctgggataaggcagagtatgcttgatactcttggcagaggcagagctcataatccgatcatacataagagttgggagatcaatacttacaccagttcccaaggcatacaaaaatcgagctgt

SEQ ID NO: 292006 - DNA, 554 bp, Cannabis indica
cagagacagatcatccattaaagacttattgactcagatggggcagttggctactcagatagcaacccgtccccacggggcacttgcctggtacaacagatgtcaatccaaaagaaaactagcaaggcaattaccctgagaagtgggaagaagtatgaggggcctgatgggggccgaaccaatggaagaagagactcaggatcaactagcaccggtatcaatagaaaagaagactactgaaagtcctacaccaaaacaagcatctccaccaatatatatagatcaccatgtgaaggtctcgtacccacaaggactccgaaagactaatcttgacaagcagtttttgaaatttttagaggtcttaaaaggttacacattaacattccttttgataaagccttggaacaaatgcctagctatgtgaagtttatgaaggagatcttgtcgaagaagagaaaaatggaagactatgagacagtggcattgaccgagggttgtagtgccatattgcagaagaaacttcctcccaaactcagagatcctgggagtttcac

SEQ ID NO: 292007 - DNA, 486 bp, Cannabis indica
tattgaaaatataacaaaatgttggaacaataaaattgcaaaataaacaagttatgcactagaaaaattttaagttaaggatgatgtaaagaaattttaaagtgatattttaaagtgaaataaggtttaaggaggattaagtttaaacgataatagtttttatatttgattcatatttttaggaattattagcaaaaagggaaagtggtagaatttagtattcagattctaatattattgtttaaaattcatcaagtaatttgaagaataataaatacgaagatattgtaataaaatgaggtgggaatactaattgtcaaatgcgaatttattgtgatcagatatatttgggaagtcaaattttatggaatttggtttgtaatttatgtcgtataagaaggtatcattataaatgttttatggtgatcaaattttggaagttttcaaacttgcttttagaaattaaaataggaataatatgtcata

SEQ ID NO: 292008 - DNA, 691 bp, Cannabis indica
tgtctgttggtctctcgtgggcacagaaatatcaacttcctatcgactttgtggaaactgattgcctaatgtttgtcaaatgctttaaatggctacatttcacaacactcgaggttttatgatctggtttctgatgttaaattttatttttcctaatagatataaaataatataattttaaaaaatggttaaacaaatgtgcataatcttaaaaataaacttcttatttatttatttatttattttaatttcattgccggccactggaataggtgcaactttccctactatgtgtccaaaatttgaccattttgaatattaacatattacatgtagatattatatataatataatatatatttaaaaaagttggtgtacatattataaataaataaagatttttcttttctccaaagaaattaggtgagaattaaagactatatttattgataatgaaaatgtaaaaagagaacgtgataacataagttacatgatattctgattaaaaaaaaacgtgggttttttcattaatgtacaacaaaaataaatatattacaaaaattagtacaaaaaacttaaattataaaactacatacatttaataagggtaagttgaaaatagctctttattcatcataatcaattactctaatttatattatttgtaacatacctcttttattatgtatt

SEQ ID NO: 292009 - DNA, 707 bp, Cannabis indica
cacctataaattacatggtgggctgattctatttttattggtattttaaaaaatttcttaaatttcaataagaataatccattacattcatgatactataaattatttataaatttttaaaaattcatataatattccaataacaatattatacactattatataacaaaagaagaaattatattcactatgagattttaaaagttgtttacttaaatatgacacttttaagtttgaccaatttatgtaatatttttcaattttaggtaattttatggtatttgatatgtcgtatatgtgtaaattaggttttcaaagctcatatttaatatttttatttgtttaggcagttttatttgtcattggtgccgcaaaaattactgaagtttactgtcggcaccgaaaaaattgtcagagtggttgccggcgtcgaaaaagccgccgaagttgttgctggcgtcgaaaaaatcgtcagaattagtattgtcgctgaaaaaatcatcggaaaaatcacttagaaaaaatcaccgaaaaaatcaccaagtacttggtgattttttcggtgagttttctagcgacaatgccaattccgacaacttttctggtgccaacagcagctctaacgactttccggacaccggcacctactctgacgatgaagaaaaagatgctaatctagaagcccataaaatctattaatcaataaa

SEQ ID NO: 292010 - DNA, 57 bp, Cannabis indica
ttcgttgaacccacgcatagaactcagaatttttatgttagtgctccccactctatt

SEQ ID NO: 292011 - DNA, 451 bp, Cannabis indica
tgatgcaaatcttacaacgctaaccacaagcaatgaagtggttccactgaacaagacgagctcatacaaatggaaaggtatggctcccttaattcggacactaactgttgaatttttatgcttcaaaactagacaactctttttgcatatgtaaaaaatgagataacacgcctcactgcatactgtaagaatgctttcaatcaaacctcatcaaaccaagcaaaccaagatggacaagcgtcagaatcatctcgtggacatcaagaaaatccaaacattgtgagggatctagtaaatgtgaaaaccaaaggtatgggaaatcaacaatgtaatatatattcctgacatatgaacaaaaccatttaacaatttgttttgagttctggttttgcttaatgaaaatttataataaaaaaaagatgaaaacaatagaaaattatgagtgataatt

SEQ ID NO: 292012 - DNA, 629 bp, Cannabis indica
aactctagctaaaatcactacttcttttacctatttaatatttatacttctcataccatatgatcttatttctttcattttaaataaccaacacaacattcagaataaatttttgttttttttactaaattgtgtaaaattaatttgatacatagatattttagttttctatttatttttcaaattaaagtaaagaaataaattggctggttgaggctaaaatatgcatgatcaaactagtgaaaacattgaattgtgttaagattggtacaataagtacaactatgtatgttttccaaatacaatgaaagaaaacattgtcatgtaacaatcaacaatgaatgaagtttagcaaatcatgaaattcttctctattattgttgcttttctttcctccattaaatcattagacaaattttcttttagttgtactactttttattttttcatatatttatatataaaaaaaataaaaagtgatgcacagtgtaataggggcagttttgtcaaacaaaaacttaaggccaacctaataattattatagctagacatatgatatgccaaaatcaaaatatatatcaatcaaagaattttattttgataaaatatatcaatcaaggaattaatt

SEQ ID NO: 292013 - DNA, 1053 bp, Cannabis indica
catcgacccggtggggggatcgttgaaggaattttatttttcaaacttaggagattttctaggtcggtcccggatgggttctggtcctccggaacctgttcccttaggtccttcagcttacattacatccagctggttccggccttcggacagctatctcggagatgatgctgccagcattaaagttcaggactttgctagggccgaattaggaagtccgggtaggagtagcttatttgccatatcttgtgtaagtggtttcccacggatgtctaacacttgcctatttttgttaaacaggtatctccatggacgccatcttggaccagcttgccggagttcacactcccgaggctcctccggcctttacttcttccccaatagcccctgccctaaaggtctcttccagcgctccccctgacactattgatttagtggatgacgaggaggtgctaccgggagaaggtcaagaaaagcaatggggcttttctgaggaagtcgcagagggtgcgggagagctccgggctcttcctgaggaagctgaagaaggtgaagaagagcctgagattgctctgattcgcaagcgcaagggcaagatggttgcccaggacgagcccaagcggcctcggagagctgacactcctgcccatggtctcgacggtggggtctcccccatggaagaacatcctgctcctcccaacattgtgctgactccagttcctggggatgaggtgaggcaagagctccggatagccaagcataactatgccatggacgaatactcccgggggtatgccgaggtggaagcccttaggagggttttgcgggttgaggtacaggaaagtatcaacaacccggagtaccaggatccgtgggaccttaacttggaccccctgtcggactggttccgtcgcttccttgggcccaccttggctcccttcgccgcggagatgactggcgagttcgcttctcagcttacccggtgcgcgcctaagcggttcgcaacttgcgcctccctgaactctatcttccaggtccaggacctcagccatt

SEQ ID NO: 292014 - DNA, 1075 bp, Cannabis indica
ttcaatagaatcttggaacataaaggtctttgccaattttaaaacaaagccactactatattgcttgttccttaaacttctaaatgtgagaacttatcttgtctgtggataagatttgctcacagttactgactttcttaggtttatttgtaaaccttgcaagaaattatgaatgtggaataacaatctaaaataatccactatgtgttaataatcacattaactatattagaatgaattcatacacaataaattaaaatttattggtgataataaagtgtgatttatttttcttaattatacagtaaaaactgtacattttagatgaagttatcagaataaatttttggaaatttctactggtatggaagaaatttatgaatagtgatgtaataaaattacatatatagttttgaggtttaaatgaatcatgtttttaccaatgaataaacatgcttaaatatgaaatcttattaaacaaaaattgcctgtgggctaaatttttaatttaataagattagatttagatgtagattatgatagatttacacaatttatgaaaaatatttctatctcaatgaaaggtatgaaacacttaattatttataaatgtttcaaaattttatactttatgataaaattattaaattaaatctacataatttcctgtgggataaattaagagaatttaatttaacatattaattatgtaaatataataaaatccctgtagggtaagattattatgttcacataattcatgtccattatgtgatcttaatccacttaatatatataattttatataattaaggatgctgtggctactccctaattatttaaaattatgtggttcactagacaccaaagtataaactgaagattaaaattttactaaatccaaaattgcctgtgggctaaattttaaatttaataaaattagatgaactttatgatagatttaattaaacaattagtttaggaaaatgaaggtttattatctatctttaattaaatttgtgataacactattaaattaaatccccataactccctgtggggtaaattaagagaa

SEQ ID NO: 292015 - DNA, 695 bp, Cannabis indica
aaaaatattttctcgagcaacctcaacaactataagacagtgcttcagcaaagatatctttcgatttgaatcttgcatagtgaatacgatttagattttactagagtgactcgaagtcttgaactctatctctaacgtcgtaccacgcaccaatctttcaagggtgtattcaaataagcccgtgcgttaatggccatgcacgtctatcccagtatagtgaacgctctagaaattttgccccaaatttcatagaaagcggccccactcccataggtgagtctatcaagagtactcctgtagctcggtactccactccacatagagtatagatctcattaagagtttctattaactcatcctcttatcgcttcaggacttcatgcttctcgtataactatagcatgatcaacacatatcaactcataatttgttattacccgttgaacctaattcttgagatctccagtcattaggttgggttactattatgagtgactcatttttctaatccatgcgcgcaaaactgggtaccccttggggccaaacccatatctcaaacttgcactagatatacacttaaaatgtagtgtttctatcccatgtgggactcctactcacacacttcactttttctatttttacataatttcatacaaagttccaacaattgctacctgaagcgagttccctgtcat

SEQ ID NO: 292016 - DNA, 618 bp, Cannabis indica
taataagattgactcgtggaatatagagaattttaactacaaaaccacgtaaaaaaaaccttcatgtttatcattttcttttgagaaatgctaaagggcaccagtggtgcctaacaccctcctatgtgtcaatattactattgatccaactaagtatcgggtcacatataatttaatataataacttttatggaagatcgctagccaatcgcaacgcgacatatcgaaaaggtgctaagcatcactggtgcctaatagcaatgcttcttttttttttgaggaaattatgtagaatatggatttttttcttcaagtttgataaatatggagaaattatgattttacttaatctatggcttttttctaatttaagttagttgtgtggaattatatttccatatgtccaagtttttatgaaataaagccatattttattttgttaatttattttgtaaagatttatattattttttagaaaaatttgcttttattttagttaaaaatattaaatttgtaatttaatatatatatttgtgtttcacgttattttttttttttagattagaaaaataaatatttgacttattagttaaattattttattctacattaactttt

SEQ ID NO: 292017 - DNA, 564 bp, Cannabis indica
tttatgatgacactccaacatacttatactattgtccataaagcaaattgtgagtggattgtagttttgtttgcttacgatgtgccttgaatccatttacgtttcatgagcattttctaatcccaacacttctcaaagactcgtatggcccttgtcatgccatgaaattctttaagatacgtcactttggccttatatgtgtctcacttttcccatgtctctaatattagggagtcttccctaacgttttctcctcaagctatgcactacccttatattgttgtgtcgatgggtatgtagaatctaagtatgtcactcgtgaaagttaatttctcttcttcctcttttgaatttgtgatctcctctctatagctgtttgttgtaccacccaccataaatttgtattcacaatgtattagttgtgcaattgtgacctgttccaagtagttgtcctctcctatatgttgtacccaaattgttagtcgtgcctagaccttcttagtctttctctttgaaaatgtcactgtcgaaactatgcacattttactctattgtctcctccac

SEQ ID NO: 292018 - DNA, 541 bp, Cannabis indica
gcctggtgaacttcctctaaagacttcaccttggcagccatttcatccaaggcttccctagcctcccgaagctcacgcttggccttggcagcagcctcgccctccgccctcagctcctcctggtgcttggcctccagcctatccctccgaagggcctcctcccggatcatcgcctctgcttgtgcctccctccgcctggcctcttcctcactggccttggcaagggcctcccggcgctcagcatcctcctggtacgtccgcctttcagcagtcaaatcctgaaggatcttcatgacttcgtccatgcccccaaagtcggacaggacgaagccatggttaataaggttcttggaaaggcggccggcctcggcagcgagctggaaaatgatacaagtatgagtggaagtccttaagagaaaataatgaggaaaaaagtaaactacgaaatacttaccacagtgagggaatggctgagatcctggacttgaaagatggagttcaaggatgcacaagcagcgaaccgcttgggtgcacaccgggt

SEQ ID NO: 292019 - DNA, 558 bp, Cannabis indica
attctaaaattagactatatcttctttatgaattttcactaagctagagcttaattgcgaagaaaagagattctaggatttatttgttaattaaggactttattaagtctaattaataaatatattaaagggaaattttatttgataattaattttaattattaaataaatggttttggcattaacgtggttgaattgaaaaatatggtatttgtaaaataataggataaatagttaaaaaatggtaaaattgcaagtggtgggcccacatcctatggccgaccactagtgcttaattttaccatttactgattaattttttaatgccaaataacttaaacctaaacctagaaagattcctataaataaatagtgatggactcaaaactaacatttgatggtagcctaagtcacactagccttcaatcaaactttgagccttctatctctctccaattttgaatccttctctctctttctcttcaatatttcgaacccttatagtgatagagtacatgcccacgcatagaaagttggtactcaatcattgtgtgtaag

SEQ ID NO: 292020 - DNA, 718 bp, Cannabis indica
taatatttggcattgaataaatcccggaactcctcccaggtcattctggcaacatccctggtgagggataccatctcccaccaaatcagggcatcctcttgaaattgaaacgtggcacatgccactctatcatttccgaccactcccataaaattcaatattctttcaataacggtcaaccactgttcagcttttaaaacatcagggcctcccagaaatactggaggtgcttgctttctgaacctctcatataaaggctccatgcggttaccagcaacatgttgctcagctggcaccgcaggggctgcaggaaccgcagcaggcggttgcgggggaggctcaacaggagcatcccgttgcctgagtcgtcggatctcttcttcttgttgctcaattctagtttgcatctcagcaaacctttgttcccaatcaaccggggcctgaggtggattctcctgtccacctctcgggactcgaccgcggcctctaccgcgtccacgggggttttggggatttctaccaccccgaccacctccggtctcaaccaattcaccctgccttctaacgtttcgctggtcgtccattatttaggacttagcctgcgaacccacaaggcacgtaggtcagacagtggtcaaaatattttcaagaccgcaattaagatttaaaacatcttatttaatcatatatacaacatatcttaaaacagtttgcaaaa

SEQ ID NO: 292021 - DNA, 564 bp, Cannabis indica
tttataagatcagaatcagaaatcttaatgatctccaacattttctgttttctgatttctgataagtgaacatatagtattttgttctccttaaattccttatagcttatttggctgcataccgaaagttccttatatggttacttaaatatctatccaacattcttaatatgtataagtacaaatacatacatgcttgagcatatattagattccaatgtaaattaaaaatcttctatatttcttgaattctaaggttgcttttagggcaataatttagacaccttattttctttagctacaagcttatcacctggtatagtatctttcatgccaaaatttttgaatactttattgatatatctcttttgttataattcaagaatatttcaagaacattctcaacatattgaattcctaatacaaaatgagtatatcattaatggcaagcaattgttcaccaatataataccaggatcatattcttactcccactgaacctgtgatatatacacaatcatcaaaagcttttatctcaaaaaccaaatgagaatacttaatgaa

SEQ ID NO: 292022 - DNA, 599 bp, Cannabis indica
tgtatggtatatgcatattgatattaatatccgtctgagttttaaatagttagaagacgtggactaaatatgtgataagttatacagtaagggcaatcaaatagtctgattagcgagctatttgggctcagggcaaacaatatggaagagaattatttatgaccataatgctgggaacatgtaaattctgttatacaggacatggttagacgacaaggagaaaaaaataaatctaagatttgaaaagatagcaggctcatcttgtgtctgttcttatactaccgagacttcctgttgtaccactagatgtggtggaatatatgaagccaccttactaatagatcaagaagcaaaaactaaatgaaccacaaattatgggataaaacgaaaggttctagggtgaccatgatagcggtcaaagtgagtataagagatggtgaccttatcctgagtgttcaagatgcaaaaaggcgccatttgagccaatttagagccatatcttgtttttttatggggtagcgggtcatctgaaaagaacctacacgtagttaagaaagacttatgttaaaggagaaaagtgtacgggtcttgcccaagtg

SEQ ID NO: 292023 - DNA, 592 bp, Cannabis indica
tgagcaaacccctctaacatgcattcaaacctgattaaatctacttaaatatgcataactaagcttctgaaaacaactaaaaacatcaagcaacatcccagcaacagattatacaaattccttcaaaaatcacatttttgcatagaaaaatcataactttaaataatctaacaatcaagcattacaagaagcttaattaaactctaatcaacatgcttacatctcagaaaacaacaacaaaatcacagcagcaacaatattacaaattcatgcatgcatcaccattttttaaaacacacgaaaacacaaagagaagttataagagatcaaaccttgatttggattacacaaagaggagatgaaaatcacaagaatttgagcaaaaacacccagccctagcagcccaagacttggccgaaaatagagagagaatgagagtttttttgaaaattttcttcttttctttactttgtaatttttttgataaaatggaataatgaataaaagacacctagcatataaccatttcagccaaataaacaataaaataaatatttatttttcaataataaactcactaaaagacaaaaca

SEQ ID NO: 292024 - DNA, 519 bp, Cannabis indica
cgcacttctgtagtgaagggcgaggtaccatgcaacttgtatatgggcttccgctgctgctcgagcattttcaaagcctggagaagcatgctctggtcaatccctccagtcgcaaagagtcggggccgctacgactgcgggagtcgtaactactgcagcgagatttgttgggatattgatcccagtggtcgcgatcggcgcggtaggcgggttattgtaagtgttgacaccctgattgtccgcatggggatcacggagcgtctcagtattatgaggggcgcaagaacacgctctaaaaactgcgttgaggtgatcacgcagatcaccccgatgtacctggtaatgtcctccctgtttcgtctgtacagagccagaccttgtatatctacttggtgtacgaccatgcgatgacgaagaagctgattttgcgtcgtgtctcttgatggtcgactgcaaggattgcgtcgttcagggtcttcatcaacctgtgtgctttggtttggataccttgcggattga

SEQ ID NO: 292025 - DNA, 95 bp, Cannabis indica
ctatgcgtggattcaacgaagaattaataagtcagtgaatttaggttataaattcttcggttatatagacccatcggtccccccactagttgaga

SEQ ID NO: 292026 - DNA, 670 bp, Cannabis indica
atagtaatttatagtcattgatttaatctaatggctcaaatcaactcttgaaagttacaccaaaactaatatatttttttatttgtaattaattttgaatattattaattgcaagttcaattaacaaactccaaacctaactccaaactttttttttattattacttatttatcttatgactagttataattttcaattaattatttttttaatttgaaatttatatatttatttttaattaattttattttctacttaacacaataattgtagctagaaaagtacaaaatattcaagttatttaatcctaccataatcaatacaaccaataatataataatggtgtaagaggtaaaattattgtatatcaagtacaatgacatgagttcaatcctttcaaaagatatgatttttttttaaatttaagattttaaatggaaatttaattttttatgcttacattaatttaataatttgaatttctttatttttattttcttaaacaatagttcatttttttatatttactaacatggaacaattcttatactataaaaataagtttgtattattgtggtgaatagttttaaacttttatttgttaatatatattgatggttgtattacataaagtataatagtgaacaataaaataacacatgaagcaat

SEQ ID NO: 292027 - DNA, 742 bp, Cannabis indica
aatatctcaacaatcttgaaatatctataaccactttttaaattagattttacctaattaaattaattaaataattaattaaccaaaaagaaaactctggagggacaggacataggcgcctaccttgttgtttaggacaaggttggtgtcttttgtcctgacaacttttgtctcaacaaattttgtcttttcctatttgattaatttgaaaaagattaattatttatcacaaaaataaataattactattttgccaattcaaaatatgtttttccaaacatcattatactactatttatccctactcttgacattgtttcaatgtggcgattcggggaccatggacccatagttctaagctccaataaactagattagttattgagtctcatcaacaaaataatccttgtttattaatttcatgattactccactataaatattaaattaaacttttagtaattatagaattatatttactaagttttactgcagtgtccattgatatcaattctagtgattagccctccatgtgttggttcgtaattagttttggtaaaattactattttacctttctaattacttctttatcatttagtaccattaattcactagtggaattataatttagatcccatctaaatttgtgcacacatttcagttataaaattaacacttaaaggtaacaaacattcgatccgttaggaaagtcaggattctataattataaatcatgttcc

SEQ ID NO: 292028 - DNA, 472 bp, Cannabis indica
aaagttccaacacaaatgacttgtcaaaagataatgagcaaattcttccttccattccaaaagctcaatttccacaaagattacttccactcaaaaaaggcaaccaatatagtgacatcttagaagtgtttaaacaagtaagtatcaacattttattctttgatgacattaaacaaattcctacctactccaaattcttgaaagacctttgcactgttaaaagaaacactaatgttccaaaaaaggcatttttaactgaacaagttagccccataattcaatataaaagccttgtgaaatataaagatcctggttgtccaacaatttgatgcatcattggtgatcattttattaacaaagctttacttgatttatgagctaatgtgaatttattgccttattctatttataagcaacttggtctaggagaatgaaaaccaacttctataacacttcaattagtcgatcgttc

SEQ ID NO: 292029 - DNA, 747 bp, Cannabis indica
ctagccattcgaatctcttgaaatcttcgaaacccacaagggatacagagaatggaaagcaagatgttgcatccatagagtatgtctcgtagcgtgttccacaaataatttttctccgtataactatttagaaaaaacaaaacaaaaaatcatctactcactttgactttgaactttctgccttgatacacttcagcccttatcaaaatctaaagtaacaacaataataataaaaataatttagtaataaaaataaggcaaaagtctccaaaaatatagggttaatgcaaattaatgttcaacctcaaaaattagcggtaatagtgctcaatgtgatattttcggtaagtctgttagtctttttttaactgatccgttaaacccaaataaagtgacacgtgccaattttttattggactaaataataattttaattaaaaaaattaaattaaaataaaaactaaaaatatattttaaaattataaatttattttatttattttatattttttatctttttttttcttatttcattcttcttctaaccaagtttcgaccggtagcatcaccacgaccccaaccacatcccgattgccagcatttccagccaacccaagccagccctagccaccaccactccagctccgatattgtcagtcgaccaccacaaaccaacccattttaaaataattttttgataataaataaaatattcctaaataaaccatatgatatgagtgtgcaaaa

SEQ ID NO: 292030 - DNA, 1078 bp, Cannabis indica
  modified_base (998)..(998): a, c, t, g, unknown or other
caagaagataattcttttacccaaataaaaatcagaagcaaaatacaacaaaaaccagacatactctaaaaataaggatctaaaataaaaattgctattaacaataatagaataaataaaaaaaattgtataaataaagatttttgggtacttattaaaattaaaaattatttgtaaataaccataaaaggtttggttttttttttttaaaaaaaatatacaatttttctattgattatttttgtaacaaaaatgcagattatttttttttggtattaaaatattaattttacgttattatgttttcataacataaaaataatatggtcgacaaaaattgaaaaaacagccatccataaaataacaaaatttatataaaaaaataactatttcaaattctgtaaatttctttgaaattattttattttttattatggttaatttattcttttaaacaattattactacaatcaaatacgtattttttttatcaaaaaaatcgaagtaaatagaataaaaataagattctagtgaatataaagaatcttgaaacaaaacatattcgcaacaaacaaacgagattaagcaattcgatcaaaataaatagttattttaactaatcagttatagatgacttgacaattaagttcacacaagtaattattttatttttttatatatttgaagtatcgtcacgaaaaattagtattattgagtattacttttgagtttcgaataattacaattacaaatcacattttgtgtggtgtaatgatgaaaagtctttgccgagagtttgaatttcactatagatattagctctttggataattagtttgctgtaaccatatcacttcttaatgataactcaattaagaccgatttagatacaaggcctctataatagcatgtagttcccgaattgttaaaactatagaaacatgctcatggaattttggacggaagaagtacaatttttagaagattttttggaaacnctttttaaaaagtgataatctatgatatatcactttttgaaaaatctgagtcagactcccatttctgaaaaaaaaaaaac

SEQ ID NO: 292031 - DNA, 687 bp, Cannabis indica
gcgggtcagcaatgacgccaaatgcctatgcttccccctcactctgagcggttcggcagaggaatggttcaagaaactagaaccaggatcggtgggatgttggaacaaactccaaaccaacttccggagacaatttgtcgccgccaggaaggtcaatttggaggttagtgccttgaccaacatcaagcaactacccaccgagaccttgaagaattacatcaagaggttccgagaggaagcctcgaagaccaagaaggtcgacgacggacaacagcttgcgcttctccaagcaggaatccgcactgggactcccttctggaacgaattacagcaagaaggcgctgctagccttcaggacttccagaagcgagtccaaaaatatattaacctcgaagaagcccagatcgtggcttacggaggctattatcccaccgggatagcaggatacatgccaggagtatcgccctcgggtactgtcccgaccgcgacccctccggtaagtggcatacagttttctgctactcccggatacagccagggccaagctttgcccccggcatcttcccattacggcaacccgtccggggtgaatggacgggctccttcacaggctgccccgaccgctagcttaacaggccctacccaggggtcgagaagcaaaaggtcttccaagggcagcacccgaac

SEQ ID NO: 292032 - DNA, 594 bp, Cannabis indica
tccctgagggatttctaaaatgggacggtgcgggggccaaggcctggccctgactgtatccgggagtagcagagggcggtgctccgggcatatacccgagggcggagccacggttgggacagtacccgagggcggtgctccgggcatataccctgctatcccggtgggatagtatcctccataggccactatttgggcctcttcaaggttgatatacttttggactctcttctggaagtcctgtctgtcctgaaggcttgcagctcctccctgttgtagtttgttccagaagggagtccctgtacggatgcctgcctggagaagggcaagttgttgtccgtcatcaacttttttcgtctttgaggcttcctcgcggaacctctttatgtagtttttcaaggtctctgtgggcagttgcttgatgttagtcaaggcactgacctccaggttgacctttcttgcggcgacaaactgtctccggaagttggtctgtaacttgttccaacagcccacggatcctagttccagcttcttgaaccattcctccgcggacccgcttagagtaagcgggaagcatagacatttggcgtcatt

SEQ ID NO: 292033 - DNA, 359 bp, Cannabis indica
atgtatggttattttaacttgtaaaaagtggaattagttttttttttcatggtacttagctggtacatataagaagaagaagttacaatccactagttcaacttaaattagttagttttagaattaaatatggcatttatttatttattttatatacataaaatattatttgacaacacttatctatgagtgttactattgtttattataaattgattttaaaatacaaatttaaaaatgtatgaattatttagcaacactttaattttaagtgtgatcaactatataaagaaataaattcacaacacttttttattaagtgttgttgattaggtgttgccaaatataatttttgtagt

SEQ ID NO: 292034 - DNA, 600 bp, Cannabis indica
gactcttgagtaagttttcgattccctttatgcttatttttgcatgtttacattttgaatgcacccttggctttgctgtagaacattcgtaggaaacccgaggtttaaaaactctgtgattcttctttgccatgatttcatgcgatttacagttcataatgcttgctttctgaactacattacgccagtcttccatcttgcttattctaagcttcatgaaattttttgccctaactcgagaaaatttcaaacttcttgagttttgatttttctttgaacattcttgttctttaatctgttgagtactccaggttggcatatttgctttgtttatcgttcgattttccgaccaaacactcatcttgtgtgttgtcttttgtagatgaactcaggtgagttttgggagagcgaacatcgaatcgacagggacctgctccaacttctgcacgaggaccaccctcgtcttcgttctagcccaccttcttcaaatcttgtacccagccatagaatgatggctcgtacaaagaaaacaatgcatctggtgttggaaaatattttaccaggatctagatttactaccatgtatgtttcattaacatc

SEQ ID NO: 292035 - DNA, 682 bp, Cannabis indica
ttgataaatgaacatttcatatacattcttataattaattgttaaatattgaacatatttttttaatactatttctactgaacaaaaactataaagatgagacattattaatggagtataatattcacatcaaattacacaaaaataaaataattctactattgttatagtgttaccataaacactatgaacatcacaaagttgactattgccaactacatcactccattgagcctacaaatccaaagtctttatcaaaatgttatgatctttatgaatttcttgttaaagatcaacacctactctacaagtatctagaactttctatcattttggtaatattatagaattttctagaatcatagagagtaatagtcattagaagtttcaagaatattttagtaacacaattagttagaattatctagaatattatagttagtttcttttgagtagtataaataggggtcatgggtcttcaagttgtgcatccaacaagagtgtcttaaaagtgtgttcaaaagagtgagagtgtgttctaaagtgtccctaaagtctttcaaaaatgtgagttatacacaagtttagtagtaaaggtgtctagtgataaaataaaagagtgagtgcttggtgtgtattgtggtcaagtttaaagtgttcaagtcttggtgtaattgctttt

SEQ ID NO: 292036 - DNA, 688 bp, Cannabis indica
ggctccggccctccggaacctattcccttaggtccctctgcttacataacgtccagctggttccggccctcggacagttatctcggagatgacgctgccagcattaaagttcaggactttgctagggccgaattaggaagttcgggtaggagtagtttatttgctgtatcttgtataagcggttcctcacggacttctaacacttgcttattttttgaaacagatatctccatggatgccatcctggaacagcttgccggggttcatactcccgtggctccgggatgggacttctctgaggaagccgctgagggtgcgggagagactcgagcccttccggaggaggcagaggagggcgaggaggagcctgaggtggctctgatacgtaagcgcaagggtaagatgattgcccaggatgagtcgaagaggcctcggagatccgacactcctgctcatggtctggacggcggggtctccccgatggaggaaaatcctgctcctcccaacatcgtgcttaccccaattccgggggacgaggtgaggtaggagcttcgcatagccaaacacaactatgctatggatgagtactccgggggtatgccgaagtggaagcccttaggaggattctgcgagccgaggttgaggcgagcatcaaccacccggaatatcaggatccgtgggaccttaa

SEQ ID NO: 292037 - DNA, 542 bp, Cannabis indica
atttttccttcagagaaaaacctgagcctttctccctccctattaaaataatttccaacacacctttctttaggggttttaccttcaattgcactagagggacttctattgattaggtatgtagtagttacaactgcttctccccaaaatccatttgcgagcccgacattgaaaagcatgcaccttgctttgttcaatatggttctgttcattctctcaacaacaccattttgctgaggggttttcctcactgtcctgtgcctttggattccattgtcttgacagtaacctgtaaactcatcattacaaaattctaggccattatttctccttagggttttaaatttccggttagttaggttttcaacaagtaatttccaatgtacaaatttttgaaaagcctcagttttatgctttaacagataaacacaaaccttcctagaataatcatcaacaatagataagaaataggcactacccccaaaagttagggttttctcaggaccccacaaatctgaatgaacataatctaagataccttg

SEQ ID NO: 292038 - DNA, 759 bp, Cannabis indica
tgtgatacagtcaaaacagtacaatacaatcgaccactaatatcaacctatactcggtacgctagtctaactctagccgtaccgatgagatactgtcggctggtacgaagccaaaatacatatctaatgtaatctaacaggcttcctaacatgcacgctaaacatgtaaatacatatccatactgttatactaatcttacctcgattccgaattcaggtgtgccggtcaacctgagtggaacgaactgctcggcgaattacaggctcttaaaccataataatcacaacactgataagtgacacgctaaatcacttcccggggacttaaactagaaactaaaagtttccctatcgataaaaagcatggcaataccctaaacaacacaaaaaggggagaactagggttcccaatttttccccaaccggtagaccggttctacaaccggaattccggttctgggaggaacccagaataccaaccggaattccggttcctacaggctatactgaaacggaattccggttcagtgcaggaaacttaaaaaaattaatttctcatgcaattcaaccccaaacttcatgcaaccttccagacctgttctaaataccccaaagaacaaactcaaagcatcaaaacaaccctataccctcagaatcaaaaaccaccattgatgagtcaagcttgagttcaaaactcaaagcttgctcatccaactaattagctaacaaaacctgctcaattcaacatatataatcata

SEQ ID NO: 292039 - DNA, 690 bp, Cannabis indica
ctttgagtttaaaactcaaacttgcataaaactaacaccatacactaaaaccagctgctaggacccttaatcaactcaaattaagtctaaaattcaaaccctaagcaaacctaaacctaacagccccttacaagcaaaatcataacttgaaaccaatgaaaaccttgagaaaacaaaactagagaagaactagggttaccttagcttaaacctccttgaatcccttgctgaaatcccagaaaaaggttgaattgaggtgattctcctctggttttggtcccagccgaaagagagaaggagagagggttcaagagaatgaattttctaattttttgattttccttcaaatgagaaaaggatttctctaattcattacttgctgaaaaaaaaagagccacatgtcacctccctaggcaaccaccacactactcatttaaatgactcaagtgccctttgacttaaacttagggtatttctaaatttaggggtacaatggtcaaattccataaccctgcttaaacccgataattaatttctctaaattatttctcactaagaaataaggttctaaacttacccatgtgatcaaactagccatccatcgcattttccgttgtagccgagcaaacattacaaaaattgcatatttcacatataagctaaataatacccctagagtttaataaaatc

SEQ ID NO: 292040 - DNA, 588 bp, Cannabis indica
aaattggttatttctaactatttgttttatcaaaatttgaatattttttttttttgaattttaatttaagttgaaaattagttatttttaactaattttggattaccttgaatttgatatatatatattttttttaaattacgttgaagaattctaggaattagttattgagagattcttgggatattttttaagttgaaaatttgttaaattttggatcaacttaaaatggaatatatttttttttttaaaataagtggttacaacttaatttgatatttaattaaattttgtttgaaaaataatttaagttaaaaatcttgttattttgaaacaacttaaattagatatttttcaaaatatatattttattatattttataattttcaaaattttatatattttattatataatgattttcgataattaaatattgaaaattaaattaaagttaaaaaattaatttttaattaattttggaccaactttaaattaattaatttttattattaaaatatatggattaaaataaatgattaattaaaaatacattattttaaataacgagctttaatcaagagatatt

SEQ ID NO: 292041 - DNA, 237 bp, Cannabis indica
ttttcccaggatgcgtgtgagtgaggacaaagcacgctaagaaacactcgtgttggtctgtagggtcagtcatcaatccaggaagcagccaaagtgacgtacgtgtataagagccattcattccgtgggtgtaaggacccaatggaggcttgaagcggggacgttacagggcattttcaccaatgagagcaatgttaatgttctctctccatttgggaaagttagatccattcagct

SEQ ID NO: 292042 - DNA, 777 bp, Cannabis indica
agagggagaaggcagggggtttcgatttcgatgagagagagagcagtgaagataaagaaggaagaagacgaaaaagatagatatatatatagagagagagaagttaaaaagaaaaaaaaatttttttatttttataatttaaaataatttttaaaatattaaatgattatttaaaataaaaaataaaataaatctacctggaccaatcacaacgtgtcacgtaagtactgacctgacatttaacgtccaggtacttacatttattgccaaaaatacgacttaggtatttatctgctactcgacataaaatttaagtattgataccgcaaattactctaaatttaaatataataaatattgttatttaatattccctatagtttgaacacgccatactaaacaccaagactgaaatgagtacaagatccatatgaaatgtcgggatgaaggtgcgtgcttttattgactcatagaggacactttgagatgaagccatgcatgtgttcccaacccaagaacactcatataagagtttcaactttgtgtctgaactaaagaatcataagaaatctaccaagttgaaaatatcttagtgtcaaatgatgtcagaaggagaagccagctagagtggcttgtgtgcttgtgaagggaaatcattttgggtgtgtcttttgattattattattaattttgtctgatataggggcatgtggagtttccattcttttatttatttttgaagttaaatacagaataggctgctgatcaagaatttaa

SEQ ID NO: 292043 - DNA, 622 bp, Cannabis indica
gcctacgcccttgcggtgcatcaggtggtggttggccatagggatgtggctctttcagcctgttgacaaaggcgatgtccatcttgcgaagtggcaacaccgtgttgtcatactctaactggggaacttcatatgccccgcagagttctgtgataactcctgccaaaccaaaaccacctcccgtggctccttgcacgatctgctcaatgctttgccttatgacttgtccaatgttaatgttgtaccccttcattatggcgtacacatatttcaggcgatccatttggacatcggaaaaatgcttgttgggcactaaccgagcactcacaaagtacagccatgtttttgccaccgggttcagctcacaccggtatagaatatttggcgacccctcggtgccatcattgtcatggaacctcaacccaggaaatcccactgtctccgccacatccaccatatcaaactgctcttcctcctcaataattcggaggcgttgttcttccctagtgtaatcttggacagagaacatcacattaaatgcatcagcagtagcgggaactttctttccacgcaccttcacttccccattccggcggtcgggccaattcgcaagaaattcaca

SEQ ID NO: 292044 - DNA, 1213 bp, Cannabis indica
aagtgagaaaaagaaagctgctagatgatcctcttgaactaagtctaactgaagatgaattgacggagcaagaaggacaagaggtcatgggttatgtgaagtggcttgattcctatgggcccttgaacagaagatattttgaggaattgggagcagttccaaaagagctaaagccatctactgaaaagcctccagaacttgaattgaaggtgcttcctagtcacttgaggtatgagtttttgggtcaagataaaaagctgccagttattgtttcagcttctctctctgatgtggaaactgatagacttttgagggtactccgagctcataataaggccatcgcttggacactaggtgatgtcaaaggaatcagtccttcaacagtgatgcatcgaattctcatggaagacaatgccaaaccaacaattgatgctcaacgaagactcaatccacccatgaaagaagttgtcagaaaagaagtagttaagtggttggatgctggagttgcttatcctatttcagatagtaagtgggttagcccggtgcaagtggtcccaaagaaaggtggaatgactgtgatcaagaatgaaaagaatgagttgattcctacaagaacagtcactggttggaggatctgcatcgattacaggaaactcaacaaagcaacacgaaaagatcacttccctttgcccttcattgatcaaatgctagacagattggcggggcaagaatattactgctttcttgatggatattctggataccaccagatagctatagcacctgaagatcaggagaagactactttcacatgtccctacggtacctttgctttcagaagaatgccattcggcttgtgcaacgcccctgctacttttcaaaggtgtatgatggctatcttttcagacttgattgaatcttgtattgaaatctttatggatgatttctcggtttttggttcttccttcgatcattgtttggaaaatttggaaaaagtgctaactaggtgcgagaagtctaacttggtgctaaactgggagaagtgccactttatggtaacagaaggaattgttcttgggcacaaaatttcaaaggcaggaattgaggtggataaggctaaagtttcaacaatagagaatttgccacctccagtttctgtaaaaggagtgaggagtttcctaggacatgctggcttctaccgcagatttatcaa

SEQ ID NO: 292045 - DNA, 548 bp, Cannabis indica
ataaaatttgcctaacatatatctaatatgttaatatgatggcaactgacatctacgctaaacatatataagcatatgcaagacattatactaatcttacctcgattccgaattcaagtgtgctcggaaaattacaggctcctaaattataataatcacaacactaataagtgacacgctaaatcacttctcggggacttatataaactcaaaactagaaatttccctatcgataaatagcatggcaataccctaaactacacaaaaatgggaagaactagggttcccaaatttgccccaaccggtagaccggttcctcaaccggaattccggttttgggaggaaatcctggaagccaaccggagttccagttcctacaggcctctctgaaccggaatttcgattcagtgcaggaaacactaaaaattccataactcaaccaattcaaccccaatcctccccaaagtttccagacctgtcctaaacatcctaaaggtcaataacaaagcaacaaaacacagcttaatgcaccataacaaaaatcacca

SEQ ID NO: 292046 - DNA, 581 bp, Cannabis indica
cgaggatcatagtcattatatatctgtgggtggcacaccaggcggggagttacatgtgggaaatttttttagagacaaagagcatttaaagatggttgttggcttgtatgcaatgaagaaagggtttgactactccgttaagaagtcctgtactactatttggaacgtcacatgtaaggatacagattgtgggtggagattaagagcgaagaagaacatactttctatcatgtttgaggtgagtacatttcataatgaacatttatgctcccttgatcttcgaggaaaagataactgtcaagcatcacttttgatagttgcccatctaattaaggataagttcgcaactgacggttcggatcatttggcctctgatataaggaaaagtatgcacaaggattacgggatccaaatgatctgaaaatgcatggaggtgaagagaaggcactacacctagcttggggtacacctgaagattcgtactcaaagttacctaattacttgcacatgctacagttgagaaatccaggtaccatcatggattttgtggtagaggatggtcgcttcaagtattgtttctt

SEQ ID NO: 292047 - DNA, 848 bp, Cannabis indica
caaccaaaattgcctagtcatatacagtcttaaaacttaaaagagtggcattattcattcaagtttcgactaagtgtttctgagtttgagttataatattgtgtcctgtgtttatgtccaaatattatgtgtctctggctaatctagtgaagaagattgaagttttgattctcaataaatagaatgaatataagtgtatactttgtagtaggtcattattgtgtcatttttaagttaatgtgtcaacttgaaaataattcatttaataaacagaatggagtcaatctaaaaatatttttctaccttaataagtagagctatagaaaacaaactcagtaactttttgagtgttaaaaaattgtaaatggttataaattcagagtaagtaagttgtgtgtggcagctggttaaagaagccaaaattgaggtttatgattagaaagtagaagcaccgctagaactttcctttgtttgaagtaatagtataataactaatattttttattacatattaataattaattcaagatgaacttttcaaagtatttttgaaacatcgtgggatatataaatgcaatacttttgcatctttagcaatatatatataatatataaatagtagtaaattcttatttaatttttaattgtatcatggcataaaatttaatatatagctttttacttaccatgcatggtcgacacctcaattgaatagagtcctattcaattagtttctgtttttcgtgtcttgatttcagattataagaaattattatttttctttggaccttgaccacttaatctatgatcgtatagttttagaataaaattcttatatgatcgtagat

SEQ ID NO: 292048 - DNA, 527 bp, Cannabis indica
atgaattttcatgctaaagttttgttttcaaagagaaattgtgtgaatttgtggctgtagtgtttgcatgaattagggttagttttttgcagtgttattgtgcttgaatatgagtttgaatcatggtttggatgcatgttagttgttattaaccaagtttgagtttggaactcatagcttgggctttaatggtgattttcatttctgtactttctgggctgtgtttatgctttagaaatgttctaggggttatttagaacaggtctggaaggtttgaggttgtttggattagatttgagcattgtgtgaatttttgaggttcagcctgcgaggaaccagaattccgaatttccaagaaccggaattccagttgggcaaccggtctaccggttgggaatttcagaacccgtgttttcctcgttttagatatgtatgttggcttcgaaccatccaaccctgtcacgtcggtacaggctggaatgaccggttcgaccgattaggctgacactgtatcacgtcagtacagg

SEQ ID NO: 292049 - DNA, 605 bp, Cannabis indica
ttgtttcaaggcactcagttttacgcataaatttggaggttgcatatacttttttggtacaaattttcttgacaaagcctaagtttacattttctgactattggtaatactttcggaggtgatcagcgttccaggccctaggcaccatggctccgtccattcttttgagcttgtaggtcccgaagccgatttcgtcctcgatttcatatggtccttcctaattaggcccaagtacccccaattcgtcttaggaccagatcaccaatagcgaattttttacttttaacttttgagttaaagtacttagtcactttcttttggtaagccgtcattcgtatttgagattcatcttggagttcgtcaatctgatccaatgattcttgtaataaagccttgtttgttgttggatcataagttgttctcttgtgggatgggaataacatttccaccgggaccattgcctcacaaccgtatgccattgaaaatggtgagtggccggttgtggttcttggggttgtccgataagcccataacactcttggcagttcttctggccaattgtttttgcaggccagcagctttttctttagagtgactttcaggat

SEQ ID NO: 292050 - DNA, 615 bp, Cannabis indica
ttggtagggtttgtttcgtaccctgagtaccactgagtgatataccacacacctcaacactttcccatacttgtgttggtatcactatactgtactgacaaacaatactcactataccaatgcactctgtactataaccatacaagtcttggtagtgcaaataataatttaagcatgcatatacacataacatatacacacattcagatattcatatcacacattatattcagttcttaccttatttccgaattcaagtgtgttggtcgacctgaacggaaatcgtgtgctagatggatgccctaatcatattttaaaaccgggtaagttacatgattaaaaccctaatctcgggaaacccaaaaccaaacacctaggttctgttatattttctataggttattctaactttggaaatgaggaaacacccaaccaaggcgccgcaaagacgaaaattgagaaaatgaaaggctcggggaaccctgccaaaatcgactagccggttttaaaggctctgcaaatcggctagccagtttgcaccagtttctccaaaacttttcattctttgctcaattctccaccaaatgcaactaaaccttccagagtacctaatta

SEQ ID NO: 292051 - DNA, 1243 bp, Cannabis indica
aaaagacagcttatgtgagtgttgctcttctgcaattgtacatttgatatgagcttcttgtatatgaagttactcacaccttccatttcataatcatagtttctgtctgattttcccttgatattcataaagtgaagaaaataaaattattaaagtttccaatttgcattcatggaagttcattataattatttgtcattgatttgattttatcatatgtacatttctgcaatagtgcttttttcttttttaattccccccttgcaaaagtaggtttatttattaatgataagtgaaaagatagattagaaagaagaagaatttggaaagacaatgttactatttggaagtgtagagagaatggaatccaaaccatccaaccactcccagacaaatcagtttcacaaggaagaaaaagaagcttatctttatgacccagaaaacaggaaggaaaaggccaataaccttttgatacactctaacaatatctctaaacctcatatgcttctctactttctcttcagcttgttccacacaccataacacataccccactgggccacggccccctcgcgcctatcctaacccgagttatgagacaaaaaagtgtagaaaagaaaggtggcagttcaggtagagagtacctggtttgtctagagctgtttgcttaatgccaaattgccaactcaaaagctagttgattggtttaagggcaaactgaaaagtaaaaaaaaaagaagtatggggcatgtaaaagggtcagtcttacagaagccccttgattgagacttgatttaatagcctgagaacacaaagcttaaccctttataaataaatacaccccagatctccaacaaactgataaaaagatcatctttattagctcgtcaatcctgacagaggagtttgcagcctgcaatgtggatgaagctggtttgaagctttgatgagatatagtaatgtaagaaataaattttcatttcaaattatatagtgtcatttcatattagtatgcctggctccctgtatgccatctgctgagcccatcagcaaattggtgggattgttagatggcgtgcgaggagccatgcatgcctgcttgttgcggttttgctctactgctggttgatcagaagtgaatgacatggtaagctttatgtagaactagactctcacatcatagaccagaaatcagtgttcacatctttaaagtctttggtatgtactaagtgattatcagttc

SEQ ID NO: 292052 - DNA, 653 bp, Cannabis indica
ttagtgtgtttaaatagtttatttcacacacgtataaaataaaagagtcagacatgtaataaattatttgaacacttatttttaaggtgtttaattttttttaaaatttttaaaattatataagatgtctttgataaatataatatatatcatcattttaaaaaaaaataaacgaaatttttttatattgaaatacattatttttcttattatattatttgtttaatggtgagatgggaaagggaagaaaatgatgggaggataggtgaatttttttaattaaaaagtaattaattatggattgaaagtgaaatagacaatttgacatgtatatgagtgtgattagtgattagtgattagtgattagccagcatgtttcaccattaataaacactttgattggattatatattaattaaataattatcttcatttagaaatatataattattacttattattacccccctaatatagtaaaaatggggaacaagaaaatcatcaaaacaataaactaatacatatatgtttttttttttctatagttttaccactatgatcatcatgtgatcactttttcttatatataaattattttagaatacatagtttattaaattattaattaattttgtttttaaatatatatatta

SEQ ID NO: 292053 - DNA, 490 bp, Cannabis indica
tgtgttggctggcttggaggctgttcgtaaaatccatgtaagtgtatcttaatttgtttgcaagaaaattatgttttattttggttgcttaatagttttctgtttgttttgcaactgtttaatttcagtctttgttttttttaggttcccccaacccaatccagatgttgttggtcaaaagtcagctgcccttcatactgatgaagaaactgaggacactgtctctgatacacctctgttggataagaggaagcgtgctccggccttgaaatctccttttgttgatttcgggtcggctgatgtggggagcactccaatggaggtaatgtcctcaggttctcaatcagctggggatgatagggattttaaaatggttacttatgtgaagggcctttatgctcttaatgattcatttgctgatcccgtatctcttgagattgaggcaaagtttgacgcgtggattggtcaaggcttgcttaaacatcctagg

SEQ ID NO: 292054 - DNA, 672 bp, Cannabis indica
tcggtagtagtaatcaccaaatcgtgcctaatctttgcactcaaaccagccaaatatttctcttcttgctaaagtcagttggcacgattcccacaacgagcttggccagacagtcaaactttgtcgtatactcagtaacggacattccatcagtttgaaccaattcagtgaactctttccgctttgcactgtggacagcttcattgtaatatttggagttaaacaactccataaactcttcccaggtcataactgtgacgtcccgggtgagggttaccaactcccaccacacgagagcgtcctcctgaaattggaaagtggcgcatgtcaccctatcattaccaaccactcccataaagttgagtatacgcttgatcactgtgagccactgctcagccttcattatatcaggacctctcagaaatactggaggtgcctacttccggaacctttcatacaacggctccatacggttgccaacaacaggttgttctgctggcacccctggaactgccacggcctgagaaacttgaggaggcacagcaggagcaccctgctggctcaatctctgaatctcttcatcttgttggcggatccgatcttgcatttccgcaaatctttgctcctagtctggaggagcttctggtggatttacagggcgaccaccctgag

SEQ ID NO: 292055 - DNA, 455 bp, Cannabis indica
tttatttcattgttttagaattcctattaggatgttaataaaacatatttggtagtaaatctagatcctggtaaaatatttccaacatgtgtatcgactatcgggagctgaataagttaactatcaaaaacaaatatcctttgcctagaattgacgatctgtttgatcaacttcaaggtaagacaatattctctaagattgacttgagatctggatatcatcaactgagaatctgagaagaggatatcccgaagacagcctttcgtactaggtacggtcattatgaattcctagttatgtcattcgggttgacaaatgctccggcagcctttatggatctcatgaagggtattcaaggtattttcttgattaattttgtaattgtatttatcgatgatattcttgtgtactctcggtcagaaacagaacacgaacagcatcttcgtatggttctg

SEQ ID NO: 292056 - DNA, 741 bp, Cannabis indica
ctgacatgagaacccaatatctagagttattcaggttagatttcgaggccaaaatccttttaaggggggatagttgtaaagaccacttagcttaaatttagaaattagcagataatcagggtttaattatggaaattatttattaatattaaattattaatttatggtaatttatttaaattcagaatgcattttatatgtcatatatagaaatttcataattttgcatattcggtgcccagcaacattggaacgcggtgtttggctattagaatcacatcttagtattttagtgtagcggggcagtttatttggtcattgggattggtcgggattttagaatttcccaaaatacccttaagtggccttttatgttttatagtgttaattttgtctttttgtgggattttagaaagaataatatcacattttttcactctctctctcatttttgaactccatagaagcagctagggctgctatttttcatcattctttcaagcttgttgcagcatattttgagtgatcttgagtcttaggtaagctcttggcaactcctcttaagtttcttaatttttaagaaagtgaatttttgcatgctttgtggtttttggttgctgtggttgctgctgttgtttgatgttgtttctgaggtttaattatggttagagttgatgattagagctggtttggtggtggtttttgaggtttgtcaaggtttgagcttaagagctcaaactt

SEQ ID NO: 292057 - DNA, 636 bp, Cannabis indica
tttttttggttttttttaatttttttttcttagtgtaactctatttagttataacctcccaattagaatatatttactggtcccaagtgtatttttgaatagaggttctactgtacatttatagatccatattgattactttgtaaatgcttgtcacatctataggtaattgagattcgaaagaagataaggaagaaaaatattattttgttttgttttttgttttttaagtttacaaatattttattattttttaaataaaagaaaattatcattaagttgacactaaaataagtcgaaaaaattacacaaactcaaataatctcgcatcaaatattttaattaggtttcttttatattattttagaaataaattttagttaattaaaataatttttttaattattttttaaattactgttatttattagtaaaataaaatttattttattttcaaatttacataatttgagctgcgccatataacattattttttttttaaaaaaaatatataaatcaaaaaagtaaaaacgtgaaacactaaattgctttccctcctattttaaatttttaaattagtaaatttaagtggcgtttggtaaaacttttttaatccgttttttatttttaaaatt

SEQ ID NO: 292058 - DNA, 790 bp, Cannabis indica
aacagttacataattatacttttctgttaggttttatttcttaaacggttaaaaattagtacttttactcctgaactttggccaatacacatttttcccccttttattaaaaaaaattaaaatttaaaaattataacattttattaattttaaaaaaaataatagtaagggaagtttttaatactttttataggttaatttaatttaacttttttatttttattgtaatacttaaattacagaattaacttttaaaaagtttaaataaaaaaaaaaaaaaaaaaaaaaaaaaaaaacaaaaaacaaaaaaccatatttttagtttgattggttagataatgtcatatttagtggtatttattttttatgacatatttatcataaccttaataatttttcccacatttttgaaaatagcccttattcttatcatttctattttcttttattaatatataataatttagaaaaaagaaattaaaaaaaaggaacttttttatttttacacttcaaaacagtttttttttttttttcattttttacagaattaggcatagaaatccccattgcaactagcactgcaacctaaattgcaacaaaaaatcgcatagaaacccctactgcaactagcgctgcaaccactttagaaacccaaaccgtaaatttaaaaaaaaaaaaaaaaagttaaaaaaaataagtatatagggtaattccctttaaaaaaaaaacactactttatttttcttttatttatattgataggagattcactattactacaacaaacatt

SEQ ID NO: 292059 - DNA, 623 bp, Cannabis indica
tttgtgtccaggtctggaccccgatttgggtctaggttcgggtccaggtccatgttcgggtcccgagtgcaggtccaagtttgggtgtgggtgaggatcacggtccagatctagttctagcattttgatcccagtctgggtcttggtctgagtccatgttcgtatacggatccctatttaggtccaagtgtgtgtttgggatcgggtcctagatttaggtcttggtccgcgtctcagttctggtcttggtacacgaccgtgttcgtgctcgagttacagtctcaatttgggtctgaggctaggtctgtgtttggttctagatcctggtccgggaactggtcacggtcctagtctttttctagggtcctggttcgacgattctggttaaggttctaattttgcgtcccaggtctaggtcggggttcgggtttggttcttcgtctgggttttggtcatagtcttagtcccagatccagacaccgactactaatctatttcaggccccgttacccggatcccaagtcaagatctggatcactgtcacgggtctcagtctgtatctggttcaggtcccaggtcccatttcaaattttgggttcaggatcgagaatggggtgcggttc

SEQ ID NO: 292060 - DNA, 842 bp, Cannabis indica
ggggatcatccagctgggttcttgcccaaccgttgttatggccttttttactttgatgcttggttctgccaagcgttccacgggtactacccccagtttctcaatctcactgtctgaagctaacttagccagacagtatgcgtgagcgttctttttcctggggattctttctactttatagtctgtgaactcgtggagcatttcccggactatcgctacgtatgcggccattctttctccgcgcgtctgatactctcccgacacctagttcactatcagttgggagtttctgtagacttctactcttttagcccccacgatctttgctaatctcagccctgctatcaaggcttcgtattcggcctcattatttgaagccgagaagtcgaaccgtagggctgcttggagtcgaagtccgcttggagatatcattgcaacccccgctctggatccattctcgttggaggctccgtctacaaatactttccatgctgggaccgatggtgtcggtatgttcgcagttgcttcggcttcattacactcggtgatgaagtctgctagcgcttgtccctttatggaaatgcgaggaatgtagtgcaggtcaaattggcttaactccattgcccatttgaggagccttccggacgcctctggcttttgcaggacttgccagagtgggtggttggtcaacaccttgattgggtgagcttggaagtagggtctcaactttctcgaggccattaggaggcaaaaaactagtttttcaatgactgggtatcgcgtctccgcccctatcatgcgcttgctgacatagtacacgggatgctgagttttctcctctt

SEQ ID NO: 292061 - DNA, 963 bp, Cannabis indica
agaatttgttgagtacaactcaaaaaaattgaaagagcaaaaaattaataaaaatttgggtatactctattttgtatctaaagctttaatctaaatatgaaaattaaaatattttttagcatgacaaaaatcttttaaaaaacaaatattataaattataattttagttttaatacaataatagaaaagctaatcaagttttgaccttttttgatagtcaaagtttacatgaaactttttttttaatactatgttgtctactctctaaatcattactttattggaaaataataattttctagtggcattttcaaatctcagacataagaaagagaataataagcaaagcaaactatacttattattattattattattagcttgatcatgatgattgtcatttctattacctattttaatagtttattttcaatgttattattagtgttttggttaatagcaaggattgttacagagttaacgtgatcattccaaattagaagaggtacgtgtgcatatttatttttttatgttaattaatattatggcatgcaaatgccccacactgcaaagggccaagggcttgcgatggaatgcaagtggctcggagcttgatgggtatacgtggctattctctgacatttgtcgcatttctttgcgaagttgaaagcgccttgtcgcagggtaggccaataatacccctgttgcatgatttttagggcaagggaattaccaccagtatgattcccacaaataccctcgtgcacctggcggagtatgtagtcgcaatcttccccgtcaatacatttgagtagcggctggctgaagcttctgcgatataatcttccaccatagatgacatatcgggcagcccgctgccgcagttttctcgcttccattttgtcatcgggtaagataccctctccagatatgcaattattggagtcatccaggtgacttctt

SEQ ID NO: 292062 - DNA, 569 bp, Cannabis indica
aacagtggaattgagcatgacaccgaacatgttagccatgaatggattgatcctgatgtagctgttgggagtgattttttaaattttttacaaattgataaaaatttagaagactatataagtccatccacacctgtagattaggatgtgttagacaaatttctctcctcttatggacaactttaagcaaccaattattttagcattgcatgtgggagacaaaccttttgggtagctgggacaaggaatattagaactttaacctttttgccctgtacataatgaaatgccattcagtcttgagcccgaatctttaatcaaaattacattgaaagacactcatcaatggaaactagttatagaaagaaagtgctagcagcaaacaataacatttaaaattgactcccattcctatggcacattatcttgcaatcataaattgtacccaagctggatcgataaaaaaaacatacttttcaagcacacatagttgatgatgaaacaaatctaaacaagaataagataacaaatatagtaagaacccaaatgaagtacaatattgacaatac

SEQ ID NO: 292063 - DNA, 583 bp, Cannabis indica
gaagtactttggtgctgaaatcaatttctcttttagaacttggaatgcctttaaaaattcatctccaaactcaaaaggtacgccattaacaagtaaactggacaatggtttagagatcttcgagaagtccttaatgaatcgtcgaaagaaaccagcatgacccaagaaactccttactcctttcacagaaaccgggggtggcaaattctctattgttgacactttagccttgtccacctcaatccctgcttttgaaatcttgtgtcccagaactatcccttctttcaccataaagtggcacttctcccagtttagaaccaagtttgacttttcgcatctgattagcaccttctccaaattctctaggcaatgatcgaatgaagagccaaagaccgagaagtcatccataaagatttcaatgcaagattcaattaagtccgaaaagatagccatcatacacctttgacatgtagcaggagcgttgcataatccgaatggcattcttctaaaagcaaaagtactgtagggacatgtgaaagtagtcttttcctgatcttcatgtgctatggctatttggtggtat

SEQ ID NO: 292064 - DNA, 705 bp, Cannabis indica
tttttaaaaaaatattataatttaaatttaaactcactacacatatctctttattttttatcttatattaaatgtatatatataacataaagtttatttttttttaattatttcaattcaaagttaaactcattgcacaatttaaaaaaaatatctttcaatattatattttttaaccaaaaaaaaaatatatttctactattattatttaaaaagaaataaaaaaaagtgttgatatttcaaaaataataaaaaatatgataaaactaaaagtattacggtaattaaactaaaattaaaaataacaacaaattttgaatattattattttttttatttttataaataacacttaaattaaatattatttcataaaaaataattttgtatattgaataacacacacaaaaaaacactaattatacaactaaaaacatatatagccaaaatacaaacaaataatataactaaatatacgtgcaatattaacctaatatatagagaaattattctatgtactattttttaactttttttttaaaaaaatttacggtttgggttgctcttgtgattgctctagtagtttctatgtgggttattatgtggattttggttgtgatttaggttgctttgttggttgctatttgggttgcttgtaaaaatgcaaaaaaaaaactattttaaagtataaaaataaaaataaaa

SEQ ID NO: 292065 - DNA, 524 bp, Cannabis indica
ttgagtgggagcactaatcataattatgaaatctatagcttctctaatgacatagaagtgaaatgatgatttccttcgagcttggcttaatagagataaatgaaagagctcttattttagtaattatattagtttacgaaaatatcatttataggaagctaagtattttaagaataaaatacattgaggggtagaatggtaaacttgtccctactcgatgtagatcatctatagaggatctttgattatttagattataacaatggataattaatagcgtatctatttttggaatacatagagtgttctatgtaatcaagagcgcaattctgaatctacagtggagttaggagaaattaataagttaagaaattacttggtaaattttaaatctacttattgggagtttgattatataggccaatgatccccacactaatataggcttgtagactctgttaattaattttaattaatcaattaaaattctaaatttgactatgtcttatttatgaattttcact

SEQ ID NO: 292066 - DNA, 597 bp, Cannabis indica
agagcacccgtgagccaagcccagcaagacagtataaataataacaataatatgctcatcatgatatttaaacagtaatgccatttatatatgtttgtgtatcacagacctgcatgttgcactcacatgcctatttatatctacgtggcgaagacttatgtgttgcgctcacacatctatttacgtctacgtggcgtagacctaccactacaaaaaatagctacctttagtgacaattttttagtcacaatataatttttttgtgactaaatgtgacttttggtcacaacaaaaaactacttatgactaaaacatagtatttagatacgagttatcactaatttacttttagtcacaacaagtattgtgactaaaaccacatttagtcacaacaaattgtaatttttgtgactaatacacttagcctcggaccttttagtcataacgaaggaatgataattaataattaaaagtaagattttttgtagtgtacgtgttgctctcacacgtctaaatacaataaggtcttagaatggttcatctcggttatggttaccgagtccaacctgattatgccttgagcgcataatccttaaa

SEQ ID NO: 292067 - DNA, 379 bp, Cannabis indica
aatttaaccttaaaataaataagggataagttgaaaaatacctcttttttgtatccattaatcaaaaataccctcatattgtttttttattaaaatatacccacttttttgagtggattgcctaatataccctcactctctacttaaatattgcatataatttacataacctaaggggcctaatgggaacaccatcaataaaagtgggtatatctaaaaaaatatgaaaatggaggtaaaaattaaaacaagtaaagtaaagtgggtatacaatgtaatttcctcaataaataactgttattaattgaataggtccaataactaaatggacctaaataaaatctatcatggtgtgacattttatttagcaacaacctat

SEQ ID NO: 292068 - DNA, 668 bp, Cannabis indica
gcatgaaatttatatgattgctttaattttggcatttagattcattagggattgatttgggcctctttagtcatcgaaattgaaagttccaatcatgtccattgtgactcgcgtgcagaaaaacgagtcaaaaacgacccagttggctgaagaagacgaccccaaatgacgtgtcgtttttccatgtaaggcaaccttcaatgctgaaaacgacgtgtcgttttccacaagtggaaaacgaaaaatgacgtgtcgtttttcgtcattttaagcagccagcctttattgaaaacgacgtgtcatttttttcgttatgggcagcatttagtaataaatgacgtgtcattttttccccttgtggaaaacgtacatgtcatttgtcagtgtatgaggctgccctttggtctaaaaaacgacgtgtcgttttgtttgtttgactgccagtattcaaaaaaaaaaggaaaattccaaatttttataaatttttatttatttggaatattaattattttcctattttgtgttaatttagtcaataaattacattcattcaatttctatttttaatttaatacatatatttagaattaatatgttatttagtataaattaaaaatgaaaatttgttttaatttagtaatttattacatgatttatttaggcatgta

SEQ ID NO: 292069 - DNA, 599 bp, Cannabis indica
ctagcgaaggaaatgaaagccgagcacatcgagatctgcagtgactcactgctagtggttaatcatgtatctggcgaatacgaggctcggggagaaaaaatgatagcatatctgagtaaaatacatgatctgctcgcacaattcaaaagctacagccttaagcagattccaagagaggaaaatacaactgcaaatgcgctagcttgtttggcgagcagcaatataagtgacaaggcgagcctggtcctgatccagtttcttgaagagccaagcatcaccggcacggaagaaatcgaaatgatcgacacatctccgaactagatgacgccaatagcaacctatctcaattctggggaactctcagataaccgaaatgaagctcggaaaatgagaaggaaggcagcacggtacatcatcgtagacgggatcatttacagaagaggattctcaatgccattgctcaggtacgtcacaccaaatgaagctgcacgacttctatatgaagttcacgacggattctgcggaaatcatgcagccagacagagcttatcaaagaaattctaaggcaaactacttctggccgacgatgatcgaagatt

SEQ ID NO: 292070 - DNA, 666 bp, Cannabis indica
aattattgaattaattaatatttaatgtgattaaaaattatgaaaaaaggagaaaaattctagagtagaataaaattattttagagtgccacatcaccgcctcatacttctcctttatatatatagatagatatagattattaatagtttaattcttatttatttatatatatttagttaaatatatagtaatttttcttaaatatatctaatatgcaacataaattaaaatatatatataaatatctttagcgtagattttatttaaatacattctaaaatttttatatataattgaaattttttttaaatataattaaaaaaaattaattcaaaagttttattatctttctttttttaaatattgattttgatcaatctttgatacggtgaaaggtgatgacaaagagtttgagtttattaccaaccatgaatgagatacggtgactacttttgaacatagttgtaatatccagattaagaatagtatttaaaatttgttgaaataataatcgtataaaaataattgtcttatttatttgaaatttttacatgaaaaatctattttgcacactttattacaaaattacccacacacgcttattactacatttttacttacaaagttatttttattacacatttaccacttactcatcataccat

SEQ ID NO: 292071 - DNA, 558 bp, Cannabis indica
cacacacttccatttattacaaagacacaacaaactaaacacaattacataggttagacactaattgctccacaattcacattaaattcaagcttaaagatatgaaaataactctaaatcttagagttatcaacaccccaaacttagaatcttgctcgtcctcgagcaatgacaacacaaaataaacaaagtaaaacacaacaacaaatttttgcacaaaaactcaacatacaagacaaatgagagatttcatagaaattacagttggcctagcgaacattgatgctctcagaaaaaaatggaattaaatggaatatgaaattgcttgccgtaactttatatgctgcccctttaacgtttttgtcattggataacattaatatttcccaaaagtcacctaatcaacaatttatacaagtatatcccatctaaactttgaactttctacaactaccttaaactttttttttcttttttattcatttaagctccataagttggattagtgcactcctctccactaatgtagtctaaacttatcccattgatcaataggac

SEQ ID NO: 292072 - DNA, 528 bp, Cannabis indica
aaccaaacaagaagccgacaagaaacaagatagggtccaataactacaaagggaagaagccatatgtggagtaccccctatgcccaacatgtggtcgtaagcatccgggagaatgtcgactgaaaggcaagacttgttacaagtgtgggcaaccaggccactataagaaggactgtccacaaaagggtgatcaactcaaggatgacaaacttgtcccagctcgagtatttgcactaaccagaggggaggctgagactagtaacactgtggttgcaggtcagatttctatctctggaaaactatgtactgttttatttgattctggagctacgcactcatttattgctttaaagatgatagataagttagaactaccgtatgtaaactttagttataagttcatgacggagttgccctcgggcgaggttatgatatcatctagaggagtgcgggatgcgccaataaggattgcagacaaggaacttagtggagatctgatagagctggagatgagggattacgatctta

SEQ ID NO: 292073 - DNA, 605 bp, Cannabis indica
atggcccaacaataaataattttagtaactgttaaaaaagcaagatacaaaacagtactgatacagtattaattaatttagttatcaaaggctcatttggtatgccatattaaatagtattattgtattgtattatattaaattaattcatatatcatacttttttatataatattatattaaattttaatttatattaaaattatgtatatttaggtactcataaaaattagtatatcacatatagttttatataaaaaatattgcataaaatataatttaatataatattatccagcaaaaaaactgtataatatgatgtacaaaataaatcctaaaatatatatataaatatacttataaaccaaccacaaaaatgaaaagaaaaaaaatataattcatcttcaaaaatgtaaatatcatcatataagcgaattgattatcatattttaggtgatatttttaataaattcttaaaagggtcggtacacttatttatttaatatttagtagaatttgttagtgttattttctttatgattatgtatgttatagttttttaaaactacatgtaaatttttataaaattttaaataatttacaat

SEQ ID NO: 292074 - DNA, 749 bp, Cannabis indica
aagactgtgaaggatcaaacttgaagaagaaggacattcgggctcagatcttgattatactctgctacagaaaggatacaagggttagagatctgagtggaaggagacattaattccgctgcatcaatgtaaggttttcttaactttatatgtgtttaatttatcgttttagaaagttcatatttagggtgtttaaacaacatacttgtgagtagatctaagatcctggtaaaataatttccaacaactggcctcagagccatggtaattgatttacttgcatgaaatttggactttaaaacgattgtttgttatttggatggtatcatgttgtattgagtgttatttgatgattgattgatgtttgtgaattttcgtgaaaaataattgaaattttgtttctggaattatttttattggatagtatggaaaaaattaagcaagttacttttttacagaactcaatttcgatttaatttgaattagttatgattttttgaagattcgaaaaaagataagggggctgtgcactcacacgcgcgcgcggaatacgtgtctgctgcctccctacgcgcgcggacctcgtctggtgcctccctacgcgcgcgcataccctgcaagctcccctgttccgccgaggtttctcggctgtcaccagggagcacgcgcgcggacagtatgcttggcatactgtccgtacagctcccaaaattttcgtttttcttcgttttttcatgctttttcatgga

SEQ ID NO: 292075 - DNA, 442 bp, Cannabis indica
ttcgatgaagctataggaagtcttctcatagcgagatggtcatctcgcatacttgttcttcgacccaatccgactgttacacttagtttgcgtattgcaagctaaggtatgtgttacttttcttcgatgcctcgctattcacctttagcgacatatggtttttcgctaatacactaagtgtcagtttgtacattgattccttgcctaagaccctacagtcggcgggttacaaatatactctgaaactaacgaaattaatgagttattccataaaaagatattgcaccgattcacattccctttatcttgacacgtgtcctccaaccgaatttcgagtataacatctacatttaaagaaatatatttcaaaaattgtattaaaataaaatacaaattctgataattattctaatttaaattgatctgaaattaaaaaaaaaat

SEQ ID NO: 292076 - DNA, 507 bp, Cannabis indica
tcaagccaaagattttacagtgtcagatagtgggatgttgttgtttaaggccagggtttgtgttccaagtagtggggaacttaaaaacaaaattctcgaagaagctcataccactccatattcattgcatcccggcattaccaagatgtaccaagaccttaaaccctacttctggtggaacgaaatgaagaagaatgtggtagaatttgtatcccagtgcctaacttgtcaacagatcaaggctgaaaatcagagaccggcaggtttattgcaacctttgacacttcctgagtggaagtaggaggatatcactatggactttgtggttggattacctagaaccacaggtatgtatgattcaatttgggttgtggtagatcgattgacgaagtctgcacattttctaccagtaaaaacaacctttacagtggatcagtatgcagaattgtacgtgaaagaaatagtaagattacatggtgttccaaagtccattatatcgaatagaga

SEQ ID NO: 292077 - DNA, 1013 bp, Cannabis indica
gtaattttctagtaattgaattgatttatgtatgctaaatttgacttatggaaagttgtttggaaaattttagaacttgcttgcttgctatttgaggcgaaatactaaattatgcacgactaggaaagtgatttaggcaatttttggatcgattgtgcctttcaagccatccctgtaattttatcctagttaccctttgtctttagccttaacctattctttgttctacacatattgagcctagaaagataaacccatgaatacccaaaatattcaaccctaattataccataagtagatctttagtttgggggaatttggatgggaaatttgttgtatgtgtgtggaaaaggtgtgaaaattgagagaatatataaaaaaaaaattgattggcaacaacttgaaaaaaagaaaaaaaaaaaaactgacaatctagtgtcaaatctaagaaaaaaaaagaataaatataaagttgttgcaaccttgttaaaaaaaatatctctcatgcaattagaaaaaggggtattgggattgtgtgaaaaatattttgggtgacatgattggagaagcttatggtatagtaaagcctaaatgaccatttcaactacctttaccctaagcctaacattacaagcctagaaagaccttctgattcttggttgtgcattaatctatattagtggagaatagtaagtattgcaagcatatggaattttgggttagtggattgatgattgtaattggcatgcataaagtggtttaattgttagttaattgcattctatggtttcatgagctaaatgaaaataaattgaaatctgtcaagggtgtaattgaactgaaattctggattatatgcataagtgaattttttcataatcatgttattgaagctacttgaaaattactcatgttttggagattgacttgtttaatgtttatttagtgttttactcgaggacgagtaaaagcttagtttgggggaatttgttaggttatttttagtattaatt

SEQ ID NO: 292078 - DNA, 649 bp, Cannabis indica
  modified_base (121)..(121): a, c, t, g, unknown or other
actagtagttagttttacggtaactattaaggtttaaagttacgaagaaaagtaaaaaactaccttaacttaactagtttagaatgtatattaatgtagttagttttttttttttttttanattagatttatcaattgtactttaaaataatataaggacattagttttgaaattatatatgataaatttctagatttatcaattgttatattttttttttaaatctaattcaatttattgaaacgatataatatttcgaaaactaaccttataataatattcatctataataaactatttaaataagaattattttaagttcaaaatattttgtacaatattagtttatttttttatattattaagagtaagaagtgaaaatttagtagaatagttacttattttattaatatatatatttatataaaatatcaaaatttgaagttttatattattttatcacttaattatcattaaataatatataattgaacgcaaagtgtgatttattttccagttcaatgtacctatttagcctaattagtatttttgcctcctgaattttgacatatatatatcaaaacatgccctttgaacttttaaggtcgttaaaaatgccccctgaactattgaaattgttggatttaa

SEQ ID NO: 292079 - DNA, 514 bp, Cannabis indica
tcaaaaaactgagtcctttaaattttggtgttctgattgtgatttcgagcttcatttattatgtggtccactaccttctactataaagcatgaaggtcatgtgcactccttacttcttgttgattccttcattgaagattattttggtgaatattattgcgatatctgtgaaactgaaagaaatccacgaattcgcgtgtactgttgtggcgagtgtaaatatattgctcacgtgcattgcgtgatttctgaggtacgccatagtatatatatatatatattattttttttttatgtttccatattaggtgaaagatacttacaatgaataaataattggagaatttatatctaatacttttaattgaatctaatttacaactatgtctttgttccttttttttttttttttaactttttttttttctaggtttgtttaacatttacaaactttcattgccccctctctctcttctttcttttctctacttttgttaaatttaaaattaatttt

SEQ ID NO: 292080 - DNA, 692 bp, Cannabis indica
ttagttgcaatgagttcttattaagagtgttcacagattggtttggtccgaatttttataatttttgaatttgaaccaaaccagtataacggttttttgaatattagagaccaaaacagaccaataaatttctcaaaccaaacccttaagaacggtttgatttggttcgaaacaacggtttaagttgaatttataattattcttatttttttaagtaattgtactatttataataaatttttaattttatttttcaaaatatatatttaacatgataaataatagatctataacatataaataacgatataaaaatattctcaaaaatcaaacaatacataaaaattcaaaatttatgcaataaaaaaattttacacacaaaaaaagttcaaaaattatacatataatcatatataaaaaaatatatataaattaattatttattataaacagtccggtatttattacgaactgcaaccgaactaatatgttgtaaacggtccagtttgaccaaaccactagaaatagtttttccggttacgatttatagtggttcggattctcgtagtctgatttaaatcgcggttttttagtttacatgaacagccctagtttttatgtataattccgtaaaaaatatataattaaaaaaaaaaattgtttaagaagtgtaaaaataaaaaaatttacaa

SEQ ID NO: 292081 - DNA, 417 bp, Cannabis indica
aattatagataagaaaaataatgatactcatgggtagattttaatcttcctttgcttcgacagagacaatagtgtaatttttatattttacacttttcattctagtcgagtccgcatataattgagttgtccattttttcgttgataaattgaatatggtagtgtcgagtcacgtaaatattaattttatttaagtttcagtgaattttttattttagaatttggtaactaattttgaattattatttgaacgacttgataagtataccatgtgtatataaacctatgatatgcacattgttattaataataaataataagctaatcttaatatattcatactcatatagtaaattaatctcgaattgaaaacatgtgtatgataacataagatgaacattatttaactgaaactat

SEQ ID NO: 292082 - DNA, 574 bp, Cannabis indica
tttttggacggaggtgtgcagaaaaaaacagaaccagagcttaggtagtttaatcaccaaaaattcggtttttgtagttaagtgtaacaaactgtaaagttcacgtagtttagccgccaatatccctattaaaatcatcttatatgataaattaaataattaataaatttaaaattaacctagatatttttatagatattttaaccagattttcaaattcaaaagttggttattttgttaaatttaattatttataaattataagtttgaaaaatgatattttactattttataacattttacttattagaaatttataaattttattttaaatatttaaataacttatatatttttgtagaaatttgaataatgcttaatttaagatatcttgacatataattaggaaaattattatttatttattattttattcttaaaataataattttctaaccatatctattttaaaattggtttattttattattttaattttattaaattatatgattagaaaatgatattgaagatattttttcaaatcatttatcttatttaatatttaatttaa

SEQ ID NO: 292083 - DNA, 471 bp, Cannabis indica
gaatagcacattgtaaaccagaaatcaaccagaatggaactgtatataacgtagacatagtattttaaaaaatttcatatcataccttattttggattcgaggggaagctccagatctgtttaatacaaatttacattgcatgaatctggattttcgattgtagagggagttgttttgaacaattaaaatcgaaatcaaatgtttaatttcagtttcttcccatttcttttagttttttcccagtttttctggttttttttcgtaattttctgtttagatcattgcaattcttcttttctagttaattttcaccggaattgatggttgcattaccctcgttttggtttcattttggttgtgttgctgatttgaacgatagaggtatgttcatcttcttcgttcattccgtgcggcttaaggtatagaccaggtggtatttttggaattttttagttttgaactgtataaat

SEQ ID NO: 292084 - DNA, 663 bp, Cannabis indica
caacaagttaaccatgacaatttagatcaaacaataataggttttataaaacttgttttaataattaaacaatataaaacacacaaacatgttacaagttggatagttggatgtagggtttatttaattttatattaattaatttaataattttgaaaaaaaaaaggaattaaatgaataattttttttcggaatataaaataaataaattaaaaaaaattaaaattaagcctataaatttgaaaaattaggtttcaactaacctaaatatcttttccaaaaaaaatgctaacaacttttcaaatttcatgttatttagaaaactaaatattcaataaaataaaatgataatttaatatcatttttctgattttacaatttaatttaaataaaaaaataataaatataaaagttagcaaaataccttacgtcaatttaaaatttcatgattaaaataaccttattttaaatttcaaataaggtcattttattaaaaaaaaatataaatatacaaccttaaattttaaaaataagatataataatcaaattttaaaaaataagataattaattaagcaacaaattagatttttacctattttcaagcttcaaatatcactaacattttaaattaattttttaaacaaattaatataattctgat

SEQ ID NO: 292085 - DNA, 744 bp, Cannabis indica
gtttggattttttccgggtttgcctcaattcccctctggctgacgatgaagcccaggaacttccctgatttgaccccaaaggtgcatttctttgggttgagcttcatgccgtatctccggactacctcgaaacactcctctaagtcgtccgcatggctattgcatgctttggacttgacgagcatatcatctacataaacctccatgtttcgtcccaggaggcctttgaacatccggttgaccattctttggtaggtcgctccggcgttcttcagtccgaagggcatgactaggtaacagtatacccccttatcggtcctgaagctagtgcactcttggtctgccgtatgcatctttatttgattatacccggcataggcgtccatgaaggatagtaatttgaatccagaagtggcgtctaccatctggtcgatcctgggcagcgggaagcagtccttcggacaagctttgtttagatcagtgaaatctatacaaactcgccaagttccgttcggcttgggcaccaggaccggattggctagccattccggatagtatacgtcgcggatcatgccgttggtcaaagcttatccacctctttctccagagcctcggctttcaccgagtcgagagggcgtcgcttttgttggactggcggcatgtccggattgacgttgaggacgtgggtgatgacgtggggacttatgccagtcatgtcctcttggcgccatgcaaagatgtcga

SEQ ID NO: 292086 - DNA, 684 bp, Cannabis indica
gattgaacctaaccatatcaggattaagatctataaacctaagatcgaccactgatattgacttagaaagatataacggtaagtttatgatatcttatccaagatcaatatcggtccaatccaatgtatattccatacatctgatactgataaactttgctaatgccctggaaagaacataacacttatctaaggtgtaagtataccttatcgccgattatcatgttagtctaaatccagtgtactgacaaatcataggacttaaacttctgaatgtataatcatgattatattccacagtgctaacgacactataatcatgaacaaatatatatatatatatatatgttctggacataatataatttatacattaaatatttaatcatgaaataaatcatgcgaaccatgccacataaaatagtttctgatcttttattaattagtaaatctaattatattgaaatggattttatttagggcacaaaacccaacaaactcttgcttgattattggtagattgtggcccctgagatccattattttgttgacagtttgggtaccgacgataatcatgggtgagtgagcgacaaatgcaacaatttcttaagtttccttggattttctccctgcttagtccttcccttgtatttcctgtacccttggttctcacaactttggggt

SEQ ID NO: 292087 - DNA, 580 bp, Cannabis indica
ttttagtttttttaattgggtaggttgtatgtagaatttttacaaaccgatctttacgttggggttaaaaaaatatgtagtataaaaccgactaaaaccgaccgcatgtacagccctactactgactgtcacacttttgctgacaacaaatatacatgacaatatagtaaataaaaaatagttagaaaagacaaaaaagaaaattaaaaatgaaataataaattaaaagaattactaaaaatcttgtaaatgaaattagaaattttttttattatttgctgcaacaatatatattgtattatggttgaaaacttaaataaaaaaacataataaataataataaaatcatcttctataaagtatattgtatgagattacaaagttaaaaaatttaaagaaaataaataaataattaaactctacatatacaattttacgacatatataaatagagaactacatatatatttctctatttatatagaatacacatttagaattgtaaagtccttttttggcaagttagatgccaaaatattttttactttatggtaaggtttatttgcattcataaccgatt

SEQ ID NO: 292088 - DNA, 554 bp, Cannabis indica
gtgcggattagattggatcggttatttcatgaagtggcagacccaggatttaaattgaaggggggggggggggcgacacttttttttttataagtgagggatgacgtctttttttctttctacaataataaaaatattaagttcaataattaagacatcaaatataatattggtaaaggttcaaaaagtaaaatgcaaatactaaagtaagcatgcttttattgagattagaactcttgacctcctttctttatatgcatgaaatgactatactattatatcaaatgttattttatgttcatagatatcatttttatttataaatatatattgtgattaactaaaatgtatatatatatagatatttttttccaattttttttagagggccgattgcgctaccttgcctgatttatatgggtccgcccaacaccctaccatatagttacgacgactcacaagattaacaaattatattattatatttaaaaaaaatgaataatatattattgttgatccaactcggggttcaatctcatcaacttcatatggac

SEQ ID NO: 292089 - DNA, 556 bp, Cannabis indica
atttccaaggtttccaacaaattaataccagtgtcccgtttaggtgagtcaaagatatcattcattgaatagagtagttagctcatctaaaatgacaaacattatagcaaccttttattcgattaagatgagaatccagcgttgtcccgtttaagtgatagtccataccattctatcttatgagcttccaccattattttatacttttgtaagtcttactcttagcagccaccattagggtggacgttactatgaataaaacacttacaaaatattacttatctttcgagattctgcggcgttaaattgctaatgaacgttcatctattagggttgattactcaccaaaacaagaactatgtagaaccaacaatggagatcgaatatccttataaagctcactatttaaagtgtattttcatctaatatttattttaaactatttattttatacatatatttatttaattaaaattaccaatttagataattttaaatatatattttaatttaatatttttgaaattatacttagatagatctgaatataaataaa

SEQ ID NO: 292090 - DNA, 744 bp, Cannabis indica
tataatggacttgatgatgaaacaaaaagttgggtggattatggagcagaggttactggagagcctttgttaaggagaggccatgaagcaataaatctgttgaatgatatggcagattttgattatgattggcattggaatccatcacttcaaggttggagtcatcaataccctccttattgtccaaactcaccccaaccaattgaagaagaggaggatatactatcacttccaaaagagattaatcgattggcggacatggtaaaagctctatgtgataatttaatggcgcaggattcagagagttttaaggataataactcaaataacgaaagttatgagagttgtttgaatatagtagaagcaccatcagatgaatacatagaagagactgagcctagaattgaagagaaagaatcctttgaagtggttgaaaatttggatacattggatgcttgctcaacaaatgatgaactcaatttggtgaatgaagaaacatccatcctcaatgatgaaattattgaagatcaaatcacagtcaaggatgtggatggtcatgaggaaactgaacaaccaattgagaggttatttgagaaaagcaagaaagaggtgccattggtggtagaagaatcacttgtagttgttgatttgaggttgtcaacaccactatattatgaaccaccaatggacccttattttccactaatgccgcattctccatattgtattctcttcgagttacca

SEQ ID NO: 292091 - DNA, 728 bp, Cannabis indica
tcttgatacattttggtggttccaggatgcaatgagtaaggagtagtatgagcttcttctagaatttctttcttaagctcattgatatcacggacacacactcgtgctttaaacaacaacattccactgtcagaagctgaaaagtccttagctttgcccgctaaaacatcttctcgaattttaacaaatttaggatcttctaactgggccactctgattctttccaacaaatctgactgaagtgtcagattaaataacttctcagtcaccaattcaatgcttgccctagtcatctctgaggctaactgaggagaaatcatgatcatattaagtatctgatctggtccctttcggcttaaggcatctgccacaacatttgcctttccaggatgatacaggatttcacagtcatagtctttcaccaactctaaccaccttctctgtctcatattcaagtccttctgagtgaaaaagtacttgagactcttgtggtcattatagatctcacacctctcaccatataagtaatgtcgccaaatttttaaggcgaacaccactgctgcaagttccaggtcgtgagttgggtaacgctgctcgtaatcttttaattgtcgagaagcataggctatgactttatctgcctgcattaacacacagcccaaaccctgccttgatgcatcacaatacaccacaaacttctcttgatcagatggcagggcaagaacagg

SEQ ID NO: 292092 - DNA, 769 bp, Cannabis indica
gataaataaataaaaataaaatttccttcctcaaaaggaaatttcaataaaaactttaacaaaggtaacaacccaaacttttcttcaaatagctctttctactctaatgatcgtgctcttagtattttcttgagaggcggacttggattttcaagaggacaaggtttagttcacctaccaatagacctcaatgctaaatctgcttcaaatctgatcacactacttaagactgctattatagatttggcaagagcttctccaacttccctgcctcttgctcaacttcatcagcacaatctgcatcagttgaagttaatctcactgctgcaaaccaagcctctgataacaattggtaccttgacacaggtgcaaccaaccattgcacaccagatgctcaaaatatcatgaacaacagtgattacatagaacctgaacgtatgtatattggtgatggtacaagtctgttcattaaacacattgacaacactttcatttcacaaacttcttgtcactctcactatttacttcttaaaactaatcttacatgtgcctactattactaaaactttagttagtgtgtctaagtttgctgcatattgtggagtctattttacatttacaccctaccaatgtcttgtgaaagactcaggtgactacatttgttcttctcatggggatacacaagagtggcatgtatcttttgattttgatgatctgcactaccacttatctcctcaactcccaacctcaattgctttagtctacgtgt

SEQ ID NO: 292093 - DNA, 437 bp, Cannabis indica
tcttgaattttgatgaaaagaaatgtttgcatgcttgatttggttgtgtagttgctgctgtgttttgatgttgatttcagaggtttatttatgatttaaaatgttgattcaagcatgattgtgttggtgatttgttggttttatcaagagatgaaattttggctcaaaactatggttttcaaagagaaattgttgaaatctgctgctgttgttttgttgatgcttgctgtagttttcagaggttaaattatgcatgtttaagtaggtttggactaatttgaatgcatgtttaagtagattctttctgaagcttaattttaattatttcattaaatattcctatttaagttgtaaattagttatttctaactaattttttttaaatcaacttaaatttgaatatcttttgaatttcaaaaattaagttgaggaatttt

SEQ ID NO: 292094 - DNA, 502 bp, Cannabis indica
gttcacgtcggccagcacacttgaattcggaaagaaggtaagaactgtatataatgtgtgatatgaatatctgagtgtatgtatatgttatgtgtatatgcatgcttaaaatgttatttgcactaccaacacttatacggttatagtatagagtgcattggtatagtaaatgttatctgagaatactgaataccagcataagtacggagaggtactgggagtgtgtggtatatcactcaggggtactcagggtatgaacaaaccctaccaacactcgtacatcgaggtacgtagtgcatgtggtatagtggctatatcctagtatggaacgttcgtactcatctgttaagccttgtaaataggtgtatgggcgtctaagtacaagtcagaaattatatgatatgttatatgcttttcttactgagtctgtcgactcacagttctacttccttgcgtaggtaaaggaaaggcgaaagctaaacaggagtgaacctgagctggg

SEQ ID NO: 292095 - DNA, 563 bp, Cannabis indica
ggttatttctatgaattgtccataacgaatgctactaggttgattcaggcatgttttttcttaagattaagcaatgcatatgtaagtatgagctaatttaaataatgaaacttcaaataatttatcaaattaattatagtttgtttgatggtatttatttgatactcaaataattgaagtaattttagagctaatgtacgtacttttagaagagatgtatttattagataataaattaatgcgggttgatgactaatgattttttataactagataattcaataactatatggcgattatttgtgacaaagaattaaagtttgattttggaggagcttgagaaacacctatcacatccaaggaagatagcaggtcgtgttcatgttgtgtcaagactcatgtaatataaatatatgcttgacatgaatatgacttatttaataatcgtgccaaaaaattaaacccaaacacaatcgtttacaaatgggttgatatgacatgacccatatagcccgtttatatgtaaattttgtttgaacataccaatccattaatatattaat

SEQ ID NO: 292096 - DNA, 508 bp, Cannabis indica
ctgactcatggactaaggttgattaacacctgaaacatgaaaaaatcttcatctcattaattttcgcattttattatatctttagttctcaaatatttactttctgaaaatttcagtaaatattttagtactttcattgagagttgaaggaagacgtaaacctacggtgttactgctaccgtgatttttacacaaaaatcggttcctaagaagacttcacgaagtgacctcgacactgttgtaacgccttaagatttaggcacgctacccaatatgattaagaaaccctaatcccctaaacgggattggttttaaaataagcgcagaaattaaactttaaacaaaaacagaatgaaaataaacctgtaataattttaaccttacaaacaaaagttacaggtttcgggatcccaaaaaccattttacaaaatattacaagtcttttctcctcagccgacctaagcggcaaaatagagttacaaaagtttcaacactggtagaccccaac

SEQ ID NO: 292097 - DNA, 430 bp, Cannabis indica
cttcctgaggaagttgaagaaagtgaagaagagcaagaggttgctctgatccgcaaacgcaaaggcaagatggtagctgaggagacatctaagcggtcgcagatagtggacactccggccccgagccatgattctgggatccctcccgaggcggaggaatttaccgtgcctcccaacatagtgctgactccagtttccggagatgaggcgaggcaggagcttcggatagccaagcataattacgccatggatgagtactcctgggggtatgctgaggtggaggccttgaggagggttttgtgggatgaaatgcaaaatacccttaatgatcagaactaccagaacccgtgggatctaaacctggaccccttgtcggactggtttaatcgtttcctcgggcctaccttggctccttttaccgcggagatga

SEQ ID NO: 292098 - DNA, 568 bp, Cannabis indica
ttttgataaagaaaagagcctaatagttgaagtgttgttttgctgaagttttgtgtagattttactgcagcaaaagtagcagtggccaagagtttaatatagtgcagaaaatatgaggtgggactttatcaattgaggtggtaattttatggttgaggtggcaaaataggattggtcttagggctcggtgttgagaggtctaggacaaaatttgaaatgaggctttttccttttatagaaatttaaaataaatattatttgagttttgacacaatatcaattttaactacttttaatttctatgtaacaaataattttctacctcgcgtaagctaacttgataaaataatatttgattactaatagcaactctattggagtactagtacattttagcacttttgtaaaataatcataacaatacatattaatatgtcaaaaattatgtcaaatttttcttaccagtttacgccttaaaatggtattgtacattatatattaaaataatttttttaaaaaatatactaaatataatatttgctcattataaaaaatatatataacataa

SEQ ID NO: 292099 - DNA, 564 bp, Cannabis indica
tccattcggcgaacatacgcctttgtcgtcgaacgcgagatttactgcagcacgcagttcgtcctgatcatgatgcagggtgttgttatgaccctgcatgagtccgagcgcgtcacggagattttgtaattcagtggcatctcatagtcatctgggcattggttccaggtgaaacagtcgtattatgaatgccctggttgggtgcggaactgttattccaagtctcttgcacactaggcgcaattccatctgtaggaactgtttcactattctccacgcttgccggctgtccaggattaacagcaggcagaacccttgtgctccctgggttctgcgatgtaggatccagcgtctatgaattgggcggatcagtcaggcctctacgagtttgcaccatcgtataggcggttggatgttgaataaagagcaattcgtgatcctcctctcaacgaaagcaccaaaatgttgacttcgcttttaatcaacaacaatgagtctattttataagcgataaatgatttataataacagatatacgatcaaacaataataagacacagggat

SEQ ID NO: 292100 - DNA, 625 bp, Cannabis indica
ccagcaacttggttacagtgatccaatagcaagttggtactattcttccttctgaggtcgacggtgtatgtctgatgtcgatcgcggttcttatcctcaaggaattctttgaggctcacttaaatcactactacaaaattaggctttagaggtagtttttaaggccattcagcgtcggttttggcaaaattcgctactaacactgtttcaagtgacgctaaaagggttaaaaacaaccgacactgtcgggaccctacggcgtcggttattatgaaaaaaccgcctccgtagggtccctatggcgttgattattatgaaataaccgactctgtaggggtttcttataattttttttttcagctataaaattttgtgttttaatattttttttttatttttattaaaaatctatttttattttttccacatatatattattttataattaatataattaaattaagtataaattatatataataagtataaataaaaaattaaattaaaaagtaaaataaatacacatttatattactttaagtagattgtatataagttttttttagtttaaaattttttagttgtttattaatatgtgtttgtattttttagttatctttttatt

SEQ ID NO: 292101 - DNA, 529 bp, Cannabis indica
cttaaaaaaatgtaaccatgatggttacaataaaaatgtaactattgaaacctcttccatatattttctacatacaatttaatataaaattaaatattttttatacattataattttttttcttcttttgaatttgctatttgttattttatttattttaatgtgttgttggagacataaaataattataatttattttattttgttgctagttctgtgaaaaaaaaaatattttttttttcatatatatgaaataatttaatattaaaaagtaactaatccaaaataactgatccaattcgcacttttacggattggattggattggagctattgtgcggattggattggatccaaaaaatgaaatctgcacttagtgcggatcggatgcactatgagcaaaatagtgcggattggattggatgaacatcctacttaataccatataacaatacgggcccgtttggtacgcaggactggattggattagacaggctaatttagtccaatccagtgtttgggcatgtta

SEQ ID NO: 292102 - DNA, 509 bp, Cannabis indica
gtaagtaagagagacatgacaaagttttgtcgttttcatggagattatggccatgacaccaacgaatgcaacaatctaaagcgggaaattgaatttttgataagaaagaataatccgcacgtgcaaaaatatgtcaaggtcgatcaaaatctaaaggccgataacaatcaagatttactatcaccaccagtagatggacatttgcaagtcattcttggaggtccgcacataggtggagattcaggcaaagcccgagaaaggtatgcccaaacattacaacatgagcaagaagaagtggttatgaccgtcgaagagaggaagccaaaaataccatgggcaggggagcccaccataacattctgtgataaggatgctgttcaagattaatttacccacacaatgacccgttagtcgtggaagtccagatagccaacaagatggtggctcgaaccatgatagataactggagcctactcaaatatcttgttcaagacaccgtatgaaaagat

SEQ ID NO: 292103 - DNA, 790 bp, Cannabis indica
ctaggtgtgggtgtttgagttcgggtccgagtctgtgtctgggtttgtgtccaagtctgcaccccgatctgggtctaggttcgggtccaggtccaagttcgggtctcgagtgcgggtcaaagtttgggtctgggtcaggatctcggtccagatctaggtccagcatttcgatcccagtctgggtcttggtccgagtccagtttcgtatccggatccctatctaggtccaagtctgtgtttaggattctagttcatggtcctggttccgcgattcttgttcaggttctaattttgggtcccaggattgggttgggatcttggtccggctcccaattcgggtctaggtcttatttggagtccgggtcctggtccggttacggttctggatctaggttcaatttcaattatgattccaagtcctaaccctagttctagtcccaatcatcttctgattttggttcaaatgtcgggtcacatggtacgggttcgggtccacttttgggttcgggactgggttcagaaccaggtgtgggttcgggtccaaggctgggtcccaaatcctgacaccaacttttggttttgtccaagccctgggtctagatccagatcccaatctcgggtcccagtcttgttccatttctgttgctgggtcacgagctgggtcctaggttcaagttaagatctgggttcgggtttgggtttaggtcctggtcttggtcctagtcctagtttggttctagttccatttgcgattttgagtttgagtttgggtttgagttcgggtcggagt

SEQ ID NO: 292104 - DNA, 728 bp, Cannabis indica
aattttaggttggcttttttttaattattagaaaaaaaaaaaattaattaattttttaagaaaagacataatttagtagtggtcaatgtttatgagaaaagtaattaatttacaacgatacataaactgtgaaacgataaaaaagaacaaaagttaacaaaagtactatatttctgtaaatagaagagttcacaaaattttgtcaccatgatgtatattttagaggatacaatttaataatattataaatttcgtcaataaaatattaataatttttttaaaatagttgtgcttagatatttttcagagccacgtgagactccactagtagcttataaaaaacgaaactatttattcagttaaattaatatttgaatctactaacaattttcttttttttttttttttaggaaaatatcctaacaaaccatttgaaattgaaatataaaaaatattaaatcaattggaatatccaagaataaaaatttaatagaagagatcatattactattataaaatatattttaaaataaattacacatatatttgataactattttatgttcttcacttattatatatatttaaatgaagtaaattagtaatataaatcaacaaatcaaacgtttctttaaaaattaaaatacaataacaaaagtcagctaccttacaaatctaagtagtaattataactttatttatttttctatttctctggtatgaattga

SEQ ID NO: 292105 - DNA, 573 bp, Cannabis indica
atgatctgagcccgtattccccaataagattcattgagaccgatcaagaactgaaggatctgttctctagcgtagtagtcttgaactttttgcatggcaccacaagtacagccacaagtgcaaggagtatttggttgatactcgttgagttcatcccatagggcttgtaactgagtgaagtatgtggtgaccgagttatcgccttgtttaacattgttaacagaggtcttaagttggagaatgcatgggccattactttgattaaaacgatcatggagattggtccacatctcccgagcagtagttttgaacatgatgcttgcaccgatttcctgagacacggattgaaggatccatgacatcacggtgttgttgcatcgatcccaagcagatagagaaggatcatttaatggtggacggggtaaggtgccgtcaagtgaagggggtttatttttggcagcgatataatcgaagccgctcgtttaccaagactgaaaattagtcttgaccagtcaaaaggaacgaggaaatgatattggttgatctccagttcccaagtgataacgatcatct

SEQ ID NO: 292106 - DNA, 566 bp, Cannabis indica
tagaatttacatatgagtattatttttttattttattttttgaaaaatattgtttaatactttaatgtttattcaattcatatttattttttaacattaatttaaactataaatattttaattttgaaaggcatatactatacatttattttttcaaatcaattatttgaacaccaaaaactaacaacaatgaaaaaaaaataaaaataaagatcgttttaaacgggttaacccaaccaaaccgataaaaattattggacgggttaaactttttttattttattttttcattggatgagttacaattaaatatttgcaacccgatatttatattgggttggtaaaaatacactataacctgaccaaaccgatcgatgtacacccctactatgtaagtaaatgtcatcatttcaaaacttgtagagaaatgatccttttttagaattaaaaacacattactttaagatcatggtatatatacattaatttcgttaaaatcttttttattttaaaattatgtcaatttttttaaatttttttataggttgttgtgggttgttggtata

SEQ ID NO: 292107 - DNA, 524 bp, Cannabis indica
gggctggtctcatagtcgagcccatcataatcgcactctactaaatgacccaaaactaagttagtaaataattttttttaaaaaaaaataagaaaaatataataaattagctaataaaaattaatcaaaaatacattaactacatacttttttttttaaaaaaatatatattataattaaattaagttacataattttttagtattgcatattattatattgcaacaaaaacgaataaatatattagatcattaaatataaataatattatttgacatatcgtatcactgaaaattgatatatcatactaataaaattataacacaaaaaaattataacaatactaaatttatactcaaaaaatatatatcatgctaataaaattatatataccactattaaaatatgtatacataccaaaagatttatatataataaaataaaaaactaaataatcatcttaaataaatgatatacaatagagaacaaaaactaatataccatacataaaaatatatatacta

SEQ ID NO: 292108 - DNA, 618 bp, Cannabis indica
cattcatgtatttacaacactcataaaaccaaacttgaaatacatgaggacaatcgatcaaagtataaaatacactcagcatctttcctaaactcttcgcctttctaacactttcaacccaactatcaagtttatccttcaacgacgaaatagtcaattcaaaagaactcggtccccaagcaaattcatcatgcctaccactatctacaatatctaaaatggacaaatgaaagtttttatgctttgtaccactaagcaaaaacttactcaacaaaataaagaactgctaacttaacaacatcctcatcagaatcacctcatctctttgtggtaaaatattaccctaacagattatttagtaatagaagtgaagctcgactaatatttcaaaataaaagactgttaacatcttgcttaaaatccaacacactatagtcaccttcacaatactaaatctaaatcagttatcaatgtaaattcatcaatgctaaaacttaagcctaacaccatgaatcataacccacaattcaagcatcgttaggctgctgaacctcctttaacaataacccatgaaaaacttggggttgcacttttgaaatcaagaagcttaatgaaatg

SEQ ID NO: 292109 - DNA, 798 bp, Cannabis indica
atttgctactagagactcactttttataattatttagccagggctctttgactcgtacttcctaaactacctttaaaaataagtccatacttcacttaagcatcttcattccatatctgaatgcaatcatgttatcaatatatacatccttttctctttccttataagttcctcacttccaattagataaactttagttattttccaaacaatggctattgtcttattccatcttagtatgttcctctaggatattgctccattactagccctctgggtcgagaaagtttcaaatatttgtctgaattcttagctcttgacaactttaacttttggcagatctgatgtcattctttcctctaacactatatagcatagaaatgccacctctcttgaccaaaattaacacttttgtaagtttttttttcttatttgcttctattcacttaaacatactcatactattgtccacaaagcaaatcatgagtggattgtagtatcatttgcatactctgtgccttttatgttgcttgatcattttataatcccaacacttcacaaaaactcgtatggtccttgtcgttccatgaaattcttctagatgtatcactttagtcctagttgtgtctcacttgtctcttgcctttgagtgaggctttcctaacctcttctccttgagttatgatctacaccgttgttgtatcgatgggtatttagaatctagggatgtcacccttgaatattaatttcccctcttcctcaagtcttgaatttatgatctactttctatagttgttt

SEQ ID NO: 292110 - DNA, 617 bp, Cannabis indica
aaacccgttagatacctagaaaaatttaacaccataatggaagtggaccaggtgccgcaactcgcgaagtgtcgcattctcgcggccacactcgaggagaatgcccatgattggttcacccaattaccagaggcatcgatatcgacatgggagaacttcgtcgatctatttctcacacatttccaggccacgatgacgtataggccaccctatacgactttggcgaacatcaagcaagaacctggtgagtctttgcagaattatttcaagcgttttaacgctgaagtaacaaaagttgagaaggcccccgagtcttcgcttgtttgcatgttaataacaggtgtcttgccaagaaccgacttttggaaagagctacaggcccgaaggccagaatccttggtagaattcttcgccatggccgaacctcataagagaatcgagaactccttggcggaattggagaagggcaagaacaagcggcgatcacccataccgcggtcgcggtcccgcagtccgcgaggaaagaattccaggggccgaagccccagaagacgcagtccacgcaaaccgcggagcccgaagttggccaagtcgcctccaaaaaaggagtcctcgcc

SEQ ID NO: 292111 - DNA, 620 bp, Cannabis indica
ccgtaaacaccgcaagtcacattgtgagtagtacgaatggttgagtgtcactcagtacaaccccaggtcgaactggattcggttagttcgttgggagagtagtgattccggtaccccaggtcgaactggattcggtgttttttggttaaggtgacacacagtatgtagtcaagttagctttggtgtaccggagtcactatcctcctaaaaaactcactgaatctagttcgagctagggttgtacgacgcgacagtcaaccattcgtagtactgacgttgtcactcgcggtgtttacatgcgcggtgacacagtatgtagtgaagtttgctgttgggtaccggagtcactcctcttctaacgaactcaccgaatcaagtttgacctagggttgtacagagtgacaccgatgcagtatgggagaagtcgcactatgaatttaggttgtttgggctgagtgtgtactcagttcatcatgaagcgtaccggattcactattctcctgattttattactagagtcacttcttgtcttaaactactattgtattcataacattaaacagttttgtattaaatatctatatttatatagtattcaaaaaattattgtaatcttgatt

SEQ ID NO: 292112 - DNA, 570 bp, Cannabis indica
caaaagtcaatttaccatgtagaagtttttttaagagaactcaaagcccaaattctagataggtcttagataagtaacaatatcaggaaacttacatatatactaaaatagaagtaaaatttaccaaaatactgtgatatacggaaatttacatttatcctgtcctaggctaaatagttttttttatatttatatctattttatataaagtatgcctatataactgaaattcttggtttatgagaaatttatgggacacttttaatttttatttaataaaataataaaatattatttatatataataaaataataataaaacaaattttattaatatttgaactatattaaatatctcttctatcatttaaaaagaaaacaaccggccatttatcataatacattcataaacatatatatgtataagatgaaaagagatatttgattttctcataaacaaccggccattttatgattgattttctcatcaactgatctgtttacatagctgatctgtccatggttccatcagctgcttcccctatctttgttcaagccccggcagagaag

SEQ ID NO: 292113 - DNA, 501 bp, Cannabis indica
acaaggattcgaaaaaaattcgaagaaaaatatgcccccttttaccttcaagaaaataaaaagggattgaatgttacttggagtgatgattctgaaagtagtgaagatgaaaaagaaaaagttgctctaacaagtgttttgtcaagaaatttgcaggaaaaaggaaaattcatgtgcatgaataatacctcgatcgatgacaacaaggaagaatctagatccgaatcagatgagtcagaaattgatgagaattctatggttgaatcctacaaggtaatgtttggtaagttgatggaaacatgtgctgaaaatcgctccctggttaaagataataaagtcttgtgtaacaacattaatgagttggaagataaacttaaatgttgtgaatctgaactatctttaaaagagtctaaaattatttctttaaccaaggaacttgataacattaaaaagaatgtgaaaatgctaaatccaggttccaccatctttgaaaaaattcaa

SEQ ID NO: 292114 - DNA, 619 bp, Cannabis indica
gataataattggaggagcaaagttcaagaccaaatccatagctgaaaatgcttttgccactcctattgattttcccactctccattttttaggtaattcattttttatttttttttttaagttcaacaatatccacacgtgtctttcccacgtgtgaacaacactcactgaaaaaatctatgacttagtttagttggtaatgttttattgactttttactactagtagtagtatatgtacttttacctaaccatgattgaagctaatgatttaaacttgtaataaatgttaatgataattaaataataatagttgttgttcttacctacccttctgaaattctatgtagtttattggtaaaattaatcaatacttacaatactttttcgagccacatgacacttattgattagttgttgtttttcaatgccatgtggctcgaaatgaataatattattaaaagtattattattaggcatcagtaatgttttacattttttttataggtggcgctttaagattaattaatgatattccataaaaattaacttttaaaattatatgagacgatatttaattatatcaatagtaatttttcaccgagaaaggtgctaagcac

SEQ ID NO: 292115 - DNA, 842 bp, Cannabis indica
ggcggatcacccctttatatacaaagcaggtgtccaattagttatacaaggattgcattcattgtcaatccgtttttacacattgaattacaataactaagctaaacaatgttagcatcaataaatgaataagagttactaaattcagcaacgtatgcgcccttctaacatgcaagttgactgttcatattctaatattaatttcgcagacccaacacttaattacgtttaggatatctacgttcttaggtagtcgcctttgtggacatcgcatgacgagctgacagaacctagacatgcgagtctatatcggtttatcaaggctgcagggccatcgggaccaactcgcattatagaaagtcggtctctatgtttatgcaagaacatggagaggatactcccacatagttcgatacatgcgagttactctcttgtcccgcataatacgagttataatcatgcgatcagactttggtcatactcgctgaatctatcttgagagaggtttaaaacttcgaggagtctctcatggacgtctcagctttcatttggaaatctgagtacacgtgtcctctaaacaggagtctggtctcgagtttctaggtgagagaaatctcactataacacatgcccctagtttcgcgatgtgacaggtgcggtcacaagggaaactatacgcgagagacaggtgaaaggttgtcacgaagaggtgacctttggttgtcccttcgagggtttcgaaaaatgacggctgtaattattactttttattgcatttatggtgccacgtcacaaaactcttcggttttcgtgtaggcgtggccattgttggccgttggatt

SEQ ID NO: 292116 - DNA, 609 bp, Cannabis indica
cattcattgtcaatccgtttttacacattgaattacaataactaaactaaataacgttaacatcaataaatgaatagcagttactaaattcagcaacgtatgcgcccttttaacatgcgagctgactgttcatattctaatgttaaactcgcgggcctaacacttaattacgtttaggatgtctgcgttcttaagtagtcgcctttgtggacatcgcatgacgaactgacagaacctagacatgcgagtctatatcggtttatcaaggctatagggtcattgggaccaactcgcattatagagagtcggtctctatgtttatgcaagaatcatggagaggatactcgcacatagttcgatacacgcgagttactctcttgtcccgcataatacgagttgtaatcatgcgatcagagtttggtcatgttcgccgtatctcgctgactctatcttgagcgaggtttgaaacttcgaggaatctcttgcagacgactcagctttcattggaaaactgagtacacatgtcctctaatcaagagtacggtctcgagtttctaggtgagagaaatctcactataacaaaaagtatttgaggctcttgtgatctat

SEQ ID NO: 292117 - DNA, 868 bp, Cannabis indica
acaataatattgcataggatgggtctatgttgtcagactgaggttatctttgtcttttttagtcctttctattttctatgtataggtgcagtggtagtggagtacgttatatcacgtaccgagtacatttatagtttatgcgtgatgtttagtaaaaaaagagtacaaaatatcaggtacctagtatgtgcctttatgttttgtagaacattggttagaaaaatttcttataactcatgaaattatgtgttgttatatattgagttttacattggtgtatttgtttaattttaattagattttaaattaaaaattatcttagaaatattttattttcaccttatttgattgggttttttttttaccttaaataatttagtattgtattaaattttcactgttgttctacggttatttttagttgttccactgttgtttttagttattttgttttgtgttctactgttgttttataaaaacacaatatttttttaaaaaattctatgctacagtatttttgtaaaagttaacccaaattctagtatttttgtaagtttcccttgtttttattcaaagaattacaaattaattagattttaaataaatattttcattaaaattaatgtgatatattttatgttggaaatattttgtttgaatttaattttgtttgagttttattgagaagaatagcatttgtaaaagaaaaagaataaaaagttgtcaaaaatgtgacccaaaaactataaaaattgaaatttttgagataagacaaaagcccaaatgggccaaaattctcttccagccgacataggtgccacgtggcacctccgccgggttcgtgcggcagaagacaccaggagcaact

SEQ ID NO: 292118 - DNA, 603 bp, Cannabis indica
ctgtggcgctgctgtttggaggtcgtgccgtcagactttattgcgtgttgcagtcccaacacgcttcctcccatgcagcattaaatgcgacttgattgctcaggagaggcctgacacttcccggagaggctttatgctatgcgagcttccgggagcaccttgcactccgggtgcctcctccgggacctatgcccagggtgcttccttgtggcatacaaagacttatcaaatatttacaagttatctgatccacgtgtccctgtttgattggtccacgtatattgggcgaaatcaggggcaacatttaccccccaagccttgtttacttggaaaataaaccaaggcttgctcaggtgcctccggttgactcctcggttccctggctcaagctcagagcgcgtgggggcacatttaatgatgacatttaatgcagcgattcgctttttgcagaggcgtctccggccgcctcctcggtttctcggcacgagcttggggcgcgtgagggtgcctctaatgatggcattaaatgcagcgattcgctcttttttgcagaggtcgattcgtttcacgccctttgattgatgcggcgcattaatggtgtca

SEQ ID NO: 292119 - DNA, 792 bp, Cannabis indica
cctccattccttctagctcaatcaactcatctttggttaagctcaattctaaaggatcttctatcaactttttcttttccacaatagtatcaatcagatcaacaaagaaacagttatcacttgcctttggaaaagtcatcgcctttaatatattgaagaccacttcttcatcttgcactcgcaacttcaattcaccattttgaacatcaatcaatgcttggccaattgccaagaatggtctcccatgaataattgggatgttgttatcttcttccatgtcaagaacaataaaatcagctgggaagatgaacttatcaacttttactaacacatcctcaatgactccccttggatgagctagtgatcgatcagccaattgcaaggagactgtagttggctttgcctcacccaacttcaatcttctgaaaaccgaaagaggcattaagttaatgttggctccaaagtcacacaaggcatttatcccttctattctcccaatagtacaaggaataggtgaaactcctaggatctctgagtttgggagagtgtttcttctgcaatatggcgctacaaccctcggtcaatgccactgtttcatagtcttccatttttctcttctttgacaagatctccttcataaacttcacatagctaggcatttgttccaaggctttagcaaaaggaatgttgatgtgcaaccttttaaaggaatgttacgggatcttcacatggagatctatactgattggtggagacgcttgttttggtgcgagactttcagtagtcttcttt

SEQ ID NO: 292120 - DNA, 506 bp, Cannabis indica
aaaagaaagagacccatgaagaagaagaacagaagaagagcaattactattacatgacaccttatcttcatgttcatcatatgagtccacccatcttctaaaaagaacaggtacttcatgttgttcttgttctgcaaatagtttagaaggaaaggtgtttgataaaatatttggtctgaaagtttaatttatttgtggttgtgaatgtgatgagtagagacgacatggaccagtggctcatataataataggtgtgataggagttggtgtgttgtcactttcatggagtgtgactcactttcatcaaaaagtaaaatgaaactcaattaaaagtgacagcttttgtcactataaaatatatatatatctttatatattaaaagtgtctatctaacggcaattcttggtttaacagaatatacttaaaataaaagaatattctgttaaatttaacgatgttaataggttttatctcccgttaacataaacccaataattaaaccaaa

SEQ ID NO: 292121 - DNA, 618 bp, Cannabis indica
attgaattcaatctattcaaatgaagctatcagtttgagtgagaacatcttggttttgaaaattttctatttcctgagtcaattcctggattctagatttgaaaagatgattatgagtcttattccaatcttttaaaaactaacacaatgagcttgtttatccaagaaaaacttaaaatgattggaaggtgaattattagcgagaaaatcatgccatttattttgcataaggttataaaaatctggatcctctaaccaactattttcaaaacgaaatcgcttattaacaaaattaatagacctactagcatcattggcaaaaagaagttttaaagcacgatgatcagacccataatagcctagatgatgtaaactattttcaggaaaaatatcacaccaagattcagaagcgactgcccaatctaaccgttcacttatagtattattagtccatgtatatttacaacccacataaggaagaggaaacatagaaaatttattaataaaatcagagaaaagggacataacaacctgatcagaggcctaacccccgagcttatcagtattaaaaagataactattaaaatcccccattattagccaaggcaaatgagaagc

SEQ ID NO: 292122 - DNA, 1195 bp, Cannabis indica
tgctcttttcttctataagaactcatcaactatctgtgcatcttcaagttcttgtagcagagccgagacaatgcttaggttagctagttttcgcgtaatgatctctataccactactttggaattcctattgtagtcgcatttctatttgtttaagtattgctaagctggcataattgcgtctacttagcgcatctgctactacattggccttctccgggtggtagtggatttcgcaatcatagtccttgactagctctagccatcatctctacctcatgttgagttccttttgtgtaaagaagtacttcaggctcttgtggtcagtataaatttcacatttctccccatagagatagtgcctacatgtttttagcacaaaaactactgctgccaactccagatcgtgtgttgggtacctctattcatactccttaagttatcttgaggcatacgctactactttgtcattttgcatcagcacgcatcccagccctttgttttgatgcatcacagtacaccacaaacttatccttgttattgggaacacataatacgaggggttgttattagtttgtcctttaaagtttttggaagttaccctcatggttttcgacagacaaacttctgtgcctttcgtattaagttggttagaggagttgcgatattggaaaatccttcaacaaagcgtctgtagtaaccaactagacccaaaagcttcttacttcacttgcagtcttaggtgttggccagctcttgacagcttcgatctttgtaggatccacctcaactccatctttggaaactatatggcctaggaattccacattctctaactagaattcacatttcttgaatttggcgtatagttggttctccttaagtcgatttggagttatcctcaggtgttcctcatgttcctccatagttttggagtagataagaatgttattaatgaatacgacaacaaacttatctaggtactccttgaacaccctattcattatatccatgacgactgctggggaattagttagtctgaaagacattaccaaaaactcatagtgtccatatcgtgttctgaatattgtcttgggtatgtcctccttccaaaccttcagctggtaatacccagatcttagatctattttcgagaacacagtcgagccttgcaattgatcaaagagatcgtcaat

SEQ ID NO: 292123 - DNA, 586 bp, Cannabis indica
  modified_base (559)..(559): a, c, t, g, unknown or other
ccgacatacatccaactgcgccctcagctcgtagtgctttctccaccatctcagcataggtggtcttgtcgtctgtagtgatcataaggtcatgcttgatcttcacatttaatccatccagatatttttccttccgggtcaggtgtgcaaactctttcttttggcacttctaacggtctcattatagtatttcgcgttgaagagctcctgaaacctttcccaggtcatggtcgtaacatcgtgaatctgggataccatgtcccaccagactaaggcatcctcttgaaactgaaaggtggcacacaccaccctgtcattcccggtgacagccatagattcaatatcttagtaatcaccgttagccactgctcggctttcatgacgtccggacctgcaagaaaaaccggaggtgcctgctttcggaacctttcataaaggggttccattctgttcgccgctaccactatctcggtctgagtaacaggggcaggtgccactggaactttcggcacaggtactgcaggagcaccctgctgccctcaatctctaaaatctcacnttcttgttcctctattctggcttgcat

SEQ ID NO: 292124 - DNA, 1233 bp, Cannabis indica
aatagaatgttttacaatgttctaagaaatttgtaagagaaatcaagaacactctagaaagttttagagaaaacttagaatcactagaactaagattagataattctagagttgtttagaaaatagtaagaagtaattaattagctagtaaattagaaaaatctagaaatctttagatacatcctttgtagcctataaatataagtgaggtgtgtgcttaagatgcaagtttgagcaagagagttcaagtgtgagtaaaagagtctaaagtgtgtgagttcttaataagtgtctaaagacaaagtgtcccaaaagtgtgagttatacacaagtgtgtagtaaaggtgtctagtgataaaataaaagagtgagtgtttggtgtattgtggtctagtaaaagtgttcaagtcttggtgtaattacttttacaataataaagtaattacgtttttcacgtgttgtggtgtccaacaagtggtatcagagccggatcgagttcgttccgaaagagtcctttgttgagtttcttagagtgatcgtgtgtggtttagtactatagagtttgcacgatgggtgaccttcaagtggtcggcggaattaagaaacttaacaaccaaaattacaacacgtggtcgatgcacatggaggcatatctccaaggccaagacttatgggagatcgttggtggcaatgaagtcacacaaccggaggatgcatccgctttaaagaaatggaagattaaagcgggcaaagccatgtttgcgattcggaccacagtcgaagatgagatgttggagcacatcaggccggcgaagacaccgaaggaagcatgggatacttttgcatcgctgttcaccaagaagaatgatacaagattgcagcttctggagaatgagcttctctcaatcaggcagcgcgacatgacgatcaaccaatacttcaccaaggtaaaatctctttgtcgcgaaatctctgcattagactctggtgctggcatgtcagatgctagaattagaagaattattattcatggattaaggccagaatatagaacttttattgctgcaatacaaggttggccaagccaaccttctcttgttgagttagaaaacttgctagctgaccaagaagcgttagctaagcaaacgtctggagtctcattaaagagtgacgaagaagcactctttagtagagataagaaaggacgaccccgaccaaatactagtagaaata

SEQ ID NO: 292125 - DNA, 860 bp, Cannabis indica
tcggaaccgaacaagaaaaaaaagacccatcggacgattgtgtcgtttttttgtttcagtttagaggaaaacgaaaagagaggcacattggtctgatcgggtccgagttggtccggaccccatcggaccatgttggccgaccatcggaccatgtgctagtttttttttgttcggtccgagagagagagacaaagtagagtagaggggggtatttttggagttttgaaaaaagtgtcatatttttgtagtgtaaaatgtattggtttattattttttttttaagtttttaagtatagaaaatcaaatttcaccatattatgtttgaaaaagaatactttaattatatggtaatatgaaatagtattttttataattatataaagctgaatttttgccctacttttcattttgcttgtaattcttaagtaattttaaataattatataatttgtacaaaaatatttgtattaatgatagaaattataaaataaacttataattttaaatatatttttatgttattcaatatattctaggggtgagcataaaatctagaaaactgaaaaaaccgtttaaaccgacctaccgaacaccattagaatcgaaactgaaaaccgaaacaccactaacggttaaaaccgccattaaacagtggttttttttttgtaataaaccaaccgaaaaaatcgaaaccaaccattatacatatatatatttatttattaagtttttctttttcatgtattatagttactaataatataaaaaaaaactatattattttttggctaattagtaatttttcttcctgaactttgacatgtagtaaatcgtgccccctgaacttttttggccgttaa

SEQ ID NO: 292126 - DNA, 441 bp, Cannabis indica
aaatcagaaaattctattgtaaaattatagtttctttcttcttcttaaagactttaggcccgtttggctaagcttaaagagtcatcttttttgagatgctattttttaaattagaatagctttaattgatattcaaacacttgaaaaaaaacttttcatctaaaaaattttcatgtaataattataagagaaaaaataagcagtggcattacttatcttaagcttttagctataagcaaaataagaagctatccaaatgggactataatactttagtttagattattagagctaagttcaggaaatagtctgcaggctaatatattctgctttggtagtttattgtgatgctgcctcagagttcttacttaaggaacttcagactttttgactgattttagtttgtagtgaagtaagtgattgtgtgtttgattcttcagt

SEQ ID NO: 292127 - DNA, 671 bp, Cannabis indica
ctatttaataaataatacaatttttttattcgttgggttcaaaactaactaaatattttgaaaataattttttttttgtactataacattttaatttaatttttttcctattgcattatttttaccaaaatttcgattaaaaatcatgaacccaaaacttttaaacattcaaaaaaaaaaaaaaaacataaacaaacattctagaataatttatgcacgaaaaaaatgattcgtctattcgaccgcagtatatttaatcatagaacctacttcactacggataaatatttaagatattcaaatttcactataacatgcataaacatattaaataataacataaactatgaaatttctaatatagaaaaatgctaacttttgaaatacaaaaacaacacaaggcctatggtgggtagcagtgatacggggtagtaaaacaaaggttaatttaaaaaaaccaaattaaaaaaattactatgcaatcaatatacacacatacacataaacatacacacatatataaacatatacatattcatattcatattcctattcacacagatatgcatatacatttcaacatatttatatacaaatatacatatataatcttacacatacgtacatatatattcatacgtatatatacatatatttacacatatacacgt

SEQ ID NO: 292128 - DNA, 468 bp, Cannabis indica
aatcacatatttaagcttaaaaaatctcaaagctttgaacaacacaactagcatgcattccaacctaactaaacataattaatccaacattttgaacataaaaacaacaacaatcacaagcagcagcaacaacatccaaattagcatgcatttactcatatttttcatcaaaaactcaagaaattaaggaaggaagaagatgagctaacctagcttgcaaaggatcttaagatgagatgaatcaacaagtaaaaatcaaaggagaaaacccactccttgctgctcaagcttcagccgaaaatgagaggaaaagagagagcttttctttttcaaagtttctattttcaacacttagtctaattttgtaaaaaaaagagaataaacaaagccatttatctcatttatttaagccaaataacaattaaaataaacatttaatttccaaataaaaagtcactaaaagacaaa

SEQ ID NO: 292129 - DNA, 791 bp, Cannabis indica
tgcctcactatttctctgccttgtctccctttttgttcatatcaatcaattaggtctttcaataaattattggtgatgacgatagagtaatagtatatacaaataaattttttattttttattttttgtttttggattgaaaatatatctgtaactcataattattagtaacaatattcgtttattacttcatgtatagtactttccatcctgaattgcaagtaacaatattcattttattacttgatgtatagtacttaaattccaatttccattctaaacagcaagtttagagtccaaagtaatttgttctatctcttaatttcatttgtattttttttttttttttttttggtagattgaaataaaagatgggtgagagttttatatttatattattcaatagtgattcttttttttttttttttttttttttttagttagttctaaaagtgaaaattttatttaaacactttcagcgattacaatagactgaaaccagcagagacattatgctgattaaaaacacaatctgacgaaaaacaagactctctagcaagacaatgagcagccctatttgcagatcgtttaacaaattttaatgaaacattattcaaagacgaaattaaagcccgacaatccccaacaagtaatccaaactgagaaggcattaaaattgagctgttaatagcttgtaccaccaccaaagcatcagtttcaattacgacattggaccattgctttctttctatccaactcaaggcctccttaatgccaatcgtctcggcaat

SEQ ID NO: 292130 - DNA, 699 bp, Cannabis indica
acctctaaaatcttatttgtaaacattttaataatcaatagttatttttaagttatattgtgctatcttattatttaaaatacacttgggtaactttaaagtttattttcgaaacgaatgattttgtcaaataatataataagctactatttttatttaccaattgttttatatacctttttaaaatagtaagcatatatatgaaatagttttatttagtatacttcatagtaatattcaaataaaactatgtaatatacatttagtcactcatatttttttttattatataagtattttgaattttaaaaataaattaatttgttaactaaataaaagttgtagaatggtatataatcaatatataatttgagatacatttttagtttattctaaaacttatttgtatacatgcatcttaataataagttagttatttttatgtaatattataatattttattatttaaaatacatttgagtaaccttcaagtttattttattgtagaaagagtagaaactaattacaaattaagttttctttaatatataatataatttaatagtaaccaatcagtatatgattggtatcatgagtacctcaatagtttcttttatttttgaaataataaaaaaaatatatgttctcacatcttaaaataatcacattaaagagtagatcacgatgatatttttttt

SEQ ID NO: 292131 - DNA, 568 bp, Cannabis indica
cccatttgctatatgggggatcgacctaattggggcattacccactgggcgaggaggagctaagtatgcggtggtggcactcgacttcttcactaaatggacggaggccgagcccctcatatccataacctgcaagaaagtcattgacttcggcgttaagagcataatctataggtttggaattcccataaagatagtatccgataatggatcccaatttgatggcaaattgttcactgaattctgcgacaggaataaaattatcaaaagcttctcgtcagtatccaggcctcaggcaaatggacaagtggaagccattaataaaaccctaagggatactatcaagaagaagttagacactgccaaaggcagatgggttgatgagatacctcaggtgctttgggcccacagaactaccgagaaaacagccacgggccaactcctttctcgctagcatttggctcgaacgcaatgctacctgttgaagtgaacatatcgactcacagaagagagttttataatcaagaagaaaaccaagaactttaaaaattgtccttggatctacttg

SEQ ID NO: 292132 - DNA, 1174 bp, Cannabis indica
tataaaaagaggtatgtttcaaataaatataaaattagaggtaaatttgattaattgatgaataaaagaagcatttttcaacttacccctaaataaagcactatttttctcgtaaagtaattacacaagaattttttataaaaataacaaaaaatctacatcaaaataacataaaaaaaataacaaaataataacataaaaataacaaaaaaataacaaaaaattaacagcaaagtaacaacagtacaacataaaaagattgtattttctgtaaataaaatcaaaaaaatcgtaaaaatatttaaaatttcataaaactgtatttttgtaatttttttgttatttttatatatttgtgaaataatcattttttttttcaatatatactttgatataaacaaatttttttaattacaataatatcatccacatcataaaaaaaaaaacattaattaattgtgttcatatacaaaacatagtcacccagacgagctcatcaagattgttctgattcattaccgccaaacacatatcttccatccccacacgaatatcgcaactcagtttaatccaatcaaaagagcgagaggaccacacctccaacaagccatgagaagaagaaggaatgtgcgatattagtgatttgtaagctttgcttttggctgatacagcagtgtgtaattgagttggtagtttaatgaaccttttgttaaaaaatgttcttgattaagaaataagtataaaataacgttatttttgtaaataatttaggtcaaggtaagatcgcattattgttacacacgttagagaaaattaaattttatatactttattttcctcgttaatttttatctatatttctatattatttaagatatacatacttttttagatgatatcctcactataccctttaaattaactaggtgattgttacgtgccaagccacgtagtgttagttttatttaatattttagttttttattttaattaataattaaaatagtataattatttgaacgatttgttttataaaaataaaatatgtgtcagtatatttagtaagtaaaacataattgtgttataataatatatgttattaatagtaaaatgtacattaatcttctaattgaaaaaaattctattatctcatttcatatctaataatagctac

SEQ ID NO: 292133 - DNA, 576 bp, Cannabis indica
aataacacagcccagaaaacacagaatcagaaatcaccatgtgagctccaagctttgagttcaaaactcaaagttggctaaactcacccacaagcatcaaaactagatttaatctacttaaacaagtataaaataactgcagaagccaaacccatgcacaaacaatctctacagcaaccaaaatcactatttcactttaaaaatcatagttttgagtaaaaattccatattttgataaaaccatccaatcaccaacataatcttgcttgaatcaacataatatagcataaataaacttcacaaatcactaacaaactcacacaacagtcacagccaccatttcttaaacatgcaattaacaaactttctcaaaacttcataaaacttagaagagagctaaaggaaacataccaacattgtgatcactaactcttgttaaattagctttaaattccaaggagaacaccacctccttcctgctcaaagagaggccgaaagagggagagagtttgagagaaaatggtggttttttaaaaatttccctttttctctaaactttgataaaatgaacaacat

SEQ ID NO: 292134 - DNA, 642 bp, Cannabis indica
agttagtatagcatgtaaatttctcataaattatagggataattacaccacattctaaaatttttaattttttacttttatactgtggagcggaatttttttaaaaaatactgtataagttttatattgtgtactgtgttaagttttcactgttgttttttagttgttccaatgttgtttttagttgttctgttttgtgttctactggtgttttataaaaatacagtatttttgaaaagattttcgtgtgacagtattttataaaagttaacccaaattctagtatttttgtaagttttcctaaattatataggagtgttcatacaatagtcgatccaatccaatcaaatccgcatgatttaatccaatccaatccgcaaagtgtagatatctgcacttgtgcggattggattggattggaaaattgaaaatccgcacttatgcggatgggatgttgattgacatgtaaaagtaatcgaaccaataaaatccacacatatttataaaaaaaattaaaaaattaatatatacaaataacatcttaatataaagaaaatagtaattgaaaagtctaatacatataaacacaagtatattttcaaaacttaatagaccaaatgtgtattctattcttatatataa

SEQ ID NO: 292135 - DNA, 554 bp, Cannabis indica
agatataggatccccttgacgaattccacaaccaggtacaattggtcccaacttttttcctccataagtaacatgataagacaccgtagacacacagaacaaaatcaaggccacaaatctcaaactaaaacccatccgaaggagcatagcttcaagaaacacccaaccaactcgatcataggccttgctcatatctaacttgatcgccataaacccatctttaccactacgcttccgtttcatatagtgcataacctcataagaaaccataatattatcagagattaaccgtcccggcaaaaatgcactttggttggtagatataacattcggcaatacaactttgagtctatttgctatcaccttagacaccactttatacagaacattacagagcgatatgggccgaagatcacccatttgttcgggacttttctctttggaataaggacaatattagtttcgttcaaaatagatgggaactcaccagtagcaaaaaatgtttgaaccaaacgcactacatcgtcaccaaccaaattccaaaatttttgata

SEQ ID NO: 292136 - DNA, 480 bp, Cannabis indica
aaaatcacgtaatacgcctaaaatagttagggtgttacattcttggacacaaaatttcaaaagcaggaattgaggtggataaggctaaagtttcaacaatagagaatttgccacctccagtttgtgtaaaaggagtaaggagtttcttaggacatgctggtttctaccgacgatttattaaggacttctcaaagatctccaaacctttgtccagtttacttgttaatggcgtgccatttgagtttggagaagatttcttaaaggcattcaaggttctaaaggaaaaattgattccaataccaatagtcacttcaccaaattgggagttacccttcgagttgatgtgcgatggaagtgattatgcaattggagcggtcttgggtcaaagagttgacagggtatttcacacaatctactatgctagtagaaccctgaatgatgctcaattaaattatgccactacagagaaagaaatgctgg

SEQ ID NO: 292137 - DNA, 613 bp, Cannabis indica
ctatagggttatgggtttttttatttattattttttaacatttaaatgggttttttttatgccatatttttgtaaaaaaaaaaagtagaaaatctaatatttgtaaaacaacaataagttttgccggaaaaatcgtcggcaccgaaaaagtcatcaaaaaagttcgtgtcgccggaaaagctaccggaaaagtcacttgaaaaattcaccagaagtaaatatctcagatataactaaaaatataatcggttttataaataaaaactaataactcaaatcggttataattaaaatataaccacttctgtaacataataaataaatataaataacataaaataactcaaaccaaatataattaaaatagaaccgattctataatagtgttataatgaataaaaacaaataacacgaaataactcaaaccggttataactaaaatagaaccggttatataacataatgaatacaaacaagtaacacgcaataactcaaaccgatttataattaaaaacaaagaagaaatcagttcctaaaacaatgaaatataaattaaaaacaaaactaagtttcacaataaaataatttcataacacataatacctcataaaaa

SEQ ID NO: 292138 - DNA, 725 bp, Cannabis indica
ggtacagtttatgattacaagataatgtgccatagggatcagagtcaattttaaatgttattgctgctgctagcactttctttctagaactagtttccattgatgagtgcctttcaatgtaattttgaatcaatccattcatggctaacatcttcagtgtcatgctcaattccactattactcatatcagagacatacttcttcacatttacttttcacaaaactcatgaaatgtaaaaaaaaatatattcatcttcagacaaatttgctataggttctatgttttcgttgtcaatcattttcgatgtaagtgtggtggagagtgaataaaagaagataattgcgagtaagactttagttaattagaatttataattaaaaaataaaaatcaagactttaaagattaattaggttttaattaagtgtcaatataatatcatcacacatcctgcaaaaaaagcagggtgtgttcttgtaaaaaaattcattataaggaaaaaaatttaatttatataaaaataattttaatttttgtaaaaaaaaattataatattatgattaaatagcttaattgttaaaataattaagctaagggatttatataaataaaaaaaattattcataaattttaattgctaaaacaggtcttcttaaatatttaatttaattacttaaaaaatagttaattataattaattaattttaaaaatcgaatttttaccta

SEQ ID NO: 292139 - DNA, 653 bp, Cannabis indica
aagtaaaaaaatttcaacatggatgaaagttcaatgggcatgattttagacatatcaaagtttgagaggcatgatttgatagatatcaaagtctggggagcatggtttagtgaataaacaatcactgaaacagtaaaattgaatcaaattagacaaaagtccttaaatttaacaagcttaatagtttggggggaatttttaacatcttaaaaagtttaggggcacgatttactacatgtcaaagttcagggggaaaaattacaaattagcttttaaataatattgttttttttttttaaacaaaataatattgtttaaccagttggtatgatctatagttgtccttttctagggttggctctggcctatgagagacttacgcctacgcttattttgtaggaggagccaaattaaaaaaataataaatatacatattttttttgtataatttttaaaaaaaaataattatttatttttataaaaatgaaccaaaaagaattacatgttttatgggttaatttcataaatacacaaaaataataaaaatacaataaaaatatagtttcatggaattttaaatatttttcgattttttttgattttatttacataaaatacagtcttttatgttgaaattttgttcatttgttgtt

SEQ ID NO: 292140 - DNA, 616 bp, Cannabis indica
aaaaaaagtttgttataattcctttaccaaaataaaaaaaatgattttatttgatacttctataatatgccttaattagagtacaaacaaacataaccaaaagcataggttcattttaatctataacattcttttttgataaacatgaaacgtagttttgtgttgttttctcttacaacaatttctattgtgttgatcatattatcttctaattctaagccatgttcatgttcatcaattcatgatcaagaccaaatttatcaccatcaccactatcatcatcaatatattattgcaccaaaaaccaaaggttttgttggtttatcatcggaactcgatcatcgaaagcttcgaatttatgtcaaaagaaggggaggaggatcctatggaggatcatcggccgcggccacaattcagaaaccttttcttcatctcttattgtgtttggctttaattggtgtccttttgttttgattataatttgtttttccaattttatacgtgcaatctttttttttctttattatcaaagttgtttttgttgagtaagtttaataactctataaatataagtatagtaaattgtgttataaatacttaagtttaacttttagtt

SEQ ID NO: 292141 - DNA, 749 bp, Cannabis indica
ttttattttatttccttaaatagaaatttatttccttaaaaaaaaactaatttcccaatatataaatattcttatatagtatactttacatttctttgatgcttgaccactggtggcttatttaattcttaattgagattgttgttagagttttcttccatattattgtaaacggcttggtatacttaattttcataattttgctcttttaaatctttcattataatagaatttatttgatttacctattaatggatatttttgttttaatctaaaaagagccttaatcaggttttttaaattaacttactaaaatataataattaaaaatatatatgaatttctctttcgttttttttttttatttcttaattcttaccgtcttttttttcattatatatattttttcaattcatttctttctagagtaattttttccaattaatttaaattttttaaagttgaaaaaaattagtttttaatcaattttaataatatagggtctaaaatagaataataaaaaaatatagagtttaaattagtaattcgacaaaatataaaatctaaaatagtataaaccttattaaatttcattaccatcatcattatgattcttattttcttacacctcaaacaacaccaaatataggatgcatttcgaataagtcaataaaaaattgaaattaaatataattgaagataatattacgcaattttataagtttgtttaactacgtaattatatattg

SEQ ID NO: 292142 - DNA, 833 bp, Cannabis indica
cacttctcgcgctttacatacaactgttccttcctcaacttctgaaacaccgttgtcaagtgttcctgatgctcttctaaagtggcgctgtagaccacgatatcatccaagtacaccaccacgaacttgtctaagacatcatggaagacttcattcatcagtgtacagaatgtggctggcgcatttgtcaacccaaacggcatgacgcgaaactcaaacgccccataccgagtaacacaagtcgtctttggttcatccccttctgcgatccgaacttgatagtatcctgatctcaagtccaacttcgtgaagtattttgccccacttagctggtcaaacagatccgcgatcaagggaatggggtatctgttgcgcacagtcaccttgttgagggcgcggtagtctatgcacagtctcaaggtcccgtccttcttcttttggaacaacacgggggcaccaaaaggtgcctttgagggtttgatgaattctgcctccagcatctccgttagctgactcttcaactccttaagttccggaggagacattcgatatgctgctttagctggggcctttgcacctggcaccagctcaatttggtgatcaactcccctcctgggaggcagtctctttggaagctcgtctggcatcacatccttgaattcatctaacaccttcttgattacaggtggagtggactcctccactttttcgtcgtacacggtgggagcgatgacaaatgttggcctcttcttcttcaggcccctcttcagttgcagggctgatagtagcttgacttctgggggctgtctcactttggcgggtaccattgaagg

SEQ ID NO: 292143 - DNA, 1026 bp, Cannabis indica
atttaattttacattttaataaattgtgatagcgagacaaatatatagtttaaattcagaagtttaaattaactgccatttgataatcataatttaaactttgtatttttctattatgtatataaattatattatttataataaaaaataatgaaaataatctcttaattgggttggtcgggtacattagtttgaatttatttaggaaattagatttatctttaacaagctcaatatatagattggactagttatgtttttttagatttttttttaatttgtattttttgtcgagtttttcaatttaatttgtgtagattattcgagttggacaatttacattagtttatggataatgttaattttactagtaagggagaattttgttatagaaaaagttgagagaccaaattctacaaaaaaatacttatttattgaggataaatcctaattatttattataataataatatattaatttttttaaaaaaaaatactaaatcagaaaagaaaaacaaaaaaaaaagaataaaaatttatgaaattcataatttttattttaaaaagaggtattacaaaaaagtaaaaaagtatagggtgattctataatgcaccccctttaaaagggatgtactgatgcaccctctacttgtttcggcataccaaaaaaaatgtagtctaattttttttattatttaagtacgttatagctatttaagatatcctacaaagtttaagaattacagaataatttacaatatagaaaataatgttcaaatagtctattttacacgcgagtaaaataaaataatcacgcgcgcaacacactgtttcaacgcaattttcagcatgttaaacttttttcgaatttttttcaaaatttgcaggatgtcttaaatagtataatttacatgaccatgaaaaaaatgactaaaatatttcggatactaaacaaatagagatgatcagtacatcccttttaagggtagtgcgttatagaatttctctaaaagtatataatagccg

SEQ ID NO: 292144 - DNA, 301 bp, Cannabis indica
actgttagccacaaactctacctccatttcaaggacacaaaagtcacatattacaactaacaacgttcagatccatgcaattcaacaaaaaactacactatttactaagaaaaacacttacccattgctttgttgagtgaggtggaggttgagggtgaaaatggtggaggttgcagtcggccgggacagggagagttcacggtggccgtcggcggcagtgatagagagagagagcgagtgagagagagagagagagtgagagagagagagagagagtgaggagagagagagagagagagag

SEQ ID NO: 292145 - DNA, 581 bp, Cannabis indica
tgtaatatccgctaactccgaaagggtatttttgtaatattatttagctgagagtatttttattatgttacatatttatggatttaaatatgtatgggattatctttatgatgatataatatttaattttattggcatgtgcataatgcctaatagatatatatgtctggatattgttatatgggtatattattattattattattattaacgtattattattattattatacgtattattattattattattattattattattattattattatcaatattattactattattaacattaactgttatgcgaacttatatacacacacgaaccgaacgcctattttggtggaatgggaatcgctccacttcagttcaatgcgatattttgcttgggtgtaaacacgatagaaattaggttttaagctctattttcgtacacccaaaacagagaaccaacgagagagagagcacgtatacggcgtatacaatattgaaaattttcattttttcaagcggagcgcaacctgggtgaaagtgggggtacagggatcgcttatatacgacctaaggaagcttt

SEQ ID NO: 292146 - DNA, 893 bp, Cannabis indica
tattgacaataaaaaaaaaacacacacacaaaaagagaattaacaccagtaaagatctaattcaaagccaatgagcaagtcaaatctttcaagacacaccactgaagaaagaagatggaaaagaaaagaacactcaggtagaatgatagcaagtcaaattttcaagacatacctttgaagaaagaagatggaaaagaaaagaacactcaggtagaatgatagcgacaaccactgtgaaatcgaaaatagtgtgggaatcaataagatcacctgactagaaccattacggccgaaaaacggcccgcgagtcgtgttcaagcaaaaaaaaaacaagcggcggctaaaaactttgaaaaaaaaaatcctaaagagaatagagagaaactctaaagaacataatgattttagtaatttgacgtgattcaccggccactggtatcaaaaaattttcttgcaagaaaattttagctcaatatcaatatttttatagctcaatatcaatattttaacaaaaatgaacggtatgttataaatgcgaaacacctacatagtgataaaaaccttttttagattacaaattattcaaaaatttgaaaaattaagagactgttagtaaattaagaaaaatttaatcaaacataaaaaaaaaaagaaaaaaaaaaggcaaccccatatgtttgttcatatatagcaaaataatagaaaggtaacaaaacacagaattacaaaaataatcattaattaattactagtactaaaatgttttagaaatactacttatatattaaaattactgacatgaagtttaattaggtgtaagaattttataaaatattcaaaataaaatgttactacaaatattaaattatattactctattaaatggttttaca

SEQ ID NO: 292147 - DNA, 596 bp, Cannabis indica
cttttttcaaaacttgatttcgattttatttgaattagtaatgatttttttgaaaattagaaaatatcaagggtggtgacaccccatgcgcgcgcggacaccacgtgacacacgggtgtcacgcgtgttcggacaaggaatgtctgaggaaacacgcacgagggcctgtctgaaggctcattccacgtgcaaagaggctgcatacagcctccagtctcgagttttctcggctgtgcaccactgcatgtgcacgcagatggtattcactgcataccttccgcaccaaatgcattttttttccaattttttctttttttttcatggtgtttcatagaattaatttccaattttttgtttaatttttaatttagatttttatttttcaaatctgaaatctaattatcagaataaaattaatttaattttttttaataaattttagatattaatagattttaaacctgaaaatggataaaatctaattttttgcttaattagttagttatttttaaaattttattactttatattatttttaaatattaggtcagatattttatattttgcattatgtaattaattttataaaatgacct

SEQ ID NO: 292148 - DNA, 376 bp, Cannabis indica
aaaaaatatatctgaccttaaatttaaaaataagataaaaaatttagcataaagatagatttttacctattttaaacgaaaaaaaaaattgcaagtggtacggacagtatgcaatgcatactatccacacgcacacgcaggggagcatgaccgaaggtcctcggcgcaagaggctgcatgcagcctctccgcatgcgtgagggaggaatttcacacaaaaaactgtgtctgagcgcgtgctgtccgagggttgcccctcatccgcgcgcgtaggtaagttgcaccatcctgatatttttccgattttcaaaaattcataactcattcaaataaaatagaaattgagttctgtaaaaaagtaaattgtttaattttt

SEQ ID NO: 292149 - DNA, 631 bp, Cannabis indica
aaatagaaaactaattaatattccaaataaataaaaatttataaaaaaatcggaatatttccgttttttcgtttttttttttggaaaaaagcactgcctataaacgacatgtcgttttttgctaacaagcaaacgacacgtcgtttttacaatatgaaggtggctgaaaatgtaacgaaaaacgacacgtcgttttcctcacctgaagcgctgcctcacaagacggaaaaacgacatgtcgtttacaacaaacgacagcttcaacattccatccaaacgacacgtcattttccacaaaacgacatgtcgttttgcgtcgtcttcttcagcagactgggtctttttgacccgtttttcagccacgcgggtccgacggacccgacccaaacccgatcggaaattgcgtttccgacgaccaaattgcgtgttttcaaatctaaaatgttctaaatcaaataataaagagatccacatagattttatgcacgaaaacacgaaaaaatataaactttaatatcacgaagttaatcgggtccgaaaaagttttaactgaattttttttccatctttaagtttttcaagggattttcaatgcttagatcgatctataatactatacgaatatagtaat

SEQ ID NO: 292150 - DNA, 442 bp, Cannabis indica
aattaaaagaaaaaagttaaaacaacttagtataattaaagttataaattttacctaaaataattttttctttaatggatgtctttacaaaatttttggatggaaataaaatttcccctcattattaccttgcattgaggatgaaatttcattgaggccctcactcgagcacgtacaatttttttagagaaaaagtttgtaagaaatgttatagcattgattcaaaaatagctacaaatgcaccatagtaatttattctataataacaatatgttttaaaaattccatttaaaaataatctattgtacttctatcttattatttctttttttggaaatgaatttctatcttattaaatacatttaatttttttttgttttgagataaaaaaaaaattataaaaatttcaaactttatttattacctttttttttctttcaat

SEQ ID NO: 292151 - DNA, 1458 bp, Cannabis indica
agaaaacgaacctgtgtttgggcattatgacactactccaaatactgctactgatctcaaaaatagcatgatgcagtttgctattctatagcttctttgtgttgagtcggcccttggcatttcctgcatctccgaccaccatttttagtggagaaaatattgtatctcaacgtctattaaggtataaatctaatttctaataattttagtaatgtacattgctttattttttattttataaattttttagggtttttctatattattaaatatgtattgtgttttattgaatatgtattgtgtgtatatatattgtgaatgaaaaatgtgatataggagagtatatgtatgtattttgtgttgtattgaatatgtattgtgtgtatatatatattgtgaatgagaaatgtgatataggagagtattttatatattatatatgtatatattgagtattttaaactaatagttttgttaaattttgtgaatgagattgagataggagagtattaaaataaaagtttagaaattaatttctaaaaaattagtttagaaacaaaagtttagaaattaactctattttgtatcaattttttttttctattttcaattttattcacgtgtttttatttttttagtagctcgtaaatagttagttacaactacttaacaagttactaattttcattcatattcatgtatttttattactaactagttactcattagtaactaattagtaataaattaactagttactcataaattatataactagtaagtagctaaataaagaaatttgtaattttgtagtatttctttacgttgtaggttgtgagatcaatttgcaaggattcaacttatttggtgttgagcggtttctgactagcttgaggtatacatttactaaattttattattaattaattatgaatgcttagtagagtttaaatatcttaaatattcatccggagtgaagtaggttctgtaatatattgtactgcgggtggatcgactggtggaataaatatgcatgttaaatgagtttgaacatcttaaatgttcatccgtagtgaaataggttctgcgaatacatgtactgtagtcaggtgggtggtaaatttttatattgctaaatgttgttatgattgttttatattattttgaattttattttgttgttattaataggtttaaattttttgaaaatatttaactatagtcgttatgctaccgaaattttgatagaattaagataaattatttgattttagtttctcttaaacttggttgttaattagaattttatcggaagtaactttatcaaaagtcaagtacatgattttttggtataaggtatgctttctttaacctacttttattaagaatattttatatatatatatatatataacccttaaataattaaagtaattttagaataatattgatgtaata

SEQ ID NO: 292152 - DNA, 503 bp, Cannabis indica
tcatagttttcttgagtttgaagttaggatgttgcatgtttttaggaattgagttaagtagctgcttgtttatgtttgggtttgttttcagaagcttgtttatgtttaaatatgttgattggagcatgttttagtgattgttgattagtttaaccaagttttgagtttagaactcaaacttggagctttaatggtaagttttgattctgagcttgtagatctgtttagttgctttgaatatgttctatatgatctaaatagcaggtctggagtgtttggtagagtttggggttgaattgaaagagttatgaaaatttttggtctttcctacactaaaccggaattccggttcagagaagcctgtaggaaccggaattccagttggtcccaggaaactccacagaactgaaattctggttggggagtcggtctaccggttggggcagttttgggaaccctagtttttctcatttttgatatatttagggtattgccatgttatt

SEQ ID NO: 292153 - DNA, 707 bp, Cannabis indica
gatgtggtgcctattggtgtatgtgcatgcttgacctgagagaatccaaacttatctaacatagacttgacatatttggactgtgatatgaatgtgccatgatctagttgttttatttagagtcctagaaagaaattaaggtcacctattaaactcattagtcattaaggtgacaaatgtatggacttcactatcacaagttgagccaaaaatgatgtcatcaacatatatttgggcaacaaaaattcctctttcaatatgtttaatgaatagagtgctatctgcagtacctcggatgaagccatgagagatgagaaatgaggtgagtcgatcataccaagcacgtggagcctgtttcagtccatataaggctttattgagcttgtacacatggtgtggatgatgtggatcttcaaatccctgtggttgtttgacatagacttcctcttgaattaccccattgagaaaagcactcttgacgtccatttggaagagtttgatcttcaaaaagcatgcaatgataagaagcagccgaatagattctaatcaagccacaggtgcaaaggtttcatcgaagtcgatgccttcgacctgactatatccttgagccacaagtcgtgctttatttcgagtcaatgtcccaaattcatcagacttgtttttaaaaagcacacatttcctccctatacattcgcaccatctggtcg

SEQ ID NO: 292154 - DNA, 754 bp, Cannabis indica
gtaagttttagaaataatccatttgagatagctagtcctcttttaaaatatatatataattaaaataattattgattttaaaagaaaaaaaattaaaagtgatttttaaatattaatttaagtttatttttcttttttaatattagagtgtaatttcacaaggtgccaataaaatttttatcatttaaataaaattctatttttctcaaaaaataaataaataaataaataaaaattccacgcctcacccgttaggcactagcataaaagtaaaggaaataataaaatataaatgttaaatattaagagactgagagctattggattggagtgctctagctaccattttgcacacacacttgtttttacatgtattttctcgtcttgcactaataactgtgcccaattttcatggatactatatattatcaagacacatgctaatcctaaagggtatttatactaaactttttattttattttttaagctaattaacatctttgaactccgaactttgataaatcatatctcaataaactttttaagctgctaaaatttttcccgaactattaatattatcagactcaaggacttaagtccaattctgttcaattttactaacatagtgattgtccatatactaaatcgcgccccctgaactttaatatctacttaagttactaccccccgaatttttaaccatgtatcaaattcgtacccctaactttcatctttcatttgtgttagacattc

SEQ ID NO: 292155 - DNA, 517 bp, Cannabis indica
ctatcctaattcttattttttatgtttttattcgccatacctcacataagtgtgtaaatcaagagtgaatatatatagcaaaaccaacaatttatttatattttaattggttaaattaaaaaatttagaaggtgtagtaaaacaatataaatataatacatatctgaatttatatacatataaacagatatccttattattactaaaaagattaaaaagtaaaaaagtaaaaaaaaaaaaaaaaccaagtgatagagatagaagagttcaattcaaaaactacatatatagtatagagtgataataaatgtggtgggatcaagtgatgaagagagtgtgtgagaatgagatatatatgagatagagagttagccccaaaggatctctggcaatccttataggtcacgagaggtgttagccagccattaatgaggcttgccccatcccaatcccaatcccatatttacaataataataataataatcatttttccttaccctatatatatatatatat

SEQ ID NO: 292156 - DNA, 546 bp, Cannabis indica
ttcaacaggcctggccgggccgggagtttcttcttcctcttcagtggagtcacctgctcttcctcagcttcatctttaggattcaagggctcctgagcatactgcttggcccttgcacctcccttcagcttagcttcgcgcttaagttgaatgagttcattctcctgatgagctcattcggtctggccagcattagatttcctcttcttccttgccacgaacttaggagtaaagtcctcgggatagagcccgtacctcacaaggttctcctcggaggtcaacttgataatattttggtcttctcccagaagtcgggcaagtttttaagctctatccctaagagtaagagtgaggggaggacggtgatatgtcggaatctactggaactgagtctgggtaatgcccccgtccttcaccatgaagtactcatcaacaaaatgccctatcttgatgatggtgtcattcgtgccggtcaaccacttgaagcctggttgagagaaatagacgtaccccgacctgccttgcttgggggtggacttcaaatca

SEQ ID NO: 292157 - DNA, 689 bp, Cannabis indica
gaataaaggacggttcatcgttcatgtttagacttgaaaaaaggaattcattgaacaacttaataattacaaggaaatggcatgcaagtctcgctcaattgtgttacgagcacaagagggagaaatcccaatccacatataggactataactttgtttttcaaagcataattagctaatacatgagccaccatatttgttttctgaattgatctttgtgttattagccggataaagaatgagactttgtatagtacttcatgataatttttctctgttctatttgacattgtttttatttgaccttttcagtaaaatctttgatacagcctgtctataagaggctgttttggttgatgatttagctgatgttagttaaattttgttgattgtatgaataggtgaggccatggcaatagagttttggggcagaaaattagaaggaaaattcaaggagaggttcttaatcaactaccccttgtactgtgtcattcttaagattgacatttcttactactttaaagaggaatttcatcaaatttgtttgtggttttcttactcgattcctattggaatatattctcaataaacaaagacgaacaatgtataattagaataattaaaatttatgttttatagcttaattatttatacttaagctttcatgttttttaagttttatatatttta

SEQ ID NO: 292158 - DNA, 544 bp, Cannabis indica
tgttgaagaatggaacacatttattctttgattttgacacgaatctgctaagtgcggcgattttaccagttaggatttgcacctcttttgtttttgtcggcgagttcatctccaggagggcttggattttttctggattggcttcaattcctcgggcattaacgatgaagcctagaaaccttcccgagctgactccaaaggagcattttaagggatttagtttcatgttgtactttctgaggactttgaagcattcgtccaagtcgtctatgtgcccccccaacttttttggatttgacgagcatgccatccacgtatacttccatatttctgccgatctggtctttaaacatcttgtttattaatctttggtacgtagctccaacgttttttagaccaaacgacatgactttgtagcagtagagacccatatctattcggaaacttgtatgttcttggtttggcggatgcattttgatttgattgtagcctgaataagcatccatgaagcttaaaatttcgtgcccggctgttgcatctacga

SEQ ID NO: 292159 - DNA, 390 bp, Cannabis indica
ctctttctctccttcctttaatggttggattctacacaatcttccacactatgattgagataccacttgatgtgtgtgggcactactctatcactagggtatttcgaaattgaagagaagaaaagagaagaagaggggcggctaggaggctcaggtttttctctgagagaaaataagatgcaagtcatagtttcgtgaagccatcactttctatttatagaatgccatctaggtttaggttagaattgtatggcattaaaataatgaaaaatataaatggtaaaatttaatcacaatggccgaccatataaggataatgggcctcactttgtaattttgccattttgtcatttttcaatcctattttctcaaaaataccaattttccaat

SEQ ID NO: 292160 - DNA, 608 bp, Cannabis indica
attaagatgtagatgaattgtgaaattgttaaaaaattcctaaataaaagaaaggcatgttttggttgattatggcacaattaatatttatttaattcgtgacaagtttaataattttaagtttttgttttataattattctgccaattttatagttcataatcttattaaattcaatttttttttttatgagagataacaatttagtggccgagcttacatgaatttatttaagtctttagacttattttgattatggcttaataataatttttcttttatttaaaaaaatagttatgatatgatcgaaaaaaattattagttgtttccaaaataaaaataagaaaaaaaaatattacgtttctaatttggtacttatttttggaaatgaaaattattggtctaaacagacaactgccaattggttttagtgggtcccgtttgtttaatatttcctagtttgtaaaattattttccaaatgaataaaaaaaactaattaagccctaatcaaattaagaaagggggtaaatacacacaattgttatcactttatatcaaaaagtatcccgtgagtttcggagcttttgaaactgactgggaatcgtag

SEQ ID NO: 292161 - DNA, 511 bp, Cannabis indica
gtgtcacaactataccaaagaccatagttaactgtcgcagctagaaatttaaaaatcttttgactgcagagagatgagactgtttaggattaggacgacttgctgtgagatacagtaagccacctatcatacttttgtatagagtggggtctacagggtcaccagactcatctcgtgacaagttggacgtggtgcctattggtgtgtgtgtgcatgcttgacctgagagaatccaaacttatctaacatagacttgacatatttagactgtgaaatgaatgtgccatgatctagttgttttatttggagtcctaaaaagaaagtaaggtcacctattaaactcatttcaaactcattagtcattaaagtgacaaatgtttggacttcattatcacaagttgagccaaaaatgatatcatcaacatatatttgggcaacaaaaattccttcgtctatatgtttaatgaatatagtgctatctggagtacctctagtgaagccatgagagatg

SEQ ID NO: 292162 - DNA, 639 bp, Cannabis indica
tctcatagtgctaaaactctaacaaatctaagatgaacaacataatcaaacactgttattatacatgtaccaacaacatgaaatttctaacacacaacaaaaagtatataaaacaaaagtagagccaagtggatggaaaatcaaaattctgttaccaataaatttgtcagcataaattttatgtagtatcaactcttgtttaaatgatctttgatctcacttcactattaaaatctgaatcttaaccttcaagatccaagacaatgagttaagtccacaagatgaattattaataaccaaaataataaattatataaccataagctttaataatagttatgataacatgaatatgtgcagatccatatgaagtagtgtaattgaacatatctccttaatgaatttcatattatttggtatccctacaatcacaataaaaatatacacttacatttagatataatacatttaaatatagataattatattattcaggagcagggccggccaaagcattgggcagcttgggccattgcacaaggcccccatttttttaaggcccaattttttttttttttaaaaaaaaggcctatttttttcttttattttttttcatattatatatacataataaaaaaa

SEQ ID NO: 292163 - DNA, 656 bp, Cannabis indica
gatatactaatgaacataaagacaatatttcctagtgaaatataactatacctcaaacttatagtaatatccacatttttaaatttctgtctttcgttcacaatcttaaattaaaatattacctttcaatattttttaatatacaattgcacataaaaacgatatatgcaaaataaatataccaaatacttaattattcaaagttataattgtaatttcatcatcaaacttttaacagaatatacattttgttaattttttttaataaaaaagcacatttattaacttaattttgatttagggccagtttgcatcaggcccaataaaaattgcttgctagggtttgaagtagtgcaggcccatgaacaaaagcccatctttatataatacatgttgaagtagcatcttcgtaaaccctagaacagattaacactcatcagtagcatcttcgcacttcgcagagtctcaaacaattctccattgcgattctcggtgtcaaccatggcgaccggaaactccactgccccgccgcgtcagctctctcagaaagaagctgacattcaaatgatgttggcggccgaagttcacctgggcaccaagaactgtgattttcagatggagcgttatgttttcaagcggagaaacgcggtagatta

SEQ ID NO: 292164 - DNA, 735 bp, Cannabis indica
tgttgaagttgttatttcccttattttttagaattgcttatgttgcattgtcctataggaatggaaaaattagagagagaagaccaagggatggaacatctcggctaaggcatgtagagagtcacaaatgctgtggcacaggtctcttaaaatccccttgtggcccacacttaataaaactaattaattcccgagtaaagtatgtcagcctatcttgtaacccaattttgagcctaataactttcgaattgggctatgaccatgcgacacacttagatctgccatcaaaagatctttcaaatgcaagttagctcaagttctttggataaaaattgagagagttatgtctgttttaccgaaggatagtatatatttttacagctccaaattcgtatcgatgtccatgtcatcatgatctgtgctacgtcattgtggcctaggtcgaccgtacatgttcttagacacctaggggtgtgttttgacttgttttttattggtaaaacatattttgtaggtctcgggacctcaaaatctcatttcgacatctgaaaccctaacgggagacctgcgccatcttttggtgccaaaagatggtataggccggctaaggtttatgggaagcccttaatggtgtttcttgcttagtttaagtcatatggatgctaaaaaaaatctaatggccacattagttctttggccaattggtgggagaggacctatgccatcttttgggac

SEQ ID NO: 292165 - DNA, 978 bp, Cannabis indica
ttcggagggataggctggaggcaaagcaccgggaagcattgagggcggagggcgaggctgtcgccaaggccaaactcgagctccgggaggctagggaggccttagacaaaatggttgccaaggtgaagtccttagaggagttgcaccaggcagacttggagtacagggctaacttggccgtggagctgaaggagcttaaggactttaaagaccaagccttgaagaaggctaagaaagatgagctcctttctcctatctcctgcagtcgttgcatcaagcgcttcgatgatggcgtctacatggcctggtcaacaaatggccagagcatcaagctctacttctacccaaaacctgcagagtttttttttatttacagctaattttcttgtatttaagacaatatttacatagctgtttcttttttatttaaaggggagacaatatttaaggcctgtccccgggccatttgtatatattttgacctgcccttagggctaggatttttatatttatatatgatcttttttgatgcacatatctttcttttggacctgtcctttggatcaggatgtttatacttatgcttttcatttttcttttttgtgcatactcttttttgacctgccctttgggtcaggatattttacttagtttgttttttgtctgtccgtgtggtataccttagtacccccctgagtggcatagaaactttgtttttaaggcactcagttttatttaacatgcggaggctgtatacatttagacggtacaaactctttaaacaaaatctaagttacatttttggctattggtaatattttctgaggtgatcggcattccaggctcttggcacaatggttccgtccatcctttttagcttgtaagtgcctgaaccgatttcgtcctcgatttcatatggtccttcccaatttggcccaagtacccccactccgggttcttgggtggctgggaagaatc

SEQ ID NO: 292166 - DNA, 385 bp, Cannabis indica
gggtattatagtttttgtgggtgatccctagaaccgaggtccatgtctttctgtattattcagtaaaggcacacatttccaacgagtgtcacatcggaaatgcatggtctaatccctaagctttttaggggttaggtggatatataatccattatcctttcttgactgatgtgatttctcataaagtagccgtcactaggttcattaatcatagcgtagtagtatgatttgttagttcttctgctcatagcttaacaccagagagaaaacaatggagaaagatagagaaagaagaagaaacagagaagagagaaaaagagactgaaaggcagagaaagagattgaaagtgtttgttgtattcatcaactgttctgagtacaagag

SEQ ID NO: 292167 - DNA, 492 bp, Cannabis indica
ctagggaactaagtagcattttgcgcgggattgtctaatttttgtaatatttttatattttaatttttttgtacttataagtgatataatataaaataaaatattttgatgtgtgtattataaataaaataacacttttaaaaattataaacgaaatttattattgtcaaaataggtagaagattataattttatgacaaatattagaaatagcaaaattaacaaagaaattgtatatatatatatattttattatttaaaaaattatttagactttattttccaacaacaacaaagaatgatgtagaacttgatattatattgtacaaatatcaatgttacatttcagaattacaataaaaacagcctataagataaactaaaagggaaatttgaatttccatgcttaaattacttaataatttttcccctaaatgcaaagttagtaaaattggtgatatatgacaacatttctaaatttcctaaactacc

SEQ ID NO: 292168 - DNA, 634 bp, Cannabis indica
gaacagctttctttgaagcaaggccagaatgatattttgaaagggcagaatgagataatgggttacttgaagaccctattggctcttatgggagatcagagaaggcccagcgcagaggcagagccacagccagacgccgtgtctccaggagatgagttcattcttccgaatgattacagacctaatgatgtggaagatgtactccagacacctcagaacatgtcggtcacgtccattggagatacccaagattcagaggttcaggttttagagaccgttccaacaccggtggagaagagaacgaagaaaagaccaaggtggttgacgagtacaccgaaaagaagaagaagatgaagccatcaacaaccaatgtgaatgttgacccacttcggcccgttgatgagaagctactacatagttttcaaaattggttagtgggaaccatcagaaacaagtatccgagggacgtcttcaccggtctgtgtggtgtggcttggttctcgaccctaaatacagacaaactatggctttctaatgacgtaagtttattaactaagtattatatgttgttatttacttgctttttaccgttgttatttttgttttttttttttaatgttgtaatgtggttgtg

SEQ ID NO: 292169 - DNA, 536 bp, Cannabis indica
ccccagtctcgatcccgaacccaaactcagaactgggacataggaccttaaccagaaccagaccgagacccgtgacagttatatagatcttgactcgcgattcgggtaacggggccttgaacataccaatagtcggtgtctacatctgggacttagactaggacaagaacccaaacgaagaacctaacccgaacccaaacctagacttgggaccaaaaattagaacctgaataagaatcgctgaaccagtaccctagaacaagactaggaccgtgaccaagacccggacccagacttagaaacgaacacagacctagcctcacacccaaactgacactggaactcgggcccggacacggtcgtgtacccagaccggaactaagacccagacttggacataaatcaaggacctagatagggatccggatacgaacctggacttggaccaagacccagaatgagatcaaaatgcttgacctagatctggaccgagatccttacccacacccaaacttggacccgcactcgggacccca

SEQ ID NO: 292170 - DNA, 535 bp, Cannabis indica
gacctgggttgagaagaggcaaccggttcttgatccactcgtagaggtgtcccaatcggatcaagttttcaatctcgtccttgagatttttgcattcattggtgctgtgcccaatgtcattgtggtactcgcatctcttattgggatccctccgggagctgtctttgtacaaaggaggcggtctccggtagtgcgtattttgcctagtagcaaaatatacacgttcttgggagtccgttaactccgtgtactgggtatattggggagtatacccccttttctgtcgcttatcctccgtccgggtgctgcctttggaggaccttttactcctcgagccctgggaaggaccggctaaactggctgtcggagcggagtgcgagggggcttgtccatttatccctgagggatttccaaaatgggaagatgcgggggccaaggcctggccttggctatatccgggagtagcaaaaaactgtatgccgctcatcggtggagctgctgctggcacagcgcctgagagctgggctccgagcac

SEQ ID NO: 292171 - DNA, 531 bp, Cannabis indica
aagaacaattaagagactaaagaagagattgatcaatgagtaaccttccatttcgagtatgagaagataatcccttgatgaagcaggtcggaccgccggagaaaagatgtttttccttaataatttaacactcagcattatttcttattcgcagagagagatagaaatagtattttttttggtttaatgggatttaattaattaattttaattttatcaataaactattttatttttaatataaataaaaaatcacccatgaatttctcataaactaagaattctgttatataggcacattttatatagaatagaataaatacatagaaattattattattaggattttaggtattattgatattatatgaaataatattgctttttttttttaaaaaaaaattaaatgaattagtcttttgagttactaatgcatgtgaacgtccgtaaattaaagagtgatttttagttttaatgaatttctttttactaatgcatgtcattaagttggtaaattactaattcatagtg

SEQ ID NO: 292172 - DNA, 718 bp, Cannabis indica
ccgggtatagccagggccaagctttggcaccagcatcttctcattttggcaacccgtccggagtgaatgggcaagctccttcacatgctgccccgactgctagcttaacaggcccttcccagggatcaaggagtaaaaggtcctccaaaggcagcacccgacgggagagaagcgccagaaaaaggggtacaccccccaatatactcaatacacggagctatcggactcccaggaacgtgtgtacttcgccactaggcaaaatacgcactaccggagaccacagccgttgtacaaagacagctcccggagagatccgagcaaaagatgcgagtaccacaacgacattggtcatagcaccaatgaatgtaagaatctcaaggacgagatcgaaaatctaatccgattgggccacctctatgagtggatcaagaataggttgccccaccttaatccgggtcaggtggctgggggtatgcctccgggaacaccagggggtacagcaggagtattggctccagctgctcccgcaggtgacgcccagcatattcccggactgccgccccggcctaatgggcgggtagccatgatctccggaggtccccatatcggagggaatactcgcaaggagcgaaagcgatacgccgaggccgcaaaacacaatgagatatgggaagttactcaactcccagctcaaaggcctcggctgatggaccaaccc

SEQ ID NO: 292173 - DNA, 455 bp, Cannabis indica
cgaagaaaaaacgaaaaaaatgcgagctgtacggacagtatgctaagcatactgcccgcgcgcgcgtatggggttgcactgccgagaaaactcggcgcaagggggaggctgcatgatttccgcgcgcggatgggcgtgattcagacaagcgctcggtcgagcacctgtctgaacgcgtgctgtccgagggtgacaccctcgtccgcgcgcgtaagtgagtgcatcatccattctattttttttttcgaaactttaaaaatcataacttaaaaataattccagaaacagaatttcaattatttttcacgaaaattaacaaacatcaatcaatcatcatataacacacaacacaacatgaaaccatccaaatcacaaacaatcgttttaaagtcaaaatttcttacaagcaaatcaattaccatggctttgaggctagttgttggaatttattatac

SEQ ID NO: 292174 - DNA, 651 bp, Cannabis indica
cttaaacccttatgtgtttatttcattattttagagaattcatatttacgatgttaactcaacatacttgttagtaaatctagatcctggtaaaatattcccaacaaaacctacatatgatgttcttgataacaaaatcaagaaccttcttgcatgtgatggtaactagaagtttggcttttgtccattttgtgaagaagtcgactaccaaaactacatactttgctccacctcaccctgtgggtaaagccccaatcaaattaattcccatattacaaatgggtatggcaaggtcatcatcctcaactcagttggtggtatgcgaggtatatgtgaaaacctttggcatttatcacatctcttgacaaatttgtgtgtgtctttgatgatagttggccaatagtatcgttgtataattatctttttggataagctctgccagactgaatgatctccacaaagccttcatgaatctctttgattatttcatttgcttctgctggtaacacacatcgcaaaagaggcaagataacctctctacaatttttcctcaaccattgtatagcgcggtatcaaatataagagtttgtataccttagttttatttgtaggaagttccccatttatagatacttgataattggcattttt

SEQ ID NO: 292175 - DNA, 527 bp, Cannabis indica
tgcctcgctggcatgcctagagccaagcaatcagaaatccgcgcaaagcaaccaacacttagcgaattcagctttcgcatcgcgagtcatcgaagagatccctataacttggggatcagattacagagatatggcaagctgtccaaatcccatgattagtgtattatgcatttatcatgcaatctttcttcttatatccattgtaacgagaagggaaacacttcttctccaagttcacaaccctttaaatagtgatgcatgttcactgggcaaagggtcgagagatttttacactagagatattatctaagaattcatattcagagatactgttgcaagagctataagaaaggaacctttctccttgttcttaagtcaataaaataacgaggattaggctattaccgaactactcagagctaaacctttataaaattcttgtgtctttacattactttattatatatcaattgctatattacttatcgcttactaaataagtctcagtgtcgttggctaaaagcgaa

SEQ ID NO: 292176 - DNA, 763 bp, Cannabis indica
aaaaaaattttgcataatgacctataatgtgaatttttcaccatgtatagttcaagaatgtcaaaactcaactaatcaaaacttttattcatagaaatagtatgtgacataccaattaagcatgtatgcataagagagtgaacaagaaggatcaaaagcaagtcaattagccaaacacttcaaatttcattttctttttatctaggcatcttaatctcatcaaaataagtagaatgaataagaatgatattaccgattcccaaatttgttaatttaggttgtgttcaagaattgacacgctctttttctatgctttttgagacttgttggtaatgtaggaaattggcattcttctttaagcatcaacacccaagagccaactttggttcctctttattgatacctacaaaacaaacttatatctttctttttggtacccacatgactttgggtcctttgatgttagtctttaaaacctttggtatccaaatagccttaccaaaataggcattctttttcacatggcaataggatttagtgtgaccatcttggttacaataagtgcaagttaagttcaaattactagatgatttgacaaagaaattcctaagaaatttttgtttcacactagtgttatatcctataccactttttgaaaaagcacatttttgactcccaagcatcatttcaaaattctcttttccttttgtaaaattgtaaaccaccttgtttaaatcatcaattttagctttcaagtttacaa

SEQ ID NO: 292177 - DNA, 591 bp, Cannabis indica
agttagaaaattcaagaattgtttttctctcttcctctctctttcggccattccttgagcagctgaagtttgagtttttttttctgtatttccagcaagaatcttcttgattttgaggtgcttaaactctaggtaatttcttgtagcttttttctttggctttcttgagtttttaaggaaaaagatgataatttgcatgcttaatttggttgtcttgctgctgttaattgttgttgttgtcttcagtagtttaaacttgtttatctgagttgaatgaagttggttgtgatgcatgcttgtggtgtttattcaaagttttggattttggttcaaaagctatggttttcaaggtgaaaatgtgaaaatagttgctgtgattgttaatggtgcttgagtttgttttctggggttataatatggttgtttatggtgaattaaggcaggtttgatgcatgttagttagatttaaccaagtttgagttttgaactcaaagcttggagctttaatggtgatttttgattctatgttttctgggttgtgttgaggctttagaaatgttctttgtggtatttagaacaggtctaaaaggt

SEQ ID NO: 292178 - DNA, 513 bp, Cannabis indica
aacatatcatataatttctgacttgtatttaggcgcccatacacctatttacaaggctaaatagatgagtacgaacgttccatactagggtatagccactataccacatacactacgtacctcaatgtacgagtgttggtagggtttgtttcataccctgagtaccactgagtgatataccacgcactcccagtacctctccgtacttatgctggtatcacggtactctcagataacattcactataccaatgcactctataccataactgtataagtgttggtagtgcaactaacattttaagcatgcatatacacataacatatacatacactcagatatccatatcacacattatatacaattcttaccttctatcaaaattcaagggtgctggccaacctgaacaaaaagtctcgtgctagatggatgccctaatcacattaatcacaatataggtgagtgacacgctaaaccacttttcgaggacttaaactttgaaactaagagttt

SEQ ID NO: 292179 - DNA, 795 bp, Cannabis indica
atgttcagaaaggtgaattaaaggcggtgacttacccgaaggcaagtgataactgttactttgttgatctgattgatacaattgtgagtgagaaaaagttgatagatgaccctttagaactgagttaaatgaagatgatttgacggagcaagagggaaaagaagtaatgggttatgttaaatggcttgattcctatgggccattaaacagaaaatattatgaagagttgggagtagtaccaaaagatcttgtgccatctactgaaaaacctccagagcttgagttgaaggttcttcccagtcatctacgatatgagttcttgggagaagataagaagctaccagttatagtgtcagcctcactttctgatgtggaaactgatagattgctcagagtacttcaggcgcacagcaaggctattgcatggacactgggtgatgtcaagggaatcagtccctcaactgtgatgcatcgaattctgatggaagaaaatgctaaaccaacaattgatgctcaacgcagacttaatccacctatgaaggaagttgtcagaaaggaagtggtcaagtggttggatggtggagtggcataccccatctcagatagtaaatgggttagtccagtacaagtagttccaaagaaagggggatgacagtaatcaagaatgagaagaatgagttgattcccacaagaacagtgactggttggaggatttgtattgattatagaaaactcaacaaagcaacccgcaaagatcactttccttcgcccttcattgatcagatgctagacaga

SEQ ID NO: 292180 - DNA, 556 bp, Cannabis indica
tatatagtaaattatatattacattattttttacttttattattttttaatcatttattatttacattaaaattactaactttttaaaaacatttaataccactttattacattttaacttatatattacattttttaatattttttttaattaaatatttttctaattatttattatttaaattgaaaatattttttttaaaataaaattacttcactaaatttttaaattacatgttccaatttcaattttatgttttactttatttattttattttatcaacaattactttattaagttattcttaatttttttttaaacaattaattaatttcacattttacctactaaaatttcggcagcataacggcttaaaaattgtaaacccaaaattttcaaaacctataaacaacacaaacaaatattgcaagacaatatataaacaaaaaaataatccacccatccaacagcagtcaattttatcacagaacctacttcactaacatgcatatacatataaactaatatcaaaaactactacgtactaagcgaaa

SEQ ID NO: 292181 - DNA, 783 bp, Cannabis indica
aacttgaaaaagtctgagcgcaacacaagaggctaaacaactcccttaacctccaataacttgaaaaaaaggctaagcgagacccaaaaggctaatcagctcccttaacatccaataagtaatcgatagaaggttgagactgctcaaaaagtctaaactcccttaataataaggttacatctaaaaataggttgagaaagcccaagtggcgaaagactccctcaaacaaaaagatctcaaggcgtaagagcctaaagagacaactgcaaaaccaagcaaaagggacagcgcatgctaaacttagtctaaaagaacacttaaaagagttcttatggactaggggcaagtgcttaccccaaaaattaataagactaattctcgagattagtcaacaatagtctcgagaagggaaagaaatcggctttaagagtcagccaagtagggcttacgaccacttaaccaaacccttgcttgagagccatggtcactcggccatggtttcatgaaggttactcggccatggtttcaacaagtcactcgaccatggtttcaacaagtcatttgaccatggtttcaacaagtcactcgaccatggttttatgaaggtcactcaaccatggacaatgaaagtcactcgatcatggtttcaaccttggtcattcggccatggtttcaactaggtcactcagtcatggtttcaacctaggtcactcacaatgatttcatctaggtcagtcgaccatggacaattaaaagtcagttgaccatatgccaagcatgcac

SEQ ID NO: 292182 - DNA, 915 bp, Cannabis indica
gctttcactttaacatataaaatgttagttatgttagttagttattatgatgtaacaaactcattaatcaatgatctcattattctcattttcattaagaccaatgtaataaaaaaaacagaataaaaagtaaaatactttatttattaaaccaaatattgaacagtatgctacatacataataaattaatttcagaacaagctacttttattaattaagatgagtttttaatgtcttgacagtttttgttgagtggtctgccaagtgacttgcgatagttctttttgtacacatctgcccaatttttattcttatcacaacggcgtctcgccaacttttcatattcttgttccaattctcttaatataaaaggcgacgtacgaatagggttcttcctcattgcatccacaatatcatcaactcctagctcgctgtacaattttttaatacatctaagattttgaggtgtcaagtaatcttcaatacggatcatttctgcgatgtcgatgttgttgttgatcttctccatgagttgtgccacattcttgattgttactttcacagactccagcaacatgtcaaattcaaacatctcatcttcacatttaaacataagtttttcgtatttatttttctcagcatgcttgaaatagtactcgtcactttttccggaagtgactaaagcacaacggtcatttaatacttcagagcataatctttcggtatcagttaaagaagtaggcgtgattgcatcaaaggaattctttggtagaaaacgatagctcggggtccttgaaagaatctttattttgaatctaagattaggacgtttttgatcatgagttgaactattattgttattattattattattattactattagtggtaagaattgtgggcatggtattagtg

SEQ ID NO: 292183 - DNA, 805 bp, Cannabis indica
gataatattatattattctaatttagttatttaatatttgtctattatattcctaagctatagttataagtgacaaataagatagaaaattgttaaatttcactagtattaagggtcagtttggcacagttgtgctgtgggaaaaaacaagctgtagctttgctgtgagaaaaagcagctgtagtaaaaaaaaactactgagtgtttggtaaatataattttaaaaaagttgaaaaagttgtatgtaagtgtttggtaagctaaatgattaaataactgttaaatatataattactaaaatatgtatgacatttgttatctaatttaattaaataattttatacatattaatatattcataaatattatttattatattataaattacggcaattttttttccttatgatatctaattcttttaaatatttatataataaaacaataaattagacttttactaataataataataataataataataataataataagatgactgttgagtagtttctgatcagagaaggattttttttttttttctgaataaggatgagattgaaagaatgtaagaagccctaaaattaattggtaaatggagaattttaaaattagatgagggcaattgggtcaaatgaaaaattcattaaactcaaatttcaaattcccttaaaagctaaaatctaaaagttggtgtgggccaactttagctaaaagctataattttaacttaaattttaaaaaaaattattttttttattttgccaaacactttttaagcaataactttctcaaaaagcac

SEQ ID NO: 292184 - DNA, 717 bp, Cannabis indica
caacgtctagctgagcgacgataaagttagcgctaattgggaggcaacccaagtgttcttttgatttagttgaactctttttttaagtttactgttatttttcttgatgttcattctgtttcgttattaagaaaaaaaaaaaaaaaaaaaaaaaaaattttggtcagtggccgcggccatgagatgtctggccgcggccagaattgacttacagaaagcagcttattttcgagatttctcgccgcggcgagggtacataccgccgcggcgagattggacttacagaaacacccagattttcacggattctcgccgcggcgagggtataggtcgccgcggcgagatggtcagttttccctttttaaatcccaaaaaccctaacatttcaaaatcacacctcattcaaacactttcttctcccagccgaaaaccacctcttttcaccctaatttcttcatctaatcccattcaaaccaattttcctcaaaattacccataaactttcatcccaaatcatcataatctcttatttctctcatctaacactcttttcctctaaaaatccattccaaaatccctaaacctcacccaaatttcagaaaaatcactattcatcttcttcttccctaaagcttcaaggttctcatcaatggaggttgactaaagagtgattttcattgaggtattgattctaagacttccattccaatttttatt

SEQ ID NO: 292185 - DNA, 489 bp, Cannabis indica
ggaagtggaaattttcttggtgattcaagccctttttagcaagattttgcaatctctaattgttggtaaagtttcttcatattgctcttttagtttcttgaatttttgatgaaaaagatgattgttgcatgcttagtttgagttgttcttgctgctgtgttttgatgttgatttcagaggtttatttatgatttaaaatgttgattcaagcatgatagggctggtgattacttgattttattaagatatgaaattttggctcaaaactatagttttcaaagagaattgttgaaatctgttgctgttgttttgttgatgtttgttgtagttttcagaggttatattatgcatgtttaagtaggtttgggctgatttgaatgcatgttagtgttgtttaatcaagtttgagtttggaactcaaagcttgatgctttaatggtgattttggtttgtttgcatgaagctcggtttttatgctttagaattgtt

SEQ ID NO: 292186 - DNA, 602 bp, Cannabis indica
tgataaaaatgtgtttggtaaaccgtcaaaaacagcttttgaaatttttttggagaagctatagctaaaagctgaagctgctccaacctaacttttagaaaaagttattttgattaaaaaactataataattttttttgtactaaaaccatatttacttatttattacatattaaaaaaattaaaataaaattaaaataaactaattataataaaataaataattattaaatctcttatttttttttaaaaaataatttatattttattttaatattaacaaacaaaatcaacttaaaatttttcttatatacttgagtttctaattttttttacatttgataaaacataataaaaaaatactataaattatttttatcaaatgtatataaatttatatttgaaaaaaaaattaaaaatataaaaaaaaaaatattatataaaataagattttacatatttgtgattttaataaactagattataacattatcattatcataatagatcttaacaactcacagtactttaaaatttataatttaccaaacactcagctcagcttttttccacagtttttctacaactgttttttctcacagc

SEQ ID NO: 292187 - DNA, 754 bp, Cannabis indica
taaatacactagaaaaatacttcaagcaaaacagataataactatctagactttcattgactaattaatttattttctaattataatatattttagttcatttattttaattaatcatttaaatgaaaaatataatgatttaagttggtctaaaattaaaataaataattttcaactttaatctatttttcaagaaaaattcaaaattttctgcatttaaataaaaaatgcaatttcgaattttaaaaaaaacaattaataaaataaaaataaaatatattttgaaaattattcaaatttaagttgttctgaaattaaaagttccaactttaaataattttctatttaattaaatattcagaaaataataatatttaagtatcaacaatgaaatcaacttaaatatttaattttcaatttagttaattgtattaaatacaacaattaaataatcaagtaaaaaaaatcttaattattaattgtaatttaatactagaaaaaatattcttaatttaagttggtccaaacttaattaaaataaataattaattttcaccttaaaatattttcctaattaaatattagaaaatataattagttaatagaaataactatctagaatatatctcattaactaagtgtttttctaaaattaactttaaaatattcaatgaaaaaataaatttcatatatttcaaagctaattatgttgctaatttaaatttaactaggttagactaatataattaaccta

SEQ ID NO: 292188 - DNA, 522 bp, Cannabis indica
gaataaccatccataagggggacgaagcctagcgtctcgaggttatattgaaaacattttaacattgtaagaccaacaatggagatcgaatatctcttgattaaagctcattatttaaaaacaatgttatttttaattaatcatttattttaatccatatattttaataataaaaattaattaatttaaagttggtccaaaattaattaaaaaaaaaaatttcaactttaatttaattttcaatatttaattttcaaaaatcattatataataaaatataaaatttcgaaaaattataaaatataataaaataaatattttgaaaaatatctaatttaagttgttctaaaataactagattttcaacttaaattattttcaaacaaaatttaattaaataacaaattaagttgcaaccacttaatttgaaaaatattccatttgaagttgatccaaaattttaacaaaatttttacttaaaaaaattatcctaagaatcgtcaataactaattcctagaatt

SEQ ID NO: 292189 - DNA, 737 bp, Cannabis indica
aagcaaacatttaggctcacacaggtcaaattaatttggatgcaccctatcatatttctaggtttacacagataaaaaaatacaaatttacctgttacaaattacttataagatctattgacaattagtgtatgattaaaatcagatcattagatctgtcaacaagttaatcatagcaatttagatcaaataaataataggttcgttaaaaaaaggttttgaataaacaattaaataaaataaacatattatccatgtaacaaattgtgaagtaagatatttatataattaaattatttctattttgaaaatttaaggttgttaaaaacacctaaaatatcttttcaaaaatttaaaaatttaaagttaaactaattttaaaatatctaggtttatttgaattacttttatcaaattaattaaatatataataagataaatgatttgaaaataaccaaatagaaattttcaatataaacaaatattaattttccaaattatatgtcaaaatatctcaaattaagcctttttcaaatttatacaaatttatctaggttacttaaatatttaaaatactatttacaaatttctaataagtaaaatgatataaaatatcatttttataacttataatttataaataattaaatatttcacaaaaaaaaactatttttgaatttgaaaatattattgttagaatatcaataaaatatctaggttaatttcaaatttattaa

SEQ ID NO: 292190 - DNA, 985 bp, Cannabis indica
tagacaatcgtcgcattagtaaaattgaacaaaatttgacaaaaattcagggtataatttagtacatgtgaaagttaaggagcgaaaattctaattaatcgtatctttttattacttggacaaatctatatatatctaaagctaagacataagacgatgacatgacgctctaaaattgcttaatagtcattttttctccttaattctctcatatcttttctctttaaaaaattattaaaaaaatatgataactaatattattttaacatgtatttgaaatttcataaattaaactaaccactacaagaaaaagtacttttgtcagcgagttttctcactggtaaaagaatttatatgtcaccggcataattttgccagcgagcttttgcaccgataaaggatgccagcaataattcgtcaacataacgtgttttgccagcgaattaccttaagtcacccaaaaaactatttataccgacgaattaagtggccggcataagttcctcgccgacaatgtgttgtcggctgagggatccctgatgacgttttgttagtgaggtattattcgcgcctaatttttatttacccgcggtcgcaatatgtcgccgacaaaactttggtaataaaatattatttagttttcccggcgatatataatcgccgataattttttttaaaaaaaaagtagtatttataataaaattaaaattaaaaatcaaatgtttttttaaagattaataataaaaaaatacaaatccaaaaatatattataaaattcaatcccgcaggttgcttgtccagtttttgttcaatattttctctatgtacttcccctaactccctttttcttacttttgattgcacctgcatcagccattctacccatacaagctagaaataattaattaatcaacctattaacaaaagaaatatgtatttgatttaattaacaatgagtttaaatattacaatactttaaagtcta

SEQ ID NO: 292191 - DNA, 676 bp, Cannabis indica
caacaaagatatgtacatattaataagtaaaatgctaagggaggtgtcaagcaccaaaagatgtagcatatcttaattggtgtattttaatattgcgtctcataaattttgatttaataaataatatgggaagttgctatatatatataaaacagtagtaacaattaattatctatagacagtataaagaagtcaaaattaaaaaagaactaaaaaaactaaaaaaaaaacttaccaagttatgcataatcaaacaaaaattaaaattctaattaaatcaataaagaaatgtacttaatacgaaacatgctaacgtatctatgcttcatgatattgaaaagaaaaaaaatgataaaaaaagatcattcataaaaagtaaaaaagaaaataaaagaatagaaaaaaaaaaagattaattgttatcaatgacccaattaaagaatactgaggtataagatccctatagctgacacatggtctataagattgtccaaaatgcctaaagatgtaggaaagaatttgcactacgtaatttttttagttctgcattaaaataaaaaaaaataacaaataaaaaataaaaattacaaattaaataaaaaaaaaaaaataaaaaaagaaacaaaaagacaaaaaaaaaaaaaaaaacaaaaaaaataaaaataaaaataactac

SEQ ID NO: 292192 - DNA, 525 bp, Cannabis indica
tcgttcccaccataagccacttgggccgcgcagtactcaaggtacatatccttagcctcgcccaagtagtcaaagttggcccggggattagccttccaaaaatcaaagaagagcttgagatcggctgtctccaaggcattgaccttctccttcaacctgtccacctcagccgtaagctcccccaccttggcatccttctcctcctccatccgaagaagaactgctcgcagagaagtcctctcatcctaaagactgtttacttcagcagagaaagtcttgatggtctcctcaaagcgatcagcagcttcgagatcctttgtcagcacagagatcttcttctcggtagcgtaacagcttcttgttggcctcgtccaactccaaccgaacagctccagcttctgccctggcctcctcagcttcctttttggccaagtccgcctctgccttcaaggtgttggacagagcaacgctcttggaagcaacgagacttagccccgggagtaagtgtaggccaacttcagatcg

SEQ ID NO: 292193 - DNA, 518 bp, Cannabis indica
tgcagccacatactccttttaatcaaataataagtaattaacaatttcattacttaataaataaaattatgtaagttgtttaagtgtcttatagtaatactttaattttttaatttttaatcataaaataaaaataaaattttgcttctaaaaatttagttttttaaaaaaaaaaaaataaaaatacattttgtaactacttttatttttcaattttaaaaatagaaaataaaagtgtgttctacaaaatttacttttatttttattttttgattttatttaagtcgagtctaggtccgggattagattcagattcgggtcagaggacggattcagtgctagggccgtgggaggatttgggttcgggtttggtcagagtccaaaatattgattaagaaaaaaagttgtttaaaaaaaatattgaaagtaattttttttttgttttcaaaattttaattatcaattaaaaaattaaaaattgaaaacagttttatacaatatatttttgaaaaatattt

SEQ ID NO: 292194 - DNA, 587 bp, Cannabis indica
attttattaagtgactataataaattttaatgatggttattttatgattttaaaaaatatataaaaaaatataagattaaaatacacaatttattaataacagtttattttttgccaacaaaaaattagtcgagagttaaaaaaaaatacaatacaattgcacacatatatttaatatgtaataatttaagtgagtttgacttaagaaaaaaagggcaggcctttcaaagaactatacttcttgaatcttcttgattccgtctatataaattatattttttcttttgggcaatttacataaattactttaatatttaatatatatgataataaattaattaatttttttttcttctaatcacacttttgtttttctaagttaacattgagttaaattattctattttagtaaatacgatacttattattattatgaaaattattttatttaatttaatattttaagtatttgtgtcacaaattttttaatagtaaagttaaaattttaatataattttactaagtaattattattaatcaaaatacacaatttatctttttatatataatttaaaatattttatata

SEQ ID NO: 292195 - DNA, 728 bp, Cannabis indica
ctaaaaaattatttcatatgctataacagataagtgcatcaatacatttatttaaaggagttacattgtagaattttcttagatatttatacatgatactaaagtatctagttcaatgcacatgatatcatatgggtttatttcaaattttgataactatttcattcacacacccacaaaaaattatgaaaacattaaaatcgattggaaaatcaagtagtcttgcccataaccttgcccattttgtgtgattcatcacataaccatgcccattaagtatttcgtgcttctcatttggtcaaagtgatgtgattttatcaattatatatggcaacgttgtgcttatcttctccatttctattgcgtgttaccctttgaactggagtgtttaagttgtgaggctacaatatataactcgttcacttacaaccaaacaaaaaatgccaacaaaaaaattaaaatattataatgcaaacccaaacgaaacttaatggcttgaatttttggcgcatatggcattgttacatattattattgctaggataaatattattttggatcagtgttttgcaaaagttatagattgaacattttgttttgttaaatgacaaaatgaatcctgtatttttataatgataaaaataggatcctgagtttaattttcgacaactttttttttaatcaatttgaagacaattcctaacacgaacaaattcagaaaacgtaaa

SEQ ID NO: 292196 - DNA, 576 bp, Cannabis indica
agaatcttctatatttcttgaattctaaggttgcttttagggcaataatttagacaccttattttctttagctacaagcttatcacctggtatagtatctttcatgccaaaatttttgaatactttattgatatatctcttttgttataattcaagaatatttcaagaacattctcaacatatattgaattcctaatacaaaatgagtatatcattaatggcaagcaattgttcaccaatataataccaggatcatattcttactcccactgaacctgtgatatatacacaatcatcaaaagcttttatctcaaaaaccaaatgagaatacttaatgaaaattgtgtaattattcacgagaagcttacttgagtatacacatggattttcctaatttgcaaaccatattctttggatctttggacacaaagttttctcgttgcacacataacttttgtcatcaatatcattattgataaatgacacattagtaatccatttgatataactcaagaccataatgagcagtcagtgtcatgcttgtcttgaaatagtctttcaattaaaccaaagaaa

SEQ ID NO: 292197 - DNA, 600 bp, Cannabis indica
aacgataggagttgttagagagatatgtggctaagatgattttttaaatttaaaaagagattattaatatttaaaagattgtttatttaaaagattgtttaatttttgggtttaattattgggtttattttttaacgggagatcaaactgaatcgttaaatttaacagaatattcttttatttttaagtatattttgttaaaccaagaatgttaaacatagaatattcttttatttttaagtatattctgttaaaccaagaatgttaaaccaccgttagataggtacttttaatatataaagatatcttaagctgtatgtttatgtacagtttgtaatcaccttaaaattttaaaatcgcggttcaaatataaattataaattaaaattttaataaagaattttcgtgagtttcgctagtaaaaaatttaagaactcttattataaattttacctctatataataaaaattagtttttaatgaaaaaactaatttcttaatgaaaaaatcaattttttgatgaatttttttttttcttgatgaaagatatttggtgagcaatttatctaaagattaaatatgaattttaaaaagtaaatt

SEQ ID NO: 292198 - DNA, 524 bp, Cannabis indica
gagagagagagagctcttgagagaaaaaaaatgcaaactttgctttcttttccaattttctatttttttttataaatgataaaacatgcataactctttcctttatttcagctaagataaatcaaataatttcataactctaagtccactaaaggacaaaagcttatggggcaaaatgaccattttgcccctcccacactaaaagggtatttttgggaaattctaaattcctgaccactcccgacatttccaatgtctaaatgaaccgccccaccatactaaaatattagattgtgattctactgagccatacaccgcgttccatgttgccgggcaccgaaaatacaaaattatgagatttcactatatgacataaaaatgcattctgaattcaaatataacaacaaaaataattatttaaatatctataaataattttcataattaaatcttaattatctgctaatttccaaattaaactaagcggtctttacaactatcctccccttaaaaggatttcgtcc

SEQ ID NO: 292199 - DNA, 557 bp, Cannabis indica
ttttgtcaaacgatctgcaaacaagctgatgttttagccaaggattattgtttctctctagatcgtgtgcttcaattggagaattattctaacgaagtgcgttctattattattaacaattgccagttgacaaagttgctaaatttattaaaaaaaaaatgctctaactaaattgaattacttttggttcaaaattatactttgtatttcgttacatatataatatatattttaagtaattagttattttataattaatttttttaaagtttataaaatatacataacaataataagatatatttggcaaaagtcaatattaatattactgtttagcaacataataatattgtaatccaaaaaaaaaacaatatctgagtatatatcaaggtcgatcttgagttgaaatagacctttacaccacatactaaattttaatttttacttttatactgtgggacagaattttttaaaaaaaactgtgtattgtgttaagttttctactgttgttctactgttgttttttagtttgttcctactgttatttttagttgttc

SEQ ID NO: 292200 - DNA, 612 bp, Cannabis indica
gccgcattttttaagtgcgcttgatcacgtttttcctccagaagatcaaggcagagtaactgcttctcctcgttctgcgagatgttgaaaacatctctgcgtagggaacctgccccaatttcaactggcaacatggcctcgcacccgtaagaaagcgagaagggtgtttcgccagttgtggatcgaggagttgtattataagaccacaggacttgcggtaactcgtctggccaagcccctttgcgatcttctagtctccctttaatggtgtgttttattattttgttaacagcttcagtctgtccattgctttgcgggtaagcaaccgcggagaatgcctttttgattcccagatcgtcgcatagttgtcgcatctctttacaatcaaactgttttccattgtctgagatgagtttgtatggaataccaaagcgacaaattatggaggtatagacaaactcgcgcaattttgttgctgtgatggttgcgagtgctttggcttcggcccatttcgtgaagtaatctactgcgactaccgcatatttgactccacctttccctttaggtagctcgccgattaagtcaatcccccatactgcaaagggccatgga

SEQ ID NO: 292201 - DNA, 936 bp, Cannabis indica
taacagcaaaaatatcaacgtttcgacctctaaaaacaagatcattccttgctttccaaacttcttctaataaatttcccataaatgacaaaaattgccaaataaactctcctggaacttttgaaaccatatcaacaatcctgtccaatattgtttctattgtccactcaacctgcaccagaggaaaggggccactgaaccataaaactctcacaaaaggacactcccaagaaatatgcataggtgtttcttcgaccaagtcacaaaataggtaggatttgtccttaacaaaatccaatttatctctagtagggagacaacaaaccaccactctccaaatcataaaagagagcatgtaatgaattttgtaattccaaattaacttccataagctactcgctgaccttgtgaaggtcctctaagttccctcatatgcgcgtttgactaaaaacctgtcgtcactaagttttttctaaattaacatgtcaggattgttagcagggaacctaacgatgttacaaattttattttctaactttcttccaaaaagattaaaaaccacctccctattcctattataaccactagttgagttctcaatattatgatttagggccctgtaaagcgtcgagctgcattttctactcaggttgactggcacacttgagcacggaacgaggtaagatagcataagaatatatatatgaatgtatgcttgttttggatgtttgcactactagcgctaaaatgaatgtgatttaagagtgttagtatagtgtgacatatttgtatggctacagtgttaccaacacgagtaccagggggtacattgtgcctgtggtacaacacttagtagttttcgggagtacaattaaggctctaccaacatgagtacagggttggtactttagtccattggtacagtagtcgtacttc

SEQ ID NO: 292202 - DNA, 833 bp, Cannabis indica
tgtttcaagccttgatattataatatggattgttttaccatctttattcacattaattatttttctttaaattgtgtggtaataaagttttattttgttaatttgtaggtcaggtttgaggaggaccaactattactgagatttaccaataagtttattttaaatatagtttatttgagagttgttatcttttaacaattgagaatttcttttattaattttaatattattgctagaggattaatgcaattttatcttattttattttgtagatattttgggatcattcttgatatatttatgagttggtgtatagtatgaagttaaagctctaccgctttggatgtgctgtttgaggatgttatagctttattgtctaaattttcgagggcaattatgtcccacgtggctcgctctgagaatttagcggcccatggcttggcaaagcatgctctgtggttagacgatgagctatcctggttcgaggagggtccaacaccggtggcggacgtttgcgtcgtaaattcatgagtgattctaatcactttgtcaaaaaaaaatatttaaaagggtattttttgaaataggaaatttttttatgtatataaatgaaaatttcttttcataaataaaataaattaaaatagggaaatttgacattatatgcttaaaaataaatggtacactaaaaatatgctaggatattttgcatcatgcaaaatatacttaaaccatttttgcattacaattttacccctaaacaataaaaaccaaaaatcgtaacactctctctctctctctctctctagaatacacacacattgtaccaatcg

SEQ ID NO: 292203 - DNA, 79 bp, Cannabis indica
tagtagttgcctataaatagagagtgatggctcagtcaaatcacatgctttcattagttttctgacagaaatttactct

SEQ ID NO: 292204 - DNA, 537 bp, Cannabis indica
gtgttaaagatgttggtttcaatatcaactaacggaaatgttaaagatgttggtttcaatatccctagaccaagttacttataaacagaataagacaataaattgaggaaattacactgcataactcttttaatttaatgcctttaatttttactctcactttcaaaatctattatgtatatttcttctttcaatctttttactaattttacccctatcacttcacaatagttttcattcttctttaattaaaattttgtccaaactttcccataaacctaagcatccatttacaaagaatacaaatctattatgtttgaaattatatgttccttatgtaagcgtgtacagataattatatacttacatactcataaaaaaaagatatatttgaactaaatttaactccagcagctcaacccaatctgtccaaccctagttgaatatagtgatgtggggtgaaattgtgaagtaaaaaatacaaatataaaacaacttaaaaaaaaaaaaaaaaaaaaaaaaaaaccaaaaataact

SEQ ID NO: 292205 - DNA, 579 bp, Cannabis indica
ctatagtaacaatattgacttctctggtgagatggcgtcaggtaatgttagagcagctccaatgttggttgctcatcaagcctttgtcagtctaagaaaagcaatcttgattgcttgaccactaaagaaaattgtgtgagctactgcaattgctactgtcaagcaatggtagttaaattatatttttttttttataatttttctatcaaaaaggtgtattaatataatatttaaaatattgaaagtaatttaataatatattacataatagagtgtgggtccattttcttgacttttaaaattatttagcattggagtaattttaagagtaaagtagccaaaaataatgtgaatgaaagaaaaaataaaatataatattttaagatgatgtggaaattattagctattttttaaaatgcttgcattggagttgctcttatggcacatttactatacagtattcagaatcggaataaattaatagaaaaatataacggaataaatgaaaaataattggaatcaatatttgtaatatgttgtttactaatttttttttggaaatggaatagttgtgattta

SEQ ID NO: 292206 - DNA, 518 bp, Cannabis indica
tgcactagacctgacatctgctatgcggtttaaatcgtgagcaggtatcagtcaaatccaggacatactaggactgactttaaccgtcgacctagtatgtcgcgtgtttcctgacttagtcaattttttgagttattttgtgactttaagctaactcgctccttttattgtcgcagatagaccagctcgacctacacttgacgcgactcgcagagagactgttgaagttttcgggagccttcctgtacaagatcgcgactggcgattattgtgtacgacctcaaagctgtgggaacacaagttgattccagagaacgcgagccttcagagagagccagtgtacaaggagcaatctgagaaacaacaagagcgaatagacaaacgcctctccaaacaaacctctcgaccaacatcaaatagcatatcgcatgcataaactagtgtgttaaaatcttactgttattggcacttattattattttttgttgttgttgctgtcgcagaaatgactttcttga

SEQ ID NO: 292207 - DNA, 511 bp, Cannabis indica
aattcatattaggatgttaatgaaacatacttgttagtaaatctagatcctggtaaatcatatccaagaactggtctcagagccatggtaatgatttactttcatgaaatatgaattaaaacgatgttatgtattgatttggatggtttcatgtggtttatgtgcttatttgatgatagtttagaaatcacaatatatgttactgaaatattttttatttcgatctggaattattttttctggaaagtagacgaaaaattaataaatttaggcttttacagaatttttatgaattagttatgattttttgaagttgaacgaaaatatcaagatttgaatgcacacacgcgcgcggacgctcggacagcacccattcagacaaggcgctgaccgagtttactcggacacggcccctgtctgaagggcagctcgcgcccacgtccctcggtcaaatgaggctgcttccagcctctttcctaggccaaaaccatgcttccgcgcgcgcaggggt

SEQ ID NO: 292208 - DNA, 476 bp, Cannabis indica
gaagagctctaaagtatgatacataaattaaagctaaatatgtattttattttggggtgtttgcaccacaaggctcggtagaaaaccctaaagttttttatgcagcattagacaatgttttataatagacacttatcaatttaccattgttgtgacatatggtcgggattgtcaagcatttctccactgactcgcatgtatgaatctggattaaaggtaagaaaattacatttttactacatagcatgtcatgttaagatacaattattgtcgtttgtcaatcgactattatcgagattaaaatacggttattaccattatgtgatgaaaaggttgtcttataagagaatgataaaaaggttatctttatggttgtctttttagacaacaatgatgatattgggatatcgaaaataagtatcagtgttgtcttattagacaaccatggtgatgttcggataccggtgataagtatc

SEQ ID NO: 292209 - DNA, 576 bp, Cannabis indica
actgttctggggcactgagtgccaaatatatttttgtgtacaaatatttatgcattatgatttttgagtttattcaaaatacagctgttatgctgccgaattttttagaaaataaaaaggaatatgttctgttgctatacttattatttgtatgctttggttatactgatgagagtcatgttgatcatgttcgatgtatattgttatttcacgacctagtctctgtgtcatcataggtagatcaggtgtgcactcacctataagtgaaagacctagaatctgtactgggagtgaattcactacaggaaaaggactttttaccggcgcagttcgtcaaatgcgccggtaaaagttgtcgaggtaaagcaaaaactgaaatcccatttgcatttatgctttatttttgccggcgcattaatgcgccggtataactttgttttgccggcgcaacaatgaataatgcgccggtaaaagtgatgaaatgaagcgccaacaggcgcgaaaagtttgccgcctttcatttcatttattgtggcgcttatatactctgcgccggtaaaagtcccaaaaaaaaaa

SEQ ID NO: 292210 - DNA, 579 bp, Cannabis indica
ctcgcacttcggggtcaatgttcaatcgatgacacatgacctgcggagatatttcgaccatatctcaatggtgtcttccgtggcttgggcggttgcggcatagtcgaggatcctaagatccaaatttggctcgtctttatgcggcacttcttctattctgaagacctcctgacgaggaggtggtgcctctagcagatagatgacattgactgacttcttttctgcaagtttgaccgctgtgttgtagcattctcgcaagtctgactggacacctcgcacagaacctactccagcgggagtagggaacttcattgtgagatgatagatggacgtcacgatcttcatctcttttagaataggccgaccaatcacagcattgtatgccgagtattggtcgattactgcgaagtcagccatcgacttagctactacaggggcggttcccaaagtaattgggagcttgatcatcccttttaatgcgatgacatcgccagtaaaaccgtatatactcgatgtgacaggtcgcagatccttctcatgcaaccccatttgtttgaaggcttggaagttcaagagatt

SEQ ID NO: 292211 - DNA, 1081 bp, Cannabis indica
tttttttttactaaaattagaaaaaagttcttaaatccaacaatctcaatagttcaggaagaatttttaacggctaaaaaaattcaaggggtatgattttgtacatatcaaagttcagagggtaaaaatcctaattaacctattaaaattgaatatactctcaatattaaaaataacaataaaacataataatatattaatagttatatataaattaatttaaaattgatataaattcaaataacttaaaataaataatattaatatttataaaattaatcctactaacacttttaaatttaacaaaatattttttatattcttaaaatattccgttaaactaacaaaaatcactagataatacactttatatataaagataataaagatattgatacatatgaataaaacatatttaaatatttattaaattaaaacacaaaaaatatgaaaaatttcaagctaaaataaaaataattaattattttaaaatattataaaggcaaataaaagaaaatgctacaataaaaaataacttaataataataaaattgaaaatgaatattaaaaatatatatatatatttaaaaaaaattgtttaatattttttgcctaatgaatgaaaatcattatacatttacacatttacaagatgcaaatataatttgtttcaaaaaaaaaaagatgcaaatataatcacttatttttttccaaattatttttagaattattacatagaaaatataaattgacactttatttacaaaaataccttcatatatgtgattttaattaccaaaatacctcttacactatcacttacacaatcagacgatggttgctgcgtggttgcgcgatagttgcatcagacgaaggtttcaatcagacgaaggtttcaatcagacgatggttccagggtggttggtcgaaggttgtatcagacgaatgtttcaatcagacgaaaagtttctgggtggttgctgggtggttggccgaaggttgcatcagatgaagtattcaatcagacgaaataactgttagcaaaatgtttatgcaattgtaatgcaactgttatgaaaca

SEQ ID NO: 292212 - DNA, 199 bp, Cannabis indica
atcattgtttggaaaacctggaaaaagtactaacaaggtgcgaaaagtctaacttggtgttaaactgggagaagtgtcactttatggtaacagaaggaattgttcttgggcacaaaatttcaaaagcaggaattgaggtggataaggcaaaggtctcaacaatagaaaatttgccacctccagtttctgtaaaaggagt

SEQ ID NO: 292213 - DNA, 553 bp, Cannabis indica
atctttaattttcacatttttctctaaaaactagtgttgtcatcgtccaaccaatcatatttgagattttccaagaaacaatacgcactttttacggtaaataggccattatattctaaaaaaaaacaatacttatgctctcaactaagtttttgttttataaatatatataaggttttattaccttatttattatgttcctagttctctattaataatgtccttcatttccatgatatttcttttttattagatgtgctcaattatacaagtgaaaagtaatataaagaaatttctgtatagtataacctaaaataataatatatgaaagaaacattattttttttaaaaattactacagtttcggttgcttcggtagttactgtggtggtttctatatatatatatattatataaaatgtgcctatataacagaattcttgatttatgagaaattattgggtgactttatttttaaataaaaaaaaataattattagattagttaacctaaatataattaatccacctaagtgttgcaattaataataaat

SEQ ID NO: 292214 - DNA, 531 bp, Cannabis indica
tctcagatggttctttatatactggctcccgttgaagactcgcgttctcagggatcagctggtgttctcgcaacttcgcagttgtgcacagtaatcgccagtcgcgatcttgtaccggaagactcccgagaatttcagctgtctcctttctagtcgcgtcaagagttggtcgagctggtctatctgcgataacaacaaaaagcgagttagcaaaagatctcagagaacaaagtaaaaattatatctaagtcaacaaatacgcgacatactgggtctgcgattaaagtcagttctaatcccaggaaccttaaaaacgtaaaaccacttcgacttccagtcacccatgttcgataccatcccctcgacaccgtttatttcagaagtcgcccatttactaaagcaatagaagccgttatgaagacccacgctctttatgtcatagaagtaactaaactcctctactgacggtgccctatgggcatactccatgtacatcgcatagaaagctagtacagtgcgataactgttggg

SEQ ID NO: 292215 - DNA, 539 bp, Cannabis indica
aaaaagtgaatgtcacgaaatagagacaaattagggagatttgtaaaacaacaaattgaaattttagaaaactctcctaaatcgtcttcttccactcgttctcattcaccaccatcacccatacttcctgcacttccaatgatggctcaacaacaggaaatccaaccaagaacgctacaggattatctacatcctacgcgtacggccacaccttcatgcataatgtatcccatgaatatgcccaacttcgatttcaaacctggcatgattcaacttttaccaacctttcatggtatggaaaatgagagtccatatgtgcatattcaggccttcgaagaggtggtggccacattcaacaaccaagctgacatcattaacttggtgagattgaagttctttcctttctcactcaaggataaagccaaaagctggttgtattccttaaggccaaggtctattgggacttgggacgaaatgacaaaagcatttttctctaaatttttcccaccccataagactagcagccttaagaggcaaat

SEQ ID NO: 292216 - DNA, 774 bp, Cannabis indica
gacggtttattagacattgggaatgtcgggattggccggaaatttagaaattcccaaaatacccctttagtgctttttatgctatattagtgtgaaggggcaaaatggtcattttgccccattgatattttgtcctttagtggacttagtaaatgaatttaatatgttatttgattattattttggctgaagtaaaatgggttaagtggcatttaatttcattttcttttcaaacttagaaaaatttagaaatttctcaaaaagctctctcttttcttctctcttgttcggccctttgaagcagcaaaaacttgtgattttctttggtttttcaagctaattttgtgtgcaactcaagctttaggtattgttcttactcttgtcttctttgttttcttgaatttttgatgaaaaatggtgtaatgcatgcttagtttaggttgttcttgctgctggatttttgatgttgtttctgaagttaaagcatgataaattgaggttaattaagttgcttgtgatgcatgatagttaggttgtttagagttgtggagattttagatcaaagagaattttcgaaattggtggctgtagttattgcatgagttagagtttgttttctgcagtgtttttatgcatgattatgtagttttaatctagttttgaggcttgtaagtgagctttagccaagtttgagtttgaactcaaagcttggagctcacatggtgatttttaattctgtgtctttctgggctgtattgttgctttagaattgtt

SEQ ID NO: 292217 - DNA, 575 bp, Cannabis indica
ttgatctaaataagaaaggagtggggaacaagcaatcaatcacgtatatatatacattaatttaattatatatatatatgttttgattaataatattttatttatacaactaatttatattttacctaattaattaaaataatttatattcattaattacatctgttaattaaaatgtacgtacaacatgacacacatatatgttcctatttataactttattagttgtctcatcatatatttatattatgtgcttttttatttatatttattttaattttaagaaagactggaatattttaagaatcatatctaaagcaaaaagaaaaccaattacacaacaaaatgataattgtctactgtatatatataaatattaattttatagattttcaagtttgaatttttctcctctccccaatcaaagtaaataaaattaattattgtgttctaaattggactcatatcacatatttttaaaatttataacacaacttttttcacaatacataattactttaagaaagattttaaaaatattctttttatattttatttataattttataatttaa

SEQ ID NO: 292218 - DNA, 454 bp, Cannabis indica
tcactcaaggttcgaaaatttagagaagaaaagagaagaagagggtggcggctatggtatagaataggaggctcaattttcatctgacagagttaagtgtgaatgtgagccatcactatctatttatcggtaaccacctaggtttaggttagaattattcggcattaaaataatagaaaaataaatgataaaaacctacactattggtcagcctgggctttagatattgggctccacttatggaatttagctgttttatcatttctgcatcttattttctcaaaaacgctaatttcaaattcaaccatttaaatgacaattccaattatttaataactaaaaattaattatcaaataatattatcatttaatatatttatcaattagacatataaagtctcttaattaacaaataaaacctagaatctcttttcttacaattttgcccttgctt

SEQ ID NO: 292219 - DNA, 697 bp, Cannabis indica
agttttggtcaacaaggtcataagaagaaagattgcccacaacgacaacaaagatttcaagcatctcatggaggacccatagggagctatgtagagtctactccttttcatggacagcccaggacaaaccagtcccagtcttcatcctatggtttcacaccccaatcgggccaacagtctcagtatcaacatcagtttaggccacaaggttcagggttcaacatggggtactcacaaggtttccaaactcctgctcctagtgggagtcaaagagggtacaatcaaggtggagggtctggtgcaagtacaagtatcctagtcagggaaagggaaaggcaaaagcaaagtcatccgctcaagcctacgctcttggggttgatgatgtacagggcggtgctgaccagggagttgttgatggtatggttcttatctcacactcttgggctcatgtgttatttgatactggtgcatcacattcctttatatctttgatgtttgctagtatgttgggtttgagttgggaaacttttagtcctgcattgcatttgagtgtacctatggggggacacggtgaggtatccaccatatgtaggtcagtttgtattgtgttcgagggacacaagttatctggaaaacttactagtgttgcctatgggacatttgatgtaattcttggtatggattggttgtctaaaat

SEQ ID NO: 292220 - DNA, 532 bp, Cannabis indica
tgtttataatcatcgtgcaattatgattgttttatttttaccaaatgctttgtacatgtataggtgcccccaaagtgaccgagcagacgtatggatcttggtcactagtcttttacaagtatattgtttatttgttcggtactttgggtttgaccaaaccttttgtacgaactggatggtaaattagagacatactgataattttgactcaatttgaattttgaaataactatctttattcatttattgatcgaaaagtgtatttgttaccgtagtaacttacatcagagctatttgatccaatctgatcttttagcttaacatgagataaaacaaactgcagaaataagaaactgtactttaaatggtggtcacctgacctgagtactttgtttcttttatcaaaacctttgagcgtaatccgcccagcaggccattaactcaaaagtaaatgttcattcagtacttaatgtggtcatccgacctggtactttattggaagtattttcttaaatgttcctcattccaatac

SEQ ID NO: 292221 - DNA, 344 bp, Cannabis indica
ataatactctgcgacagaaatgatacaagggttagagatctgagtgaaaggagacatattattccgctgcacccaatgtaagttttctcatactttatatgtgtttacttataatcgttttagaagttcatatttagggtgttaatcaacatacttgtgagtagatctaagatcctggtaaaattgatttgcttgcaagaaatttggacttaaaatgatttgtttgtgatttggatggtgtcatgttgttttgtgtggtgtattgatgattgattgatgttgtgaattttcgtgaaaataatgaatttttgtttctggaattattttattggatagtttggaaa

SEQ ID NO: 292222 - DNA, 766 bp, Cannabis indica
tctcttttgcattactcatcgggcgacttctattttgttttcttctttattttgtttttattctttttcttcttcttcttcttccaaaaaaaaaattaaaaataaaaattcactgttttgtctctctacttgctacacttcaaattgttttattttgtcaatgtattaataattaattctttgctttttgcgtgatttcatattcaattgttttgttttcattgttatgtatatcttctttgtttgtatagcatttgtctgattagacaggtagtaaaaactcatgtggtacagtcaaagtaaagtctttatttacattttattaatttttgaaaaattaaaagaatgctaaaataaaataaataaaatgaggttttttaattttttatatatttttacgaaaatttatattaaatcttatactaattaacacatcaagttaaatcgtaatcaaattttacatagtaattcatataaaatttaatcaaaaaaatctataatgtaattttaaaaaataaaaaaataatatataatctataaagtaatttctcaataaatattataacataaatctaaaacaataaatagtattcttaacatatagagatagatatagagagtaatgaatcaaagtatttttaattaaaaggtaggtttttcatattgtattgtgtggtttttatttataaaaatttaaatctttaattaagtcaacaaaaatagttaacatatttaatataaatttaagtagttaatgtattagatt

SEQ ID NO: 292223 - DNA, 663 bp, Cannabis indica
tctattctatttatttttcttattttttattctatttaataacttatacttattagttaattaaatttaaagttttcatatatttttttttttaaagttttgaaattaaatgatgagttttctatggatttatcgattatgtttctttttatatttttcttttatgtgacaattctataatttttattcttttctttaagtttaaagatatctctttaattaaatgattataaaaatttaaaaatatataagttaattaaaagatctaaaaatacatttgaatttaaattttattagatacaattgtatctatattctcattattaattaataaattttattttgtacatttcctttacaaggaaaacataaaaactgcgaaatttactatatataaaagtaagtagttaactcattgttagatccatttttttttaatatgtaaaaacttattggaaatgatcatgcattaaaaaatgagatatcataacgagtatgtaacgattttgaatgtagtctacaagtaagatacagtgatgacaaaagttttgaaatcatatgatgaatttgttggtaaatattttaccaggatctagatttactaccagtatgtttgtattacatcctaatatagaaatctaaaaataatgaaataaaaacata

SEQ ID NO: 292224 - DNA, 646 bp, Cannabis indica
agcctcgaagccacaagagaagaaaacacatagaaaggaaatatcacatcatcagagaatatgtggcaagaggggatgtattggtggagaaagtggacactgaagacaactttgctgatccattcaccaaagttttggctggaactacatttgaaaagcacagactgaattaaggattaattgaaatatactgattgttttatgttagtgcaagtgggagtttgttgggttttgtgccctaaaaaaaactctatttcaatgtaatctttaccattcaattatcaataaagaaacaaaagtattttcatcacttatttagtatgtcatttggttcatgtgatcatttatatgtttatttgatttataaattcatccaaattcttatcatattgatattcttgtttattgtgtcgtcagcacagtggaaagtaatcaagattacgtgattaaatgtattcctagatttatcagtacacagggtttaactgatatgataatctacaacatagtttacttataccttggatgactgctcctttccagggcactggttaaagtaagcttgggttggatgcattggaagggaccgatattgaacttggattaaatatgataaatttaccgtaatattgttgggttttatgcc

SEQ ID NO: 292225 - DNA, 604 bp, Cannabis indica
tttgttcaatcacaggatcaatagtaggagcggaagcggaagcaacaggtacagggacataaatacgttcttccctgaacacaatttctcttgacccttgacttgaaccaaattcatcttcaaaatagacagctctatctgattctatcaccctggtggtgtgagaaggacaatagaatctagaacccctcgaaccaatagtgtagcctacaaaatagccactgatagtcttcggatcaagcttcttagattgtgggttatagggccttacttcagctttacatccccaaacatgaaaatgacgcaagctcggtttcttgcctgaccacaattcgtatggtgtctttgggacggacttgctaggcacttgattcaagatataagcagcagtccttaatgcctcaccccataaaaattctggcaagctagaatgaatcaacatacaacgtaccatgtcaagaagtgtgcgattccttctttcagcaattccattttgttggggtgtccctggcattgtatatcttgcatcaataccacattccagcaagtatttggcaaaaggcccggggttccttccagtctcatcataacgcccataatactc

SEQ ID NO: 292226 - DNA, 531 bp, Cannabis indica
aggtgaaagcctttggatggcttctgatgggagtgatggtcgttcgtcacaggcttcgtgggagttggagcaaagattcgcagaaatggaagctatgattcaacgacacgatgaggagattcagaggttgaaacaacaaaggtttcctgtattacctttacctcgtatgccaggcattctcaattcggtattaccagcagagtatagtatggctgataaccaagtgggatcatggcatgagagaatttggataaatgaacctacagtctttcagggagattcagatatggagaatgctctctggactggaagctctaaagaatgtattttagggcctcaagaggtaatgccacgaaatcgggataccgcttgccatatttctagttatggcagaagtggtaggggctccatggttgagcagaagagtaaacctacgtcatcaatggtgggtttaaaacggaacaagcggttccggggaaatcgaggcaagggtgtacgcaaggattattcttaccctgagtgcccgcgatg

SEQ ID NO: 292227 - DNA, 1328 bp, Cannabis indica
  modified_base (1222)..(1222): a, c, t, g, unknown or other
gttttatcttctgggaaaaatctagctactccgacattacattacacctagccttcaaaatgagcatcatcaaaaattcaaggattataaattgaaaaggatatcttgttacttttggtgtgcccaacaaactctctaacggatgacattatatttcgcatatcccaaagctgtttaaaagtaaagcaatatagcaagggaatagaagacttactcaaataaataattacttgagcaacaaaggataactcgctaatagaacactgaatattacacccaaataaacaaaaagtgaggaatcgcagcagagaggccatgaatcacggcatagaagatgaggcaataattcaatagcaatatagggtttgagggtttgagatttagaaaaagaaattataaatgattatcctaaataatcacgattggttgctcatccttttggggttagttattttattgagaattttcagagattgtgtttcggttaggtttatacgattaaaatttaaaagtaatattaatgtatttaaaaattaatattaaaatacatcttcataaaaaaaattattatttttgaatagaaatttttttaaaaaaagttacccataaatttctcataaacccgattaaaattaaagtaatattaattatttaaaattaatattaaatcatcttaataaaaaatatatattttgaatagaaatattttaaaaagttatcatgaattctcataacaattcagttatataggcacactttatatagaatagatatattttttaatcttatgtatcatcaaatttttaattttctttccctactttacatataaggaatttaattttatattaatatattttaaatcagtttatagatgtatttttctttataatattgttagtcatttcaaataatatatacgagagagagacatgtgggaaattaaaaattaattttaaaaaatattaacacgaataagatcatgcaaatgttgatatactaatattgtagcaaaatccatagtgcaaaataaaaataacagaatcaaatcttatatcccatatgtgtatgaaaaaatatgattaattacctcatatactatttgtaattttttttttttttaaataaactataagttcttactcttatatatcaagaaaaaaaacaattcttactctctatgcaaaaaattataaataccctaatttaaaattaattactntcagtgatcccatatcccacatcagaatttgctaacctggtataccaaagaactaaaatcttcttcttcttcttttgaaactttctcactgttcacacctcaaaaa

SEQ ID NO: 292228 - DNA, 601 bp, Cannabis indica
tttgtatttctctctgtttttctctcttttgatactaacaaaaactctcttttcttttacatgaacactctaggaggagtttcacatggagtatgacaactcacagccaaaaggctctctttttactttgttgttatttctgatgttgttctctgttgttgttctactgttgttgtatctctctggctgtgactctttattttgctcttgtatattattccttcttgtatctgagaaaagcacctttatatatactgttctgtgatctgatctagggcagagccctagtgatatttgtaactgtttttgtaactgtctttgttaaactgtctttatgttctttagtcttgatatttgttgttatctgatgtaagggtatatttgtcaaaccctatgattagtgttatacaacttaagggtaaataagtgaaatctgaaaaaacaaaaaataccacccagattctcttatttacccaaggatagttgataatgctatgagggcttgaatgaccccaagggtcagtaccatttgtttatccctagcaagttcagtttgaacttagctaggacaaacaccatggccttcatgtttgtgacacct

SEQ ID NO: 292229 - DNA, 578 bp, Cannabis indica
gaaagctttgacaccaagcaaacatatcctttggatgaagagcaaatcgattaaagaacacattattcctttgattccaaatggtccacataaaacacatcaataaatctgcagaacctttatctaaacttgagaacacattagagagaaattgcataattaatatccaagtggttgttttgtaaataaaaatgagcaaaatcagaagccttccaagctttccgagccctagagcactctagcaaagcatgcataacagtttctggggaatttttacacagaggacacaaaggagaagaaataatgtggcgttgagagagtaaaacagcaaccggcactgaattagaaacaattctccacacaaaatgtttaaccttaggaggaatgttagcatgccaaattctagcccagaaagatttcaaatcaaataaagaggatgtagaagggatatcgcgagattcaagagctaagtgataagcagatttaacagagaaaagccccgaactctccctcccccaaatttgctcatctttaccctcaagtccagaaaaaggaacatttaagatatcattaatagt

SEQ ID NO: 292230 - DNA, 567 bp, Cannabis indica
acttgttcagacatagtttgaagtgaagggcagaaaggctggagtcaaactgtttaagatcaaactcacttgagttgtctgatctataacagctccatgattctcagcttcctggaagtaactagtcatctggagaaggtgatcacgcacgctctgatgaggtctcatccgtgcgttgatgaaattcttagtcgcctcaaagcgagcttgaattgatgccatcccgaatagctcagttaactggttcatgatttctgcagccgtgagagtgttagcaaaccttgtcttcaaggtgtcaaccatgctagacagcatgaagtatcgagctttgttgttggcattctgccaacgctcgaacttctcctttactgctttggttgcattctcaccaggctgctcaggagccacttcagtcaacacaaacagggcattttcaccaatgagagcaatgtgaatgttctctctccatttgataaagttagatccattcagcttattatcagtcaacagtgacaccatggggttggtcattgtcatgttggatactacaaataacaataaatagaa

SEQ ID NO: 292231 - DNA, 815 bp, Cannabis indica
gaagctgggagaggtaaggaactgatttttccctagaggctctgtggggaagcacagcgctgctgacaccttgatttcagcccagtgatagtgactctgggcttctgacttccagaattctgagagagtaaatttctgttgtttcaagccaccaagtctgtggtgatttgttacagcagctacaggaaatggagataggctgtaagagccttgagagaagtcctggaatattgtatcgtcattgaaaatattcaacaagactttgtaactgcaagaaaaaaaagtgatatgctacaatgttctctaaaaaccagggttaaaaataaaagttgtgggtattatgatcacagctacataaaaatacagagaaaataaactagaaagaagagaggtattacgagagcagattgtgttttctctttctatatctctttttcaaaaattcattgaaccatattacttttatagtgagaagttttcaatttttttaagtagaaagtacagttgttcctcagtatccatggtgattggcgtccagaacctctgcagataccaaaatactaaggatgttcaagtcccttactataaaataggcattgtattggcgatagaatccacgtgctcctctcctatacttaaattcatctctagattacttagtaatacataataaaatagtaaataactacgtaaacaagctgctaaactgcattgttgtagagaataatagacaagaaaaataagtctgtacatgtgtagtccagatgctaaatttttctttaaaaaattttagttatattgctagtgttggtaat

SEQ ID NO: 292232 - DNA, 511 bp, Cannabis indica
acatgctgtgagtgttgcccttataagagaagaagatgtgtacaacaccctgtatactacaccagcaagagactgattgacactaaaagtcagttcccactcataaagaagctaacccacaactttcccttgccttccaaaaatctaaggctatacttccaaatacacccccataaaatgtgtacaccgatcaacagttgcgacaggttcttcaaaaacctggagcatcaggccaactactcaagtgaactattgagactcaaccaacataaaatcacctcacaataaagcatggccaccacatgccaagctctcatcagcttcatggctaatcataaaagcatgtctccccaaacctctcagagtttgagagaaaagtaggagctagagaagaagcgagaataagaacccaagaggtgcattgaccacctgctcattacaagaatggcccccaaggcacatgggggcaactgatgcatgaggtaacaaggtaaatttcaaagcttctaat

SEQ ID NO: 292233 - DNA, 490 bp, Cannabis indica
ttgcccaaaaatttcatataccatagtgtgctttgagcattgctataaattaaaacaccataatttaataaaatggtaatggttaggagctttctataattattgtaaaaaaaaataaataaaatttaatattaaattgtaccaataataatataattctatataagagtgcatgatcctatttttcaatttcaaatattgaatgatgtttaaacttgcatgatccttaaatttaccactttcataattaaaatatgtatataaaattaaagtgtcattatctttatatattaaaattggttattttgaatagatttttttttatttttgttaaactttaaaagatatatatacgacaagtattgttaatttgttattaaataatataaaatagatgagaaaaaagaagaagaagagaaagagaaagtgaatgatgataatttctcagttgtttattctaatgggatgaacccctatttatacaaataca

SEQ ID NO: 292234 - DNA, 503 bp, Cannabis indica
agtattatacatgttatttgatttgttagttaaacctactttttggtcagggtgatacgtacactttgggaacatggtagtgcaattgagtgggagcgctaaacatagataggaaatctataacttctatctaggaaatagaagtgaaatgataatttccttctgttgactagatttttagccaaccgacgcggagtcgtaataaatgagatttaaaccaaaatcacaataataaatgcaattaataacaccggaattcgcaataaatgtaaataaaagacaccagaatttaaagaggttcggcctcggatgtcggtaatagcctactcccattgagttttattgatctgagttgcaaaagtcaagaacaggctcttgattgcaaagaatgagaagtgtttatttatctaagtgtttcaaattgtcgatccccctccaaggtatgggtgaccccttatataggggaggggggtcggtgtttctcgcttcaggagacgcgacca

SEQ ID NO: 292235 - DNA, 632 bp, Cannabis indica
tttctcatgggataaggtttgcggtacggtaccactgagtgagttgcattgtagatattttctcttgtgtccaggagcaggctataggtggtgaaccttggaattggatctcgcctggctggctcgggggtattctttagtcttttgttatcattgttgttaccgccattactgttattccctctcttaccattgttggagccattcctagcgttacccccttgagagctttgactatttgagcttgttccgttttttttattcttagtgtggttgaagttttgagcgtttcgctcggcttcttccaatttaataaactcatctgctctgtcaagaaagtctctcatagtatgggttggtttccgccttgtatctttccatagccgacttcccacaaggatgccccccatgatggcggcccgcttgccatcatcgcttagattttttactttggttgcctcttgcataaaacgttgaatgtagtcttttagtggctcatcgggcttctgcttgatggcgactaagtcacccaactctgctggtatctgtcgggctgaagagaattgggtgtaaaataacccctcaaactcatcccaagaagtaattcttcctgggggtagtttagtaaacca

SEQ ID NO: 292236 - DNA, 602 bp, Cannabis indica
aaaaagccttcaaaaactctcttctttcctctcatttcggccaagccttggagcagcaaggagctgattttctccattgaagtttgcttgttgattcatctcattttaaggtccacttcaagctaggttagctcttgtcatttccttctttgttttgttgaaaaaatgatgaaattggtatgttgcatgcttgtttttgagttatgcttgctgctgtattttgatgtagttttcagaggtttatttttgatttaaaatgttgattcatgcatgttagggctgatgatttcttgagtttattaagttatgaaattttggctcaaaactatggtttttcaaagaaaattgttgaaatctgttgctgctgttttgtgatgtttactgtagttttcagaggtgattttatgcatgtttaagtagatttgagttggtttggatgcttgtttgttagatttaaccaagtttgagttttgaactcaaagcttggagctttaatggtggattttgatttcgtgcatgaagctttgttttatcacctggaaaatgtttattagggtctaattagcaggtctggaaagtttggttgagtttggaaacgtttt

SEQ ID NO: 292237 - DNA, 604 bp, Cannabis indica
agagattgatcttgtcaaatccactatgaacaagatacaaatgccatagattaaaaaaaatgtggtagtgtcttttgatgacataggtttagttacatcaaagagttcttagaatactgcaagtggatcctggtcacagaatacctaactcatattccatacagttttaatccattaatagaagatggatattaaacacttgagaaagtgtaactgtattgtattctggaattagaaatataagaaaatttctatttggaatctaaaattaaagtcaaagacttaaatttataccaaatataatgagtaattctatcttggaccaccactactaatacaaactctaagtcagatttgcccatacaagtaggagatttctaagattgaggatttatatcaattgggaatagaatttcgggattataatcatatgcgtcatttaatttcttaagagaaaatataatgacatgaaatgatttatagaccattcatccaatgatatgttattgagctaattcgaaatgaataagctaagaggaattaggataatttcgtttataaataagaatccaacgatgcttcgattagcgaaagacaaagtaat

SEQ ID NO: 292238 - DNA, 820 bp, Cannabis indica
aaagaggatgtatctacaatatcgatacattgtgatagccaatcaacattggctagagcatatagtggagtatataatgggaagtctagacatattagtctaagacatggatatgtaagtgagttgatttaaagaggagtcatctcaatatcccatgtgagatcaagtgaaaacttggcagattcgtttacgaagccactaactagagatttagtggaaaagacttctaaagggatgggactaaaactccctaaaccggttcacaattgagggtaacctatcttaatactagtaactttactagtgttaggttcaataggtaagaacaaatcaatgtgtgaacaaatgtgataagtactatatgtcccatcctataaagttgtgaagtacttagtgagttaccaatttgagggtagacttttaaaaagtctttaatagaattcagtttggaaaataagtattttggtaacaaatactgtaagaattctacttatattgacctaagggtggtgcgccctaaatgagaaatagggagtatattttctcaaaagggtcaatgaatggaatgtgcacaaggccattaacggtgcaaagcgagacatgaggtcttgggtgaaactagcaaaggtgtgtgtgtcattaccattttattataaagaaaaaattggttcaatgctttgtcaaccgaattgtcaataaaatttttgatgattacactatggttaagttcaagttgaaaaacacttaagtttatgcacttaagcaaggactctatagagagagttgattttattcaatcgaaaagtggggggatagtatg

SEQ ID NO: 292239 - DNA, 1203 bp, Cannabis indica
cacatactcccccttaattgttcggcgtcctcgacgaacctgctgcatgatcttcaatcttctgtataaactgctgcaagtcctccgccttttcccagctgatctcgtcatcagcaaggcctttccatttgaccaggtactcttttctcttctttttcttcacacgaacagttctttcggcaaggatttcttctggttctctgctgctgcgtcgttgaatgctgatgtcgtccctggtagactggttgcgcgctggatcttctggatcttcatgatacggcttgaggttgctgacgtgcaggaccgggtgtatcttcatccatgaaggtagttcgactttgtaggatgctaggccaattttggagatgactggaacagggccctcgtatttgcgtacgagtctgatgtccttgtcccctcggaatctcaattgttctggccgcagtttgatcaacactaagtcacctgtcttgaactccagcggtcggcgtttctgatctgcccacttcttcattcttcgtgaagctttctctaaatatgcttgggcaatctctgtgttcttcttccagtcttttgtaaaattaaaggcccgcggattccgtccgtggtattcatccactgtgtggggtaacagtggttgctgtccgttcacaacttcaaaagggctcttgtttgatgaagaactcttctgagagttgaaacaaaattgagctacgtctagtagttgcggccaattcttctggttggcattgacaaagtgccgcaaatactcctccaacatcccattgaatctttctgtctgcccatctgtctgtggatggtagctcgaggagatgttcatctgtgacccaagaagcttgaatagttcggaccagaaggtccctgtgaatcttcgatctcggtcacttactatattctggggtactccccagtattttacaatatgcttgaagaaaagttgagctgtctcttctgccggacactgcttcgacaccgggatgaaggttgcatactttgaaaatctatccacaatcaccaagattgcattcaagtccccagtcttcggcaaacctgagatgaaatcaagcgagacactctcccatggtctgcttgggaccgatagaggttctaacaaccctggcgtcttatgcctctccactttgtcttgttggcagacgagacaggtccttgtgtagtccacca

SEQ ID NO: 292240 - DNA, 479 bp, Cannabis indica
atgtggttttgcagttaaaattctgcatagtccacgagtcaatcttattcaaatttttgagcatttttcagggcctctttcatatgagtttttttgtcccctttcttgatcttgtctgccactatttgtaattacatagtgggcagtaatcactattacaaaaagtataattcacgtcagttataagtgtgatttaaagaatttacgtcggttaaaaaaactgacgtatatatcataatcgcaaatagtcttttattaatgtcgtttttgaaatgacgcaaaaaataattatctacatttaaaagccgacacaaaatatgcactcttcttttttatcttctgcgtcggtttggaaatgacaaaaaattatttgtgccatttccaaaccgtcgccaaaaacttattacgtcagttcaaaattgacacataaattactgaaatattttttttttcacctattacgtcggttataaaatgaa

SEQ ID NO: 292241 - DNA, 661 bp, Cannabis indica
ataaggcaagtacatattgttgaacaacaaactcgggcaacacatgataatgttcgaggaatcaaaacttctgagattgctgaaaggattggtgaagaggctcatcttcctctgagtttgtcacaaaacacgaattgtattggtctcctttaaagccaaaaggggtaacacatcatcatcggtaacttccattcgacttttcatccaccctaccctgtggaagttgcagtcaaaccttaccctcgtggttacatgagtccagtatttcgaaaatacaatgggaaatttggcattgccaaagaacatatcattcaaattatagatgatttaagtatttaagcgcatgattttgtaattaagaatctgagaattttcaaagtctctcactaatcgagcatactcttggtatgcaagtttgccatcagagagtataaggagttgggacgacatggtctctcaattttgttgcaaagttctttatgatcgaagataaaatggagcatagatgacttattaggagaaagataaaaaccttggagaaagactcgttaaaagtgtagggaaaaaagctcttgattgtgctgagaccgtggttgaaaaggatctggtcaaaaatgtgtatcaaaggcaggttggatgaatatcgcttacacattgaaaa

SEQ ID NO: 292242 - DNA, 573 bp, Cannabis indica
ttatacatttcatatcttctacgaattcgactaaaaaaatgtgaaaaaatgtttctcttctctgtaaattcttttttgaacaattgaagaaaacgttaagtgctaaaaaagaaattctatgttgtttctgattattatgtctttatcttattatctcattgaacagatcaaatcctgaatacatttctggtattcaattggaatttggaatacggaatatcataataatggtagaaattgaatcacttttgttttgattgatattctatacaaaactccctaagtctaagtggaatttatcaccccttcccgttttcgttatctcgttgtcgaactaacgtcgttagttagaagtaaaattaaacttcctttacttttacctttcccgtttccgttactaacgttaacgtttagttcgtccctacctacttacttttaattttaatttaatttaattaggtagggttaaaaggtttaaaaaagttttaaaactttactagttggtagttacttacgacgtaaataaaacagaaatagaaattccatcattgctatatcgatctatcttatttg

SEQ ID NO: 292243 - DNA, 415 bp, Cannabis indica
tttcatagtgggaaatattttagagaaaataaattatcgggattgagcggggttatggaaattgaccattttacccctagcttttgaaaatacctaagtttgatgtaaagggcattttagtcatttccttggtgggagataggtggcttctttagttagtgacacctagctatttttggcagcaaaggttaatctaatccttttccaatttgggaaaatcaaaaatagaaaagaaaaagggaaattaaaaaggaaaagtcaaaccctcttgaatctctctctctctctcttgcttcggctggaacaaaccaaggaccaaaaccagattttcctcctcctttctttgggattaagcaaggattcaagctattacaagtgaggtaaaaccctagaccattgattatttgtttttaag

SEQ ID NO: 292244 - DNA, 791 bp, Cannabis indica
catttcgtgagtcactagattctaaagaaaatttcttaagcaatataaaatccattcattcacattataacgcagatatatctagttacaactcatcacataataacatgcttaagtcatttcataatttcgtaatcacgcaatcctagtactttataaagtacccttaccactcgttaaccacgagctgcttatgtcactatcgttgcccgatacagcaaacgataagtaagaaacctatctgcggtttcaggagtaattactcataacggtaatgaccgtttcttttactcaatcataatcgagtcacaacgataataatcgtttcatatcatttccctcgatcataatcgagtcacaacgataataatcgtttcccattatttccctcgatcataatcgagtcacaacaaatatatatcgggatctcgatcataatcgagaccataataatcatatcattaaccataaacagtgcttaatacttttcttacctcaagtccaaagtcaagtatgtgggccgacctgagtggaacgatgcccgacactttcgagtcctatgtcatgacaaatgtaaatcaataagggtctattccaaaacactgtctaaaacccgcataaaataacctaggattttctatcaaatcttatagtaaaaacaccctaaaataaaatatatcttttggctctaatctatgtctcatactgtagagctcgtcataagcttcgaaacggtataaagaatgtctaaaacggacacccgagtgaaaagttatggctaaaatacaaaa

SEQ ID NO: 292245 - DNA, 692 bp, Cannabis indica
agaccctctgcgcagatgatgaaaagatatggagaaataggatccccctgacgaatccctctagttggaacaatcggcccaagaacttctcccccatggacgatgttgtaagaaatagtatgcagacattccattatcatcgaaacccagccagtggagaaacccatgcgaagcaagatagaatgcaaaaaagaccactccattctatcataagccttgctcatatccaacttaagagccatacaaccgtgtttaccttgctgtttacgtctcaagtagtggaggatctcaaatgagaccaaaacattgtccgagatgagacgacccggaatgaaagcgctctgaaactcagaaatcaccttagacaataaacccttgagacggttagccaaaactttagaaatcactttgtacagcacattacacagagcaataggtctcaaatctcccataactacaggcgttttcttcttaggaataagcacaagattggtagcattaagatctttaggcatcaccttattccggaaaaaattctgaacaagccgaaccacatcatgacccacaatatgccagcacttctgataaaacgcaggagtcatcccatcaggacccggagacttatcaggatgcatctgaaaaaccgctgagcgaacttcctcttccaagaccggttgaagtaacatagcatt

SEQ ID NO: 292246 - DNA, 550 bp, Cannabis indica
gctaaaagttgtgtacaaatttagcaataaaaaataacatgagccaaatttaagctcataataaatactaacgttttttaattattattttgtcactcagtaatatattattaatttaaaaaagctttttatttttaatcctattttaatttcataaaaaaaaattagttagtcataaagaaaataatagaaattaattgtaatgtacgttttttaataaacattaattgattttttagttttttttagttattttgttccttgtccattagagaacaattacaaaaagtatgctaaatataactttagtgtatattttggactaaatttaacacaaattatacatcttgcattagaagtgatcttagaacacacttgtaaaatgtagactaaatataacattaaaatttaagacaaaatttaaattttcactcgagatggtctaacaattaaaaaatataaaatttattgactaaaataatatatcaaataagtgatgctaaagagaaatagaaatttctcaaattttttttttttgaaagaatttttt

SEQ ID NO: 292247 - DNA, 699 bp, Cannabis indica
gcctcctatgaggaaccgcctcagcaagctcctcactaacgtagtccaagccctcaaccaggacgtctccgtccgcatcgactggctgcccagccttgttgtactccccgaagttaggggattcaaactcttcctctccctccgcctcggaaggactgggtggacaaacctcatccagctcctcaacctcctggacctcagcgtccccctcacagtcctcttccatcgggacggctaaaccctgttcggcgtcgggcagagtggaaagccgagccacttgaggatcataagcgccggccagacgcgtggttttctttgtacgagccatcatcctatggctaggttcaaggtcagaagagtttccttcgctagaaggaggactaaaacgaagacgaggatgaacctcgtgcagaagttgaagcaaatcctggtcgatctgatgcccgagttcccaagactcacctgggttcatctacaaaagacaacacacgagatgagtgttggacggagtatcaaatgcaaaacaagcaaatatgccgaccaggagtactcaacagattaagagaacgactatgtttaaagaaaagtcaaaactgaagaagtcagaaagttttcttgagttagggcgaaaaatttcatgaagcttagaataagcaagatggaagacaaacacaatgcggttcaaaaataagctctacg

SEQ ID NO: 292248 - DNA, 576 bp, Cannabis indica
atatagaaaaaccctaaaaaaatttataaaataaaaattaaagcaatgtacattactaaaattagtagaaattagatttataccttaatagacgttgaaatacaatgttttctccactaaaaacgggggccggaggtataacaacaacaacaacaaccactacattcggtttaccctaaaaaatgaggaaaatgtgatcttttcaggtatatagttttagatatgagaaatagaagatttagaaacaaaaatgagctaaaatggtgaaaaaaatggtgaaatgggggtggtttttcgtggtggttggcagagagggtttgaggttctctggtttgggagtttctgggttggctggtcgaatgaggaagatgatgggctgggctagggttataaaccctttaggagtcggtttttttagaaacaaccgacgccatagcgggaacctatggcgtcggttatttccaaaaaactgacgccatacgtggtgtcaaaatcccttccaaaaaattccaaccctataacgtcggttctttaatatttgctgaaaaaaagtgcctctaaaagcttggtttgtag

SEQ ID NO: 292249 - DNA, 654 bp, Cannabis indica
ttttttgaggaatttccaccttaggcaccaaggaaatcatagtctcattgaactgaacaagtatagctcccgtactaaagaaactcttgactgctagccaaacttcagtacctatttcagaccagagaactttaataaaaaataaataaatttttaaatcgcttaattagttttaaaattttaatttattttttaatttttttaatcattcaaaataattttttcttaggatctaaattaattttttaagattttactaaaaaaagtgttaaaaatctttctcatgtttattttgaggggtacgatttgaccgttatcaaagtttagggggtaaagtttctaatttacaaagacacgtcatcatttaaacagaataataagacggaacctaaacaaaataactaaataagttcagagagaattctttacaaaccgtatattttagaggcaaaatcaacattgttgaaaatttagggctaaagttgtatatacatgtgtgttgttacttcacatttatagctaagcaaaaatgggaaacaataaaagttggattcggtagtttttttcctttttacgatgatataagtaaagattaaacatatctatatatattgatagctattctttttttttaattattatatatataaaaaa

SEQ ID NO: 292250 - DNA, 513 bp, Cannabis indica
ctagaatttcccaagtaaattctctaacttattaattcctccttacaccactatagatttggaatcgcactctcaattatgtagagcgctctatatgttcaaggatatagatacgctatgaattatccatttcttataatcctaataatcaatgatcctctacagatgatctacattgagtagagataaatttaccgttatgtattttatccttaaaacatttacctataaatgatatttcagtgaactaatataatcactgaaatgagtacttaatcatttatctctattaagctaagctcgaaggaaattatcgtttcacttctatgtccggatagaagctatagattctgtatccatgattagtgctcccactcgattgaactacaatgtccttaaactatatgtcacgggaagatctattggtcaactttaacaaatagattgaagagcacaaataatacaactgaacaagtgtaatgtccgctttagtaatttggattagtaaaggca

SEQ ID NO: 292251 - DNA, 650 bp, Cannabis indica
ttggtaagtgactattggtgctgaaataaatttttcttttagaacctggaatgcctttaaacaatcttctccaaactcaaatggatcgccattaacaagtaaattggacaatggtttggagatctttgagaagtccttaataaatcttcggtagaaaccagcatgtcccaagaaactccttactcctttctcagaaacttgaggtggcaaattctctattgttgaaactttagctttgtccacctcaattcctgcttttgaaattttgtgtcccagaacaattccttctgttaccataaagtggcacttctcccagtttagcaccaagttagacctcttgcatctaataagcaccttttctaaattttctaagcaatgatcgaaggaggagccaaagaccaagaaatcatccataaagatctcaatacaggattcaattaagtctgaaaagatagccatcatacacctttgaaaactagcaggggcgttgcacaatccgaatggcattcttctgaaagaaaaagtaccgtagggacatgtgaaagtagtattttcctaatcttcaggtgctatggctatttggtggtatccagagtagccatcaagaaaatagtaacattcttgccccgccaatctgtctagcatttgat

SEQ ID NO: 292252 - DNA, 823 bp, Cannabis indica
ttacatgaggttaccgttgcttttttcccatgtaatttaaactttgacatcatgtctccaaaggagcgcaagtctaaattaccccaaaaccctttagtccgattcgaggctcaactgattgagtctaaggttaggttaattgccccatatgcgggtccatttctaaggtcttgtggtatcaagaacgaggaaggatgccgaattttcctggtcacacaagacaaattcagttgctttcctccaactcgctcgtcgaatgaagagggttgcagcactagtggttcttcaaagataggtccttggagtgttgagcatgttaaagctggggttgtccttcctctcaaacagcactttaaggacttttgtaattatgtcgaggttagcaccctttcaactcatcccaaatacatataggatcctagcctgcttgaagtcaatttaccacatcttaggataggagtatccaacccctttgagatgatgtgtttttatgcccttaaggcatgccctacaaggaagaattgctcaagcggcttctactatctgggtactcactctaatgataataagagtactgttagactcccaaataagaaagagttcaagcatgatttttttggacgatcgggcttcatccaagcaacaccactacaaaattatatgtaagtattcattatttcaaaactttaattctaagttagaattttatgtttgaatttttactattttttttcttttagtctctttcaaaaagactaattccaactactgtcatccaaagacgacacgagaccctggtgaacttatcttatggtttacgagc

SEQ ID NO: 292253 - DNA, 564 bp, Cannabis indica
ttgtttttatcttcaaaaatgctatttttcatagttttgggcctcatttttatcacctttttatttcttttccactctttcacaaatgctattttctcaatcaaacacaaacaaaattaaatccaaacaaaatattttcaacataaaatatatcacaataattttaatgaaaatatttatttaaaatttaattaatttgtatttctttaaataaaaacaatgcattttcttaactttttatttctttttctctattatgccataaatactattattatttataaacaaagataaaattaatcttaaataaaatattttcaatataataatatattgcattaatttcttgaaaatattataaagaattaattttattttgtatttttacactataaaatatgtaatattttggcatttaacactactaaactattaacaaatttaagatagtatttattgttcacagttaactgccagcatgaactacttattaatagagtattaaaaataataatatatttaattatctttacctttgtactaattctttaatatatgtatata

SEQ ID NO: 292254 - DNA, 639 bp, Cannabis indica
gcttaaaaatggtgaagatatttagagaaggtttggaagaacttggaaagattcgattacttaaaattgaacaaattttgagagaacaaaactccaacgttgatgccttagcaaaactggcctcgcagaatgacttggatgaattgaacttagttccagtggagatactgagcgagccaagtatacgtgaaacgaaagacgtcgagatgatagacgactttcctacatggatgactcctattatcaattatttactcgatgggcaacttccaaatgacaaaaacgaggcacgaaaactattgtattcactgcctcgctacacaataattgaaggtaaactatatagaagagggtactcgatgcccctactttggtgtgttcttcctgcagaagcgagtgaaatcatcaaagagattcatgaaggcttttgtggggatcatgcgggttgggaaagcctttctaaaaagatcatttgacaaggatattattggccaatgattaataaggacacccacgagtttgtcaagaaatgtgataaatgtcagaggtttcacatatacctcgcgtgccgccaacggaactaacaatgatgacctcgccctacccatttgctatatggggaattgacttaattggggc

SEQ ID NO: 292255 - DNA, 293 bp, Cannabis indica
tatttttattagttaatttattacttttgataatttttttaatttttttaaagaagagatatttattaatttagttttcatatttaggtcattttctatctcaaccctattccatagacatttaattaaaattttaatatagctatatggagttaaatatatatttctttggcatatgccatttattagtcttttttttctttattctgaatgtatttctataattaagtatataatttttttttttttgaaaaaaataatattgtaacatattctaattctaggtgtaaaat

SEQ ID NO: 292256 - DNA, 588 bp, Cannabis indica
accctgagcccactcatttcccttggcccacttatgctgaagagattgggttagctgaggaattaatgggcccagctcaagttgataagtttgaacctatgcccactttgttccatgacccacatgatgtaactgaacttattcatccatgcccacaacaaagaaaacgtaaagccagtttgactttagtccccttcattcaacataccccagaaaatacaattgaattctctcaagagttacccgaactccctagcttttcacaatctttagataccccgttcaaaatgggatcaggtggatcctcttcctctgtgaaaaatgataaaagaaggagaaaaagttctagattgaagtcgacccctgcttcgagaaggccaaagcagaattcgacaccgaaagagggcgagtcacatagaaatttgatcgactctttgaatctcattgaagtgcaagtggagagtactcaaaattttagtttcgggccaggaggcggcccttatcaagcccctccagccccatgaagtgcctatcgtggaactgtcgggcctcgctagggacccgacagcccaagccttaaaggtttgg

SEQ ID NO: 292257 - DNA, 652 bp, Cannabis indica
attaatatgaagtgtacaagctaagaaaaaatagaaaaagcttcaaaaatgagagattttggcaagttttagtcattttggccatataaggtcattttaagcaacttacttaccaaaaattgattttatgcaaaaatttcatgcaaaatcttttctaacagctgatatatgataaaacaaacatgctcaaaacaagaaaaagcaaaaaaaatgtcaaaaatcttaacttttcgccgttttcggtaagcttttcgattttcttgaaatctagaaatctaccaaaaatgagttttatgcaaccaaattgaaaaattctttttccagtagtttaagaatgttaaatgtgaggtgtacaaacttacggaattcaaaaatattgaaaattgatcaagtttggtgaaaaacactcttttaaggttataaaaagtcaaaattatggaagatagtacaaaaatcaagatttgagaattatttttgaaaaattattttggagtatagtttatatatgagtatttaaacatgtaaaagctttcaaaataacaatttctttacaatatgaaattttggcaaatttcacccattatgggcgtaaaagttgaaattaaagcaaataacataccaaattttagttctaaagcatatttcaatcaag

SEQ ID NO: 292258 - DNA, 666 bp, Cannabis indica
  modified_base (32)..(32): a, c, t, g, unknown or other
aacttatttttattttatatttttttaaaaanattaaatttaagatactattatgtattttctttattaatctaatttttaaaatttatcaaaaattgttctaataaaaataagtatagtaaaaaatacaatttagttacttttaataattaaaaaaataatattttttaataacttatggaattggttagtatatttaattttgtctaattaaatttaatgtttgacttagtgtaacttatatgatgtttaagatactatttagtttatttacaagttattttatacatctatgaaaatagttttataacatatgtttatttataatttagtcttgtaacagataaaataaaaaaaaaaaactttttagtaacctattaagttgttgatacatcaaattttgtttaagtttaaagattaattatttatttgttaaaaaaatataaaagaaactaaaatgctacatttgatcttggaaatcttctttggtgaaggagaaagatatatacttctcacatattaaaatgatcatcataaaaaaaattacaatgatgtaactcttaaaaccaaacaattatttgtgtagtaaaaatatatttttttttaaacttgcaaaaagaaaaaaagagagatacatgaagttggaaatttattataaagtttttt

SEQ ID NO: 292259 - DNA, 724 bp, Cannabis indica
agttttattaggcttttatttaagtaaaattaaatgtattgtaaacaataaatattcatagcttaattagttgtgttgtatgacattttatacaatgtcatggattcaaatctcatgacacttatctttataatttttttatataattttaagagtgatgactcaaaaatttaattcgccataggtccatatattttagggccgactttgtttgaaatgtcaaagaagaataaaaattatgattagcttttttttttctttttttttttcttaaacaatgatagattattattattataaaaatgagattactctattagtgcatcacaatagtattgccattatttatttctttttcaaaagactagtttaattgaaaaaaaatgataaaaagttttaagtggggtcaagcaggtaacacaacactaatcgttgttgcatgcattaatgatgctcttataagtaaatgatgattttcgtgtagacaactatatattttaccttaatattccaattaatcaaaattattttgaacattgttattttcataaatcaatagctagttttggtttcaagatattcaaaacatatctaagtttagttggcatttacacaaaaatgttatattttctttcaatctccaaaatgagtacacatgaacaaaggcttgttaatgttatattggaattaggggtgttcacaaagtatccgatccaatccaatc

SEQ ID NO: 292260 - DNA, 689 bp, Cannabis indica
ccgagtcctctcctctacatcaataatactctggaagctaaccatgagccattgtgcaccggagctaggaggcctgaaaagaaaaccaatgaacacaaagatctgataaaagggaaagaggaacaactctccaaagtctaagttttcgcctgagtaggaccaccgcatcttgccgtccccaaaatcggaagggagaaagcccaaagaaacccaccactgtcgccttccatctaaccaagagaccggagctgcccacgaccaccaacctcggacttgagagacctcagtagaggcagtcatccaccgtggtcggcgaccacaagcttgaagacacaagcaacatagcgccgatctcaaggaaagagagagagggcagacgctcatcactccaaggagtaaaggccccaggcgccaccagccagaatcggccggcgacgccgaagcccaaaacctaaagtgtgaaaagaaaaagaagaaaaggagaaaccctaatctgagagagagagaaaaaattaaagtaagactcagtcacatcattacttagatgagcctaaaaagaatactattgtaatctactgtgaacattttaaaatatgagaagtatatgttttttttgctatttcaagaaaaaaaaactatattttttttttagcttaactagaaactacttggttactaatatagtaatt

SEQ ID NO: 292261 - DNA, 757 bp, Cannabis indica
ctcgtcaataatatcttctacttcaaatgctgctctccttagttttcgaacccacattttaacaccattgctattgtcaatgctatgatgtgtttgggctcttacatcagcgtctttgaggaaagtcataatgtagtctagatcacatttgatcttctatgtcattaatatgcacaccacttaacaagtatgcttcttcagctagtaatggaatcttgtctatgaccaaaccaatacagtttatgccatctgtattaggtatctagtaatgcactcgacttcttagctctgtttttaatgggcaatcatcaatttgttgcacatatataaatagtcatattataaatgttttttgtcataagataataatagtagtatattatatcaataatcttcatacatgaaaaattgttggtcgttaatttttcctaagtgaaataacaaagtcgatgtggttgtcaaatattaagacatctccaatgtggacaatattttttttttactcaattcagcccacccgactaacttttaaaattttagctgatcaaaatttaatctatttttttattattaaaagaagagaaattttactttttgcccctaataaaacccccaatatcaaattttagaccctccactaatttgtacaaattaattcctttgattacataaactttctattttacctttttttttaaaaattccctctctctcttccctctcgtgcacctctctctctctaagaaaaactagaaaa

SEQ ID NO: 292262 - DNA, 298 bp, Cannabis indica
ttgaatccacgcatagaacttcgaattgcactctcagtatatagaatgctctatatggtccaccactatacaggtccaagtttggttcttcgtcaagatctcggtccagatctaggtccagcatttcgatcacagtcttggtcttggtccatctccaggttcatattcgaatccctatctagatccaattctgtgtttgggatcgttcccagatttaggtccaggtccaggtctcagtttcggtctgggtacacgactgtgtccgagcccgagttccagtctcagttggggtctaagg

SEQ ID NO: 292263 - DNA, 386 bp, Cannabis indica
tttaagtggttcagagttagtgtatgcatgatagttgcttggatttaagttttgaagtttttagctcaagaacatgaatttttgaagaaatgtgtggatctgtaaattgcttgctgtagttagtagatttcattttcagaggctatattatgcttgtttaagaggatttgagttggtttgaatgcatgttaggtgattttactcaagtttgagtttagaactcaaagcttgagctttaatggcactttttgctttggtgcaatctgggtggttttggtgccttagaaatgttctttgggtcatatggaataggtctggaaggtttgagttgatttggagttgatttgagcaagatatgaatttttgattgttgctgcctgcgagga

SEQ ID NO: 292264 - DNA, 592 bp, Cannabis indica
tcaaatcaaggtcagggagcccagtttcccccacattctaggggccgtggtagaggtcccaggggtagggctcgtggtcgaggtgatgataacccgccacaggctgcccaggctgcccaagccgagcaagaagcccagaattgggagactaggtttgctgaaatgcaagccaggatagaggaacaagatcttgagatacagagattgaggcagcagggtgctcctgcagtgcctgtgctagaagttcctgtggcacccgcccctgctgctcaggccgaaatagtagtagcggcaaacagaatggaacccttgtatgaaaggttccggaagcaagcacctccggtttttctgggtccagatgttatgaaagccgaacagtggctaacggtgattaccaagattctgaactttatgggtgtcaccggaaatgatagagtggtgtgtgccaccttccagttctaagaagacgctctagtctggtgggacatggtgtctcaaattcatgatgtcaccaccatgacctgggaaaggttccaggaactcttcaacgccaagtatataacgaggcagttagaagtgcaaagaggaaaga

SEQ ID NO: 292265 - DNA, 769 bp, Cannabis indica
aacaccggcgcttattttttgccggcgttattcctcgccggtaaaaggacgttttgccggcgcagttaatgtacgcgccggtaaaaagtcctttaccgaccaagcttcccagataagctttgccggcgcacaactgcgccggcaaagctttcccggcgcagtcagtgtacaaagaatacaaatagtttttagttataaaattttgttttaagtagcattaaaaactctaaatatataagaaaaattaaaaattttgaaaaaactaaaaaatagaaaaactctcatatatgatgtgacatcactttccctaaaattctcagatatatatattgattctcttttatatttaattatttaataaataattaaaaaagttaaaaaaatagagaaaaataaagaatacctctataaacattagtgtaaaattaccaataatatataattaaaaaaaatatttatataattaatgataggtagtcctttcaaataacacatataattaagaatagtatacataataattaaagagctaatagtattaaggctagacatgaatttgaaatgaattaattacctaaaactaaaaatatgcattaaaaaatagaaataggaaaaaatagagaatagagaatagaagaagattagaatgccacttaacatgttttgtgctttcctttatattatatattgatgatattgattgattgatgattgattaagctcacattttgtatagaaaaagctaaacttcaatcaataataatatata

SEQ ID NO: 292266 - DNA, 270 bp, Cannabis indica
gctaagactatagtattgtctaagaattatatattcagagatactgttgtaagagctataagaaaaggaatcttcttccttgttcttaagtcaatacaaataacgaggattaggctattaccgaactgctcggggctaaacctctataaaattcctgtgtcttattattattttattattatcagatactacatatcatttatctcttataaaatagactcattgtcgttggctaaaagcgaagtcaacaggatgtatggagtatacatt

SEQ ID NO: 292267 - DNA, 802 bp, Cannabis indica
tttaatgccaaataattcaaacctaaccctagtggaatgctataaatagatagtgaaggcttcaggaaatttacacttaaattttctatttttccttcagagaaaaacctgagccttctctctccctatctggccgaccactccctctctctttcttccctcttgaatttcgaaattcttagtgttagagtagtgcccacacacagcaagtgatacctcaatcatagtgaggaagatcgtgaagaaagactttcagcaagaaggagtttcagcactaaagaatcagagaaagagatccaggttcagatattgataatgctctgctacagaaaggaatcaagggctagatatctgaacggaaggagtcattttattccgctgcacccaatgtaaggtttcctaaactttatatgtgtttatttcatcgttttagaaagttcatatttagggtgttaatcaacatacttgtgagtagatctaagatcctggtaaaataatttccaacactctccctatttaaaccaagtctcatcttttaaaattcgtgaaattacgaaacttcccaaaaattccgtcactgggtccccgtcgcgactggcaatgcccccgtcgcgacggggttaaacctcgttttttttttttgtaaattttctctgccagttcccgtcgcgattgggatagtacccgtcgcgattgggacataacctgtcgcgactgggttaggcaacgacacgatttttggtttttcatctcgattctttcaccgcgcgtcctcaattcttgtacatactttctttaaaca

SEQ ID NO: 292268 - DNA, 185 bp, Cannabis indica
taccgacgtgttacagtatcctcctgatcggtcgaactggtcacactccggctgctggtcataaccgacgggatacgtcaatagcacggaaccaccaacctaagtgtcagacaacactataagtgacacgctaaatcacttcccggggacttaaactaggaattaaagtttccctatcaataaaa

SEQ ID NO: 292269 - DNA, 648 bp, Cannabis indica
catcgaattcttagagaaccttccatgtccattcggacaatgaaagcccctacagtgcatacttttgcatattctgatcaatcctccatacttccgtgtccattccattgttccatataaccaagttgttgcatcaatggttatggtgaatcgttccatcttcctcaaaagatttgaagacatccatcaaatcctctttaataacttcccagctagcttgaaagactgcaatactaaaaccatcaggacctagagccttactaccttcacaactaaagaccgtacttttaacttcatcttcttcaaaaggcctttctagttgtcccgccaagaaatccaaaattttttaccactcaattccttcaatacttctccctcttgtcttctcagaagtgtataatctcttaaaaaaatctcttcaaccacatcttcttcttcatcgataaacgatccatcctccctttcaattcatgaaattgtgtttcttgcctttctcgcattcaacatgtcatgaaaaaatctcgagttagcatcaccctctttggcctacttgcatttagctttcaaccatgcacttctttcttcagcaaaagctaaattttgccattcctttttgtctttcttctttcctccattaaagcttgattc

SEQ ID NO: 292270 - DNA, 689 bp, Cannabis indica
ggttcgatcccataaggttttgaagttgaagagtttgattgatggcaactgttcctggagggataaactctaaagcctgtttagcttttattcagctgaaagcttgtagatctcattgtccttctcatcaagaagtttgttgagattcttaacagtgtcctccagtttgactttttcagactctatctgctccttggcactattcagacctctaatctgcttggtcatatattcccattgagcaaacatctcttcatatgcattttgtcttccattagagactccatcatcctccgattcaacagactgatgactttgagccatgaaagccactacttgtttatcctcattagaacttttgcttgcaatagagtctttttcttcgtcactatcgctccaggtggcaacaagggctttcttctttttgagagtgttagcacactcggcctgaatgtgtctgaacacatcacattctctacactgaatgcccatgctcttattgtcactgggttgctgaccatgccagaagttcccaagaggatttctttcggaagcatttttcttaccttcagaacacagtttcttgtacttctttttcaagaattttgcatagttcttggtcagcaaatctacagcttcatctgagaaaccagcagacaaatctgggatagacttattttcttctttgt

SEQ ID NO: 292271 - DNA, 1379 bp, Cannabis indica
attgctcccactcaattgcactaccgtgttcccaaaatgtacgtatcaccctgacctaaaagtaggcttaactaacaaatcaaagaacacgaatagcctcttgagattgagcctaatcataacaggattaagatcatttgatctaggatcaactaggcgatattgacttgaatagatattacggtaagtttaataaatctaagtcaaagttcaatatcggtcccttccgatgcatactccatgcatccaacctgagctttactttaaccaatgctctggaaagaacatagcacttctccaaatgcaagtaaactctgttgtagattatcatatcagtaaaaccctatgtctgataaatctagaactttattcacatagtcatgtttactttccaatgtgttgacagcacaataaacaggatcaagtatgtgaaaagggtttcagatgaatttatacattatgtacatataatcatgaaataaatcatgtgaaccatgcaacattaaatgttatttctgatctatattaataagtaaatctgattatattgaaatgagttttatttagggcataaaacccaacaattttactttcccacgatcgaggaaaggtggctgacgggcactgtggactccgacattagcaagatagggaactttgtggacgagtactacttcatccagggcatggataccatccacactcggttccagtagattccctcatattttcgccctgccttcacattggggctcagggagaaggcacaaaaaaattccacaactgtcggatactgctcggaacatcacccttctggccactgaggccaattatgtcgagtacaaactcttcctagaggattttgtgccgaggcctgtgaagaagatgttggtttatgccctaaataaaactcatttcaatataatcagatttacttattaatatagatcagaaataacatttaatgttgcatggttcacatgatttatttcatgattatatgtacataatgtatgaattcgtctgaaacccttttcacatacttgatcctgtttattgtgctgtcaacacattggaaagtaaacatgactatgtgaataaagtttcctagatttatcagacacagggttttactgatatgataatctacaacagagtttacttgcatttggagaaatgctatgttctttccagagcattggttaaagtaaagctcaggttggatgcatggagtatgcatcggaagggaccgatattgaactttgacttagatttattaaacttaccgtaatatctattcaagtcaatatcgcctagttgatcctagatcaaatgatcttaatcctgttatgattaggctcaatctcaagaggctattc

SEQ ID NO: 292272 - DNA, 103 bp, Cannabis indica
agagagagaggtcggctatagaaggatagtgagaggctcaatttttctgaagacaatctcttgaatcacttattttggtgtgagccatcgctatctatttata

SEQ ID NO: 292273 - DNA, 971 bp, Cannabis indica
aaaaaataggaaaatacaaaaaatgagaaaaaattacaaaattactatgggccggcccattcaacatttatacagtccagaatcaaaaaaattacaaaaataccacctggtctataccttaagtcgcacggaatcaacgaagaagacgaacataccttcatcgttcaaatcaacaacacaaccataatgaaaccaaaacgagagtaatgcaaccatcaattccggcgaaaattaactagaaaagaagaactgcaatgatctaaacagaaaattacgaaaaaaaaactagaaaaactgggaagaaactgaaattaaacatttaatttcggttttaatcgttcaaaacaactccctctaaaatcaaaaatccagattcatgcaatgtagatctgtattaaacaaatctggagcttctccttgaatccaaaacaaggtattatatgaaattttttaaatactaaatctacattatatacagtcacattctggtttacaatgtgcaattcagttttttaaaacacaataacaagatctaattcgaattaaggaacgacgtgttacgtataagtccgtttattattttttgtggttgcattatagttgcataatcgttttataatagtttataaattatgcaggaatttcagttgacgggtaccaacaaatagcagttatacaaggtaagatttatgtaaatagttgcaaattagttttataatagttggaaattgatctgattcaaataaaactgatgaaaagcacagggatcacaattagtaagaactgaattgaaataacgaaaagattaggagctcccaatcaatccaaaacaagtataaccaatacatataagttatattcagttgcatagccgttttgttatgatttcaaaataaactcaagcaacaactatgttaattggagttaagtaccatgttttttcaagtggatttacagttgcatcatcattt

SEQ ID NO: 292274 - DNA, 1136 bp, Cannabis indica
gttgcaatagaagtttctatgtagaattctgtaaaaatgcaaaaaaaaaaaaaaaaaaaaaaaaaaacgactgttttgaagtgtaaaaatgaaaaagccccaaacagaaaagaactaaaaatattaaacttacaaaattatgtataattaaataaaaaaattaaaattctaattaaagttaacaaagacctgtacatattaataagtttaatattgaaggaggtgtcaagcaccaaaagatatgtggcataccgtaattagtgcatttcaatatcggatcttaaaaattttgttttaataaaaaataagtgggaggccgctatttatataaatataaatagtactactaataaccattaactatatatagatcatttcaaaaaaaaaaaaaaactatatatagaaaaaataaataagacaaaaattagctaaaagaatttatgaagttatgtataattaaaccaaagttaaatttttaattaaaataggatgaagatatatacttaataaagaaaatgctaccatatctatttttgattgatattgaaaagaataaaaagaatcatttataaaataaaaagaaaaaattaactgataacaaacaaaaaaaacaaaaaaaaaataggaaatataatcaacttgaaaaaaaccctaaaacaacacaagatcaatagaaaaaaaccttatcagatttgggagactttggaactttggctcaaactcaaaatcagagtcggagttctccaacacagattgagggtatttttgatttagtgttctttgaagtaccagaacctatatttgcaagaacagatctagaaaatcaaaataaaaaaaccactcttttatttccccccaaaagtgtgactaaaaattagaaaaactaaaaaaatgagaagaagatgaagaagaagaactgaacaagaaataaaataaaaaatttatatgttaatggagagagtaagagaacttaaggaggaagatagtgagaaaaaagatgataagtgtatggattttgaaaaaaaaaaaaaaaagaaagagacccatgaagaagaagaagaacagaagaggagcaattactattacatgacaccttatcttcatgttcatcagatgagtccacccatcttctaaaa

SEQ ID NO: 292275 - DNA, 732 bp, Cannabis indica
caagtcttctcctgaagaccactctcttgttcagtcaagtcgttctaacaaactctaggacatagtaagaactgatatataaaatactagaacctagatgaacaactaggttctcacataacaaagaaactctcctcacaaaaataaaaaaatgcaaaaaaatgaataatggaagagctgattcgaatgactgctctctaggtcctatttatagaacatagaaaccctagagacagccacaaggttgaatctgcagctgtacaaaactttcctaagataaacacgatctgcagcatcagaatcaggatctgacgcagcaaatcagactagaataggaaacttgctataatcgagtctgatcttctattaagtcttgattcctgcgataaacagtttatgtattctgattgtatcaagacacaatcgaattcaataagggaaaggcaataatcaaagtttcctttaaaaaccaactttccataagagaattgcttctcttacaagaagtttccatacaagaaaagttcacctgtaaaatgcatctttcctaacatagaaaagagcaataaaaactgaatatataaggtaagaaaatcggttatgaatgcaaataaatcttaccgtaaaagaaaaaatattttggcatctaactttccaaaaaaggactttacaatccttacctttggcactttagataaacaaaatatttttttaacaaagaagtacctgcaa

SEQ ID NO: 292276 - DNA, 446 bp, Cannabis indica
agaagtgaaatgatagttttctttgagcttagcttaacagagttaaatgaaagagctcttacttcagtaattatattagtttactgaaatattatttatagaaagctaagtgttttaaggataaaatacaatgaggggtagagcggtaaatttatctctacttgatgtagatcatctatagaggatctttgattatttagattgaaataatggataattaatgcgtatatatatttgaaacatatagagtgttctatgtaatcaggagtgcgatttcaaattatagtagagtcgagaggaattaataaattagaaaatttagttggtaaattttagatctacttattgggagcttgattatatagggtcatagtgttggaaattattttaccaggatcttagatctactcacaagtatgttgattaatatgaacttctaaaacgat

SEQ ID NO: 292277 - DNA, 747 bp, Cannabis indica
atttttactcaaccaattctaaaaaaatgatatccgttatctatatattttgagtcaacgtgcattttgaggaatgtttgtggaactttcattatcacacatgaagacacataaacaagcaatgaggaacactagacaacatatcatgtgtgtatcatatttcttttgaagcaagggagtacgatgtacaacatgatcaaaaccagcatacactaggacaaaaacatcatcatttctttgtttaaacccaagattcaacagtataaggtttagaagaccataccatagcactaataatagtgaatgagctcttgaaagacgaggtgatgatttaacactcttatttcttttggttaaaacttttggaatagcagtaaagtctccaatatctgatttatccaatgatgcactattacataggacaacattgtccaacaaataactaccatcactagatctcttccctgttaagactgagcacccatcaaatgaaactaaacaatgagttttagaaaaacttacagtgtaatttgcatcacaaagttgaccgatgcttatcagatttgccttgagtcctttcacatacagtacttcagtaagaggtgcagctctactcatcaccaagtctccttttccaataatatggcccttatttccatcaccaaaagtgacaactccctcctttgcttctttgtaattgactaacaatttcttgttgcccgtcatgtgtcgagagcaaccactatc

SEQ ID NO: 292278 - DNA, 511 bp, Cannabis indica
ttatacgcgtgtaaaatagactgtttgaacattactttctatattgtaaattattccgaatttttcaaaattttataagatatcttaaatagatataacatgcatgaatatgaaaaaaaaattagactaaaaaattcttcaatggtgtatcagtatatcacttttaagggggtgcataacagaatcacccaataatatattataaatattaattttaattattttatatttattttattatatttttttattaatttctttcacaaacaaaaagagagggaaaggagagttaatgaaaacgacaaagccaactcaaaaatttataggggtctacgcgtataaaagataaaaatttatttaatgagaaattttatttataccctaaaaatttttaaagacactctattttaataatttttattttatttaaaattaatatctttaattatactaaatttttttaactttttcttccaattcatatctattgtgtctatataaccgaattctt

SEQ ID NO: 292279 - DNA, 510 bp, Cannabis indica
aattttcctatcactagggtatatccctagaaggacttaagcaactactagtaactaatcatggaccttttactttcatcaatatgcaaaccacatttctagggaggtaagttttgatacaattcaaaaattcaacttaatgatctttgaactgcatacctatcaaatatttttctacccctatcagttcgtaagatctttaaccacttaccataatgttttcaataatgctagaaattcaagaaatttctcaaacatttcaaatttctttgcacaagataaaatctagagtgattgttaaaagaatttaacgataactcatatccacccctgaatgtacatccatattcaaatatagatgattctactttcaaatggatataggcatattttctctttacagagaatgatcttgtccaaactactatgaacaagatgcaaaagtcatagatataattattgtggttatgatcttttgatgaaaaatgtttagttataacaaagagtact

SEQ ID NO: 292280 - DNA, 626 bp, Cannabis indica
tttttggaaaaagagtggggcggtttccttttgtgttcttgggctggtagtttctctttttaagtcggtttcctcttttgatcctctctcacatgattatataaaccaacttccttttgtgttcttgcttctatgtttctcattcttactttcagaaattcatagctaaaactaagaacctagggcatccaaggaaaatggtggaatccgaacaagccccctcaaatgctcctcttgctgctccaatcgtcttgctgccatggaggaggttcagcaagagatgtccaagcagctgtcctcattgatcaagcattatggggtataagttttctttctttttgttttgttggacatatttctatattttcatttctttttgtctttggcccttatagataaacaactgtgtagggggagttgaggtttgtgttcgtgtttgtattcgtctttggtcaaagttagctttttattttggtttaatgttgtgcttctcagggggagcttttatgtttgtttcgctaactttgttttataggtgtttgttaattaataatattttgattatctaaagtgccaaagggggagattgttcggtccttttttttggcaatttagttgtcaaaata

SEQ ID NO: 292281 - DNA, 467 bp, Cannabis indica
gaccaacacacttgaatctggaaagaaggtaagaactgtatataatatgtaatatgaatatctgagtgtatatatgtgttaagtgtatatgcattcttatgtgttagtcgcaatgcattagtatagtgaatattgtttaagagtacattacagtgataccggcacaagtacgggaaagtatagggtgtctgtggtacatcactcagtggtactcagggtacgaaacaaaccctaccaacactcgaatttctctttaacagctttggttgcattgtcacccgactgttcaggagacgactcaattaacacaaacaaggcactttcacctatgagagcaatattaatgttctcattctattttgggaagttagatccatttagcttattttcagtcaagagtgataacatgggatttgacatggctatacaggatactacaaaataataaatagaaatcaattatggtt

SEQ ID NO: 292282 - DNA, 820 bp, Cannabis indica
gactcaattaattgattttaattgatcaattataattctaaaattagactatgtctagtttatgaattttcactaagctggggacttaattggtaaaaaaaaaaaaaaaagattctagggtttatttattaattaagagacttaattaagtctaattaataaatatgttaaatggaaattttctttgataattaattttaattattaaataaatagttttggtatttaagtggttgaattgaaaaaaaatggtatttttgagaaaataagataaatagctggaaaattggaaaaattgcaaagtgggggctcacatcctatggccggccactattgctctatttttacaatttattttattttttaaatgccaaataattcaaacctaaacctaggtggttccctataaatagatagtgatggccacaaattgaaggatgatgaacacactttccttcagtcaaaaatttgagccttcttccctatgctattcgaacctctcttctctcttcctctcttcataatttcgaaccctatggtgatagagtaagtgcccacacacatcaagttggtcctcaatcatagtgtgtattactgtgaagaatccaaacacaaggaaggagaatcgggctcagatcttggtgatactctactacagaaaggatacaagggttagagatgtaagtgaaaagagtcatttaattccgttgcatccactgtaaggtttctcataatttttatgtgtttaaattacaatgttttagaaattcatataaggatgttaaaaacatacatggtagtaaatctacatcctggtaaa

SEQ ID NO: 292283 - DNA, 588 bp, Cannabis indica
tttaaaaaaaatcatcatcattttttttgcctggtcagttgtgtcagggtgcctatacttaaggcctacggaaagtgatcagtctcacttcttcactttcctctccgaaaccctaagctctgcctcatccaaattctttcctctctatcatggagaatatcacacccattgcagtaacccctgttgctatggttgttccatccatggagtcgactgatgatcctccagtgcctcctacagtcgcgtctgcattgcctaatccctgtcgtgacattgtcctctaccagtcggaggttggtggttctgcacatttcccgagttcagagtcaaccccgtctcctccctcacctccggtcagtcagaaacctcgtacgtttctaggtaaggctcctcctatctctaaaaaggttcgtccttcactttcatctccttccccacctgtgtccaaacgagtcactcgttcttcgtcgagtcaccagtctccctcgaaacctataggccctcctcgtcctccatctaaggtctctattcctaccccaaccagtgaacgtgttcaacccaaaagaaaatcctctgctgacaccacgt

SEQ ID NO: 292284 - DNA, 690 bp, Cannabis indica
caaaaatgaaacactaagagaagatagaagtaaacatacagtctggagcttgcaaatccatttgaatttctgaacgagccattcgtggcaggaggaggtggcccaggagctgttgctatgttagttcccacaatctctatcttcattggcttcccatcgagttgcacattgttgtatcttttgaccgctgccacagcatctccccttcgtgagaaaactacttccgcagttccctaagaaaaagagctttttttttttctaagctacagtagcatagaatgaatcatcggaaaggatctaattatgccaaactttggtaccttcgatctaccgcttcggtcgtaatggattgaataacgtttcagatcaccaacttcagaaaaaagctcctgcacacatagtaaaactgatgcctcatgttggttagtatgttaagtccatcctccaatggctatatgcaatactatgtcactcaaaaatggtttcaaactttctttttcattttttttttcaaaataggtagcctaaagattttcgagagcgtgttcacttgatttaattctaagtttctaataccaaggcaagttaaaaaagattatgctaatctatttataaatgatgtgtacttatttggtacaaaatttagtgctttgtgctttcaatatatctggtaccttctatgttttgata

SEQ ID NO: 292285 - DNA, 680 bp, Cannabis indica
ttgaccacccaagttatggatattacatatctgccacagcctagggctcgggtcgtgacagaaaaatggtatcagagcaccgggtttaattacctcggagtgtgtcaccaaatagtttagatttattttaaataataatagtaataaatatcttggtatttatatgtataaggcatatttatattattagcatccaatcctcactaactgattagcttttggttctcagacctaagaaaatgcctccaaaaggaaggaagacaaggagaacggttggagaagacgcccctcaagctaatgtccaacctccacaagctgaattccctatgaacgcccttctcgaagccttaagagctgttcccgctcaacaaatggatcctgccgctcgacagagtcatcattttcaagtctttcatcggatccaagtgcctgagtttgagggtggacaagatcccatgatagctgaaaggtggttgaggcagataaagaaaaatttcaacacaataggaacacttgaggaataccaagttactttcgctgtgtccaagttagagggtggtgcagcagattggtgggagaccttatccaggacaatggaaactgatgggatgacttggcgagaatttgaggaagttttcagggaacaatattttagtccatctcacaggagggctcttatt

SEQ ID NO: 292286 - DNA, 632 bp, Cannabis indica
ttccagtttttttgaaccattcctccgcggacccacttagggtaagtgggaagcacagacatttggcgtcattgctgaccctcatgaccgtcatgacacggttgaaccgtgacaagtggtcgctaggatcggagttcccggtataagctgccatttcgggcatcttgaagttcttagggagctccgcctctaagatgtgcttagcacagggctcccgatcctcgctgtctgagtcggagtcatctcctttgtctccgggagactcgggcaatgtcttttcgaagtatggcgagttccgccataattccttcatttaacgtacccgtggagaccgcgggtccgtatcttttttggtcaaggtgatctcggagatcaccttggttcccattgatttgatttctcagatcaacgggaggacacctctgtcctcttctccctctacccccgggttcttggtgcacggaaacgctttttcggtcccctcgatcctgagggccaaagctccctttttggggcttgcccctctgcggacctttccctttagggaaatctgagcggacctttcgcggatcctgcgcctttttctttcgccctggggtagaagtagggttttttgtttggttcccttcagc

SEQ ID NO: 292287 - DNA, 475 bp, Cannabis indica
aaataaaattgtcatttataatatttattatttagactccataaaatctcttaattaacaaataaaccccaaaacactatttcttcacactcaagccatatcttagtgaaaaattcataaacgagacatagtctaattttagaataataatttattaactaaaattaattaactaagtcttacaagaagtttgtctcaactagcttggaatcgcactctaagttacatagaacgctctatatgttccacgatatagatacgctattaattaatcattgttataatcccaataatcaatgatcatttatagatgatctacattgcatagggacaaaataaccgttacaccctttcaatgtattttatccttaaaatacttggtgttgcgatatttttttatctttttccatctttttctctgatatttttctaatcttcttctattttaaatctgcaaaaataaaagataacaagc

SEQ ID NO: 292288 - DNA, 521 bp, Cannabis indica
ttctttgtgaatgaacgcaatattgttgtcccctttttctttgttcacatccatcttctttttttctttcttccaccttgttaatgacatttcataattctgcaaggatccaatcagttcatcaagatccagttcctccacgtttctcatttcttcaatggaggttactttagacataaatctcctaggtagaactccaaggactttacgaaccagctttgcattagaataagtctttcccaaagcataagattcatttgatatgtcacacaatttagcatggaactcagccaccgtttcttcttcctccattgataaatcttcaaacgcttttgccaaagcacgaagacgggatttctttacagcatccgttccttcatttttaattcgtagtttttcccaagcctctttggccatctcacagtttgcaatgaccttcaattgatttgtggacactgcattgaacaaagcatgcatggccttcgaattaaaattggccctctccatctcatctggagtcc

SEQ ID NO: 292289 - DNA, 914 bp, Cannabis indica
aaaacgagctaaaaataattttgttaaggcgatgaataaagaaaccaattacaaatattaaaactcatataagatttgtgtattatgaaatttgatattttagtttaagaaattagtttctactttctagatctccaactgtggcggaatctgtaagatcttttggggtttggtggtggagatctcatatcaagcgtccgtttgagtcgtcggtcgccaaatatgtcgcttgtgaacagaggtcggtaggtagattgttgacgggtgaggcaaatagctttgagagttttttagttttttgaaataatttatttaagcatcaaatatgagctttaaaaattaaatttccacatatatgtatacaaaataccataaaacaatgttaaaattaaaatatgccacataaagtggtcaaatctagaagtactatacttttgtaataaaattttgaaaaaactatagtaagtgtattttctaaaatagagtatctgatgaacaaccaaaaagtagcatagagtagtgaaaaaataatttccacaaactttttatctccttttatatgtttacttgacaaattctcctttttaatgagactttactaaaaggaggagcgaaaatatatttttgtgattatattttggacatgcatttttaagaaaaaaaaaaatactacttattttagtaagggtttatttattggaaaatttagacagattgctatttttttttttgttcaaaattttaatattttactagcttttttctttttctaattctacggttttttatttatttttaatttactaattttagtatttccctataaaataaagaaaacaaacgtgaaaataaataaaatttagtaattagtctatatttttgttaaataaataataaactagtaaaaataattt

SEQ ID NO: 292290 - DNA, 658 bp, Cannabis indica
caaaaggaaggaagacaaggagaacggttggagaagacgcccctcaagctaatgtccaacctccacaagctgaattccctatgaacgcccttctcgaagccttaagagctattcccgctcaacaaatggatcctgccgctcgacagagtcatcattttcagatctttcatcggatccaagtgcctgagtttgagggtggacaagatcccatggtagctgaaaggtggttgaggcagataaagaaaaatttcaacacaataggaacacctgaggaatatcaagttacttttgctgtgtccaagttagagggtggtgcagcagattggtgggagaccttgtccaggacaatggaaactgatgggatgacttggcgagaatttgaggaagttttcagggaacaatattttagtccatctcacaggagggctcttattggagtatttgatggtctaagacaaggggatatgactgtgaatgaattttacatgaagtttgtagagctatcctcttatgcatatcctggtgttgttgatcaacccttggtgattgaacagttcatgcgtcgtttgaggcctgcgatacgtggtccaatagcccctttgacctttaacaacctgatgagtgtgtgacagcagccttgcaaactgaggctcatgta

SEQ ID NO: 292291 - DNA, 668 bp, Cannabis indica
catcagacaatcaaatgaaaaaaaaatacatacaaaaatacaaaaaaatattaatcacaaatataatcaaaacaacatacaatgcataccaataaattaaaaataaaatataagtgtaagtttcgaacctagaaataaaatataaaaaagtaacttaaaataaaaaatttgtaataacattataaaatagagcaatctcattacaaaaatctcaaaatatgtaaaccagtttcgaacaataatttagaaaaaaacactaacaaaaataatcaaaaacaacacatactttaagaacataatataaatgtgaaaatcagttttaaatttagaaaaaaaaataatataaagaaacttaaaataaaaaaatcataaaatgaagcaatcccattacaaaacttcaaaatctgtgaaaccaatttcaaccctataaaaaatcatataaaatctgtgaagcatttttattattaatatttaaactggttttcacatatttttagttatgcttaatgttatgaggaatgtaaataatctatgaagcattttaaaccagttttgaccgtataagaaaatcatataataaagttaattgtttttctgatgaaattagtttcaattaactttattattaacatttgttattaacatttgtattttgttatgatttttta

SEQ ID NO: 292292 - DNA, 502 bp, Cannabis indica
aattttggaatcagaagataaggatgtgatgtgacaacacactgcaacggttgagatcgtggtcaaataatttcagcggccaagattaaatcactagatttcttatcttttaattttggaatcagaagataaggttgtgatgtgacaacacactgcaacggttgagatcgtggtgaaataatttcagcggccaagattaaatcactagatttcttatcttttaattttggaatcagaagataagaatgtttacactataaaatatggatatgatacatgatatgaggcacaccaaaaatatatacaatttaactttgaaaaaaatatgaattcttatcctggtagttcatcgtatttatcatcatcgtcttcttcagatgatgaatattatgatgatatagaaatgcaagtggtaggtcaaatcactgctaacaataatttttgtatcgctcaacaccaacaaaatcaaactcacgtcgaggctcgattcctggtcatatag

SEQ ID NO: 292293 - DNA, 704 bp, Cannabis indica
gcataaaacccaacatccacaccaaactttccagacctgatctaaacatcctagaggtcaaaaataaagcaacaaaacacagcttcatgcaccataacaaaattcaccattgatgagtcaagcttgtgtttaaaaactcaaagcttgctcatccaactaattagctatcaaaacctgatcaattcaccatatataaccataatataactccagaaaacaaacccaaacacaaaccacaaccacaccagctaattcaacattttaccataaaaatcctaagttttgagtttaaaattccaaacttgaacaaaatcaactagcatgcatcaaaacctattccattccactcaattaaacataaatacatccaagaatacaacaacaaacacaaacagcagctacagcaagtaaaattccaaagcatgcaaatattcattttcttaaaactcaaggaaactagcaagagagttgcacaagggttaccttagcttggattacactttgaattgctgaaaacacttgaattgaatgaacaaaagcatgaaccctagctggttctagaggtggcagagagagagagagagagagagagagagcttgagaggaaatgggattttggtctttctttgtattttttttcctaattttgcaacataaatgataaaatggttttcattacttatctcagccaaaaataacatatc

SEQ ID NO: 292294 - DNA, 803 bp, Cannabis indica
ttatgtacatataatcatgaaataaatcatgtgaaccatgcaacattaaatgttatttctgatttatattaataagtaaatctgattatattgaatgagttttatttagggcataaaacccaacagttaattatgtttttttttatttcatattatttattaaatataataataataataataataatattttatataatttttttcatttttgaagtagggcaacaaaaattgatttaaagttaagtatttataaaaatttattaaattttaaattttacttatatacttttataatacttttataatgatactttcacatatcctccatatatatttatataaactatatgtatcttcctttttaaaaagtatatatattctttttttttagaaaaaaaaaataatatagtgttattcttaaattttattattaattatttgtaaatgtcaaacaaaatcagaaatttgatggcaaaaaaaaaagaaaaataaactatagaagttatatatatatattagtgtagtatttatttaataatatacataatttttaggggaattacccaatatattatttttttaacttttttttacaaatttacgatttgggtttctaaagtggttgcagcactagttgcaatagggatttctatacgatttttttgttgcaatttaggttgcagcgctagttgcaataggggtttctatgtagaatttcgtaaaaatacaaaaaaaattgtttggggtgtaaaaatgaaaaagtccctaatgtttaactatatatattatgaaaagtaact

SEQ ID NO: 292295 - DNA, 718 bp, Cannabis indica
tttgtcttattattaattgatcattcaattcaatgactttaaagactcaacgtcgttggctaaaagtgaggtgaaaaaaaaggatgttctcccatttgatatccaggaaattccctgtcatttcatagcattatttttggttagcaatttagggtaaaaatttgtctttcttacccaaaaagtaatactatccaacttcgcatcccacctgtaagaaccattattttctgaagtgacaaattatgtccagttgcatttcagttgcatctgggacttgtagtgttttgtctggggttcgtactgttagtgttagtccacgtcagtaaagatattttaggttttaattgttcagatggtaacagctgtataatttgagtttcttggtttagctgggtataaatacgatttctgggtattatgttgacgaactttttgatcggagattagggattacgtttctttcttcttgtttcttctttatgttccatggcaggtgatctttgagctaggaggtattactccaaattgcagatcagagcttgaagatgttgagttcagactgaagggatttcagtatcatcttcatcacaagatctgaagggagttcagattgaagaatgttgaagagagctcgtcattcacacaagggaatcttatgtctccaatcaagggtcttggttggtatgggtatgattcactgtattttgtaaaagagtgt

SEQ ID NO: 292296 - DNA, 450 bp, Cannabis indica
gttggaaaggagacacatcataacgtttgaggatggccgcaataaagggatgaaaagggaccgataccccacatcgaagaatgggtattgagattaccacatcctctgtgggaacaatcgctggattggtaaaagaaagatgcgccctatgagtcggtttaggtcgcaaagaagcaagtcgcaacaagtttagtcttgtaaaggtagtgaggtccgatttggtaaccctcgaaaccaagtcctcgcatgagaaaggctcgttcagctgagtgtcgtccaccgaatcagtcccactcccttgttcctcttcttcttcctcgcctaactctcgagctggggccgcccaatcgtcatccatctcctcgacctcaacgtcaggggcatgcctggagtggataagataatcgtgggctgacaccgtagctccctgtctcgaatctcaatggcccc

SEQ ID NO: 292297 - DNA, 678 bp, Cannabis indica
ttcttttagggccttttttgtataattttttcgttccttttttatctaacttgccactatttataatcacatagtgagcggttaattacaaagttgattgtaatctttacaacgtttattccctaaaatcatggggtttgattacatatcacgtagtgtaaatgcagttattatttgaatatcacacagctattattttcctgcttttactgggtcaaaatgatggtgtgtttaaacacgtctgtaattgtaccattctgggatgtctcgactggaacttggttccaatgaccttgatagcaagcatgagctttctcccctacctttctgaggtcgatgatgtacaccttgctgcttctttgcttaaaggcttgatgtttcattctgataattgcagttcttatttacaaagagtacctcagcagtcatttgaatgttagcttctgactcgtcaagactataagtcttactgaaagatgtctgaagtcaattggtgaaagtcacacgagtgtgccttcctatagcgatataagcaccttgcttattaggtcatgagtctgcccaactattatacttagtttgtatattatacgctaagtgtcttctcagtcgatatgcattgcttttgtcttctcaggtgtaacgaagttgatgtctcgctttatgcatccaatgacg

SEQ ID NO: 292298 - DNA, 529 bp, Cannabis indica
ttttacccctagttttggaaatgcctaagttgtaggcttaaggttatttttgtaatttgctaaataggtgatttggtggctgcctagggtgtggacacctgtccattttattcagcaagtaattaattggggattatctctttttcatttgaagaaaatagaggaataaggaaaaaaagtcaaaaattcaagaaagctatctctttctctttttctctctttccgctgaagcaaaccagggggatttgttgctaaaattggtattttcagcaaggttggaggaggattcaagcaaaggtaaaaccctagaactcttgagcatgtttttgaagctttttctttaggttgaatatgtgaattttgttaaataggggctattagggttaggtttgtttaaggtttgattttataggttcatctgagttgagtatagcattgagcagctggttttgatgtttggttttagttttgtcgaagtttaagctttgagttcaaagctttgaactctaatggcataaattgattcatt

SEQ ID NO: 292299 - DNA, 567 bp, Cannabis indica
aaaaacaaaaataacaacataacaataaaaaacatacttcttcttcatcaaaccaccttcgatccacttaacgtatcccccgcaatcttcagggccggtgttcttcccaatctctttaacaaaaggaaacaactccttagggtcaaaagctaattcactagatgcctccttatccttcttattttgaatttttggttcagaagaaccaaactcgttgacaaaaggagatctacaatgcaatccaggttttgcttgtctcttgacagcaacactggattgcaaaggcattacatctagaacctcaacctcatcttccacagcaggggatgcagactcaggaattgacaccaaatcccattgctcattctttgcactaagtggggaagaatatgcccgagtgattctatcaaccaaatccaaaatggattggtcgactgtaatcgtttcatacgaaaacacaccgccctcatcccttccctcacctaagccaaagtgaacctggaataaaaacaagaatcaattaaacttacaatctaaaaaaaacaagttataataaacacatccatt

SEQ ID NO: 292300 - DNA, 581 bp, Cannabis indica
aatttttaacgaccaaaaaaattaagggggtatgatttggtatatgtcaaagttgggagggaaaaaattgctaattagcctaatttatactacttatagatgatagtaataagtccatatattttcattatatctcttaaatttcgtagaataagtaatatcccttgacacatttaattggtgatatttatgaaattacaaatagtaacttgtaactccacaaattgtatattacaagacaattatacttaaaacaatttgttacattatatatttattttatatattatattatttaataaattatataacaaaaaaatactataaatttttatatggtggtaacatcattataattatttatatatatactagttctataggggttcatgcttggacagatgcgtgtcctagatttattagtgctcctgtaacagctgatttgagttgattaataacatacttctttcaaaaaaaaaaaagttacaaacaactaactagtcacgtatataagaaaaaaaaagttagcacgtataataaaataatttaaaccttaatttccgtacttataaaattaactt

SEQ ID NO: 292301 - DNA, 537 bp, Cannabis indica
ggcactgattgtcgacattgtgtcgacatactatcgacatacagtcgacaaccacaccaagcatgctcgccatcgacataatatcgacataccatcgacattcaatcgacaattaacaacggttgcacatttaatgttaataaattttacctacgttcccaacaacccttcccaactgacacgttgcatgtcagacacgtgtcctatcgacaacatgtcgacatgacgtcgacatggcatcgacaaatgtgttagcagtgacactaaattggcatgttgtcgacatgatgtcgacatagtatcgacattcagtcgacaaatacaccatttcatgcgttttacctgtacagttacgcatttaatgaccattaaattttcatacattcccaacatgtttactgctctataaaagcaaatccctttcttattcataagtgctcttgtcttctacttctctcttactcttaaaaatttctcttattctcttaagttctaaatatggccccaagaaagaacggcaaattccccatcttaact

SEQ ID NO: 292302 - DNA, 832 bp, Cannabis indica
tttgtgaagtcttatatattaatagaataagtacatggttctttatacgtgcagggtatataacttttatatgaccgctactattggttgtactttgttttattgatatacttcatagttatattaattttttgttaggacgagcagaatacaacttttatgatcgttacttttggttatattagatttactttatagttatatcaattttttttagtactgagtatacattaaatttttatttattagtatatttatttggttatacttttttttttacttttattaataatttttaataataagattttttaagtaaagaatcaaacttaataataaaatttagttaaaatgagttaacagcgtggcattgaattatgttttacccattatatttgctcatatatgtatggacaatatataaaaaattagttttttcttctgaatatattaatgttagtttgatatattatttttaatataatgaaaatatttttattaaaatattaaccaatatataaagataataaataatataattatttttttaagaaatatataattattcattgctaaaaacaaacttggtacacaatattcatttcctaaaaattttatttttggcggtgaattctaaaatttccctctgtattttcaattctctaccttaactaccttaatgagccttctatggcacaattagcattctctctcgtcttcttccccaaattaacctctctctcagctttctctcacaacctcagctcaccgacctcaacctatccctcacccccgaccacgactccaaacccaacccctaaaccaactctca

SEQ ID NO: 292303 - DNA, 779 bp, Cannabis indica
aagaattcctagatcccaacctccttcggtgctcacaagattttgtacctttgcattatctaaagctggatgtgataaagtaatgtaagggtactcatcacaaggcaggcaaggttcatttagtacttgaatgttactgccatcaccaacacaccaatgcactcccttttgaactagttgttgggcttcccaaacacttctccacacaaaattcgaattgcttcccaaagatgtcgtgagataattaccattggggaagtatctggctttaaaaatccttgctaccaaagagtcgggtcgaaccattaatctccacccttgcttcccaagcatcgccaaattagagtcacgtaaatgtctaaaacccatgcctcatctttccctatggtgacaaagtctatcccacgagagccaatgaatccctttcccatttttatttgacgatcgccaccagaacttgctctttactttctccatatcccgcattatttcaaatggaagcaaaaagacactcattgcgtaacttggaagagattgtgccactgttttgattaaaatttcctttcccgcacgtgaaaggaactttgattcccaactttggattcgtttgcacactctctctttgagaaagcccaagacagccggtttgtttctgctcattgtacttgggaggccaaggtcaaactatttgggctgcaatattcatccaagcctattgctaatgtgttttgagtggccacattcgtgtttgtgttgaaaaaaaatagatgactttgaga

SEQ ID NO: 292304 - DNA, 158 bp, Cannabis indica
taggcgagagtccaaagcatcatttattgaatagagttgtcaggtcattcctatttcatgagctcccaccattgtttcatacttttgtaagtcttataaagtcgtcatcattagggtggtctatactaatataaaacacttacaaataatacttatct

SEQ ID NO: 292305 - DNA, 556 bp, Cannabis indica
tgaacaataaaacactactgattaacatgcagaaaaacaagcacaagttcgtatacacatcctaaaacaatctaatcagaataacatacacaaattcccatccaattctatgaaaattctattttttaataagaaaaaaacttacctttgactgttcgtggttttggggacgacctctgttctggttttggtggctacgacctctgaaaattggttgggttccaatgtcggccgtgggtgtgggtgggttgggttccaatgtcgagagcaataggcagagaaagagagaaagagagaacgagaatagtgtgaactgcgtgagggttgggtcagggtcagggtcgtgggtggccggactggggtcgtggtcgtggactgcgttgttgggtcgttgggtcgttgggtcgtcgtcgtggagtaacgttcgaaagatgtaaacgacagagagagaacgagagagggaaagagagggaatagcaaacgacagagagagaaagagagagtgaaagagggaaagacggaaagagagagaaagaataggaaaattaaatttgag

SEQ ID NO: 292306 - DNA, 317 bp, Cannabis indica
cgaagtacctggtgcgtgcgagcaccatactcgacacccatggcatccggtttttcaagtaaccataactttctcaattttatcggaatcgagttccgtaaaaaccaaaattgcttaatttttcacaaggaatccaaataaaatattttcagattgaaaataaaattattttcatggaaaaattttataattcacattcaatcatcaaattaacacataagccaacatgaacacatccaaatcaacatacaaacaatattcatcgttttaactgaggccagttgttaggaatatttcatcaggatctaaatttacta

SEQ ID NO: 292307 - DNA, 856 bp, Cannabis indica
gggtattacaatttagagttgtgaacatgagccattgctagttgacacaacaccactacattagaatttcttacaaaaaaaaaaaaacactatattagaattagagttttatttttaagaattatttaatttaattatatgaactctattgtataacactccataagtaagacacaatgttattatcttttagagtcatttgtggcatatttggtctataatttttttaatctagctgttaaaatattatttgatttattgtgtaattaaaaaaaaaattagtgttagttttgtgacttttgattattcttttctttttagaaaagttttatttacagctgttatttttggtttatgaactttgtttaacaagagaaggaattcttttatgaaaagttacttatttaaaaaaaaaataaaataaaattctctttatagaaagttgtctatttttgaaaaaattgactttttttttctaattgttaaattcggttttgtcatgtttattgtagatcaaataatctttattttggcaggtattaaagaccaaatcgtgatcttggtcttgattggaaagtttcccgtttggtcctgatttgctgcataaaatttgatcttgatgctgcaaatcaagattttttttagaaaagttttggatagctttgaaaacttgtgtgtggttgtagctagggtttctatgttctataaataggacctaaagagcaaccaaacgttctgatatcctctagtctcatattttcatatctatctttgtgagaagagtgttttatttgtaaaaacttaaagtgttcaactagattttggttttcttgttatgatctcgtactattcatag

SEQ ID NO: 292308 - DNA, 546 bp, Cannabis indica
tctttcactctcagagaaaacagcacgaaaaatcttcgtaaattgcccagattttcgcctttattcgtggattctccttgattctacattgctgtcaagggcgattcgtggaaacagattcatcaaagtaaaaggttagttttttttttgaatcttcaccatgcttcgttttctgtttttgagtggggactatattttctgggttttcagtgtgcatgagggttgtgtaaggatgaatgtttatgaggctatgtgttttaggtaaaaacctgggtaaattcatagaatatgacctgtaaattgacataaccgcacacgatatacttgaataggcactgtttcacgtcttgaatactcgcgggtattcagatgaacaactcgaatactcgcgtattgacaagatttactttcttttgattgatagctagatcttttagggattttatatgtcgtgggttgaattgcgagggtatcaatcgctgttccaaatggtgggtgtgcctcagtattctaatggtcatatatgcgattatatgccccttgaga

SEQ ID NO: 292309 - DNA, 575 bp, Cannabis indica
atataaaaaaaagtgcatttcaaataatctcaacatcttgatatccaaatcaagtgttatatgtagtatactctccgtaatagcatctgacacgttgtattgaatacaacctttcctccaccattacatttccttaatcacaaaattcttgatattgtgaaatttctctctatatgtctactcctttagggatactggattctttactttttggcaactacttttgtgttagctagaaggtaacactagtagttaataaatgttggaacaatgccaataatgtatagaactttccttagactgaataagtgtctttcctgcaactttaacattcagtctctctggtagagttagagaattcagataggtttttacacttctccgaaatcactactccaccccaagagtaatcaccatctcatcagcagactttctagcactaaggcaagtctagaaatttgatttggtgtagtctaagagtattaaatactcccttatcgactaacatatagttcctcttcttgatcttaagattcacttgattgtcttccaatgttcctttcctggattaatct

SEQ ID NO: 292310 - DNA, 742 bp, Cannabis indica
gcagaatataatgattccttctgttcaagatctctagcccttaattcctttatgtagcagagcattatcaagatctaaacctggatctctttctctcctccgggtttggttaccaccgtcttacacactatgattgagtactagacttgctatgtgtgggcacgacactcattcacacaaggtttcgaatgtgaagaacaatgaaggaggtgaaatctctatagaagaaactctctcatcaactagtagtctcacatagaaaactaggtttgatttggttgaaggcatcaagtggatgaatgagagtatcatgttctttttatagtgtttcaactagggcttaaggttgaattatatggattaaaaaagaataaaatattgagcaaaaatacttctaagccatacaaaatagtgggccaatttctagttacaattttgccactttatttcaatcacttattcttcttttcaataataccatattttccaattcaaccttataaatgtcaaaactatttatttaataattataattaattactaaataaaattatcatttatgtaatttattaattagaccatgcaaagtcttttaattaacaaattgaccctaaaatctcttttcttcacaattaagcccttacttagtgaaaatccataaataagacatagtctaattataattgattaattaaaatcaattaactgagtctgcaaacagtattatctcaactagtgaggg

SEQ ID NO: 292311 - DNA, 485 bp, Cannabis indica
atgacgaaaaaatgcaactcgttctagtactaaggtattggaatggggaacatttaagaaaatactaccaataaagtaccaggtcggatgaccacattaagtactgaatgaacatttacttttaagtgaatggcctgctaggtgggctacgctcaaaggtttcgataaaagaaacaaagtacttaggttaggtgaccaccatctaaagtacaatttcttatttctgcaacttgttttatctcatgttaagctaaaagatcagattggatcaaatagctctgatgtaagttactacggtaacaaatacatttttcaatcaatgaatgaataaagatagttatttcaaaattcaaattgagtcaaaattatcagcatgtttctaatttaccatccagtgcatacaaaaaggtttggtcaaacccaaaataccgagtcatacatctggtcggtcacttggggggcacctatacctgtacaaagcattt

SEQ ID NO: 292312 - DNA, 558 bp, Cannabis indica
tgatggctggtatagggcattgggatgtccttgggtttttacggtttggttttatgaatgctgtcctgctatggtgaactctttctgtaaaagagtttcatcttctattccaaggattctgaactgaagcaacaccattgtcaccaaaaatccaactcttcgagacttgaagggcaaaaattttgatttgccgttggacaaggtaatttacagtttctttactgtttcttttcagttttatttatgtcgttaatttttagttttttagttttttcaattgtttcaatattttcatattatgtttgattatgctgttcagttgaagatcaaaaacatgtgtcctactgatgaagagaggcagaagcttcaacttgacggtttatttctcgatgagtctattgatgaccgtggtgtagcaaagcaatcctttgagagtgggtcatcttcaaagaaatctgattcagtggtgttatagtgagatttctctcacctagaaactcgagaccagactcctctttaaaaggacacgtgtattcagattcccaatgaaagctgaaa

SEQ ID NO: 292313 - DNA, 660 bp, Cannabis indica
tcgtttttgacaaacgacacgttgttttttttttggacaaacgacatgtcgtttgcgtcgtcttcttcagccaaaccgggtcgattttgacccgtttttctgcacgcgggtccgtcgaacccgacccaaacccgatcggaaattgcgtttccgacgaccaaattgcgtgttttcaaatctaaaatgttctaaatcaaataataaagagatccacatagattttatgcacgaaaacacgaaaaaatataaactttaatatcacaaagttaatcgggtccgaaaaagttttaactgaaatttttttccatctttaagtttttcaatggattttcaatgcttagatcgatctataatactatacgaatatagtaatgtatatagaattcaaaataaacaccgaaaataaaaatgaaaaacggaaaaaataaactttaaccgataactttatgttatatatatatgcatatatcacataaatgaaaatgaatattatgaatattattatgcgataaaacatatatataatatacaatatatatataaatatatatacatatacgtaaatataccgaaaaaataaatatatatatatactgtaggaggtacgtgtatgtattatatatataagtttatgaataaatgtatatatgtatatgtgta

SEQ ID NO: 292314 - DNA, 709 bp, Cannabis indica
gttatggtgctatcgtgcaagactctcaagactagataatagtagggttttactcttctgctccctcagggctgtctcccatcttcgtagaagtagaggctcttaaccgagcagtgagttggggtagagctatcaatttccctattagtctggtgctctcagattgttttgaccttgtctcaataatattaaagaggagaaaagactattcagctctttaagatttgatttggactgttctcaactatttgtcctacttttctaatgtatctatccaccacaccccaagagctcacaaccaattggcgcacaaacttgcacaagatgcattaggaacagacgaagagtgtaacaccctaaataattaggcacgctacccaaaatacttctgaaaccctaatcccctaatcgggattactaaccaaaatagcgcagaatttaaactttatgttaaacagaatgaaaataaacttgtaatatatttacactttcaaaatagttgggatcccaaacttactatttacaaacttattacaagtattttctttctagccgacctaagcggcaaaacagaataccaaagttcatcactgatagacccataacccgtttggtctgaagtggcttagaacatgtacattcttcgccctgtctcttagaaactggccgatcggctaatgccttaccctttcctgcacagtagagcacc

SEQ ID NO: 292315 - DNA, 520 bp, Cannabis indica
cttcccaatgctttacagtgggagcttgaagaaattgacttaacttgttggtgatataggctacatcaggccgagttaaactcaagtactataaggcacctatggtgcttctatacaaagtgacatcttcaaaaggatccccatcatgcaaactcaacttagagatggaacttgtaggatttggacagctcttggctccctccatgtggactttggtaagcaagtcagtaatgtatttactttgactgaggtacatgccatggtgatctctgtaaacttcaactcccaaaaaatagtgaattggcccaagatcctttagtgagaactgagcattgagagcagagataaagtggttaatgagagaagtatttggacctgtaagtaatatgtcatcaacatatactaggagataaactagtgtgctgcccgatccatgaataaacagtgagctatccgattttgagtctgaaaatccccaatgtagtaaggtttgcttgagcttttcattccatgctcttgg

SEQ ID NO: 292316 - DNA, 613 bp, Cannabis indica
tataaatattacattactagagaacaaacattacattcaatgacaaaaataaatattataaggtgcttttacaatgtattcttctaaataaaagagtcacgcaatagaaagtttgaattttatttttggcattgttaaattttttaatttttttaaaattttgcagaatgttttaaataaatataatgtacacgaccataaaaaaaaaagaagactaaacaagtctcccgaatgccgaaacaggtaggagtaaatcagtgcaccacttttaaagaagtgctttattttcggcgtattaaatttttctaaatttttttaaattttacaggatgtcttaaataattataatatacactactatataaaaaaaatagactaaaaaagtttgtcgggtgccgaaataaataggagtagattcgtacatcacttttaaaaatgtgtattaaaaaatttcccaaaaaataattcttaattttacaaatataataatattaatatatatataaatataaattaaattattaaaaaaaactaaaaaaaaaaaaaaaaaaaacaaatgccgtggctaccaatttgcagtgtatgttgctgcctccttggatcaatcctcaac

SEQ ID NO: 292317 - DNA, 839 bp, Cannabis indica
ttccatttattatcttctgattttttccacttcttcttagtcttcttaatttatggatcagaaaactagctcagaaccttaataagaatccgaatggcactgagcatagttggaaaatcacttctgggttttacattataaatatttagaatgatcatataaaatgaactgcaatatgtttcaggaaactttaaaaatgttcagataatactaacggggcttcataagaatatcaccaaaatacagacttaccaagactggccattcattgtcactagttgcaaattaaatctgcaaacatcatcctcaaaattttacaattaattttaatggattatggaagaatttaggacagcctatccattataacaaattcctgaaacaatgtttttgtctgattggagagtataaaaattaccttgttgagtttgcctgtttacttttcaaaccaggtattgaaaattgaaatatagtcaccagtcagaagttgttgcagtaggcttcaaataagtttaatatacttattgctgcctttctaaaattctatgcaaagaaagcaatcagatactgaaataagtatttatgggcaaagattctcagtgcagtattgttggtattattaaaattcagaaacaaaccatccaaaagtacagctattgttaaataaatatagtatatccacacaagacaatattatgcatccattgtattttgtatttttttaattaattctatggggcaatgtgtgatatataaaaatacaaaagagaaaagtaaactaatataaaaattatatatggttgatacatttgccgatgaaaatgacataatgattgcca

SEQ ID NO: 292318 - DNA, 792 bp, Cannabis indica
gactccggttcctggagatgaggcgagacaggagctccggatagctaaacacaactacgccatggatgaatactcccgggggtatgctgaggtggaggccctgaagaggatcttacgagttgagatgcaaaatactctcaacaacccggaataccagaatccgtgggatttaaatttggatcccttgtcggattggttcggtcgtttcctcgggcccaccttagctccctttgccgcggagatgaccggcgagtttgcgtcccagcttacccggtgtgcacccaggcggttcgctgcttgtgcatccttgaactccatcttccaagtccaggatctcagccactccctcactgtggtaagtattttgtagtttacttttctccttattattttttcttggagattcttacttatacttgtatcctttcccagcttgctgctgaggccggcgcctttccaagacataattaatcatggcttcgtcctgtccgattttggggacatggacgaagttaggaagatccttcaggaccttactgctgaaaggcggctttatcaggaggatgctgagcgccgggaggcccttgccaaggccagtgaggaagaggccaagcggagggaagcgcaggcagaggcaatgatccgggaggaggcccttcggagagataggctggaggccaggcaccaagaggagctgaggacggagggcgaagccactgctaaggccaggcgagagcttcgggaggccagggaagccttggatgaaatggctgccaaggtgaggtccttaga

SEQ ID NO: 292319 - DNA, 510 bp, Cannabis indica
gattgaaatgacaacacttcttggttctttaatgaacatgaagtataagggtcaaggaaatgtaagggagtacattatggaaatgcatcatattgtctcaagattaaggacacttaagattgagctttcagatgatgtacttgtactcatggttttgttaacgcttcctccacagtttaaccaatttaaaattagttacaactgtcaaaaggagaaatggactctcaacgagcttatttctcattgtgtgcaagaggaagaaaggttgaaaaaggacaaaaccgaaagtgctcatttggccactacccctaaggataagggcaagaaaaggaaatttgagaatgaagctgctaagggtccagttcaaaagaaacaacaacaggattctaagggttgtttcttttgtaaccaacctggacatgtgaagaaagattgtgccaaatatcacgcatggcgtgtaaagaaaggtattaatcttgctttggtctgttctgaggttaatttagtttc

SEQ ID NO: 292320 - DNA, 570 bp, Cannabis indica
tgtgttaggaatattttaccagggtctagatttactaacaagtatgttgaattaacatcctaaatatgaattctataaaacaatgaaataaacacataagggtttaagaaaaccttacattgattgtagtggaataatataactccttccgttcaagatctctgtagtagagcattatcaagatctgaacatggatctctttctctctttcgggcttggttaccaccatcttactcactatgattgagtacttgacttcctatgtgtgggcatgtcactcactcactgtagggcgaaataggaagaacagtgaaggaggtgaaatctctatagaagaaactctctcatctaggtggttgaatagtcaggttgacaatagtttgacaaaaggtcaagtggatgagatgagagcatcatgttccttttcaagtgtttcgactagggcttaaggttgaattatatggattaaaaaagaataaaatattgggcaaaaaatcacactaggcgtacacaatagtggaccaatctctagttagatttttgccactttatttcaaccacttattcttc

SEQ ID NO: 292321 - DNA, 662 bp, Cannabis indica
atcacctgacatcgatcttatttcagacataacagctttcccgttttttcgaacacgggaggggatggccgaacaggtgaaatcgactcccttatgcgaattgcatgttcataggcctggcgggccgaaagtttcttcttccttttcagtggagtcacctgctcttcctcagcctcatctttaggattcaagggctcctgagtatacatcttggcccttgcacctcccttcaacttagcttcgcgcttaagtttaatgagttcattctcttgatgagctcgttcggtccggccatcaccagatttcctattcttccccgtcacagacttaggagtaaagtccttgggatagagcccgtacctcacaaatttatcctcggagatcaactggataatattctggtcttcccccagaagccgggcaagttttttgagctctatccctaagagcaagagtgaggggaaggcggtgataggtcggaatctactggaaccgagtgcgggtgatgcccgtaccatccaccatgaagtactcatcagtaaaatgtccaatcttgctaatggtcgtatcatccgtgcctgtcaaccacttgaagcctggttgagagaagtagaagtaccccgacctgccttgcttgggggtggacttcaaattaaggaacc

SEQ ID NO: 292322 - DNA, 561 bp, Cannabis indica
attttagatcaacttaaatcaagtaattttcattaatgatttattaaaataaatagactaaaatatattttaattagaaaattagtaattagtttatgaattatctagatagatattttctaggtagactttttggtatttttctagatatatttaattaaattagaaaattaatatttaagttgattttgttcaagacacttaaatatttgatatttttcttaagatatttaattaaataggaaaattatatttatgttgaaaattaatttatttaatattagaccaacataaattagaataatttttccagttttattttattttattttaatgaagaatttcgaaatgtattatttttaatacattagatttcgaattctgtcatatatatttatagaaaattaaatttgagtggaaaattaattttaataaaattttggaccaactgaaattaagtaattttcataatatttattggaaaattaatactaaggatggaaaataatttacttttatttttcagatcttcctaaagtataattttataaatattaaatt

SEQ ID NO: 292323 - DNA, 679 bp, Cannabis indica
ctataaatagtgatacatgttcactgggcaaagggtcgcaaacagtttagtcgagaccttaccctaaatatattatctaagaattcttattcagagatactgttgtaagagctataagaaaaggaatctttctccttgttcttgagtcaatacaaataacgaggactaggctattaccgaactgctcggggctgaacctctataaaattcttgtgtctttatatttgttttactatatatcgattgctataaatcacttatcgcttactaaataagactcattgtcgttggctaaaagcgaggtcaacagagttcatttgcaaaggcatgtaatagatgaggattggggtgtgggttgttcattttgacactacatatatcaataaatagaaataaattacttagttcaattaaattcatacacaaaattcagaaaataacaagtacagaaaatatgtttgcaaaaataccaaaaattaaacatattaattattttccaaggtttccaatattatgaaatacagtgtttcggtaggcgtgattcaaaaataacattagttgaatagagtagtcagctcatctaaaatggacaccattctagcaactttttattcaatcaaaataagaatctaaagttgtctcggtaggcgagagtcatggttattcttattttatgaac

SEQ ID NO: 292324 - DNA, 875 bp, Cannabis indica
gtgattcttaaggcaaacacactcattatgatttttttattttatatggtttggtactttaagtattcttctaaaagaaccttaaatttttatgttgtcgtttctcctctttcaaaaagaaaataaagttgcttcaaaaagaaaaagaaaataatgttagaagcttaaatagtttcaaattgtagatatattgtgtttgtaatattttttaattaattttttattttttaattagaaaagtacaaatatttttgaaaaatatgttttataaaactgtttttagttttcaacttttaattaaaaatcaaaattttttttttaaaaaaaaaactactttcaaaatttttttaaataattttttttcttaattaatattttagactctgatctttctctaaaccttagaatccgaactccgaccctaaccccagccctgaactcgaaccatggccctgctccagatccgcgacttgtacccgacttaaataaaattagaaaataaaaataaaagttataaaacacatttttgttttctattatcaaaattaaaaaaaaatagttataaattttatgctttctattctctaaaaaaaaattatgctttctatttatagacatgagcagtagcaatgtagcattgccattcttctaaaaaaaacaattatagaattttaaacataggcatgaatatttcaaaatttcaataaataaccaacctcattgggctacatttttatatttatattatctatatctttatatattaaaagtgtctatctagcggcatttcttggtttaacattcttggtttaacagaatatacttaaaaataaaagaatattctgttaaatttaacgattaggtttgatctcccg

SEQ ID NO: 292325 - DNA, 530 bp, Cannabis indica
gagcttcattctcccctgaatttgccaattcaatatgcatccttagaaactcatctaaattctgatctagggttttagtatgactcatcttgaacccaaagattctctcctttaggtagatcttattagttagagacttttgttgaaactgttcttcaagtttcttccagatcttggcaggagtctcttccttgtcaaccaatctgatgatggcatcagaaaggttaaagattatgatcccagtagctgtttctaacagttcttcttgctgtatttttgtagtgttgtctggccattcaatagggtcttcaagaaccctaagtaacttctgttgagccaatagagatctgatctttctcctccagatcctgtaatcaccagatccatcaaaacgatcaatgtcaactttgatattgctcatgttagaaaaatcaaaattaaattgagttgagtttatagaaattgattgattatcaatttgtggaatttccacagcttttccactgtccacaacttcttgttgtgtttct

SEQ ID NO: 292326 - DNA, 592 bp, Cannabis indica
ctagaaaagataaaggccaaggaaagaattccttaggatcgacagtgagaggtctcagatatgctttgctatgcattagaccagacacgtgctgttgagtgggagaaatgagttggtatcagattaatcaaggaaaggaacattggaagataatcaagtaaatcttaagatcaaagaagaggaactatatgtaagtcgataagggtgctattttaatactcttagactacaccaaatcaggtttctagacttgcattagtgctagaaagtctactaatgagatggtgattactttgggggtggagcagtgattttggagaagtgtagaaacctatctgagtctcttactctaccagtgagactgaatgttaaagttgcaggaatgatacttattaaatctatggaaagttctgcacagtttttggcattgtaccaacaatttattaactactagtgttacttcttgactaacacagaagtagtttctaaaaagtaaagaatccattatccctagaggagtagacaaatagagaggaatttcacaatatcaaggattttgtgattaaggaatataatggtggagaaagtttgt

SEQ ID NO: 292327 - DNA, 554 bp, Cannabis indica
tattccactgtgctgacaatactctaaatctgattatattgaaatgggttttatttagggcataaaacccaacaagtcgatggttggggtttcgggtgatggagaactcaaatatgtggaggggcttggggttctggttcgcactggagaagcttggggttcgcgattggagggggcggcttggggttctgttcgcacaaagcagagagggagagagagttaggttagaatttttagggtttggttagaaagagatgaatttatactcatctaaattttttttaattaattttttaatataattatttatttattattattttatgaatttataattatatattttatttattttattaaaagaaaaaggtatatgttgacacgccacacgtgtgagcaaacgtatttacccacacgttatgcgcgttgctaaagccacgtgaatcacgtggctttagcgacgcgtgcaaagtgtgggtaaatacgtttgcgcacacgtgtcgcatgtcactataggccataattttcttatttttataaaattataaattttg

SEQ ID NO: 292328 - DNA, 502 bp, Cannabis indica
gagtaggaacagtgggggttccaccaacactcagagtcatctggggctcctgaaaaaacttcactgcaccctcggctctcaaagccttttcaaccatttctgcataggtggttgcctcggtagtagtaatcaccaaatcgtgcctaatcttcgcactcaaaccagccaaatatttctctttcttactgaaatcagttggcacaattcccgctgcgagcttggccagacggtcaaactttgtcgtatactcagtaacagacattccctcggtttgaaccaattcggtgaattctttccgctttgcactgcggacagcttcattgtaatacttggagttaaacaactccttgaattcttcccaggtcatcactgtgacgtcccgagtgagggttatcaactcccaccacacgagagcgtcttcctgaaactggaaagtggcgcatgtcacccgatcattaccgaccactcccataaaattgaggatacgctcgatcactgtgag

SEQ ID NO: 292329 - DNA, 533 bp, Cannabis indica
agcttcatcaagtatctctttcttaatctcatcaacattaggaacacaaactcgagtcttgtacaacaacattccactgttcgagactgaaaagtctctaggccgaccagccattacctcgtctcgaaccttaactagctcaggatcttctagttgtgcctttctgactctctctaacagatcagattgaagtgtcaaactttgcaaattcccaacaacaaactcaatccctgcactaaccatctgagaggctagttgaggggctatcaacaccgtggtacaaacttgtctgggaccatttctacttaaagcatcagccacaacattagctttctcggggtgatacagaatctgacagtcgtaatctttaaccaattccagccacctcctctgcctcatgttcaaatctttctgggggaaaaagtatttgagactcttatgatcagtataaattgcacattttttaccgtagagataatgtcgccatatctttagagcaaaaaccacagtagcaagctctaggtcatgagttg

SEQ ID NO: 292330 - DNA, 500 bp, Cannabis indica
cttacaagcagtttgtctcaactagtatggggaccatgggcctatataacagagcttctaataagcacatctagaatttactaagtagattttttaacttattaattcctccttgcaccactataaatttagaattgcactctcaattatatagaacgctctatatgttctatgatatagatacgctatgagattatccatttgttattatcctaataatcaacgatcctctatagatgatctacactgagtagggactaatttaccgttacacccttcaatgtattttatccttaaaacacttagctatctataaatgatatttcccttaattaatatgatcactgaagtgagtactcaaccatttacctctgttaagccaagctcgaaggaaatcatcgtttgacttctatattccgatggaaggtatagatttcgtatctatgattagcgctctcactcaattgaactaccatgtccttaacctatatgtcacgaga

SEQ ID NO: 292331 - DNA, 552 bp, Cannabis indica
caactcacctgttgttatgtattttatgatggggaccatccagctgggttcttgcccaaccgttagtgtggtctcttttattttgatgcttggctctgccaagcgttccactggtactacccccagctcttcgatttcgctatccgaggctaacttagccagacagtccgcgtgagcgttcttttctcgggggattctttctattttgtagtccgcgaactcgtggagcagctctcggactattgttacgtacgcggccatccgctcgccgcgggtttggtattctccggatacctggtttacgaccagttgggagtcactgtagacttccactcttttggctcctacagcttttgccaatttcagccctgctatcagggcttcatattcggcctcattgtttgaagctgcgaagtcaaatcggagggccgcctggagtcgcagtccagttggtgatatcatagccactccggctccagaaccgttctcattagaagctccgtccacaaataccctccacgtggggattggcggtaccggcgtattcgcggt

SEQ ID NO: 292332 - DNA, 323 bp, Cannabis indica
cactcaaggttcgaaaattttaggaagaaaagagaagggaagtggcggcttagaattttctctgaaggaatgagatgcatcatctttttcctgaagccatcactacctatttataggtaaccacctaggtttaggttagaattatttggcattaaaataatagaaaaataaatagtaaaattctacaagtgtggccggccataggatagttattgggcccactttgcaattttgccattttgtcatttttccatcccattttctcaaaaaccccaattttctaatttaaccacttaaataccaattccaattatttaataact

SEQ ID NO: 292333 - DNA, 693 bp, Cannabis indica
attttatttaagcaatcgatttcaagtaatattaaaaaattaaaagagaataaaaagaactagaataacaaattaaagttgataataatcaaataaaaaaattatcaaggttttgacttttgatttcaccctaatacaactgttgtctagataagaataaaaaaaatgtcatcttattcctataaatagtaataacaagactatacaaatgtcgaccaaatttctaacttggagaaatttaaaatttgaactataacttcatcataactttatctaatttacctattaatagatatttctattttctctacaaaatatatctatagcaataataagcatatgtactccatctaaaatattaatagctctaattgtaaatattgtatatgataaaaaaaaaattatttttaatctgcatgcatcacgattttggctttttagctcaatgagctcaattttttctcttttataaaatttaaatcattattaaaatatgttttaacaagaaccaccattaacattaaaacacggggattcttaaaaatgttcgaccgtagcaattctctttaataataaaataaaaaaaaataaaaaataaataaaattgcggcatatatacctaatatttcaaatttatacatttaaatatcttatctttatttttagaggcaaaaatacttaatgttacaattc

SEQ ID NO: 292334 - DNA, 714 bp, Cannabis indica
atctagaaaaataccaaaaaagtctacctagaaaatttagggttgttaaaaacaacctaaaatatcttttcaaaatttaaaattcaaactaatttaaaatatctaggtttatttgaattattttatcaaattaaattgaatatctaataaataaatgaatttgtaaaataaccaaatagatattttcatattcatttctaagcagataatttaataaaattaaaataataaaacaaactaattttaaaatagatatggttaggcaattattattttaagaataaaataataaacaaataataattatccaaattatatgtcaaaatatctcaaattaagcaattttcaaatttctacaaaaatatcttgattatttaaatatttaaaatactatttataaatttatgataagtaaaatgatataaaatataataaatatcatttttctaacttataatttataaataattaaatatttaacaaaaataaccaattttgaatttgaaaatattatggttagaatatctataaaattatctaggtttattttaaatttattaattatttaatttatcatataagataattttaatataatatttcaaattaaaagataaggttatcttttaggttatcttttaatttaaaatatggctaatattaaaatatttgatcttataattaaataatatataaatattaaagaaattaaca

SEQ ID NO: 292335 - DNA, 673 bp, Cannabis indica
ggcggctgctgaagcgtaagtttgtgaccactttgcatgcagtcagttttaatctgatgcagagagaatattattactatatatctaactagggaactaagccgcgcttcgcgcggtgttgcctaacttttataatttttatgtatacatattgtatttatattaagtgatataatttaaaatataatattttaacgtgtatattataaacaaaccaatatagtgttgaaactaaaaatatagtttgctattttaaaatatatagaaaagtgaaaattttgtgacaaatattatcgttataattactaaaaaaaataaaatttattttatgattacttttttttttttgtatttttgatttcataaatttatattctaataaatatttataaatatttttactaaataagtaaaatattataaattatgatcgtttgttattttttaattatttttaaatttaaataaaataattttttaattcttattctatcaccataagttttttattgcttcatttaattattataagatgttattattaatcactataaaaaaagttaagaataatttatatattttttgtcccatatatttttcgtaacaaaagttaagtgtaaaaatactttatttatagtttagaagtatactaatcatgtagttcttaatccat

SEQ ID NO: 292336 - DNA, 509 bp, Cannabis indica
gagattgggatctagatctagacccatggctttgacaaaacccgtagtcggtgtcaggatttgggacacagcccttgaccctaaccctaacaaggacccgaactcgtaccctgtgacctaaaattggaacaaaaaccggaagttgaccgggactggaacgaggacttggacttggaatcataacagaaattggacttagatctagaaccataaccgaaccaggacccgaactccaaatcagacctagactggaattgggagccggacccaaatctcaacccaaacctggtctcgggacccgaacttgatcttgaactcagacccaaacatggaaccagacaggggacgcagaatcagggtcggtcctagaaccgcaccccaatctcgatcccgaacccaaactcaaaaattagacttgggacctgaacttgaaccagactgagacccgtgacagtgatccagatcttgactcaggattcgggtaacggggcctggaacagaccagtagt

SEQ ID NO: 292337 - DNA, 391 bp, Cannabis indica
aaaacggatataccgatacatttctatctatttagtatttgaaatgagttttttagtcaaatttttttctcatggtcatgtaaactataattatttaagacatcctgcaaaattttaagaaattcgaaaaaaaatttaacacgccaaaaaattatgttccaatagtgtgttgtacgcgtgactattttattttatatgcatgtaaaatagactgtttgaatattgttttgctatattataaattattctcaatttttcaaaattttataagatatcttaaataactatgatgtacatgaattttttaaaaaatagactaattttttttctgaataccaaaacaaatagagtgtgcatcagtacatccttttaagtggtgcataaaatcacc

SEQ ID NO: 292338 - DNA, 646 bp, Cannabis indica
gtcctggtctgagtttgggttcgagtctggatttcagtctaggtccagatcaggctccaggtgtgggttcgcaccctgggtcttggtctaggatgggtttgagtcccaagttccaatcccgatctgtgtctggattcagttctaggtctaagtcgttggttctgatcttggtctaggttcgagtttgggtccgggtccgggtctagctttgggtctgattctaggtgtgggtttgagttcgggtccgagtctgtgtccgggtttgtgtctaggtttggaccccgatctgggtctaggttcgggtccaggtccaagtgggggtcccgagtgcgggtccaagtttgggtcttggtcaggatctcggtgcagatctaggtccaacatttcgatcccagtctgggtcttggtccgagtccaggttcgtatccggatctatatctaggtccaagtctgtgtttgggatcgtgtcccaaatttaggtccaggtctggatctcagttccggtctgggaacacgaccgtgtccgggctcgagttccagtctcagtttgggtctgaggctaggtctttgttcggttctaggtctgggtccaggtcttggtcacggccctagtcttgttctagggtcctggttcggcgattcttgt

SEQ ID NO: 292339 - DNA, 476 bp, Cannabis indica
cgcacaatatcacatagttaacaaaatcgcataacggtgcacaacatatcgcacacaaatcgccaaacatcactatcgcacataaaatcgtacaataatcgtacaaagtcgccaaaattaatcatgtcatccctaacctcagatttctcatgacatcgcacaaaacatcgcatgatgtcgcataaaatcgcaaaaaacaaaaaaacccagaaaaacacagactgttagccacaaactctacctccatttcaaggacacaaaagtcacaaattacaactaacaacgttcagatccatgcaattcaacaaaaaactacactatttactaagaaaaacacttacccattgctttgttgagtgaggtggaggttgagggtgaaaatggtggaggtggcagtcggccgggacaggatagagtggcactcggcggagtcggcggcagagagagagagagagtgtgtaacgccctaaataatt

SEQ ID NO: 292340 - DNA, 280 bp, Cannabis indica
tctatacatttttggctttgttccaacatttataaactactagtgttacttcctgactaacgcaaaagtagttgccaaaagtaaagaatccagtatccctagaggagtagacatacagagaggaatttcacaatatcaagtattttgtgattaaggaaatgtaatggtggaggaatttgtcagatcctattacagaggatatactacataatacacttgatttgaatatcaaggtgttgagattatttgaaatgcaccttttattttatattagtgcaag

SEQ ID NO: 292341 - DNA, 801 bp, Cannabis indica
ccttttccagcttgctgccaggccgcgccttccaagaccttattaaccgatggcttaagcgttgtccgactttgggggcatggacgaagtcatgaagatccttcaggatttgactgctgaaaggcggctttaccaggaggatgccgagcgccgggaggcccttgccaaggccagtgaggaagaggccaggcggagggaggcacaagcggaggcgatgatccgggaggaggcccttcggagggataggctggaggccaggcaccaggaggagctgagggcggagggcgaagctgctgctaaggccaggcgtgagcttcgggaggctagggaagccttggatgaaatggctgccaaggtgaagtccttagaggaagttcaccaggcagacttggagtctagggccaacctggccgtggagctgaaggagctcaaggacttcaaagaccaagccttgaagaaggcaaagaaagatgagctcctttctcccacttcctgcagccggtgcgtcaagcgtttcgacgatggcgtctacatggcctggtctacaaatgaccagaatatcaagcttaacttctatcccaaacccgcggagatgattgcaaaattccgggagaagaagaagaagcttgatgccatgctggaggcgcgcattggtcctcgccttcctcctcgtattgactaggccgctctgagttccacccattacaaccaagatttcactctctttttttttttaatttacagctaattatcttgtacttaagcaatttctatttacatagctgtttttattaaagggga

SEQ ID NO: 292342 - DNA, 656 bp, Cannabis indica
gtgctatatgtataatgattgcatttaatgtacacaataaagaatataaggtagaaaatatctcagttcacagaggaccactgataacaatgcttcagtcacgtaattggcaatcggtggagtcaggatttgactcaagttcttgtattacatcatgatgctattggcatcatgttatgggtatcatctaaaagaagagaggtgaaaatctgaagaaagaagctggatcttctccttagagtccaggagggcagaagaataaagacagtcctgggcctaatggtgcctgtcaatgtatatttattgtgtctactcaggcccaacactgcaagatgctaatagggatgaagtcatcttctgatctctcattgcactttgtctctgcttcaccagcatcgagaatactgtgttacagtgattgatgagaaaaacctacctttgtgtggcactctacacttcacaacagactgtcaggagttatgccatttgatctaatttaagagcatgctttatctgttctactagacagttctctcttttgaaccatgtctgattcaactttgtacctcactatgttgcctttagtgtcccaagtctaactaagcaaagacatgacaaataacagcaactcctaactctagaataggtgtcttttc

SEQ ID NO: 292343 - DNA, 501 bp, Cannabis indica
tatatatatatatatttattcttctcttgctatatatgtattatataatctttttcttctagcttttctttataataattaatatataatgtgtattgtaatatacatttaattaatctcttattttataatagagtggtaataaaatcctaacagtactttatccatattgtcatagatttgtatggtaaaataatttataaactacaaacttgaaataaaaagatcttaccaatgtttttccactggacacaaacaaattctgcaaaatattaataagaaataacaaatttataaaaagtcgatctaaatgtaaaatatttagaaagaaagatataaataagaaatttaatttgtaagtagttagctaaaacactcaccaacagtaacatgagccgatggcatcattagacgtctgtcgaatatatggcgccagagccctgaagcatccagtataacaatatatcttactaactatttgtaattttattattataaata

SEQ ID NO: 292344 - DNA, 716 bp, Cannabis indica
ggaatgatgactaagtggtatttgtgtaataaaaacaactttgtaagtaaaaatgtagtcataggcgtgtgtgagtaattttgtaataaattgtgtaaaatggatttttcatgtaaaaatttcaataatttttagttaaattttttctcattggtcatgtatgttatatttatttaagacattctgtaaaattttaaaaaatttgaaaaagtttctcaaaattttgtataaaaaaaaattagactaaaaatttttctagatgccgaaataagtaaaggatgtatcaatacatcccttttaagagggtgtattgtaaaatcacccaaaattatatatataagaaaatagagaaacaacctttttttaaaaaaaaatagataaatcactgtaattaaattttttaagtttgtaaagtaaaataaatttttaatttttagtagtataagtatttaatatttataaaactagttttttttttaattttgtccattatagattttattattatcttaaataggatacataggttcaaattctaaattatttggtctatataaaaatcgatagtatcaagaaatttttacatgaaaaatcctttttagacactttattacaaatttaccctcacacgcctattactacatttctacttacaaagttattttatttactacatttaccacttactcatcataccatgcatacacgtgtgctct

SEQ ID NO: 292345 - DNA, 619 bp, Cannabis indica
aaaacttttggaatagcagtaaagtctccaatatagtgtaatttgcatcacaaagttgaccgatgcttatcagatttgccttgagtcctttcacatacagtacttcagtaagaggtgcagctctactcatcaccaagtctccttttccaataatatggcccttatttccatcaccaaaagtgacaactccctcctttgcttctttgtaattgactaacaatttcttgttgcccgtcatgtgtcgagagcaaccactatccaagtaccactgtccttccagaaatgcagacagtgaaacttgagctaccaacccaacattcgattcacgatcagccctcaatctccactcacattgagatccttccttttgagttttattgggtttttgaaaactcataggtcgattgatcatagctttcaagtagttctgcagcttatagcatctgggtcgaatatgacccctcctgttacagaagtgacacactgggatgaatctctccatctgagatatattctccggggcaattcttcttccttctaacttcaccttggtaggtccagatggaacatggaattttccagtggggtctgaggactcaggtgtcgagggaaatgatga

SEQ ID NO: 292346 - DNA, 1319 bp, Cannabis indica
atttattttaataatttaataagtatttttttttaatttataaaattttaaaaatatatattacaaaaataaaaactaaaaatataattaagtatacttatcatgcacgcacataacgcaataatctgatataaataaataaacctatactttcatttcatacctattttttaattgtttcacttttgttttgtatgcctctttattatacgtttttttaagattcacatttaagcctaaagtaaactgttatataattctaagggtcaattgttttcaagattaggtttaagtttatgttcttttgtttttttgtattgacataaaagtgtgatttgaatttgacaccttatagactagagcactcacaaggtaaaacatctctattttacatctttcattttttttttttatctattttatcaatttaattttacatatatatatatatatatcatatattaacttctttattctaatttttttacaatcttttaaatatgaaatttataatagataaattaataaaatattatatatttataaacatatttaaagtcaacaaaaatatataaataaatattgaaaacatttaactactacactattcattgagttaaatataaaaatagaatagtaaatatttagctttttagtttggcttatttaatgtatacatatttttaaattttttaagttatattatacccattctatttgttatagtgagatttctctcacctagaaactcgagaccagactcctctttaaaggacacgtgtattcagatttccaatgaaggctgaatgtccgtgagagacttctcgaagtttagacctcgctcaggataaaaacagcgagatactgtaagtgtgacttaagtcgcaccgcataaccataattctcatcatgcagggtagatccaactcgcatatgtcagaacatgtgcgagtgtcccctctatatctccgcgacaagtatagagaccaatcccctatgatgcagttttggtcccaacgacccaatagccctgacagaccaatataagttcgcatgtccagactttactagctccaacatgcgacgtctacaaagggcgattacctaaggacgcagacgttccaaacgtactggcgatcctgcgagctcaacaacggaacatgaacggtcaactcgcagatgcggaagacgcatacgttgatgaatttagtaactgtcatcatttataatgtaacgtgtttgagtttagttatgcaattcatgtgtaaataatggattaacaatgaatgtgatcctcatgtaaccgattggacacctac

SEQ ID NO: 292347 - DNA, 645 bp, Cannabis indica
agctggagctgttcggctggaatagggcgaagccaacaagaagctatttgctgccgagaagaagatctatgtgctgacaaaggatctcgaagctgttgatcgctttgaggagaccatcgagatcttatctactgaagttaacagtcttcaggatgagaggacttctctgcggcaggttcttcttcggataaaggaggagaaggacgtcgaggtggccgaggcagataggttgaaggagaatgtcactgccttagagacagctggtctcgagctcttctttgacttttggaaggctaatccccgggccaactttgactatttgggcgaggctaaggacatgtaccttgagtactgcgcggcccaagttgcttatggtgggaacgaggcggttgcttcaacctccggccaagctgcttcaacctctggccaggctgctgatgcttctcttgttctaacaacagatcctcctgctccagttggctcagaagaaccgaaccaagagcctgggactccagctgtttaaacacttctctttttatctcctttatatatatatatatcatattcggcctcaaggccttttttaatacatcatgaccgaccaagcggtctttaaaactggaattatttttcattttttggaca

SEQ ID NO: 292348 - DNA, 514 bp, Cannabis indica
cctaatatcctacacatactctctttctcgtaggccggaacataaaaaccgctaaaccgtgggaaccgcctaacccattagaatccgcccgcatggaaaccgcccattaaaaaaccgcaaaaattgggttgggttgagttttaacccgttgattggcgggcgggtatgggttcgcctaaaaggagcgggtccaacccgtacccgttatttattattatatatatatattttttaaaaaaatttattcctaaggctgcctaaaaacaaaaaaaaaaaaaaaaacctaaaactaattgtcgcactatgtgtgaaagtaaataactgccttatagttatttagatggtggctttaacttgtgactgtaaaccaaaccaaagcttcaattttggtgataatatagtataccacaggttgtattggtatgggggaagggagggagatatttttttgctgagtaaaatttacatatgttgtttaagcaaaaagtggagtctatacttgtggcaatatact

SEQ ID NO: 292349 - DNA, 636 bp, Cannabis indica
aacaagtaatcactcatataatacacttctatatactcagataacatttactaagaatgttaaccctaactcatgctttcactggattcttaatattctagggtaataaccctagatcgcattaaaattaactcaaggtaccaacttaccgagtctagcttaattatgccttaagcgcataattcataatcttaatatatacatttatccaacatggcatagtatttatacaacatatatcactagggtaataaccctaggctattaaaccgctcacattaggggtaataacccctaaacccgtaccgttacttaaacctttaaacctttactagtcgactaattactacttacttaccaaactaaattaaagtaacggcccgaccctacgtcggccgactaacttaccttaccgttacggtcgtacgttacgtacctacgttcgtttaccctttaccgtttggtttccgtaccgacgaaacgaaaaaggaaaaaggtaagttaccgtaaaccgaaaccccgggttccccggggtcgtcccttccgtaccgaaccggtagggtccgggtaaccggttaacctaaccgtaacgtaccaaccaaccaaactaaccgggtaccgggttttacttttacc

SEQ ID NO: 292350 - DNA, 833 bp, Cannabis indica
tttaatgagacggtttttatggacatctaagggggattattatgaaatattatttatagatgtccaaatcaccagattaattatcaccattaatgtttggttgtattttcctttattacattaatttagtttcccattcttttagtcatatttttgtataaataggagttcaccccattagaataaaaaactgagaaattcttattcaatttctctttctctcttcatctttttcttcttttttcttatatattttataatatttattactttttaaaagataattttttaaaatggttttataagataattgtatccaacaaaattatgatttgtcttttctacaatcctctcaaatatggagagattaaatttttgaagtttgaacttctttctctctcgccaaacaagagagatttaattttagagtttcttcatgtatatataaaaaaataattaaattacaataatatttatggccagtcttataaatattaatacaacccataaactaaatatcatcaaaatatcactttttctactaatttagtagcacggaactaaataaataacctcacgcacacaatcttcaatcgaccaatctagcaatctaacacaactaaaacgaaacccaaccagaagagaactacaattaattccagtgacttcacctaagaagatgaccgaaatcaatcaaaataggattgtttaaattcataaaaaaaagtagtagaaaaaataccacaaaactgaaattaaactagaaatccggtttaattcgcataaattaatgtcctgacttcaatttttagattcatgaaatgcagatctca

SEQ ID NO: 292351 - DNA, 511 bp, Cannabis indica
aactagagcaagaacaactaacatgcaattcaacctaattaaacctacttaactcaacattttaatcatggaaacaacaacaacaattaacagcagcaacatcatcaaaatccatgcataactcattatttttcatcatttttttcaagaaaacaaaggaagaaaaattagagagaacataccacaacaagagttcacaaatttaggttgaaacaagcttgaaatcacaagaaaatggacagcttcttgctgctccaagagggccgaaatagagagagagttgagagaaaaaaaaatggtttttcctttgaatattttctaactttgaaataatgaagttttgtaaaataaaaataaagggtttcacttaaacatttcagccaacatataataccaaataaacatatatttccactaataaaatcactagaagacaaaatactaatggggcaaaaagaccattttgcccctccacactaaaaccacataattaacactaaaggggtatttt

SEQ ID NO: 292352 - DNA, 587 bp, Cannabis indica
gcacatgccaccctatcattcccaatacacccataaaattcagtattctttcgataacagtcaaccactgctcagccttaagaacatcaggacctccagaaatactggaggtgcttgctttctgaatctctcatataaaggctccatgcggttaccagcaacatgttgctcagctggcaccgcaggggctgcaggaaccgcagcaggcggttgcgggggaggctcaacaggagcatcccgttgcctgagtcgtcggatctcttcttcttgttgctcaattctagtttgcatctcagcaaacctttgttcccaatcaaccggggcctgaggtggattctcctgtccacctctcgggactcgaccgcggcctctaccgcgtccacgggggttttggggatttctaccaccccgaccacctccggtctcaaccaattcaccctgccttctaacgtttcgctggtcgtccattatttaggacttagcctgcgaacccacaaggcacgtaggtcagacagtggtcaaaatattttcaagaccgcaattagggatttaaaacatctaattaatcatatatacaacatatctta

SEQ ID NO: 292353 - DNA, 584 bp, Cannabis indica
agctccttcagctccgcggctagagcggccctggactctaagtttgcttggtgagtttcctctaaggatctcaccttggcaaccatctcgtccaaggcttccctggcctcccggagctcccgcttggcctttgcggcagcctcactttccgccctcagctactcttgatgctgggcctccagcctgtccctccgctttcgtcctgggcaatcattttgcccttgcgcttacgaatcagagcaatttctggctcttcttcaccttcttcagcttcctcaggaagagcccaaagccctcctgcaccttctgcaacttcctcagaaaatccccattgcttttcttgaccttctcccgacagcacctcctcatcatccactaaatcaatagtgtcagggggagcgctggaagaaatcttttgagcaggggctattggggaagaagtaaaggccggaggtgcctcaggaatgtgaaccccagcaagctgatccaagatggcgtccatggagatacctgctacaataaaaataagcaagtgttagaacgtccgtgggaaacgactaacacaagatatggcaaataagcta

SEQ ID NO: 292354 - DNA, 516 bp, Cannabis indica
taatataatagtataaatttaaataacccctatacgctaaaaaggatcatatatctattttgaaaaaccataactattaaaattctttaaagttaatccaggtaaaaaccatttataattatttagttaaaatatttaagttgtattcacatttgttattattacatcgttttataccttcataagtaaatttgaaaacataaactgaaaactaaaaaatagacccaaatgatatttactatattattttaaaattgtatgtattatccctgtccttgctataagagacataatacttagtaaagttggactgatttaccttgtagtggtttagataaggctgccttcatttgtttgtctgaggagaaaatgactgctccaaaaccaatcacattttgaggggttgatatcgctgcgtccacatatagtttatagctattgacttctgtctctgtattactttgctcactagtacacccagttgaaaccccttttttagttttatttctttctcga

SEQ ID NO: 292355 - DNA, 656 bp, Cannabis indica
ccttctaagaaaaaagtttatggatatcaagtattattttttctgggtttgttttgaaagtttgaactgtagtaaactacaatttgtataggagaacgttttgtttaatacaataattaagaaactgtttcgggtgtgttatattttgtttattaaatttaaaatttttataagttttaatttaagaatgtgagtaactaatttattatttataaataatttattttttataaatatatattactcttagtgttcaaaatatatattgtttgaataaattaaattagaattttaattttaatttcaatataaaattgtattaattgttaaaatatatatatatatatatttttgagttataaaaaatatattttttaaaatatgcttccttgaataaaaatatattaattaataattagaaattaaaaaataaatagaaaattataaaaaaaaaaaaaaaagaagaggaaaggaagttatgatttattttttactataaaaaactagataaatattaaatatattctatgaataagcaggttgtatataattttatattattaattaattaatttattatatatatatagatattacttattaatacccgttaatgggtaataaacaaatttaactataagaatgaaatatatatt

SEQ ID NO: 292356 - DNA, 541 bp, Cannabis indica
agaaatttggacttaaaacaattagtttgtgatttggatggtatcatgttgtgttgtattgatgtttgtgaaattctgggaaaaataattgattttctgtttctggaattatttttattggatagtttggaaaaatttaagcaagttaatttttatagcactcgatttcgattttatttgaattagttatgaatttttgaaaatcgagaaaaatcagggtggtgatcacccttcccacgcgcgtggaatggctgcttgcagcctcccagcgccgaggaaactcggcagatcacccctcatgcgtgcgcgggtggtatgctgtgcataccatccgtacaacatgcaattttcttcgttttcttcaatttttcatgctatttcatggaattaactttcgattttttgtgtagttttgtatcttgattttcatttttatttttcatttttcaaatctaattatcagaaataaattaattttagatattagtgtaatttgaatttgaaaataggtaaaaaatcatttttccttacctcttttctt

SEQ ID NO: 292357 - DNA, 778 bp, Cannabis indica
gtcaaagttgtttgtattttttatatcttcaactcatctatatatattatatggaaatatgaggaggtataaccaaaggtctacttaaaataaattttgtaattataacatgaatttattgaatagttttttttcttttgaagaatgccaaaagctttatttatcataaaatcaatgtaaatattaatgtaaatatgaattaacagataattaattaaaataattagaaaatgaataaaaatttgagaaaaaaatgagagaatagaaaaattagctctttgaaaagttaaaggattacattatctatcctaacattagaattgtataattatatatataaatatatagatagatatataaatatagctatatgtatatacttttttgcaatataaatatgtatgcatatattttgaattgttaaagattaatcaattatataggtttacaaaattactatacatatatcatattttttgggtgtaataaaatatctatatatatatagatgagaatactaatagtttaaaagaatactaatagattataaaaaattaagaatggggaggttacattatttttttcttattattcaatagaaaaaaattagaaaacataacaaaatagagaaaatagagaaatggaaggaaaagatgccacatcaatgctcttatgctttcctttatttatatatatagatattataccaaaactatctccaacgcaattgcattatcatttttgggtttatctaccgtgtcccaccatatttaggtgg

SEQ ID NO: 292358 - DNA, 547 bp, Cannabis indica
atttagatcaagcaataataggttttataaaacttacacaaacaagctaaaacacatacacctgcaacaagttggatagttggatataggatttatttaattttaaattaattaatttatttaataattttcaaaaataaataaataataaaaaaatatttttttgggataataaataaaataaaataaaattaaaattaaacctataatttttgaaaaattatgtttcaactaacctaaatatctttttcagaaaaaatgctaactacctttcaaatttcatgttattttaaaaattaaatatccaataaaataaaatgataacttaatatcatttttttgattttacaatttaattaaaataaaataacaaaatttaaaagttagcgtaatcctatttctattcaaaatatcatgattaaactaatcttattttaaatttaaataagttcaatttattataaaaagaaatagaataatttaaaaaaatattaatatctgaccttaaatttaaaaataagataatataattaaattttaaaaataa

SEQ ID NO: 292359 - DNA, 353 bp, Cannabis indica
tttttcgatgtcaaaagagtaagggatacatcgatactttttttttggagtgcattgtagaagtattcaaaaattatatgtaataaatattattagaaaattctacggtgcaccgcctaaaaaggatacaccgatgaacccctatttgtttcagcatctaggaatttttcttttgtcaaactttttttcaaagtcgtgtacattggagttatttaaaacatcctgcaaaagtttaagaaattacaaaaaaaaaaaaaaaaaaattaaacacacaaaaaaaaacattcaaacagtctattgtacggatgacttaatttgtacgtgtatgaaatagattatttgaacactatttt

SEQ ID NO: 292360 - DNA, 731 bp, Cannabis indica
ttaaaaacaatcaaatcatatgtttggtttgtgcaatttttactggaattactatctaagtaactaaatatagtataaactagtctaacacaatatttatttattcacataattagcagcagaatttgactcaaaattttcaaaaaggtaagaaatttatcgaacttaacgcaagaatatactcagtacccccaactaaaatgagacagtgtcctcaatgtctaaatatgtatatgataagaacatgagatgagaactgaaaaaaaacagagaatatgcacagtgatagatgttgattttctaaaaaacaaatgacagaaaataaactaaaatactgaaaaataaagaaagcaattaaagataggaccagtagtgaaagaattcactaaccttggtaaatcgagttgtgaaagagcgtttcctccacttcaggtggtgttaattctaaaaatggtttcaacctttgaccattgactttgaatacattaccaaatttagaattttcaatttcaacagctccgtaaaacagtacgaacagaaaatggaccagtccatttagaacgtaacttaccgggatcaaaaggaatgtcccaattaggaggtcgaaataacttttgtggtctagggagtgattgtgattctctaggaattttcacagatcgatctgctaactttttcggaacattggtgtttctttttgcagtacacagatcttttaaaaaatttgagta

SEQ ID NO: 292361 - DNA, 505 bp, Cannabis indica
taatatattatttttaatatttaaacccaaatatcaaaattttaaaattaataatatttattttttaattagattattattaatttttgatattttgaagtttaaatttaaaaattagttattttatattttgaattatggttagattttaaaaatttgttaatttcttaaaatattcaaattatttaataataatattagatattttaatattagatatattttaaattaaaagatatcattatccttttaatttgaaatattatattaaaattatcttatttgataaattaaataattataaatttatttttatagatatcctaaccataaaatttttaaattcataaattgtttattttataaaattttttattatttaaaaattataagttagaaaaatgatatttatggctatataatgtcattttacttattagatatttataaataatatttaaaatattcaaatgtaatgactgctctagtaatgtggattagtaaa

SEQ ID NO: 292362 - DNA, 680 bp, Cannabis indica
ttcctcccgaagtaaggctttgattacgcgcaaaattgtcttcacaaagcggttgttgtagtgtagcatgggcggtcgtgtccacagagagatatcttatcaaaaagtgattagtagaactttaagcgcaaaagtaaataaatcgttggtggtttttgagaaaattttgaaaataaattggttgaaaaattcaataacaaaagtgataaggtttcaagaatcacctatatgtttgactcatttatttggattttgattcacacatataacacaattaaatcgttcacttcccaacaatttaatcggaagataaaacatgaagaacatatataataaaacatattcgagtaataataattctcacgttagcatcataatcttatgaaaaatctaagaatgacaatataccttattggcaataatgcaataaaagactaatcataaaattataatatcaatatatatttatcctaatcatattcacatagaaaaagcatgactatttctatataatactaaatagataaatatattgatattgagatagagaaaatagaagaaaagtatattactcaaatgtataaactttaagcatttggtgaatcaaaatacaagtaaatattacctcacatataagatataaagcccgcttagttaatttggaaattagcagttgttta

SEQ ID NO: 292363 - DNA, 717 bp, Cannabis indica
atgacattttttttcacatgtttcttggatcatttgaagatttctaaatcagtttctttataaccaaccttttatgtttcattaaaaaaaatataaagaggaaaaaaaataaccttgtaagcttaaaaaagaaactggaatatcttttttggttttacctaaaaaaaaacggatgtaccgtataattataaacacaccatttattgataaattgctttccaaaaaaaattaagattaaaatctgattttattttttttttgatagagaaaatttcgatattttaatacacaatccatgacaagattgtctagagccatagatgatgatgatatgcagggcaatttgtaataacaaaaccctctttcttgtctgaacggttggtattcattgaatcaatagtcaattttcttaatttttgttttttttttttggtattaagagatcatacttgtcatccaaaaatacaaaagtaaagcaccatgatcctaatctcaaagccaaaccaaacccagatagaaaaaaccatgatcgagctcaatcaaagtacctattattatataaatatacacaaacaaatatatgatcaaaatagaaagaaaccatgattatgattatgattgttttgtgggtaccttgagggtgcgtttgcagtggtggcatctaaagcatgccttatggtaaactttattatcagcagtaagctcatcaacgaaata

SEQ ID NO: 292364 - DNA, 472 bp, Cannabis indica
agttcaaaactcgatttctaactgaaaatcacctcaaattcaacaagtaaacatcaaaactattcccatgactacccgagaataatcctataaggtcagaacctttataaatattctaatttacaaaacccctatacgaaactaattatttttaaacttaaaacgaaattaaaccataccttaagctttcccttttcaaagatttgctatcttgctgctaccggagcttagatcactagatttcaggttgaaaatcgaagaaaatatatataagaagagaaggttttgtcgaaggagggagaatgaaggtttcgttgttcgttctttctactgttataacttaaaacttaacatatatacttttaaaacgagcttcagtttcgttttatatatataataataataataatataatattaataaaaattttattattaatagttatcttgttatttcttagtcactaagaaat

SEQ ID NO: 292365 - DNA, 711 bp, Cannabis indica
ttcatttttactctttaaatttttttatttataaaaatatctcttcagtaaaaataataaactattttttagttgttttataatatatatatatctataacggagaagtatgagacggtgacataacattctaaaatcactccaaaactattttctcttctctccttaattctttcaattttaatattttattaaagcataaatctataaattaatattttactattattttaataatttttctatataaaaagaataaatttaggaatttatattttactgttattttaataatttttctatataatattttaaaaaaaaagttagaaagtaaaaaataaattaaaaaaaaaatattaaaacttaaatcaaatataattaatcgtaaatttcgtttatatacatacatacataaaatatcaatcaatatatatataaatctatatttatatttttcttttagcattttctcataactaaaatatcacatttttttatatatatattttttttaattaagtatatttaaaaaataataatcaattttttaaaaacatattaatgtataacagaacaaactaatgaaattttctctaatgtcttaaaaaatattaaaaaaaatatttaaaaattcgaagatgaaatctaatattaagatatagatttggaaaataaaataagtgacgaccacaagtgaactacggcaatgac

SEQ ID NO: 292366 - DNA, 559 bp, Cannabis indica
gaattttgggaaaaaaaatcccataaaattcgaaaattgggtgaaggcatacccagtaggctgcaggcgcagccatgagaggctgcgaaaagccctcggcgggatgcatgattactgtgggtgtgctgcagggtcaggacacgcgcgcgtaacccaggttgtccgagtgcctattgcgattgatgcacccactcgacaaccatggattcgaatcttccaaaattcataactctttcaatttttatcagaattcagttccgtaaaaaacaaaaaaaatgcttaatttttcacaaggaatccaaaaaaaatattttcaaaaatagaaaaaatattttcatgcaaaaaattctgtacaacacatacattcatcaaataacacataaaccacatgaaaccatccaaatcaacacatatcatcgttttaattcatatttcatgaaagtaaatcattaccatggctctgaggccagttgttggaaatattttaccaggatctagatttactaccatgtatgtttcattaacatcctaatatgaattctaaaacaatgaaataaac

SEQ ID NO: 292367 - DNA, 855 bp, Cannabis indica
aataatgtcatcaaaattaaatcccaaataattagtaatattagttttatttttcagtttaatcacaatactcaagcagacaaactcaataataatatgttatactcgaaggagatgcactaaaaaaacgtgttgcgaatagttaacgcttcagccacttcagaaacaaaacaaccatccaaatgctaacttgtcgaaactataggatttgctttgcatttcattactctttttctcttcaaaattaattaagaccatcttcaaatattattttagtgtacatttttttattgtatattacttttggtacaacaaatttaatgatttaatatcaaatatcattccaaatatgatatcaaataaaaatattttgctttaaagatttcatattttatattattcatattgataataaataataactaatttatgatgtaattatataggcaatcactcaacaaatagtttaatattatttttaaaataaattaaaagaggggctaaaatgaaaaaaaaaaaattatccaccaatttagtgtacatttaaaatctaacatcatttatatatagtgtagaacttgggacatagtatacacaactttagagtgaaatgatttgaaaatttcgaatcgatttattataataatgtactattgaagatgctctaatacactaacatcttcatcccacatctcaaattttaataaaaattaaataaaaaaataatttatgtagaaagataatgttgccgaaggttttcgtacaaccaactataataataatatttaagtaaagactgtaagaagttaatacgcaagattttacgtgttggggcgattaatgtagccttagtcc

SEQ ID NO: 292368 - DNA, 593 bp, Cannabis indica
caatctatagaagcttctcaactcatagacatagattttacttatctaaggaaaagtctcaactattccataaaagataaagccatgaaggaattccttaggatcaacagtgaaaggtctcagatatgctttcccatgcattagaccagacatctgctgttgagtgggagcaatgagtaggtatcagattcatccaggaaagaacattgaatgaaaatcatgtaattcttaagatcaagaagaggaactatatgtaagtcgataagggtggtatttaatactcttagactacactaaatcaagtttctagacttgccttagtgctagaaagtctactgatgagatggtgattactctgggggtcgagtagtgattttggagaagtgtaaaaacctatctaaagtctctaagtctaccagagagactgaattttaaagttgcacgaaagatacttattcagtctatggaaagttttatacatttttggcattgtaccaacatttattaactactaatgttacttcctgactaacgcagaagtagttgccaaaaagtaaagaatccagtatcactagaggagtagacatatagag

SEQ ID NO: 292369 - DNA, 499 bp, Cannabis indica
acaataaggccttagaatggttcatcttgattatggttactgagtccaacccgattatgccttaaacgcataacctttaaatctcaatttaattatatacttagcatggcatagcatttactcaacttatatcactagggtaataatcctaggctattaaccgctcatattagggtaataaccctaatctcggttacaattactcacatatatcatattcaacataagcaccaccgtgcatactctgcgtgcaaactactatcttacctgttgtcctgcaataacagagattctaaacccctggggcgtcctgatcaggtgtcgataatcctagtcacacaatccgggagtttcacaattagggttaagtccctaactttcactttctacaaaataataaagttaggtcattcaaaatagcagataatcaaaaagaagctcggaacgagatttccaacaatataagaacgtccaaaccggagtcccgacgtcaaagtta

SEQ ID NO: 292370 - DNA, 591 bp, Cannabis indica
atatataacatatactcatcataatatatatcatctcctcataatatatatcatatatagtcttacatacataaatattctcatcataaatatatatcatgtatcacacactacaagaaaatccacttttaccagcgcatttttgcgccggcaaaagtacactaactgcgccggcaaagcttatctgggaagcttggtcggtaaaagactttttaccggcgcgtagagtaaatgcgccggtaaaacttccttttaccggcgagaaatcacgccggtgaaaaataagcgccggtgttaaaaaatacccttatccgctatgaacctgctttgataagcttttgccggcgcaatagtgcgccggcaaaactattggcgccaatctgacggttggcgccaatagttttggccactttttaccggtgcaggaatgcgccggcaaaagtattaatttttttaaaaaaataattaattaatgggatattggcggctaaaccccccaaacttttgggtttgtgacagttaaccaccaaaactcaaattttggcggctaaactacctgaactccacttccgttttgctctgcacacctcc

SEQ ID NO: 292371 - DNA, 508 bp, Cannabis indica
gcttgacttgtcgctattctccccaaacacaagttgaattcacccatttctgtagaagcagaagcagcagcaggttcaacagtaacaccaagggaagcaaggttgtaagtcgactttcaagctttggtcttcgactttctggcagatttcatcggagcagatgacgaactaggaactccggttgctggtgcaggcggcgcaggaggggagatcggagatgcagaggcagagccacgagagggcttcttggacggttgggcattcttagttttggccattttttctctgaaaccctagaacacaaacactcttacactttgaaaaatgttagacctttgagaaaaaaaatagaaagagaagagtgagtggtgatcgtgggtgagtgggtagttgagcatatataacatttcaattttaattacccaataagaaaaaaaatggaaaaaggaaagtaacttacttaccttaatcaccacgtgtggagagaaaaagaggaaaccaaaaaaaa

SEQ ID NO: 292372 - DNA, 1288 bp, Cannabis indica
aaaagaggttacagtggtggttgtggtggacatttgtggtggatggtggcggtgtcgcatccgtggtggtgatgaatggtgaagaaaaaaaaatgcattcagaaaaataaagattaaggaggaagagaaaaaaaaaattatgatttttttaattaatagtttttttaataactgaaaagaaaaaaaaatgaaaaaaaaatgttttttttaatttataattttttaatttcaaattaattatgttttaatttttctatatacttttttacataaaccaataaaattgtgacatgtgaacattgtgtccacgtagatatacacgcagacagtccaacatgacacttagcacctaaaatgtatggaaatattatattgctagcaaaacgtgagtattgagagttttaccgtcaaaaattaagttttggggttaagtgcaagcaaaataaaatattgaaggttttgccgcaattaacccttataaaaaagaatcttaaaaaaaattaaaaattataatatacctttaataataatgtaataaaacactaatcataagataacaatgtatttatactaataatttatttactggtgactattcaatggttacatttttattgtaaccatcatggttacatttttctttgacctgtaatagcaggttactaataggtaaacattccttttttagaattaattaattataattaactattttcttaaaataattaattaaatatttaacaagacctcttttagcaattaatatttataaataattttttatttatatttaaatccttactctaattattttaacaattaagccatttaattataatatttacaataaaatttatttttttacaaaaattaaacttctttttacacaaattaaaattctcttcttataataaatttttaaataattaattatttttaaatgatatttaattattttgttacaattagatgaactaagtatgaagcctcaagctagtcaatcgataacaagtgtagccattttttttctaaaaaattcttcaacttatttcactttttactttttaaatatttaaataaaaaaattaaataattaagtgtaataatttaaaattaagattacaagtataataaaatttaaattatgaaattatatgtgtataattttaaattataaaaagttttgctataaaattttaaataatttaagtgcaaaaaaataaattgctaaaagatccttatatagtaataaattgcaaaaaattaattaataattataattaattaa

SEQ ID NO: 292373 - DNA, 402 bp, Cannabis indica
accctaattatctactaattttctaagtaagttaaaactaagcggtctttacataacggtgagtttatgatatcttatctaaaatcaatatcgatccctccaatgtatactccatacatctgatacggtaaacttttgtaattccctggaaaggacatgtcacttgtccaaggtgtaagtataccttatcgcaaattatcaagtcagtctaaatccagtgaactgacaattcatgggaattaaacttttgaacatataatcatgattatattccactgtgctatatttatatatgttctagaatttatacattaaacataatcacaaaataaatcacgtgaaccatgcaacataaattgatttttgatcttttattaatgagaaatctgattatattgaaat

SEQ ID NO: 292374 - DNA, 539 bp, Cannabis indica
taaatcaaatagacaagtaattgataatatgaaccaaataacacacaaatgaatgaaaaatacttctgtttctttattgatattgaataatagagattacattgaaatggagttttctttagggcataaaacccaacaaactcccacttgcactaatataaaactaatcagtacatctcaattaatcctaaattttgacggtgattttcgaatgcagttcctgccaagactttggtgaatagatcggctaagttgtcctctgtgtccactttttccaccagtacatcctctcttgccacatattctctgatgatgttatattttctttatatatgcttgcttcacttgtggctttgaggctccttactgttggctatggcttcagtgttatcacaaagcaaaactagaggtttttccattccagggacgacactgaaacctgtgaagaactttctcagccagacaagttctttggcagcctctgcagtagctatgtattctgcctccatggtaaagtctaaaatcgcagtttgtttagc

SEQ ID NO: 292375 - DNA, 534 bp, Cannabis indica
gattagcaacataattaatttccaaatatatgaaattaatttttcatttgaatattttgaaattaatttaagaaaaacacacttaatttaatgaaactttttcaagataaactatatgtatttttcttgtatttaattaaataaagaagttataactaattagattcttttagatacttaattatttaatatttcataaaaatatatttaagttgaaaaccagttatttataactaatttcggaacaacttgaatttgagtattttttaaattaataattaagttgaatttttctagaaaatttgttattcagatattctttaaatattgatttaagttgaacacttattaattctggattaacttaaaatggaatatttttcaaattaaggtggttagttcaagatacttaatttgttatttaattaaattttgaaaataatttaagttgaaaattttgttattttagaacaacttaaattagatatttttttttaaatatttattttattatattttaatttttttttgtaa

SEQ ID NO: 292376 - DNA, 662 bp, Cannabis indica
gggcaagcagaagtttcctatagggagattaaattaattctggagaagacggttcaacggtcaagaaaagattgggctaagaagctggatgatgcattatgggcttatagaacagcgttcaaaacaccaataggaatgtctccctatcggttggtctatggtaaggcttgtcatcttccagtggaattagaacacaaagcatctgggccatgaagacattaaatatggacttggcggcagcaggagaaaagaggttgttacaacttaatgagatggatgagtttcgtaacgaggcttatgaaaatgccaagatctataaagagaaaactaaaagatggcatgatagacatttagcaagaaaagagttccagcctggccaacaagttctattatataattccagattgaagctttttcctggaaaattgaaatcaaggtggtcaggaccgttcactgtggttcaagttttcccatatggcgcggtagaagttaaaggagaaaaaccagagactttcaaagtcaatggtcaacgattgaagccttatttgggaggccatattgatgaagccaagaaagttattcaattggtgcctctgtaaaggggaccttcagcattttaaattatttatttagtaaactttagttttaaattttactttctt

SEQ ID NO: 292377 - DNA, 545 bp, Cannabis indica
attggcgagaaattcacatgccatagtcacattcgcctggcctcgagcatccacaaaactaccccatttcatcctctcaatttgagcccaaattgcttcgaacctaggttgacgcctcaaggggttttcagggaattcaataccccgatcttcaatgtaaggtctaatttttaacctcatgaaacgattttgagcctcctcatttacaaatcgggttctatcgaaacccgtaactggcgggtttcacatcgaaccttcttgagcatgccttgttctttttggtctcattttctgagaaaaaaaacttttttttttcgttcttctttatttttttctttttctggtttttttttctttctaaaataattctaagaaaaattgggcagcaccttcccttaaatatctacttcccaaaaattaaaactacaccaacaaacccaatacgacaacaataccacaatacaatttcaacaaacccaatatcaacaacaattttatcacaatatgcactattaccaccaaaatttataaatagtaaatcaaat

SEQ ID NO: 292378 - DNA, 417 bp, Cannabis indica
attttgattccggcgtaactcctcattctgagctcgtagccttgcaatttcttgagttagctcctcacgtatacgagcgttttctcagagtatctcaacttgagcattgggaggtgcctgttgttgttcgagtgctacttcatctaccggtgctaccgatgctccttgtctacctcccttaccgctttggcctccatgtcggcctccgcgtcgaccatcacctcagcctccgtcccttgcgggtgctggagcagcatccacgtggatgtttctattgccgttgatctgaactgatcttcttggagcattatttcctaatgttcctttgtttgtttctaagaatctctaaaagaagataaacttaaataagatatcactaattttcaaaaaaaaaaatgcccatacttgcataactag

SEQ ID NO: 292379 - DNA, 732 bp, Cannabis indica
tatatgctgcacaaccaaacactctgagattagataagttaggaggtttaccagaccatttttcctcaggagttttgaatccatttgcactggatggactcctgtttattaagtatacagctgttaaagctgcttctccccagaaaccttgtgatagtccagattgcaacagtaagcatctcactttgttgagaatggttctgttcattctctctgcaactccattctgttggggtgttattctaactgtcctgtgtctctgtatgccatgttctttacagtaattgttaaattcatcattacaaaattctaatccattgtcagtccttagagtttttaatttttcatttgttaaattttccacaagtgttttccactgtgtaaacttagaaaaagcctcatttttatgttttaacagaaaaatccaaactttccttgaaaaatcatcaacaatagatagaaaatagacacagccaccatgagtacttgttttctctggtccccacagatcagagtgaacatactctagtattttcttagtgttgtgtgtgccagtggaaaatttcagtctatgatgttttccaagtacacaacactcacaaaaatcaagtttgcataccttgtctttacctagtaggttctgttcactcattagttgcagtcctttctcacttatgtgtcctagcctcttgtgccatagcattgcatttgagtcatcattgttgctgtgag

SEQ ID NO: 292380 - DNA, 1313 bp, Cannabis indica
tttctgtatctgttcgtgttaggaattttcttcaagtttgttatatttaaaaaaaattgtcaaaaactaagcctagggtcctatttttaccattttagaaaatacatggtccattttgttatttaacaaaacagatggtctaattgggtaacttttgcaaaatacagggtccaaaatggtatttactctttttattatggggcataattttttttcaaaaatattatatattttttttaaaaaaaaaatactgtgtattgtgttaagttttctctgttgttccactgctgttttttagttgttcaattgttatttttaattgttttgttttgtattttactgttattttataaagatacagtattttttaaaaaaatcctcgtagacagtatttttgtaaaagttaacctaattttagtatttttgtaaattctcctttgagaaatgttaaaatgaaagggatcagaggtgtctagcatcctttaatgtgtattactgttattggtgcaattaagtatcaggttccatataatttaggggcctgcttggcacagctttttgaaaaaagctaaaaagctgtttttcaaaaaaaaaattgtaacaaaaaaggtatttggtaagcagttaaaaaaacagcttattgaaaaatttatggaaaaagctacagctgggtacaactcaacttttagaaaaaagttgttttgattaaaacactataataaattattttttactaaaaatttatttaattatttattacagattacaaaaaaatgaaaatattttttgaaggaaaaaatattaaaataaataatatttaaatttcaaatttcttattttgttattaaaaatattttatatttatatttatatttatattattaacaaacaataccaatctaagtttcttataaactaaatttttttttacaattgacataaatataattaataatattaaaaaattatttttatcaaatgactaaaaatttatacaaaaaaataataattaataatatataaaaaataaaaaaaaatatataacatattttatatatatatttgtgattttaatgaaataaattaatatattattattattattattattattattattattattattattatagaatcttaacaacttgcaacacttgaaaatttataatttacctcaaacacttaactcagatttttttttctacagttgtgctacagctgctttttttctacagcacaactacagtttgcttttccccacacacaattgtgctaaactaatcaacctccacgcccgaaatcacatgtcg

SEQ ID NO: 292381 - DNA, 696 bp, Cannabis indica
acttgctttgcttctcatcctcgctatcaatactttcatcaattttcctttgcccgtatgagagaaaagggtagcaagtcgagtacgataaacttcaatgtcaaaattagcaggaacatcttttccatggatgaagaactcggcaaatgcatccacaaatgctccccaatcactaataaccagaaaaggaaaaaaacagttaaacaactaaaatacaacataaaataaacttaaaaacaacaactcactttttctgctgagatggaagaccagcaatctccacaactcttagaggagcttcagggtcagaacctaaatcaggaacaggggacctattcttccaaaatccaaggagatcaaaaaacaaaggcagtaaaactgaataagccttcattgcattcctagttgcagaattcattttggcagtcctcaaggaattatgaagaaacaaaatcccctcattcaagtcaagacgaccaaaaacccaatgactttccttgctaagatttatgatgaataagacatgatcggcttcataccaaggcatagaacacggaattcgcaaacctcgtatgtaatgcgctattgggtgagcagcatgtatgtgcgacatctttgttttcatttccttggctttgttgaacttgtggtataagcttgaatggaatcatcgaaaaggcaatcagttgttgcaaa

SEQ ID NO: 292382 - DNA, 499 bp, Cannabis indica
aaaacttccgaattatgatatagctatttctataaaatttatagatctttgaattatcttttcaacgccactgaattcaccttaatcggagctctaaaactctagatatgatcattttactaaaatagtttttaatcctacaaatttatccaaacctacgaattttttcaaacctacgaatttttttaacattaatttcattataatgttatttaatgcactcatacaataaattaaaggattaattgcacaatacaacgacaatattaaaatatttgtaaaattatcttcatcactttaattaattgaaataccgtatcatttcaataagctttcaggcacgtttaccgaaatgaaaatatatccctcttttctagttgatagtctagtacgcgatgcacttcaaaaaatttctcttatttatttattcaatttatttttctctctcttttattattattattattaaaaaactgaaataatgagctattcacatatt

SEQ ID NO: 292383 - DNA, 734 bp, Cannabis indica
gcagtgtcagatgagttgtatgctatcgctaacccagcgaatacagcaatttatttttatccagggtgcatagtgaacggtataaatttttggtcaaggaagggatgataaccgcaaaacacaaaatagcggtgtcatggtccccggtgaagatggacaaaatttttacggcacacttgaaaaaattatggagttcacttatttgaaagattgcagtgttctcttatttttttgtaagtggtttgacactaacgggagtagaatggatagtgacggtgttattactagcatctgcgtcaaccgacagtggtaccaaaatgaaccgttcatacttgcatctcaagcaaaattgatctactacattcctgatttaaagaacggtaaagactggctgattgtaaatgagtacataccgcgcaatgtttgggacttcccggacacggatggggagacaccctttgtacaggaaaacaattcagctgaaaccgagttcgttgttcaacttccacagttggatgatgttgactatgttcgccatgatgtcgacccaactgaagttgcaaacatccatcgtgtgaattcacagcctcaacaattagatgatttcattgtcgatgatgacaacgagggtctaaataccgaagaagacaactccttagaattagagagtgacagtgatgataatgctgtatatgtaactgatgatgaggatgatgaattgtaattgacatagt

SEQ ID NO: 292384 - DNA, 757 bp, Cannabis indica
gcacaggaaaagaagaaagcataccagaaagcaatcccgagccagtaccacagccaagtagcaatgaacacaaaccgacctggaaactacatgtggacgggtcagcaacagatcaactatctggtgcaagaattaccctcgtcacgcctggggggcaacacctgcacggtgcagtcaatttcggattcaaggcatctaacaacgaagccaaatacgaggctcaaatcgctggacttaagctagcccagaaaatgatggccgaacacattgaaatctgcagtgattcacagctggtggtaaatcatgtatccgacgaatacgagactcagggagaaaatatgatagcatatttgaggaaaattcacgaccaactcgcacaattcaaaagctacgatctcagacgtgagctcgattggtaagcaacaatgtaagtgacaaggcaaacttggtccctatccagttccttgaagagcctagcatcactggcacggaagaaatcgaaatgatcgacacatccccaaactggatgacaccaatagcagcctacctcaactctagggaactcctagataaccgaaatgaagctcggaaaatgagaaggaaggcagcacggtatatcatagtagaaggggtcatgtacagaagaggattcttgatgccattactcagatgtgtcacacaagacgaagctgcacgactcctatctgaagttcacgacggattctgtggaaatcacgccgccggacagagcttatcc

SEQ ID NO: 292385 - DNA, 891 bp, Cannabis indica
ttagttgacacctagccaagcaaatttcagcaagggaaaataggtttttcctaaccatttattccatttagagaaaataagaaaagtaaaaaaaaaaaaaaatacaaacttaaacctactctacctctctcttcctctttcgaaggaagcaagaacaagggagatttgctgtgattttcttgtgttttcagccaaagattcaaggggaaatcaaaccaaggtaagctctagcaactcctagccctaattcttgaatttaagcttaggttgagtatgtgaaattgagtttcaggggctgttagggttttgaaatgattagggttcgaattttatagtttatttgagttaaataagttcctagcagctggttttgatgcttggtgttagttctaagcaagcttgagttttgaaactcaagctttgagctttaatggcaatttgaattataatggtttgttctgtgaattgctggctggaatatgttgtttatgccctaattaggtactctggaaggtttcatggcaattggtggaagattgagcaacaaatgaaaagtttggggaaaactggtgcaaaccggctagccggtttgcagtgccacaaaaaccggctagccggttttggcagggttccccgggcctttcattttctcaatttttgccatttcgatgcctcggttgggtgtttccccatttccagagttagaataacccattaagagtataacagaacctagggttttggttttgggtttcccgggattagggttttaatcatgtgacttacccggtttcaatatgtgattagggcatccatctagcacgagaattccgttcaggtcggccaacacacttgaattcggaaaacaggtaagaactgtgtataatgtgt

SEQ ID NO: 292386 - DNA, 679 bp, Cannabis indica
aaaaatcatatcacttagttgagtattattagaatactcataaatatcttaacatcaaatattaaaataaagatatatttataaatttatttaaattttaaaaaaaaataaaaataaaaaatgtaaatccactccaaaattattaataaaaagtagtcattaattattcttagtcactcaagctcctataaatataacgaaattaaataccaaccttaccttttttatatttctatctaaaattttcaaaaaatatataaagaaaaatttttgctctctatagctttaggctatggcaaaattttaaatgggggttttattaaaaaagtaaaatatcgtgtttttgaaaattataatttatttctttacaccaatttaggcaatcatttcataaaaatattttaaaaaaccataatatttggaggaaaaaaataacatatttgtattaaaaagttactaaagtgtcgaataaattcaggttacaaccataattgatgtttatatacgtacctactcaaataaaagtagagatgatttgttttttatatatgataatagtaattataaatgactccttatttaaccccttctctaacgttttccttgatcattgaactactttattagtctctcttcctttttcaaccaatctttctcaaatcttataagattcgtttct

SEQ ID NO: 292387 - DNA, 755 bp, Cannabis indica
aacataacacttactccaagtgtaagtacacatcatcgctgattatcacattagtgtaaatccaataacactgatgaaacagggaccaagtcttttgattcatatgatcacaatcacattccactgtgttgacgatactgtaattgtgaataaacatatgatctggatttaactgattttgtgtataaaagtaataaacatattaaaccattagcatgtaaaattcatgcaaacatcaatcacttcaaatttcttatattgataactaatcagattgtaaagagttttatttagggcataaaacccaacactcctctactgtagagttgaggagacgatgaaggcctcttccgctgcaaagccgataggatgttgaaggcctccttggctacaaagccgatgggatgttgaaggcctcctacgctataaagttaaggagttgacaaaggcctcccctgctaccaaatcgaggagatgaacaagaccaccttcattgaaacacagtcgagggaatgctaaagaccttcaaggctaaaatctcagataagacaaagactacatcaatattcacataaacacacaacgtgacaagagagtcaatgctaagacaatagccaagtaaatattgacattccaatattagcatgatttcacggtatctcaaataaagaaaatcactcaagcattctgttatcccaaaagtggcactctgacgtggcatcacaaaaatggtgacacgtggcatcaacttagag

SEQ ID NO: 292388 - DNA, 672 bp, Cannabis indica
atcacgtaatacgcctatgctagttagggtgttacaattagggtgatctaaactaaaaaacacttacaaaaaaaacttatctttcgagattctacagcgttaaattgctaatgaacgttcctccattagggaggattactcactaaaacaataactatgtaaaaccaacaatggagattgaatgtctcttgattaaagctcattatttaaaatatgtattttatttaatcatttattttattctgtattttaatgatgaaaattacaaattaaagttggttaataaaaaaaattaaattttaaaaaaaatttccaacttcaattaaattttcaattatttaatattcgaaaattataaataaaattcgaaattaaataaataattaaaaaataataaaataaaatttgaaaaacaaaattaagttgtaaccacgtaatttgaaaaatattccattttaatttgatctatattttttttttaaaaaaaaaaattacaacttaaaaaataatcctcaacttaattttgaaattcaaaagatattcaaatttaagttgataaataaaattagttagaaataactaatttacaacttaaataggaatatttaatgaaataattaaaataagcttcagaaagaatctagttagttataattctatatttaattaaat

SEQ ID NO: 292389 - DNA, 691 bp, Cannabis indica
aggagctgactactgcaaatcctcccactcccaaatctgacaagtctaacgagtctgggccaccaacatctgggtccgagctggtcaggaggattcttgagctggtgcaggcaccaactccgcccatgcccgtgcttctggaggccaagaagggcaaggaggtgatggctcactacatgaaccgcctggttcctgaggttggtgagcaactggctggtgctggcgactcatctctgtatgtgttggtgggcggagtgttgaaggagcttaccagggttagtcttttcttttcgacatttcccttttagcttttcatacttagctccatatgctgactttttcctttatggtggttggtttgaagttggcttacacctactcccgatctaaatctgctacttccaagagtgcagctctgtccgacaccttgagggcggaggcggacttggccaagaaggaagttgaggaggccagggcaaagacaacagctgttcgtcatgagttgggtgaggcacacaagaagctgtttgccgcccagaaaaagatcaccgtgctgacaaaggacctcgaggctgctgatcgcgttgaggaaaccatcgagaccttgtctgctgaagttgatcgtcttcaggatgagaggagttctctgcggcaggtccttcttcggttgaaagaagataaggacgctcag

SEQ ID NO: 292390 - DNA, 500 bp, Cannabis indica
aattagggctatattcagagtttacagtattctaacatgtggtatcagagtatccctaaattagttcttgagaatatatagtagtgttgatcttccattaaattatttttcctggtgactgtggtattatatatatatgcttataccattgaattttctgcattattgcatgcgattaaaatttacattgtgtatatatattcatgatatgcatgcgattaaaaaggctttacgattgaagtttttcttttatgttctgccaattacgatttatatatactgccaattatattttgtggcatatattcataaatcaatcgtgtatatatatatataaacttctgctttcaatggatatatagtatctgcgattgaagttttatatgtatatatatattgttaccatttaagtgttttagcatatgcgattggtatatgccatttaagtgatttggcatatgtgattgccatttaagttttatatgtatataaattgttac

SEQ ID NO: 292391 - DNA, 500 bp, Cannabis indica
tcattagcggctgaattactaagctgaatggacaaaataagatcccgatcatgggaaacaaacagatctcgcacaacatcctcatcccaaacacgagtatcgacttgaaagagacagctaaccaacttattcacaagagcagggtgtcgtgagacaacatagctgttagagttataaggaagccaatgataatcaagaatggagacattatccccattagcaatagttctttgagcacatgcatggattagatctttagcttcaagaatactacgccatataaaactaggattgtctcccaattcagcagaaaacagattaccactagcataatattttgccttataaagcctactaaccaaagaatcatcattaaccaacaaacgccaatatttctttcccaaaagagccaaattaaagtctctcaaacttcagaatcccaatccccttgcatgtttatggtgacacaaccgctcacagctcatccaatgaataccttt

SEQ ID NO: 292392 - DNA, 539 bp, Cannabis indica
ggggtgaaattcctcttgtattatgataagagtcaactagaccagaggagaagtaataatattgctacacaaattggttaggtgtgcaaaatgagtgaatcagtatggaaaatggtttcttccattattcctagatcaatgatggagagtatacatacatagtaacagaattcttagataatcttataatattattatatatatattaaaataaaattatataatatttatataaaaaattaaatttaaaatgcttaaatattataaatatttaaatcatattttaactttattattatttattttattattttaaattaaaatggttataataagaaattgattacttgttttagtctatagtaaactaattcacacactatatttttctttaagtttaagaataaaaaatctttatataatatacgaatccaacctatatatatatacacacttaaatttagttatgtgaattttggttaagaatatagtaaattacaatatatgtattatcagatacattacttaattaaaaaaaa

SEQ ID NO: 292393 - DNA, 798 bp, Cannabis indica
attaaatattgttaatgcactaatattatttcacatagggtcataaaagttagaggatttgagtttgccttaaatgagtttagatcgtattttagttgactcgtctaacccatttaataaacggatcgtattcgagttgacataactaacacaaaattgacatgttaatgacatatttaaaattaatttaatacttaaacatgtaataataggtcataaatgtgttacatatgttataatatattaatgggttgacatgtttaaataaaatatatttataaacgggttacacagtcgtttcgtgtcaatcctaaacgggtcgtgtttgagttttatttttaacacaattattgaatgggtcgtgttcgggtcgaacatatacttgaaatacatgagtcttgacacaacgtaaatacaactggcaagcacgaattgccacccctaatttcacaccactttattagtattaaattgaagagtaatgatacatgcatatacattcacacacaaacttgacacacacttatatactaagtaatttaaattaattatttttatttaagatgagtctcatctatcaaaagtaacttctcacataggtgtgtgtcatgtttatatgtgatttatagaaatgttttttttagtaaaatatcaacttcattaaataatttagtattctgaatacaaaagatgtaagagttcaccagaaatagaaatatcagatttgctacggtcagattgataccgagaatgtctagcaacataatgtgctactcgatttgctgatcgtctaataaa

SEQ ID NO: 292394 - DNA, 937 bp, Cannabis indica
tttaatcttaagagcttcggggttagcaatcaaccgatcatcgttccgtgtcttcaaaatcttcaggtaaaattcgtacttgttgggcatagggggtactcctctaggtaccgttttaaagataatttaatgatctatattttttatgaagaaactctttcctaattctgattatttcgatgtcaaaaaattcatgttttacagactgtcgatttacagttttttttaaaatttcttttcgatattgccttagtaaaagtgtgatatctctctcgatatctattattttcaagcgattcttgtactgttagaaagataattcaataatccatattttctttgaagaaacctttccctagttcggagttcttaccagtcaaaagttaggatctttactcggttatggtatttcgttttaagttttgtttcagaaaaagtgtcttcagtaaaaattcaatatctctctcacttttgatccattttaaaagatctttatctcgttttaaagcttagaaaaatagctacattttttatgaagaaagtattgtctagatcggggtgtaactatttttaaaacttttatttttaggctgtattcagaaatcggcatgatccaggattttaaagaaactgttttgagaaaacatgcataactcctaggttatagctccgattttgatgatctttataccgttagaaaggtctttcaattaactaaaaactttgtgaacagtaggacttctaattcaaacgttttataagtcaaattctaggctaaacttgctgtacagtaagagtaataaatatattgagtttatcggtggactaagggtttcactaattgttatagggcctagaaggtatcgtaggagttaattacagcggagttgaggtaaggaaaaataattatactttatacttgctttttatatggttt

SEQ ID NO: 292395 - DNA, 631 bp, Cannabis indica
aatcaccattaaagctcaagctttgagttccaaactcaaacttgagcaaacctaaataacatgcacccaaactagctcaaatctacttaatcatgcataaaaaaacctctgaaaataactacaacttcaacaacatcacagcaacaaaattaagtcatttctctttgaaaaccataatttttgagctaaaaatcacacaacttaaacaagatagcaagcatgcattaaaacctaaataatccattcattttagacctaattaagcttctgaaaacaacatataaacacagcaacaacagccacccaaaaactagcatgcaacctaccatttcactttaaaaacttcaagaaacataagagaaagatgaagaaagcttactaacaattagagatcaccaaatctgctcaaaatgagcttgaatcaccaagaaaaactccacttccttgctgctcaaggagggccgaaaagagagagagcttgagagaacaaattttgcttttctttctaaatttttctaactttgattttgaaatgagaaaatgagattaaatgacacctattcctatttacttcagccaacaattaaagaaaataaacacatataatccatttactaagtccactaaagga

SEQ ID NO: 292396 - DNA, 671 bp, Cannabis indica
tccgaagagaaggttttccatgaactaaactttcctggagccaacttaaaataccattgatgtgcggcctctgacagagttgcggggaagattctgcaacatacgtctcctcgcaccccttgtaaatccatttgcatctcgaaatacttgagatgagagcgaggatcttctctttgagtgtacatcttccacgttggcatcttgaacttgtgaggtagtggcaggaggttgatttctggcgagaagggaggtccgcgtgcacggtctaacttaagatcattgttacgctgcccggccatgccatgaaacatattcttcagttcgtcaagctgagcctgtacggctgggctgacatgattgacattctggtcgggttgggccacgtcagcgtctttctaagcggggattttagtatgggctatggactgcacattcgttgtagtattctgctcgtctattccccttcttctgtttaggtcgtcccttaggtcatgggttcttcccaacctatcgaacacagaagaacctcgttgcttagcgattggtttgcttggttggcaggtggaatggctccattattttgcgtggatccatcgagcatgactcctcctgatgaattcctggacaaggtctgtccgcctacctcttggcccacgagtggaacttgttgg

SEQ ID NO: 292397 - DNA, 725 bp, Cannabis indica
cctggtcctcacagtaagtcaaagtcatcacctttttgtccctaggagactcgagcaatgtccttccggagtatggcaagctcagccctgattccttcgtttagtgttcctgtggagaccgcgggcacgtgtttcttttggtctaagtgatcctggaggtcaccgtgttttccgttaatctgatgcctcagatcgacgggcgggtatttttggccccttcttcctctcccctcgggttcctggtgtacagaaacgctctttcggtcctctcgatcttgagggccaagactccctttttggagtttgcccctctgcgcaccttttcctttcgggaaatctgagcggactttttgcggatcctacacctttttctttttcccaggagtggaggtagggtttttctgctggttccccttagagggataccttatagggttaggttccctagatttttgcttttgggcacttggcgaggattctcctggtgtttctcccagtccaacagggatggctttatgatgcacgtggattcctgttgcctccatggctttttgcatggccagcatcacctcttgcatctttttgttttgttctttttgggctgtgatttcagcttcgtgatcagcagccttttgtctcaagagtactagctctgtatagctgccttcgtcataggcgtcgtactcatcgaagtttcctcgtattcgtcgtcgtgggttccttct

SEQ ID NO: 292398 - DNA, 826 bp, Cannabis indica
aaatgtcgtcaataaatacaatcacacacctatccaggtagtctttaaacacccgattcatcaaatccatgaatgtcgcttgggcattagtgagtccaaacgacatcacaagaaattcataatgtccatacccagtacggaacccagtttttgggatatcttcctctcaaattttcagctgatgatggcttgagcgaagatcgatcttggaaaagaccgttttccccttcagttgatcaaataaatcatctattcgaggtaaatgatacttgttcttgatggtgagcttgttcaactcccggtagtcaatacacattcgcagggttccatatttcttcttcacaaacaaaaccagagcaccctaaggtgagtagctcggtctgatgaatcccaaattcagcaactcttgcaattgtatcttcaattccttcaattcagctggagccatttggtacggtgccttagatactggatccacttccggaaccaattcaataacaaattgaatttcccgggtaggtggcaatccctgcaaatcttctgaaaagacatcaaggaactcgcataccaatctcgtattctcaggccctgatgtcacaggttggctggtatccaatgcagtgactatgaatcccagacaacctctgctcatcaagtccttagctttcaacaatgttattgttggtgtgcgtgccccctgaaccttacccacaaataccgttggattagcactaacgggctcaaacactaccatcttctgcttacaatcaatcgtagctccatacttagatagaaaatccattcccaggattatgtcaaaatcaga

SEQ ID NO: 292399 - DNA, 621 bp, Cannabis indica
atccaactcaaagcttctttgatgcgtatgatctcagcaattttgggttggacatacccaacctttcccttcttgaaagcttctaccatggttccttgatgatctcgagctacacagcccactccaaaccgcccctcttgttcaaataaagccccatcaacataaactttaatcttgtttaacacaggtgcagtccaactctcacagttccgcccccatcattcaaaggagacaatgaaaggcccttcattccctgagcaaatttgtattgatcaagcatgattctcgctgatgttacaatatttgaagtaagccaactcttattttgccaaacaaagtcattccccgcagccaaatagcccaactcaccattgccacttcctccacttcaacttcgtgccccctggtgaaaattcccgacaaccagctgctgaatgttacagccccagccccgacgtccactatgttgcgatgccaagcaacctttgcaaatgagcattccaccaatgcatggtgaatagtttcaaaactagagttgcacaaagggcagtcagcattgacaggaacatgacatttttggagttgaaaacacgttggaagcacacccgaagcagctcgcca

SEQ ID NO: 292400 - DNA, 482 bp, Cannabis indica
aaaattattacactaattattttcaattcaattaaataattgatttgacatttataagaatttcttttagtagtgtcccatttataaactaattttagtacaaattttaagtgtgtacacatcattgtaccttttgttctaaggagcaaccgagtcaattcttttattattaaatatatgtacactatatataacactctgggcccgtttggcacagcttttggaaaagctaaaagctgcttttcaaaaaagctgtgacaaaaaggtgtttggtaagcagttaaaaaacagcttattgaagaaattatggaaaagctacagctaaaagctaaagctggtacaacccaacttttagaaaaagctgttttgattaaaagactttataataaattatttttactaaaaatttatttaattatttattatatattataaaaataaaatatttttaaatgaaaaaatatttaaaaataaataatatt

SEQ ID NO: 292401 - DNA, 773 bp, Cannabis indica
agctgtaaataaaaaaaagtgagaaaaagcttgataaagtgggctggactcaatcggcctagtcaatgcgaggaggaaggcgaggaccaatacgcgtctcaagcatggcgtcaagtttcttcttcttctctcgaaatttagcaataacctcctcaggcttgggatagaagttgagcttgatactttggccatttgtcgaccaggccatatagacgccatcatcgaagcgcttgacacaacgcttgcaggagacaggggacatgcgctcatctcttttagccttctttaaggcttgatctctaaagtcctttagctccttcatctccacggccaagttagccttggactgcaagtctgcctggtgcaactcctctaaggacctcacctcggcggccatttcgtccatggcctccttagcctcccaaagctcacgcctggccctagcgacggcctcacctttcgccttcagcgcctcccgatgcctcgcctccagctcagcctccctccattggacctcctcacagagcctcgcctccgcctgggcttccctttgtttggcctcctcctcgagcttcaccatagcgagggcctcccttcgctcagcctcctcctagatcgctcgcctttcagcagacaagtcccgaaggatcctcacggcctcgtctatgcccccaaattcggacatgacgaagccatgattgacgatggtcctggagaggtggctggtctccgcagtaatctgaaaaaggagaaaagagtgagatcaaatgcct

SEQ ID NO: 292402 - DNA, 462 bp, Cannabis indica
ttcttgtcaacattatccttgtaatgttgcatattcttacctactgtctccatcagcttacgaaaagcgcgctcgcgccactaatacaccttcaatgaaagcgatcagtccaagcttgtaggcatcatctttatcttcgcacctctcaagttggagcataagggaatccaactaaacagaactcttcccttcaaaataagtctgaactagatggtcgttggacttggcgtgtatttcctcgtctgtaggggcactacccaaaggtaagcctgtaatgagtccaaactctatccgtccgaatctcatgtcatttctccctacatgaaaccaaacctcatcctccttttctgtatccactttcattttttgtaagaggaggctgtggaccaacgcgcctgtaatatccagattcaaatagtatttaatttttttttggatattaattgagcgaggataattatc

SEQ ID NO: 292403 - DNA, 655 bp, Cannabis indica
ttctaaaaactatgaaactcgaaaaatctcaatttttcgcattcaccgaaacactaaaaacatatccaaatcactccaaatttcacagggcgcatatataccatcaatattaccatccttacgtaatagaaattaaaatcgagcccttaaatgaaaaataccattaacgttcggagtaagctttaaaaaattcaaaactcgatttctaactcaaaattacctcaaattcaacaagtacacatcagaactagtcccatgactacccgagaataattctataaggtcagaaccttcataactattctaattcaaaaaaccctacatgaaaccaattgtttttaaacttaaaacgaaattaaaccatatcttaagctttcattttttaaagatttgctatcctgctactaccagagcttagatcactaggtttcgagttgaaaatcaaagaaaatggatataggacgagaagattttgtcaaaggagagaacgaggatttcgttcgtttgtttgttatatttcactaataacttaatatatatatataaataatatataaaaaaatattataataatatattaataataatgatatattattaataataatattaaaaaaactttattattaatagttatcttattatttattagcca

SEQ ID NO: 292404 - DNA, 298 bp, Cannabis indica
taaactaaccctaagtggtttcctataaataggtagtgatggctaaagggaaaagatgatgcatctcattccttcagtaaaaatttgagcctcttctcctataccaaaaccgaaaccctatctctctcttcctctcttcaaaaccgaagccacatagttaaaagagtgagtgcccacacacatcaagtggtactcaatcatagtgtgtaaggctatgaagaatccagtttcaagagaaggagattcggactcagatcttggtgataccctgctacagaaaggatacaagggttagaga

SEQ ID NO: 292405 - DNA, 629 bp, Cannabis indica
atcaaggaatggcttgacactcaattcaaaatgaaagatttgggtgaagctgctaatgttcttggtattcaaatcattggaaactggaagaagagatcccttgctctctctcaaacaacttacattgataaggtgctagagagattctcaatgacaaatgtcaaagaggcagtgatgccttttagacctggtatcctatatctatggaacagtctcccactaatcctcaagagatataggacatgagaatgttggaaatattttaccagtatctagatttactaccaagtatgttttattaacaacctaatatgaattctaaaacaataaaataaacacataagagtttaagaaaaccttacattgggtgcagtggagtataatgatttcttccattcaaatttctagcccttgattcctttctgtagcagagcattatcaagatctgaatctggatctctttctctccttcttcgatgttgattttccacagtcttacatagtatgattaatgtaccacttgatgtgtgtgggcactactctatcactcaagggaattttcgaaattttgaagagaagaaaagagagaggaaagtggcggctcagaattctctctgaaaagaatgaga

SEQ ID NO: 292406 - DNA, 1146 bp, Cannabis indica
taatgtcttttattttaattttttcacaaaattttattatggtattgttaatatattggtctatcctcaatactcaacgcctcatagtttaaaaattaattctttttatttagggaaattttatttacaccctaaaaatttctaagtacaccccattttaagtaatttttatttaatattaaatttatatctttaattttactaagtatttttaacttttttctttcaatttatattcttaaaatatatacctatcaaacaaaattaaattacattttaaaaattatgacaaaaaaattaaaaataaaaaattatatgaaattttcttaaaaaaaaaataaaaaaaataatacatgagttagaaaaaattataaaattaaaatcaaaataagtattgaaattaacataaaataatgtgagaaaaaaaatttaaaaaaaatattaagagtaatttttaaaaattatttaaagttaattttttttaaaaaatgaggtgtatttataattttatggggtgcaaatataactcccctttatttattaatagactttatatgtctaattaataattaaattaaatgacaatattatttaataatctattttagttattaaataattagttttggcatttaaatggttagaattggaaaattggcgtttttgagaaaatagaaataaaatttgtgaaaactgcaaaaccaagtggggcccattacacacaccatggccggccacttaaagtggtttttcaaattgatattttcattattttaatgccaaataattcctaacctaaacctagtagttgcctataaatagaaagtgatggctcagtcaaaatcacacttttcattagttttctgtcagaaaatttctcttcagaaaaactgagccttcccttttctctctatagccgaaatctctctctctctcttttcttcttcataaatttcgaaccttagtgatagagtaagtgcccacacacagcaagtggtaactcaatcatagattggaagactgtgaaggatcacacacaaagagaaggacattcgggctcagatcttgataatactctgcgacagaaaggatacaagggttagagatctgagtggaaggagacattaattccgctgcatcaaatgt

SEQ ID NO: 292407 - DNA, 346 bp, Cannabis indica
accatgggcctatataaccgagcttccaataagcagatctagaatttaccaagtaaattcactaacttattaattcctcattgcatccacgcatagaacttcaaattgcactctcagttatatagaacgctctatatgttccacgatatagatacgctattaattatctattgttataatcccaataatcaatgatcctctatagatgatctacattgcatagggataaaaattatcgttacataggacgctctatatgttccacgatatagatacgctattaattatctgttgttataatcccaataatcaatgatcctctatagatgatctacattgcataggg

SEQ ID NO: 292408 - DNA, 788 bp, Cannabis indica
taatttgtccattacaataaaaaatatattatcttaaataaaattaggaaattgtctttaaataaactttaaaacataacacataattaaaaaaaacctaactatcattgttcaaatcagtaaactctaaaaattcatctgcatttgagctaagtcttgaaccatcaatattctcacgggattgagccggcggggcagggtaataaggttgtccagtctgcggcgtaggtaagatctccacatattgtcgagggtgcgggcgaaccaaaattggttgttgctgttgttgctgactctgagcactgaaaaagcctccatacataggctgttgtggagatcctcccatttgaccatacacaggttgttgctgcaacaatgacccaaattgaccgtacacagggtatggttgttgggatgagcctccaatattaccaaccataggttgtgtctgagatcctccagcggcttccgaaaaaaatataggaggagactgtgagggaagcccgaacatgtaatgcaactgaggcgattgtgaagagccagcagacatgttgggagaatgttgttgttgttgttgaaaagacatgttgggagaatgaattaaacttttatatattttaatgttaaaattatattatttatttaattttttaaagaaatattatttaaaaatattttcctatattaaatcattttttttaaaaaaaaacttataattaaaatcataaaaaagtttaattctttacattaaaatttttttttttgttttatatttatttttcaagtat

SEQ ID NO: 292409 - DNA, 901 bp, Cannabis indica
agtaggtacaggatttgcctcttacttctgtttttctttctttgtttaagggaaatctttcttaaaatgcccaaccatgccacactagaagcatattttttggttgcattctccgagacgatgtttcttacatcgacggcacttagggtaagaataactctggcatcctcctctaccttggtaccctcagaaccttttgttttatcccgaaccactagatgtcaggaaagtcttcctcttctaatcagcagtggaatcaccagtgtccctaccatatccaaaagtaggaagagtggtggtcccaccaacacttggagtctctcggggctcctgaagaaatttcacgtcacccttagcttgaagagccttctcaacaatttcagcataagtcattgtgtcacttgtagtaatcactagatcatgtttaatcttggcatttaaacccgccaagtatttttctttcttactgaaattcgtgggtactatacccgaagaaaacttggctaaatggtcaaacttcgttgtgttttccgttactgacaagccttctccctaaaccaagtcagtgaattcttttcgcttaccactgcatactgcctcattataatacttggcattgaacaatgccctaaagtcttcctgggtcatagtggtgacatctcaggtgtgggacactaactccaaccacacgagtgcgtctttctagaactgaaacatagcgaagttacccaatcattcctagtgacacccataaacgttaaggatcctctcattaatgtaattcactgttcaactttcaaagcatatggacctcccaaaataacctggaggcacctgcttgtgaaacctctcatataaaggttccatacggttgctgttaacgcagatttttgttaactat

SEQ ID NO: 292410 - DNA, 443 bp, Cannabis indica
aattgataaggtgaaccaaatcatacacaaatgaatgaaaaatacttctgttattttattgatattgaataatctggattacattgaaatagagttttatttagggcataaaacccaacaaatacctagaaacataaaatcactaacaattgtctgataatagattcaaccaataacacaaaattgtcactaaattaaaagaccctactttttcaatttagaagccttagaagacttgctttgcttctcatcctcgctatcaatgctttcatcaattttcctttggccatatgagaagaaaagggcagcaagtcgagtacgataaactttgatgtcaaaatccccaggaacgtcttttccatggatgaagaactcggcaaatgcagccacaattcttagaggagctttagggtcagaacctaaatcaggagcatgtgacctat

SEQ ID NO: 292411 - DNA, 509 bp, Cannabis indica
tacatgttaaaatttagagggtaaaaatcctaattagctattttttttattatgatgttgagatctttagtggtattttacatcaattaatgaggggtctaaatttcatatcacccttattttggcactagaaaaataactagaatatatgcactggcggacccaatgaatgaccagtatgggcttaagcccatggtgaaaaaaatatttcttttacatcttaatttaaaaaaatcttttaattattttaatttcccacaacaaatacgcaacagaataggtgatcaataattgaatgatagtttgacagtatatctcaaaaagaatgtattcaatgttattgacaacgagattattatttatcgttttcaaaatatgaaaactcgtcgaggacaactctaaagatatgagctcaaaaattgatatatttgctaaaattttaggatattgagtatgttatatattttgaatatcgttttagattgcttttttttttttctattagaaga

SEQ ID NO: 292412 - DNA, 598 bp, Cannabis indica
ttagatagtgatttctagtaactaatttatattttctaatatttaattaagtagaaaaatatatttaagttgaaaattaatttgttaattaatttttgaccaacttaaattaggatatttttcttagaacttaactagaattaataattaagatgattttattcaagatacttaattatttgttcctctttcatgaaatttaattaaattagaaaatatatttaagttgaaaattaattttgcaccaacttaaattagaatattttccttagatattaaataagaattaataattaagttcattttattctagatacttaagtattcatattttaatgaatttaattagatagaaaattatatttaagtgagaaagttttcaatttcagatcaacataaattagaataattttcaaaatatattatattttattttaataatcatttttcccacaaaattttgaaatatatatttttttttaaattgtagatatttaaaaatttttctaattttgaaaagttagattgttaagaaattacttttgaataattttagatcaacattaaatcaagtaattttcattaatgatttaattaa

SEQ ID NO: 292413 - DNA, 492 bp, Cannabis indica
tatgatgtgacatatatatatttaaaactcagccaagtacggtgttataatagaataataatttgaacacttaaagtaaatctgattttgtcaatgcaatgaaaaccgtaagttgaacatacccaaccaactaataaatttttcttgaaagacgtaatttgaaccaacctaataaccagttttgttatggtttggttgagtttggttagaaaaatcaaatatttaaataagtgaaatgttgttccatccctaaaattttcacatgtagcaacaaatatgcccatattatgtctaaataaacatgtgtggcaaaatgaataagaaattaaattataatatttactaataatcaaaactcaatttgtgagtactacgaaccagctcagttaataatgggtacgtgtaagaaattagtacaatttgtgagaaaaataattgttattagtttgtattggaatactaaatttcaaataatcagttgacatctgtagg

SEQ ID NO: 292414 - DNA, 754 bp, Cannabis indica
atcagaattttgagaataagataataaaattttgcatagtctattcgaatgacttaggcaaaattcctaatcctcatgaaatattttatggtatctctaatgattacttaatcttaagcaagtattttacattaatgttaatactagattgctatgttgatgacttagtctagagggaacttacagtttcagactaagataatatgtcacaacaagatatccctgaaaaacaatagtaagaggttaaatgtacttctatgtatgaatttaaccagactcctactgttgagtgggagccatctaagatgtaatcaaatgaggaacattaggagatagtcaagaaaaatctttgaaagtgacctatatgtaagatgataggggtgtatattagaatccttatatctacaccaactcataacctattcgagatggtggttactctgggggtggaggaattattctagtaggatgtaaaaacccatctataataatttaagctccatcagtgaagataaataactttgttgtttcaaaaacactagacgtttcaaactgaggaaaattctacaatgtgttatctctattccatttttggatagaattagagatatgtcttttgtttattcagatgcactcaataagcaataggaattcagtatccctagatgagtaatgcatatagaaaatgatgttgcataatgttttatgaacacaaagaaagtaatggtggcgaaagcagttgcttaccacagac

SEQ ID NO: 292415 - DNA, 1000 bp, Cannabis indica
aatcctcatcaaatttctactttgttcttagagtactataatcagattttgggaagcaaaatggtgaataggaaatcggttttggaaggagttatgaggcaaggtccgattttgtctagccagcaagccgatatgctagttatgcattactcaagagaggaagtcaagcaagcaatcttcgatattcctggaaataaagccccaggccctgatggatattgtagctttttcttccaggataactgggaggtggtgggagaagatgtttttgaagccatcacctctttcctgcattctgggaaactccttagagaggtaaataatacggttttgactctagtgcctaaaagtaagtgtccaaattctgttggggattataggccaatagcttgttgtaatgtgttgtataaagctgctaccaagttgatttgctcacggctgaaattggtattaccggatttgatttcacagaatcagagtggtttcgtgcagggaggttcattgggcacaatattatggtctgtcaggacttaattaggcactatggaaggaaaacctctaaggcgaattgtatgatcaagctagacttacaaaagcttacgatacagttgaatgggactttattgaagagatgcttgtggctttcaagtttccagctagctttgtcgatctcattatggtgtgtgtccggactccaaagttctccttgatgtttaatggctctttacatggatactttgattcaaaaagggggctacgcaaggtgatccaatgtctctctgttgttgttttgggaatggaatcctatctagaattatgaggaaagttggcgcaaacaggattttaagtttcatgagagatgtggagaattgcagctcaatcacctcagctttgcagatgatgtcttgttattctgtaatggagattacaagagtatatacctcatgctacaaggtcttgagctattctcgcaaacttcaggtttgaaaccgaatccttc

SEQ ID NO: 292416 - DNA, 641 bp, Cannabis indica
cccaagttcatatatttcaactcggggcaccccgagcatcattccaaggaagtctcccatgaattttccttattttcacccacaaggaagatacaagtgctcttcgagaagcaaatgaagccatcaagctagatgaagagctgggcgcctaggttgacatcccagtcactaggtgcccaggttgacgtagccacacttttggtggttctatcaatctgattgtgattttgtcttgggtattcttcttgttttgctctaaaaataagatatgatacttggaatcaggataaaatattgttcgagtagtaagttagccaccaggcatcactaggcgcgagtgtgcaagcacactaggtgcctatgttgactttggcatggggctcagtgttctgcccttcaaacagtagttccactctaggaatcagtcttattttccccaaaaataagatttggacgcttttgcaagttaatatctcatgtacacgtgtcacgtgtaagtccaccgacacccatgtgcactagtgatcaccccgagtatcacctagtcgtcactagtggatcactaggaatcacccatgcatatcaagtaaaattgccaagagaacttcttcaaggtcaaagaatgaactaaggatagctat

SEQ ID NO: 292417 - DNA, 618 bp, Cannabis indica
gaaattcaataaaaaaaaaatttggactatcgtgtgagaaaacttgttgcacaagttagtgagtgggccaaaatttgtacttataaaccctagtatactatgcaaatcactttaacaagactaaaataaatttataccatttgattatttgtagtcttgatgtagatgagcttcctaacttgatttgcatgttttgatcaaaagttgacttttcctgagagttgactttgactttgaccttcgggttgacttttgacttctaacttttgaattcttgatctcttgataaaaattttgatcttatgaagtatgaagtagttgatatacttgttgaatccacttctttgattatgtttgactttaccgagcaaatattgatactttgtgaatttgcttgcaaaatggtcaagaaaagattagtaacaaataataattaaatatttgtttatcatcaaaataagtgagtgattgacttttggtcaacagattttacttcgagcaacaaaccttttctgttttttagtttcctggccgggatatcagaatcgatctcgatctcttctaattcttccacaggtccaacattgctgcttgggtccccaagtcgaggatccacat

SEQ ID NO: 292418 - DNA, 929 bp, Cannabis indica
aggattacaaatttagatattaaaagaaaattgaggctttaatgaattcatgttttaccaatgtagaaacatgatgaagatgaaaattttattaaatctaaaattgcctgtgggctaaattttaaatctaataaaattatatgaactttatgatagatttaatgaaatatttaatttagaaaaatggaggaatgaaatctatcttaattaaatttgtgataacactattaaattaaatcctcataactccctgtggggtaaattaagagaatttaatttaacatattatcctaattaattatacaaatataataaaatccctgtggggtaaaattattatacctatataattaattacaagttatgtccattaaggtgaattttaattaatatataattttatataaataaagatgttgtggctactccctaattatttaaaattatattttcacttagacattaggtattgggctctacctaaaagtaatttcgttattaacataatagacaatcactgagattagtgctcctagtgtggtcgtccgaagatcattaaaaaccgttctagatatgagcatttgtcccaggttcatgttttcttatgtcaaaccacaaaattacttacgttttattcatattttattcattttatgaatattttatgaataattttatgaagttttatgaaacttaattgctaaataaaatattcaacctatcttaatgtttgaatatttctaaatatatctagcactataaaaggaatttatgtatagcatttaaatcatacaaatctaaattaattgcattaaaaataaatttgccaaataaatacaaattaatacaattaatgtatgatattaattaaatgcaaatttcaaaatatatataatggcaaattttttcaaataatcagactgaaaact

SEQ ID NO: 292419 - DNA, 753 bp, Cannabis indica
attgcattgatatttatcaaatccaatatcaataataaacttttttttacttctcatttatactttaaagtataccctatactgattacgtaactgattatgtaaatcaaattgcgcattcctgagtgaaccgctatatattgaaaatatattataacgtatacgatgtatttatatacatataatatataatatggatatacacttaaacaaggacatagtgactagtggcttattcaggaattgaatcaaacaggcccttttaactcagtggtagagtaacgccatggtaaggcgtaagtcatcggttcaaatccgataaggggctttggttttttcataaaactcccgtgggagtattcatagttgaaggaagaatagagatattgttgatatttgaaataaaataaaaaagtagcaaacaatatttctattttattaattaaattaatagaaaaataaaatttttattgaattatactatatctactatactaattagtatagtaattctagttataaggttgaacatttggtattatgtttattatattataatgtataatgaataatattcagttgataaaaaaaacaagttgtctacttgaatctccaaatattcctattttctattattgcaatcaaatcaattagaaattaaaaaagaaaaaagtaaagtggacctaacccattgaatcagaaatatatccactatctgatattcaaataaatattcaaattcaacgttggaac

SEQ ID NO: 292420 - DNA, 567 bp, Cannabis indica
tttttatattacttttacgttttcgtgttgtttttaatgaaaaaccgtaaaaagatagagaaaaaaattaaacgtaaaaatataaatttttacaaaaactaaaataaaataatttcttatataattatctcataaagttatcctttgctatttttataaatatttctataactactattatattttaaaaaaaaaactccttaaaaagaatcgataaatttacagtaataatagtggacagtagcaatataataggaaaatttgaaaaactatccataaaaatctctaaaattatttccctaaatctatatctattaaaattgcccatatatgactccatttgatttttctccataatacccctcccatttgaaaaacaaaaatcaaaaatcaatctctctccctctcggtgaccacgcaacaccacgccgccctaccatgcccggccaccgacgaccacccaccaccaccgacagcagcctccgaccaccgtccgaccacgcacaacccagctcagcccccctctctcccaatcggacccagcccctcctctcttcctctctttca

SEQ ID NO: 292421 - DNA, 604 bp, Cannabis indica
tttaagttcttgtagcagcgttgagacaatggttaggttggctagttttggagtaatgatctctataccacttctttggagttcttgttgtagtggcctttctatttttgccagtattgccaagctggcataactgcgtctacttagcgcgtctgctactacgttggccttccccgggtggtagtggatttcacaatcatagtccttaacaagctctagccatcgcctctgcctcatgttgagttccttttgcgtaaagaagtacttaaggctcttgtggtcggtataaatttcacatttctccccgtagagatagtgcctccatatttttagcgcaaaactactgctgccaactctagatcgtgtgttgggtacctcttttcatactccttaagttgtcttgaggcatacgctactactttgtcattttgcatcagcacgcatcccagcccttgttttgatgcatcgcagtacaccacaaacttatccttgttattgggaacacataatacaggggatgttattagtttgtccttaagtgtttggaagctaccctcacacttttctgaccagacaaacttttgcgtctttcgagtcaagttgg

SEQ ID NO: 292422 - DNA, 768 bp, Cannabis indica
aagtaaactctgttgtagattatcatatcaataaaactctatgtctgataaatctaagaatctttattcacatagtcatgtttactttccaatgtgttgacaacacaataaacaggatcaagtatgtgaaaagggtttcagatgaattcatacactatatacatataatcatgaaataaatcatgtgaaccatgcaacattaaatgttatttcttatctatattaataagtaaatctgattatattgaaatgagttttatttagggcataaaacccaatataaattacatctcaattcataagttttttcccattcttggtgagtatgcctttccataattgcttaataaagtaatcatttcctagaatttcaatggtctccttataaatcacattgactatccagtcaattataaagtactctccatcattatcgtgtcaccttaagtaattcaggtaatcttctttaccttagtgataccactattcttcctgatattattttatacgttacccggtaacatcccgcttcaagcctcgattgggcccttacgcccacagaatgatgactcttatacactagtgcatcactctagctatttcttggactgacgactggtcccactgaccaatccaagtgtttcttacgtgctttgctctgctcacacgcttcatggggaaatttcctaaatgaaactaccccaagtccaaggcactcgaccatggagttccatcatggtcagctaccaaaataagatgcttcttgct

SEQ ID NO: 292423 - DNA, 661 bp, Cannabis indica
cactcgcctttttcaatggcgtacggttgcgaagcaatggtcccggtggaaacgttattcccgtcccataggagaacaacctatgatccagctacaaaccaagctttgttacaggaagcgctggatcaagttgaagagctccgggacgagtctcaaatacgaatggcagcttatcaaaagaaggtgactaaatattttaactccaaagttaaaaacagaaaattcactattggggatatggtcttaagaagagtcttcccagccactcaagaacccggagtgggggtacttgggccaaattgggaagggccatatgaaatcgaggatgagatcggctccggaacctataagctaaaaaggatggatggaaccattgtgccaagggcctggaacgccgatcatctccggaagtattaccaatagtccaaatatgttaacttaggctttgtttaaagaatttgtaccgtcaaaatgtatgcaacctctaaattttaaataaaactgagtgccttaaaaacaaagttttcatgccactcaggggggtactaaggcataccacacggacagatgtaaaacaggccaaaagtaaaaacaaagagaatatgcatcaaagagatcatatatatatataaaatatcctgacccaaagggcaggtaaaaa

SEQ ID NO: 292424 - DNA, 1316 bp, Cannabis indica
aaattattattttatggaaaattgaaaaaaaaaaaaggttgaaaaatataaagaaatcaggtataacgataatcaaatacccttataataaccaaataagtaacaaattaccaaataatagtacattaataagagaatattcaaatagaaaaaacaaatgttaagtattgctaaaaggtatcgttggtgcttagcaccctcctcggtctcataacgctattattgtaattaggtatcgagtcttatataacttaaagaatagcttttaaaaaatatcactaactaattgtagggcgccacctataaaaagtattgggtactaatgatacctaataacaatactttttttataaaagatgttacattcagttgctcgggtttcgcttaaaatagaataatggaaaaaagattgacgaagccaatcgagtgcgtgtgagagattttaggattaaattattttatactattttttcaaactttttgaaataattttcacctatacatatatttatattaaaagaggttatatttttaaatacattctataataactcgtgtaatttctacaaaatatataacatattattgataatgatatgcgataatcttgttgttcatgtcatatcatatttaatcaaaagaataaaatatatttttaaatatttttatgagttttagtttattgtttgtttacgatatttttttgttgttttattttatttttatttattattatttttattttaatttttattgttgtttatcttgttgtcttcttattttttattggggatccgtaaaattataattaaaaaataaaaaactataaaattaaaaaaattgtaaaaatataaaactaaaaatataggtatataatattattttgatcgtataaacattaaaaaaagaaattagaaatttgataagtttttatacattttgtttaaaaatataactttctcttcaaaaatatattttcatgagaaaattgaaaaaaaaaaattgaaaaatatgaagaaattttgtaagggtaaacagatacccttatggtaatcaaatgagcaactaattaccataaaagggtaactaggtactttatactattttttttttctatattttttaatgtttttttttactaattttttctataaaataattttttgtagtaaaaatattatttttttgtcaaacttaattcaaaaaccgtaaaattttcccatcaattaaattagtccaaaatgatacattatgtaaaaataaagtgaaactatagcaaatggccccaaatcataagatcgtgctagtaaatgttc

SEQ ID NO: 292425 - DNA, 575 bp, Cannabis indica
tcaatcacttcctgacgcaaacatgatcacctccagcccatccattgattatgatgaacattttcctcctctcaagaggtttgaaaaaactgaagatcagggcaccacttcccaccatccaaaaatacacaatcctacgacaaggaatgctgatggaactttacaaaaggtctcagcagccgaagaagtattaaattggcaaacagaaaatatgatcgcccaaaaccacgtcttaaaacgggtagaaaaacacatcacccgcacagagacaatcgtcaaacaacaatcacaagatacgattattgaaaagttgacgaacaagattcaacagacgcatgacgaactcatggccatcataaaatcaaactctgttccaatgtcattattcttggctaaagaagcagaaatgaaagccctcaaaacccagtatgaatctctaaaaaaagcaattttttcaacgagaatcataccctacggggcctccgtcaacactctttggaggaaatacaacactctttggagcaaataccaccatcagtaccatggcagttctcaaccatgccaaagacctctcc

SEQ ID NO: 292426 - DNA, 536 bp, Cannabis indica
ctccccaatgtcaaagaacaaatatatttatatgattcacatattattatatcaaaaaaaagaccaaagccttcgtttttctctctctctcaacaagcatgttggcaactcagatctcttcatcttcctcttcgaacttccacagtagtgatgaatctcttaactccttttcccacccgtctccgtgtcgtggtggttctgcattaatgtcgattgacagccatccgtcagcctcctctcagctgggatcagaatcgtcaactttgctgatgatttgggagcaggcgtgccactccattaatgctttccttacaggtttgatcccttctctgaacaaatctcataatgatccctatttgttcttaatcatggctgtccattccagttctaataggggttatagatttaattgctatttctacctacctggtcagtggatggatttggataatcccccgcctgatccggtattaaatgtctgtctcttattcttcctgtatcactcgagtacaactccagatatggaagatctatta

SEQ ID NO: 292427 - DNA, 782 bp, Cannabis indica
agtagtctgggaagtattcatcgttgtgtcctcttccgtttttcccaagggaatgacgttaggcgattgctgacctacagtttggtaggctcttcgtatcatcacggtaccttgccgactacgagcttcgatctctgcatggttagcccttaatgcctccatctctttatctctccattcagcgaatatacgcctctgtcgtcaaacgcgagatttactgcagcatgcagttcgtcctgatcatgatgcagagtgttgttatgaccctacatgagtccgaggatgtcacagagattttgtaattcgatggcatctcccatggtcgcctgggcattggttccacgcagaacagtcgtattatgaatgctcttgttgagtgcggaactgttattcccagtctcttgcacaccaggcgcaattccagtaataggaactgtttcaccattccccacgcttcccgtctgtccaggattaacagcaggcggaacccttgaactccctgggtcctgtgatgtaggatccagcgtctgtgaatttgctgggtcagactgacctctacgagtttgcaccatcgtgttggcggttggatgtcgaataaagagcgatttctgatccttctctcaatgaaagcaccaaaatgttgacttctcttttagccaacgacaatgagtctattttataagcgataaactatatgtagtaacagatatatgataaagaaataataagacacaggaattttatagaggtttagccccgagcagttcagtaatagcctaatc

SEQ ID NO: 292428 - DNA, 825 bp, Cannabis indica
acggttctagatctaggtccaatctcagttatgattccaaatccaagtcctagttccaatctcggtcaattttcggttttggttctaattttgggtcatagggtacgggttcgggtccacttttgcgtttgggattgggttcaagtcccggtgtgggttcgagtccttgtcaggtttcgaatccagggttgggtcccaaatcctgagaccgactacgagttttgaccaagccctgggtcaagatccggatacctatctcgggtcccagtctggttccatttttggtgccggctcacgagctgggtcctgagttaaagttcgagtctgggtcgggtactaggtcccggtcatagttctgtttctcatgtccctatcctgattctgggtctaggtccaggttattgtgtgagtttggttcccagtctatgttcgggttcgagtgttagtctcggtcgggtttaggtctctatttgggttttgaactgggttcgggtttgggtttaggtcctcgtcctggtcctagtcctagttcggttctaattccatttgggattctgagttcgagtttgggatttagttcgggtcggagtaagagtcctggtctgagtttgggttcgggttcggattttagtctaggtccagatcagtctcctggtgtgggttcgcttcctgagtcttggtctaggttgggtctgagtcccaagttccaatcccgatctaagtctggattctgttctgggtttaagtccttggttctgatcctggtctgggttcgagttttggtgcgggtctagcttttggtctgattctaggtgtgggtgtttg

SEQ ID NO: 292429 - DNA, 672 bp, Cannabis indica
ttatttcatgattatacttaatatataaattctaattaacctagaacatatacatatatatatatatatatttgttcatgattatagtgtcatcaatacagttgaatataatcatgattatctgttcaaaagtttaattcccatgatttgttagtttacttacaccttggaaaagtattatgtcctcgccagggcattggcaaagtttaccagtatcggatgtatggagtatacattggatttgaccgatattgatcttagataaaatatcataaacttaccattatgtctttctaagtcaatatcactagttgatcttaggtctatggatcttaatcctgatatggttaggtttagcttagttatattatttatgttcttcaagttgttcgtggatgtcaaccaatggttctgcagatatttacatcttgggaacatggtagttcaattgagtgggagcactaatcatagatgtggactctatagcttctataagtatttagaagtgaaacgatgattgtgacagtcagtagtcccgtgatccgtaaggggaaataccgggtaagctgtacaatcccacaccgcctggggaaggtcaagtgggatgattcagagactgtgtaggtatgggactacacagttgaagagagcttaaatggattgattggtact

SEQ ID NO: 292430 - DNA, 496 bp, Cannabis indica
ataccctctgtaagcatttaaaaagtacttttttattagaaagaaatttttaaggggcaatttttatactcaaaattcggctaccatttcaatcacaacactgataagcgacacgctaaataacttcccggggacttaaacttgaaactaaaagtttacctatcgataaataacatggcaagaccctaaattacacaaaaatgggaaaactatggttcccaaatttgccccaaccggtagaccggttccccaatcggaattccagttcagggaagaaaacctggaagccaaccgaaatcccggttcctataggcctctctgaactggaattccgattcagtgcaggaaacaccaaaaaaatcgtatctcgaccaaatcaaccccaaaccaattcaaacattccagacctgctaattagaccccaatgaacatttctaaagcaacaaataaagtttcatgcataaatacaaaaaccaccattgatgagccaagcttg

SEQ ID NO: 292431 - DNA, 706 bp, Cannabis indica
taagatcagcattaagcaataatctaaatgtcacaaaggctatgtaaatactttcgtttcacatcaaaacctagactatccaattttagcattctcaattctcacttttcagatttcgaattgagatcataaaacatgtaaaaggtgatcaatcttgcacatggaaattaaacacaaatatgaatagtgttcacaatcaagatggaggaatggcaattattcattaactaggaaaaacttaaacaacattcatcattctccctaaataggagtttagttcaaaacatccataatcaaatccataattaacattgaaatagaaaagaacatagaaaaattaaagagaagagaaagaactagttgaagcaattgatccgggtcgccacaagccgctcttctagcctcctcctttgtttctagggttccaattctgaataatccctaattttcacgaaccctcactatttaaaccaattctcatctttaaaattcgtgaaattacgaaactgcccaaaaatcccgtcactggggtccccgtcgcgactggcaaagcccccgtcgcgacggggttaaactttgaaacttcgagatcctctctgccagttcccgtcgcgactggcatgttcccagtcgcgactggcatgttcccagtcgcgactggaacaggcagcgacacaaactttggtttttcttctcgattctttca

SEQ ID NO: 292432 - DNA, 787 bp, Cannabis indica
gagcaagaagttgctctgattcgcaaacgcaagggcaaaatggttgcccaggaggagcccaaacgacaacggagagctgacactccggcccacggtcttgatggcggggtctcccccatggaggaacacactgcccctcctaatattgtgctgactccggttcctggagatgaggcgagacaggagctccagatagctaaacacaactacgccatggacgaatagtcccgggggtatgcttaggtggaggccctgaagaggatcttacgagttgagatgcaaaatactctcaacaacccggaataccagaatccgtgggatctaaatttggatcccctgtcggactggttcggtcgcttcctcggagatgattggcgagtttgcgtcccagcttacccggtgtgcacctaggcggttcgctgcttgtgcatccttgaactccatcttccaagtccaggatctcaggcactccctcactgtggtaagtattttatagtttacttttctccttattattattttcttttcggagattcttacttatacttgtatcttttcgcagcttgctgctgaggccggccgcctttccaagaacataatcaaccatggcttcgtcctgtccgattttggggacatggatgaagttaggaagattcttcaggatcttactgctgagaggcggctttatcaggaggctgctgagcgccgggaagccattgccaaggccaatgaggagaggccaagcggagggaagcgcaggcggaggcaatggatccggggaggaggg

SEQ ID NO: 292433 - DNA, 711 bp, Cannabis indica
attataaacatggaggcttcaaactctagctataaaaggtagcgacatatgttgtaacacgataaaacaactcaaaaatagcatgaaattagcgggtcggcgtttaaataagcaagtatcaaaatagatcatgattaaatttcgggtcaaactcagattaacttactaaaccccaaaatattttaacactagtaagtgtgcatatatattaggggttttttttcttcataaatatagaaaaatataaaaaagtttatttttatatgacataaataaataatacaaaatatataagatcaaaaaataatcaaaatttaaaatatgaaaaaaaaaagataataaataaatttgaaaaaaatttgtaataataagtttcgtcagaatagtcaccggtgtcggaaaagtcgccgaattattcaccgaaaaagttatcatcgccagaaaagtcaccgaaaaaatcaccgtcgctagaacaatcattgaaaaagtcactagaagtagatttctcaaatataataataaaaatagaaccggttccataacataatgaataaaaataaataacacataataattcaaactggttataaattaaaatagaaccaatttatcacataatgaataaaacaaaacaagtaagcacgcaataattcaagccgattataattaaaaataagaactaggttctataacataatgaataaaaataac

SEQ ID NO: 292434 - DNA, 759 bp, Cannabis indica
gagcatcttggatgtgtcagggctgctgggtatgctagtttgaaaaatatttttccttagttatacaaaaaaattatacataattttatttattgatttgcaggttccttgtcaaggcatctaaactatttggcaggaaaaaaagggaagtttctgatgttgtggctcaaaaacagagggagattaagaaattaaaagctgaaatcaaatcccttaaatggaagaaaaatattgcccaacaatagcagaatgaggatgaggaagaaggagaggtatctcatcaggtgtatgttccacaacaatacgctcatgaagatgagggtcgaccacaaaattatgctcaggagtttgtttccctaaatgagccacctctcatgtacaatttcgatgaacatagggctcttaatcagctagtatatctctgctctgataatatcgacaacattatggcccaagcttatttgtacgaacatgagggtccaatcaaagttcactgcaaagactacgatgattcaaagcctaggttctgattttagaattgctgcaagaggatgctgaaatcccaatatcaattgacgggtgcagatatatatatgttaaggaagtagcaaacatgttcattccttggcctaagtacttaattagaacacccgaggtaacttttgttataaattaattatcaatgattagtggagtttgaatttcttaaatattcaaccatagtgaagtaggttccacgaatacatgtgctgcggtcgg

SEQ ID NO: 292435 - DNA, 622 bp, Cannabis indica
cccaaataacataaaaacgagaaaatctagggttcttaaaaatttcccaaccggaattccggttctgggaaattccttaaccccatccagaattccggatgcacaaccggaatttcggttcctcgcagtgaacattcaaaaattcataacttgctcaaatcaaacccaaagcatatcaaactttccaaacctgttctatgtaccctaaagaacaagtctaaagcaacaaaaccatctagaaaccacagataccaaaaatgtcgtgtgagctccaagatttgagttcaaaactcaaacttggctaaagctcacctgcaagcatttaaactagatttaaactacatatgcatgcatatagaaaatccagaaaacattctcaaactcatgcaacaatcacagcaaccaatttctcaacatttcatagaaattataatttttgagctaaaaagatccaaacttggttaaaccatctagcatgcttcaaacctactcaaatccacttaattcaagcatatacaatcacagaaaacaacctagaactacagcagcaacaacatctcaaagctaagcatgcaacctatcaagatttctcaaaacttcaaaaaaaacttaaaggaaagct

SEQ ID NO: 292436 - DNA, 666 bp, Cannabis indica
agattctagggtttatttatttattaaatctaattaataaatatattaaatagcaattttatttgataattaattttaattattaaataaatagttttggcatttaagtggttaaattgaaaaaaaatgacgtttttgagaaaataagaaaaaattgttgaaaaatggtaaaattccaaagtggggcccacatcctatggccgaccacttgtacagaattttccatttaattttttcaatattttaatgccaaataattctaacctaaacctaggtggctgcctataaatagatagtgatacctcatatcaaaagatgatgaaattcaagccttcagttaaatttttctgagccatcacttctatcctatttcgaaccactctcctctctttctctcttcatattttcatgccctatagtgatagagtaagtgcccacacacatcaagtagtactcaatcatagtatgtaaggctgtgaagaatccaatttcaaaagaaggagattcggactcagatcttgatgatactctgctacagacaggattcaagggttagagatctgagtggaaggagccattattattccactgtacccactgtaaggtttctgaaactttatatgtgtttatttatattgttttagagattcatatttgggatgttaa

SEQ ID NO: 292437 - DNA, 801 bp, Cannabis indica
gtcttgttagctttttcaagctctttcgctctttttccttctttgcaaaaattttccgccgcatatcttgcaaggtaatttcatctacctctttttcactttcaggtgaggtagattcaggatcttcttttgttaaagtcatgcagcaatccgacacactgtcattacaactagctgccttgtcccgtaactcttttggtaaaaactcctccagagttactagatttcgttttggttgttcgagttcgtttcttttggaaacggccttttgcttgccgatccttttcttactcttttgatcctttatatctggtctactccgaaatttgactccggagcttccagatggcttccgagatggaatttttgccggttttttccgagtacatgtttgccatgtactttctaaatcctcttcactatcataccagtcctcccaaatttctaaattaggctctgtcatgagctcatataatgtaggaatatttgggtttcctggccttggcatgtctgagtgggcttggactattgtaacttccttgtcgacttcaaatgccacagaaattatgtccctttgtgtgggatcatttggtatttggtcattctcggttagggaagttgtatttgttgtcgctttcccgagagaagagtcaatctcaatctcttttctcttgatcatgccttcgataatgtttttgaggatgtagcaatccgacaatgggtgactcacaatttggtggtaccgacaataatttggatcatttgtcataccaacctcgttgggtcgtttcggctcgggga

SEQ ID NO: 292438 - DNA, 524 bp, Cannabis indica
gtttgggatcgcgtcccagatttaggtccaggtccgggtctcaattctgttctgggtacacgactgtgtccgtgcccgagttccagtctcaatttgggtctgaggctaggtctgtgttcagttctaggtctaggttcgagtcctggtcacagtcctagtcttgttctagggtcctggttcgacaattctttttcaggttctaattttgggtcccaggtctaggtctgggttcgggtttggttcctcgtctgggttcttgtcctagtttgagtccaagatctagacaccgactattggtcggttccaggccctgttacgcgtatcccgagtcaagatcttgatcactgtcacgggtctatgtctgcttctggttcagaacccatgtcccatttctgagtttgggttcgggatcgaggctggggtgcagttctaggtcccgaccctagttctttgtccctagcctggttccatatttgagtttgagttcaggttcaggttcgggtcccgagtccaggtttgggttg

SEQ ID NO: 292439 - DNA, 634 bp, Cannabis indica
gtaatagtaataataatattagtattaataataataatagtaatagtaataatattattattattaataataaattaaacaatatgctataatatatttacccatatttttattattaatttacctacaataatattcacaaataataaaatattaaattatctccaataatttaattatttatctagcattacacacaccctcaaaataaaataacaaaaataaacgaaataaaaataataaaaaaaattattgtcactaagaaaaatttcatactccaccaaactcataaatattcaaaataataaattatccccattgacaaacaaaataaactaaaaaaaaattattcaaccaagaaagcggatattacagtgaatcctttgtaaatattgtaatacaagttaatacggaccatttgttatgtaataaataatacaacatactttgtatgaaaaattttggtcgtaataattaataccatacattgctttatccaaacatagtgttatttattatttaatacagtaagacccttatggattagattaagtgtagattatactagttatgttgaactctagaaacatttagatttgtttgtgaaatttcttattttaatattcccagttta

SEQ ID NO: 292440 - DNA, 1094 bp, Cannabis indica
aagatgtggtttcagattgcagtcttattgatatggagttggtgggctatcctttcacttgggagaaagggaggggaacggaggcatggattgaagtccgtttggatagagctctcgtcacgcatggttggaatgatctttttccggatgcaaggttagaaaatttagaaatttctgcttctgatcattgtcctattttgttgaatcttaatttatttagaaaagtggttagtttaaagaaattcggtttgaaaatgcttgggtgcgtgagcctatgtgtcgccaaattgtgcatgataattgggatgttcatgagtcgagttctttgagctcaaaaatcaaatgttgtagtactgctttagccgaatgggggaaggatatcactggtaatttcaagcagcgaataaatagttgtcataaaatcctgaagcttttgaaaaatagaagggatgttgattcggttaacaggtcaaggaggctcaaaatcgttattcgaagtcctcgcccagaggaggtctctggaagcagagatccaaacattgtggctgcaatctggtgaccaaaacactaagtactttcatgcttgtgcgagtactaggcaaaaaaacaatcagattttgtctcttaaaaatagaagtgggatttgggtggcttgggaaaatggcttaccaagtgtcgttgaagattattttaaagagttgttcacagcttcagagactgattgggatagggtcacggcttgtgtgcataatcgggtgtcgactgctatgaatgagtctcttactattccggttgacgctgaggaggttcggaaagcactctttcaaatgcatcctgataaatctcatggtcctgatggctttaatcctgggttttatcagaagttgtgggatatcgctagtaaggatatcattcagttagttcaacacttctttacttttggtgaatttcctgatcatttaaaagaaactaatattgtgcttatcccgaagaagtctaaacccgaaagcatgagtgatctaagaccaatttgtaatgtggcttataaaattgtttctaaggtgctggccaatcggttgaaagttgttcttcct

SEQ ID NO: 292441 - DNA, 556 bp, Cannabis indica
cattaatgtggcaatcaaatgtggcaaggagatatgggttctatggaacaacccaacgactgtctaatgttgccccctgaccttcacagtcacaccattatttgaacgcctataaatagggaaacagtcatttctgacagacgtaactggagcatacttttttggaaaattattcttgcaacgtggattctcccctttcatgcacacgtttgttttgttcaactccccacaaggtccattcatcatgtgttttacaaccgccttatgcaagtggatgttagagactttatctggaatatctactgatacgatctcatcgaaagattcaggagcatggactttcaaatccattttcaatataattaaaaagtgtgcatgtggaagacctcgtttttggtgctcaataacgtagacatatgtttagaccttgccaaatatccccattttaaataacttgtcctttaattcttctagttttgcatgaaatattcgtgcaaccaaatcaggtctattgtggctctcctcgtgttgacataattcatttgtgatttccttc

SEQ ID NO: 292442 - DNA, 585 bp, Cannabis indica
gggtctcaattccggtctgggtacatgaccgtgtccgggcccgagttcaagtctcagtttgggtctgaggctaggtctatgttcggttctaggtctgggtccgggtcctggtcacggtcgtagtcttgttctattctcctggctcggcgattcttgttgaggttttaattttgggtcccaagtctaggtctgggttaaggttttgtttttcttctaggttctggtcctagtctgagtcccagatcttgacaccgaccactggtctgttccaggccccgttacacaaatcgtgagtcaagatctggatcactgtcatgggtctcgatcttgttctggttcaggtcccatgtcccatttctaagtttgggtttaggatcgagactggggtgcggttctaggtcccgaccatggttctgtgtgcctagactagttccatgtttgggtctgagttcaggttcaagttcgagtcccgagggcaggtttgggttgggattcgggtccggctcccaattcttgtctaggtatgatttggagttcgggtcctgggccagttacggttctggatctaggtccaatttcagttat

SEQ ID NO: 292443 - DNA, 543 bp, Cannabis indica
atatatataaacacatattcaataataaaatacaaaatatatacatatatattatatatcaagtaaataaatatttaccttataaacgcaatccggcgacaaattgcgaccaaaaatccggccacctatagcacacacaatataatattaataaaatgaaaaaatcctaaaaaaaatttacaaaaacgaaataataccaatgtacattaataaaatgaacagaaatcatatttataccttaatgaacgttgagattgaacgatttctccgctaaaatcggtggtcggagttaaaccaccacctttttttaaaataggttcgggtacagtgtaaatgggtgaaaaaacaaaacttttttagtgtatgggattagatattgaaaatagaaacttttaagacaaaaatgaggtgaaatggtgaagaaatgagagagatatgggggtttttagaggtggttggcgagggttttcgtgggttttctctgctgtagaagtggctgggttatgctggagaagaagaagtgaggaagaagaagacgatgca

SEQ ID NO: 292444 - DNA, 844 bp, Cannabis indica
cctagttaggagaccttaatggggcaggataagacaggctgtcccataaatagtttgattctttagttatctatagccatttcatatgttttgaaatgcataaaacacacgttattttatagggaaatttacatggtatactatttttttacaaaaatactgttaggcgaaattttttactttttttattgtgtttttttataagtttcatactgcagtatactgtgttaagtttcattgatgttctactggtgttttttagttgttctactgttgttttgagttgttctgctttatattttactggtgttttataaaaacaaagtatttttgtaaaaaatttccgtgtgacagtatttttgtaaaaattcactcaaattccagtatttttgtaaatttttctattttataagcaccattctataacttatggtagttatttgatagcataatttgaccggtcataatataagcaacctaaaatacaagtctccgttattgtataagagcaccaaacaatgatctttgtagtaccttacattgataaaactacaatttgataaatgctagtaaaaatttctagcttattgccaaatgtaatagtattattaatttgttggaagaatagatatctagaagcatatattcatctataagatatttttcatgtataaaaataaaggtttagaataacttcacagaatcacaagatttccttatgatagaataatatgagagttgactcaataataattcatggtataacctaatttaagtttaccaatcaatgagattggtgttctttgccctgccttgagaggctgatgattcctccctcttagat

SEQ ID NO: 292445 - DNA, 91 bp, Cannabis indica
tttgggtcccaggtgctggtctaggtctggttctgggacagggtctgatctcgtactgggtttgagcccaggtttgtattcggatacctat

SEQ ID NO: 292446 - DNA, 530 bp, Cannabis indica
aagactcacctgggttcatctacaaaagacaacacacaagatgagtgttggacggagtatcaaacgaaaaacaagcaaatatgccgaccaggagtactcaacagattaaagaacgaccatgttcgaagaaaagtcaaaactcaagaagtcagaaagttttcttgagttagggcaaaaaagttcatgaaacttagaataagcaagatggaagacagacgcaatgcagttcaaaaataagctctacggctgaaagccaacataaggacttggaaaagaagagtcgcagaagtttctaaccctagggtttcctaagcattctttctacaacatagctacattcgaagcgtaaacatgcaaaggaaagcgtaaaggaaatcagaaacttactcaaagattcaaatgtccgagttcaagcaagccagcaatcgtctgtaggcacttcgacaactttgaagccagaaaactctctcttttcgctctggagtttacttaacaacgaagggtgataaaatgagtaatgtgccagtact

SEQ ID NO: 292447 - DNA, 526 bp, Cannabis indica
tccaaaaggtggattaggtctatgccgatcagaatagaggatagagagttgagtgctgatttaatagagatgaatttagtggattttgatattatactgggaatggatttcttgtccaagtactcagccagtattaattgtaagaggaagatggtaatcttccaaccagaaggtgaagaaccgtttattttgtcggatcggttcaaggatctcgaatctcggtaatttcagtactaacggctagagaattgtttacaagagggatgtctagggtttttggccatggtattggataccactcggtctaactctgttcggttagaacacatcaaggtggttcaggaatttctagatgttttctcgatgaattctgggtttacaacctcagagagaaattgattttgttattgacttggaacttggagcagaaccggtttctaaggccccttataaaatggcttcagtagaacttaaggaattgaaaattcaacttcagggaagaccgtcttttcaaagattgatctcc

SEQ ID NO: 292448 - DNA, 590 bp, Cannabis indica
ataactgaaattggacctagatccaaaaccgtaacctaaccaggaccccggcgccaaataagacctagacccgaattgggagccggacccggatccccacccaaacctggacacgggaacccgaacacgaactcagactcaaacatggaaccagactagggacaaagaactagggtcgggacctagaactacaccccagcctcgatcccgaacccaaactcagaaatgggacatgagacctaaaccagaaccacaaccagacctagacccgtgacagtgatccagatcttaacccgtgacagaccaagagtcggtgtctagatcttggactcagactaggaaaagaaaaagactaggaccgtgaccaggactcggacctagacctagaactgaacacagacctagcctcagacccaaactaagactagaactcgagcacggacacagtcgtgtaccaagaacggaactgagaccaggacctggacctaaatcagggacccgatcccaaacacagacttggacctagataaggacccggatacgaaccttgactcggaccaagaccctgactgggatcgaaatgctggacc

SEQ ID NO: 292449 - DNA, 305 bp, Cannabis indica
gttgcactttcaattggtatcatagcttgaaattttataaaaaattgtgttagatcctactcctgtatgattcttgatcgttgattcttgagtcaaccttaacgatcgattctgtcgtaactaacctcctctgagttctctctcaaagaactacaacgatgatggagaatgaaatcgttatacccaaacctatgagtcaatggaccattgttgaaatggaaagagcaaatttcaactcaaaggctcttcatgccttgtttaatgtcgtctccactaaccagttgaaggttatagccaattgtgaa

SEQ ID NO: 292450 - DNA, 1305 bp, Cannabis indica
tgagtaaaagtccttaagagaaaatgatgaggaaaaaagtaagctacgaaatacttaccacggtgagggagtggctgagatcctggacttggaagatggagttcaaggatgcacaagcagcgaaccgcttgggtgcacaccgggtaagctgagacgcaaactcgccggtcatctccgcggcaaagggagctagtgtgggcccgaggaaacgaccgaaccaatccgacagggggtccaagtttagatcccacggattctggtagttcgggtcgttaagggtattttgcatttcaactcgcaaaaccctcctcaaagcctccacgtcagcatgcccccgggagtattcatccatggcgtagttgtgtttagctatccggagttcctgtctcgcctcatctccaggaaccggagtcagcacaatgttgggaggggctgtgtgttcctccacctcgggagagatcccgccatcaagaccaggggccggagtatcagctctccgttgccgtttgggctcttcctgggcaaccatcttgcccttgcgcttgcgaattagagcaacttcttgctcttcttcactttcttcaacttcctcaggaagagcccgttgctcttctttaccttcttcaacttcctcagaaaagccccattgcttttcttgaccttctcccggaagcacctcctcctcatccactaagtcaatagtgtctggaggggcactggaagaagctttcaagggggtggccatctgggaggaagttaaaggaaggggagcatcaggagtgtgagccccggcaagttcggccaaaatggcatccatggaagtacctgctacaacaaaagaaaaaaggcaagtgttagaacatccatggaaaacaatcaaacacagtatagcaatcaagctagtcctaccctgactctctaattcggccctagcaaagttccgaatcttaacgctggcagcatcgtctccgagatagctgtccgaaggccggaaccagctggaagaaatgtaagccgaagggtctaagggaacgggctccggaggaccagaacccatccgggaccgacctaggaaatctcctaagttggaaaaataatattccttcatatggtctccccaccgggtcgagggcatcctaaacctatggagacgctcatcgaaccctacaggcctaagactggcatattcgccaacggaaggaacgtaatgtactgctaaaggagacttaccagagccggaagtgctggcgccaggccccaagggtcggctcctgaatcgaaggcttcaacctgggagccctcctc

SEQ ID NO: 292451 - DNA, 684 bp, Cannabis indica
cgctcatgacgaggcatcaacctcgttgcgtgaaagagaaaacgacaacactaaaaatacttagcgtatattatacgattacaaactgagtatagatagtgtgacgagacaagataacagaccgtgaggcgcttatctcgctagaaggtggtatgcatgcaaggaagatcatctcgacaccagaaagcatagttatcagagttaaaacaatattagtctcgagaagccaaatgacaagcaactgctcgctaccaaagttatcttggctccattctcagcgaggcatccctatgagataaagggcttaccgtatatttatgattacacgttcatctcggcccaataaaagcgggatattcacagctgtgtaaaaacctcatttatttgacttgttttgtaatcagatcccacgattttagggataatggttgtaaacatattttggttatctttgtaattaattgccactatgcaattataaatgggggcagacaaggtcaaaaaaggggacgaaaaaactcttatgaaagaggccttgaaaaaatactcagaaatctaaataagattgactcgtggagtatgcagaattttaactgcaaaaccacgtaaaaaaaccctgtgttcatgcattaattttctatagcttctatttttctgcgttgaattattatcgtgaggctcaaa

SEQ ID NO: 292452 - DNA, 440 bp, Cannabis indica
atcagacccgtcggaccccccatcggacccgtcggaccccccagcttgcaagcatcagaccccccatcagtcccgtcggaccccctatcggatcccctccatcggtccccatcgaacccgtcggacccaacccaatttttttcccaactcgcaagtcggttcggtcgagatggtgcggagtcgagatggtgcaactatgggtctccggtggtgttcggccggttttcgtggttcgtcgtgcgtggtggatcggcgtgcgtggttcggtcgagatgggtgtagatggatgggcgtgggtggtgaacaccgtgcgtgggtggttcgaggaggaagagagggatcgcatgggtgatgaacaccgtgtgtgggtggttccacgaggaagagatttgggtgggtgggtggtgattcggccggtatggtatgtgttggttttgggt

SEQ ID NO: 292453 - DNA, 746 bp, Cannabis indica
aattacttattagataatctggtacattggtacatttttcaactatagggtacacacatttaattctttttaaagttttgattggttaaaataagtaccctatgctatgagttaatttaacttggtcctacaatagcaattccctatacaaatataaatatatatatatggaagaggtttcaatggttacatttttattgtaaccattatggttacatttttttaagctttggattactattaaatggttgtgattaatttagaaattaaataaaaataaataataaataacttgtaacttgaaagtaacctaataatttatttccttataaaactttaattaagattaattatattttaaaattaaattaattataattattaattaattttttacaatttattactatataaggatcttttagcaatttatttttttgcacttaaattatttaaaattttatagcaaaactttttataatttaaaattatacacatataatttcataatttaaattttattatacttgtaatcttaattttaaattattacacttaattatttaatttttttatttaaatatttaaaaagtaaaaagtgaaataagttgaagaattttttagaaaaaaaatagactacacttgttatcgattgactagcttgaggcttcatacttagtttatctaattgtaacaaaataattaaatatcatttaaaaatttattataagaagagaattttaatt

SEQ ID NO: 292454 - DNA, 677 bp, Cannabis indica
gacactccggccccgagtcatgattccgggatccttcccgaggcagaggagtttacagtgcctcacggcattatgctgactccagtccccggagatgaagcgaggcaagagcttcggatagccaagtataattatgcccttgacgagtactcccaggggcacgctgaggtggaggccttgaggagggttttgcgagaggaggtgcaaaattctcttaacgaggagaactaccagaatccgtgggatctaaacctggaccccctgacggactggttcaaccgtttcctcgggcccaccttggctccttttgccgctgagatgaccggtgagtacgtctcccagctgactcggtgcgcgcctaagcggtacgctgcttgtgcatccttgaactccgtcttccaagttcaggacctcagccacgccttggccgcggtaagtactttgtgatttacttctttcctcattattttacttaaggccttcactcactcttgcttccttttccagattactgcagaggccggccgcctttccaaaaccataatcaatcacggctttgtcttgttcgaatttgggggcatagacgaggtcgtgaagatcctgcaggacttgtctgctgaaaggcgggcgttccaagaggaggctgagcgaaaggaggctcttgctaaggccaagtt

SEQ ID NO: 292455 - DNA, 677 bp, Cannabis indica
gtcgcctatgatacaccaaggcaaacttgacttgttttttagctcccttataaggtcccatgttctttttcgtaatgatctattcggctcaccatatattcccgtcaaccgccaatgcccttggtcactaccacaaacaactacatcaatataggacaacccatactctagcacctgaacatcctcctcttctctccacaacaacgcaacacccccacttctcccttgacagtccaccgccaaggctccttcaaaaccaatcgccacacgaattctttcaacaatatcttttttagcaagagtttcacacaaaaacaagtaactgggcttcttttggaccacaagatccttcaagaattgttgagcccacgggttcccaagcccatggcaattccaggaaataatactcatgatgatgggtgggcctgtacaccatggcccacctgtgaatcgttttttgacccattaacaccaacatccccaccaatagctttagtcgaccccccctccacgtgagcttcaaggcccacacgcccagtacgcctcctcttactttccattaacacaaccaaatcttcctcaatatttgcatcatcatcactttccataaattcagaatttccatctatagccgattgcataatctccctcccactttccttaattatttctttctt

SEQ ID NO: 292456 - DNA, 470 bp, Cannabis indica
tttatttagggcataaaactcaagaggatccgtggctgccgaatgaagataatccaagagtaacttcgaataatcctgctcttgttaatcaaaatgttaaaacacttatggaaactgatacgttggattgggatgttgacttggtgcatgatatgtttaatgaaagggatgctaatttaattcttagtatttcgttgtcttcaagtcatttatgtgatgtttggtattggagttgggagagctcgggccatttctcagtaaaatcagtttataagttcttacaattgagcaaagagttgggtgcacgggatgataattctgtcttttagaatactctttggaagctaagtgttcctccgaaagtgaaagacttgttatggcgtgctgctactaactgtctgcctacgaagtccagacttcgttctagacatgtgcctattgataccatctgccttgtgtgcaaagtaact

SEQ ID NO: 292457 - DNA, 551 bp, Cannabis indica
cactttattgaagatgaagatctcaagctctcattagtgtttatatgtttggctgtagtaatttttgtgactctgtacctttagtaattaggtgtgcttagacaaacgttttatggttttttggatatgaaggattggagtgggtggtgtccaaaataagtgatatatattggtcatagtttaccttgagagctgcagccaaacatggtctaaatagcgaagcaagcatcacctttctaatggtggttctttgcttcttaataggctagctatatttttcactccaagtgtgtccttaattttccatgtatttcgattcattttgcctttctttttttctttttcttttttgcatatatattagtgatgttcttgtttaccgcttgagaattttgagtaggtaggtcatggtttgcttgcattttcattgatgtgtgccttgtaatatcaaacatgtttgagtttattatgttttacaaagatagcaggttcagtcagactgtagtttctcagtcgagtttccatctcgaaattcagaaatttccagaaaa

SEQ ID NO: 292458 - DNA, 531 bp, Cannabis indica
aataaaatattttaaaaaataacaatacactatattcataactctgcagtaaaaatgcgcaaagtaacttaaaaaaaaaagaaaaaaaaaaatagacaagtacatatttattcatatgtaattatattctgaaatgttgttcaatactaattgtttttaatcattatctatataactacatataagtttaaaactttttttttttttatgaaattatataatcttaattttttttaaaaaaaaaatacacatattcttttacacctcattttaaactcagatacttaccctactcactacaatatagcacaagcgctagacaccaagcatcagcatgtaagcccacataggctaaaggcttcaacaatacaagtgaaaattcatgaaatatgagatttcataacaaagttagaaaaatatggcatttttaagtttgccactcttctatgacatttttttacattttaagatttttttatggtatttgatatgccatatttttataaacttattatccaatcccatatttta

SEQ ID NO: 292459 - DNA, 731 bp, Cannabis indica
ataccttgttcaagtcatggtgatccccactattctacactcaaggttgtgagtgagtgatcttttcttcttcatattatatatatgttatataatattgtgtaatctatatatcttcttctacatttcttatatataatatatgtagtgtacatatatattgtatattatgtattgtaacatttatttaatctctttgttaatccttgtattatattgtaatagtgttgtaatgtcttgattttcttccattgtaataaaatctctaacagtatgtttttagtttgtgattgaatctttgtgaatcttttcttatttatatactcgtgtagttgcatgtgaggctgaacatctctctctctgtttcctttttctcttttgcaggcatgttctaactctgttttggtggatttgtgttacaaaattctctcatacctttaaaggttaattctttgaattgtaaaacatatttacagtaactgattctcttgttttatttcaattattggtaaagatttcaaattttggctttaaggggttcatttatttattttgttagtttgctctgctatcatccaactaactttgtaattaattgggttgtaatttttattatatacatattcatggatgtcctgtagttatttctgttatcaagtaaaaatgaaaaaaagtgtttttcagatgacatgaaaccataaaatgataaaggacattaggatctctctaac

SEQ ID NO: 292460 - DNA, 639 bp, Cannabis indica
ttttttatataaatactttgcttgttcattatctatggctattactctatcaaagtcttcttctccagttgtaaaaaatcccccaaaaatgcctcagaaaaacttgtgtcgatcctcaatgggtaagaggaattttaaggaacacccccaagccttacctcaccagttccaagcaaacgcaaatttcttggtgaaacttcgaagaggaggatgtccaaacgtccttgtcctgtggttgaaattcagactcagattttgagttggacaatgaatttttacatatgtccaagcttgataaggtattttttagttgtttttgtgttgttttaggggttttcttgtaatttatcttacttactcctatatttctatgggatgtattactttcatatgtaatatgtcttttttcttctttttatcttgtctttgtgtgtttgttttgtttgaatgtagtattttgttgtttaacagttgtttttgtgttgtttattattgttttgtttatatgtagaggaagggtaaatcccagttaaaaatgttgaatcagatgatatttttgacaatgtcactgtaaaaaaggttgtagaggtgtgttgttttttaatttttgtgttaccggttatttatgcttcatttgtt

SEQ ID NO: 292461 - DNA, 530 bp, Cannabis indica
agtcaatcttattcaaatttttttattgtttttcaggagctgtctcgtatgagttctttcgtcgtctttttcatcttgtctgccactatttataattacatagtgggcaataaatctcaaaagttgactgtaatctttacaacaattattctcctcaaatcatgggatttgattacaaattatgctaagtaaatgtaatttttatttaaaatccacacagctgtgagtatcgtgcttttattgggccaagatgaacgcatatttaaagatatacggtaagccttatctcatggggatgcctcgctaggaatggagctgagttaactttgatggcgagctgtggctcgtcatatgacttctcgagattaatattgctttaattttgataactacattttctggtgtcgagatgatctttctcgcatgcatgccctcttccagcaagatagacgcctcgctgtctgtcatcttgattcatgaaactgtttatacttagtttgtataccttgtaatatatgctaagtgttttt

SEQ ID NO: 292462 - DNA, 502 bp, Cannabis indica
ctttgtaagctcggttaggggcattgaaattttgagaacccttccacgaacctacggtagtacccagctaaacccaagaagcttctgatctctgtcactgtcttcggtctcggccaatccctgacggattcgatcttcccgggatccaccttgatcccatctttgctcacaatgtgccctaggaaggacacctgagatagccagaactcacatttcttgaacgtcgtcgactaaagtaacgtacttagtttcgttccgtaacggaaccggttccggttcgacgtaaccgtaacctacttcgtaaggaaagtagttaacgttaacctactagtcgtcccttccctttccttcgtagttagttaggaaggtaacgtaaccgaacgggaaggtagttcggttccggtacgtcaggagtattggttagtccgaacgacataaccagaaactcgtaatgtccatacctagtgcggaaagccgtcttcggaatgtcctcctctcggat

SEQ ID NO: 292463 - DNA, 1032 bp, Cannabis indica
aaaaaccaagtgatctcacgtgcatgagctagcccggtattcagcttcagcagaagagcgagaaactgttgactgctttttagatttccaagagatgagagatctgccaagaaaaacacagtagccagaaacagaccttctagtgtcactgcaagaggcccaatcagcatctgaaaaaaatttgagatgaaagtctttgctagacatatcagtttcagcatgagcagatagattagtagaagatgctgagtaaaagaatagtccttgaccagaggtacccttgagatattgtaatattctgtgagcagcagtgaggtggggaacccttggattggatagaaattgacttaacttgtttacggcgaatgagatatcaggccgtgtaatagttaagtaaaggagtttaccaatgaggctgcgataggttttgggattgtctaatggttttccaacatcggatgagagccgaatgttggattccattggggtagagacagaagatgctcctaaaaaacctgtgtcagttaaaagttgaagtgtaaaagggcgttgggagacagatattccggaggaagaacgacctatctccaatcccaagaaaaaacgtaaaggacccaggtctttaagttgaaacacagagttaagttgctgtttaaaatcagaaacagcatcatcattgttagaggtaattacaatgtcatcaacatatattagaagggcaagaaaaagacctttatcatttttgatgaacaatgtgtgatctgaaagggactgggtgaagccagtggatagaaggtaattgctgagtttcgagtaccattgtctagaggcttgtttcaagccatagagacttttggttaacttacaaacagcatttgggggaatttgtcccttgggtttatacccttttggtagtgtcatatagacagtttcatttaaatcgccatgaagaaaggcattgtttatatcaagttggtacagagaccaattgttaatggccgcaatggcaagcataagttttaaggtattaaa

SEQ ID NO: 292464 - DNA, 611 bp, Cannabis indica
aaagactctggctgccacataagaacatccttgacctaaacactcacccggaggatgcctcttactaatgagacactccagtaggaataacgggtctcaacactaccctgacgaccgtcttgattccagttccctcgggacctcttgttctgccccgagccaccggatgcagtggatgatttcctcctctagtccatggccgaaccactacctcccctgctgaaacctgacgcaggaggggtaggagccccgccacattctggagtcctaactgattccaacatacatctaactgcgccctcagcttgcactgccttctccaccatcacagcataggtggtcttgtcgtcggtagtaaccataaggtcatacttgatcttcacattaagtccatcaagatatttttctttcttactgaaatcggttggcataaatcccgaggccaacctcgccaaccgatcgaactgagtagtatattctgtcatgctcatattctctcgctgggtcaggtgagcgaactctttcctcttgatgcttctgaccgcctcgttataatacttggcgttgaagagttcctggaacctttcccaggtcatggtggtgacgtcatg

SEQ ID NO: 292465 - DNA, 639 bp, Cannabis indica
atttttgctggtgtatcttctttatcaacaacctgataatagcatcagacaagttaaaaatgattaaaccagtagcagtttcaagaagttcttcttgtgtagatttagaagtattttctggccattctataggttcactaagaaccctaagtaatttgttatgagcaagaagagctctaatcttcttcctccaaatcctatagtcccccgatccatcaaacttgtcaacatctactctaatattactcatgtttaattgttataacaagataataaaagtaagaatgtaacaagacaaagtttaggttagagttttcctttttatcaacttcttgataatttcagattttgcttcttcaatgttttgatgatcttgcttgtttcttgacgttgtttccaggtgttgttgaatcttcttgcttccccgagctctgataccactgtaggaaattagctggcattccgaaaatgccccctacacccaacaccaacgttcaaaacagaggggcaaaatcgtcctttttcttggtgcggatcacaaagggaatattccctttaccaatcaggatatgccctttttaaaaaatctgatgcccttttgaaaagccagatttgcttttatttacacttctgccatta

SEQ ID NO: 292466 - DNA, 685 bp, Cannabis indica
gtatttaaatgtgctctgggggggtgtccgggcacaaggtgactgggagccttacttttcccattgggataagtgtcgtcccattaaaccctgtgagttgggacccactgggcgagaggtctcggtccgtcaagcctattgcggtgaaggcttccttgaagagtaggttcacggaacttccattgtcaattaagactctggccaccactttattcgcgatgggggtctctatgaccaatgggtcatgatgagggaagcgcactgtcttggcgtcttcttccgtgaacgtgatgggttggtccatcagccggggcctttgagctgggagttgagtaacctcccaaacctcattgtgtttcacggcccctgcgtatcgtttaagctccttgcgagtagttcctccgatatggggacctccggagatcatggctaccctcccattaggcctgggcggcagaccggggatgtgctgggcgtcgcccgtgggagcagctggagctaatgctcctgctgtactccccggtgttccctgaggcacacccacagtcgcctggcccggattaaggtggggcaacctatttttgatccactcgtagaggtggcctaaccggattaggttttcaatctcgtccttgagattcttgcattcattggtgctatgaccgatgtcgttgtggtactcgca

SEQ ID NO: 292467 - DNA, 760 bp, Cannabis indica
tagatgttgggttttcagggtacaaacttcatacccccaaaatagaagcccaaacttttccactttggcccactaggtttagcccctttgcttccacatcagccaactggtgtaatttgagtgactggaccgaatttgctgaggtggataagtgaaactcgtgtttccacgtcactgccaggatgctgaattcgcttcagcaatctgccccaatttcagcttgtgttccttttcttccttgcttccttttctttttcctatcaatttaattcttcctttttcaacaacaaacaagcacaattaattggaaaaacacacccaacaatatcaatatttacaagacttaaaagttagcttactaaatagaaaataacactaaaactaactaaaattaagcaaacaaacacattttcactactcttctcacaatacttttagtttaaaagcataaaaaataactctataccatagagttatcacaccccaaacttagagtattgctcgtcctcgagtaatgaaaaacaaaaagaactaaacaataaaaacagaaaatgacagcgacactaacatgcttgcagcagagaaaatattgctctttcacacttggtttagggacgaaaatgctctcagaattagatggaatggaagtgtaattggtggtagtgaatatgccttgaacttgtgtgtttcaacagaattttgcatgctatttatgtccttaatacttaccaagagtaattcaatcaataaagtgtgcaaa

SEQ ID NO: 292468 - DNA, 406 bp, Cannabis indica
ggaaacaaggcttgccacttttccaactttccttttcctacattgatagtttcctgttttgtcaaaaactgccaattcctttgttcaaccacataaatgtcaaatctaattatttaataattaaaattaattatcaaataatatattgtcatttatttattaataataaaactaattaaagtttcctaattaataaatatgcccttcaaattctctatttactgttttgcccttaataagtgataaattctcaaatagacacagtgtaacttgagaattataattgattaattaaaatcaattaaatgagtcttacaagtaatattatctcaactagtgaggggaccatgggtctatatatccgagcttccaataagcagatcaagaatttaccacttaaattcac

SEQ ID NO: 292469 - DNA, 581 bp, Cannabis indica
aacaaattctttttcatttttattttattttttggcttgtgcatattgttttgatttctttttaggatttatatttttttagttatattaattttggttctattatcctttttgttggttgttattatttcattcatttgaatttgtttatgttttagttattatgctcttctttttttttcctggtgtttatattaggttttttttccatgtctttatgagattgcctttttttgtacatttgttatgtatgactatttttatagttgttttgtagtttttttttcacagttttaaaactataattttttagtacatttattaatgtttattcttgctcatgttctgctttagattcttcacaaattttctacttatgttctctgtggaatccacatatctaacatcaagaactaaatataataactaacttagaacttgatcttgaacgagctaaattgggctatatatttgtgatggggtttactctttttattattattatttttatgtctttttatgtttttttatgttttgttgtttttattaagtttgttttcattctatgtttatgtttatgt

SEQ ID NO: 292470 - DNA, 663 bp, Cannabis indica
aggaggagcagagtggcggcccagattcattccaccaacactttctttcttccttccttaattttcttttatgttaaattctgttttaggaatggttatggatttgaacatgaactaaattcccaattagggaagatgatgaatgttgtttaaagtattccttagttaatgttaattgccattcctttcatcttgattggtgaaattatccttatttgtgtttaattccatgtttaagcttgatcaccttttacatgttctatgatctcaattcaaaatctgaaaagtgagaattgagaatgctaaaattagataatctaggttttatgtgaaacgacagtatttgcgtgacctaagtgacaattagattattgcttaatgatgatcatatgtgattctaattaagagattaattagagaacatgtgattgagaacctaaaagaccttaaaagagttaggttaaattgtataatctgtcatttacatcaaggaaaaggatagcaattgggcattaacaattgggtaaacaaatcaacaggattctcttccctattttctcatcttgattaatctttatctgtgtgcttaagtttcttagaattttattctgtttttaatcataaaaactattggtttgcaaaatagaatcataaatttagtct

SEQ ID NO: 292471 - DNA, 644 bp, Cannabis indica
caaaagagttacattcagaaactgatagacaagttctgtatgaatgaggctaaatctgttagcactcctctggctcagcatttcaaactgactcaaaatcagtcaccaaaaacagaggaggacaagatgtacatggattccatgccctatgcatcttgtgttggaagtttgatgtactgcatggtgtgcactagacctgatctagcctatgcactcagcatggttagtagattcatagcagaccctggaaaggaacattggtctgctgtgaaatggatactcagatacctaaaagggtctatggacattggtcttgtctatgataacaagtttcaagaaggaattgaagtaaatggatatgttgactctgattatgcaggtagtatagacacaagaaggtctataactggttatgctttcactgttctaggtggatgcatcagttggaaatcgaatttgcaaaaggttgtggccttgtcttcaactgaagcagaatacatggctgctactgaagccattaaggaagctatttggctcaaaggattcacacatgaactggggttcaaatctgaaagcataacagtgcactgtgacaaccaaagtgcactgcatttgatgaaaaaccccatgttccatgaaagatc

SEQ ID NO: 292472 - DNA, 917 bp, Cannabis indica
agttacaattttgtcacttttttcaaccacttattcttctttcaataataccatattttccaattcaatcatataaataccaaaactatttatttaataattataattaattatcaaataaaattttcatttatataatttattaattagaccatgcaaagccttttaattaacaaattgaccccgaaacctcttttcttcacagttaagcccttacttagtgaaaattcataaataagacatagtttaattttagaattataattgattaattaactgagtctacaagcagtattatctcaattagtgaggggaccatgggcctatataaccgagctttcaataagtagatctaaaatttaccaagtaaattctctaagttattaattccgctttgcgccactatagatttggaattgaatagcactctcaattatatagaaagctctatatgtaccatgatatagatacgtcatgattattcattgttacaatcctaatagtcaaagatcgtctatagattatctactttgaatagggacaaagttaccgttctaccattcaatgtattttatcctcaatacacttagctacctataaatgatactacagtaaactaatataattactaaaatgagacctaaatcatttatctctattcagccaagctcgaaggaaatcatcgcttcacttctaaatacttatagaagctatagattccatatctataatcagcgctcccactcaatttaactaccatgttcccaagatgtaaatatccgccaaaatcattggttagcttcaacaaacaacttgaagaacataaataatacagctaagttgaacctaaccatatcaggattaagatccatagacctaagatcaaaccattaatattgacttaggaagatataacg

SEQ ID NO: 292473 - DNA, 484 bp, Cannabis indica
gatttaggggctccatggagacgaactatctccttcacatacaattcagcgtactgatccactgaatatgtaactttcactggtagaaagtagagctgattttgtgtgaatctgtccacgatgacccatactgaatcatacattctcgtagttctaggtattccagttacaaaatccattgcaatgtcctcccatttccactcaggaaggactaaagattgcagtaatcctgccggcctttggtgttcagctttaattgctggcaggttaaacacttgaacacataatccaccacttttcgtttcatctcataccaccaaaaataggattttaaattctgatacattttggtggttcctggatgcaatgaataaggtgtggtatgagcttcattaagtatctctttcttaagcccatcaacattaggaacacaaactcgagctttgcataacaacattccactgttcgagactaaaagtcttta

SEQ ID NO: 292474 - DNA, 869 bp, Cannabis indica
tttttttaagaagaaaaaaaaaccatatttttagtttgattggttagataattagttgcatttactttttatgccatgtttatcataaccttaataatttttccaatatttttgaaaatagccctgaaaaaaagaggaaattacacttactatgggattttaaaaattcttatgataaatatgacacatttaagtttgatcaatttatatggtatttttttatttttaggtctttttatggtatttgatatgccatatatatgtaattaggttttcaaatcccatatttaatgtttttatttgtttaggaagttttatttgtcattgatgccgaaaaagtcactggagtgctgccggtgctggaaaagtcgccggagtagcggtcggtgccagaaaagtcgtcggagttgttgtcggcgccggaaaattcgtcgaaattggaattgtcgccggaaaaatcactgaaaaaatacaccaagaaaccggtttcttggtttctattctgacactagcagctactccggcgacttttcaggcaccgacagcaaacttcgaaaaagtcatcagaattggcatagtctccggaaaaattacaaagaaactggtttctggtttcttaatgaagaaaccagttttttggtaatttttccagtgatttctctgacgacaatgacaattctgacaacttttctggcgttggtagcaactctgacgactaatacaccgacagctgttgcgatatttagcacacgcaagtgtacgtatcgtttcaagtagtagactcactaagagtgaggtcgatcccacagggaattggattaagtaccactaaattatacttatgattctattcggtaaatcaaaagtaa

SEQ ID NO: 292475 - DNA, 549 bp, Cannabis indica
atgatggttacaataaaaatgtaaccattgaaaccttttccctttcaattatatagattaagtaatcacttaaaggcattttatctttttgaagaatgtagtctttactatattggtagttgaaaaaaatcactttgtggtagctataaaaaatagaagagtaatagaaagaattataattttatacataagtgaaaaaatctaaaatggcatatcttacaaagtaaattaatattattagagaaaaaaataaatatcttaaaagaaaaaagataacaaatagattttaataaaattaaataaataaaactaaattaaaacgtaccatatttataattttagtttgactttgtcaaactagatctccatgtaaaatgaattatataacccaacaaaagaagaaaaaaaaagcccaaatagcatatataaccttaatcacatctaatatatctagggggcaatggcctctatatgccatattgtacgtccgcccgtgcgtgcaatgcacgtataatagttttttttttttaattaggttcaattaggtga

SEQ ID NO: 292476 - DNA, 603 bp, Cannabis indica
aaaaaaattaaagaatgtaatatataatttaaaatgtaataaagtggtattaaatttttttaaaaagttagtaattttaatttaaataaaaaatgattaaaaaataataaaagtgaaaaatgtaatatataatttaaaatataataaagtgatattataaatttgaaaaagttagtaattttaatttaataataaattattaaaaaaataataaaagtgaaaaatgtaatatataatttaaaatataataaagtgatattataaattttaagaagtttgtaattttaatttaaataatataggattaaacaaataataaaagtgaaaaatgtaatatataatttaaaatataataaagtgatattataaatttaaaaaagtttgtaattttaatttaaataataaaagtgaaaatgtaataaagtgatgttataataagtataaatgagcataagatattgtaaagtatatgataagatattgtaaaatagcataaaattaaatttgtattatcttttcttgatctctttggttatacaccaaagataggatttaacaagggaaatatcactttttggccttaataatacaacacatatcaaa

SEQ ID NO: 292477 - DNA, 526 bp, Cannabis indica
tagggccgaattaggaagtccgggtaggagtagcttatttgccatatcttgtgtaagtggtttcccacggatgtctaacacttgcctatttttgttaaacaggtatctccatggacgccatcttggaccagcttgccggagttcacactcccgaggctcctccggcctttacttcttccccaatagcccctgccctaaaggtctcttccagcgctccccccgacactattgatttagtggatgacgaggaggtgctaccgggagaaggtcaagaaaagcaatggggcttttctgaggaagtcgcagagggtgcgggagagctccgggctcttcctgaggaagctgaagaaggtgaagaagagcctgaaattgctctgattcgcaagcgcaagggcaagatggttgcccaggacgagcccaagcgacctcggagagctgacactcctgcccatggtcttgacggtggggtctcccccatggaagaacatcctgctcctcccaacattgtgctgactccagttcctag

SEQ ID NO: 292478 - DNA, 516 bp, Cannabis indica
ttttagaaaaaaaaaacttaaattaaaataaaaatatataatattaaattaaaatttctaataataaacaaataaaaatgaatgattcacagaataaaaaaataaaaaataataaattataaaataaaataaaataatatatcttaattaatcaagtatatatatatatcataaatatataataaaataatttattatattttttatttaataaataattaaaatagtaaaataaaaatacttaaataatataaaattgtttatgctaaacactaatttaatgtaaatatttttttttaaatatttatataaattttgtagtaatttaaaaataatataaattttattgttatattgtttctcttagaatcaatttaagtaactttgtttaattaataatattttaaattttgaaaacttatgtatataatttaaaattatacattttcactaattagtaattttaatgaatacatttttgattaaaaaaaattataaataaatagtgtgataatt

SEQ ID NO: 292479 - DNA, 662 bp, Cannabis indica
tttactggttacgagaagtggacataccacggggaagcagaatctagtgccactaatgcaatgaacgaccatgatgccgctgatgatgatcctgaaattgacgagatgattccaatagtggatgacttccttcagccgtcattcgaaatggatgataatcctgatgcaaatcaatggcgcgacgaattatttgaagaaattgaggccgagttgtatcctggttgtgattggatatcttctcttaactttttggcaaagttattgcatttgaaagttaggggaaaaattcctaacaacatatttgatgaattactgaagttattaaaatttgcttttccaaaggaaaataaaattccatcaaactattatgatgccaagaaaagattgaaaaaattaggattggggtatgagtcaattcatgtgtgcaagcacaattgctgtttattttacaatgaacatgcaaatgaagattcatgtccagtctgtggcactagtagatggataacttcagaaaatttaggagcaaaaaaggtgcctcataaggtgatgcgttattttccgttaattccgcgactgaaaagactgtatacttcaaggcatacggcaaaatacatggtatggcaccacagtggtaaatcaaaagatgagggtgtgatgcgaca

SEQ ID NO: 292480 - DNA, 514 bp, Cannabis indica
cgtgtgatcaatgctgaatgcaaggatcgtgggattgaggttgagtacactgatagtgggatcgtgtgtatgtcatatccacgtaagttgatccttgagttatttggattgagttgatgactcatgatgcgaaagctgaattcgctaatagtattaagtgctctgaacggatggctggatatctgatcctggatatgcgagcgaggcatcctactcggtctattcttcccaagaagatgctccaagtggaatccacgtgtcaccattctcgtgatgccacgtcagagtacaaaatttgggataacacaaggggacccggatattggtccttcgaccgactcaagttagaatttatgggcaatattataattgctattttgatttatattggtatgaaatattgtactctcaatgggggacatcaaaagatctaaatggattgtgtctatatgttatttagtggtagttcatctgacagggtggacagatttgaaaaataacaatatgagttaaa

SEQ ID NO: 292481 - DNA, 524 bp, Cannabis indica
gagttgagtttgggtttgagttcgggtcggcgttcgagtcctggtctgagttttggttcggaacccgatctgagtcaggattcagttcagggtataagtccttagttcttatccaggactgggttcgagtttgggtccaggtccgggtctagcttttggtctgattctaggtgtgggtttgagttcgggtcccaatctgtgtcagggtttgtgtccaggtatggaccacgatctgggtctaggttcgggtccaggtccaacttggggtcccgagtgcgggtacaagtttgggtctgggtcaggatctcagtccagatccaggtcaagcattttgatcccactcttggtcttggtccgagtacaggttcttatttggatccctatctaggtgcaagtttgtgttcgggatcgggtccaagatttaggtccaggaccgggcctcagttctggtctgggtctgaggctaagtctgtgttcggttctacatctgggtctgggtcttcgtcacggtcctagtcttgttc

SEQ ID NO: 292482 - DNA, 509 bp, Cannabis indica
acacacaagatgagtgttggacggagtatcaaacgaaaaacaggcaaatatgccgaccaggagtacccaacagattaaagaacgaccatgttcaaagaaaagtctaaactcaagaagtcagaaagtttttcttgagttagggcaaagaagttcatgaagcttggaaaaagcaaaatggaaaacagacgcaatgcagttctaaaataagccttatggcagaaagctaacacgaggacatggaaaagaagagtcacagaagtttcaaaccctagggtttcctaaagtgttctttctacaacgaagttacattcaaagcgtaagcatgcaaaggaaaagcataaagaggatcagaaacttactcaaagattcgaatgtccgggttcaagcaagccagcaatcgtctgtaggcactttggcaactctgaagccagaaaattttctcttttcgctctgaaagtttacttaacaacgaagggtgatgaaatgaggtaatgtgccagtactccaag

SEQ ID NO: 292483 - DNA, 677 bp, Cannabis indica
tgaaagaacatggtgttcacttttcagcattcctgtccccatgatcatgagcaaaaatggtcgtgcggaaacgcaaacatagacacataaatgaaacgggaatgaccctattagctcaatcaggtcttgatttatcttattggtggcatgcctttcaacatgctacctatgtcatcaatcggctaccaacaccagttttggatgatgtcagtccctatcaatgtttgttttacaaaaagcctgactatgcctttctaaggacttttggatgcacatgcttcccttacttgaggccttatcatacacacaagatgactgtcaaatctgagaagtgcattttcattgggtactctctacaacacaaaggatatctttgtgagaattcctctggccgagtgtatatcacacgcaatgtggtgttcaatgagactgagtttcctgctctttcatcacctaagacaaaccaggtatcatcacttgcacctactacctttccttgcactatttttcggacaactcctctatttggccatactaatacactgtcatttggtgcccctgaggtaattcctcctcgcacttcaggagttggtgccagcagctctcactctccacctgtccacactgcagctgcagttctcaatactgcctcagcaaatattttgcccactgttgat

SEQ ID NO: 292484 - DNA, 842 bp, Cannabis indica
accagatttatccccaactttaaaagtttttgggtgtgcagcatatgcacaccaaggagatggaaagttagagcctagagttctaaagtgtgtatttttgggatattcagaaggaacaaaagggtatagactttgggtaagagaaaaaggttttaaaactattaatagtagagatgcaatatttgatgaaaatatttttccatgcattgctactaacccaaatgttttaggttcttgccctagtactaaccatgcaggtaactcaatcaacgttgatctaagacctactactccaagtgatgaacaaggagagaacactgttcaggtggaacaaggagaagacactgttcaggtggaacagggagaagacactgttcaggtggaacagggagaaaacactgttcaggtggaacagggagaagacactgttcaggtggaacaaggagacattgttcaagtggaacatggagaaaatactgttcaggtggaacagggagagaagatcgttcatgtggaacaaggaaacctaagggaaagtcaagcagaggagttggaagactaccagttgactagagacaaagttaaaagagcacctagacagaatcctaagtatagcttcaacatttggaatgaagacattgcctatgcactgttgagtgctttgcaaggacagaagaataaaccagaaagttgtggagaagctatgaagagcaaaaatgctaagaagtggaactgtgctatggatgaagagacagactctttgagtaaagagaagacttgggtttgtgttccaaaacccaagggaaagagtgtgtgaaacatatgtggccttttagacataa

SEQ ID NO: 292485 - DNA, 580 bp, Cannabis indica
cctcgcagaatgatctggatgaattgaatctagttctggtagagatgctgagcgagccaagtatgtgtgaaactgaagacgtcgagatgatagatagctctcccacatggatgacacctattaaattatttactcgagtgacaacttccaaatgacaaaagcgaggtgcaaaaactattttattcagtgcctcgctacaccatgatcgaaggcaaactatatagaagaggatattcaatgcccctacttcggtgtgttcttcatgcagaagcaaataaaatcatcagagaaattcatgaaggcttctgtggggatcatgcgagctggcaatgtttatttaaaaagatcattagacaaggatattactggccaacgatcaataaggacacacacgagtttgtaaagaaatttgataagtgtcagaggttttcacatatacctcgcgtacctccaacaaaacttagaatgatgacctcgccctacccactttgctatatgggagatcgacctaactggggcattacccactgggcgaggaggagctaagtatgcaggtagtaactgttagaatttattttac

SEQ ID NO: 292486 - DNA, 55 bp, Cannabis indica
tgggagcgctaacataaacatggaatctatagcttctatttggcgaatagtaagt

SEQ ID NO: 292487 - DNA, 771 bp, Cannabis indica
aaattcgaaattaccagaaagttattcaactgaagaaaattctacactgtgttatctctatttcattcttgaatagaatgagagatagatcttatgtttattcacatgcacttaataagcagtaaggaattcagtatcccttgatgagtaatgcatatagtaaataatgtttcataatgttttatgaacacaaaggaagtaatggtggataaagcagtagcttaccacagacttacagttccaaaaatttgggttgagtcacatatactacacttgatttgaagatcaaagaaataaactaattgaaatgcacaacttgttttatttagtgcaagtgggagtttgatgggattttatgccctaaataaaatccatttcaatataatctcatttgttatcaataaaagattagaagtcatttatgtttacatgtagttttcatgtttatggtttaatatatacaaaaatctgttaagtccagaatatatagtcatttacaattacagtgatgtcaacacagttgaatgtgattttgattatatgcttcaaaagaaaaagtccttgtttcatcagtgcattggatttacactgatgtgataatcagcaatgaagtgtacttacactttgcttaagtgttatgttctttccagaaaattggcaaagtatactactttcgaatgtatgtagtatacattggactgggaccgatattgatcttggtaaagttattataatcttaccattgtatctttctaagtcaatatcactagt

SEQ ID NO: 292488 - DNA, 527 bp, Cannabis indica
aaaaacccgacccgaaactcggcacacccgcacacccgaacaccgagtttggtagtgcatttccaagacccgaagcccgaaaactcgaacccaaaaccccgaaaacccgactcgtgtgcacccgtatattcagcctcaatcccacgatccttgcattcaacattgatcccacgatctttctggttatacgcattgtaacgagagaggaaattcttcctcctcaaacttcctagccctataaatagtgatgcatattcactgggcaggggatcggtcgaaaagcagctaagctaagactatactattatctaagaagtatatattccgagatactgttgtaagagctataagaaaaagaatctttctccttgatcttaagtcaatacaaataacaaggattaggctattaccgaactgcttggggctgaacctctataaaattcctgtgtcttattattgctttatcatatatttgttactacatatcatttatcgcttataaaataggctcattgtcgttggctaaa

SEQ ID NO: 292489 - DNA, 590 bp, Cannabis indica
gttgaacatgttaattcttgagatatatcatttggcatttttttgattgaaataaaataaatctcatttgtagcattattcgtaatatcgtggtgatctgattgttttgcttggtcaatctctcattttttttatatctaatatccatatattttaggtcatgttgtgagatggtttgactttcttctttaatgttgtaatagatactttagaatttctttgcaatgaggagtctatgttgcatttttcgtcgccattcaaggggagctctttgctaaacttcttattttcttaggggagaatttggttttggacaatattattgacatggattatgctcaatgaagggggagaaatacttatcctttgtgcttttctgtttgtttagactctgttatattttgatggttgctttgttttgcactggtattattgtcattgaccataatttgtcaagggggagattgtaagaaccattattttctgtagtgacaaattatgtccagttgcattccagttgcgtctgggactcgtagtgttttgtctggggttcgtactgttagtgttagtccacatcagcaaagatattt

SEQ ID NO: 292490 - DNA, 778 bp, Cannabis indica
ggaatgagtttttctgctgtggtgaaataacgccaattttttttatggtatataactttcaatattatttaatattaatttctttctaatttctatacctactttctttcataaacgtgcgaaaccccccgttattgagggggacgacaaagccagtattgattcttaagggagacaggtatagttataatttcaagacaactaaacaattctttattagtggtataataatctaagatttttaagtgcaacaacagatggataaatagtcctttttactactattattttgatgataaggctatttaagcttattataatggtgttttgctgctacttggttccaatacttacagagattttaactccacggtgtgcattttagtaagtttagttagtttttatcgccaatataaaaaatgtaaatatttatttatttaattattatatgaatttatgtaattttgcctccaaaccaataacaaataataggacatttgtttgtcatacctataatttaggtggtaaatattggctgcaaatattccatttccatctaaccaaattaagtaaggccagctttaagagggagggaggccgaggtaggcggtgcagccgtggcaatgacatgaaaaatgagtaaagtccaataacaaataataaaaaggtgttggcttggcttaattttgaccacaataactttatcctttaccatcaccaacgcccaatcatatcctcaatgagtctgacaaagtggagagaagcgagagagatcctc

SEQ ID NO: 292491 - DNA, 605 bp, Cannabis indica
acatgagagattctatagaaattcaagatggcctagcgaacattgacgctctcagaaaaaaatggaattaaatggaatatgaaattgcttgccgtaactttatatgctgcccctttaacgtttttgtcattggataacattaatatttcccaaaagtcacctaatcaacaatttatacaagtatatcccacctaaactttgaacttctctccaactaccttaaactttttttttattcatttcagctccataagttggattagtgcactcctctccactaatgtagtctaaacttatccccttgatcaataggactttattaggcttgtaatgttaggcttgggttagggtatggtaaaggatgtattttagctagctcaacacctaaccacttcacttgtcaaaaaccgagcctcttccataaattttttttttcttttgactcacttccctaattcattatactcacaagtacttgatattaaaattaacttctcttgctatgtttatttctttttttttttttttacttcaaatgggtggaacaccccaaacttagttgcaagaatatatatacatatatacttattattattttttttttt

SEQ ID NO: 292492 - DNA, 679 bp, Cannabis indica
cccatcaggggaaatcgcgaccggagggacatcctaaaaaattctgtaagtaccacaaggacattggtcatactactcttgaatgttgggtcttgcaggatgaaatagaggaactgatccgaagagggaagttcgacaagtataaaagaagcgaggaaggtcatccccaagcggatggcaaaggagaaacccagaacgcgagtggctccagaacacctcgcaatatcttaactataatcggaggaccacacatcgcaggcgactctcgcaaatcgcaagaaaggtatgccagagaagccaaggagaggccgttaaccaatgtgaacaatcttggtgaacggccagagaagctctttaagaaagaatgcgacgacatcatctttatggagagcgacgcgagatgggtccatcacccgcactctgatgcactggtgatagtcgccaatattggtggagacaatgtccatcgtatactggttgacaatgggagttcagtgaatttgctgaatttccaagccttcaagcaaatggggttgcaagagaaggatttgcgacctatgacatcaagcatctatggcttttcgggagatgtcatagcaattaaaggaatgatcaagctcccaatcactttgggaactgccccagtaacagccaagtcgatggccgacttcgcagtaat

SEQ ID NO: 292493 - DNA, 432 bp, Cannabis indica
tagattccatatctataatcagcgctcccactcaatttaactaccatgttcctaagatataaatatctgtcagaaccaacttgaagatcataaataatataactaagttgaacctaaccatatcaggattaagatcaataaacctaagatcaaccattaatatttacttagaaagatattgcagtaagtttatagtatcttatcctagatcaatatcggtcctttccaatgtgtactccatacatttgatactggtaaactttgccaatatattggaaaagacataacacttatccaaggtgtaagtataccttatcgccaattatcatgtgttaggttataattagcctatgtttcgggtctttaaagttagcattatctcatctattggtgtcttttggagcagttttacgcttgattttcattatttca

SEQ ID NO: 292494 - DNA, 516 bp, Cannabis indica
caagaatttcagatttcatgctatacaaaaacatgcttcaaactcatcaaaatcttaaacccaagagcatgaacttaacccaactcaaacctattacaaatcagcagcatagcaaccttttaaacatgaaattccaatctagaaataccatgaaatcactgcccaagctcaaccacaaaacacacaacaatagaagctcaatttcacaagattagcatacaaactaacaagattaagcaatcttttcaccacacatgcaagacccaaaaatcaaaataatctaagcatgtttctaccacaatattcagcaaaggaaacataaattaaaaccaagaaaactacctcaaacacttgcacaataagcctcaagcctcccaacacctttccttcaaccaacaaacttcaaatcaaccagttcttcacaaaattaagcttgaaaatggaaaggggtgaaagagagggagagggttcggtgagagagagagaataccagaaaataaaattcattttctctca

SEQ ID NO: 292495 - DNA, 481 bp, Cannabis indica
tgtgagataagaaccataccatcaacaactccctggtgagcaccgccctgtacatcatcaaccccaagaccgtgggcttgagcggatgactttgcttttgcctttccctttccctgactaggatggcttgtacttgcaccagaccctccaccttgattgtaccctctttgactcccacaaggagcaggagtttggaaaccttgtgagtaccccatgttgaaccatgaaccttgtggcttaaaatgatgttgatattgagactgctggcccgattggggtgtgaaaccataggatgaagactgagactagtttgtcctcggctgtccatgaaaaggagtagactctacatagctccgtatgggtcctccgtgagatgcttgaaatctttgttgtcgttgtgggcaatatttcttcttatgaccttgttgaccacaactgaaacatccgtatggtccactacgagtctttccagatgaaccac

SEQ ID NO: 292496 - DNA, 829 bp, Cannabis indica
tttggatgcaaatgttacattttaaacaccaaggacaaccttggaaaatttgatgctaaatccgatgttggaatttttatagggtattcaacacatagtaaagcttatagaatttataacaaaagaactaatgttgttgaagaatctattcatgttgcttttgatgagactaacccgcctacaagcaaaaatttagatgatgatgttgtaggtttgggagatgaggttcaaaatctcgaaattggagagacttccaatgctccttcacaaactcccaaagaggaaccacccgtggaaaaggtaaatgaaagccaaggtatgaactctaaccttccacatgagtggaaattcaaaagtgctcatcctatagaccaaattctaggtgatccttctcaaggtgtcactactagaaactcccttagaaacttgtgtaatttcattgcttttatttctcaaattgaaccaaagaattttaaagaggccgaagttgatgaattttggcttctagctatgcaagaagaaataaatcaatttataagaaataatgtttgggagttagttccaagaccgtcacatcaatcggtgattggaacaaaatgggtctatagaaataaggtagatgagcatggggtcattgtgcgtaacaaggctagattagtggcccaaggttacaatcaagaagaaggaattgattatgaggaaacctttgccccggtagcaagacttgagtccattagaatgttgttagcttttgcatgccacaagaattttatcttgtatcaaatggatgtaaaaagcgcattcttaaatgggtacattatggaagagg

SEQ ID NO: 292497 - DNA, 517 bp, Cannabis indica
aactatgatttttataactaaaactttttagctatagattttttaataataacataggtttattgatattattttagtcacaatttttttttacttttagtaatatgataagcctaagaatagagtttgaaaccttttttcttatcttggtttcaaacatttcaagtctagaaaagttgaaataagaaaccatttaaaatcaaaaatctaaaaactcaatcgtcactaccaaaaaaaaaggatttttttatttttacatttcaaaagcagttttttaacatttgcataaatccaaatagcaaccaacgaagcaacttaaatcgcaatcaaaatccacatagcaacttacataaaaaccaccggagcaacaactagagcaacccaaaccgtaaatttgaagaaaaaaaaaggttaaaaaaatggtacataggaaaaaaaaaacctaaccctttagtgatagcacaaaatttttgtgactcgatatgacttttagttataataaaaatttacttatcac

SEQ ID NO: 292498 - DNA, 648 bp, Cannabis indica
aggttacttgggtgtcctctccatgtgtttaccttctagtatatatatataaatacacatatatattacaaaggaggtgagactattagaaaaaatataataaaaattaagaagaattgtgtcatttttattttattttgtaatagataatagtaagagaattgagaagaatatagtaagagaatatatgagtattttttttttttcaaaagaaaattacctgatattttttttttcttgcaactataacaattgaatagaatttactttctctcttgtgttgaattttcatttgtgacgataatcttgcaaaatatcatataaaaacaacactaacatgacaataattttcaattacagtgatatatattacttgaatatttttgaatagctcaaaaagaaaaaaaaatagaagaaactaaaatcttaagaagacataaaaagaatacatgaatattttcaattacagtgatatatattacttgaatatttttgaatagctcaaaaaaaaaaaaaaaatagaagaaactaaaatcttaagaagacataaaaagaatacatgaaagtagatttctatatgattacaatatcaaactcatataacatttggactttggagcttctaaatatatataagtacataaattt

SEQ ID NO: 292499 - DNA, 701 bp, Cannabis indica
aataggataaacaatattgttttaatatatggtcgaataatatgccaacatgatagcttgaggtcactttattaaggagattttggcttaaatatctaatctatataattctttatagaagcatggtaaatactattttggactctgtcttttgtaaaagttattaattggattctttatttttttaaaatgataaaatagaccctatattttccaatatggtaaaaataggaccctaactcaattttcaataattttatttttttaatataaccaatttaagacaattcttaccacgaacatatacagaaaaagtaatcagttttgtcataacatctcttcatcagattattattaagttttattttgacaaaaaattagttcagagtcctatttgtaaaattttagaaaatacagggtccattttatcatttaacaaaatacagagtccaattaataacttttacaaaaatagtatttactctagaagcattattataattattattattatttggatgagaagaatatattttttttaagagaaattccaatcaaattatattctaatttttatacatttaccttcttatttatttattattattatttgtagatgttgtaaaactctcattttttactctacagatgtatatttttaatagtctaaattatattaattattaaaaatattataaaaa

SEQ ID NO: 292500 - DNA, 704 bp, Cannabis indica
ttaagtaattataaagttttactctttaaaattacttaaggggcatttatgtatgattaaccgaaattcatctgaaaatacatagtataatgcaaacccaccatttcaattttttttttttaaaaaaattaaaggttatcgactaaacctctttgacgaaaggggagtcgaactgttataaccacctgaccaaacctttttgacgagagaggggttgaattgttataacatcttgatcaatccttttgacgaagaagggatcaaacaactataattttttatttaaaacctatctgacgggaaagaaaaatcaaaagttttaactcgcgtataaaactgaatactaacggttatcgcgagctaagaaagtactaaacgaggcatcacgacaccttgataaaagtacttgaacctagaaaatggatagataatttaactattcatacgagcaaattaaaaatatacaaagtggtaaaattattaaagtatatttaagtttgcttaaggcagatcataactgctatagcgaggcagaattgacaactgctcgaaaatcaaaaagtttggtagatcactaactacttaaataggaagattgcgagcaatggaaaaatccaaaagtactgtacatttgatcgaaatatagttgtttacattgtgaataaaaacgcaagcaaacacaattgtattaagttcgaatgaaa

SEQ ID NO: 292501 - DNA, 705 bp, Cannabis indica
taacagaaaaagtaatgacaattaaaaaaacacctcaataagaatgtccagcttcttgttcatctcagcaacagatttcataagaatcccttgctggctgacaacaacagataaacactttttaaattcctcaaactcaactcgggagacattctcatgagcagatgatgaagaagaacccatcaagccaggttgaccagcaggcttggaaccacctttaattttgaatttcacagcctcgggagtagtctcaccagagaaaaaatcagtgaggctcaaactcaatctctcaacggaagttggagtgatgtttcttaattttaactgaaacaacaaaaaccaacaaaaaacaatatgcacatgaaactgaaattataaaataacaacaacaataaaaacataaagtataaataatgtacacaaaaacaacattaaaacaacagtggaaatagtgtaaaaaacaacaggattacctctttcaaagaccgatcgaaaatgagggtgttcatgacatccattttcaccataccctccttgtccttgggtaatttaggccaattcaaaatccttggaatgccaacatttgagtacaaggacagtttcccaataacatacgggcaacactcgaaaaaccagaattgaatagccaaaggaaaacccaataacctgtaatacccaccatcctcgtcactacgaactaccctc

SEQ ID NO: 292502 - DNA, 753 bp, Cannabis indica
tttttagatctttttatggtatttgatatgccatatatatgtaattaggttttcaaatctcatatttaatgtttttatttgtttaggaagttctatttgtcattgatgccggaaaagtcaccggagtttactgccggtgccggaaagtcgctggagtagcggtcggtgccggaaaagtcgtaggagttgttgccggcgtcggaaaattcatcggaattggcattgtcgtaggaaaatcactgaaaaaatcaccaagaaactgttttcttcttcaaaatcggtttcttagtgatttttccgttgacaatgccaattctgacgacttttctgacgctagaagctactccggcgacttttccagcaccgacaacaaactttggaaaattcaccagaattggcatagtcgtcggaaaaattaccaagaaactggtttttggtttcttgatgaaaaaaccaatttttggtgatttttctgacgacaatggcaattctgacgacttttttggcattggtagcaactctgacgactaatacaccgacagctactccggtgactttttcagtaccgacagtaaactctgggaaattcgtcggaattggcattgtcactggaaaaattaccgaaaaaatcaccaagaaactggtttttttttcttcatcaagaaaccgatttcttgatgaagaaaccagtttcttggtaatttttttgtatttttttctctatttggttgattgatgaaactggtttcaatt

SEQ ID NO: 292503 - DNA, 536 bp, Cannabis indica
gcaaaaactctttccttgattctctcatcatgccatctctttgtcttctccttgtacaatttagcattctcataggaaaacaaacgcaattcatccaactcgttcagctgtaactttcttgcttctccagctgctgaaatatccatattgagatgttttagtgcccaaaacgccttgtgttctaactccacgggaagatggcatgctttcccataaactaggcgatatggagacatgcctagaggagttttatatgctgtcctatacgcccaaagtgcatcatcgaggcgttgggaccaatcttttctgttgggatttacaaccttctccaatatgcctttaatttcccgattagatatttcagcttgcccgttggtctgtgggtggtatgcagtagcaattttgtgttttacactatattttgccaagagggcagccaacactttgttcacaaagtgtgttccctcatcacttatcaaagctctaggagtcccaaaccttgtaaaaacatgcttatgaaggaacttcataaccac

SEQ ID NO: 292504 - DNA, 226 bp, Cannabis indica
gagtgacagggggaaaatgcatgctcgctggtggtatggacgtgtccccaacttgagggtcagttgttttagggagcaagttgagaggtctaatgttgctcctccctactccgccattaacgacgtccacaagcggtgttctagctccggataacggtacgttcatcattccgatgttgatggacccgttgttagcaccttcgtttgtttgatttccagccatgat

SEQ ID NO: 292505 - DNA, 882 bp, Cannabis indica
ggaagcaaccaaggtatcacgggcatacatcagcagattcatgacagaagcgaccaaggtatcacgggtaatcgaggatggaaagttatctacgatactggggggcattgaagtccttggcgaactatggaaggacataaggaaaaatggaccggtcaactcaatgagtgatttccttgaccgggccgaaggtttcatcaagctcgaagaagccattcagcgagcagaaggtgagcaaaagccgaacaaaacgaaggctccttctactggaacgtccgcccaacttccccaatattccagcaattcaagtggcaagcgttcaggcaacaaccacaagcaaggaaacgggaagaagggaaagttcgccgaaaaacccggacagactccccgtgatcgcgccaaacacactgcattcactatcttaactgaagatatagaaagtgtgtatatagcgactcagtcgctaattccgtacaagaagcccgggcccatgaagaaagataccagcaaaagggacatgacaaagttttgtcggttccatggagactacggccacgacaccaacgaatgctacaacttgaagcgggaaatagaacttctgatcaagaaaaacaacccgcacttacagaagtatgtcaaggccaaccaaggtcagaataaccaggatctgatgcctccgccaatagatggacacttgcaagtcatcattggaggcccgcacatcgctggagacacgggcaaagctcgagaacgatatgcccgcacagctcaatacgagcaagaagaagtcatcctggccgtggaagaaaggaagcccaaagttccacgagcaggagagccaaccataacattcaacgcgaagatgctgtccagataagattt

SEQ ID NO: 292506 - DNA, 613 bp, Cannabis indica
ctcttttctccctcttttcggctgagacttgggctgctagggctgggaattttctgcctaaagcttgtgattttcaactcattcttgtgtaattcaagtcaaggtgtgatcccttataaattccctttgtgttcttcttgaattttaagtgaaaatggatgaaatgcatgcttgaatagttgttgttgttgctgctgaaatatgattgttattttgagtttaagcatgttagtttagggttgtttatgtgataaagaaagcatgttgtattgattgtttaaagcttttagtttatatgttaaaataggtgatttttgagagaaaatgccatgttttgtttctgtgaattgctggatgtttctgtttgttttcagagatgtttttaggcttagttaagtagaattaagcttatggattgcatgtttaggtggttttgctcaagcttgagtttggaactcaaagcttgagctccaatggtgaattttgcatgtgtggtttctgggtaggtttgatgcctttgaaatgtcatttggggcatatagaacaggtctggaaagtttgggaccaattggggttgaattggtcaagttatgtgatttttagttggctgcct

SEQ ID NO: 292507 - DNA, 334 bp, Cannabis indica
gccacacacataagcccatgaatctcttgccaatatttctgtaaacttggacatcatttgagttgccatgtccttaataaaggcacctctgataacatccataattcaatgtttgtcttaatttcacattattttggaaaaaaaatattggcggtagggtactttgttccagaaattaattcggttacttcatgaaacaactctaacttatctacacaattgttgagcattttgccaatcaatttccgaagggacacacatcaaatgcaactcacgcagccttgcacgttcaaatactgtcttgtacgataaagctgtgctaagcatcagaaaa

SEQ ID NO: 292508 - DNA, 670 bp, Cannabis indica
ttgtattttggtagtcgctgtgcaacctgtaataaatgtatattttggaatgttaactttacaaagtttgaaaacgggatcccgatacttgtaaatattttattatattataaagtttattaattaatataaaagttttaatttgacacgaatttcgagaaaaattctttgattagcaaagattgctctgtaattgaaaaagcactgtagtgtgccttagcattagggcgttacagatcgtgtgatcaatgctgaatgtaaggatcgtgggattgaggctgagtacactgatagtgggatcgtgtgtatgccgtatccacgcaaattgatccctgagttatagggattgagctgatgactcatgatgcgaaagctgaattcgctaagtgttgattgttctgcacggaccgctgaatatcttactcaggccatgccagcgaggcatcctgctcggcctatcttcttaagcagatactccaagtagactttacgtgtcaccattctcgtgatgccacgtcagagtgcaaaatttgggataacaattataattttgaaatataaaattaattaatataatatgatagaatttgaaaactattaaattaattgaaatcttaaattaaatataaataaaaaaaaaaagaaaagaaaatattacttctaaagtatt

SEQ ID NO: 292509 - DNA, 670 bp, Cannabis indica
taatagagttaccccaggatttaagagaagaatgcaagcattctaacaagaaatgaacctagagtaaactcctgaattatgcatcccatgagtacccatgtcctaagaatttctaattgtggtgtaaaaactcagggttctcaaaccagatgttttcaaagtggaaccgtttattggtgaaaaggatgcaacaaatgtttttaggtcatgattaatcactatggtgattaatcatgaccttaagagctctatgatcagaaccataaaatggcaaatgatagagaaccgcataaggaaatagattacaccaagaatcagacccaatagcccaatctaatctttcagaaacagtattattttaccaagtatatttgtgaccaataaaaggaaggggaaacagttgaaacttattcaaaatgttagaaaaactttctatattattatcaaaataactacttccaattttatcactatgaagaagataactattaaaatccccaataatgagccaagggaaattaggagcattataaaaactttaatcaagaagattccaagtaaaacaacgttgagaagcagcagggaaaccataaaagccaagtgaaataaaataatttcattatcattaagagttgtattattgtctatatgattacatgaaaaagttaaa

SEQ ID NO: 292510 - DNA, 589 bp, Cannabis indica
atgcatttgtctgtggatcgggagatacaacggctcagggcagcaacctttccggttaagctctgcacatctttgtgtttcttgggggagggcgtgcttaggagagcttggattttctctggatttgcctctatcccccgctggctgacaatgaagcccaaaaactttcctgatttaaccccgaaagtgcacttctttgggttaagtttcattccgtatctccggaccacttcgaagcattcttctaggtcatctgcgtgacttgcgtatgccttcgatttgaccaacatgtcgtccacgtatacctccatgttttatcccagaaggcctttaaacatccagtttatcattctctgataagttgcaccagcgttcttcagcccgaaaggcatgaccaggtagcagtatacccccttatcggtcttgaagctagtacactcttaatccgcaatatgcatcttgatctggctgtaaccggcatatgtgtccatgaaggacaatagcttgaatccggaggtggcatccactatttggtcgattcgtggcaagggacaacagtcttttgggcaggctttgtttagatcggtaa

SEQ ID NO: 292511 - DNA, 476 bp, Cannabis indica
agagatcgagatcgatccagatatcccgaccagaaagctaaaaattggaaagggtttgttgctcgaagtaaaatcagaactgataaaatttctgagagcaaacctagatgttttcgcctggtcacatgcggatatggtcggaagcgatccttctattatttcgcacgtcctgaatatcgatcctaacatctggccagttcagcaaaaatgaagattgctggataaagaacgagcagtagccctgaaagacgaagttgaaaagctgtgcaacaacaacttcatcattgaagccttttacccccggcttgggtcgcgaacaccgtactcgtgcctaagctgaacaagaaatggcgagtttgtattgacttcacagacctcaacaaagcatgccctaaacactgtttcccacttccaagaatcgaccagctcgtcgatgcaacagtcgggcatgaaatatttgttggatatattttacc

SEQ ID NO: 292512 - DNA, 403 bp, Cannabis indica
ccctcgacctcatcaagaaggttccctccaccaccttaggtctgagtaggcgacatggcacgaaaagcctcggccatctcagcggcttctgctccgaggagagagaagtcaaagtctggaactttggaaagagtggtataaatataatcagacactgcctgatcatacggctcctttccattctctctctcagtttctaaatcacgggtcatctcctcgatcgtcgcccgcgagttcttgacctcaagctccgcctgctccttagccttgctaagctcttcgagctccttctccttcctagccacttcttgcttcagcctttttatgttctcctgaaactgggcattttgcctcttcagcgagtcggcttccttcgaaggagtagctgttgggttttatgccc

SEQ ID NO: 292513 - DNA, 535 bp, Cannabis indica
tattcttaatctctcacttatcaaaataattctcgataatttgaagacatatagaattttttttatgtccacaacttcactattgtcaataacttcgaattatttatgatttattcattagttttgattttctattggtgtttattttctctctatattttataatatattttttagtagattattaattattgtcaatattctatttactttattttttctattatttactattcattctataatttcctcaaatatttttatttattcactcctaatctcttatttttctaatttatttaatctactaaatacctcaatttatttttccctagtttgatcatttttatattaattaatcacacaaatatatcatatttccatggctaacttatttttttaaaaaaaaaatgattaaaatttttaatattgttactataactttagctaactttttttttctcaaaataataataataaaaataataataataataataataataaatctacatataagattcaattaaaaaaa

SEQ ID NO: 292514 - DNA, 530 bp, Cannabis indica
ccactatttaagctgatttcattcaaaagaaaaaaaatatgaaaaaatataatttaaaacctaataatccaataataaacaatagtttaatccaaattcaacctaattttcataataaaaatataacaaaaatctaacttaataagcaaaagtcttaataaacaagttcaatacatcaaatgcaaatattatataaaatattaaatcaatgtgtgcaggtgcacagtaaaacctattaataattaatatatttttttaaaacaaaataattaaatatataaaattataaatattaaatatgattggatggacattggatgatattggattgggtcggttcggttatccattggatcggatgtctcatccaacatccgatccgatccaattggatttttaaaatttgcatccgatccgatccaattatgattggatatccgattctattggatcggttggcattggatccacaggttgggattggattggatgactttctgcacacccttacgtatcaccctgacctaaaa

SEQ ID NO: 292515 - DNA, 284 bp, Cannabis indica
tagtgggatcgtgtgtatgccatatccacgtaaattgatccctgagttatagggattgtgttgatgactcatgatgcaaaagtcaaattcgctaagtgtttggccattctgtgcgtattactgaatactttgctccgggcatgccagtgaggcatcttgctcggactgtgcttccggagcacatgttccaagtggactccacgtgtcaccattattgtaatgccacgtcagacttcaaaaattagggtaacaatagtatttgaaatatttaaataacttagata

SEQ ID NO: 292516 - DNA, 749 bp, Cannabis indica
ctgcatactaaattaagggaaataatattgggtatatacttacattaaataagtagtcatatatctatctaataaataagataactaattaacgttggttttggtagtaatcactaccctaaaaaaaaatgacacgtagatataatatcttaacatttaacggttaggtatccagaaatataacttaagtattgttactgccaaaacttaaacttagttatttatttaaaactgagtgttaaatttaagtatttatactccaaattactttattttattattattattcttcaaattaatactttgtacattatatattaaaaaaacaaaacgttttaatctagacacagactttttaaggttttctctttttgactgatcatcttttagacttgcatcaagtaagaacgaaaaagtcataacaccaattattattattattatttttttatttttcatgtgtaactctttttttttttctttttttcaacatttctcatccccacatttcaaattgtaagaaaattaaagagtacacagaacaaaaatatctcctaacaagaattttatcattgaaggtatgtgcatttttattattgtttttagttttttttttaaattatattattataaaatttctttaaaaatgattaccactttttaagattttactgttgtttttatttttactttgaattgttcatgatatggtataattataaatagtttctcttatggaaaaaaactat

SEQ ID NO: 292517 - DNA, 392 bp, Cannabis indica
ataaggaggtttatctcgaaagactgccaaaaaagaggagaagctcggccatggtccccctagatttttaaaagttaatgcatattgagaatatatatacagtagaacctctatccaagaatatacttgggaccaagaaaataatattctaattgagaggttataactaaatagagttacacttaaaaaaaatcaaaatatcaaaaaatatcaatgtaacaaaaataccaataaataattcttaatactatattatattagaattattttcgagtacatataatatttatacatgtactataatttgaaataaaattattaattctacataaataaatttataaaatatatgtatatatttttttaagatgtaattattcttatatagaggt

SEQ ID NO: 292518 - DNA, 675 bp, Cannabis indica
aagaaaaaatattattacttattaggtgagattattattatgtatatctaaataatgtaatttataattttgacaattaaaagtaaatactggatgtaatatattatagtgtttaagaaaacttgataatttaagtgtaatatgttcttaagataatccaaaaataaactaaaaattcatgttcaaatactaaagaaaacacaacttaaatgtgtgtgaaataaaaaagaaaattaaaaatcaatctctaaattattgataattgaagataacatctatctaaaagttgtagataaaaaatctctttttcacaaattataatgtgaaatgttttagttaaaatactttatatatatatatatggaacacttctaaatgggtaatacccattgatgggcactaaaaaaaattaataaggtaacaatctaataaccttttatggcaagtttctaataattatttttaaaaaaattatatttatttttataaattgaataatatataacatacttgaaaatataatatttaaaattaattaaatactacttatatttatgaattatgagtttattaataatttattattgtaaaactaagaatcatttacttgtatattaatgtgttttttttaattaggtagaataagagcttgattgtggaatccaattgtcttaa

SEQ ID NO: 292519 - DNA, 621 bp, Cannabis indica
ccattccaacccccaaagaaaccctctacaaagtttctcaatctcctttgtaatactatgaagccaaatgaatatactcattcagtagttgcgcacccaagcaaaactgaatgaatgaaaagagccctacctgcaaaagaaagatgtcttgttgcccatgttggattttgtgccctaaataaaacccactacaatctgattagttatcaatacaagaaatttgaagtgatttatgtttgcatgaattttacatgcttatgtttaatatgtttattcacaattacagtattgtcaacacagtggaatgtgattgtgattatatgattcaaaagactaagtccctgtttcatcagtgttttggatttacactaatgtgataatcagcgatgatgtgtacttacacttggagtaagtgttatgttctttccaggacattggtaaagtatactagtttcgaatgtatggagtatacattggactggaccgatattgaacttagttaagatattataaacttaccgttgtatctttccaagtcaatatcagtagttgatcttaagattaaaaagaatctaaatcctgatatgcttaggctcaactcaggagtacttactattcatg

SEQ ID NO: 292520 - DNA, 865 bp, Cannabis indica
tttttcggatcccacacggggatccaactcaccctcttccgccatttctggcttaataatttcttggaccatcaagacgggtaggtgggcagcaacgttataacactgcttggcctacccttggcttaataatttcaggcacaagtgccgtatcgatgtgattgcaccgaaatctaccagggtcggtcggccaaggattgcattataagctgttgggcagtccaccaccacaaacgtgcactatttgaaagtgctttggggtgtgtccgggcacaaggtaactaggagcctcacttttcccatccagataagtgttgttccattgaaccttgtgagttgggaaccacttggtgaaagatctcggtccgttaggcctattgcagtgaaggcctctttgaacaatagattcacagaactcccgttgtcgatcaagactctggccacgatcttattggcaatgggagtctctatgaccaaagggtcatggtgaggaaaacgcactgttttagcatcttcttccgtgaatgtaatgggctggtccattagccggggcctttgagctgggagttgagtaacctcccaaacctcatcatgttttacggcccctgcgtatcgtttgagctccttacgggtagttcctccgatctggggtcctcccgagatcatagccactcccgttgggtcttggtggcaggccgggaatatgctgggcctctccgaggggagcaactggggccaatgctcctgctacaccccctggtgctccttgaggcaaaactccagccgcttgacctgggttgagatggggcaaccggttcttgatccactcgtagagatgtcctaatcggatcaaattttcgatctc

SEQ ID NO: 292521 - DNA, 631 bp, Cannabis indica
tataaaatatcattaattattttgatacactactttgtggtggtggtaacactaggcactaataatagttaatagtaatgttcaaatttttagtgtaaaacatatggagacatatcatacctaatacctttgctttttattaaatgataatgtcattataatatgattagtttattttatgagtattgttttgtagtgattagtacctttagatgtattactttataattagttagtaatattttttaagggtgtctacacatttggtatcatgtgttttatctaaatataaatttggtaccctatatttttaaataatgcttatttggtaccttgcattttaaaattatacttatttggtaccctaaattcatatttttttgtataaaatttaatcaatactatcaatagtctaaaattttatgaattttaaattctaatttatttattttgatttacatataactgagaattgtttggttaaattaataaaattgtattgtattaaattttattttaaggtactaaatatgtacatttaaaatataaggtaccattaagtattattaaaaacatagggtaccaaatataatttttctataaaaacacaaggtactaaaatgaatatatt

SEQ ID NO: 292522 - DNA, 502 bp, Cannabis indica
tgattaattaaaataaatgaactaaaatatattataattagaaattgaattaattagtcaatgaaagtctagatagttattgtctgtttgcttgaagtatttttctagtgatatttaattaaatagaaaattaatatttaagttgattttcatcatgatacttaaatatttgaaaattttcttaatatttaattaaataggaaaattatatttgtgttgaaaattaaatttttaattaattttggaccaacaaaaaattagaataatttttcaggatttattttattttattttagagcattttcaaaaattgtatttattttaaatacattaattttcaaaatgcaatatatatttatagaaaattaaatttgagttgtaaattaattattaattaattttgatacaacttaaattgaataattttcgaaatatttattgaaaattattactaagatagaaaataattcaatttattttcatatccatctaagtataattt

SEQ ID NO: 292523 - DNA, 527 bp, Cannabis indica
taaaaaaagcttggaaatctattctaatgggttggtctccacttgttaaagacactaatgaaggtaataccaaggcaaaatctgaattagaatggtcaaatgaagaagatatattatctggtaataataagaaagttttgcatgatttttttaattgcgtttgggaagggttttattaaattaatctcctcgtgtgaatttgcaagagaaacttggctaattcttaaaacttgttgtacctaaaagtgagtgttttaatatttatacttgcaagtgtacgaattatttcgggatataatattcatgtaagtacgattcaaactcatgagagttaactaaaatcaaaagaaatcttttaaacaaagtaaggatattctaattaacctagttccaaatatttgatgggattttggatttggaaaacaaataaaagacaagcaataaaaaaacttaagattaaagatgagtgggtatgaaaataattttcaaataagatgtgtaaaataagattattaaaatattagaat

SEQ ID NO: 292524 - DNA, 650 bp, Cannabis indica
atataggatgattctacaatacaccctcttaaaatagatgtattgatggaccctctacttgtttcgacatccaagtaaaaaaatttagtctaagttttttttttcatattcatgtacgttataatatttaggatatcctacaaaattttaagaaattcggaataatttacaatatagaaaacaatgttcaaatagtctattttatatgcgtacaaaataaaatagtcacgcgtgcaacacactgcttgaacgtaatttttggcgtgttaaactttttcaaatttcttaaaattttgcaggatgtcttaaataagtataatttatatgaccatgagaataaatttgattaaaaattatttcggatactaaaatagatagagatgtatatcctttttttttgaaggagatgtatatcccttttaagagggtgtattatagaatttccctaaaatataattatttagtgaaatatttggtataatatttagggtgattctagaatgcacccccttaaaaggtatgtactgatgcaccctctacttgtttcggcatacaaaaaaaaattagtctaattttttttcatgctcatgtacgttatacctatttaagatatcctacaaaattttaagaaattcgaaataacttacaat

SEQ ID NO: 292525 - DNA, 678 bp, Cannabis indica
atcaatctcagccgtcagatcaaataattccctcatctgacggctgttgtacatcacggattacaatccgtaaaagtacaataacagaacaaaatcatatcccattatatatatgcatatatatatacagcaacaagaacgatataataataataataataataataataataacattaataataataataataataataattgtgttaaatataccctttaacactattattatcctaaaaaaataatcatcacaatcattattattattcccactaataataatatatacaaaaatcaaaccaaatctcatattcatttaattatatcgagatatatatatttattaggcattatgcacatgccaataaaaatcaaatattacatcatcatcaaaaaaatttacatacatatttaaattcataaatatgtaacataataaaaatactctcagctaaataaaattacaaaaataccctttcgaaggtagcgggtattacaacacttcaaatcaagcaccataggatggctctttgagatacgccgtcaaagtcgaatcgcagctcaccggagcgtacaaaagatgatcgacgctcaacttgaggacattaacaacggtatcttctttttcttacccagtttatgttggtcggaggttcttagttggatgggtgagac

SEQ ID NO: 292526 - DNA, 693 bp, Cannabis indica
atacttgtgagtagatctaagatcctggtaaaataatttccaacactaacaatctccccctttggcactttagataatcaaaatattattaattaacaaacacctacaaaacaaagttagcgaaacaaacataaaaactccccctgagaagaagcacaacattaaaccaaaataacactacaagaaatgggactttttatcccactttttatacatgagaaaataaaaaatgggataaaagatgtgctaaaatattttaccccacttttatttttggcgcttcaaaatgtgtctcaaactttttgggaacaagggctacgtttggttctaaattaaaaaaaataacattttaaactggaaaaagtgattgaagataggtttttagtgaccagccaaacacctctttctaggtcttatatcacgtttttggaccaagggccgtgtttggctaatcatgaaaaaaacattttttgaatgctttgtatattccatgaaccaaacaggcgtaaagggttattagggaaaccctttcatcccagttttaataaaactggtatgaaagggtttccccaataaccctaaattatattcatccttttcacatttctggaggcttcttcttcggcaaatcgaaaggcagccatggaagccttttctccaggtacgcctctctcattctctcttcttttctca

SEQ ID NO: 292527 - DNA, 434 bp, Cannabis indica
tctctctctatttttcggcccctttgagcagctgggatttgctccttcttccttgagatttcaagtgttgttgtgttcaattcaagctaggttagctctttctcttcctctctttaaaattcttgaaaattatgaaatgttggtggttgcatgtttaattttgaggatgttgttgctgctgtagttctaggttgttttctgtgtttttatgcttgaattgaatggattaatgtaggtttcatgcatgctagttacccttgttttagtttgagaagttttggttcaaaagctatggtttttcaagtgaaaatgtgaaaatggttgctgtgtttgttgtttgagttcgagaatgatttctgcagtttttattatgcatgattatgtagtttaaatctggttttgaggcttgtaggtgagctttagccaagtttgag

SEQ ID NO: 292528 - DNA, 551 bp, Cannabis indica
tgtgcaccaccccaagaccaccacaaagaggtcgagggtgcactaccccgagaaggaattgattgggttcttgaggtaccctaagattgaaagtaccagccaccctgagattatgttgtttctaccccgagcttggtaaaggatgtggtaccccgagtttggccataaaccgtcgagatggagttattgttttggatctcagggtgtaccacaacctttggaatggggttgctaaaataccctgagatgggcttacgggggacgattgtcatggcctcttgtgatttttttttttgacactcacgtgtatatgcaacatattgtaccatgaacacttagtaaaaattttgacaatttccaatgaaattggcaccccaaaatccaccacttataattgtcttcattgtatttcactttagctatatggacaatggttgccttttgatacacttccttttttgttgcacaatgaatgttacatatgtgtgtcttattttttagtttggagctatgttgctctatttctatgctactatgtgttaacttgtctg

SEQ ID NO: 292529 - DNA, 844 bp, Cannabis indica
acgtacattttgggaacatgatagtataattgagtgggagcgctaacataaatatggaatctataacttctataggaatttagaagtgaaacgatgatatccttcgagcttggctaaacagagataaatggtggagatctcatttcactttgctgaaatatcatttatacggagctaagtgttttaaggataaaatacattgaaggtgtaacggtaacttagtgccttttcaatgtagatcatctattagaggatcattgatcaaattaggattataacaatggataactaatgacgtatctatatcgtggaacatatagagcgttctatatactgagagtgcaattctaagttctatgcgtggattcaacgaagaattaataagtcagtgaatttaagatataaattcttgatctgcttattggaagctcggatatatagacccatggtccccatactagttgagaccatactgcttgtaagactcagttaattgattttgattaatcaattataattctaaagttagactatgtctagtttatgaattttcactaagcaagggcgaaattgtaaagaaaagagattctaggtttatttattaattaagagactttatatgtctaattaataaattcagtgaatgagtgagtgcccacacacatcaagtggtatctcaatcatagtgtgtaagactgtaggagaattccaaacaacaagaaggagattcagcatcaagatgacaaaatgctctaaatctaacaattaagttaataaatgtccccttttttttaaaatattaacaaaatgtcttttttagttaaaaatttgatgataaaattac

SEQ ID NO: 292530 - DNA, 703 bp, Cannabis indica
atactttttttaaacacccgaggacctgaaacaaaagaatcaagcataaaatagccctaaaactagaaacaaaaagtgaaaactaatcgaaaatatgacccaaaacttagactaattttagcctaacaaattccctcaaactagattcttactcgccctcgagaaagataaaaaaaataaatcttactaactactaatttactaactacgttatgagataatcacaatactactgcctcatgtgctgttctcttccattgctcaaactagaatttcaattccaccaactctaacaattaatttagatgctcagtttgtcacatactgcacaaacacaagatgacttcacaatcgaaacaatgttataatggttttactctttccagccattccactacccgataactcatatgcttgcatgcttacctctctccactaatgttgacaacatcctttcagaatcaatagggctttttgaggtttagaaagtatggcttagatatttggaaaatgaaaaacaattttggctaaagatatcataagcacaaaaataacccacaagcttcttctaatttcaaatttcccaaagttttcccacaactaaccacgcttgagtaaaatttttttctttctttttttttttaacatcactgaattttattatttttcttgaatcatgttttttttttcagtgatattgatc

SEQ ID NO: 292531 - DNA, 528 bp, Cannabis indica
aaaagataaagttatcttttaatttaaaatatttgatcttataattaaataatatataaatattaaagaaattaacaaatttttaaatctgaccataatttaaaaaataaaataatcattttttaaatttaaacctcaaaatatcaaaattaataataatctatttaaaaaataaatattattaatttaaaaatgatatttaagtttaaatatattaaaaataatattttattttaattttagggtttgaaattaggaaaaatcaaaattggggaaaaaatcccatgaaaatcaggtttgggagaggggatgccgaggaggctgcaaattgcccaggacgcgcgctcagggaaggatttgaagggtgctgtgggcggctgagctcaacgtgtgcaacatctggtgggcgagggataggggcatgcaaggtgctccgtgtctttagacacgggtgatgtccgagcccacgcgcgcgtaatggtgtcttgtccgaacacctggtgcgtgcgagcaccatgctcaacacca

SEQ ID NO: 292532 - DNA, 575 bp, Cannabis indica
atttactaacaagtatatttcattaacatcctaatatgaattctctaaaacaatgaaagaaacacatataaagtttaagaaaccttacattaattgtagcgaaatataatgactccttccgttcagatctgtagctcttgattcctttctgtagcagagcattatcaagatctgaacctggatctctttctttccttcttgttgatttgattcttcacagtcttacacactatgattgagataccacttgatgtgtgtgggcactcactctttttcctgaagagaataagagaagaagtggttcagctataggtatagaatagatggctcaatttttcctgaaggtaagaaatttcatcaactttaagtgtgagccatcactatttatttataggcaaccactaggtttaggttagacttatttggaattaaaataatgaaaaaattaaatgttaaaatccatgcatagtggccacccatgggttggataatgggccccactttgcaaattttccatttgtcattttcccatcttattttctcaaaaatgcaaattttccgatttaaccacttaa

SEQ ID NO: 292533 - DNA, 571 bp, Cannabis indica
aaaaagaactacaccattttcttcgtttgctcatctatatcaattgttttactaatatttactattacaaattatatgtaaatatatttttaacttttttaaaaaattataaattgaaattatgaaaattttaaaggatcatgaacttaaatttttgacaatttttttaatataactaacttgaaagcaatttttaaaataaaaaaattcagaaaatataatcatttttttcataatacttagatcaagttattattaagttttatttcaataaaaaatcaattcattaccctatttatactattttgtaaaaatattttgtaaaaatataagatctattttgttatttaacaaaataaatgatcaaatttgtaacttttaaaaaatatatagggtccaaaatagtatttacttaattttaaataatttttataatattttgattagattattataaattataatatatatatatattatattttatgtaaaatgtaaaaggaaaatttaattttctatacttaaaaaaccgtaatatttattcttaaaccaatacatttcaaactaaaaa

SEQ ID NO: 292534 - DNA, 702 bp, Cannabis indica
atcttttttatcttttattttctaaaaaaattattttgctattatttttttaaccgatacaacaacctcaatctatataataaaaaatgagaaatttttctaattaaatataaaaattcaaattttcttaatatattacccattcatggtaatccgtattgtgcacccaccaagctacaatcataagatattgtaacaaatccaacagaaaatatccatcaagctacaatattaaaaattataaaattacttttaactttcactgtaaaattgtatatatcatttactactagtttaataaattattaataaataaaatttaatgtgggcttttatctagttttataatgaaatgataagagtttatgatgctaatactttttatgaagtgttattagttattattacaatttaatatggaatcttacttattttatttttaattaataattataaaaaatcaataactatttaaaaggtcatcacccttacgagtagtactaagaatagtggcagaccaatatagaataagggtggcatatgccaccctgaaattttaatatctgttttttatttgtcaatttagtcatttttgttttttttttattgtgtatactttaattttgttaaatatttttattatttatactctcttttattgtatttttctttatatattattattatttttttgttaaatta

SEQ ID NO: 292535 - DNA, 537 bp, Cannabis indica
cccgttacccgaatcccgagtcaagatctggatcactgtcacgggtttcggtctggttcttgttcaggtcccaagtcccatttctgagtttgggttcgggatcgagactggggtgcgattctaggtcccgaccctggttctatgtccctagtctggttccatgttacggtctgagttcaagttcgggtttgggtcccaagttcaggtttgggttgggatccgggtccggctcccaattcgggtataggtcagatttggagtccgggtcctgatccggttacagttctggatctaggtcaaatttcagttatgattcaaagtccaagtcctagttccagtcccggtcaactttcgatttaggttccaattttgggtcacagggtacgggttcgggtccacttttggttttgggactaggttcaggtccgagtgtgggttcgggtccttgtcaaggttcgggtccaggcctggatcccaaatccaaacaccgactaggggttttatccaagccctgggtccatatccggatcccaatct

SEQ ID NO: 292536 - DNA, 654 bp, Cannabis indica
gtgttagacaattaagagcatgtttggtattgttttctgttttttgttttaaaaaattatttttagaaatgagaacaaaaaatagtttttgaagtttttaaaacacaagtcatgtttggttagtgatttttaaaaacaatattgaccaaaagtgaattggtttttaaaacagaaaacaacattttgttgttttcaaaattcttgttttttgtaactttgttttctgaaaactgtttttaaaaaacaaggccaaacaagccaaattgtttttaaaaacaattttctgtttttaaaaacaaaaaacagtttttagttatgatgccaaacatgcactaagtctccaataacaatgctcaaactgaaattgatatttcatcttttaaattgataatataagtttttttttttggaaagataaacatttttaatttaaactcctctcattcaaaaaaatactaatttgctttctagaagaaaactttacactcaacaactcaattaagggccaggtgtcaagtgtgcaatagtagtaaaaagcaatgttacttttgaaaatttatttattttaatttttataaatggatatatgttaatggtatatgagttggataattaataattgtttattaataggaggagatgacgtactataat

SEQ ID NO: 292537 - DNA, 621 bp, Cannabis indica
ccctatatattttaaggtgagatacgtactaaaagaccatataacctcattttaagcatggatagaaaattttcctatgtatttatatatatattataggcatgcacgtacacttttttttatacatgatgtaacatatatctatatacacacacatatgatcaaaatagaataacttcactttaagaaattggaatttatcagattattgaattttttcaataataaacttaaagataaggctcttatatattatagtctaaattcatgattttctaaccaaaggagatttaattgaggagacaatatataattctggatacacacttatttcacactataatattcataaatattagccacttatatatatcattaagtaagaatcacattactcttaattgtttagttaaaattaagaaatttttacatcaaaaatataaaatgataattttattacctaaataccactacacggtaaactaaacatttatatccttcatctttattttattactattttattcacatgcacactcttcccactgcatcaaacatgtgtgtgaccactatcaattaatcaaccatccatcatttccctttcttttttcttttcttttt

SEQ ID NO: 292538 - DNA, 597 bp, Cannabis indica
tattaccatatatatattataaaaaaaattaaaaaaagtgtgagaaaatgataataattttttttgcacatattttgtaattaattaaaataatgtatacaaaattataaaataccttagtttaattccacctaatgtttttatgggattggaattataaggagttcattccttattttattttaatgctgtgatcgtatttatgtgttgaaactaatttaatttttccattagtcttgtcttttgacatggttctttagtcttgtcttttgacatggttttttagtctttttcttttagttttttctggttcgagtcttgtcttttggtatgggttgtgtagctcagaatcatcatggtgctatggtagaagcattcaagaaggagaagattagatgtgttcaacccgaaattcctgagataataggcattaaagaagcattgagttggattgcaactcatttgtgggatagagtcatgttggaaatagatagcttagtgtgtgtgtccaagcgattcagagcggtattttatgccttcacaatttatatttttgtaaaaacgatctgcaaaataagttggctcattgcttggcaa

SEQ ID NO: 292539 - DNA, 825 bp, Cannabis indica
cagttattatgtcacctcatagtcaattttccctctaaaaagagatgaaattactactctatcctttgttataataccacatcatcaatacaaacggtatttttaaacaaaataaacagaaggagtaaatgtatgcatataaaattatacaaagactatttgtaacaagctgaatagattaaggggtataatagtatagtgtcataagtacaaggggtaaaaaagataattattccaaagtttattataattttttttagaacttgtggttgaatatatacttatattaaatttttaagtgtttttataacagtttatttgatttcttaataatatttgatttaacatttatttgtttaaatgtaatcttgaaactaaaattataaaagttaattcatatgtatcataactacatttcttacattgattatgtgaaaagataacctaatttccatattatggcattctattctgttttataaaataatctgataccatcaaaatttaattttgcataaattatcttttaatttatgtatttatttcttacaaaattaggtatttatttacatggaaaaaaaaagtaacttaatatgcatgttatgcttcataaaaaaacttgactatgtaaaaaaggcaaatctaatatatgtaatgtagaaaacttaaaatcgtagagagagtacgagttcttttatttatttgagtttttttttctaagtctttctaataagttttttaaaactgtaataatttttgaaacattttgaaatatggaaatataaaattcataaaaattaacttaaaatagaaaaaaaaaaaaaa

SEQ ID NO: 292540 - DNA, 880 bp, Cannabis indica
taattattaattattgttttatcttttattgttttattaattatgaattattgttttagtataaattattaattatttttttttaattttttattgttttattgattattgtttaattattaattatgaattattgttttattaattattggttatggttttattattaattattaattactttttttttttcagggaactgcacatctaataattccagtgtcggaccattacacaggccgtgtcacatggcgcgggggtagttactactacccgaagattaaggctaaatttgaagaattcaacctatgggacagggtgagggaatcccctttcaaacagtttttcgagagagagcccattcaattttcaggagcattttttcatcagttgatgcttcacaaaataaaatctgacaagccggacgaggtgcatttctatgtgggaaggaagagatgtagatttggcagggtggagttcggcttggtcaccgggttaaacttgttgcccggccctactgaggaagacatcaaagaaaaaggaagttctgaccggttgattatggaatatttcaacggtagtccttcgatcagcttcggccaactgcgcagagtttttgagagctgcacagaagctgatgatgtctacaagttggggatggccttgtttgttatgggcgtcctcactggtaaggaggagaagactgtcgttcctccttttgtgataagaatggttgataaccttccattcttctacgagtacccctggggaaagatttcttacaccaagctgatggaaacttgtaacaaggactacttggatgtgaagaataagatgttgaaaaagattgagaagggagtcactcagaaggaggcaaaat

SEQ ID NO: 292541 - DNA, 372 bp, Cannabis indica
tttcaacataaattaacaccagaaaacacaacataacaatagcagcaaccacagcaacgaaaatcaaaactttactttgaaaaccatagcttttgaacaaaatttcacaaacttaaacaaaggtaactagcatgcatgaaacctacttaattccattcaattcaagcatagaaaaccacagaaaacaacctagaactacagcagcaacaacatcaaaattaaacatgcaaccatttcctttttccttgaaaaccaagaaaactaaagagcaagattcaaggcttaccaagagcttagaatcacacaaaatctgcttgaaaatcaaaggaaatccagccctagcacacccaaccagccgagagagagagagag

SEQ ID NO: 292542 - DNA, 888 bp, Cannabis indica
ttgccatgtactttctaaatcctcttcactatcataccagtcctcccaaatttctagattaggctctgtcatgagctcatataatgtaggaatatttgggtttcctggccttggcatgtctgagtgggcttggactattgtaacttccttgtcgacttcaaatgccacagaaattatatccctttgtgtgggatcatttggtatttggtcattcttggttaaggaagctgtatttgttgttgctttcccgagagaagagtcatctcaatctcttttctcttgatcatgccttcgataatgtttttaaggatgtagcaatccgacaatgggtgactcacaatttggtggtaccgacaataatttggatcatttgtcataccaacctcgttgggtcgtttcggctcggggagtcgtattgccttagcttttaacaactcatcgaaaatttggtcgacatcatcatcgtcgaatgaatacttaacttctttcctttcatagagagagaaaatttttttgtggctcctgtgccttccctttatctttgttgctggtattgataaaagttgccattgattctcccttcttgaatggctttttattttcaaatctcggtgagggtttgccacccctttgccgagaaatttgtatttcaacgttgcaggccttcgagacgagctcattgaaagttttggaatctgctgtgcccacaaaagttgccacctcagggttgaggtttttggtcgcacattgaaaccgccgcttgttccgacatcctttctggacattggagattgagatttctccacctggttatgaactcattagcactttcactaattcgttgcttcgtttccactggtcattgagacttatggtcttctttgagct

SEQ ID NO: 292543 - DNA, 676 bp, Cannabis indica
agagcctgaccgaaaggtagctgctttaagccgcttcatctcacggtccacggacaagtgcatacccttcttcaacgtgctaaagaagtgccaaaagttcgaatggtcggacgagtgcgaggaggcattcaaaaagctaaaagagcacatggccaagcctcctatcctatcaaaacccgtcctcggagaagacctatttctttatttggccgtctccgaacacgcggtcagcgctgccttggtccgggaagaagagaaaactcagcatcccgtgtactatgtcagcaagcgcatgataggggccgaaacaagatacccggtcattgaaaaactggtgttttgcctcctgatggcgtcaaggaagttgaggccatacttccaagcccatccgatcaaaattctgaccaatcacccgctccgacaggtcctccaaaaacctgaagcatccggaaggctcctcaagtgggcaatggagctaagtcaattcgacttgcactacataccccgaatttctataaaaggccaagccttggcggacttcattactgaatgcaacgaagccgaggcaaccgcgaatacgccggtaccgccaatccccacatggagggtatttgtagacggagcctccaatgagaacggttccggagccggagtggctatgatatcaccaactgga

SEQ ID NO: 292544 - DNA, 467 bp, Cannabis indica
tttggcatatatagggttgaaagtacaaaaagtggtatttctgaaaaataaataaatagttgagaaaaatagcaaaaaactaactagtgttgggcccactaatggccggccactagtccctatttttgctctatttttatcatttcttattccaaaaaaatcaatactaaccctaagttaattagtataaaaagaaaagaaagtctcattatccaactaatgcaaatattaactcttgacctagttttcttttttagagacaactagtgagtttgagacttcttcttcttcttttccttctaattttcgaattctatagtcttcttcacaaaacatattcaacctttagtgattgagtgcatgcccattcatagtaagttagtcctcaaccatagtgtgtaagattgtgaagaatccaaacaactgaaggagtttcgggctcaaatcttggtgatactctactacag

SEQ ID NO: 292545 - DNA, 96 bp, Cannabis indica
aattagacatacaaagtctcttaattaataaataaacctagaatctcttttctttacaatttcgcccttgcttagtgaaaattcataaagtagaca

SEQ ID NO: 292546 - DNA, 689 bp, Cannabis indica
caagttatttaaaataccaatttaaaaaaaaaacaagttataaattctgtttcagtactatagaataataacaaaaaaaaaaaaaaaaactaaaaaacttaaggatgatcatcattataattacaataaacacccaaaaaaaaattgtacggtagagaccctataatatattgggtttgttactcatacaaatcaatttgcacaatttatataaaatctagtgtgacatttataattaaagaatttctaaccgagtcacatttttcgtaatattttaataaataatataatggcacatgtacagttattagttaatcatataaggaaattattaatatattaaaaaagactgaggatttttttttttccttttctactttaattttaaccctttattaaagaactttaacctaatagtgttttggtgtagtagtggtagattaactaatcacattttgttttatattttcaaaagcagatagccaccttatcaatttggatatataattcacaataagaaatttgattgataatatttaaaatctttggatcctttcctagaaccatcatataaaacttttttaatggtagctagcttccttgcttgattggttgcattgtaaatcttaaacctttacagggtttttttttttttttatttttattttatttttttatttagtggtagt

SEQ ID NO: 292547 - DNA, 555 bp, Cannabis indica
tgaagaaagtgaagaagagcaagaagttgctctgattcgaaagcgcaagggcaagatggttgcccaggaagagcccaaacggcaacggagagctgatactccggcccctggtctccatggcgggatctctcccgaggtggaggaacacacagctcctcctaacattgtgctgagtccggttcttggagatgaggcgagacaggaactccaaatagctaagcacaactacgccatggatgagtactcccgggggcatgctgacgtggaggctctgaggagggttttgcgagttgaaatgcaaaatacccttaacgattcgaactaccagaatccgtgggatctaaacttggaccccctgtcggattggttcggtcgtttcctcgggcccaccctagctcccattgccgcggagatgagtggcgagttttcgtctcagcttacccggtgtgcacccaagcggttcgctgcttgtgcatccttgaactccatcttccaagtccaggagctcagccactccctcactgtggtaagtatttcgtagtttacttttttcct

SEQ ID NO: 292548 - DNA, 580 bp, Cannabis indica
aaacagaatcacaataatattttcctccaaaaatcacatttttttgcatagaaactcaaagctttaaacaatctatccaacatgctttcaacatagctcaattaacattaattaacatgcttaaactcagaaacaacaaccagatttcagcagcaacaacaacaattattcaagcatgcatttcaacaattttttcatcaaaactcaagaaattaaagaagggagaaggtgagctaacctagcttgcaaaggaccttaagagatgatgaattaacaagccaaaatcaaaggagaaaacccactccttgctgctcaatgcttggccgaaaatggaagggaaagaaagagagagtttctttttgaaaattctatttttgctaagtgttgaacttttgtgtgaaaaggaatataaatcacatagcctataataaatccatttcagccaaaaatacacttaaataaatatttatttttcaaataataaactcacataagacaaaacactaatggggcaaaaagaccattttgcccctccaccataaaatcacataaatcatactaaaggggtatttttgggaaa

SEQ ID NO: 292549 - DNA, 677 bp, Cannabis indica
ttaaaaaaaaattataattaaatgaggcatgtaatcactaaataagttaaaaaaattatctgtaaaaaattaaccagctaaactttacattaatacataaaattatacagtaacttgattacacaaaggtattgtcataattaaaatgttaattctaagataataaacctacataacaaagtgtaaacaaaagttagtgataaaaagttacaacattgagtaaaacgaaaacaataataaaaaaaaaagaaaaaataaataaaataaaataccaatactgtaaaaaagtactttagtacatgaagaatataatatacaaagtccaaaacacaccaaggcaactgataactatacacatatgtactactataatagtttttttttgctaatatatttggtatatacatcttgtatgcaaagtaattagtatattaatttacctacagctgctcttccaatctcttttgtacttccaatttgatgccttagtgcttctgtaattgggatgtcactgctatatgaaaatagaaattagtatcacaaaactttactaaagaaagataatcatgcaacaaataaaaagggtacgtatgtaagactaacaaaactctaaatacttaaaagagttaaagagaaaactgtctaaagactttgactgtgagagtctattgacatgt

SEQ ID NO: 292550 - DNA, 625 bp, Cannabis indica
acactgatagtgggatcgtgtgtatgccatatccacataagttgatccctgagttatagggattgagctgatgactcatgatgcgaaagctaaattcgctaagtgttgagtgctcttcacggatcgctgaatatctcattctggatgtgccagcaaggcatcctgctcggtctatcttcccgagcagatgctccaagtggactccacgtgtcaccattctcgtgatgccacgtcagattgcaaaatttgggataacacaaataaagacctattttcttaaatgattgctactttctatataacataactataatttgagtgctatctctttctacatttggctttttatacacattgagtgctatttatttttaagtttcctggtaaattgagtgcaatttttttattgagtgttgtagacaattttatgaattgattgttatttatttcattatttttggtaaatcgattaatactccactaatgatattttataacttgaatcttatttctttcatagatttttattgatactttcttataaattggtgtcaaccattacaataattttaagtaccaattctaacttttaaatatcaatgtgactgctactataaaagcaagg

SEQ ID NO: 292551 - DNA, 683 bp, Cannabis indica
gtgctacctaggaggcttcacgtgcaccccaaggaggctgcacgtgcaaccccaggaggctgtaaacacccccacgacgagcgcagatgtggaaggcaacacggtgggacacgcgcggaaaacttcggcgcccagggttcggtctgggcgagatctgcagggtggccccttcgggcgggacacgacttcagacaaggtgatgtccgagcccacgcgcgcgtaatggtgtcttgttcgaacacctggtgcgtgcgagcaccatgcttgacaccattgaatctcgatttttccaaaattcataactctctcaatttttattggaatcgagttccgtttcacaaggaatccaaataaaatattttcagaaacaggaaaatatttttcattgaaaaattttgtacaacacatactatcatcacataagtacataaaccaacaagaaaccatccaaataaacacataacatcgttttaattcatattacatgaagtaaatcattaccatggctctattaccagttgttggaaatattttaccaggatctagatttactaacaactatgtttcattaacatcctaatatgaattctaaaacaatgaaataaacacatataaagtttaggaaaccttacattcggtgcagcggaatataatgactccttctgttcagatctctagccctt

SEQ ID NO: 292552 - DNA, 685 bp, Cannabis indica
agatgtcggatgttcctgggtcggatgttcctggagatgctagtgatgaggacgatgctactacaaacttcttttagaatatctattttaattttacgaactatcgatctaatatgtttgttaatagtttatgaacactaatttatatttaggtatgcagtactataatgtttatgactcactttttattgtaatattagtgactctaaatattttcttttagttaaatgatttcatatcttaattaattcaataattttatatattaattaattaattaaaaaaattaaaattaaaattaattatttaatttaataattttaatataatattatatattaataattaattacaaataattttaatataattatttatttttttttcgaaaaagctcttcaataacgacattgtcgtcattgataataatatcaataacgacaatgtcgttgttgatgcactcaggttttaaaaaaaataaataaataaaatattattcccaacgacaatgtcgttgttgataatttttattcccaacgacttaaaaagtcgttgttgataatcgtttttaccaacgaagtattcccaacgactttttaccaacgaaatgtcctcattgatgcgcaatactgacgaaaacaggagtttttaccaacgaaatttgtcctcattaatgctcattttt

SEQ ID NO: 292553 - DNA, 815 bp, Cannabis indica
  modified_base (776)..(776): a, c, t, g, unknown or other
aacttagatgctgtgaagttatgtgatgcaattttgagaaggaaaaactggttgtgtaagattaggagaagaaagtgctaattttttttctaatgacaaaaaacatgcatcttattctccacatatttccatatcagattttcggagaggattttgcattgctgaattataacagggacgtctattactggactgagacttttttgttcaaagttggcatttgacgatcaaagtgtaatttttgtgtagggctaacattttataggtttgacccgaactcaaccaacctgctcagacctaacccgaccaaaggattggacccgaacccgcctgtgaacccagtttttttttactcttacataaacattattaataataaaagtttacactcaacatacattagacctcaaatataataatatttctattcctcaaaaaaaaaaaaaaaatagatagtataatatatacacttcttttatgtgttaaaagtttatatgtttaaatatttcattaaatttaatggtttttttattttgagattatttcataaatacacaaaaataacaaaaaaaattacaaaaataaggtttcacgaaattataaatatttttacgatttttttaattttatttacagaaaatacggtctttttatgttgtattcttgttaatttttttgttatttgtatgttatattttgttgttaaaatagtgtcttaagtaattatccctatatttatatatacttagtaagtgcttaaggtttttttttttttnttttttgttgaaagatgataagtgcttaagtttagttat

SEQ ID NO: 292554 - DNA, 519 bp, Cannabis indica
ttaccatctggggaggttgtaatctctagaaattggcttaggggtatatctgttaggatagatggtagggaattatttgtagacctgattgtattagatttatttgattttgatgtaatcttgggcatggattttcctaccaaatatggagcatcaattgactggaagcaaaagaaagttgttttcacaccagaagatggagaaacattcgagttcaaggggtaggaaagaaaccccgcacccctattatttcggcaatgaaggctaagcaactattgcagcatgggtgcttagggtatctagttaatgtggttgatgacaccaagaaaattgaaagaaagccggaggaaacacgagtagtcgctgagttccttgatgtgtttccagaggagttacccagatcaccaccacacagagaaattgagtttgtgatagaattagtgcccgggacagcaccagtttcccacgcaccatatagaatggcaccatctgaattgaaagaactcaaaatacagttgg

SEQ ID NO: 292555 - DNA, 578 bp, Cannabis indica
gttcgggttagagttccagtcttggtctgagtttgggttctggtccggatttcattctaggtccagatcaggctccgggtgtgggttcgcgtcctgtgtcttggtcaaggttgggtccgagtccagagttcaaatcccgatctaagtttggattcagttctgggtctaagtcctttgttctgatccttgtatgggttcgagtttgggtccgggtctagcttttggtctgattctaggtgtgggtgttagttcaggtctgagtctgtgtccgagtttgtgtccagttccggtcctcgatctaggtcttggttcgggttagagttccagtcttggtctgagtttgggtgtgggtccggatctcggtccaaatctaagtccagcatttcgatccaagtctgggtcttggtctgagtccaaattcgtattcggatccctatctaggtccaagtgagtgtttgggatcgggtcccagatttaggtccaggtccgagtctgagtttcggtctaggtacacgaacatgtacgggcccgagttccagtctcagttagggtgttcggctaggtctgtgttcggttct

SEQ ID NO: 292556 - DNA, 497 bp, Cannabis indica
cgacgacaaacacagcttgcacttctccaagcaggcatccgcactgggactcctttctggaatgaactgcagcaagaaggagctgcaagccatcaggacttccagaagagagtccaaaaaaaaaatcaacctcgaagaagcccaaatcgtggcttacggaggatactaccccaccgggatagcagggtacatgcccggagtatcgccctcgggtactaccccgaccgcaactccacaaacaagtggcatacaattctctgctacccccggatatagccagggccaggccttggcaccagcatcatcccatttcggcaacccgtccggagtgaatggacaaactccttcgcactctgctccggctgctagcctggcaggcccttcccagggctcgaggagtaaaaggtcctccaagggtagcacccggacgggggagaagcgccagaaaagggggtaccccccaagtatactcaatacacggagctgtcagactccca

SEQ ID NO: 292557 - DNA, 980 bp, Cannabis indica
ccttgtgatttcattaaaaaaatatatatttggtatcttatgttttcaataatacttaattggtaactcatattttcaaattgtacatatttggtaccctaaagtaaaatttaattaatataattttttcgaattaactaaaaaatctcaattatatgtaatcatataattaaatttgaattcaaaatttataaaattttagataatttgattgtattgattaatttattcataaaaacttaaatttaagataccaaatatgtatgattttaaaatacaggatatcaaataaaaattattgaaaacaagggtacctaatttgtatttagataaaatgtgtaaacacccttttctttttacaagtttatcgtgggttattcttctgttgccgatacaagaaattaacgtgatttttttttatttgaaaaaaatacaagttaaaaacctataaaaaaaaattaaaaaagattctataaatatatatatatatatactagaagaaagttacgtgcaagacacgtatatttagttttatgttatgtgttctataatttaattaagaaagattcaataaataatcatataatttaaaatgatttaaaaactaattttagtgtgtggggttatttgaaaatcaatagtgaaaagtcaaatttaaaatttgcagaaagagaagaggagaatggagattagcttgaaatatatttaaaaaataataatgctacacacttactatggacacttaactcgagccggtaataataaaattataaagaataagggtagcaggcatataactggacatatgaaagaaagaatataaaaaacaagaaatatgatagcttccaaataatattataacaaagcaatgctctccaaatttatcttaatatcattcttctcttgaagcctctcatcaatctcatagcactccatgatagattcaacaaaatatatgtgtttatgtatatttggattca

SEQ ID NO: 292558 - DNA, 512 bp, Cannabis indica
cccgtgatttcggaaagtctgtaaagaccgttttttcaaatactattcaaaagtgtgtttcctacggcaacaaaaagagtttgatcttttttatttaataatgataaaagtaatgtgtaattattctagcgttcatcattggaaagtgtctgcatagtaaaaaaggtcgaattttaggctatatatcttttttttcgaaagggaagggaagtttagtggttataatttttatttttcgttctcgaaagatgacttgtttctgtgttagatgctacatcaatggtatgaatttgatgtgtctcccgattaaaatttgaaactccagtcggtggtggagagatgccaagatgtggggctgggttagaggtgttttagggccagttcgtcacattagtgagaaaatgcagtatgtgctgtgagaaaaatagaaaaaagttgaatatttggtaaattataaatttcaaaaaattgtgagttgttaagatttattataatgataataataatgttat

SEQ ID NO: 292559 - DNA, 72 bp, Cannabis indica
agaacgatgattaaatgtttatagcgtatctatatcatggaacatataaagcgttctatatgactgagggtg

SEQ ID NO: 292560 - DNA, 700 bp, Cannabis indica
ttttagtttatttaaataatttaaattaattaaatatctactaagataatataatataatatcttaatttaaaatttagatatttctaatattatattcttaatcttataatttaatgaattaaataaaacaaaaataaataatttgaaaaatagatatttgatggttatgatattatcaattttgtttaattattaaataaaacaaaatatcttaagtttgaaaattttatggttagaaaccttaaaatttctattcaaacaaaaataacaaacttttcaaaatttcttgttattttgctaaagattaattttttaaaaaataaatatctaataagataaaatatcaaaattaacatttttctaatcttataatttaatttaataaaatatatatttcaaaaataacaaattttgaaaatctgatatggttaccaaatttgaaactttaactagattattttaaattttattaatattttaatattaaaataagatcatttcaaattttaataataaaataagtagtatctgatcttataattaaaataatcaaaaatttcaaaattaaccataaggcttgtttgtggaaaaaatcaaattttcaaattcaacggcaactaatatctaaaactatttaatattaaaaataataaaattatttatctgataattagatttttaattgaaaatttagattc

SEQ ID NO: 292561 - DNA, 742 bp, Cannabis indica
  modified_base (703)..(703): a, c, t, g, unknown or other
gggtcccagtctggttccatttctggtgtaccgtcacgagctgggtcctaggttcaatttcaggtatgggtcgagtactaggtcccagtcctcgttctgtttcccaggtccctatcctgattctggttccaggtcccgattattgtgtgggtttgggtcctagtctaggttcttgttcgagtcctagtctcagttcgggtttgggtctctatcttggttttgatatgggttcaggtttgggtttatgtcctgatcctggtcctagtcttagttcggttctagtttcatttgcgattctgagttcgagtttggggttgagttcgggtcagagttcgaggcttggtctgattttgggttcgggtctggatttcagtctaggtccatatcaagctctgggtgtgggttcgcctcatggatcttagtctaggttgtgtctgagtccccagttccaatcccgatctgagtctagattcaattctgggtctaagtccttggttctaatcctgatcttggtttgagattaggtccgagtccgggtctagctctgggtcttattctaggtgtggttgtttgagttcgggtccgagtttgtgtgtaggtttgtgtccagatctggaccccgatctgggtctaggttcaggtctaggtccaagttcgtgtcccgagtgcgcgtccagttgggtctgggtcagatctcggtcgngatctggtctgcatttcgatcccagtcttggtcttggtc

SEQ ID NO: 292562 - DNA, 290 bp, Cannabis indica
gcaaaaaatgataaaacagcaaaattgcaaaagtgaggctcatatccacaagccatggccggccacttgtatagggtttatcatttaatatttttcattattttaatgtcatataattcaaacctaaccctatgtggcttactataaatagatagtggtggcttaggaaataatgacatgcatattattcctttcagagaaaaacctgagccatcttttctaaacctagccgccacctctctttctttctttttctttggttggttcgaaaccccttagtgatagagtag

SEQ ID NO: 292563 - DNA, 590 bp, Cannabis indica
aaacattctgattcaagagcccatgattgttggttgtaacaatgctgaacttaaatatctcaattttaatattttattaaagcataaatctacaaattgatattttactattatttcaataatttttctataaaaaagcataaatctacaaattgatattttactatattttaattttctataaaaatataaaatattttagaaaaagttagaaaataaaaaataaattacaaattgatattttactattatttaaataatttttctataaaaagcataaacctacaaatttatattttactattattttaattttctataaaaaaaatataaaatatttttaaaaaagttagaaaataaaaaataaatttaaaaaaaatattaaaacttaaataaaaaataattaatcgtaaattttgtttatatacatacataaaatatcaatcaatatacataaatctatatctatatatctatatatatataatagagacataaagcggtgacatgatactctaaaatttctttaaaactatttttcttttctctcaataactaaaatatcacatttttatatatttttctttttt

SEQ ID NO: 292564 - DNA, 593 bp, Cannabis indica
cctacttcccttatattgtatctattcaatataaaatgtgcctatataacagaattcttggttttatgagaaagtcatggatgactttttaattatatcaaaataaaatgatttattaataaaaataaaatggtttatgagaaattcatagtttaaaatatttaatttgatatcttaattattaataaacaataccataaatatacatctacgatcatataagaattttattctaaaactatacgatcatagattaaataataatttcttataatctgaaatgaagacacgaaaaacagaaactaattgaataggactttctattcaattggggtgtcgaccatgcatggtaagtaaaaagctatatattaaattttatgtcatgatacaattaaaaattaaataagaatgtactactatctatatattatatatatattgctaaataatttttctatttattttttttggtctcgatcatgttataaatatttgccttcacatctgaatacataaaatgtggcgaattctttatttatgagaaattattgggtgactttttttaaaatatttttatatatataaaatgtggc

SEQ ID NO: 292565 - DNA, 680 bp, Cannabis indica
tatcggtttccaattgtgcaattgttccaggatttactacttttagcatgtgcaggtattttggtagttgttgataagattcatcttgccttcctcttgccaactccaaagctttctctcttgctctccatgctttttggtagctcattgacactccaaaatcatcaatcatgtctatcataatgtcatttggtctgtgatttcttttgattgacagaaatttcttttttatcatttctgcaatcatgttgcagtttgcctgcttgtggtcgcccattacaatatccagtgagcagttgtgatcttggacatattttcttactttgaatgttgaggtactcttgaactttgaagctctcagaaaccagttacagttgtcatccacacaagtcaccacatactctcttggttcagatcttttggttttaaactggaaattgttgatcatagcaaaaaaacccactgcagtcttcaatacttttctgtccttgtagatctgtcctttttcaatgttgaaaaccttatgatctgttattatttgtctttcttcttcttgtcttttccttttgtgttcttgtgttttctcaatgatacaatcagcaacactatcagctacttgaaatatgtttggtaaggcaagtacctcgcttatttctgaggtttcatcatcgtattccata

SEQ ID NO: 292566 - DNA, 629 bp, Cannabis indica
aagacccaggacgcgaacccacacccggagcctgatctcgaccttgactgaaatacggactcgtacccaaactcagaccaagaatcgaacaccgacccgaactcaaacccaaactcgaactcagaatcgcaaatggaactagaaccgaactaggactaggaccagtacaaggacctaaacccaatcctgaaccaagatcaaaacccagatagagacctaaaccggaaccgagactaggactcgaactcaaacctagaccgggacccaaacccacacaataactgagacctggacccagaatcattattgggacctgggaaacagaactaggaccgggacctagtacacgacccagacccgaacttgaacataggactcaactcgtgacccagcaccaaaaatggaaccatactatgactcgagattgggatccggatctggacccgaggcttggataaaaccagtagtcggtgtttggatttgggacccagccctggactcgaaccctgacaaggacccgaacacacacccggacctgaacccagtcccaaacacaatagtggacccgaacccgtaccctgtgacccaaaattagaaccaaaaccgaaagttgacccggactggaacta

SEQ ID NO: 292567 - DNA, 706 bp, Cannabis indica
gtgcttaatggaactatattattatatagtattcctgtgttgtcttttcaggtgtgatctgacaggttggcgcggtatagtcacaaccaggtatttcgggccgaaccgagttcgggcccgacatgcaaattggattggattatttgacattttatttgatatgtgataatctgaaatttaattgggatttatttatgcttggaatgacaaaaatacccttgtgagggtgaatatgtgtgttttgggccctaagggcattttggtcttttgacctctattttctatgtttaataaaattgattttttttgagataaaggaaaagaatttctggttttgctccctctcacccgacctctctctctcactcaaaccctctcatttctcaatctttgatttcttgagaaattggtgtgattattgcatgaattagagcttgatacttgggaattgttggagtttagccttgaattgagatttgaggtaactttccttggttaatctttatttattaattgaatttttaataaagaggagcatgaaatagatgtagtgttcttgattatgcatgttgttagatttgaagcttgatcttggttaattgagcttgttgttgttgtatgcttctttgatgagtttgggcagagattttatgatattttctaggttggaatttcatattttaatagtgttatgctgctgagtttt

SEQ ID NO: 292568 - DNA, 532 bp, Cannabis indica
tcacctttccaactaactccaaatagttatcgcactgccctggccttttacgcgatgtatatggagtacgttaatagagctccctcggtagaagagttcagctacttctacgatataaaaagcgtaggccttcataacggtttttactgctttagcaaatgggcaacctctgaaatcaatggagtagaaggaatggtgtcgaatatgggagactggaaatcaaaatggttctacatcttcaaagtccctgggattagaactgattttaatcgcagacctagtacgtcgcgtgttttctaacttaggaattttctgaattactttgagatctcatgctaactcgctcttttttgttctcgcagatagaccagctcgacctgcacttgacgcaactcgcagagaaacagatgaaattctcgggagccttccggtacaagatcgcgactggcgattactgtgtacgactgccaagctgcgagaacaccagctgattccagagaacgcaagtcttcaaagagagccagtatacaag

SEQ ID NO: 292569 - DNA, 767 bp, Cannabis indica
  modified_base (715)..(715): a, c, t, g, unknown or other
aaatactgccaggcggtatttttactttttactgtgttttttataagtttcatactgcagtatactgtgttaagttttcactggtattttattggtgtttttagttgttctactgcttttccgtgtgacagtatttttgtaaaagtgacttcaaattaccagtatttttgtaaatttccttaagtatgaatgaatctcaaaactaattggtaatgagagaagtagcccatttatcttatatatcacaatttatttccacacattagcaatgtgggactaactcttaataatatatgagtaaattattgtttttacacgatgacagataattgtacttaaacggaacattatataaattcttattgtgatatttacattaaacttatatttattaattttaaattgatgatataattttaataattagataaatattattaagtgtatatatatatataaaaaaaaacttagtgcatgtgtttcgtttcacattaagtgcccatatatgagagtaattgtgagatcatattccatttatagctatcaaatcttaacatcacgataagtaattaaataaaatagtatacgtataattgaaatttaatataaaaaaaaattaattaaaattacaatacacataataaatatacaaaattacgtttatgcaattagtcatttcaatcaacatcctaatttattaagaatttttctactntaatttgttggtagatcttcatcaattatattacactgtgaagtatatatat

SEQ ID NO: 292570 - DNA, 618 bp, Cannabis indica
aacaactttatatcctcgcggggatatctgtttttagtattttcgcagtacacgggtactcgcgctttaatatctataatattttgactttaattacaacctggtgtaataagtaaaaaatttcataagacttgaaaaaattttaaacttgaagaatttccaagaattttcattatataatcaatagtacattacggcatataccccctatacttaggattttttatataaaaaatgactaagtataagtacaaggcgaatacaaattagacaatgcgagtactattgataatagaattttaggctttcgccattccaagctcgtggaatcgcagtaccatcgagtgctgcgagtcgatatgtagcgtcaccaatcttttccgcgatgagatatggtccttcccaattatccccgaagaccccatgcgctgggttcttggtatttggcattactcttcgaaggaccaagtctcctgttcgcaggacttttgccttgaccttggaattgaagtatcttgcggttcgccgctggtaagccgcattttttaagtacgcctgatcgcgtttttcttccagaagatcaaggtagagtgactgtttttcttcattttgcgagat

SEQ ID NO: 292571 - DNA, 612 bp, Cannabis indica
cttagatatttaattttcaatttaattaaatgtatttgttgactggatttttagccaaccgacgcggagtcgtaataaatgagatttaaaccaaaatcacaataataaatgtaattaataacgccggaattcgtaataaatgtcaataaaagacaccgaaatttaaagaggttcggccccggatgtcggtaatagcctactccccttgagttttattgatctgagttacaatagtcaagaacaggctcttgattgcaaagaatgagaaatctttaattttctaagtctttcagattgcggatccccctcccaggtcatgggtgaccccttatataggggagggggtcggtgcttctcgcttcaggagaagcgaccaacgcggttggagtctgatatttaggaaaatatcccgctattttcgtgggttgacaactgtctttgagcctttcgcgggatttgaacatttgaaggagtcactgatgacaagggtcccttatgggtgtgacatggtcgtcaaccacctttgaggattaagcccatacttgggggtaacaccctcgagactctcgttgagggggggattaccactatcatagttaggtgactccccca

SEQ ID NO: 292572 - DNA, 509 bp, Cannabis indica
ctttatataataacattcccttaattgagattgaaaagtctttaggccgaccagccattacctcatctcgaatcttgactagctcgggatcttctagttgagcttttctgattctttctaacaaatcagattgaagtgttaagttgtgcaactttccaactacaaactcaatccctgtactaattatctcagaagctagttgaggggctatcaaaactgtggtgcaaacctgcccgagacctcttctactcaaagcatcagccacaacattggctttcccggggtgatacagaatttcacagtcatagtctttaaccagttccagccacctcctctacctcatgttcaaatctttctgcgtgaaaaaatatttgacactcttatggtcagtataaatctcaaaatttttcatcataaagataatgccgccatatctttagagaaaaaccacagcagcaagctctaggtcatgagttgggtagcgttgctcataatctttcagttgacga

SEQ ID NO: 292573 - DNA, 659 bp, Cannabis indica
acctagcttttatggtaaagaaggcaaggtttgttgtcattggcaatattgttggtcaggttttttttccttaagtcatatttgaatattagcgataggatctgacaagcaaccttacttgttttatgtgttggtgaagctctaaaaatggaaattgttggtaatttttttttattatggcaattggtctttaaccatataagttttgacaaatttatgcccaaaatttatttttaataagttgattcccaagtacttaattcgttatcgttcataatattaagtttccacagttaaataatttttttatatatttatttttcagtcattaattaattatcttttgtgttatgtttgatttttttattgttatataaaaagaatatatattaattttattttcttttaaattataaaaaaaacggtatatagtagtgtataatttattttattttacgtagtattaataaatattataaaatatatatgtactattacaagtatctatctatccatctatatatataaagtagaagtatgagacggtgatgtgacattctaatatcacttcaaatagctttatctcatctctccttaattctctctttttattaatttttattaggtttataaatatttatttattttcttattttttt

SEQ ID NO: 292574 - DNA, 648 bp, Cannabis indica
taagttcaagttcgggttcgggttacgagtacaggtttgggttgggatcagggtccagctcccaatttgggtcaaggtctgatttagagtccaggtcctggtcgtgttacggttctggatctatgtccaatttcagttatgattccatgtccaagtcctagttccagtcctggtcaacttcccgttttggttccaattttgggtcacagggtacgggttctggtccactttttggtttgggactgggttcaggtgcgcgtgtgagttcgggtccttatcagggttcgggcccagggctgggtcccaaatccagacaccgactttgggttttttccaagccctgggtccagatctggatcccaatctcgtgccaagtctggttcatttctagtgacgggtcacaagctgggtcctagtttcaagttcgggtctgggtctggtactaggtcccggtcctagttctttttcccactttcatatcctgattctgggtcaaggtctcaattattgtgagggtttcggtcccggtctaggttcgaattcgagtcctagtctcggttctggtttcgatctctgactaggttttgatctgggttcgggtttgggtttaggcatttgtcttggtcctagtcctagttcggttctagt

SEQ ID NO: 292575 - DNA, 497 bp, Cannabis indica
tatatataataataaaattaagttacataattttttttagtattgcatattattatattgtaataaaaataaataaatatattagatcatttaaatatatacagcagtattagatatattgtagtactgaaaattaatataccacaaagaaattataacaatattaaattaatactcaaaaaatatatatatatcatgctaacaaaattatatatacaaccattaaaatatgaatacataccaaaaaatttatatataataaaatagaaactaaatatcatattaaataaatggtatattatagacaacaaaaatcatataccatacaataaaacgtatataccgacaataaaaaataaaacaaaataatataatattattaaaaaaattatatatcacctttatgtatactaaaataaaaaataaacatgcattatcttgaaataaaatagatataatatacaataaaacttatataccatataacataaaatata

SEQ ID NO: 292576 - DNA, 652 bp, Cannabis indica
cttttaggcttgcatagttctggtgttatttactgtttgttgagtgttcagctttcctaccggtagaaaacttttttttgaccattgattttagatcatgtggttattatgatgtaaggtatatactcttacgataggactacttgtatacaatgaaaactttatacatattataataatatttaattatatatctattttaacaaacaaaataatattaataattaaaaaaatattaatttttaatttgaattattaatatttttttaaattctctcatatgtaaatcttcacagttttttgcattaatattattgttgctctaatttttttttctcattcgatattaaactagtgttcttgccattattatatttttgattaatttactctcatattgttataaaagattttattaaaaaatattttattattaaactaattttattgggaaaaaaaaagagtttttacaccacatactgaaatttctaactatattctttattttattattactagtagatttttttcaaaaatacaatataagtttcatactgtgtactgtgttaagttttcactgttgttctacggttattttttagttgttctactgttgtttttagttattatattttgttgttttacggttgtt

SEQ ID NO: 292577 - DNA, 1033 bp, Cannabis indica
aattgttgtgtgatttactgcttgattattgattcatgtctataattcatatcttgaaatcaatcaatctaaagataatcaacttggtaatttggatcattaaaatcaacaagttgtactttcaattggtatcagagcctgaaattttctaaaaatttgtgttagatcctactcctgtctgattcttgatccttgattcttgattcaatcttaaggattgattctgtcgtcactaaccacctctgagttctctctcaaagaactacaggacgtttgtgtgtctgttttccacttctgtgtgcaggatggaaatgtttagagaaggaggttccacctcgagacctccgatgctggaaggagccaactatccatactggaaaaccaagatgcgtgctttcttgagagctgtagatgaaagagtttggatgtccatagaagaagggtggtggaaaccaacgatgatggagaatgaaatcgttatacccaaacctatgagccaatggaccacagttgaaatggaaagagcgaatttcaactcgaaggcacttcatgccttgtttaatgctgtctccactaatcagttgaaggtcatagccaattgaaattgctaaggaagcttgggagaagctgaaaattaagaacgagggaactgatgctgtcaagaaatcaagattgcgtgccttggcaaaggcctttgaaaatcttaccatggaggaggatgagtctgttgctgagttccatgcaaaattgtgtgacatttcgaatgaatcgtatgctctggggaaaacttactctaattcaaaattggttcgaaaggtgcttggtgttctccccagaagattcatgtccaaagttacctcaatcgaagaaatgagaaacattgaggaactcgattttgacgaactcatcgggtctttgcaaaattatgagctatctctgtccaggtggaagaaaaccaagaaacaaaaggaggtggtgaaagaaaagtcagatgccagcattgcacttatacaccaagaaaacaagaaaccag

SEQ ID NO: 292578 - DNA, 239 bp, Cannabis indica
ataattggatatctagttacacacctaaattttaacattagcttaaaaatataaagaaaaaaacgtaaaaaaataagtatcactttttatttaagtttaatacttcataaatatactattcttacaagtgtattgtagctaaaagttttaaataattaaaacaataacatttctaagtaataaaatagaacaaaacatcatgaaaataaatacactaaacaattaagtgttacaaattc

SEQ ID NO: 292579 - DNA, 911 bp, Cannabis indica
agattttaaatgttgaactatgattataagtttattatggtttgttaattgtttagattttctccataattacaaaccagttctttccgagatggatgggtaatgagttcatttacttcattttgcattttcccgaccaaaggcactgggtcacagttgaagttgacatagagctgtggaaattaatgtgtacgactgtgatttccagcgtttgtcattggtccgccatggcacccatcttgaaacttgggaagaactgttgccctcgctaatccatgcaaccagggattttccacttaataaccagatcatggcgttaactaataaggagatcaccgtgcttccgaaaatgcatgcaagtcgagccactcacgacttagttccaaaggtaacaatcaggtacatagcgataaaaaagtactatagtattaaaatatgctttacattgtactaactttatgttttatgttgcatttagtggtgattgtggcgtttattgcattgagtatgtggagcatctcataatgagacgtggattaaccgatgtcacgcaaggccagatcaagttgtttcgtgaaccgtggtgtgttgatttgttttaccaaaatgtcggctgattatatgtgtaattatggtgacattgtatattttgtgtaattaaaattatagttatgtattctgtttatttagtcttgtaaagtataacagtgtctcagttcttcatagtagatttatcatacttattcttagtcttgtaaaaatatttaacattgtctttgattcacaacaaaaaatattcaacctcaacattattttaaagcagtttcgaacctgaaatagaaaacatgttattacaacgaataagtatactacgcctcaaatgcgagctttgcatgttgctctgttgtggc

SEQ ID NO: 292580 - DNA, 592 bp, Cannabis indica
ttgattatattttcctttcctctctttttttttttttttgcatgtttttgtgttagtcctcctattttatggttttctgtttgtttgactctgtgttttgttgttgttttggttttgttttgttaactcttagggaaagggtaattctcagtggagattgtgttggattaaaatcctcaatatgagctcatatgtatattagtgtattgctatttgaagcttggcccaaaataaagtgatcattttagtaattgtgggtcattgggtattaaagtgtcatgggctaaatgtgtagataccctaagcgatatttctaatttattgaggggctaaattagaaatacttaaaattaataacctagctatgaggttataaattggtagtggtccccaagaaacaagagtgaatttctattctcatcttcccccatcaagagagaaaattagaaaaccctaagtcttgttttcttggaagatcattacccaaaattaccacaaagattatctctacaagatggattaagatcatcactatctatgaattaaggtacgcttccgccatttgaattcttctctttgaatcaacaaaggt

SEQ ID NO: 292581 - DNA, 496 bp, Cannabis indica
cgaaaaaacactacagaaaaataaaggagaacacaacaaagtttgatctcggagttccccttgaaatcaagagtacatctccgtcaagcttccctcaaagacgcttgattcttcactatgatgtcaaaaccggttacaagttcatggagattccatgctacaaaacacagcaggtaatctctttctcttcactttatttctctttgtttttcttacaatatctctcactaactctctatatttttctctcttgtttctgaggtgggttacacaaagaaaacaaaggttgctgcctttttttttctgcttggccgaaatggtgtgttgctcaaagtggaaggttgaaccacttatttataatgttgttgttgttgttgtgtttgtttctgatctgagaaagtttgttgtaatctgtttgagatattttccttgtaaagctgaaagttgttagagtcttgagatatttatttgcttccttttattgttaagaaataaa

SEQ ID NO: 292582 - DNA, 607 bp, Cannabis indica
gagacagctcctctttaggttttctatgatttttggaaggctaatcctgaagaaaattttgattaccttggtaaatccaagaacatgtaccttgacttccgcacgactcaggttgccaaagaaaaccccgaggtaactacctccacagttccagttgactagagcatcgaactccccgtcgctcagagtgttgatcctctggccccctcagaccaaggcgatccgtaccaagagcttgggactcctggtgtttgaatattttctcattttttatatatgtttgtacgtcccatagtccttcttttgagataaaatgaccagccaagcagctttcaaacttggaatatgtttttcatttttaagacaactggctgactgggcagcctttaatcccagatttaccgtgctttgttatcttttttcaatgaatatagtttcttgttatgataattgattgtggaactgtgtttgtttttttttttttgtagcttgttatttacttttagtcaatgtctttgttacgggtagtagttgtcccccaacgtgactgaggaagacttttgtactctttattcacttgtcatttctacaagtatggtttttttcg

SEQ ID NO: 292583 - DNA, 721 bp, Cannabis indica
ataaaagggaaccactaaaaaggtagttttttttttcttttgcaaataaaataaaatatgtatatcaatatatgagcaatgcaatgaaaatcaaatggtgattattttttatgtgaattgatttgtgactatgagcgaatcaatagtagaaaaaaaaaatatgttatgtataaatgaatataaacatacaacaaacaaataatatattattatatatgattaattagacattctaacttattttgtttttcttttccaatggtctatttcaagcactttatcaactctcaacataaggggcaattcaacatttaatagataatcaagtcaaaataagttaacaaaacgctatactactacgaaaatttcaaagcaaacaaaataataattaaaaaggaaaggaattaaataaatatagctattgatcataaaaattaataaaatattaactttaaaaaattaaaaacttaccattataatacaaggagatagaaattgaaaagatttttttttttttatataataggagatagttgatgaggattgaggatttaggatgaggaggatagttggtaaattgtaaattgtaaaggtgattttttttttttgagagattagaaatttagaagagaaagaatgttagagaaaaaaattgggggaaagaatggaagattgagaatttgagattgagacttgagagagagagagagagagagagaga

SEQ ID NO: 292584 - DNA, 578 bp, Cannabis indica
tgttacgctcacacgtctaattacaataaggccttagaacggttcatctcggttctagttaccgagtccaacccgattatgccttgaacacataaccctttacttcaatatacatctatatacatcatggaataacaattacatattaacaattcacttgggtaataaccctaagccaataaaccgctcactttagagtaataactctaatcccggtttctagtttctcatataaatcacattccatataagcgccattgcgcatatctctacgtgctaactactgtcttacctgatgtcccacaaatatggagatttcaaatccccgggtgctcctgaccaagtgccggtaatcctagtcacaattctgggatacacaagtatagggttaatcccaaaaatcatttccacattaaaaactgggcatttaaattccagatattcagatagagctcggaacgagctttccaacgatataaagaacgtcccaaacggagtcccgagtcaaaagttatgaccaaaacaaaaacccaaaaaaaatacaataagctgccaaaaatggccgcggctactgagtt

SEQ ID NO: 292585 - DNA, 694 bp, Cannabis indica
agatcctggtaaaataaattccaacataaatcaagtctccaacaactatatttttaatagctatcattcattcacattcataaataattagtaacatcttttactaatttaagagtgaaaaagatgtgagagttacatattcaagtgatcatcaaattaaaggatttgcaactcctattttgtgatcattctacacacattttgtaacttcataatgtttgttacaatttgacaaaattaatactttgtcacacttaattatttaatttaaatattatattatataaaataatataacaaatacaccaggataaatattttactatggtattgatataatttttttgaattatacttcagttagattgtttgggaactccatttcaactttttgagatctgcctttcatggatctgaaaattgaagtcaggacattagttttatgcaaattaaactagatttttggttgaattttagtttcgtagtagtttttctacactttttttcatgaattcaaaacagtccctattttgattgattctggtcgtcttctcaggtgaagtcgtcgaaattaatggtggttctctttttggttgaatttttgtttcggttgcgttgggttgttgtgtggttgcacgatggttgcgcgataattgccaaggaagcatgaatcctgggttgaaggtgtgtgtaa

SEQ ID NO: 292586 - DNA, 530 bp, Cannabis indica
acaataataatagaacaaaaacctaacaaaacactagcgattagttagaagaaattaaaacataggaatagaaataaaaatgagattatgaataggaatggaatgaaatcaaatttaaaatgcataaaaaattattaaatttttctcatcttgcataaaaatgagaaagtgttgggagtaagaggataataaatctctagagtattattgtcaaatatcataatattgaactgagagttcccatcagccatcagctcttgcccatcaatttctctctccccgacgctgatggttcgtcccatggtcggagaagaaggtctcgccagaaaattcttgggtcgtggtcagagaagatcgtccaacccccctttctctctcccatggtttcacaattttagggttttaatttttaatttttttaggaacagtgtaatttttttgaagacaatgtattttattatttaatttcatattttattataaatttattaaattaatttgatgtaaagggtttatgtaatttttttttt

SEQ ID NO: 292587 - DNA, 643 bp, Cannabis indica
ttttaaagattacaaatttttttcttgaaaaaattaaatatttatatttgaaatatctttatatatttgaaatatctttatatttgaaaaaattaaagatagaaatggtatttctgctaaaccatgacacttgaatcatcggggcgaattaacaccaaccaataagaaagaaaaaaaacagagaacggtttcaaggtggagtattgtgtttaatatatgagtttgcacgatcagatttagaacaattacaaataatgagaaagtagatacagaattaaatctaatcaaatttaaatttaaatggtatatgatttagatatttttaattaatctatttaatatttaataattatttagtcaaaaaaaatatctacaaacatcatagtgaaaaaaataataacaataaaaaaaatagttatccttatatgatagaaaaatagaaaaattaaattttatcatcaattaaaattaataattatacctgtataattaataggttaaaaaaaagagtaatgacctatattatagatagatatatagattatggagtgcaaacacttggactaatttgatgactctctattgccaaaaatttattcacattagaatagaaaagaaattaataaagcaattaaaaagaata

SEQ ID NO: 292588 - DNA, 704 bp, Cannabis indica
agccaaaacatctcttcctctcttctaaaccgagcctatagtgaaagagtgagtgcccacacacatcaagtagtactcaatcatagtgtgtaaggctgtgaagaatccagtttcaagagaaggagattcggactcagatcttggtgatactctgctacagaaaggatacaagggttagagatctgagtggaaggagacattatattccgctgcaaccactgtaaggtttcttatactttatatgtgtttatttcatatcgttttagaagttcatatttaggatgttaaataacatacttgttagtaaatctaagatcctggtaaaataattccaacaacaagctcaccctggctagcctataagcttcttttggccaaccagacatgttggtatagcttcttgatggctcacttcactcttttcaattgttgcttaaaatggttttcccataccttgttgtttactattggcaaggatgtattccacacatactctttcttggcttacgtggacatgccacgtcacgtggaaaaaatttgggataatattttccttcccaagtccctgttcaaacatttggttggatggggaccttctagctctcgtctggtttgtagtagtctccgtcgagcaaccttgtctagcggagtgttggctttttgcatggcatgcttttagacctttatcttctctctctctctct

SEQ ID NO: 292589 - DNA, 577 bp, Cannabis indica
gtgtttaattctattattttagataattcatatttatggtgttaatcaatatacatgttgataaatctagatcctggtaaaataatctccagcaattggcctcagagccatggtaatgatttaatttcatgaataatagatttaaaataatgattgtgatgatttggatgtgttcatattggtttaaggaaatttgaaaaactatactttaaaaaccctaatattttattcttaaaccaatacatttcaaaataaaacatatatgacacttttataaaaaaaactcaagaataaccctcacataacacacaacccaactctctctctcttcctatatctctctaccttctctctcaacccaactgaaccctcaaccccctcaccacatcgtacgagccgacccagccccctcacccccacttcgaccgagacgactccgacggagacccacaaccccgatccgaccgagacgactcccacggacacccactaaccgaacaaccttcaatctcaaacttcaacccacaacaccatcggacccaacccacataacccatcggaccatcggaccccccac

SEQ ID NO: 292590 - DNA, 656 bp, Cannabis indica
agcaagaaggagtttcagcatcaaagattcagagaaagaaatccaggttcagatattgataatgctctgctacagaaagtgggaatgtcagtcgggccgagccggacccggcccgccacaaacctggcccggcccgacatcactttggcccggcccggcccggcccgactccttcttttggcctagcgggtcaagcccggcccgagataatcgggccgggttaggctcgacccggtttttttttttttttttttaagactgaatgaacagacggccataatcaaggatttaatttttgaaaataaaatgaagaggcaattgtgtgattcgaaaacaaaaatttcacacagaagaacatttcatgactttgcatgcttgcaaaggctcattcttctatttttaaactcctcacgtaaaagaatccataatacccaattccaaacagcctaaactgaataattgaaagccaaaggcataaagtattaacccagagaacaaatgaaatcaaaccactaaacaatatctaccattgatgcgaattaaattgaataaagcttcagactttaactgacagagaatatttaacgaaaaccataggcaaagcttaatccctcaccatatttttccagaagagcaaaaaatgcaagtctgccttc

SEQ ID NO: 292591 - DNA, 594 bp, Cannabis indica
gggttcgcatcctgggtcttggtctgggtttggtcaaagcctcaagttccaatcccgatctgagtctggattcagtactgggtttaagtccttggtcctgatcctagtctgggttcgagtttgggtctgggtccgggtctagctttgggtctgattctaggtgtgggtttgagttcgagtcggagtctttgtccgtgtttgtgtccaggtctggaccccgatctgggtctaggttcgggtccaagtcctagttggggtcccgagtgcggatccaagtttgtgtctgggtcaggatctcggtccagatcttcgtccagcattttgatcccaatctgggtccttgtccgagtccaggttcgtaaccggatccctatctaggtccaagtctatgtttttgatcgtgtcctagatttaggtagaggtctgggtctaagttccggtctgggtacaagaccgtgtcggggcctgggttccagtctcagtttgggtctaaagctaggtttgcgtttgcttctaggtcgtgggtccgggtccgttctcactgtcctaatcttgttctaggttcctggttcgccgattcttgttcaggttcta

SEQ ID NO: 292592 - DNA, 601 bp, Cannabis indica
attaaccaagttttaaccttaagggccttttagtcatttttatttggtgaggggtaggtggctgcccttagtaatgacaccttgcaagttggttttcagcaaaggattaattaaaaatccttttgtctcatttgaagaaaaatcaagaaaaagaaaaaattggaattttagttttctcttgaacctctctctctcttgctttcggctgggacaaaccaagggggtttgctgttgatttttgagtttcagcaaggaatccaaagggagaaatcaaactaaggtaagtttcaatgaaacccttcttagtttcaagctttttagttaggttcaaatggtgattttgaaattgatgggctgttaggtttagttaggtttagggttcgaattttagggtccttttaagttgattttaactccttgcagctggttttaattggtgttaatggttctatgcaattttgagctttgaattcaaagctttgagctttaatggcataaattgatttggtgtgtttttctgtgaaatactggctgggttttattgtgtatgcattgtttaggagctctggaaagtttggtaacatttggtggaaaattgagc

SEQ ID NO: 292593 - DNA, 659 bp, Cannabis indica
tgcaaaaatgtcgatggcgccctttcagtgtctttatttatttttttcgtttttcctccgggtctaggctttttcttagttggagtactttggtggagtcgatgtcgcacactgatacctcctcgacatcctccatcggttctacaattttttcggatcccacgcggggatccaactcatcttcttcagccatgtctggctcaatggtttcccggaccatcagtacgggcacgtgggttgctacgttgtaacattgcctcgcctcccctgatttcctctcaccgtccctattccagcttcctgggttgggaactttaagcacaagtgtcgtatggacgtgactgcactgaaatctaccagggccggtcggcggagaatcgcgttgtaagcggttgggcagtctaccaccacgaaagtgcagtatttgaacgtgctttggggggtatcagggcacaaggtgacgggaagtcttactttccccattgggataagtgtcgttccgttaaaccccgtgagttggaaaccactgggtgagaggtctcggtccgtcaggcctattgcagtgaaggcctctttgaaaagtagattcacggagcttccgttgtcgatcaagaccctggccactcatttaagtgattatgtttagttcactgaaatat

SEQ ID NO: 292594 - DNA, 599 bp, Cannabis indica
ttttaatatacttttttataattaaattgaatttttaataaaaataattaattttttatatcgcttaattaattttaattttcttagtcattcaaaacgattttttttttttaaattagtaattaacttttaagtatttactataaaaaataattgattttttttattttttttatttttaagggtagtactgttatcccaaaattggcactctgacgtggcatcacaagaatggtgacacgtggcatctacttagagcacctggtcggatcaacatgccgagcaggatgcctcgctggcatgtccatgatggaatactcaacgagccgtgcagaatgagcaacacttagcgaattcaaccaagcacttcgtgagtcaccagctcaatccctataactcagggatcaacttgcgtggatgtggcatacacacgattccactatcggtgtatacggcctcaatcccacgatcctagcattcagcaatgatcacacgatctttgtgtttatgcgctttgtaacgagagaggaaactcttcctcctcaagtttcctaccctataaatagtgaggaatgttcactgggaaagggagatcgatc

SEQ ID NO: 292595 - DNA, 1155 bp, Cannabis indica
caagtggccataggtgggtgtgtgagtgttggaggtcctgggttcgagtcccaggtaaaatatgttgtaatatgtaaacgcttaaatcaaaaaaaaaaaaaggtgttattatataaagaggtatgaataattagtgtgaaagagagagagtattactagtcagaagaataatgctaaggaatactttatgatgcctagcactacttttaattaggaattattttacaaatacataaaaataataaaaaaattacaaaaatataattgtacgaaattttaaatattatacagtttttttatatattgtactcttgttaatttgttattaatttttgttatatgtatgttattttgatgttgtttgaatgttattttcctattgttttcgttattatttttataaaaaccggaaaaatatatatgtataaaaaaaaatctttaaacgtacaaatataatttttttttacaaaaaattgtgttttacgtaattatctattttaattatattaatgatatatcattatttattaatattagtacaatattcacatgtttaactactaattagggcctcacacactaaggccccgtttggtattagttgatgaaaaccaattctcattgaaattggtataaaccaaagtgaaagttacaaaaaagtcatatatatatatgggcccaaactaaagagaccaaccacaaatacaagcgtgtaaagaaacagcagaagctaaacagaaaatgcagagcagttttagagtgcatggtggtatgagccaagctcaatgaaagcttaacccaaagcaattgagctgatcttctatttatagcagaaatgtttgacaagaaagtaaaaacaagaaaaatgttagagctcacttaggccaaattaactaacaaagctaattagtttgtcggtttatatttctctcaaacgaaaagaggttgtaaccattttgagtttggacttgaaataagagaacctatcagtggacagagacttaataaggacatctgccacttggtcaattgctgggacatatcttactgaaatttcttggtaaaatttgatctctgacaaagtgtagatcgatttcaatatacttcgaacgagtataaaatatgaagttagtatctaatattgcagcactttag

SEQ ID NO: 292596 - DNA, 534 bp, Cannabis indica
cacctttatacataaaaaatttcattgaagaaaagacaaaaaaacaaaaacagtatacactttctatgtgaaagctcatacgtgttaaaagttaattgctcagaaactcagtaacgctctttgtaaaaatctcatctatataaaagtaagagagcttggatatgagcaacaagttcatagctccaacaatggctggcttggttcttccacatgaagaagtatctcaaggaattgacatgaatagagatgacccacctaaggaattcttcgtcaaagagagtgcttttggtgctgtggattcatctccaccattgattccaattccagtcattgatttaagtatgctctctacagaaactgagctggagaaactaagatcagctctcagcacatggggatgctttcaggtttgtttctgcatctttttcatgaaaaagaaaaaaaaagaagcttgttttaggtacttttgttctgttttttttttccttttaattttgaatactagaaccttatacacagaaatgatttgacttt

SEQ ID NO: 292597 - DNA, 751 bp, Cannabis indica
cacctcttcttcacatgcccggccgcgcagcagctctggcgcaccattggcatgccgatgctctccttctcctcgccgcacatatggaccacctcgatgcaccccaagatccatgcttccatctggtccttcgcgctgctctcgacgctgtggaaaatctgggatgcaagaaacatgctagtcttccgcgacattcatcagcaaacatccgtaactattcagaaaataattgaggacatctctctttggtcctatagattctcttgtcccgcgtataaggatcacgtcatgctatggcgtgaccacctctcccattgtaacatgtaaactctcttttttggaagtaatgatattcaggtggggatcccctccccccacccctttgacttgtttcaaaaaaaaaactgtatgattcctctccggctaattccattgtacaatgaaacacatcccgtaatttgttagcgttgccaaaattgaaatgatatcccatgggagcctaaagcttttcatcagcatactgaatccatgaattcggtgctcgcagcaaccagaacaacacaagtccgtttcatggtacagataaagaaggcaatggtggttgcttgtatgttgcctcgaggatctagggtgatggcatccagattccagagtgcaagacttacagtcaacctgaactctccagcgctgcacgagcgacgatacagcaagtcctggcctatcattaatctgtcaatatatactaagtgaa

SEQ ID NO: 292598 - DNA, 1055 bp, Cannabis indica
ttccgggcccccggtctacggtccaggtcttggtcaaggtcgcggcctgtccaaggtcctagtcacgttcttgttcaaatttcagtttcgggtcccaagtctgggtctgggtccaggtcgtggtccagctttgggccttgtacgagtcccaaataaagaaatcgactatgggtcttgtccaagccccgattttcagatctcgggacaagatttggatcccaatcacgggtcctagtctagtttcggcttatgtcccaggtctcggtctgggtctgggtctaggtccgggactgaaactagggtttagttctaggtctcgatcccatttctaggtcccgagtcatgttcaatgtttagctttgaattcgggtcttgattagggtcccgtgtctcggttcgggtttggattcaggttttggaccccaataacagggtgggtctgtgtccgagtctgggtcctggtccggttaaagttttgggtcttggtccaagtcctggtcgtggtcctgttcctgggtcccaatcggcttctagtttcggttccagcttcatgtcacatcatacgggttcgggtcgagtttgggtccgagtcttggtttgggttctgatttgggtctgggacgaggttcaagtttggggttcgatctcggttagggtccgaggctgggccggttctgggttcgaatctcggtccaggtttcggtcctgttccaagatcttagtctggttccagttcaagtttcggttttggttcccaggtgtgggtctatgtcttagtatgttcccgagacctggtttgagatcgagttttggtttgggttctagtctaagtcctagatcctgacacaaactacgagtcaggtccaagcatcgagtcccgtccaaggtcccgaggtttgtcctaggaccaggtttgggtttgaagttaggtcccgaatcccgatccatgttctgaggcccaagttctgatcctagttcggggtcccatttcctaggtctgggtcccctatatatgttcgggtcctaggtcccagtctgggtccaagttcgtgttc

SEQ ID NO: 292599 - DNA, 696 bp, Cannabis indica
tatccggatccctatctaggtccatgtctgtgtttgtgatcgggtcccagatttaggtttaggtcagggtctcaattccgatttgggtacacgacagagtccgggcccaagttctagtcccagtttgggtctgaggctaggtctgtgttcagttctaggtctgggttcgggtcctggtcacggtccttgtcttgttctatggtcctggttcggcgattcttattcaagttctaattttgggtccaggtctaggtctgtgttcgaatttggttcttcgtctaggttctggtcctagtctgagtcctacatctagacaccgcctactggtctgttccaggccccgttacgcgaatcccgaatcaagatatggatcgatgtcacgagcctctttctggttccagtttaggtcccttgtcctatttctgagtttgggttggggatcgagattggggtgcgattctaggtcccgagcctggttctgtgtccctagtctggttccacgtttgggtctgagttcaggttcgggtctgagttcaggttcgggttcaggtcccgagtcaaggtttgggttgggatccgggttcggcacgtaattcgagtctaggtctgatttggagtccgagtcctggtccagttatggttctggatataggtccaatttcagttatgattccaagtccaagtcctagttcgagt

SEQ ID NO: 292600 - DNA, 527 bp, Cannabis indica
ccaggtacatagcgataaaaaagtactatagtattaaaatatgttttacgttagactgactttacattttattttgcatttagtggtgattgtggcgtgtattgcattgagtatgtggagcatctcatgatgcagcgtggattgaccgatgtgacgccagaccggatagccatgtttcgtcaacggtggtgtgtcgatttattttaccaaaatgtcggctgattatatgtgtaattattgggacattgtatattttgtgtaattaacattacagttatgtatatatagattttcttttcgttcaaattttgataattatacgtggtttcaaatataaaatatcaacattattcaacaaaaataactattaaacctaaaaataattaaaatatttgaaaaaatattcaaacctcaaacaaaaaataactaatgacaaaataatgcatcattacaaatatatcaaaatttcccaacgaatacgtacaagacgcctcaaatgcgggctttgcatgttgctctgttgtggc

SEQ ID NO: 292601 - DNA, 540 bp, Cannabis indica
gaacttgcagcagtcagtggtgttcgcttgaaaatttggcgacattacttgtatggtgaaaggtgtgagatctatactgaccacaagagtctcaagtatttcttcactcagaaggatttgaacatgagacagagaaggtggttagaattggtaaaagactatgactgtgaaatcctgtatcatcctggaaaggcaaatgttgtggctgatgccttaagcagaaaaggacctgatcagatatccaacatggttatgatttcctctcagctagcctcggaaatgactagagcaaacattgagttggtgactgagaaattatttaatctgacacttcagtcagatttgttggaaagaatcagaatggcccagttagaagatcctgaattggttaaaattcgagaagatgtcttagcaggcaaagctaaggacttctcaatttctgacaatgggatgctgttgtttaaagcacgggtgtgtgtccctgatatcagtgagcttaaaaaggaaattttagaagaagctcatactaccccttactca

SEQ ID NO: 292602 - DNA, 527 bp, Cannabis indica
tcaagaataacctctaatttgttataaaaaaatgaagtcacaatttgggccagttataaataagaataacctctatattgtaattacagtagaacctagggctgaacatcgggcgggtttaccgggtttcgggttcacgggtttcgggttcaaaaaattgaaaccgaacccggacccgaatagggcacgggttggcgggttggcgggtcacgggttggcgggtttcggttggtcgggtttagcgggttggcgggttgacccggtcaactcagtcaactcggtcaactctttaaaaaaattaattttttattcaaataattatttttttatttttttatttattaaattaagcatatataatataacaatttgttcatagtatctactattgaagaaaaaatgcattaatcaatccaaccaacaaacaaacaacctatttatcaaagattcaaatcaaacttcatattcatgttcatgaatcatgataaaagtgaaaactaaaatatttcaaaatacatccatatcca

SEQ ID NO: 292603 - DNA, 673 bp, Cannabis indica
cttattaaggtttctcgtagactcgtccctcgatgtgggttggttcaaatcaagttcctcctgattggccctacgttccctgcgagtatgattattacgacgtctagagttagttcctgggggttttctgtgcgagtagtaggtactcggggaggacgtcaagtcatgttttgtccgtcaacctcggcctccagagcgcatagctggtctctcacagtgccccgacctactccgtcgttgatcacgtctacgggaggcactctgcctcctgacagtgggacgttcataatcccaatattgatggattcgttgttaagacctccgtttacttggtttccagccattatgattctccttctaaatcagcaataaagtatttctcgttcgcacagacggcgccaaatgttgttgatggaattttacaacaccaaaataaaaaataacaataataataaagtaaggaacaagtgcgagtattcaacctagaatggcgagtactcgaacagggaacacgaacagtcaacaaaaactagaaatacaaagaacacgagggggtatagtgattcagtcaaatcacgatctacttagtcaactattgccaggattcagtatgtcccatttcacggtggatcactcctttatatacaaagcaagtgtcctatcatttacacaa

SEQ ID NO: 292604 - DNA, 682 bp, Cannabis indica
aaaaagtttatgttgtcattcatattcgaatgagaataaacattctttatatagtgattattgttcattcactacaaaaaaatttatttttagtcacaacaaaacttgtgactaaaagtaaaaaagttgtaataaattataaatcatcattcttatgttgtgactaaaaagtccgtggctaaaagtattagttacaaaattacaatttattgtgactgtgactaaatgtgtttttagtcacaatacttgttgtgactaaacttaaattaatgacaatttgtatctaaatactatgttttagtcacaagcaattttttattgtgactaaaagtcacatgtagtcacaaaaaatatatgttgtgactaaaaaagttatcactaaagctagttgttttttgtagttgactagtataatacactagttataatgttgaaatatagaaatttttgtgagaatatactcatccttaaacactaagttgagtacatgagacttgataaatttttagaaatatttctagagttacccaagtattcatgaaagaagaaaatgacttttaaaataaaagtgtaaaaagaccatgtttaagtctttgagtgtttcttcttcttattctttgagtttcgtagtattatgttattgttggtctccttcttatataatctttgtatatttttacaa

SEQ ID NO: 292605 - DNA, 437 bp, Cannabis indica
tatctcatatcaataaaatgtagatagtatgatcccgtacattcaggggcggacgtacttgtctccctatagtggccatggccccccctagcatttagatatatgcaatataaaatcttagttatagtatattgtaattaaactttttaataattattatatggtggctcttttagaaaagtcaaactaaaatttgaaaattataacgaagactacacttcgcaacaaaacagaagataatttttaagtgattgtttgctagtgtatactaaaaaaaaaattgttaaaaaatttagcatagattcaattatagatgattttcctaatatgtaagaaagacataattttaataatatattttaaactatttgcctatttaccgcttttttttttttttttgaagaaaagcgtacatatattagattagaaactgttag

SEQ ID NO: 292606 - DNA, 536 bp, Cannabis indica
ccaaaaccctaggttctgctatgctcttaaagggttattctaactctggaaatggggaaacacccaactgaggcatcgaaatggcaaaaattgagaaaatgaaaggctcggggaaccctgccaaaaccggctagccggtttttgtcgccctgcaaaccggctagccggtttgcaccaggtttcccaaaacctctcatttgttgctcaatcttccaccaattgccatgaaactttccagagcacctatacaatgcataagcaataaaatccaggcagtatttcacagaacaaaccatccaaaatcaatttgccattaaagctcaaagctttgaactctaaacttagaattgcacaaaacttaaaccaatcattaaaccagcaactagcttaaaatcaactcaacaagaccctaaaattcgaaccctaggcatatgaaaacctaacagcccctatattccaaacaccattcaactactaaaagcttgaaaataaataccaatagtctaggcttacctcacttgcaatagcttgaatcc

SEQ ID NO: 292607 - DNA, 835 bp, Cannabis indica
ttggtcaatccggaccgtttacgtcgtaatggttcggttgcggttcgtaatatataattaacggttaaaccggaccggaccgtttataataaataattaatttatatatttttttatatatgactatatgtataatttagaacttttttgtgtgtcaagttttttattgcataaattttagatttttatgttatgtttgacttttgagaatgtttttatatcattatttatatcttatagatctattacttatcatgttaaatatatattttgaaaaataaaattaaaaacttagtaaaaatagtacaattactaaaaaaatatgaataattattaattccacataaaccgtggtttcgaaccaaaccaaaccgttcttaatggtttggtttgagaaattttttggtctggtttggtttctaatattgaaaaaaccttcatactggtttggttcaaaacttatgaaaatccggaccaaaccaatccgtgaacacccctagtttggggtttagggtttagggttggggtttaggggttagatgttagggttagagggtaggggtatgggtaggggtttggagtcagggtcagggttcagggtttatggcatgtttactaataagtaatgggaatcaatagtaaggtaattattcccttacatttccttacttacatcattaaaattagaaaagagagaacttgattaaataagagagaaaaaaaagggagaacttcccccactaaattttgtaaggaatgccattaatggcacgtttactatacagtaatcagaatcagaataaattaatagagaaatgtaacggaataaatgaaa

SEQ ID NO: 292608 - DNA, 509 bp, Cannabis indica
aaatggcttccatgacgaatgttttaaagaatttgagcattgggaactctaaaaatattcagccagctgttgccagtcaaagtgatgatgtctcatgtgtgttttgtggagaagggcatgtgtttgagaagtgtccctctaatccagagtccgtttgttacataggaaatcaaaattttaacagaaacaatggggcattctcgaactcttacaatcaagcatggaagaatcatcctaatttgtcttgggggggtgtcaaggagcaagctcccgcaccagcccaaggaagacaagaatatccaccgggtttttcacaacaatcgcgacattcacaacatgcacaaaattctcaaccgagtttttcggagagtctaatgcgggattatatggccaaaaaatgatgcggtgatacaaagtcaggcttgttctcttcgaaaccttgagttacaacttggacatttggccaatgaattaaaagctaggccgcaaggttctttgcctagcaacac

SEQ ID NO: 292609 - DNA, 523 bp, Cannabis indica
tattttcactttatggtcaaatgtgggggtgagatttgagtttaatcaaatttattgagaaattattgattgtatgtatgtgattttgaacttaatattctaaattaatattttgctatgtgcatatgaaaatttagatatatttggtgtcaaaatttggtggtaataatttcaagaaggaaattaaatctaaaatggtaggggtgcatactccaatatgagaagtttagacatgtttggtgtctaaaactaaaaatgtgtatatttgagacatgcttggtgtcttttataaagtgtaatttagacatgtttggtgtctaaattaatgtttaattttgatatgcttgatatcaaaattattgagaatttgagttgtgtgaaaattaatcttttatgattgaattttcaaagcttaagtacttaaggagaaaagtggtcacaaagtgaacactatatatttggctagcatgattcgtttggaatcaaaagtgtgaggttaacaaatcgcttaatcttcatacaa

SEQ ID NO: 292610 - DNA, 589 bp, Cannabis indica
aaggaattgtcaagacagatcatctttcctcaaaagaacaaatggcagacattctaataaaggcactacttcctaatcaattcgaggtgttaaaaggcaagatgggattggtaaatatataccatccatcttgagggggagtatcaagattgagttagttaagtggccttagttggttaggaaggttgttatgacagctgttagtgtttgttagaatctgttattttttagttggttagcttctctcatttcatcactatatataaaccaatccattgtactctgttcaattcaatgaatcaataatacacagagttcttttccttctctcttcttgcttgtttcgtaaaataaataaataactaaaataaagttattaatatatataacttacaccatagagatgggctcgtcgatggtcatttgaaagaaagattaacggaggagcgagagaggggtggttggagggatgagggacgagaggtaattttgggattttcggcaagaggggtgccgccgattgaagctcgaagagagagagagagagagagagagagagagagagagagagagagagagagagagagag

SEQ ID NO: 292611 - DNA, 712 bp, Cannabis indica
ggttttttgcattttagagtttctaattttgatatatatataaataattacttgcttcaggtgagtatatgagtttaccggcgagccagtactcggttttagatgctgagagaatagaaagagttgatgacaacactttcaggtgttatgtgtatagaatcaaattcttttcctttgaggtttgccccgttctgcttgttagagtagaagaacagcctaaagggtgctccattaagctcctgtcttgcaaggtctgttgttaatttgttattatcattattattgttattattttgaatgaatgaatgattgtgatatactttattatcgtcttttggtttgtacagcttgaaggctcgccaatggtggttgctcagaatgacaaatttgatggtaactcattttgtgacttcgtgttatgcatgtgaatgcgtgtaggttcagaaaaaagttgggttttccattttaattatgtacaaacatgataattgtatgagtaatccggcatttggtttaggagaagtttgaatgtattcggttaagtgaattggttttcatgattttgatagacaaatactgttaaaactgtaaagagctgggcataactttttggcactttttactcttcatatattgtgtgtaatgtgttgctattataatttttgcaaataccttcagaataaccaattccatgtggcttgttgcattgtct

SEQ ID NO: 292612 - DNA, 416 bp, Cannabis indica
caatttttacactttgacgtggcaccgcatgaatggtgacacgtggaatccacttggaacatctgctcgggaagcatagtccgagcaggatgcctcgctggcatgcctagagcaaagcagtcagcaatccgcgcagagaaaccagcacttagcggattcagctttcacattatgagtcatcaatcccacgatctttgtattcagcattgatcccatgatctttctgtatatatgcattgtgacgagaggggaagctcttcctctccaagcttactagccctataagtagtgatgcatgttcactgggcaagaggtcgaaaaccatttagctgagactataccctaaatatattatctaagaataatacattcagagatactattgtaagagctataagaaaaggaacctttctcct

SEQ ID NO: 292613 - DNA, 530 bp, Cannabis indica
cccgatcggcttgcatcagcacacaccccagaccctgtctggatgcatcgcaataaactacaaatttctctttgtctgaaggcaaagctagcactggagctgtaatcaacctctgtttcagctcttgaaaactagcttcgcacttatctgaccagacaaaccgctgattcttcttcgtaagttcggttaagggtgttgaaatcttagaaaacccttccacgaaccgacgataataaccggctaaacccaagaagcttctaatttctgtcactgtcttcggtcttggccaatccctgacggattctattttcccgggatccaccttgatcccatctttgctaacaatgtgccctaagaaagacacctgagatagccaaaattcacatttcttgaatttggcataaagcttatgttctcgaagccgttgcagaccatctgaagatgtaactcatgctcctcttctgattgagagtacacgaggatgtcgtcgataaacacaatcacacagatatcgaggaaatccttgaata

SEQ ID NO: 292614 - DNA, 796 bp, Cannabis indica
gttagctcgactgcatgttgtgctcatatgatcttcacgttgggtcttctaacaaagacacattctttatgtatttatgaatggaatctaacacattgaatttgagtgtttcaccatcaaattccattctaagtatccatgcttttgtatccaacttcttacttgcagtgagtaagaagggtctcccaaataaagttgatgtaggattgggatcaccctcatcttccatctcaattatgtaggaatcacctggaatgacaagtccataagcctgcacaaaaatatctttaactatccctaaaggataagcattagtttgatctgtcaattgaataaaaacctgagtttttcttgatggaccaagatttaaagaagcaaaattagaataagacatattattaataatttctcctaaatctatcatgcaatgatcaaacctggttttaccaattgtgcattgaattgtacttggcttagctccttcttttaggagaattctgtgcatacatgtagcaggactgattcctttgatgtcagcaacggaccatgcaatggcagttctgtgagctcgtagcaccctcatcagcttttcttcttgcacttggtcgagatttgtagcaattatgactggtaaggtttcattctctcctaagtaagcatatttgagatgattgggcagtgtcttcagttcaagaataggagcttgtacaatagatggttgtaacttatcagttatgactggcaattccacataggccaccttcttgtaaagcttattgaagtcgttattaagtgc

SEQ ID NO: 292615 - DNA, 553 bp, Cannabis indica
aaagaaacaaggtatttctttctataaactgatgagttttagtgaattattatccaattggattattaattctggactactaaccttgtttatttgtttttcttcttattatagcccaagctgcttgaactcagatgctatcttagtgagttggatcggaaagctggacaaagggatgaagatcgtccaagataaagatgaagctcatttatttatttatttattttgaattaattgttttagtttaaaaacaatttggatttcgaatatttgtttgggatttttattccctgtttttctcataatgttgcaatacatttttttattaataatatgtttttcttttacaaataaattgcaatttatgagattgagcttcatttactttatcttaaccacaattaccaattatatttatatgtttgtatgtgtaagtgtttttattattggtacaaattctatatattttaaactcttcatagagttattattacataaacattagaaattatttctatgtttataaataattgttaattctaatacaattatt

SEQ ID NO: 292616 - DNA, 756 bp, Cannabis indica
aaggtaattttatttaaaataaatattgcagtttccaactttggcacatgtttcaattcaaattaacgcgcacacacacatatatattccacccttattattgactacctatagtatttaggtatattcctttcataaagacaagaattgcatatcaattataagttatattgattaagtttaaattaaatttaatttctaagttccgtctacattactagattaaattccatttgaggttagttttgatttctggaactgtgctttatttatattaccttcataatatttgttttcaaatagagtcggtgttaacaaattagtaactacaagtatgcatacgtttgaatttgtttctctttgttatttaattactaggcataaaaaggctcaaaaacaggttaaaatgagttattttaaagtttattttgggcactgcaaattatttggaattttacaaaaaaattgtgatttcctacataaatacaatgcatattgtcataaaaaaaatagttggattattatttctctaagtataaaaaacaaaaacgtacctaccgagaaccaaaagcatgtctctaccaaagaatctttttatatgtatatatatgtttgactaattttctggctcaataaatatgcaaattggtgctcattgaactgtaactaatattcagtatgatgctcgtacacccaagaggctgaagatcaaaattttccaaggggatataaaacactgatcttgggatatcttgt

SEQ ID NO: 292617 - DNA, 473 bp, Cannabis indica
aatcacgtaatacgcctatcttagttagggtgttacatagaatgcagaggcaaagaagaaagcctaccagaaagcaatctcgagccagacctcagccaagtaacaatgaagacaaaccgacctggaaactacatgtggatgggtcggcaacaaatcaattatctggtgcaagaattgccctagtcacgcctgggggcaacacctgcagtcaagttcggatttaaggcctctaacaatgaagccgaatacgaggccctaatcactagacttaagctagccaaggaaatgaaggtcgaacacattgagatctacagtgattcacagctggtggtaaatcatgtattcggcgaatatgaggctcgaggagaaaaaaatatagcatatctgagcaaaatacatgacgtgttcgcacattcaaaagctacggtctcagacaaattccaagaaaagaaaatactgttggaaattatttt

SEQ ID NO: 292618 - DNA, 861 bp, Cannabis indica
acaaaatagtctcagacaatggaaagcagtttgactgcaaagagttcaccaacttctgcaaccaacacgaagtcgttaaaagcttctccgcagtggcaacaccacaaacaaacggacaagcagaagcggtcaacaaaatcctaaatgtcaccctaaagtaaaagctgctggcctacaaaaacaattggaccgaagaattacgaagagtgttataggcctaccggacaaccccaagaaccacgaccggccactcgccattttcaatggcgtacggttgtgaagcaatagtcccggtggaaatgttattcccgtcccataggagaacaacttacgatccaacaacaaacaaggccttattacaagaagcgttggatcaaattgaagaactctgggatgagtctcaaatacgaatggcagcttatcaaaagaaggtgactaagtacttaaactctaaggttaaaagtagaaaattcactattggtgatatggtcttaagaagactcttcccaaccactcaagaacccggagtgggggtacttccaaattgggaagggccatatgaaattgaggatgagatcagctccagaacctataagctaaaaagattggatagaaccattgtgccaagggcttggaatgccgatcatctccggaagtattaccaatagtcaaaaaatgtaaacttagactttgttaagagaatttgtaccataaagtatatgcaacctctaaatttttaataaagctgagtgccttaaaaataatgttttcatgccactcagggggtaccaaggcataccacacggacaaatgtaaaacaggccaaaagtaaaaataaaatcaagcagaatatatatcaaa

SEQ ID NO: 292619 - DNA, 663 bp, Cannabis indica
tatgatttagaatatttttcgggatatcattgtttgttagtagaggtgttagaatttttggggtttggtttgaccattttgcccttgatgcatatggatattttggttttattaccttagggttatttaggtcttttgatagggagttttgtcttgttgtgggatgttactagctgaatataacttaaatattaaagtaaagggggttttattctttttgataagtattaaagaaactcatcttttcttcatcaatctccttctttctttctttttcgaaacatcaagaaacctagcctaggtttgattttgcttgctgatttttggaattcctagcagtgttggtgaagctttgatccaaggtagtgtaccctagctctcttcttttgatttctttagttgaaacttaagttagataaattcttgaactttgatattggggagctgtgttgaagtctataatttgaaatgaaattctgaagtttaattaaggttacctgagttattttatgttgttttgttcattgtagtaaggttttatcaaggtttgggtttgagaactcaaaccttgacctttaatggtgtttttggaatatgagtgaattgttgtgatttgtcacttgggattggtttaatataatatatacaggtgttctggaagtt

SEQ ID NO: 292620 - DNA, 578 bp, Cannabis indica
tttcaaacatttcaaatttattttgcataaggtaaaatctagaggggttgtcttaagaatataatgaaaaactcatatccacccctgaatgtacatccatcttcgaatatagattcattttagtggatataggcatattgactcttcttttagagaattatcttgtcaaaaccactatgaacaagatacaaatgccatagatttataaaacatgtggttgtggtctttcgatgacttaggtctagttacaagataaagttcttagaatagtccaagtggatccttgtcacaaaatactaaactcaaatccacacataaacatacagtttgaatccattgatggaaaatggatattaaaaaaaacttgtgaaagtcatactgtaatgtgtaatgtgttctaggaaatagaaatataaaatttctatttggaatctaaaattgaaagtcaaaggcttaaatttaaccaaatagatgtaatacccggtaaaaatatacatatattttaaattttatttgttatacaatttgtgtgagaataaatattctatttatttctactaatagtgaatagagactat

SEQ ID NO: 292621 - DNA, 730 bp, Cannabis indica
aaacttttgtttttaaaaaaattatttttgaaaaacaaaaatgcgttcggtaaccacttttgttttttcaattttaaaaactagaaaacaaaagtgtgttctgtaaagttcatttttatttttattttttgattttatttaattcgtgtctaggtccggggtcggattcgggttcaagtcaaaagtcgggttcaacgccaggaccgttgggaggggatttgggtccgggtctggtcgtaatctaaaagattgattaagaaaaaaaaaactgtttaaaaaaatattgaaagtgatttttttttttgtttttaaaattttgatttctaattataaaattgaaaagtaaaaacagttttatagaacatgtttttgaaaaatattttcacttttctacttttaaaaacaaaaaactgattaaaaaagtgttaccaaacggcacctaagctaactaattcaacttaaaattccttgagaaattaacaacttttcttgtccttacccaaaaattaattgtgagctgattcaccttatgttaatttacttttataatttgagataaagcaaaaataataataataataataataataatatattctgaaataaaaataaattttttttttgaaaataaaaataaatttaaacaaacaaaataagacacactcttaaatactaataatttgctgaggtcttgacatatttacgtatatacaacattaaaataaaactt

SEQ ID NO: 292622 - DNA, 532 bp, Cannabis indica
aaaatcaaaatagaaatctaacctgtaaagcgagttgcctgaaagccttcctgacctcagattcagaagcaccaggttggatccgaagagtcttgtacggatccattacagatgaagacgtcgaataagaagctcgacaaaccctaactctgttcgcaggagaccttttcttatcattatccttgaattgaatccaagatctattattattaacaccgataatcccagcagtagcagcagcagccattaatattgttgcgatttctcaaagaagaagaagaatctgaaatctgaaaaccagaaaccgaaatctatggtggtattgattttgattggaagctttatttgaactcaataattttgatgatgaattaaatgaaaagagagaagagaaataaaggttttagaaaacggggattgggacatgtgtatttatagaacatgtgggtgtgaacagtccttatccaaattcatgctgcgtgttcctttaaatttaatgaattaaattaataaataaataaataaataaggc

SEQ ID NO: 292623 - DNA, 819 bp, Cannabis indica
atatttattctcaaaaaatttaaaaaaaaaaaaaaaaaaaaaaactttaccagaactcttattattagtatagggagaattatcctaattattgtttatagtggcaaattataaattttttatattattaattaatatgcaatatatctatttttatataaagtgtgcatatataacagaattattgttttatgagaaattcatggttgaatttttatttatattaaaaataaaatagtttattaataaaaataaaatggtttatgaaaagttcatgtgtcactttttatttatatataataaaatatattccattaaaattaaaaaaaaaaattagagtttttgctgttgtacatttacgattgacttttctaaatatacttatgttatttagttggattttattctaaataagaatttactactatttatatattatatatattttgttaaagaattttttctattttttttttttttatttggctcgatcaggttataattgtttgcctccacatggcgaattctttgtttatgagaaattattgggtgtcttttttaaaatatatatttttttatatataaaatgtggctatgtaacagaattcttggtttaatgttattatttatttttctgtcaaaatgttaacagaatattctaatatttgacagaatattctgattagaaaacgttaattataattgattaattttagctaaataatcctaccaaaatttaatctaacaaatttctctctctagagcaaaaaccctagcctccaacacaacatttaccaatttataaccttagttataatt

SEQ ID NO: 292624 - DNA, 762 bp, Cannabis indica
ataatataacatacataggtataaatggtataaaagtagataaaaatggaataatatatgatcatggggaaattttgtcatttctctatatattatgcttgtaattatttatttttcaaatatatatttatatataagaataccattattgaagagtatataaataaaagtgagtgtaggtccagactcgactggaggcttttgttgatttacaaaaaaaaaaaaaagtttgtttataaaagctgatctacgttggcgtctagtacgtaaaataacagcaaaaaaagattcttttttaaatataaaaataaataattaatgattaataattaataaaaaagagttgaaaaaaaattattaaatacatgagaaggtaaaaacccaacttgattgaagaacgtcacactattaatatgatgatatgtataaacgcaataggcaatgtgtaatatttattaaattttaaataattcataatatcaaaaataaagtacaaaataacaatttatttatttttaagaacatataaaatattttgaaaattgtttatacacgcgtaataattaaattatttttattagtctgataggaaatagaatatggtttaatagatgtataaaatgaatttatatattgatcataataggaaaaattaaatgttgtaatttataatatataatattaatatatataaatgtggtaataataataataatgatatagatatatatatacgtaggtagggaaatttgatgatataat

SEQ ID NO: 292625 - DNA, 760 bp, Cannabis indica
tgtatatataaatacatatacttaacaatttggtcgatattattgttatttttctggatgttgtttctattttagttaatatcctcattttagatatttgttatgttttttttttctcctaataatatttgtaaaaaaatctcctatttttctttgatgattaatcctaataatgacatgaattatattcattttactatttggctcaataataagaagaatataaaaatgttatatgatttatttttgttacaaaatttgagcactattgatgtctagcatcttttaaacttgtcctattgttattaactaatgatattcttttatagttattatattaaggtatataaaatccgatacttaattgaatcaataatgatattgaaatgtaaaaaaatatttttagtatttttatattccaaaatagaaaaaagaaaatagctaaagacaaaatttatcaaataatatgaaaggataaaaagtagattttcagatgctaaacaggccctacctttatatctgtttcccactactcttgttctagcatatatgcttgaacaaaaaaaaaaaaaaaaagaaagaaaaagaaaaagaaaaaggcttctggagaaatctatgagaaatttgaacagccgtcaaaaagaaatggacggaaagtttattactcgtttgcgtacttaataaacctgtaaatttgataggaaaacacaaggaaatgtccgaaacggacccctctagtagcgtgaaaaagctactcata

SEQ ID NO: 292626 - DNA, 605 bp, Cannabis indica
atagcttcgggttcctcttttcaaaatagcaagcaattttggactaaggtttggtcttccaatgttccacctaaagtcaaacatttagtttggagagtcttatctcactcaatccctgttgcttcatctctattttttcgacatatcattccatctcctgtctgcccgatctgtcatcaaaccacggagtcagtgaaacatgccatcttggagtgcaaatatgctaggaaagcctggaaaaattcaaccttcattgacttttatactaataatctgtccagttctatagatactgttgctgcttttgaaacttttgattctcatcagatagctttactattttgttttgtttgggctatttggaactatagaaataaagtgtttcatcaacaaaaaaggccttggcctcaagatatttttcaatctgcttgtaattttttggatgaatttcagttagctcgtgtcaagaatctcaagcaggggactgtaacttcagaggatcaagctctaatccctatcccgatagcaggaacctggcaggtccatactgatgcagctattgatgtggctaatcaaaagaccagtttagcttccatagtcacgga

SEQ ID NO: 292627 - DNA, 414 bp, Cannabis indica
aagatagaccaaggacaacaccgtgccgagataaaccagggtcagcaccacaccaagaatttttttttaaatactctttttttatgttttatttacaattttacgacttagagtttttatttatagaaatacactttttaaaattttaaaattacaaaaatacattttgctttagcaaaaagtaataaaataactaaaaaaataattaaaaattaaccttacaactataaaaacaactacacataaactataaaacaactagagatctcatgataactataatacaaataaattataaaacaactaaaaaaattattattttgaatgaaagatattttggtaaataaaaaagttcaaagaataaaagtaaaaaaaattacgtgctgaaatatttttgtaattttttttaaaaaa

SEQ ID NO: 292628 - DNA, 695 bp, Cannabis indica
ttgtgacatgtttgaggttactgtattccacaacgaacacacatgtagcctggattctagacatgctgataaccgtcaagcagcaccgtgggttgttggccacctcattaagaacaagttcaaatcagatggaactaagtacaaagctaaagacatacaaagggatatgtttcaggagtatgggatcaagatgagctatgagaaggcttggaggtgccgagagaagggacttatgtattcgaggggtacgccagcagcagcttatagtcagttacctggttacttttacgtgctggaacagaagaatccaggtactattacagacattatcacagaggataacaggttcaagtactgtttctggtcactggctgcttgtaggaggggatttaagttttgtcgtcctgtgattagtatcgacggcacgttcttgaagacaaggtttgggggcacaatgctagttgctgtagcgtacgatgcaaataaccaactgtttccgattgcctttgcaattgttgacagcgagaatcatgactcttggaagtatttcttgcagaagttaaaggaagcgattggggaggttgaaaacttagtgtttgtatcggataggcatcaaagcattgaacatgctgtcgaggttattttccccgaagcatgccactgtgcatgctacaaacatatttctatgaatgtca

SEQ ID NO: 292629 - DNA, 521 bp, Cannabis indica
atatagaatagatatatatttttgagtattaatttagtattattataatttctttgtggtgtataattttattactactgtatattacttttcagtgatacgatatatcaaatactgctgtatatatttaatgatctaatatatttattcgtttttgttacaatataatattatgtaatattaaaaaaattatatagcttaatttaattattatatatatattttttaaaaaaatactatgtaataaatgtatttttataatttttattagttaatttattatatttgaccattttattaattttttttaaaaatgaaatatttactaacttagttttcaaaattgaagatcatcttgcatcacagtcctttttaatgttacatttttcttaaaaaataaaaataaaaattccatattttaaatttttctacattctacgatttcggagcttgaatcttcgaggcccagtggctcgggtatgtagaaacaaccttagatatttgagtgatagagattttag

SEQ ID NO: 292630 - DNA, 783 bp, Cannabis indica
agcaaccaccacagtaactaacacaaccggccttaatggtgtgcaggctgttccattgcacagggcccaaagataaaaaggccccaatttttagttttttttattttttttaaaaatcagattcatcaatttaagttataattatttcgatttcaaatattaacgtacgtcttaagtaaataacaccgaatataaaataaacgaagctattaaaaataaagttaagtaatataaattaatttagttctgacaattagttgatcataaaaaaacaaatatgtatatgacaaatatgtatagctaatattcgttaattgccaaattggatagttaatggtgagaatgtgatcaacttttttttttagaaagaaactattatttcgctcaaggctctcaaattgtttgggccgaccttgttagttttatactgttgtgtactgtatttttttttcaaaataatgtgtaatttttatactgtgtagtgtgttaagttttcacggctattttttagttgttccactgttgttttaattgttctgttttgttgttttacggttattttataaaaagactatatctttgaaaaaaaaattgtatgacaataaaattataaactttttacccaaaatctaatatattttttttttataagaggcctaatttttaaaattggaacatggcctccacaatatttaagaccgctttgataattaacactgtaaaaataaaaagggttatttgcggtaaaaccccctaaagtaggcaggtttttgcaactaaccc

SEQ ID NO: 292631 - DNA, 564 bp, Cannabis indica
atgcaataggagaatgcttagcaattggagatatagatcctaacatggttgaagagtccaaattaaaaattagtaagaatgtgagaaagaagattctccttaaagaaattgctaaggatcacgagccgcgagaaagcaaagacaaaacatcatttgaccctaaaaaaaccacccaaaaagaagagaaagaaaaagaagcttagtagaaaaatttggtctcaaatgtttgaagttgggcaacaagtgattttcgccaactctttaacgaaggctactcatggacgactagattcaaggtgtgatggatctttcttggtggtgagagtatatcccgatggggtggtggaactacgtgatgcactttcaagaagaaaattcttggtgaaaagccaaggagtgaagtttgggggtggtgaggtcaaccaagcaaagacctccatcactttgaaagaagcttgaagaaggactttgggttgccttggccttattgtatcacatttgggcaacccaagagcggatatatattatataataagtttgggtgccaccctttgtaaaaaaaaa

SEQ ID NO: 292632 - DNA, 534 bp, Cannabis indica
caaaacagatggtccaattaataacttttgcaaaacacaaggtccaaaataatatttacccttattattattattattattattattattattattattattattattattattatatcgattccttaaaatatattatcaaaaactatatttgcaatatattatacaccagttttttatttaattttttttacattatttaaatattatatttttcaatacaatattattaattaaaatacaaaagaaatataataaaaaaataacaaagtaattaatggggaagataaagcacaaaagtgaaaattaaatacattaaaataatatatagagaatctcaaatgtgtatctacatataagttttaaaggatgtttatttcacatatacttttgatgcatatgatattagagctcgatcgggtttgggcggtttattctatgtattttttaacctaaccttaagtttgggttgctaaaatttaagtgcaacccgcccgatttagaaaaaaaaattataaaccgaccaacggtttg

SEQ ID NO: 292633 - DNA, 655 bp, Cannabis indica
ccctaattatttagggtagtttgtttaaaaattttacggcttcttgtattgaaaatataataaaatgatggcgcaataaaattgcaaaataaacaagttatgcactagacaaattttactagttgaaatataagggttatttaagttaaggtatgatgtaaagaaaattttaaaatgatattttaaaaatattttcaagtgaaataaggtttaaggaggattaagtttaaacgataataatagctttcagctatggttggttcatatttttaggaattattagcaaaaagaaaattttaagttaaggtattatgtaaagaaaattttaaaatgatattttaaaaatattttcaagtgaaataaggtttaaggaggattaagtttaaacgataataatagctttcagctatggttggttcatatttttaggaattattagcaaaaaaggaaagtggtggaatttagtattcagattctaatattattatttaaaattaatcaagtaatttaaagaataataaatacgaagatattgtaataaaaggatgtgggaatactaattgttgcgaatttattgtgttcagatatatttgggaagtcaaattttatggaatttggtttgtaatctacgacgtataggaaggtatcattataa

SEQ ID NO: 292634 - DNA, 667 bp, Cannabis indica
gaaaaaaattgggcagcacctccccttaaatttcctctatcccaaaaatacaaaattcactcaatcaatgttcctaaccacttaataccacaatacaataataataaacccaatattatcaatttttaccccacacacaattatatcactcaaaacttaaaataattaatcaaattcttaaaagcatgaagaaagtgatacttacaacccgaaaacgcttaactccacctccattgttgaatgtcttgaaagcttgagtttgagggtgacaacaatggtgatttttttggttttgggtattctttggtgtgggttttgatgatatgtgtagattattgagtgaaattgggtttttgattggattgggtttaagaaatttgagaaaagatgaaaagattgaagtttgaagatgaaaaattgaatttttgagaggaaaagagggtagggtcggctgagaggatttgaaatttgaatttggtttgtgtagggttgaatgagggggaaagtgtgaatttatagaatttttcgtcagcaagtcgcgacctggccaaaggctagtcgcgacttgctaacgaggaaaatttaggtgtttctggaaaatcagcaagtcgcgactgaggtcgcgacttgagaaataggtcgcgactaggcttaatgctagtcgcga

SEQ ID NO: 292635 - DNA, 622 bp, Cannabis indica
atagctactgatctcagacaaaaagataacaaaatctagaaattggtttccaacaaaaaaaaaaaaaaacaaaattgattaggcttccaacacatacctactgatcttgtaaaaactggtttctgtgaataggtttgacaataatatcagacaggcataagagtttagagaaggcggtgatcaatgtctacccaaaccacttccacggagcatgcatcttccacctgctaaacaacatcaaaacaaactttggagtgcatggagacgatctgaccataaactttgtaaaggcagcaaagacgtacaagctcacctcattcgagagatagatagaatcgacaaacgaataagaccataccttgagaaaattggacatgaggtttggaccaggagccactgccctacaagaaggtacacaatgatgacttcaaacatagcagaatcaataaattcggcaatcctagctgcaagatcattacctataacaacaatgattgagtgcttcagaagccttgtacaaaaatgggtgagcttgtacgtatttggaaaggtggtttctaaaaacaatatatattttaactaacagtttttaaaatgatattatctgttaaacataaacaaa

SEQ ID NO: 292636 - DNA, 617 bp, Cannabis indica
tatatggccattagaatactgtgacacacccaccatttggaatagcgattaataccctcgcaactcagcccgcgacatataaaaatcctaaaagatctagctaacagtcaaatggaaataaatcttggaaatatgcgagtattcaagctgttcatctgaacacccgcgaacattcaagttgttcatccgaatatccgcgagtattcaagacgtgaaacagtgcctatgaattgtgtgcggttatgtcagtttacaggtcatattctatgaatttacccaggtttacttacctaaaacacatagcctcataaacacccactagcatacattcctaaaaaagcctttaaaatacccaaacccagaaaataaagcatattttctccaaaacagaaaacgaaaatgcagtgatttggaaactaacctttagttctgatttctgcgattgctctcgatcacttctgagattgagaatgttgtggaaaaatggtagaaaatctgggaatggatttttcgaagtgtatgtaatggagggaaagagaagttaagagtaagagggaaaaatgggaattttgattcgtatcaaagtatttaaatacccatatcccttattaattggg

SEQ ID NO: 292637 - DNA, 263 bp, Cannabis indica
gtttgatccttcacagtcttccaatctatgattgagtgactacttgctgtgtgtgggcactcactctttcactagggtcgaaatttagaagaagaaaagagaagagaggggttcggccaaggtatagaaaaagggaaggctcagtttttctagaaaagagaaatttctgtcagaagaataatgaaaagcatagtaatttgactaagccatcactttctatttataggcaactactaggtttaggttaggaattatttggcatt

SEQ ID NO: 292638 - DNA, 333 bp, Cannabis indica
tttatatgtgtttatttcatttggaaattcatattagcatgttaatgaaacatacttgttagtaaatctagatcctggtaaaatatttccaacaattaagtatcttgaactaatcaccttaatttgaaaaatattccatttttaagttgatccaaaattagcaagttttcaactaaaaaaatatatttaaagaatatctgaataactaatattctagaaaattctacttaattattaatttaaaaaatattcaaatttaagttggtccaaaattagttatcataactgattttcaacttaaatatatttttttttaagaaatattaaataatt

SEQ ID NO: 292639 - DNA, 564 bp, Cannabis indica
gccatagattggcgtgtgtagtttccgaagggacttgtccagagggacttggcttcagtggaagcgtgttttgtaggtgccgttgggaacggttggtttgcgaacctcaccccgaggggtgcaccatacttagtccgtgtcaaaaggagtatgcattggacgattggcgagtgagctgcaatcagaggatgtggtagcttcagggtcagtgttgcaagggctacttggttgactggagggacgtcgtgatggactcagaggagttcatgttgggggaggtattctagtgcagaggcactactccatgggtggatctgaatagcgacagtggcacagggtctttgatcaagtccaagagtgggcgtgcgagatcatcaccaagagggtggttctacggaggtagagggacaagtgcagacttaggattcgggagaagcttggggtaagcttaggagtcgagatcaggaacatttgcctgcggtccgtcgatgagggcatcgacatgttgaagtgggggagaatgttacgtgcagtctatgatggcacgttacaagctaagtgatg

SEQ ID NO: 292640 - DNA, 923 bp, Cannabis indica
  modified_base (794)..(794): a, c, t, g, unknown or other
gacagctatctcggagacgatgctgccagcgttaagattcggaactttgctagggccgaattagagagtcagggtaggctagcttgattgctttattcgagtgtttactgtttccatggatattctaacacttgccttttttcttttgttgtagcaggtacttccatggatgccattttggccgaacttgccggagctcacactcctgacgctccccttcctttaacttcctcccagatggccactcccttgaaagcttcttccagtgcccctccagacactattgacttagtggatgaggaggaggcgcttccggaggaagctaaagaaggtcaagaaaagcaatggggcctttctgaggaagttgaagaaggtaaagaagagcaatggctcttcctgaggaagttgaagaaagtgaagaagagcaagaagttgctctgattcgcaagcgcaagggcaagatggttgccgaggaagtacccaaacggcagcggagagctgatactccggcccctggccctgattccgggatctctcccgaggtggaggaacacacagcgcctcccaacatagtgctgactccggttcctggagatgaggcgagacaggaactccggatagctaaacacaactacgccatggacgagtactcccgggggcatgctgacgtggaggctttgaggagggttttgcgagttgaaatgcaaaatacccttaacgatccgaactaccagaatccgtgggatctaaacttggaccccccggcggattggttcaattgttccttgggcccncgctggctccctttgccgcggagatgaccagcgagtttgcgtctcagcttacccggtgtgcacccaagcgattcgctgcttgtgcatccttgaactccatctttcaggtccaggatctcagtcactccc

SEQ ID NO: 292641 - DNA, 499 bp, Cannabis indica
tgatattaccaaagaagttgctcaaggatattgaggcaatacgtagatcgtacttatggaagggaactcaaatggcgatgggtcctagtttagtggcttgggagcatgtttgtatccccaaaagtgctggcggacttggacttagagatattcagaaatggaatacaacagctatgactaggtatgtatgggacatagttagcaagaaagattgtttgtttgtgaaatggatacataatgtatacttgaaagataggtgctggtgagattatgaaggccccaccgactgcagctggttttggaaaaaattggtaggagtcaagagtcaggtgaaggctaagatggatcgggctacctttgttatgcagaaattcagcatatcaaatacctatctattgttgtttagcaagccagagaagaaggattggtgcaaacatgtgtgggatagacttgtcattcccaaacacaagtttatcttatggctagtcttgtgggatag

SEQ ID NO: 292642 - DNA, 549 bp, Cannabis indica
tgagacagttgctctaactgaagagtgcagtgccatcctacagaagaaactccctcctaaactcagagatccagggagtttcactattccttgtactataggaaaaattgagggaataaatgcactttgtgacttgggagctagcattaacttgatgcctctatcggtgtttaaaagactgcagttgggtgaagcaaagccaacaacagtaactctccaattggcggaccgatcactagcccatcctagaggagtcattgaggatgtgttagttaaggttgataagttcatctttccagctgatttcatcgttttggatatggaagaagatagcaatgtcccaattattcttgggagaccattcttggcaactggccaagccttaatcgatgttcagaagggtgaattaaagctgagagtccaaggagaagaagtggtctttaatgtgctaaaggctatgacgtacccaaaggcaagtgataactgtttcttcattgatttgattgatgaaatggtgagtgagaaaagctgctagatgatcctcttgaa

SEQ ID NO: 292643 - DNA, 576 bp, Cannabis indica
tttgttctctttttaattctctttttttatttaaaataatctatttatatttttttactcatttttttaattgttttattatttcttttattttttttattatattaattttttttaaaaaaaagaaatatctatccaatcaaatatacatatatattattttaaaatatttttatatctaatataaattaaaaaatctataaataaatatcattaagtacatcaaaagcaaaaatacttatactaaaaaaaattaaattaaccacgcgaagagcggctatattacctaattataatataaataaaaataatcactccaacacttttatattcactctccaaattagagtgtcaaggaactatagctagagattcctaatttaaatataagatcatcatcatcatcatcatcatatcctcaaatctacaaattagagatagtcattaaaaacaattctaattaattaatttcacttgaagaattaatataataagtctcttcagaatcaaaaccagaaccagaactagaatcagacgaagcgaaagacgatgataagaacgatgtggaagcattca

SEQ ID NO: 292644 - DNA, 501 bp, Cannabis indica
tagaagacatgtggcaccttatatgtacctttttgtttctccaaatttttttacctttattctatttttcttccttaattacactttagcttttattccttatttgatttccttcatttttcttattaataaaattaagttaacaacattaataacattaatttatttttaaatacttcctcaataatacaaaaaaaaaaaaaaaaatagttaatttttattaaatgcacaataatattaaatacataaattattatacttggaacctttttctccttttatttttttttaaatgtttgtaattttttaatatatatatatataaaatcaatttattgtcttaattttttttgggggtttttcaattattatacttaaaattgattttatttataaaaatacctttaagaaaattatttgcacaaataccgttatgccacgtcagcttacataccaaaattcaaaacaattaccgaaaatagaaaaaactggaaaaatctc

SEQ ID NO: 292645 - DNA, 615 bp, Cannabis indica
cctaagcggttcgctgcttgtgcatccttgaactccatctaccaagtccaggatctcagccactccctcactgtggtaagtgttttgtagtttgcttttccccttattgttttctttttttggagattctcacttatacttgccttattttttagcttgctgctgaggccggccgtctctccaagaacataatcaaccatggcttcgtcctgtctgattttggggacatggacgaagtcaggaagattcttcaggatcttactgctgagaggcggctttatcaagaggctgctgagcgccgggaggccgctgccaaagctaatgaggaagaggctaagcggagggaaacccaggcggaggcgatgatccgggaggaggccctgcagagagacaggctggaggccaggcaccaggaggagctgagggcggaaggcgaggccactgcaaaggccaggcgggagcttcgagaggccagggaagccttggatgagatggctgccaaggtgaggtccttagaggaaactcaccaggcaaacttagaatccagggccagtctggccgcggagctgaaggagctcatggacttcaaggaacaagcctcaaagaaggcaaaaa

SEQ ID NO: 292646 - DNA, 707 bp, Cannabis indica
aagtcctcagcgcaacacgaacacgacacagcaacactaattgccactccaactgtaaaccatgacgagcacaagaaagttcaatcccaatccaaatagcacatgtaacaatatttacaatgcatgattggctacagtatgtgctacttgattagcatccctacaaataaaattcaaaccaattacacaatcatgtgtaatattaatttattttaatatgaattaaaaaaaatgtttattaatttatttttgagtaatttatggcgtaaatacttaagtttaactctttattgtagataaatacctaagtttaatattttacggtaataatacctaagttatgtttctagaacttttctagttacctgtccattaagtgtcaagttattatacacgtgttattttttattggtatatttaaattaatttttaaataaaaaataaaatttaatgatctagactaattagggtcacccatgtggccattaacttaacacttaatggccaggtacctagggaagttccagaattttaacttaggtacgtattattactgtcaaaaattaaacttaaatatttatctgcaatcgaaagttaaacttagatatttataccgcaaattactcatttattttaatatgagttacttgattatatacatatttaaatatacggtgatgtatacatattaatttatattttattat

SEQ ID NO: 292647 - DNA, 761 bp, Cannabis indica
aattaacccaaaatgactctttcagccttacaaaattgacaattgtacaaattgttgctttctaaaataattgcaatgaaacatttttggggttacgtataattttaaatctcaataaatgataatatgttatggaccatataaaaatacatacatttacgtacgtagtaacttaatttttatttttggctctaataaatattaaattattttattttggattcacaggtagtgtcagatgaagcaagagcaatgtacaatggaggacaagccggtttgacatattggagtccaaatgtgaatatttttcgggaccctaggtggggccgaggccaagtaaactcccggtgaagaccccgtcttggctgcaaagtacgccgttaattatgttaagggactccaaggtgccgggtcaggaaataggctcaaggttgctgcttgttgcaagcactacacagcctatgatcttgataattggattggtgtagatcggtaccatttcaatgctagggtaagaaaataattcatatcttataattttctttattattaaatattgattcattataaataattttaattattatttctacattttttagtcaattatatattctacaatattcatatagagtgtgcatatgttttatttctgttttcaatgcatgaactttcttggcaaaaaaaaaaactaaattaataatgatttatttgttgttgtgtggtgtacttttgttcattgtctctcttgctgatttacc

SEQ ID NO: 292648 - DNA, 801 bp, Cannabis indica
gtatgaatgcaaaggtattttttacgtggttttgcagttaaaattctgcatagtccacgagtcaatcttattagatttttgattaatttttcagggccttttttgtatgatctttttgtccccttttttgatcttacttgccactatttttaatcacatagtaggtagttaattacaagattgactgtaatctttacagcgtttttccctaaaatcatggggtttgattacatatcacgtagtataaatgcggttattatttaaaaatcacacagctgtgattttcccgcttttactgggtcaaaatgatggtgtgtttaaacacgtctttaattgtatcgttctgggatgtctcgatgggagcttggttccagtgaccgtgatagcgagctagagccttttttcttatcattccaaggttgacaatatatgccttgttgcttctttgtttgaaagcttaacgcttcatttgtgacaatcgcagttcttattaacagagactttctcgaggatcatttgaatgttaggttctaactcatcaagattgtaagtcttactgacagatgtctgaagttaactagtgaaagttacaggaatgggccttcttatagcaagataggcacctcgtttattatgtctcgagtccactcgactgttgtacttagtttgtgcattttacactgttatccaaaatttggcactctgacgtggcatcacgagaattgagacacgtggactctacttaaagcatctattcggatcaacacgccgagtaggatgcctcgctggcatgtccagaat

SEQ ID NO: 292649 - DNA, 556 bp, Cannabis indica
tttttgtaaaaaaaatatcaaaaattaatataccatgtacatttccctctacgtcacattaccgctaaaagcccatttagcgataatatacctcgaatattgactatatatatactacttacttaattatctatctaggtcggcaacggccatattgaattttatattgaactaattaagaaagaaaatatcttcaccaatcaaacactaagatccaaaccataaacttaattaataaattaaaactatattttaaattaagtaaatatcttcattagtgcatgtgtatttactttggaacttacgaggtggccattattttttgagattaatatataatattaattattgttaaaacaaagtgtttgttaggtggatttaaaatttcttagctctagaataatgatgggacattttaaacaaatattaacgcaaaacgtcaaatatttttagtgggcaactgaagtaggagagataaataattaaaaattaggaattatattgaaatgttaatgttattttagttaaaacaaagaaagaaaaaaaaaacctaaaa

SEQ ID NO: 292650 - DNA, 500 bp, Cannabis indica
aaggaggttgtatgtagggtaggttatgtactcaactcctataaaaggaaggttgaggacacataaagaggacatcagaagaaaagaagagtttctctctaaaaatctcagttttcatcattgttccctattctcttcccttacacacagccatcccgtctcatcaattttcttcttacacacaaccatactgtctcatcaattttcttcttacacacaaccatcccatctcatcaattctcttcctacacacaaccatcccatcacctctgccaagaaccaggctgctcatttagcaagctcctataaaaaccaggctgcttatttagcaacctcctataaaaaccaggctgcctatttagcgagctcctataaaaaccagattgcttatttagtaagctcctataaaaaccatgctgcttatttagcaagctcctataaaaagaaggcttcttatttcataacctttataaaaaccaaaccgttcacactaccttcca

SEQ ID NO: 292651 - DNA, 669 bp, Cannabis indica
taatgaacacaaaattatttatgaaaaaaatcaatattgagaatcatatatttttacaataaataaaaaatgtgataatatatcaacaaaatataaagaaaaattgcatacatttatagcacaaataataaaataaaaaaaaacacttgtaaataaataaaaaaaaaaactaatcttcttattataatttttataaacataaatgtttaaaattttagtatattgtatttggataatagttttataggaaagaaataaatagtgatttaatctaaatacaaattttcaatatttgtaataatggttgatttttaaaattatttaaaattatataaaaaatatataattattaatatatcatcattcaataactataataatgagttataataaatcaaataatcaaatacttactatttatatattatattgtataataaattgaaaataattttcttcataatagataaaatgtatgattatatgaaaataaattattatgcacatatattataataaaattatataatgtatacattagtgtaaattgccctttaaaaattgacctgaattagattttgagtaagattgataaatcttagctattgatcaaaactaattattctattcttttaattaaataaataattaacttaaaactgagatcct

SEQ ID NO: 292652 - DNA, 620 bp, Cannabis indica
aatacaaatctttaaaataatgagctttagttataaggatattcgatctccattgttggacatacatggttaatttggttttaatataacctcgagacgctagacttgtccccttaatggatggttattcattgatgcaattaacaccgtaaagatcttaaaagataagtattttgtaagttttcgtctctattagagtctcccctacggtaaatacttaaagataaatttacaaaatatgaaacaatagtggaagctcataaaataagaataactttgactcacgcctaccgggacaacattggattcttattttgatcgaataaaaggttggtagaatggtccattttagatgagctgacaactctattcaatgaatgatatctttgactctcacctatcgggacactgtatcagtttgttggaaaccttagaaattatttaagatatgatagttttgtattttcacatgtctttgttacttgctaaatgcttaataatttctgagttgtgtgtaaatttatattgaaccatgttgttttctgttattaattgtagttgtaaatttcgtgtaaaataagaataattttgactcttgcctattgggacattgttggatt

SEQ ID NO: 292653 - DNA, 461 bp, Cannabis indica
ggtaaaattatttccaacaaaaattgggtaaccggtttctgcagcaggttttccgaaaatttcagctttgcgattcgtgccaatttcaggtttctggttggttaattccctgctagtttagggtattgtcatattaagttgcagtagataggtttttggtttaaaacctaagtcccggttgtgatttagtgagtcacttatctatgttgttatcggtgtaatttaggagcctataattcgccgagcagttgttctactcaggttgactggcacacctgaattcagaattgaggtaagattagtataatgatatgcatatgttattacatgtttagcgtacatgttagttgccgttagaataacatatcagggtatcggtgaggtgtacatagagttgcaccgagataccaacagatatatgttaggcaaatctatagccatcagattagcatatcagggca

SEQ ID NO: 292654 - DNA, 566 bp, Cannabis indica
gcgggtacgtcctcttcgagctcgcctcgattccactatagatcttcaatgatcaagcgattacaatggtgggattccaaaacacacaggtattattttggtaatccccaataattttacagtgtttgatagtctctctttctctctgtttttctctaatttcagtactaacaattgtgcttctttctcttgcatgaacaaccctccactgagttgaatatccgaacccaagtccaaggattccaaggttacccaatgtgagcctccttcaactcagtctccatctgttttgctctctgtaaacagacattttatttgttgttcagccctttgagttttgttgttttattttctggtattgatctgaaattttctgagatgttgtattgataattgctctctgaaatgttgtcctgcctctatcttattatttatattgctggaatatatatatatgatgttgttattaaagcacaaagagaggagagttagttaacaagattattactaaacttagtaactaactttaactgctctgtctaggtaactagaggccgaaggcctac

SEQ ID NO: 292655 - DNA, 468 bp, Cannabis indica
tccaagtttgaactattagggtaatgggggttttaaacggacgtcgcagccgaaggaacttgtgactggcccggtttaggttcgacatctgctcgttgaatggcttcttcaagcttgatgaaaccatctacacggtcgaaaaaatcactcatagaatctactggacctacttttcttgatgttctttccacagctctcctagaattctttatgccctcccagtatgacagattaactttccccttctttagttaatcgcgcctacttttgttgcctccgtcatgaacctgcttatataagctcggagaggctctcctggtctttgcttcactttgaccaggtcttctaaatgtaacaggagttgacgaggaacgggaagaagagaattgtgcatgaaactccgaggagaatgccttccaagagttgaaccttcctggtgtcaacttgaagttgttggaaatttatttt

SEQ ID NO: 292656 - DNA, 783 bp, Cannabis indica
catcaatatcgtacaaatactacaaacaaatagtatttgttaaaaaattatgtgttaattgaaattaattatttgaaacattaaacttgttaatgtgttttaccttcattttttgtacaatttggtctttaaagtgttgaggaatttcactaaaattcaagtagtgtcctggcaacgtaattgtgacctcaacacccatttgacgtacaaaagctgaactctccttaccaaccactttgcctgtcacggcatcaagttttagtggtaatggtttccctgcatcacgccttctttgctcaacatccaagttggtagcaaggccacgcccctttcttcttggcggtggagcagtctgacaagttggcggtaccctactagggtccggtggatcggtaccgcccccgtctccaccatgataagtggatacatcagctgacattactttttttttaaaaaaaatatttcatttataagtaatagtaaaaataatttaaaattaataaagttaacttgaaataagaaatattaacttgcaattaataattgtatgatttacaaaataaagtgattgaaaattaatcatccatatcactatcattattaactaaatgatcattcacatcatcttcacaaaggtcaactaaaatttcttcgtcagattcttcagtagcatcttcgtcgtccacgttgcggtcatcttcgttgacaggcgaactaggttcagagccaatgtctataggaggttgattaggtagcaaaattaactccccaagatcaactgtt

SEQ ID NO: 292657 - DNA, 619 bp, Cannabis indica
tgttttcccattgatgaaattgaataaactttacaatcccataaacccgatgagcatgcaaatcatagttcctctcactttcaaacttatggtttgcatataaattccagtcacgttcattatcacgataataaaatcgagggcagtcagagagagatgagggaacattaccagaagaaggttcttccataggctgcttgcctttggcagcagcaaaggcctttgctgcagaagcagattttgatcgaggaggctctggctcgagttctgtgtcctcactatctttctctgaatgaagagacactgatttgtctgaagagacttccaagagatcttcttcttctgaacttgaactggaggaagccgagggaggattgatcttgagtttcttcttggctggaggaacaacctcatcacgactttgagaagctcgaagttccttctttgcagaggcttgctgggctcgagttcgagtagaagggcctgttggggtggagccaggaattgatgcagcaggagggggaacagccaacgaaggaggagattccttcgaagattcagatgaagaacaccaggttcgaagaggtcttaccgatttgcgagcaacttgcttgggtgg

SEQ ID NO: 292658 - DNA, 1030 bp, Cannabis indica
agccttcggtgcctcaattttaagttgaggccaatccctcttgtaatgccctggcatgccacattgaaagcacccttgacctctacactcccccagatggttccttttacaactggggcactctgggtaagtgtatccggtctcaaaactaccctagcgactgcctcgaccttagttcccccggaacctcttgttctgagctgagccaccagttgcagtggatgctttccttttctgatccatggccaaaccactacctcccttgctaaagcctgatgcaggaggggtaggagccccgccaatcactggagtccaagcagactccgtcatgcatccaactgcgccctcatctcgcagtgccttttccaccatttcaggataggtggttttgtcatcagtagtaatcattagatcatgtctaatcatcacattcaatccatccagatacttttccttttgcagaaatcagttggcactatacccgaggccaacctcgccagacgatcaaattgggtcgtatactatgtaacacacatattttccttctgggtcaagtgagtgaactctttccccttgcactcctgcggcctcattttaatacttggcattgaaaagttcctggaacttttcctaggtcatcgtcgtgacatcatgaatcatggacaccatgtcccacaagaccagtgcgtcttcttgaaattgaaaagtggcacaaaccactctatcatttccagtcacgcccatgaaattcaaaattcttgtaatcactgctagccactgctcggctttcataacgtctagaccacccagaaaaataggaggtgcttgcttgcgaaacctttcatacaagggttccatccggttcgttgccacaacaggttcggcctgcacaacaggggcgggtgccactggtatctctggaacaggcactgcaggagcaccctgctgcctcaactgccgaattacttcctcttgttcattgattttagattgcatttctgcaaacctgttttcccaattatcggcttcc

SEQ ID NO: 292659 - DNA, 611 bp, Cannabis indica
ataaaaaagataaatatgccctttaaaaatctataaacaaaaaaaataattacatattctaataatggcaattttgtcaaattaaagcattccgattacctttcctagttatgtaaacaaaataatatgattctggttttctttccggacagtttagtaaacagcataataaaatattgattccgattattttctattttaaaccgatacatttctcccattgattattctgattccaattacagtttagtaaacgcgccattaaagaagtaaactaagagtaggatgttattcatgctttatattatagaacactatttattactctaaatatattttattaattgtataaagttttaattttttttatatgaagatatatgtaaatattaatattatatatttaaaatgaataaaatatattaaaatttgaaaaattagatttttgatctaatgtatcatgtaaagtaaagtaaaaatttgagataaaataaaaaagggaaattatccatatacttatttttttaacctttttttttctaaatttacggtttggtttctaaagtggttgcagcgctagttgcaataggagtttctatacgtattttttg

SEQ ID NO: 292660 - DNA, 788 bp, Cannabis indica
tttatcggaagtgactttatcggaagacaagtacataatttttggtataaggtatgcttttgttaacctacttttataagaatatttttcatatatatttagataatctttaaatgcttagagtaattttagaataatattgatgtaatacataggatatatattgttgagtgctaaggatagatatagtaagctataaaaaaaaatacaaaaaaggtctatactgggatttgaacttgtgaccaaaaggatagattgataagtttttaccaatataccaaaacacaatagaattaacaaatacattataaacattgattctaatacttaaaataagaattctattatagcaaaataaaacacaaaaaatacccaagttcaaaaaaaaaatcgcctcaagcggacaaccggatcaaaagttattaataatgttcaaagtttttaaaaaatttcatgcaaattttaaccctttatctacaaaaatacaatacactacaaaaatgatactaatatattaaaaaaaattataaaaatatactaatatactacaaaaatacaaacacataatataaaatattaataaaaagatagctaatatacaaacacttagagtaatgtagatgtgtatttattcaacttttcaatttaatttgtatttatggttattatatataatttatacttaatttaattatattaataataaaataatatatatataaattatgctaaaatacaaaattggaagctgaaaaaaaaccataggaagaccctatggcgtcggttat

SEQ ID NO: 292661 - DNA, 963 bp, Cannabis indica
ggggatatataatatttgattgattaaataatgttacaatggtgtgtcacaagttttaatctagtgggggaatgttatattatattgttataatataagatagattaaaatattaaaatgagacatattatatattaatatgagattaatgtatataatatgattgagagttacatacatataataatattcacataaattgtaacattagaggtggagttactcatattttgtaacttccacatgatcactaattaagtgtgtaaagagtggttacacaacttaattgttttgaaattcaaaaccataattcaaatatagttgttggggattgaattttgtcatttataaagtgtataagtgatataaaataaagtggcaatggtttggaatggtttgaagagttgtttgcaaaagctgaaaaatttggtaactagtaactagttactgtttttttcagctttaattgttgaacgttttttggctataaggatggtttttaacaactctcataacctccaaattacccatttaatctcatttacaccccattaagaaatggtaacaacccttgggtgtaggttatttgaatttcaaaatatgtgatcttaaaacactataaatagaggtttttctttcacttgaaaaaggacaatattttttgtgagtttctatcaaagagagcaccttgctagaaactataagcttgataattccagaaagctatttccatttctttcttccctaagtgcttgtggtagggggaaataagcttttggacaaaggtgtaaaaccttgttcaagttttgtgattcccctacttgacacttggtgttagtgttgttgagattgttctcacatctatatatatactactatttatattgtattttataatcttctcttcatcttattttctatacttatgtgtatattttgtctagagttgtaacattattttat

SEQ ID NO: 292662 - DNA, 625 bp, Cannabis indica
tcagtacatttcaattaatcctaaattctgacggtggtttcaaatgtagttcctgccaagactttggtaaatggttctactaggttgtcctctgtgtccactttctccaccagtacatcccctcttgccacatattctctgatgatgtgagtatttcttttctatgtgcttgcttctcttgtggctctttactgttggctatggctcaagtgttatcacaaagcaaaaacagtggttttttccattctaaggacgacatcgagcccagtgaagaacttctaagccagacaagttcttttgcagcctctgcagcagctatgtattcagcctccatggtagagtctaaaatggcagttgtttagcccttctccaaaccactactccacccccatgagtaaacaccatcccagatgtagatttcctgtcttcaagacatgcctggaaatctgaatcagtatagcctatgggatttaaagcaccacccttgtagactaaaaatagatctcttgtactcttcaagtacttcaagatatgcttaacatcattctaatgttcttgtcctggatttgtctgatacttgcccacgattcctaatgcgtaacagatgttaggtctagtgcataac

SEQ ID NO: 292663 - DNA, 824 bp, Cannabis indica
tactaatcttacctcgattccgaattcaggtgtgtcggtcaacctgggtggaacgaactgctcggcgaattacaggctcctaaaccataataatcacaacactgataagtgacacgctaaatcacttcccgaggatttaaacttgaaactaaaagtttccctatcgataactagcatggaaataccctaaataacacaaaaatggaaagaactagggttaccaaatttgccccagccggtagaccggttcctcaactggaattccggttctgggaaaaattcctggaagccaactggtcgaccagttcttactggcctccctgaacctgaattctggttcagtgcatgaatttttcaaaaaaaccataactcaaccaattcaaccccaatcctccccaaactttccagacctgttctaaacttcctaaataacaaagcaacaaaacacagcttcatgcaccataacaaaaatcaccattgatgagtcaagcttgagttcaaaaactcaaagcttgctcatccaactaattggctaacaaaacctgcttaaatcaccttaaataatcataatataactatagaaaacatacccaaactcaaacagcaactacagcagctaaatcaccatttcattcataaaaaccaaagttttgagttaaaaattccaaacttgcttcaatccaaccaacattcatcaaaacctattctaatccactaaattaaacatactttaactacagaaaataacaacaaacatacacagtagctaccactatcaaaatcatcaagcatgcaaattttctcaactcataaatttcaagaaa

SEQ ID NO: 292664 - DNA, 620 bp, Cannabis indica
attagacatatatgatctcgcccatagaccacactatatattatttattttaattaattactctctcaatttaattcttatatatatgcgtacatatatatataaaaataaaaatatatatgcatactggccattctatattttaattatttgattataataattattattatttgcaaaattccctaccttcttcgaaaatcttaaatataaggttataataagaaagtaaagtaacaaatattatacacaatagatcgatttatatataggcactgttaaatatattaatttgtacaataatttacacttttatattatatcacttttatatatgtatgcaacaataatttaaatttaatataaacatattattaattaataagaataatatttaatttttgtttatcaaataaaaatactaattaattaaatattataataatgagtaattaatactattatttgactcttaaatatttaattatttaaggggcatttgctaatattttatttttttttttaattttttaatcataaaaataaaagtaattttttgtttttaaaaaatatgtgttctataaccatttttgtttttttttttaattttaaaaattgat

SEQ ID NO: 292665 - DNA, 658 bp, Cannabis indica
tatttaatgtagacttttttataaatagtgcatacagacagtttatctgtaaaaaaaaatatttatctgaattattactatttatctatacagcaattctctaaatatatataagcattgtaatacataagtatatatataacatggtgtattttaatgggtattatttatgaatgagtaatattataaaattttgagttttatatttatttatctatttaattaaaaatttctcattttatattatataggctgagattggttcatcagctagaaaaaaaaaaaaaaaaaaacttttcggcaaaaaagtgataaaaaatttgactttgatttaaatatttttcatataaacatgttttgaagtgtaaaaggatgtatttttttgatattttctttaattaagtaactaaattaaacataaaaattcaaatttttcttttattattcgttatcggaccaaaatttaatggtttaatattttaaaaattaatatttatagttaaatttatttagtaatcattaatgggtattacccattattgagaagtattctgaatactaaaaaatattaatggtgcctgtatcaatattgttattagtttaattaaatataaaatcacatatagtctaatgtactaatttttagaaaatattgcta

SEQ ID NO: 292666 - DNA, 471 bp, Cannabis indica
tatagacaacagtcttggcttcgactataagagtaaggaaaaaccttgttgaaatttatcctaaataatagaatatttcaatttttgaaaaaggagtcattttaacaaaatttaacttcaaaccaatcttcatattcacgtgttagtagtacgaattcattgtgactagtggggaaaaatatttcgagatgggtccgggccacatttcacaaaggggtacaactattagaaatgtaaaattttaactatttcaattagaatgattattactgcttgaaaactactttttctcttaatataactaacagaaaagtgatgcacaatggtcttggctttgtgtttgtgaaatttcatgattttttgtgtagggtgagattttaacagaaaactaacgagtgcaagagtaagaaaaaactttaaaaagaaggcttagtagtacgaatttattgtgactagtggcaaaaaatattc

SEQ ID NO: 292667 - DNA, 599 bp, Cannabis indica
tgtgaaaaggaaaagaagaaaagaaggaaaagtgtgtacctcctgaatgtagtgtatgaggctttcgtcagtaagtttgttcccacgttggtctgtcacatggaacactgaaaccaaaacaccatgcaatcaaaatggagcccatgtcaataataacccaataaagttcagacttatataattaattatataaaaatgtaagtgtgtactattagaagaagaagaagacgaaaacaaaagcccttttcaattaatttgataattcttggactgtgagctcataaaaaagctgaaatggagaatcttgaatgaagacaaacttcctcgatcataatagatcgaacatacattactttttgggttttattttaaacatttagagttgtaaaatttaactgactacgtctacattatattttttaatgtatacattctcctgaagaattctagttaattaaaagaaatttaagttattatcttccataaattttttgaactttttcaaatataatagtcttaaaaaaatgtactatctaaatttaaatgtattaattaaataaaattcaattttgttaaaaaaaaaagaaaacaaaattaaa

SEQ ID NO: 292668 - DNA, 550 bp, Cannabis indica
aaaaataaaattataaaacaaccaaaaaaataacatcgaaaagcaatagaaaaataacaagatatatcaactccactgcaatatgcaaattaactagagctacaatagtaaaataaactaataaaaaaaaaataaaaaaagacaaaaacacaacatacaaaaaaattataactgtatttttaaaataagtataagaaaatatagtaaatctatacataatgacaattacacataaaacatcaactaaccaataattgaagatcaatcatatataaattaacatttatatagtttaataaaataattaagaatttattcaatttagtgcgcaataacaaaaagatatatacttaattaaaaataaactagcaactaaaaaatataccatacaagaatgagaaaaagaaattatgttcttaaaaataattattgaaagagggaagtgggtagactcaaaaatttagagggatgggcagggttgcatcttcgggacgatggtggaggtggtgggagaattgcatggggttagggttatgggtgagacaatagt

SEQ ID NO: 292669 - DNA, 654 bp, Cannabis indica
gtaaatttttaaatttttttgtgtaatttacaatgccaaatttcttctttaaatatgagattgttttacaatacatagaaacaacaaaaaaattacaaaaatacggttgtacggaatgttaaatatttttatgatttttataattttgtttataaaaaatatggtcttctgatgtacttttatgttgtacttttgttaatttattgttatttgtatgctattttttttgttattttgatgttatttaaatgttattttctattatttttatgtagtttttttgttgtttttatagaacactattaaaatattaaaaaatcattgaaatgtaaaaatgtaaatttttttttaccaaaagtaatagtttatgtaattattcctttaaatattttgttacatacgtgattattttttcttatacgtatgataagtaattgttaaaacttaatttttggaactgtaaattattttgaagtttttgaaaaatttataagttattctaaatagctacaaattatttgatcaagaaaaaaaattaaaaaaaaactaaaatttactagatgccaaaacaaataatgatatgtcaaaacaactctttagattgtaaataatgtttaatatttaatatacaaataaaaatataaaaataatatt

SEQ ID NO: 292670 - DNA, 193 bp, Cannabis indica
tataaatgatatttcagcttatgtgaaatgagatctccaccatttattttcgtttggtcaagctcgaaggagatcatcctttacttactatgccagatagaagctatagattccatgtttatgttagcgctcccactcaattgcactaccgtgacacgaatagcctctcgagattgagcctaataatatcagg

SEQ ID NO: 292671 - DNA, 467 bp, Cannabis indica
ttatttaatttctaaattaatcataaccatttaatagtaatccaatgacttaaaaaaatgtaaccatgatggttacaataaaaatgtaaccattgaaacatcttccattattattattatgttgatattacgtacaatgcacgtataattagttttctttttaattagatttaattaagagtgatgctaagtacaatacatgtatgtttattttttttttttaatttttgaaatgaggtttgagattttgatcttttagaatttttttttaactattgttacattggtgtgtcatttgaatgtgattatatatacgcattttttaaatttttatttttttaattaggtaacgcatctaataatgcatatattgtaatttactatattcttaattaaaaatcacataactaattttgagtgtatacatgtatatataagttggattcgtaaatttgatataaatattt

SEQ ID NO: 292672 - DNA, 964 bp, Cannabis indica
aggtggaggaagccacctgggagctagagtcagatatgagagctcaatatccagagttattcaggttagatttcggggacgaaatccttttaaggggggaatagttgtaaagaccgcttagtttaatttggaaattagcagttaatcatgtttaattatgaaaattatttatagctatttaaataattatttatactgttattattgaattctgagatgcattttatgtcatttagtagttttcataattttgcatttccggtgcccggtaacatggaactcggtgtttggctcagtaaaatcacaacttagtatgttagtagtttgggacggtttattagacattgggaatgtcgggaatggccgggaatttagaatttcccaaaatacccctttagtgttatttatgttattttagtgtgaaggggcaaaatggtcattttgccccattgttattttgtcctttagtggactttatttggttaaattatatgtttaataatgcttttgttggctgaagtaaaaggggttatgtggcattttcttttcattcttttcaaaacttagaaaaaattaaaaatttctcaaaaagctctctctcttttcctctctcttttcggccctttgaggcagcaagaaaagaggattttcctcttgaatttcaagtgattttcagcaagttagagtgtttctagttgaggtaattcttgtctagcttctttacttttgtcttcttgaaaaatgataaaaaaatgagtaatgcattgatatttttttgatgatgttgctgctgctagttgttgttgttgtttctatgtttaaaatgttgaattaaatatgtttagttaggttgaaatgcatgctagttgttcttgctttagttggataattttcttgttaaaaagctatggttttcaaagtgaaaattgaggatttggtggctgtagttattgcatgaattagg

SEQ ID NO: 292673 - DNA, 561 bp, Cannabis indica
gtgtgccctaaggcactatactagagagtatatttagtagcaacaacaataaaaataactcttatctgttttaattttttacctattttagtagagagtaccattagaatgctcttagagagttccctccataccctatcaaatcctaacaaatctaataattttttatatgattatttataaaaaataaaacaataaaaaataaaaaaaataaaaacccacatagttttataattagatcattaattatgaaataaaaatatataaaaaaataaaatacaaatatgagcccgtaaaaataaaaagttattaacctatttttttaaaaaagggtcgtgtccgaataaaacagcatacacaatagacatgacccttgaattgacttccagacaaaaaaaaaaaaaaagaaaaaaaaaaacctccaattgacgaaatatatatgagcttaattttaaggattcggtatcttaattagtgtacagattacgttttatttccccattttatttttatttttctatgtgttttcaataaagattaggctttaatgcatgtatccat

SEQ ID NO: 292674 - DNA, 465 bp, Cannabis indica
aatagtcacccataaatatatatgagtgcactcttaatgggtattacccatgaatggataatattagaaaattttgagtttttgtgattaatttttctatttaattagaaaaatttctcgtttttacaatatatggactgtgattgatccatcagctgaaaaaaaaaatattaaaaaaaaaagttttcggctaaaaaagtgataaaaaagttgaatttaacttaaatatttattttttcatataaacatatttctgatatagtataaaaagatgtattttttgatatattttttttttctaatttagtagctaaattaagtatagaaattcaaaaattttcttttattattcgctaacggatcaaaatctaatggtttaatatttttaaaattaatatttatagttaaatttatttattacccattgatgggtaatacccattaagaagtatttcatatatatat

SEQ ID NO: 292675 - DNA, 596 bp, Cannabis indica
tatgtaaaactatatgtggtattaatttttatggacacttaaatatataatattttagtataaatataagtttaacatagtattataaaaatataatttataatccaattcaatataatataatacagtacgacctaatacgaagttccaaacgagcccttattctcatataaatggataaaatatttgtcgttatgtggattctaaaactattccaagatataaaaataaggataaattgcggtataaatagctaatgtttcagattttatacacttaaatacctaatgtttatttttggaggcaaaaatacctaatgttacaattctcttacaccgttacaaccacttccgttaactcacaaatatggacacgtggagggttcagatgcattatatttatttttattttatttttaaacttaattttttaatatcagaaactaaatgctacttgtttcaagaaaaaaaaaaaacaaagttctcataacaatttttacatgatattggcacttcaattcgataatcatgttccatataccacaccggttcactcaactatggtaatttagtattgcattctctcttatttttttt

SEQ ID NO: 292676 - DNA, 582 bp, Cannabis indica
ttttagtgttattttctatttagtaagctaacttttaagtcttgtatatattgatattgttgggtgtatttttctaattaattgtacttgtttgttgttgaaaaaggaagaattaaagtgataggaaaaaaagaaaagtaagcaaggaagagtggaacataagctgaaattgaggcagattgctgaagcaatgctgaagcgaattcaacatcctggcagtgatgtggaaacacgagtttcacttatccacctcagcaaattcggtccagtcactcaaattacaccagctggctgatgtggaagaaaatgggctaaacctagtgggccaaagtggaaaagtttgggcttctattttggggtatgaagtttgtaccctaaaaacccaacacctaaaagaagagaaaaagggaagtacactaggatcatgaccattacgtgagctgcgatattttttttggagagaattaattgcagaagtacagaggaggaagaagagaaagggggaccaagtgcaagggagaaggacacaagctcttgtgtttgaatttcttttatcttccctttatcttttcctttcctttt

SEQ ID NO: 292677 - DNA, 485 bp, Cannabis indica
cttgcccttctccaggcagacatccatacagggactccattctggaacaaactacaacaggaaggagctgcaaaccttcaggacttccagaaaagagtccaaaaatacatcaatcttgaagaggcccaaataatggcctatggaggatattatcccaccgggatagcagggtatatgccaggaccccagccatcgggtactatcccgaccgcagctccaccaatgagcggcatacaattctctgctattcctagatacagtcagggccaggccttggcccccgcatcatcccattttgggaatccctccggtatgaatggacaagccccctcacactccactccaactgccagcctggcaggtccttcccagggcttaaggagtaaaaggtcctccaaaggcagcacccggacggaggaaaaacgacaaaaggggtgcactccccaatacacccagtacacggagttgacggactcccaagagcg

SEQ ID NO: 292678 - DNA, 645 bp, Cannabis indica
agatcctggtaaaataaattccaacatgacgtaccgagtataggctgacacagtaacacatcggtacagcaagagtatgactagcataccgagtataggctgttactatgtcaaaagtaccgtcgtgcgaacgttcgagactcagtaccttgtgggacacggggattagggttatggtcaggggtatgggcgtttaatcataatccgggatatatgtatgttatatgatttatgcttttcttactgagtctatcgactcacagtgctatgttcaggtgtaggtaagggcaaggctaaagttgaagaaccgtgaggacgagtagatgaagatcgtacatgtcggagcggttaggcctggagcgtacgatcctcgggacatcagggcttttgtagttagtcgctaggcgacaaatattttgtaaatgaatagcaaacttttgtaaagtattttgttaacggaatcccaaaatattttgtatgtaatattataagttttaattaaataagcaaattttaattagtcacgtttttcattaacctcgttgattagcaacgagctgcacaactagtttcaaatcacgttaacacgcctaggctagttagggtgttacacagccactttttttttttgaagccatgaacagc

SEQ ID NO: 292679 - DNA, 615 bp, Cannabis indica
aataaataaatattaaagaagttaacaaatttttaaaactgaccatcataggaaatatttaaaattggaaacaaccaaaaaaaaaaatatttaaaattggaaaaaattccaaattaaaaatattaaaaattggaaaaatttcaatttagaaatatttaaaaatggaaaaaatgaattttgggaaacaatcccatgaaaaaattggatttttgggaaaaaaaatcccaaaaatcgcaattttgggaaagtggctgcatgcagcagcccaggaggctgccagcagcctcaaacgcgcgcgcagcatgggcacccagccgagaaacctcgacagatgcagggtgtaggggcggcaaacgtgggcggatgaaggattctcatgggcggacagcagggtgcacacgggcgtgtcacgcgcgcgcgattgagcacccatgcatacccgaaatccccattttccaaaattcataactttcaatttttaccggaatcgagttctgtaaaaaaaaaattgcttaattttcacaaggaatccaaaaaatcgaaaaatattttcatggaaaacgaaactgtacaacatcaacattcatcaaagaacacataaaccacatgaaacca

SEQ ID NO: 292680 - DNA, 760 bp, Cannabis indica
acacatacacatacaatcattaaaacatataaatataattggtacttgcatacacaagataaagtaaatgaagctcaattcataaatgcaattcatttccaaaatagaaagctttattataaaattctccaaaattaaaagaattgtcggcaacaatatgaaaaatagggaataacatcccaaactaataattgaaatccaaattgttctgaaactaaaacaattaattcacaaatttaaaaaaaaaatcgagcttcatcttcatcttggactaactccaccctttttgtccaaccatccgattcaactcgctaagatagcatccgagttcaagcagctggagctgtaataagaagaaaaacaaataaacatggttagtaggtccagaattaataatccaagtggataataattcactaaaacacatcagtttataggaaaagaaataccttgtttctttgctagaaatttagggcattggggtttccagtgtcctttttcattgcaatagaagcattttccttttggtgtatcaccaggagtagcagcctttttctttttaactgttttcacagcttgaacaggcttcttgctattcttccacttcttcttgttcttgggtttggaagtagaggcaaagtttgcctcagctttagtcgccccattaccatttccagaattatgaggtttactccctttcttcttcggtcctccaatcaaattttcataagtctgaaggtcattgactaacgtgtgaaag

SEQ ID NO: 292681 - DNA, 526 bp, Cannabis indica
agagtggtgtgtgccacatttcaatttcaagaggacgcattggtatggtgggacatggtgtccatgatacacgatgtcaccacgatgacctgggaaaagttataggaacttttcaatgcaaagtactacaatgaggccgttagaagtgccaagagaaaagagttcactcacctgacttggaaagatttcatgagagttactgaatatacaacgcagtttgatcggttggcgaggttggcctcaagaatcgtgccaaccaatttcaataaaaggaaaagtatttgaatggacttaatgtgaagattaaacatgacctgatgatcactacagacgacaagaccacctatgctgagatggtggaaaaagcactgcgagctaagggcgcagttgggtgtatgactgagttagctaggactcgagtgagtggcagggctcctacccctcctgcatcaggctttagcaggggaggtaatggttcggccatggaccagaaaaggaaaacatccactgcaaccggtggcttggg

SEQ ID NO: 292682 - DNA, 657 bp, Cannabis indica
atgttacattccaacctggtgatcatgtctttctacgagtatccccgatgaagggaatcagacgctttggaaaaaaggtaaattgagccctaggtttattggaccttttgaaattctggagaaggttggacaagttgcttatcggttagccttacctccttccttgtcagcagtgcataacgtgtttcatgtttccatgctgaggaagtatgtatctgatccaatgcacgttctgagttatgaaatgttagagttgcaacccgatctatcttatgacgaacaaccagtgcaaattctggataggaaggaaaaagttttgcgaactaaaactatatcattggttaaggtactctggaggaatagtaaagtggaagaagccacttgggaattggaattcgatatgagggctcagcaccctgagttattcaggtagatttcgggggcgaaatccttttaacggggggataattgtaaagaccgcatatgattaatactttgaattattaaataattagggtttatgtatgagattttattattataatacaattatgtgaatttatttgagttcgtatatatttattatgctattttatgtttaattatccaatttctgtgattgtgttcggaagcggtggaaagcggcgttggggcctt

SEQ ID NO: 292683 - DNA, 569 bp, Cannabis indica
agataccattaaaattttatgaggattaggaatctttgcccaagtcattcgaatagactatgcaagaattctactatcttattctcataattctaataagttacttctatccatatgaatggttagatttactttctcagtagtgttcttaagttcctatcactagcgtcaaccaaataaagatgggcaaagaattttaaaattctcccactcaaataaggtagtgtgaaactttgtcaaagaactttattggtatcaatttctattacaacagtaaatatagactggaacataaatcaagatcaagaatttattctgataattgctaattatattacatccatgtttaaaaaatatgtgtgacaaagagtattgtggtgtattgaatatagtccagagttcaaaatgaactacatatttcaatagtatagtccacccctaagtttatagagactatgatccacccctaagggatatagagatcacggttctctaagtgttatagagatcatgtggagttatgaatataatccagagttcaatagatataaaagatcgttgaactgcat

SEQ ID NO: 292684 - DNA, 555 bp, Cannabis indica
cttttaaggtgttgaaaatgccccatgaactattgaaattgttggatttaaagattttttgctaatttcattcaattttcatttcaatgattgcttatgtactaaaccatgctccccagattttgatatctaccaaatcatgcgtcttgaactttgatatgtactaaattatggcccctgaactttcatccatgctagacttttttactaaaattagaaaaaagtccttaaatattccaacaatctcaatagtttagggggtatttttaacgaccttaaaagttcagggggcatgatttggtacatgtcaaagatcaggggacaaaaatcctaattaggctaataatagtaatattaatatgacatttgttttcatattaaacaaatttactaccatatttggttttaaagaaaatacacaatacacctaaaattggttttttttttactaatttttacgaaccttttgatttagtctacagattctttttacaggttttcacttgtttttttcaatgaaaaaataaacgtcaaaataacattgttttgaaacaa

SEQ ID NO: 292685 - DNA, 634 bp, Cannabis indica
acgaagacgagatttctttacagcatccgttccttcatttttaattcgtagtttttcccaagcctctttggccatctcacagtttgcaatgaccttcaattgatttgtggacactgcattgaacaaagcatgcatggccttcgaattaaaaattggccctctccatctcatctggagtccacaagctcataggttttggtttggtgacaccgttatccatcatcgttgggcatgtccaaccatcttctatggccatccaaactctttcattcaccgccctcaagaatgctcgcattttggttttccagtatgggtaattggcaccttccagcattgggggtcgtgatgtggaccctccttctctgaacatctccattcctgtacgaacaaggaaaaacaaaacaaagatagagagcagtatactcccagagtcgtgtctggagagggggttagttccaactgggtgttgcagaaaggaaaaaatgcagaaaaatcaagaattgcagcaacaatgaatttcagtacaacgaatcttgcaagaaccctaaggatcaatatttctaacagaaatagctggctctgataccaaatgtaagcccaagttcttgtctaacctatctttttcatatttaga

SEQ ID NO: 292686 - DNA, 642 bp, Cannabis indica
ggatatacttctttattttactttattattattcatgttatataatgatatggttaatgtgttttatatattttgtacaaaaattataattttatttttcaaaaataatatattttaccagttgtgtggtgtagtggtaagaaaatctttattaacaaccttacttcttcgtcgaatgttactacaacgtccctcattgtaaggaattatacttgactcttgaaggcctatagctatagcacgtagtccctagaattgactaagccactgaaagagtgaggaagaaatctgcatcgggtgatctcttttttcattcctaatatatatcattagaatttttttaaaaaaataattagaaaaatagagaaataaggtaacttaagatgtaattggttacccaataagctattctttctatattttttaatttttcttttgagtttttcttctataatttttttttttttgtctaaaaaaacaaaacatatttgtatgctcagccaaaaaaaaaatagataaaaatagaatttaaaaaaactttactatttaaaaattacatagcgggttaagttaatttctttaatttgttctattggtcatgtaattagttactatttaaaaaaaaaaaaactttaaaagtaa

SEQ ID NO: 292687 - DNA, 490 bp, Cannabis indica
ctttcttcaactgaggacagtctttcctgagatgtcccacagaaccacactgaaagcaggctctccggttacaagtcccgggatgatgcttcttgcaacgcgggcactcaggataggaataagtctgacgtcctcctttgttctggtttcctcgaaaccttttaccttgccctgaacttcccgaagatgggaaagttcttttcttctgttcaaatgtagaacccccactctctttttcaggaccagacatagggagaatagtaatcccaccaacaccaggagactctcgggtttcttgcaaaaatttaactgctccttcagctcgaagagccttgtcaaccatttctgcataagttgtggtatcgttcgttgtaataaccagatcatgcctgatcttagcattcagtccagccaaatacttttctttcttgctgaagtctgttggtacaattccgaaggctagcttggccaagcgatcaaacttggttgt

SEQ ID NO: 292688 - DNA, 575 bp, Cannabis indica
attctccagatacatgatttaccaccagctgtgaatcactacagatttcgatgtgttcggccttcatctcccgggctagtcttagcccagcaattagagcttcgtactcagctttgttattagatgctttgaatccgaacttgactgcagcgtgcaggtgttgccccccaggcgtgacaagggaaatccctgcacttgatagttgatctgtagtcgacccatccacatgtagtttccaggtcggtttttcttcattgttacttggctgaggtgcttgtaccggctcggggtttctttctggtatgctttcttttgcctgtgcattctaccacaaagtctgctaaggcttggcctttgattgctgttcggggttggaaagtgatttcgtactgacccaactctaccgcccacttgagtaatcgtccagaagcatctggcttttgcagtatttgtcgtaatggctggtcggtatatacccgaacatgatgagcttggaaataaggcctcaactttcttgttactaaaatgaggcagtaggggagtttttctatcaatggatatcggccctcggcctc

SEQ ID NO: 292689 - DNA, 795 bp, Cannabis indica
tatgaattgatttgtatttttaataagacttaatttcttattatttttctcttgtatttatagttgttctttttattattttatggttgtttttatgttgttgttgatatattctatagtttttttaaagtattttttgtacagtcgttgtttagtttatgtgtatttttatcgtgtatatttttagtttatttaagataatattttcgttgtatatatgtgcatttattttgttatttttatgttgtgttttaattgtttttcaatttatagttgtcttttaaccatcactaactcaataggaaaagagaacgaaagttataacaataaattctatgaaaaaaaaataatgttaatagtacaaaagttatcaaaatgtaacgtccccgcttcaagcctccattgggtccttacacccatagaataatgtctcttatatacacgagtacgccactctggctgcttcctgtactgatgactgaccctacaaaccaacacgagtgtttccagcgtgctttgtcctcactcgcacactttctgagaaaactacccaagaggtcacccattctaaaattactccaagtcaagcacgcttaactgtgaagttcttttgtgatgggctaccgaaaaataagatgcaccttcttgatataagtagtaccaatcaatccatttaagtcctcttcaacggtatagtcccatacttacacagcctcaaattcataacacttgaccttacccaggcaatgtggggggttgcatagcttaccccgctactttccccttacggatcac

SEQ ID NO: 292690 - DNA, 854 bp, Cannabis indica
ttgattattgatctaatggtaatcttgttaaggaaacataatagtaataatagaccctagcttatagtatttttacaccttttttttttgtctttacactattgtctttttcttcttcttcttcttcttctttttttttttttttttatttttttaaaaactaaatttaatagttattttattttattttttagtacacttaaattacttaattagtaattttttttattttttttatattcttctaaagatatttttttaatatgttactttcaaaaattatttattttaataagcttgttgatgactctttttaaaatttattttctaaaaattatattttatgtatttcttagatttgttttctttataataaaatcagtttttgagcaatacaactttctggttcataaaaaaaaatctaataagtacaataatttataataaaatataaattaatatgtatacatcaacgtatatttaaataagtatataatcaagtaactcatattaaaataaatgagtaatttgcggtataaatatctaagtttaactttcgattgcaaataaatatttaagtttaatttttgacagtaataatacgtacctaagttaaaattctggaacttccctaggtacctggccattaagtgttaagttaatggccacatggcagaccctaattagtctagatcattaaattttattttttatttaaaaattaatttaaatataccaataaaaaaataacacgtgtataataacttgacacttaatggacaggtaactagaaaagttctagaaatataacttaggtattattaccgtaaaaaattaaacttaggtatttatct

SEQ ID NO: 292691 - DNA, 786 bp, Cannabis indica
gtaccacaacgacattggtcatagcaccaatgaatgcaagaatctcaaagacgagattgaaaacctgatccgattgggccacctctatgagtggatcaagaatcggctgcctcacctcaatccgggccaggcgacaggggttgtgccccagggaacaccggggggtgcagcaggagtattggctccagttgctcccgcgggcgatgcccagcacatccccggtctgccgcccagaccaaacgggagggtagccatgatctccggaggaccccatattggaggaaccacccgcaaagagctaaagcggtacgcgggggccgtaaagcacaatgaggtttgggaggttactcaactcccagctcagaggccccggctgatggaccaacccatcacgttcacggaagaagacgccaagatggttcgcttccctcaccatgatccgctggtcatcgagacccccatcgctaataaggtggtggccagagtcttgattgacaacggaagctccgtgaatctactcttcaaggaggccttcactgcaataggcctgacggaccgagacctctcacccagtggttcccaactcactgggtttaatggaacgacgcttatcccaatgggaaaagtgagacttccggacaccccctagagcacatttaagtactgcagttttgtggtggtggactgcccgaccgcttacaacgcgatcctaagccgaccggccttggtagattttggcgcagtcacatccattcggcacctgtgcttaaagttccctacccagga

SEQ ID NO: 292692 - DNA, 579 bp, Cannabis indica
tgcgattttatgcgacattgtgcgatattgtgtgcgatgtcatgagaaatccaaggttagggatgaaatgattaattttggcgactttgtacgattttcatgcgattatgtgtgcgattgtgatatttggcgatttatgtgcgacctttgtgcatcgttatgcgattttgttatgtatggtatattgtgcgaccttatgcgatatgtttccttctttgtgcgatttgtgtgcgacatgatacttgtttatattgttgatttattaggcgacattgtgcgacattagtagtagcttgtgcgatttagtgtgatattatgcttattttttctgtttatttgtttgtatttctttgggacagattcaactgtatttgtgcctgtactgtatgatggcgtttggactgtcgagggtttcaactgggtatttgattcctcaaaaagtaagacattgatgttggacattgactctacactgaaaaaggtgcgtgaagttttgcatgaggagttggaggtggaccccttggtgtatgaattgaagttagaagttctttacatgtacataggcatggcaaaaagatc

SEQ ID NO: 292693 - DNA, 689 bp, Cannabis indica
caacacatttcacaactattgtttgtgatcttgttatcatcttttaggagcatcatcatatgatttttgtaacataagtgttgagtctccattttcaatctatataactgaaacaataataaaaacacccattaatagctcaactatatacatatatggaacacttcttaatgggtattacccattgatgagtactaaacaaatttaactataaatattaattttaaaaaatattaaaccattaaattttaatctgatagcaaataataaaatagaaatttaaatttactatgcttaaattagctacttaatttaaagaaaatatcaaaaaatataattagaagcaaacaattttatatagattacatacatatgaggaactgaatgaaaaactaaaagcttacctgaatcaaaacttcaccaccaaacttggaaataaaaaatataaataaagaagagcttaattttgatttgtttatataaagaagagagagtatactaattttgttttttaatttttgctttgagttatttcttttaacttcagtattatttgtagtccattttgtagttttgtattatcttttaattggtgaggaaaaaaagaataaagtaaataaaattcttccttgctacataatttataatttataaaagatttatcttctatgataatttattgtgatttt

SEQ ID NO: 292694 - DNA, 659 bp, Cannabis indica
ggactaacactaacagtacgaaccccagacaaaacactatgagtcccaaacgcaactggaaagcaactggacataatttgtcactacagaaaataatagttcttacagtatacaatatttattttttattttgttatgtataatagtagtatataattttgttagcataataaatacattttaatgtatgtatataattttattggtatgctacatatatttaattattatttttatatatttgaattgtataatatattatttatttaaaataatagttaattagtttttattttattatatacaatggtggtatataattttgtaatcatagtatatatactttaattgtggtatataatttagttagtgtagtatatatatattagtaatttctttgtggtatataattttattactatggtatattaattttcagtgataagatatattaaatatcattctatatatttaatggtctaatatatttattcgtttttgttacaatataataacatgcaaaattaaaaaaatatatatatcttaatttaattattatatattattttttcaaaaaaaaaatatacagtaaatatattgttacagtttttgttatagtgaggtttctctcacctagaaactcgagaccagactcctat

SEQ ID NO: 292695 - DNA, 629 bp, Cannabis indica
tttgccccccaagtctgtacgggacttccaaagttgcgtgtagacttcatccgagctatctttgcatttgaatgggtgacacgtgtcaggcgcgtctattcgcgaatcgatgtgaggctgactgggcgtccctttagttttcggctaataaatgctctgatgcaattaatattttgaaatctgattttctctcaccacggttgacggctacacttgattgcttttgatttcccatattcacttttggggggaaccgaggcgtctgaggttcttttgaaatgattaccccttttcgttgtttgcctataaataccattgagcatttgttcacaaactcattttcaccaaccttccttgctaagtaagttcagagcaaaaagggaggtttttagcttcaagtttgctgaagtgctttcaccagaattgctcgtttagcttggcgtaacctaagtccagacgttcgatccttgagtaagttctcaatttcttttattttactttgcacatttactctctaaatgcaactttaaccttgttgtagaggatatgtaggaaaccctaagttttagaaactctgcgattttcctttgtaacgattcatgctaattcatcgttcgtaatgcttactt

SEQ ID NO: 292696 - DNA, 560 bp, Cannabis indica
atccataagaaacgacactaagatactatactcgctagctaagctagtacaagtaatttttgttgattcctaccaaccacaatggtacgaacatatactagtggtaataattaaaagaaaaaagtctatatcatttacccaacataaattacataatcttccaatatactacattcataactatcattaagtttaaaaaaataaaaaaaaaaataaataaataaatagaaaacctttcatccatagttaccgtttgataacatttttttttgattaattttctatttttaaaattaaaaagtaaaaaaaaaaattcaaaaatatattatataaaactatttttacttttttaattttttaattgagaatcaaaattttgaaatccaaaacttcactttcaatattttttaaaatagtttttttttttcttaattaatattttggactccgaccagacttgaacccaaatcccccgcgaccctggcgccaaacccaacctctgacgcaaacccgaatttgatcccgaacttagacccaacttaaataaaaaaaaaaataaa

SEQ ID NO: 292697 - DNA, 742 bp, Cannabis indica
catggacctgctggctgttttgtgttgaatttaaattagttttcaatttttcatgatgttggatctattttattacttgcttatgttgttgttttagacttttagttatggagttctaagtttttatggacctgcctagatataactttttatggaggtttaagcttgaatgaatggagttttttagttttcatggacctgttggctggatagaactttttatggatttttaaacttgaatgaagggtgtcttttttttgtttttatgcaaaaaaaagcatgtttttatgtcaatttgaaaaatcaggtatgtaattggacatccaattagaaaaccgatccaatccaattagtaattggattggattggattggatattgaggtctaattggattggatcggatgatgattttctaaatccaattactaattggattggattggatgaggtaaaaaaggttggatcggatcggatgcccacccctaattcataccattcctgtacccttccatgtccgagtcaattcgaattaaattatttgaaattcaactaaataatttagtatgaatatccttcaaaaaaaaaaaacaaaaattaagtatgaatagtttcatcaattcatatggtttatattttttaatggtcacggtttgaaaattctgatcagcaatttaaatcaaactgtgaaattttatttttatgtatacttaagggtaatactataatgtacgttcttcaaa

SEQ ID NO: 292698 - DNA, 608 bp, Cannabis indica
cattttcgtgttattttttggaaaaccgtaaaaatagctaaaaaaaaaaaacattctttgacagtaaaaatataattattttacaaaaaataatgccttatgtaattattccaactattaacctctttttatagctagaagaaatataattataaataatggccaagataaaaaatggaccaaagtaagtaaatgctcccctccttttcaaaaataaataaataaataaataaatgtttttcttcctttttaatctaacaaaatcaccaaatataataaattaaataataaaaaattataaaaaatatttatatttttgtcgattttcttaaaaaaaattatattatataaatttattagtattttatattaatttattaaaatacaaaaaatatatattatattattaaatatattatgtatacaatagtatttaatatatcataatacaaaaaaattaatataccgtagtaataaaattatgaccataaaaaaaaatagcaaaaataaatttagtataataatactaaaaaaagtatatacaataataaaattatatatatcaccaaaaaaatatataattacatataattaaataaaaattaaat

SEQ ID NO: 292699 - DNA, 751 bp, Cannabis indica
aatcatattttaatagttgtcgaaaatctcggtcaacagttacccttaataaccgcaggcatagggaacttaaggaattgttcaccatcagttcggagtaattccctgaacagatcgacaggaacattgttcctgatagtgctaagaactgatgttggtagcttcagtcctccttcatacaagtcttctatttccttgaagctatcaaactcatttcgagtctgatcaaagaaatgtttcagtgcaggtacaatggcttgagacaatgacttaattgcataagcaagaaaatctgacatcttcaagtgaccaaatcgttcatctcttggaacataaatgtctaaagattcaataggatccaatggtttcataatattcacttgtttcagcctactctcacttgtagaatctattaaacataaacatgtgaaagtattaaaaaaaaatagtcaaactcccaaatatgcaaatacacaaatacaatatacatttacacaattgcatcacctgttttggtggatgctctgccagttcttcctctacgagggtaagggaattcactattccctcacgaacaaagtttgaacctttgtcgggttcgcccaaatcattgtacacatcgtaatcatagactctgtcccactcttttcgctctccttttccatctcctctcgagttctgaacctctcccttctgtcttaagcatggtgctggtgttgcacttggaagatatgtgataactctatgaaaa

SEQ ID NO: 292700 - DNA, 662 bp, Cannabis indica
agaaaatatagggtttctgaaaatcacccaaccggcagaccggttgcccaatcggaattccagttctaggaatttcagaaccccatccagaattccggatgcacaattggaattccggacctgttctaaataccccaaagaacaataccaaagcatcaaaacagtccagaacacacagataccaaaaatgccactaaagctccaagctttgagttcaaaactcaaacttggttaaacaacactatcatgcatcaaaccttgattaaaattacatattcatgcataaaaaaactgcagaaactgaactcaaacacaatcaaactttacagcagctattttcacattttcactttcaaaaaccatagttttgaatataaaattccaagcttgaatcaaagcaactaacaagcatcaaactagctctaacctactcaaataatcatgctttaaacttcagaaacaacatcaaaaacacagcagcaacatcaactcaaactaagcatgcaaaccatttcttttcatcaaaattcaagacactaaaagagcaagatacaagggtcttaccaagcacttgaagaacacttagattgaatgaaaaagagcttgaaaatcaaaagaatcccagccctagcacaccacaacagccgagagagagagagaga

SEQ ID NO: 292701 - DNA, 576 bp, Cannabis indica
ttccagacctgctatatagaccctaaggaacatttctaaagcataaaaaccgagcttcatgcaaacaaaccaaaatcaccattaaagcatcaagctttgagttccaaactcaaacttggttaaacaacactatcatgcatcaaaccttgattaaaattacatattcatgcataaaaaaactgcagaaactgaactcaaacacaatcaaactttacagcagctattttcacatttttactttgaaaaaccatagttttgagtataaaatttcaagcttgaatcaaagcaactaacatgcatcaaactagctctaatctactcaaataatcatgctttaaacttcagaaacaacatcaaaaacacagcagcaacatcaactcaaactaagcatgcaaaccatttcttttcatcaaaattcaagaaattaaaagaacaagatacaagggtcttaccaagcacttgaagaacacttagattgaatgaaaagagcttgaaaaatcaaaagaatcccagccctagcacaccactccagccgagagagagagagagagagagagagagagagagagagagaga

SEQ ID NO: 292702 - DNA, 402 bp, Cannabis indica
acagttgggaggcggatgagcttcattccacactgacttgtgctcaccagcttgaaaagatcgtggtggtggcaggcatcaaaccatcagcctccgggaccttccaccggctgcctcgggacgaggagacacccaaccacaattatgggggcttcgaagcttggagccagacccacttgatgtccggggctatgctccctcttaaggaatactttgtaaatttcttagtttttgttggccttgcgccgtaccaactaatccctcaagcctaccgcctgctttcaggcttgtttattttgtatgccgcccggagctggggttcgcccagtccggctgaaattttgtacttttatgaacttgattctgtccccaagaagggggacaaatttaaagacgaatttt

SEQ ID NO: 292703 - DNA, 589 bp, Cannabis indica
aatccttttaaggggggatagttgaaaagaccgcttagctttaatttgcaaattagcagataattagggtttaattatggaattatttattaattttgaattattaaattatggtggtttatttgattcagaatgcatttttatgtcacatatagaaatttcataattttgtatttttaatgcccgacaacattggaacgcagtgtttggctattagaatcacatcctagtatttttagtatagcggggcgatatagttagacattgggaatgtcgggtatagtcgggattttagaatttcttaaagtaccccttagagacctttagtggctattagtatggaagggtaaaatggtcattttgccaatctttattttgtcctttagtgagaatgaagttgtttattaaatcagattttaattgatttttaagtctgaaattaattggataaaccaatgtatttcattatttcaaaaaaaaaattaaaattatcaaaaatcacattttcactctcaaccctttctctctttcgaatccaccagaggcagctagggtttgtcaatttaatcttcatttcaagcttaattca

SEQ ID NO: 292704 - DNA, 680 bp, Cannabis indica
atagatttggagttattattttttttaaaataaaataaaatgtggtagtatatataataataataataataataatatatcgatatttttataaaaaatttattaaaataatagtaaaatatgaatttgtagatttatgctctaataaaatattaaaaataagataattaaagagagaaaaaaaatcgtaaagttttgaattaattttttacttttgattcaaactctttttccatatttttttacatattttatattgctatgatgtttttattgcttgatctcaatgataataacaaaaatttattagtagaataaataccaaaacttacttttcatcaattgtttaaatatatgttgttgtgttagacaacaacctcagccagcaaacaaacaataatcaacacaccagaaatgaattaatgagttgcagaaaatataataacagaatttaaagaacacaatcaagattatagaggttcgaacttccttcacaaagtgaagagcctagtcctctttgaactcccttaggattagtctttattatgaatcaaatggcaagattacactatgtttagttgtacaaattacagaacatagagatgatgagttattccccttgtttagctttaatcctgaagcttgaacaccttgaaaccacctgaagcttggacttgctt

SEQ ID NO: 292705 - DNA, 803 bp, Cannabis indica
agtgtttttcttagtaatagtgttgttttttgttatattgtatagatctgaacgttgttagttgtaatttgtgtcatttgtgtccttaaaatagaggtagagtgtggtccgaacagtctgtggttttctgggttttttcatttttgtgcgattttatgcgactttatacgattctttgtgcgatttcatgagaaatctgaggttagggatgacatgattaattttggcgaccttgtacgatggttatgcgattatgtgcgatttctgatgttaggcgatttgtgtgcgacttgttgtgcagcattatgcgattttgtcatgtatgtgttcttgtgcgactttatgcgatattgtcccttgtctgtgcgattattgtgcgacttcatacttcaacatattaggcgacgttgtgcgatctctgtagtaccttgtgcgatgtatgtgcgatattgtatgctgattttttctgtgtttttctttgtatttttctgtgggacagattcatctgtatttgtgcctgtgctgtatgatggcgtttggactgtggagggtttcaactgggtatttgattcctcaaaaagtaagacattgatattggacgttgagtgtacactgaaaaagttgcgtgaagttttgcatgaagagttggaggtggaccccttggtgtatgaattgaagttagaagttctttacatgtacatgaaaggcactaagtttccacctgaggttttagtgaaagatagtcaactacgagtgttcttgagcatgaaggcaaaaaatgagtgtggacaacttgttgccac

SEQ ID NO: 292706 - DNA, 502 bp, Cannabis indica
ttgctatcttcttccatatccagaacaataaagtcagctggaaagataaacttatcaactttgactaacacatcctcaatgactcctctaggatgagctagtaatcgatccgccaattgtagagttaccgtggttggctttgcctctcccaactgcaatcttttaaaaatagatagaggcatcaagttaatgctggctgtcaagtcacaaagcgcatttattccttcaattctcccaatggtacaaggaatagtgaaactccatggatctctgagtttgtttgggagggagtttcttttatagaatggcgctacactcttcagttagagccaatgtttcatagtcctccatttttctcttctttgacagaatctccttcatgaacttcacataactcggcatctgttctaaagcttcagcaaaaggatgttaatgtgtagtcttttgaagacctctagaaattttgtgaactgcttgtctagattggtctttcagagtctct

SEQ ID NO: 292707 - DNA, 669 bp, Cannabis indica
cattatcacagtcacgcaaaaatgggtaaacaacttgctaaaacctttacgaggacctaaactaaaaattagaagtttctctatcgataagtagcatgacaatgtcttaaatattgaggaaacatgaaaaaacgagactttagaaaactgctagaaaaaatggtaggccgtttttctcgataatctgccagtcacggtctgccgttttctactgcaaaaaaataccaagtctcaattcgagctaaaaccatccccaaacttgaaaccaagttccagaacacctatttacgcatcaataaataaaacccaagtaataacaaccagtaaaacacacaaaatcaaaaaatgctattattgaaccaagtttgagttcttgaagtcaaacttgttcaaccactcacttagccaccaaaaccagctcaactaagcaccaaacaacctaaaattggccaagaaaataacttctaagagcttagggttcggacataaccaaatcactaaaaattacatacttaaactcaaagaaaaaccataaaaatccgaaaagaaaagtactaaggatcaatagtaattttaaaaagagtaatttgcggcataaatacctaagttttatgccgagtagcagataaatacctaagtcgtatttttggcggtaaaaataccttccgt

SEQ ID NO: 292708 - DNA, 630 bp, Cannabis indica
atgctttgatgcctatccgatacaaacactaagttttcaacctccccaatcgcttcccttaacttctgcaagaaatacttccaagagtcatgattctcactgtcaacaattacaaaggcaatcagaaacaattggttatttgcatcgtacgctacagcaactagcattgtgccccaaaccttgacttcaagaacctgtcgccgatactaatcacaagacgaaaaaacttaaaacccctcctacaagcatctagtgaccagaaacagtacttgaacctgttgtcctctgtgaccatgtctgtaatagtaccttcattcttctgttctagcatgtaaaagtaaccaggtaactaactacaagttgctgctggcgtacccctcgcatacataagtgccttctctcggcacctccaagcatattcctttgtatgtctttagctttgtacttagtttcatctgattcgaacttgttcttaataaggtggccaacaacccacagtgttgcttgccggttatcagcatgtctagaatccaggctacatgtgtgtttgttgtggaatatagtcccctcaaacatgtcacaatgtgccctcttcctccccctcactctctatttgcaatttgaatccct

SEQ ID NO: 292709 - DNA, 703 bp, Cannabis indica
aaattaatttttcatttgattattttaaaattaatttagaaaaacacacttagtttaatgaaatttaaatttaagataaattaaatgtattttaatagtatttaattaaatgaagaattaataactaattagattcttctagacacttaattatttaatatttcattaaaatatatttaagttgaaaattagttatttataactaattttggataaacttgaatttgaatatttttgaaattcataattaagttgagagattctagaaattagttattggaagattctttaagatattattttaagttgaaagtttgttaattttagatcaacttaaaatggaatatttttcaaattaagtggttagtaacttaatttgttatttaattaaatttttgaaaataatttaagttggaaattttattattttagaacaacttaaattagataattttcaaatatttattttattatattttaatttatttattaatttttcgaattttatatatttatacataattttcaaaaaattaaatattgaaaattaaattaaatttgaaaattaattttggaccaactttaaattaaataattttcattattaaaataaatgattaaataaaaatacatttttttaaataatgagctttaatcaagagatattcgatcttcattgttggtcttacaaaagttaaatgtt

SEQ ID NO: 292710 - DNA, 581 bp, Cannabis indica
aggttctaaatgagttttcatgtaataacagttattagagcactgttaaagtgatactgatgcagtttaaagattcaagtttgtatattgcttatataatggatgaaagagctatgctgatcttaagtgtagaaatattaaatttcaagtcgggaattctatctttcttcaggtggttccaatgaaagggaaaattcagaaattggtcagaaaggggagttaagtcccaggttaatcagtccgtttgagttttcagaaagggaaggtcgggtagcttattagctagccatactccctgttttatttagagtttacaacatatgcttcaaggttttagaagtacaaagtggaagaaatccatatacggagttgggagaatattgaatttcaaatagatttgttatatgaggaacaatatgtacagatttttgaatagaaaagagaaagtgttgcagaagcaagaaaatatcaatagttatagttttgtgaaagaacaataagattgaaaggcgatttgggagttaaagttgcagttgcgaaagttgtatcccgcattgattgaataatttcgaggacgaaat

SEQ ID NO: 292711 - DNA, 719 bp, Cannabis indica
catttaataaacaatttcgttcttaatgaatctacgaatccgcagtatacaggaaaattagttaagagtccaatttttatatctgaagagttatataattttattgataaactaataaatgaaaagaaggaaaagaacacgctaattagtgtcaaaaaataaacaaaaaaagaaataaaattttattttgtcgaattcagcttatgttatatttagtcggcatatatttttttagtaatagtatactgtatactggtgttggcactttcgttgcaatacttctatattttacaattactggatctttttttcttccaaaagtggtgctaacaatgtcccctaatcgtggttgaattttccaatagagaacaaaaagaagggttaatgttattgtatgatatatatatacccaaaaaattattgggttagaaagaatgaaaaggagaatagaaattacatttaaaacgtataagaaataataataaatattattatttattattaaatagtctttctttattttttaaataaaatattaaaatattatttaatactttaaaatataacgaatcaaaagaatgaaataataacagtttcctttttcatttttattatttccaatcaaacgctattttttgattaattttaaagaataattatctttttttacccccctgtacttatgacaatatactattatgccccttaatctattcagc

SEQ ID NO: 292712 - DNA, 460 bp, Cannabis indica
atatgaaatgagttttatttaggacataaaacccaacataaaatacattgaagggtataacagtaaattaatccctatacaatgtaaatcattaatagacgatcattaattattgggattataacaatggataactaatagcgtattctatatcgtggaaaatatagagcattctatataactcagagtgcaattcaaagttctatggtggatgcaatgaggaattaataagttagtggatttacttggtaaattctagatgtgcttattggaagcttgggtatataggcccatggtgcccatactagttgagacaatactgcttgtcagactcagttaatttattttaattaatcaattataattctaaaattagactatgactagtttatgaattttcactaagctagggcttgattgtgaagaaaagagattctagggtttatttgttaattaagag

SEQ ID NO: 292713 - DNA, 710 bp, Cannabis indica
cctattgtaactaggggatcaacctaaatcgcaactaaaaatcttatatcaacccacatatatagaaactaccagagaaaatattttagaaacccaaaccgacgtaaattatatagaaaaaaattggttacaaaaaatagtatatgaggttatttttactaaaaattataggttatatattctttttttttttagataaataggttatatattcttagaaaattacgaaaaaataaaataaaaaaatatttaaatattaaacacaaaaataaaatttttaaaaaaaaaagtcaattaaagtacctttaatagtggagaatattcctaaaaaattaaacttatgggggccaatttgtaaaaataaattagagtaccaattttccaaaaatgaattaatagcaaaaaaatcatttagaaactactttatcaacacttaattcttttaaaaaaaaaaacacacacaaataataaaaaaattacaaaattacggcttgtatggagttttcaatatttttaccgttttttagattttatttacataaaattacagtttttttttgtaattttatgttgtactcttgttattttttgttgattatttattatttgtatattacttttttttttatgttattttgatattgttttcgtgttacttatatgtgattttttaatgtttttacaaaatattgtaaaaatgtaaaaaaaaa

SEQ ID NO: 292714 - DNA, 1071 bp, Cannabis indica
caacttaaattaggatatttttcctagaacttagaattagaatttataattaagttgattttattcaacatacttaattgtttgtttctatttcatgaaatttaattaattagaagatatatttaagttaaaaattaatttattaattaattttggaccaacttaaattagaatattttcttagaatattaaattagaaataataattaagttgatcttattctagatacttaattaattttattttaattaatttaattaaattagaaaattatatttaagctagaaatttttcaatttcagatcaacttaaattagaataactttcaaaatatatttgttgacctcgcttttagccaacaacagcgagtctaattttgtaagcgacaagtagtttataacaattgaaatataataaagcaatataacgacacaggaattttatagaggtttagccccgagcagttccataatagcataatcctcgttatttgtattgacttaagaataaggagaaaggtgccttttcttatagctcttacaataatatctctgaatatgaattcttagacaaaatctctcaacaagaatgttttcgacccttcgcccagtgaatatgcatcactatttatagggctatgagcttggagaggaagtatttcccttctcgttgcaatggatataagcagaaagattgcgtaataaatacataatacactgataataggatttggatagcttgttatatgtctgcaatctgatcccaagttatagggatttccttgatgactgacggtccaaaatcgctaagtgttggtcgctctgtgtggattgttgattgctctgcctcaagcatgcatatgaggtatcctgttcggactatatcttgtgggcagatactcagagtttattccatgtgtcaccatcatgtgatgccacgtcagagtgcaaaaattagaataacatttgccgcccaagtctgtacgggacttctgaagttgcgtgtagacttcatccaagctgtttttgcatttagatgggtgacacgtgtcaagcacgtctgttcgtgac

SEQ ID NO: 292715 - DNA, 448 bp, Cannabis indica
aataagaggtttgatgaaatcatcaaaacctacaactttcttcagaatgaagatgaaccttgtgtttactaactcaaggaagacaaagtagtagtattcctggtcctttatgttgacgacattttgatcataggcaacaatatcaagaaaatgactaacattaaggaatggctagacactcaattcgaaatgaaagatttgggtgaggttgcctatgttctcgttatttaaattatcagaaaccggaagaacagatcccttgctctctctcaaacaacttacattgataaagttttagagagattctccatgaccaacaccaaaggggcgactatgccttctagatatggtatccgtctatctaaggaacagtgtcctactgatcctcaagagatagaggacatggcaaaagttccttatgcttctgcagttggaagtctaatgtatg

SEQ ID NO: 292716 - DNA, 610 bp, Cannabis indica
ggtaccatggtatgctgattatgtcaacttcttggctgcaaaataactcctcctgagctttctcgtcaacaattgaagaagttctttctgaggtgaaacattattattgggaagagtcaatcctctacaagcactgtgttgatcagataattcgaagatgtgtgcctgaagaggaaatgtactctatcctaaatcattgtcatgctttaccatgtgggggacatttcagtgggactagaactgctgctaacgtgttacaaagtggattcttggccaacactctttaaggatgcttgtacttttgtgaaggcatgtgatcgctgtcaacgtacaggtaatatctcaaggaggaacgaaatgcctttaacgggaatcttggaagtggaattgtttgatgtgtggggaatagacttcatgggtccttttccttcatcttttagcaatccgtacatcttattggctgtggactatgtgtcgaaatgggttgaagctgcagcaacaccacagaatgatggtaaaacagttctccgcttccttcaaaagaacatcttcactcggtttggtactccccgagcaatcatatgcgatgaagggagtcacttctgcaaca

SEQ ID NO: 292717 - DNA, 664 bp, Cannabis indica
tataacaattaaactgaaatattgtggaaaacaaatcacattattattaataattaattttaatgtgaacttcttaaaatatgtaaatatttttcttgtatttgacataatataaatacacgtatatgagattgtcctatatataaatattattatacgttttaaagagaagcatgcaataataatgcttgacagttagagtcttatttaaaaaaaaaaatagtgctaaatcgtaaagtaatcgaattataatgagtttctcttatgtatattttaacaatttatataaaatttaattgtttgaagaaatttttaaaaaagaaaaatatattcctatcaaatatattgaccaatacagaattattataagaaaaatcaattgtaatgtatatatatatagtacaaaataataattggtcaaaacatataaattctttcataaacataaatttaatcatttataatttagacgttttataaaaatattgtaaaaaatatgagtgaatgaaaagttacataatgtatgaattattcagcgagattatatgtgtatttaagagattatcattaactaaataaatataaaactaaatatgtattcataatacttttattattacaaaacgacgaaaaaatgaaattatttatatataaaaaaaaaaaa

SEQ ID NO: 292718 - DNA, 663 bp, Cannabis indica
cccgaccctggttctgtgtccctagtctggttccatctttttgtctgagttcaggttcgtgttcgcgtccagagtccaggtttgtgttgggatctgggtccgggtcccgattcgggtctatgtcagatttggattccaggtcctggtccggttacgattctggatctaagtccaatttcaattatgattccaagtccaagtcctagttccagtcccggtcaacttcctgttttggttacaattttgggtcacaaggtacgggatcgggtccacttttgagttcgggactgggttcaggtgcgggtgtggtttgggtccttgtcagggttctggtccagtgctaggtcccaaatccaaacaccgactatgaatttgtccaagcgctgggtctagatcaagatcccaatctcgggtcacgagctgggtcctaggttcaagttcgggtttgggtcgggtactaggtcccggtcctagttctatttcccacttccctatcctgattctgggtccaggtccaggttattgtgtggatttgggtcccggtctaggttcgcgttcgagtcctagtctcagttcgggtttaggtctctgtttgagtttcattctgggttcgggtttcagtttaggtcctagtcctggtcctagtcctagttcggttctagt

SEQ ID NO: 292719 - DNA, 597 bp, Cannabis indica
gtacatgaatagaagcttttataactataatatatgcattactttttctattacatacattcaaaggtatcatgtaacttgactgaataatggttatatttcacatatactctatatgactatctatctaattagaatcttaacaagctccactatataacaaggttgtagcagacacgaaaaaaaaagtgactaacaccaaagatactaactacgcggtagttaaataacaaacacaaataaagaaaaatgaaggattactctaattctatataacttctccttcatacatgtattttttttttttgttcagatttatttttgtttggttaattaactaatgtttatacaatatgcaaatagaaaatattcaaaagattaaaagttaaaattacccaaactcaaatcaagaagaaaaaaatattcaaagtcaagtcaatagcattcaaactcagattaactatgaaagtgcaactagtagattttaatgattcaagttaccaagttgtacatctttagattgatcgatttcaagatatgagttatgaacaagaattaaactttaagcaataaatcacacatcaatttacaagcttc

SEQ ID NO: 292720 - DNA, 600 bp, Cannabis indica
gattatcatgtagagtagataatttaggtaaataacagaattagttaaatgtgtttaactaagaactaacttaaccaaaaggctaactaactaactaagagcatccctaataaagatacatataagtgatataagttaaaatataactcatttagcaaaaaatatactctaatgatgtggcaaaaggtgatttgaatttggcacataaaaatcttgtatcaaatttgacactacatttgttataatgaaaaatttacatttaaatgcactactttttttttgtttacacttataccatttatattattttattagtatctttaactatagcattaaattataaaatatttatattatttttttattgtttacataaaaataataaaattaattacaaagttattttttaaatatttgtaataaaaatattaacaaaaaaaaaatcgtttcgtaattgtgtattgaagcacaatattaaaagttagttgcaaatctatcacaaagctaatacatatctatatattatagggataattacatataatatactattttttgttaatatttttttattatttttacgtttcattttttttatat

SEQ ID NO: 292721 - DNA, 563 bp, Cannabis indica
ttacaattttaatagcataaagaggcagaggttagtatcgcgaaacacgaaaaaccaactagagactatagttattgggaagggacaaccttacctagtttcactaccaccccatctaaatttgcctttgtgggcttcttgccttgctttctagaaaaaaattaaatttttggcggctaaacactctcaactatcgtttcacttgcacttaactctccaagcttaaatttagacagtataactttctaaattactgaactgttagcaaaagtaacgtgtcatctgcttaactgcctccgtgtacttatgtgtatactcttatacatgtaacacgtttatattagtacacctaatattattgaaattatttcaaaattcaatttaaaattaaatataattataaaaattaaaattaaaatattaaaaatatttaaatttgaataattttatattttaataataatactagtgtagcaatataaacgtgacacatgtacaagagtgtacacataagcagtgcatgttagtgttaaactgtgaaaaaaatatatcaccttaaattt

SEQ ID NO: 292722 - DNA, 807 bp, Cannabis indica
ttgccccatacttagacagaaaatccattcccaggattatatcaaaatcagacagttgcaattctattagattggcggttaattcacaaccgtcaatccagaaggacaaggaccgaatccacctagtggatactataaggtctcccgaaggtaaaagggtaccaaaccccgaagcataaatatcacatggtttatcgaaactttcaattactctacttgacacataagagtgggtagctcccgaatcaaacaatacagtataagaacaaccatttatagacaactgacctgtcaccactgacggactagcatcagcgtcagcctgagtcatggtaaaaagtcgtcccgggttctgagtaacattcttcttaggctcctctttcttggtctgaggacaatctctgatgaagtggcccaccatgccacactggaaacaagtcttggcccgacattcaccctgatggtgtttcttacattttggacactcaggataagatcggaatgaagatccgcggccctgacgaccacctctgtttccccgaaactttctattgccccctgatgttccggaagcatcaaccttccgtttgtgatcagggttaccactgtcggtccccttactgatattaccactagcaggagggttcgatgccgtgacggcatcctttgcagtctgctctttcactacatgttgctcagcctcctcagcaattaaggctagctctaccactttcttgtacaaagtgtcatgtgaagtggtaattttcaagtcccgactgattgtggcattcagtcctctcacatatt

SEQ ID NO: 292723 - DNA, 488 bp, Cannabis indica
ttaattttatttatcttttatatattttgtagctaatagataaaaaagccatatccaaaagctatgattgatgagatgagagaagagtgggcgacggatatgcttccacacttgcagagtcatcgcattatgggtcatttacttaagttttttttttaaaaaattattcatgacaaatatttagttacaatatcagttaaatatatatatattttaatacaatatttgctaatttttttatgtatatatctttatcaaatattgtaaactttgtgatatttatgatagtttaaaatttgtattttttttttatatttacactttttatgtgtattaactgaggtaagttaattataaataatttgttggaaaaaaatatattatataatacaaataattatttataatataatataaaaataaagaaataaaattaattttgcagcaattaatttagaaaaaaaaacaaaaaaaatctaatttcaagt

SEQ ID NO: 292724 - DNA, 604 bp, Cannabis indica
aaataattttatcctataactactgaaatttcagcaacataagggctataattgaacattctcaaaaaatttaaagttattaataacaacaaaaaataatctaaaacaagataaaacaagtgatgatgacttagataatttctaattatcattgcatttcccattaatattttaattcgagttttatgagtcaagtgttttctaggataatagaatttagggttctagttctagaaacataattatctttactttagtttaagttttatgatacatcattggtatgtttaaattttatgtgacattttattcatccttaggtattctaaaatattattcaatataatttgtgagacttacgcgtcaaaccctaacaaccaagaaagcataccttataccaaaaattatgtacttgacttccgataaagtcacttctgataaaatcctaacaaccaagtttaagagaaactaaaatcaaatattatcctaattctaccaaaatttcggcagcataacgactataattgaatgtttccaaaaaattcaaacctattaataacaacaaaacacaattcaaaataatataaaataatcacaacaacat

SEQ ID NO: 292725 - DNA, 782 bp, Cannabis indica
agttgcccatttttcttcatcactatgacgatgtttgcaagccaggtaggatactgaacttcccgaataaaccgacagtctcttaacttgtcaatttctgcctcgactttgggaagtaattctggtcgaatccttctttgagattgtttaacaggggtagcatcttttgatactgccaacctgtgcacagcaacctttcggttcaaccccggcatgtctcggtataaccaagcaaatacatctttgttctcgcgaaggacttgtatgtactgtggtaactcttcttcagataataaagcactgacaaacacaggctttggatcatcctcggtcccgagattgatctctattaagtcatccacagttgcttgtcctccatcttcgaattcctgaggtgctggttgaaagatgtctataaaatcttccgaagggtttgagcttgagccttcatcttctacggtcaagctttcttcgaaagagaggtaattgacttgagcaaaattttctccatcttcttgtgtttcatgcccccgaatagtaattctcaaagatttcttctgttttggcatccactgtttttgctttttagttccctttgactgtggagcacttgggaaaacaagcctttcgaatgctgacactcgtggggtggatgtgcttggttcaagtctatcaaatactgagacccgcggggaaggtgtaggaacatcgtcgctgtgaaacattttttgttcctcctctgttaactcatctggttcaaaagaagcttttaaacaatcact

SEQ ID NO: 292726 - DNA, 573 bp, Cannabis indica
acctcaatcatagattggaagactgtgaaggatcacagacaaagagaaaaacatttaaggttttcttaactttatacgtgtttatttatcgttttagaaagttcatatatagggtgtaaacaacatacttgtgagtagatctaagaccctggtaaaataaattccaacagaaagttcttctcaagacttggtgttgttcctggaatggaaaaaccactgttttactttgtgacaacactggatctatagacaatagtaaagagcctcgaagccacacgagaagtaaacacatagagaggaaataccacatcatcaaggaatatgtggcaagaggggacatactggtggagaaagtggacactgaagataacttagctgatccattcaccaaagttttgactgtaactacatttgaaaagcacagactgaatttaggattaattaaaatgtattaacagatttgtgttagtgtaagtgggagtttattgggctttgtgccctaaataaaactctatttcaatgtaatcttttctattcaattatcaataagaaacagatttaatttcattactt

SEQ ID NO: 292727 - DNA, 473 bp, Cannabis indica
ccggccccgagccatgatttcgggatccctcccgaggcggaggagtttacaatgcctcatagcattgtgctgactctggtcctcggagatgaggcgaggcaagagcttcggatagccaagtaaaattacgcccttgacgagtactcccaggggcatactgaggtggaggccttgaggagggttttgcgagaggaggtgcaaaattcccttaacgaggagaactatcagaatccgtgggatctaaacctggaccacctcacggactggttcaaccgtttcctcgggcctaccttggctccttttgcctctgagatgaccggtgagtacgtctgccagctgactcggtgcgcgcctaagcggtacgctgcttgtgcatccttgaactccgtcttccaagttcaggatctcagccacgccttggccgcggtaagtactttatgatttacttcttttctcattattttatttaaggc

SEQ ID NO: 292728 - DNA, 616 bp, Cannabis indica
aaaaaaaaaaaaaaaagaacggtttggacgggttaacccgaccaaaccgacgaaatcattgggcgggttgaactttttcttaaattttcattgggcgggttacgattaaatatttacaacccgatatttatattgggttaataaaaatatgctataacccgaccaaaccgaccgatgtacacccctatttcagataggagccgtgcaacttcatcttgtgtaacacatctgagtaatggcattatgaatcctcttctatacatgaccccttctactatgatgtaccgtgctgcctttcttctcattttccgagcttcatttcgattacctgggagttccccagcgttgagataggctgctattggcgtcatccagtttagggatgtgtcgatcatttcgatttcttccatgctagtgatgctagtttcttcaaggaactgaatagggatcaagtttgccttgtcacttacagtgttgcttgtcaatcgagccaacgcgtctgcagttgtattttcttctcttagaatttgtctgagaccgtagcttttgaattgtgtgagcagatcatgtattttgctcagatatgctatcattttttctccctgagcctcgtatt

SEQ ID NO: 292729 - DNA, 546 bp, Cannabis indica
aaatagcatgaaaaatcgaagaaaaacgaaaaaaattgcaagtggtacggacagtatgcaatgcatactgtccgcgcgcgcagggatggtgatctgcaaagagatctcggtgcatgcctttcctggcatgatttccgcgggtggataggggtttaagacacccctaggcgtgtcgctcggacaatgacatgtccgaacacgcacctgaccgagggacactcggttccgcgcgcgtgggcttgagtgatccacctatcttttttttcaaatcttcaaaaaaaaaaagtaaattgcttaaattttttccaaactatccaataaaaataattccagaaacgaaaattcaattatttttcacgaaaattcacaaacatcaatcaatcatcatacaaaacatagatcaacatgaaaaccataccaaatcacatacaaatcattttaagtccaaatttcttgcaagcaaatcaattaccatagctctgacaccagttgttggaattaattttacaaggatcttagatctactcacaagtatgttatttaaca

SEQ ID NO: 292730 - DNA, 611 bp, Cannabis indica
aaatctaagattctagtaaaatatttccaacaactggcctcagagccataataattgattcactttcaagaaatttggacttaaaacgatttgcgtgtgatttggatggtttcatgttgatctgcgtgttatatgatgattgattgatgcttgtgaaatttttatgaaaataattgaatttttcttttctagaattatttttgttggatagtttgcaaaaaattaagcaatttacttttttacaaaacttaatttcaattttatttgaattagttatgattttttgaagttttgaaaaaaaaaatagagtgatcactcaccctcacgcgcgcggaaccgaatttctctcggtcaagagcgtgttcggacaagcatctgtccgagtgacacgcccagggatgtctgaaatccccctctgtgcgcgcagaaatcatgccagcagcccctggcgccgagttttctcggctattccctctgtgggcgcgcggatgagtatgcaacgcataccatccgtacagctcacaattttttcgattttcttcgatttttcatgctatttcatggaattaacttctgatttttttgtgtagttttgtattttgatttttact

SEQ ID NO: 292731 - DNA, 699 bp, Cannabis indica
agtatccaggttttgttctttctcagagattccatctctgtgtccattgccttggaccatttcttggcatctttatcagtcatagcttcttcataggacttaggttctgtcatttccactcccatagcacaaaagaatgcataggctagcacttcttcccaagctgtgaagctgaatctctgtgtaggtctaggaacccttctagttctgtctctggtcagttggtaatcttgtattgcctcattttcttgtccttcttcagtaataggttccacctgaatgttgtcatcctgaacttggtcatttccttccaagttttcatctccctgagtattttccacctgttctggttccacctgaacagtattaggttgagtgttccttgtttgcatgtccacagatgtgcctgcagggttagtgtctaaagtaggactagatattgcattattattagtaatacaagggaataaatcttccttaaaaacaacatccctactgtttatggttttaaaaccttgtttctctcttacccataatctgtagcctttagtaccttcaggatagcctaggaacacacattttagagctctaggctctaacttacctacactctgatgtgcataggctgcacatccaaatactcttaagtttgagagatcaggaggcttacctgaccagatctcctctggtgtcttgaat

SEQ ID NO: 292732 - DNA, 675 bp, Cannabis indica
gtgttagcaagatgtgaagaaaccaacttggtagcttaattgggagaatgccacttcatggttcaagagggtattgtgttgggtcacaaagtgtctagcaaggggatagaaattgacaaggcaaagctagaagttattgagaagtttaccagctcctaccacggtgaaagccataggaagcttccttggacacgcgggttttctataggtgcttcattaaagacttttctaaggtgtctaaacccttgtgtagcttgctggaacaaaataggccatttgagtttaccgctgaatgtaatgaagtatttttgaagttgaagatagctcttgttacggcccccgtgattgtagcacccgattggtcattgccctttgaactcatgtgtgatgcaagtgattttgccattggagctgttcttgggcagcggaagaataagatctttcattccatttattacgcaagcaaaactcttgttgaattcagatcgtatcttgtgggaaccaaggttattgtgtatactgaccactcggcaatcaagtatttcatagccaagaaagattctaaaccgaggctcattcgttgggttttgttgctataagagttcgatttggaaatccgagacaaaaaagggacagaaaacaaagtggcggaccatctctctaggttggaaacta

SEQ ID NO: 292733 - DNA, 637 bp, Cannabis indica
actgggatcgaaatgctggacctagatctggacgtagatcctaacccagacccaaacttggaccagcactcgtgacccgaaattggacctgcacccgaacctagacctcgatcggggtgcagacctgtacacaaacccatacacagactcggacctgaactcaaacatacacctagaatcatcatacccaaagctagacccggacctagacgcaaactcgaacccagacaaggatcagaaacaaggactaagacccagaactgcatctagacacagatcggtattggaacttgggactcggacccaacctagaccaagacccaggaggcgaacccacactcggtgcctgttctgaccctagagtgaaatccggacccgaacccaaactcagaccaggactcgaactccgacccgaactcaaccccaaactagaactcagaattgcaaatggaactagaacagaactaggactagggccaggaccaggacctaaaccacaaaaccgaacccagatcgaaacccaaacagagacctaaaccccaaccgagactaggactcgaacccaaacctagaccggaacccaaacccacacaataattaggacctagacccagaatcaggatagggacctgggaaa

SEQ ID NO: 292734 - DNA, 511 bp, Cannabis indica
gttccacaatatagatacgctatgaaattatctatcgttcttattccaataatcaaagatcctctatagatgatttacatcaagtagggataaattttccatttcacccctcaatgtattttatgctcaaaacacttagcttcctataaatgatatttcagtaaactaatataattactgaaataattgctcttccatttatctctattaagccaaactcgaaggaaatcatcttttcacttctatgtccagatagaagctatagattctgtatctatgattaacgctctcactcaatcgtactatcatattcccaagatgtatgtgttacttgaaccaataggtaggctttaactaacaactctaagaacataaataactctcttgagatcgaaccaaaccaaatcaagattaagatcttttgatctaagatcatccagtaatattaacttagaaagatacaacggtaagattataatttctttattaaagatcaatatcagtcccaatc

SEQ ID NO: 292735 - DNA, 383 bp, Cannabis indica
atatatatatatcatgataacaaaattatatatcattattaaatataataaaatagaaactaattaaatattatttaaaataaataatatacctcacaattaaactatataaaaataataattaaatatatgtagcatgccaataaaattgtatatttacattaaaatatttgtattatgtgaataaaatgatataccattattatacataaaataaaaaataaatatcatataaaaataataatataccatactacaaaacaaaaatatactctacaacaaaatatatataccaacaacccacaacaacctataaaaaataaaaaaatcgatataactttaaaattaaaaagatttttaaaaaaattaatataaatatacta

SEQ ID NO: 292736 - DNA, 513 bp, Cannabis indica
ttagccggggcctttgagctgggagttgagtaacttcccaaacttcatcgtgtttcacagcccctgcgtaccgtttgagctctttgcgggtagttcctccaatgtgggctcctcccgagatcatagccactctcccgttgggtctaggtggcaggccgggaacatgctgggcatctccggggggaacaactggagccaatactcctgctgcaccccctggtgctccttgtggcaaagctccaaccgcctgacctgggttgagatggggcagccgaattttgatcaactcgtagaggtgtcccaatcggatcaagttttcaatctcgtccttgagatttttgcattcgttggtgctgtacccaatgttattgtggtactcgcatctcttattgggatccctccaggagctgtctttgtacaaaggaggcggtcttcggtagtgcgtattttgcctggtagcaaaatatacacgttctgtgagtctgttaactccatgtattgggtatattgggg

SEQ ID NO: 292737 - DNA, 743 bp, Cannabis indica
acatgaaaataagatctaaataacatcaaaacaacaacaaaaaagaacatacaaataataaaaaatcaacaacaaattaacaagaatacaacgtaaaaggactctattttatgtaaataaaattataaaaattattaaaatatttacaattccgtgaaatcgtatttttataatttttttgttatttttatatatttgagaaataatccctaaaataaatccttacatttctactaactcctataataaaattaaggcctcattacaactaaaatttaaaaacaaaatattattttaatatatttaaacttaaatatcaattttaaattaataatatttaatttttaatagattattattaatttttgatattttgaggtttaaatttaaaaattgattattttatttttaaattatggctagattttaaaaatttgttaatttctttaatatttatatattatttaattataagatcagatattttaatattggacatattttaaattaaatgataactttatccttttaatttgaaatattgtattaaaattattttatatgataaattaaataattaataaatttttgtgttgcctaaacatagatttatctattggcaagttgtgaactcccaacttataacccgagacctgctggacaaatttgtgccaattcctgatgtaaactgtccagtttgtcatcaagcagaggaaaaccatgatcatgtgttttttgaatgt

SEQ ID NO: 292738 - DNA, 550 bp, Cannabis indica
ctggcaaggtcccgaaccaacaccagtaccagaaccaagtctcaaaccctaaagtggactcgaacccgtaccctgtgacccaaaattagaaccaaaaccggaacttcactgggactggaactaggacttggatatggaatcataactgaaattggacccggacccagacctagtaccgaacacagacctagcctcagaccaaaactgacactggaactcgggccaggacacgatcgtgtacccagaccggcactgagacctggacatggacctaaatatgggacccgatcccaaacacttacttggacctagatagggatccaaatatgaacttggactcgaaccgagacccaaactgggatcgaaatgctggatctagatcttgaccgagatcttgacccagacacaaacttggacccgctctagggacctcaactcggatacagattcatacccaaactcaaacccacacgtacaatcagacccaaagctagacctggacctggacccaaactcaaacccaaaccaagatcagaaccaggacttagac

SEQ ID NO: 292739 - DNA, 521 bp, Cannabis indica
aatggtctttttgccccaatgatattttgtcctttagtggactttatttagttgaattatgtgttttattttattaagttttggctgaaataaagtgggttaagtggcattaaacttcattttcttttcaaacttagaaaaataagaaaaaggttggaaaactctctctcttttcctctctcttttcggccccctttgagcagcaagaaaagaggattttcctcttgaatttcaagccctccttagcaagattaagtgttcataagttgttggtatgttttctacatctttcttttatgttttcttgaatttttgaagagaaatggtaggttgcatgcttagttttaagttgttcttgctgctggattttgatgattatttctgaagttaaagcatgataatttgaggttaattaagctacttgtggtacttgatagttagattgattatagttatggttttctatgcaaaagtttagttttcaaagagaaatttggaaatttggtggctgtgattattgc

SEQ ID NO: 292740 - DNA, 662 bp, Cannabis indica
ctcttggtttcgcaggctattcagactagatggacgctaggcggaacaccaggagtcagggaaactcagtcgggtcaaatcaaggtcaaggagctaagtttcctgcgaatgttaggggccgtggtagaggtcccaagggtagggctcgtggtcggggtgatgttaacccgccacaggctgcccaggctgcccaagccaatcacgaagcccagaattgggaaactaggtttgctgaaatgcaagccagaatagaggagcaagacagtgagattcagagattgagacagcagggtgctgctgcagtgcctgtgccagaagttccagtggcaccggcccctgttgtccaggccgagttagtagtagcggggaatagaatggaacccctgtatgaacggtttcggaaggaggcacctctagtttttctgggaggtctggacgtcatgaaagccgagcagtggctaacgatgattacaagaatattaaactttatgggtgtcaccgggaatgacagggtggtgtgtgccacctttcagtttcaagaggacgctttagtctggtgggacatggtatccccaggattaacgatgtcacaaccatgacctgggaaaggttccaagaactcttcaacgcaaagtaactcaatgaggccgttagaagtgcca

SEQ ID NO: 292741 - DNA, 598 bp, Cannabis indica
aaggtcctgtaaatctagggcataatttgcctcttttcccgaaacgttttgatccccttcattggagacacgtgtaggaacacatgatctcctacttgaaactctacattcttgcgtttcggatctgcataactcttttgcctactctgagaggcaagcattttggctttaatcttctcgattgcttcattagtccattgtactgattccggacctaagtatttcctctaccctgtctcatcccagtgaatgggagatctacactttctgccatataacaattcatagggagccatccctattgtactttgataactgttattatacgagaaatctatcaatcgtaaatacttactccaggagccctcgaaatccataacacaagcttgtaacatatcttccagtatctgaattgctctttcggactgtccatcagtttgaggatggaaagctgtactgaatttcagtttggtacccatagcccgctgtaaactctaccagaatttaaaagtaaacttcgaatctctatcagaaactatagactttggtacaccatgtaatcttactatttccttgacgtacaaatccgcatattgat

SEQ ID NO: 292742 - DNA, 627 bp, Cannabis indica
ccggcaaccgctgcctgacgcgccagtcgccgattgtcttcacctttcatcatttaagtctaagttaacctatattttatcttattttaattttatttaattttattttttatttgtgtatatatagttaattttagtttatttgtgtataaaattgtgtttaatttttaagtttatatatatttgtgtaaatttatatagttttatgtgtatttttataaatttgtgtgtatatgtatatatatgtgtatgtgtataatagtttatatatgtgtagatgtatatatatgtaaatgtatatatatgtgtatatgtataaatatgtgtatatatgtatatatatgtaaaagtatatatgtgtatatataattgtatgtaaaagtatatatgtgtgtatatatatatgtatatatatgtatatatatgtgtatatgtaaatgtatatattacatatatatataatatagacacatacttatatgtaaatataatatataatgaatacgagatgagacaaaatcactaatctgaagccattgttgaagattactaacaaggttataatcttctaagaatacattatttctttaaagtattttctctgatagggaagaagagaataaaaga

SEQ ID NO: 292743 - DNA, 510 bp, Cannabis indica
cttactttatagttacacttactttatgataacttgattaaattctaaatataattactttaaaattttattttattttatttttagattataagtataaaagttttaaaattttaaaaatatcacttgattaaattttaatttttattataaaagttaattcataattttttattttatttatttaaattacaaattacaaactttttaatcttcaaaatatcatttgcttacattttcaatttaacaataaatattcatttataattttctatttttttttaacttaaaaattacaacctttttaaagttaataatatcacttacttactttttaaaattaaacaataagtagtaatttataattttcacatttattcatttaaattaaagattaaaaattttttaaaataaaaaataaattgattacctattatagattataatatatactaatttatatattacattttttttagggaaaaaaacaaaaaaatacaaaaaaggaaa

SEQ ID NO: 292744 - DNA, 765 bp, Cannabis indica
acaacacactaataacacaacctaataataacacaagtgttttttacagactattcaccatatgaaatcttagccttgctagaccgaatcctaggggaggctcttgaggggggaaacatgtttgcgtggcgagacttcgccgtactgaaccgaggatcgcgtggagactttgacggactacgcaaaggggccgaggatgatgcaaatgagctgccttgtgcagccctacgatcttcaaccactttggtacgaatttcattttgttcatcagttatgatcctcgcagcgatttccaaacgtgcctcaatcgggtgaaactgtgggacaatacagaaacaaaaacaaaaacttagaaaatgtaattaactctaatcaacttgacagtagaacaccgaattaaatttaaattagacaacgttaatctcaatcaaacttgggtagtacattctgaactaactaaacagtggtatacctgatcaactacttcttcctcattagccacagcctccatgtacttcatgatgtatacaccgcaatctcggtcattgtcttgttgaggaagcccgcgatctttactgtcaattccgaaatccacaaaagtcacattctttgacctattctcatcaaacaaaaggtccaacgtcgacagctgcaaacgtatacaattagttagattcaatgaagaatgagttcacatcaaacaatgaaactttgcaactttaccatttctttcgtagcgtcgacacgatacttctcatccattgc

SEQ ID NO: 292745 - DNA, 504 bp, Cannabis indica
tactttttctttacaagaggacaattggagatcgtcaaagaggtgagggaggttggaaacccttcttctgacaatgtctccaactcaaggcagttgaagatctcaagtgtttgcaaagaggtgagttgtgtaagcccatttttgtccagccctctaagtcttctaaaagacgagattgcaagataggtaatagtgttaggcagtagcccttccttggggaatgattccacatcttcttctattccatatccatcaataaaaagagtggtaagatggggtaatgtttgccaattccatttcatcctcaaaagttcatcatacgataaatcaagactagacaaactaacaggcagaccaccttcaccttcagggaaactctttatcaacggacaatatttgattgtcaactccttcaaagcagagagggaagtcatcttctctggcaaccacttcaatttaggacattttctaattttcaactcactcagcttgggagcaataagt

SEQ ID NO: 292746 - DNA, 561 bp, Cannabis indica
taggtcttcaatgtatttagtttgtgtcaagtaaagacctgtttcgtccctgtaaacttcaattccaagaaaataattaagtgagccgagatctttcaatgtaaattttctgtttaattcagcaataaaatcattcactttcttgctattgttgccggttactattatatcatccacataaatcaatgctatgataatagtggaatcatgtataaagaagaagagtgaagtatcagctcttgaatttttgaagttccagcttattaatgttgcctttaacttgtcaaaccaagctctaggggcctgctttaggccgtatagagacttgttcaacttgcagacaaaatgttctttccctttctcttcgaatccttcaggttgtgccatgaacacatcctcttcaagtgttccatttaggaaggcattatttatgtctaattgccttatgtcccatcctttagaaacggatatagcaagaataattctaaactgccgatgctttaatgaccggggctataagtctctccaaaagtcaattcctggtctttggtgaaatccttt

SEQ ID NO: 292747 - DNA, 534 bp, Cannabis indica
gttgaggtccaaatagctaatataatgatggacaggataatgatcgatgacggagcatcatcaaacatcctattcaaaaagtcctactctacatgggtttaactttaaagacttggaaccatgcgaataactcatgtacggtttcaatgaagctagcatcccaccatatatggcaaagtcaagttgtcgctcacagtcgacactaccctaaggcagacatgatgggatttatgccctaaaagaaagtaataatggataatatattagagtatatatgaaatataattatgaaataaatgatatataaattataagaatataattattaaatatgtaaaaaaaatttattcatatggagaaggtataatctaataaggatgtacaagagaattatgattatatgatatgaattaaataacttggtactgtattaaagtattaaaaatctttaatatgaaactactaagtacggttcactatacactatacttctagtgtgtgtgattttgattcggatcacatatgtagatgaac

SEQ ID NO: 292748 - DNA, 763 bp, Cannabis indica
gtaattattgaagatatcaggaaaaattgtttgttttttgtaatcaacatgaaaagaaaaatgtacattaccgttattgatgaatgaatggattaaagaaatgcatttcatttgtaaccaaaagaataataattaagaaagaaaaaggttagaatggttgatacttacttgaattggaaaggaaagagtgagaatgaatgatgagttgtttgagtattgtgtaatgataataataataatgtaaagaaagagatttatatataagtgggtttatgtttggcggcaaaagtaaacccctttcaatttgtataggagttgtttggtgtgtttagtttacttctctaaaataacgaaatatcatttttaccattttgtcgtgaaatttgcctcaaccagaacacaataaaaacaacacagtgacaagacttaagaacagaacagaacacaaaatgaataaaatggacaaatgaatttccaacccaatgagtataatggaatctaatgcattccaacaataacaactacaatagtcatcaaataagtgaaagatcaaataattttattttgtgcatttaataataatgaacatacttctaatattgtacgtagattctttgatcatcttctttaatcaaacttatccaagaaacacaacatacaataacaaataaaatgcaaaagaggaactaatgaagagcatacccttaccattaccatcataaccccattttatttcttgtaccccatcatatctattctatat

SEQ ID NO: 292749 - DNA, 508 bp, Cannabis indica
gtattagccatttagaagtgttccatataaatatatatatatatatatatatatatatatatataaagaaatttaactaaaacatttcacattataatttgtgaaaaagagattttttatctacaacttttagatagatgttatcttcaattgtcaataatttagagattgatttttaattttcttttttatttcacacacatttaagttgtgttttctttagtatttgaacatgaatttttagtttatttttagattatcttaagaacatattacacttaaattatcaagttttcttaaacactataatatattacatccagtatttacttttaattgtcaaaattataaattacattatttagatatacataataataatctcacctattaagtaataatatttttttctttaattgttaattatattttttaaataaaataaaaaatacctaacataaaattagtatacgtgcatcgcacgtaaatttttactagtatatatata

SEQ ID NO: 292750 - DNA, 704 bp, Cannabis indica
taatccctttcaccatatcgtcctaaaaatgaaacttttccatacaaaaatatatataaaaaaaaacactatattataggatggtcagattgctctgttttaatatgtatattttagttaaatttggacatagttggtttgacaaatttctttgttttagcacacccaattctctgtctctcactctctcatacataaaataatcgaaaattttagaccactaatgcaattggtataatcttgtgagcccacatgctttgaatttagttaaatttactaaaatcatatccaaccttaatatacgattatctttgagaatgccttttattattatttatgctatttttttggttttgaaaagaaaaaatcaacaagtacaaagtgtaaaccatgattttaaatcaaaccaattcatttttacgtggattggtttagtttggtctgatttgattttcaaattttaaaaagcgttatattcgtttggtttcaaaaaaaatgtaaatcgagaccaaatcaatccgtgaacacccttactatttttatttttatttttatttttttaagataaaaaccataaaatatactaattaataataaatgtattcacaattcagtacacacaaaataaattaatttctaaattttataattatataaataataatagagaatgtttcaatagttacatcaaatatgtaagtaca

SEQ ID NO: 292751 - DNA, 67 bp, Cannabis indica
taataggttttgaaaacttacatacaagctaaaaatagatttcgaaattaataattaaataaaaaaa

SEQ ID NO: 292752 - DNA, 350 bp, Cannabis indica
ccaaattaaactaagcagtctttacaagggcttaccttaacttgaatctccaaaagtttccttgctgaaatcaccaagaatcagcagcccttccccttgtccttgctggtttcgaagagagagagagaagaaaggaagcttctcctttgaattttgtattttccttctaattaactaaatgggataaatcaaagtagggaaaattcgtttcccttggctgaaaacaagtggccacgtgccacactcctaggcagccacccaaccccaaacaaattaccaatttgccctttaagttaacaacttaggtgtttcaaaagctaggggtaaaatggtcaaattccataaccccg

SEQ ID NO: 292753 - DNA, 588 bp, Cannabis indica
attatttagtttttttttatatatacatatatatatacataatattatacatatacattaactttttttactttgataatttgcagatatcaatgaatgtgatgaacatgatgatggggttgagttgtgtccaggcagtacttgtgtgaatactttcggaggctttaattgtagttataaacgcaagtttatctttataggtaaatttatatatttcacatttttaatcatataactctaactttttaaaacctcctaaatctgttatcacttatggcacgtttactatacagtaatcagaatcggaataaattaatggaaaaatgtaacggaataaatgaaaaataatcggaatcaatatttgtaatatgttgtttactaaaattttttagaaatggaatagttgtgatttatcttgtttactttattaggaaacgtaatcgaaatgcttaaattgactaaattgcccttttgagttaaactatattatatggtagttattttgcaagacatattttaaaggacaaaattgtcattatatatttaatattaaaaaaataaaataaaaataataaaaatccattaccc

SEQ ID NO: 292754 - DNA, 526 bp, Cannabis indica
ccaatctttttccactttggcccactaggtttagtctctttccttccacagcagccagctggtgcattttaagtaatttggacgaatttgctgatgtggataagtgaaagtcgttttttagactttttccacgtcattacccaaactgcccagaatgctatagcattccttcagcatttctgtccagtttttcagcttttgttcaaacttctcctttgcatcacttcatttttcctagcaaattaatccttctttccacaacaaacaagcaacatttaattaaaaaaaaacacacttaacacaataatttttacaagactcaaacgttagcttcctaactagaaattaaactaaaactacttaaaattaagcaaccaaacacatttttcactactctcctcacaatattttcagtttaaaagcataaaaaataactctataccatagagtacttatctatagtaattattagtaaatgttcatttaatttatcctgaagttgttaaatctagaggtactcatggag

SEQ ID NO: 292755 - DNA, 538 bp, Cannabis indica
aaatcgtttttaggaccgtcgcgaattctgatatttgtagtagtgaattcttacatcaaagaataaataaacaaacataactttatagctccaaaaattatttaattagaaaaaataagcatgacacaataaacaaagaaaaagataaagaaaacaatttttttatattatttattttctaaaaaattaacaaaaaataaacataacacacatagagtgatataataaacctatgtgaatattattattttgtttattaaatcagtatgtttaattaatagaacataaaaataaacacatatataaaatgttttatattattggtatttttattataattgtaaacataaaaataaacatagccaatattaccatatcaatggaaggaagaggaaaagcgaagcaagcaaagctaatttaacattgtgtttggaagtaactgtataattactaggtagggtaattactaaagtagtaattacacagtttagtaattacacaatattttaaaatgcaaggtgtgtttggatatgaggtg

SEQ ID NO: 292756 - DNA, 582 bp, Cannabis indica
aataagatgtcccttatcgttatggcccatttatttttattccatgttgtaacttttccaatcatttattttcataaatacttgaaaactatacaaaaaaaaattacaaaaataacgatgaacagttttttcaatattctttttagttttcatgctgtttatatttgaatgatgttgttttaatattactttattgaaaaaaattaaaataaatctgtaaaaataaaaaagataataatacatattaattttttttgtctagaaattctttttttttatatgaagccccaactctatttgattattgacacctatctgtgcatgtaaacatatatttagggcctgcctaagttaaaataggtcatataagttaaaaatacaaaataaaaaattagccattatataaatataaaaaaataagtatatttttaaaaaataagtatatttttaaaaaatattttttatttgccttaaatgagtgagcataagcgtgggctcttagcccaccttagagccgaccctgcatatattaaatattactagtttgaagttacgtgcctaaatattagttttatttagagt

SEQ ID NO: 292757 - DNA, 1227 bp, Cannabis indica
aaattttgatcatgattatgctgtgaactttgaagttgagagagttgaaaaacatgtccacgtgtgagcaacaaaagcatcattttctcttgtttccatacattggggaaacaaaactaggctaattaatttcaactccaataacaaatgtttggataaatttattatcaatattttaaataccagcattgctattaggcaccagtagtgtctaacaccttctcgacatgtcgcattacgattgactagcgatactctttaaaagctattatattaaattatatgggacccgatacttagttagaccaatagcaatattaacacataagaaggtactaggcactgttatcctttgtatttctctttaaataccaactatatttacaataaaatacattctacaatgtaatttatatatacatattaggcatagagaatgtgctagctagaggtaggtaactcctttaaaatttgtaaattataattatatatcttattcttattaattatatttaaataattattgaaaaattatgtttaaacaaaaatatagtgtgatttgattattgaaagtacagtcattagtcatcatatttaaatataaatctatgtaattttttccactattatctaataagtaaaatttagaaaaaaaaaaatagctaacaaaattttatataaaaaattaatatcatatatatttgtatagtcttcttaaactaatatatatttgctgttaaataaataagaaaaaaaataagcaaataaaattgaaaaaaaaaacacatgagaaaaaaatagtaaaaaattatacaaaagacttaaaaaaattaaaacagaaaaaacctgtgtaattttttccacaattatctaataagtaaaatttagaaaaaaaaaaaataataataactaacaaaaatttatctaaaaaaaaataatagcacaaaaaaaattaatatcatatatatatatttatatagtcttctaaattaatatatatttgctattaaataaataagaaaaaattcaaaaaaaataagcaaataatgttttttatttttttttaaaaaaaacaacatgggaaaaaatggcaaaaaattatacaaaagacttaaaaaaaaaattaaaaacagaaaaaagaactaaaaaaacgaagagagaaatttttttttaaaaaaaaaaggaaaaaaaaaaatagtagagattagaaaaagaaaaaaataaata

SEQ ID NO: 292758 - DNA, 593 bp, Cannabis indica
taattacatatatttataattattagggatgaccaaatatgttcactgcaatactgagttatttggggacccgtataattccaaatggtagaaatgtagctatatggaagacagatgggataattataacaattctgcttcatgtttttgtttgtggaattcttatactattggcttcacagagctttacaccaccattacctctattctcgttatcactctcatcaccattcctccattgtcaccgagcccattacttgtaagcactatattaattagtttgtatgaaattattataataagttaataatattattatattgatgagtatattattaattactgcagctgtggctcatccatttgcagagcacatggcatatttccttctgtttgcaatcccattattgataacagcatttacagaaactgtctccgtagctttattaataggttacataacttatatcgatttcatgaacaacttagggcactgcaacttcgagctcattcccaagtggttcttctctctgttcccccttctcaagtaccttatgtatactccctcgtacgtacaccttctctctctctct

SEQ ID NO: 292759 - DNA, 549 bp, Cannabis indica
actgtaattatgaataagtatatgttctggatttaacacaaattgtaatattaaaccataaatatgaagactacatgtaaacataaatgatttctaatcttctattgataacaaatgagattatattgaaatgagttttatttagggcataaaatcctaacaaactcccacttgcactaacataaaacaagaagtgaatttcaatcaacctattgtcttcatatccagatcaagtgtagtgtatttgactaagcccaaattacagaaactgtaagcctatggtaagcaactgctttctccaccattacttcctttgtgttcataaaatattatgaaacatcatgtttctatatgtattaattctctagggataatgaattctttactgtatgataagtgcatctgaatatatagaagacacatctctaattctatccaaaatggagtaaagattaaaatagttaggaactctcttcagtttgaataactttctagtgtttttcaaaaacaactatgttatttagcttcattggtggaactaaattatta

SEQ ID NO: 292760 - DNA, 1234 bp, Cannabis indica
caaaatccgcacttgtgcggatgggatgttgattgacaatgtaaaagtaaccgatccaatccaatccacacatatttataacaaaattaaaaaattatatatacaaataacattttaatataaaaaaaaatagtaatttaaaagtcttatacatataatacaattatattgcaaaatttaatagataaaatgtatattctattctaatatatatatttttttctacatacaatttaaaataaaattaaatattttttatatatatacaatttttttctcctttgaatttgttatttgttattttatctatttaatgtgttgttggagacataaaataactataatttgttttattttgttgctagttatgtgaaatttttttttcataaatattaaataatttaatattaaaaagtaacaaattcaaagtaaccgatccaattcgcacttttgcggattggattggattggatttgagctattgtgcggattggattggatccaaaaaaacaaaatccgcacttagtgcggattagatgttgtttgaccaaaaaagtacggattggattggataaacagtcctaggttcattagtagacgtagtgtaaagcattggcatgctattgagagggtgtcaatataaaaggttcaaaaaatttgaaaaaaaaatgtttcctaaactgtaatgtagaccgttaatatctacataaaataaattgaattataatttatgaaatgcaaaaatcaagtagtgtttgagttccttctcttttgtgattcctgcactttctcatgtcctcagctgtattgaactaccattatatattatgaacttcaatcaaatatatatgcattacaatagggaaaggtggcccaacaagaaatcactatatatatttttacaaattaatttttgaaaaggagccaataatgtgctattagttattaggtgacattattattacgtgtatctaaataatatactttataatttagatatggtgcgtggaatccgtagtccattggatgcttggcaacatcttcaggctcgattctagcagtgttctgaatttgcaaaatgaatattaagagtataaataaatatacaactcctaaagtcataaccccaaggtgtagcagaaacggttctgagaggtaaaactgaatattttaaatggaatgccaccggtaagtacctttattataaaaactaagctcgttaaaaaactagtgt

SEQ ID NO: 292761 - DNA, 584 bp, Cannabis indica
gtcccgtataataggcaaactcacgttaggagtatcgccatcgttttttcttctcctccgggttccgggcagtggaccatccggagctccttactgagtgggtcaggattcctccttacgaacggactgcacctactcaggtctttcttcggagagcccaggcctttgcctcttatgaccgggctgatcttgacgtcgggggcctggtcactacggagaactgcaggaaggccaaactcatccttccgcaccaatccgtggaggactctaacctttcccgggttatctgtcccaacgtgagggcgccggtcgcggagaagaccttccgggatgagatcattgccactgcagagaagaagtaccaggagtatctctaccggaaggctcaggagaaggcatactctaacgcccaggcggcttccgggaggtcacttcgcgtggggagcccggtggagagaaggagtcaggcgatcgccgggaagccccttcatattagggactcggcggagagaagggctcccaggccgcagccttcggctcaggagccgaacactggggctcctggtgccagcacttccggcgcc

SEQ ID NO: 292762 - DNA, 1171 bp, Cannabis indica
ggcacaaaacccaacaaatcattaccatggctttgataccagttgttggaatatgttttaccaggatctagatttgctaacaagtatgattcattatcatcctaatatgaatttctaaaacaatgaaattaaacacatataatgtttagaaaaccttacattgggtgcagcgaaataatatgtctccttccactcagatcagcggaataatatgtctccttccactcagatctctaacccttgtatcctgtctgtcgcagagtatcactaagatctgagcccgaatgtccttctcttcagtttggattcttcacaatctttcagactatgattgagataccacttgatgtgtgtggggactcactctatcacttaaggtttcgaaaaattgaagaagaaaagagggagaagaggttcgactatagaaggatagtgaatggctcaatttttcctgaaggcaaaaatttctaattttcaatctctgttaagtgtgagccatcactatctatttataggtaaccactaggtttaggttaggaattacaatattaattggacaaaataccattaagtggccggccatagggttaatgggccccacttggtattttgcaattttgacaattttcatttctattttctcaaaaacgtcaattttccaattctaaacatttaaatgccaaaactaattatttaataactaaaataataaataatattgtcatttaatataattattaattagacataatatagtcttccaattaataaataaaaactagaatctcttttcttcacaatttagcccttgcttaatgaaaattcataaactagacatagtctaattctagaattataattgattaattaaaatcaattatctcagtcttacaagcagtatggtctcaactagaatggggaccatgggcctatattactgagctcccaataagctgaaccagaatttaccaagtaaattcccctaacttattaattccttgttgcatccactcttagaacttggaattgcactctcaataacagagaatgctctatatgttccaccatatagatacgctatcacatttaaccatcgttataatctcaataatcaaagatcatctatatagatgatttacaccgagtagggataaatttaccatttcacccc

SEQ ID NO: 292763 - DNA, 559 bp, Cannabis indica
tcttcttctttcttctcatctactttatattattttatattatgttatattattttataacaatatatatatatttatattgtgattttaataaatttgtatggtagaaaaggagatggggaataaatgtaagcatcttatatcgtacaattaatattcatatataatgaaattaaagtgttaactataaatatatttagccaattaaaatctcctaccattggttaattacgtttgatcataatcttttatttgggatagagctaaaattattctaaaacatgcatatataaatcctcatcaaaaataattctaagataattattataggcatatatacgttcccaagttcgaattgtcatctcccaatgtgcgaataattaaataaataaataaaataattccaagaaaataatcatatatacacatcaacaagcaaaaatgatccaccccttctaccaaacacacacctaaaaataaataaaaagataagattgctttatacttaagcaatattccatttatcaggttatatgttcatacacatagatgacacaat

SEQ ID NO: 292764 - DNA, 608 bp, Cannabis indica
tgacctcgaactcaccttagagtcgttcagattgcgattgggaaggtgaaatggaagagtctattggtttttaaatttgtttaactttttttaataggattaataagttaacagcattagaagagataccgttaagaaaaaaaaaaaaaaaaaaaagaataagtcctggcgttaaaaattaaaaaagagaatcgttaaaccaagaatcgttaaaaccaagaattgccgttagatagatacttttaatatataaagatatataaaaattttataattatttgtgtacgtatatatgcatgcatggcctatattttttatggttgacgtgttcatgaacattgcttctccaatagtgattacaactcgatctgctttaattattaataattataatttccactttatatttgagatacttttcaaagtgatgtttgtatataataatattggattatattattttattctctaaattttaacatgtactaaatcatgctcttaaaatttttggctctaaaaaattctttttatttaaaatatattgctgaatttaaaattttgtctatatatgtaataattaagcatctaatcaaatatgtcatcaatgc

SEQ ID NO: 292765 - DNA, 730 bp, Cannabis indica
attctagatctcgttttcgccatagccccagcttctcagctgcgagagcaagaacacgagaaaagtcgatttcactgtagttatagtagaataattgttgcaaaattatttttcttacaaaactattttaagtaaaaatatattaaagtaattttcttaaatttttttatagaattaatttattttaaatttttacatatataagtatgcatttttgagcacttaaagcaactcttaactaacttattgctaattcctagcaatttaagtgaatacaaaatattagtaatttaaaatattaaattaaattatgttaaatgggtatatgttaatgtacaattctttcaccgttgtgattcaaatttctgagattatttatgtatgtgttgttttaatatattttttaacttgacgtaatatcatgatgcctaattaatttttatattaaaatgaaattgttatcgtgttgtttattcgttgttattaagttgtttagctaagagaaaaatagcatatatttatttttttttggggtacaattagtgtacaagttttttgtaattgattttaaatttatgttatagattattggtatttttttctttcttggagttttttttcatgcctatttaatttgcatattagaatgaagttcttattcaattatttatttgttgttattaagttgtttaactaagtagaagattaatatactatatacatgtttttt

SEQ ID NO: 292766 - DNA, 633 bp, Cannabis indica
aagcacaaatatgaatagtattcacaatcaagatggaggaatggcaattaatcattaactaggaaaacttaaacaacattcatcattctccctaaataggagtttagttcaaaacatccataatcaaatccataattaacattgaaatagaaaagaacatagaaaaattaaagagaagagaaagaactagttgaagcaattgatccgggtcgccacaagccgctcttctagcctcctcctttgtttctagggttccaattctgaatactctctatttttcacgaacccttgctatttaaaccaattctcatcttcaaaattcgtgaaattacgaaattgcccaaaaatcccgtcaacagggtccccgtcgcgactggcacagtccccgtcgcgacggggttaagcagagaattttcgaagactttctgtcagttcccgtcgcgactggcaaatccccccgtcgcgacgggagttcagcattgaatttttgaaactttctgtaagttcccgtcgcgactggcaaatcccccgtcgcgacgggaataggcagaaacaccaatttggtttttctcgattcttcacgttttcctcattctgtacatacttcttaatgcctgaggacctgaacaaaga

SEQ ID NO: 292767 - DNA, 501 bp, Cannabis indica
aaaaaaacttaaatatttaaacttaaaacaacataattaattaataataataaattatttaccgtagctttttttttatatatatatgggagctaatacaataggtattgtaatttttacctatcaataaggatagtaatttatagcccttgatttaatccaatggctcaaatcaactcttgaaaactacaccaaaattaatatatatttttatttataattaatcttgaatattattaattacaagttcaactaacaaactccaaacctaactccaaacttaatttttttttttacttatttatcttatgactagttataattttcaattaattatttttttaatttgaaatttatatatttatttttaattaattttattttctacttaacacaataattgtagctagaaaagtacaaaatattcaagttaataaatcctaacataatcaatacaaccaataatataataatggtgtaagaagtaaaattattgtatat

SEQ ID NO: 292768 - DNA, 664 bp, Cannabis indica
caaagctttgccggcgcagttgtgcgccggcaaagattatctgggaagcttggtcggtaaaggactttttaccggcgcgtatagtaactgcgccggtaaaacttccttttaccggcgaggaataacgccggtgaaaaataagcgccggtgttaaaaaatggccttatccgccatgaacctgctatgataagcttttgccggcgcactagtgcgccggcaaaactattggcgccaatctgactgttggcgccaatagtttttgccactttttaccggcgcactattgcgccggcaaaagtattaaattttatttttaaaaaaatttaattaattataatattaattaattaaatataattaattaaattttttaaataattataatattatattaacaaaataaaccaacataatttacattaaaagataaaccaacattaattactactaaaatcagtatataaacaaaatgttaaatgttcgaactggataataaaaaaagtacagttctataggcgggtaatgtcgtcatcgttgtttctctgagtctcgggaggctgcgatgacgatccagcaccagcagcagccgatgatccagcaccaggagtgggcaatggtggaagatccatgggaggcaagttgaaacccggcacagctcgagaaa

SEQ ID NO: 292769 - DNA, 1000 bp, Cannabis indica
tccacccctatcagttcgcaagatctttaaccacttacctttatgttttcaacattgctagaaattcatgaaatttctcaaacatttcaaatttcttagcataaggtaaaatctaaagtgatcgtcttaagaatataacgaaaactcatatccacccctgaatgtacatccatattcgaatatagatgatcttactttcaagtggatataggcatattgactctttacagagaatgatcttgtcaaaaccactatgaacaagatgcaaatgccatagatatataagaatgtggttgtggtcttttgatgacttaggtctagttacaataaagagttcttagaatagtccaagtggatcctggtcacagaatactaaactcatattccatacataaacatacagtttggatccattgatcaaaaatggatattaaaaacttgtaaaagtcatactgtaatgtccattgtattatagaaaaatgaaataaaaatttctatttggaatctaaaatttaaggtcaaagacttaaatttataccaaatatgaaagagttttattctagcttggaccaccactacttatctaactctaagtttaatttgcctaaagtaaacatatacaagtaggagatttctaagatcgaggatttatatcatttcaggatagaatgtcgggaatatagtcatctgcgccattcaatttacataaaagaattagagtgacatcataagcagatgattataaaccattcatccaatgaaagctaattcgaaatgaataagctaagaagaaaaaaataaggataatttcgattaaaataagactccaacaatgtcccgataggcagtgtcaaagttattctttattttacacgaaatttacaactacaattaataacagaaaacaacatggttcaatataaattcacacacaattcagaaattattatacaagtaacaaagacatgtgaaaatacaaaacaagcacatcttaaataat

SEQ ID NO: 292770 - DNA, 668 bp, Cannabis indica
tactgaaatttctaacttctttacttttttactgtggggtgaatttttttaaaaaaatagtgtgtactgtgttaagttttcactattgttccagagttatttttagttctttttacgtataaaaagataatatttttgtaaacatttcatgtgacagtaaaattgtaaacttttgcccaaaatttaatatttttgtaaaaattcctataatatacctactcatcacaaataagaagaccaaacaaaagtcatactactaattaatcatctttgatgaatttgcccaccaagccaaattaatgttaaaaaataaataaattaatgcttcaaaaaaaataaaacaaaattaatcgctctttaagcattacatttaaatatgattatctaaattataatcatatattatcatagtaataaagtaatataactaaatattaatatttaataataatgatcaaatatttatttagtgtattttttttaagatgattaaaaatttattattttaattattgtatgttgcaattgaattaaaaatttgtactattttaaaaatgaaatatataatttttattaatgtaatataattataaagaaaaagtttaaaactgttaatgtgacttaaaaaaaaatgaaatgtgatatttttaaaataaatatataattat

SEQ ID NO: 292771 - DNA, 549 bp, Cannabis indica
ggtttggtgtttaggtctttggcttttggggtttttgggtttgaggtttagggtttggggttttatgactagggtttagagtttaggatcttggacctagtatttgcggtttgaggttttaagtttgggatttttggggttttagggtttgggtttggggattttaggttagctatttttgggattagggtttggggtttagggtttgatgtttggggttttgggttttggggtttcgaggttttacggtttaggagtttaggggttggggtatgggatttgggttttaggttttggggtttggggttttgcagttttggcgtttggggttttagggttttgggaatcgttatgggaataggaatgggaattggaatggcaatgggcatgggtcagggaatgggaatgggaatggggattgggaatgggaataggaatgggatttagaatggcaatgggcatgggttggggaatgtgaatgggaatggggattgggaatgggaataggaatgggaatgggaacgagaatggaaattggaatgggctggg

SEQ ID NO: 292772 - DNA, 543 bp, Cannabis indica
tcctaattttaagaagaaaagtatgacatttggccacttaaattatatgggagctaatacaataggtattgtaatttttacctattgataggtataatgatttatagccactgatttaatcaaatggcttaaattaactcctagaaactacaccataattaatattttttttatttatagttaatttgaaatattaatttggatccaactaacaatactccaaagttaactctaaacttataatttttctcacttatttaccttataactttttataattttaattaattattttttaattttgaatttatatataattttattttctactcaacaataattatagctaaaagagtacaaaatattcaagttatttaatcctaaaataatcaattcaaacaagtacaatataatcatagtataagtggtaaaattctcttacatcaactacaatgtttatattgattattataagttgaacatgttttaattttctataagtataattattgttttaatataaattaaattaaaatatatttt

SEQ ID NO: 292773 - DNA, 1014 bp, Cannabis indica
ccagactttaatatctatcaaatcatgctccttaaattttgatatgtactaaatcatgattttcgtcaatgttagaatttttttactaaaattaaaattttttaaaaaaaacaaaaccttctaaagtaacttatttgtattatatagcacatatttaattataatcacccatatataatatggcctttggtaaagattccctatcttacggtacctaatcctttaataaatatatgtttaaaaaaatatgtattatttgatataaacatataaaataatattataaccatgtgtagctagcaataataaaaaaaagttgtgaaagagctacctaatgtattatttaattaataaaatcattctcacttttatttgatgacatctgaaaaactaaataattagtatgataatatttgataaaaaaaataatttaagataaatgtaacacaataatttctttttatatattggcaataactaaacatatagagttaaaaaaaaattaaaattaaggtgtgaggctaaataaaataataaaattaaaatggggcatataaaagtacagtaattacactactcaaaaagaatttttgcatgagttaacacaattaatgtacaatgttgttgatggacacaattaattactctaataatactgatattaatttattattagtttagaaccgaatttcaaacatatgttgtcgattgttaaaatcgacgagtatactacccacacaaaaacattaattttctttaccatcattctaagttacaaaaaaatttacattgcaaaaatggtgtaatatcagattttttcaccattgtcgtcaagtttataaaaaacttttacagatctaagttcgatccagcaaaatcttaccaccaaattaaatctcatcatcacatttcaatccatatagtaagcaatagtgtatattcattccaaatataagatccttatatataatgttatcgaagctcccgtgtgcgctgcaaaaaagaaattcaatt

SEQ ID NO: 292774 - DNA, 506 bp, Cannabis indica
tccaatccaaatctagagagtttgtaaataattgggaagctatttatttatttatattcttttggtcagatttatgaaaaacaaactacacaaccgaagccaagacaagactgtgcagattttgcgggattcattacaaaatatattatcaaaaattaaaattttaaattccatttcaaaaaaatatatatatattatctaactaaaaaaattaaacatattgcatttaacatcacttaattaaaaaaactaattatacgtgcattgcacgtaacattaacataatacttatttaatactatatattaataaaattaaggggaattaccccatatactatcttttaatttttttttgcttcaaattttatggtttgggtttctaacaaaccgtatatccccataattgtttgtatggaatcaatctttccacccttctctctctctcactttattattaaaaagattcaataattattatttattctttatttattcttttttttt

SEQ ID NO: 292775 - DNA, 473 bp, Cannabis indica
tgtaagatatgacaatttttatgatattcctaaaatactcccatttacaccactctatttacaccatcggaccacccatcggaccacccatcggaccacccatcggaccacccatcggactaccatcggaccagatctgctaccaatttttttttatgtttttgtacatacaaaagtagcatcaggtgaccatcggaccaccatcggaccccatcggactaccaattttttttttttttttatgtttttgcactaaaaaaagtatgaaaattttgagaggggtatttttgggttttagataaagtggtcatatattttcaatggtgatatgtattagtttagaaataaaatattaggtatatgtaagtatagaaaatcaaatttcactactacaataacaccctttagaggcggtttttaagccctttcagcgtcggttttcgcgaaattcgctaccgacgctgattatggcg

SEQ ID NO: 292776 - DNA, 507 bp, Cannabis indica
attggtattttattcaactaaaacgttcatccattatgcaaaacagtgcccaaaaggaaaaacagtcaagctcatatcacatattcaacaaacgaccgggatgtctcttaaagagaacgacatagagtcaatcttctccaccgatgatgaattcaactcagactccctttgtgcattcgaacaatggagtgattcagacactccagaatgctatcaaatgtccactattcacacaatgcagccatcccctgtcctcactgtgcgagttcttccaacaaaatatgccaagccgataaaagtggccggattctttgacacgggagcatcatacacaataatgaaccctgatattcttccgaaagaatattggaagaaagagaaacaatacttccatgctgcaaatggaggtattttttgcacagaactcatcagcaaaccgattcgattgcagttcttcccagggtgttctgttactcacagagtcattggatcaaaattgcccggaaa

SEQ ID NO: 292777 - DNA, 213 bp, Cannabis indica
atttttctgtaattttaatgctaattaaacttaacctaaccctaagtgctttcctaaaatatgtagtgatggcttaagggaaaagatgatgcatctcattcattcagaaaaaatttgagcctccactcctatacctagccgaaacctctctctctctctgttcctctcttcaaaactaaagcctatagtgaaagagtgagtgctcacacacat

SEQ ID NO: 292778 - DNA, 486 bp, Cannabis indica
ttaaaaaatatatataattaagtgcagattaagtttgatcgattacttttgaggtcaaacacatccaatccacacaagtgtggcttttatattttttcaatccaatccaatccgcgcaagtgcggatatccgcattttgcgaattaaattggattgaatcgtacaaattaaattggatcagatattttgcgaacaaccccaatgccattatttgcattgtttggacctcaaataggaaatattaaatgttaggaagaaaatatttttcacagatttagtaaagacttcctttagatttttataattattctaaattgcacaaaattatactacactcaaactttagctttcttaatttattgatgcaatccaaaaaaatagaatcctttgaaattattaattttttggatgagtagttatccgcatatatagaaaagaataatttgcggcaaaaccccctcaactatcaatttacttgcaaaaaac

SEQ ID NO: 292779 - DNA, 469 bp, Cannabis indica
gggtacttgggccaaattgggaaagggccatatgaaattgaggacgaaatcggctccggaacctataagctaaaaaggatggatggaacctattgtgccaagggcctggaacgccgatcacctccgaaaatattaccaatagtctaaatatgcaacttaggctttgtttaaaggatttgtaccgtctaaatgtatgcaacctctgaattttaaaataaaactgagcgtccttaaaaaacaaagttttcatgcaactcaggggggtactaaagcataccacacagacagatgaaaaacaagccaaaagtaaaatatcatgacccaaagggcaagtccaaaaagagaaaaacatgcagcataaaaaaaaaaagagatcatgtatacaaaaatcctggctctaaggacaggtaaaaaaaaatatatatatacaaagagcccggggacatgccttaatcattgtctcccctta

SEQ ID NO: 292780 - DNA, 602 bp, Cannabis indica
gagcttgatgaagccttcagctcggtcaaggaaatcactcattgagtcaaccggcccattcttccttatgtccttccatagttcaccaaggacttcaatggcccccagtattgcggataacattccatccttggttactcgcaagactttggtcgcttccgtcatgaatctgctgatgtacgcccggagtggctcgcctggtcgttattttacttcgcttttagccaacgacaatgagtctttttgataagcgataaatgatatgtcgtaatgaatatataataaagcaataataagacacatgaattttatagaggttcagccccgagcagttcggtaatagcctaatcctcgttatttgtattgactcaagaacaaggaagaagattccttttcttatagctcttacaacagtatctctgaatatataattcttagataataatatagtcttagcttagctgcgtatcgactttcaatctctcggtccctttgcccagtgaacattcctcactatttatagggctgagaaacttgaggaggaagagtttcctctctcgttacaatgcgcataaaaagaaagatcgtgtgatcaatgctga

SEQ ID NO: 292781 - DNA, 565 bp, Cannabis indica
ttcttgatatgcgctgaaggattttcggctttgataaggaaatatgaagaaagaaagtggattcatgggtgcaaggttgcaaacaaagccccggtggtgtcgcacatgctcttcgcggacgatagctatctgtattgcaaggcgaatgataatgacgtccaaagagttcagcaattgcttcgggtctttgaaatggcttcaggtcagaaggttaattttgcaaaatcttcagctttctttagcacaaacaccataagtcaagacagagatcgtatatgtcagactttgggcatcatagaagcaggggaggatagtaagtatttggggctgccaagtactttgtctaggaataagtctgtagtgtttggctacctgaaagacaaagtgaggaagaagattcaaagttgggatgggaagttgttatctagagcaggaaagaagtgttaatcaaagctgtggttcaggcacttccttcgtatgctatgaatgtgttccaattgcctcaggatacttgtaaggatattgagagaagtatgtgtaatttctggtggcattcgaaatcatc

SEQ ID NO: 292782 - DNA, 872 bp, Cannabis indica
atataattttattatactatataatacaaaataacttattcacatttaattatacattctatattagatacataaacataatttttattttctatacaatctatataaggtaattaattttctttaagtcttacataaataaacaatgaacatacatatttttccttatatacaacaaaaaaagtaaacatacatattttgtttataaagctaaatattaaatatattagatcaataatttataaataatattaatataaaatataaacaaaatgtttatacatgattgcacattttgttatagtttcgtttcttaaaacaaaataaacataaatattttatttttaaaattatttatggacttttaataaacaaatcatattgattttatttaaatattatcataataaatatattagataaataaaccataataaacattaataataatcaaatatgtatatacgtatatacgttagttataaaatataaacaaattttttaaatatgtttgtatacatataattttgtattaaattttaataaacctattattttagtaatatatcaaaatacaaatattgacttatgtatttttatattttagctttcatgcatttttttttagaaaattaattaaaaataatcaacatgttaaaatcgtaaatatttatgtttatttttattatataatatgaatatgatgattatttaaatatttatcaaattgtatagaattgtgtaattatatttttttttttttagtctacatcttttataatataattaatatacttgtatacattaaaaattgtccattatttaattacaagattctcttaaaaagacttcaatctttttaattgtttttt

SEQ ID NO: 292783 - DNA, 126 bp, Cannabis indica
ttagtagatccagaatcaacaatccaggtggatttgtcacttctctaaaaacatgattcaaaagacaaaagcgatcaccttcatgaccccctaactctcacacaagacccaaaggagaggaattta

SEQ ID NO: 292784 - DNA, 549 bp, Cannabis indica
aattgggaatatacttagctgtcacggaacatgccgtgagtgccgtgctaatcagagaagagaacagcatacatcacccagtctattacatcagtaaaagactcgttgaggccgagggccaatacccattaatagagaaactcgcctactgccttattctagcaacaaggaagttgaggccttattttcaagctcatcctgttcgggtatacactgaccagccattacgccaaatactacaaaagccaaatgcttctggacgactactcaagtgggcggtagaattgggccagtatgaaatcactttccaaccccgaacaacaattaaaggccaggccttaacagactttgtggtagaatgcacaggcaagaaagaaagcataccagaaagcaaccctgagccggtacaaacacctcagccaagtaacaatgaagataagctgacctggaaactgatgtagatgggtcagcttcaaatcagctatctggtgcaggaattgcccttgtcacgcctgggggcaacacctgcacgctgcagtcaagttcgga

SEQ ID NO: 292785 - DNA, 579 bp, Cannabis indica
ggcaacatatgttacctgataaatgtataaccttatgaactcaaaatttgctattttgtaaagatatttacaacaatctcgtccattaactatacccatataggatcaaagtgattttcatcatatcaatcatgactaaacccatcaatggtcacatatacaaatatagccaaatgacatagatcaatcatggatgcgtagcatggaaattacatgcaatgtgaaccgaacatgcctatttccaactggtcctccttaaaccaaagtgaggtcagacttaaacataacaaaacagagtgaataaactgaaaactttatttctgatcagaaaataaccaaatacataaatgtcttaaacaaacataaagcaaagaaaatacaaactcccactaaatcatgatatcctcaagcaatactacacccatatgagcagtgtgcccatgaaagaccttgggtggtaatccttttgtgagcggatccgctatcatggagtttgtcccaatgtgctctatggatatctgtccactctgcactctttctttcacaactaggaactttatgtcaatatgctttgacttg

SEQ ID NO: 292786 - DNA, 689 bp, Cannabis indica
attaagatgacccaatgtcaccctaatcataatagcattgtattgggcaaccaccacttcataggtggagcctataattggttagcgatattatctaaaagttattttcttaaattatgtgaaaaccgatacataattatactaatagcgatatcacactaaagaatgtgtaattattagcaattctctaatcataatgcattttgcgaagaactttattatagttttttcctgatttgttaagcgtgattaatttcatatgtatgtatccatactacaaggtgatattttaattaattaattcttttgatatgcagatagagtattttgaccattataaggtatgtatttcaaaaaaaaaaaaaaaggtaatgtacaccaacttatttttattttcatgctctcagtggtagagggattttattgatttttttctctttcttaatttccttttaaatatgattctcataaaattataattgtgttccttgacttgaattttacaggatcaactcacacatctgttaatatatatagtaatgtgtaatgtttttggaaatttaattatgtatatatgcagtggcggacccagaatttaaagtgaaaggggcataaataaatttaaaaaaaaaatataaagtgtaattagtgggattgaacctttcacctctaacctatttaccaactac

SEQ ID NO: 292787 - DNA, 581 bp, Cannabis indica
gcgtagggatatggctctgatactatgttgagaatcatggggttccatctcaaaactaattggcaatgagtggagtagcctatgttcttatatatggctcaatacttttacaatttaatccatgtggacaatgttctccaatattgttttatatgagattcaacttcttttttttttttttaagtaagattcaactctttttttaatagagaggggtgggtgagtgggcttaatataatagaatgtgtttaaaaatataacagaacacataattctagggtttgtagaacgtgtgtgtgtttgaaaaacaaataatatttcctgtactgcaccccactaaatagtgtgtggacttgatattagaccaaataattattaagagtttaaggagtgcattgatatatctgattttggagtatccattgtagaattacccaataacatatatcaataataagtaaaagaattttttttctttttttaacaaaaaaaaaatgaatggtatgatttcaaattctaataataatattatttagggaaattctacaatacacccccttaaaatggatacattgatgcac

SEQ ID NO: 292788 - DNA, 722 bp, Cannabis indica
ccctcacaaacaacccaattgtgaaggcccatttaccttatttaaataattgtattaggctaattatactagtttatcctaattaaaatttaattaccaacataattaattttaaaataaatagaattaatttttcattagattattttaaaattaatttagaaaaatacacatagttttatgaaatattctagatagtgatttctagtatctaatttatattttctaatatttaattaagtaaaaaatatattgaagttgaaaattgattttttaattaattttggaccaacttaaattaggatatttttcttagaatttaaatagaattaataattaagttaatattattcaagatacttaattatttgtttctatttcaagaaatttaattaaataaggaaaatatatttaagttgaaaattaattctggaccaacttaaattagaatattttcttagataattagaattaataattaagtttattttattctagatacttaattatttctattttaatgaatttaatttaataagaaaattatatttaagttggaaattttttaatttcagatcaacttaaattaaataatttttagaatatattttattttattttaataatcatttcctacattaatttcgaaatgcatttattttgaatgtagatgtttcgaaattttttaattttgaaaattagattaagttaaaaattaattt

SEQ ID NO: 292789 - DNA, 609 bp, Cannabis indica
aacattattaattttataattatattgacaggaaagacatcgtggccagagttggtaggagtaagaggtgaggttgcaaaagaaactattgaaagggaaaattctactgtgaatgcgattgttgttttagaagattttattggcgatcatcagtttcggtgtgatagagttcgtgttgttgttgatgacaatggaattgttacttcaactcctcaagttggttaattatatatatcattggcaacctattgtaatttaattagttttataaattggtaagtttttatttatgcattgtttcttatgtgttgtaataatgtgtgtatgttctttgttttataatgtaatatcaataagatcgttgtaaatgatcaattataaggtattgaaatgaattattttgtaaacatcgttgttttatgcattattttttatgtgttgtaataatgtgtgtatgttctttattttttggtggagttggatagttattagagagtttgttttgtttgtttttattctaatactatgttagaatttgagataagataaatgaaattttatctcaaaactaattgataatgaaattagtaattcattcatcttatatat

SEQ ID NO: 292790 - DNA, 504 bp, Cannabis indica
actactaaccttgtttatttgtttttcttcttactattgcccaagctgcttaaactcacgtgctatcttagcgagttgaatcggaaagctaaacaaaggggtggagttcgtccaagataaagatgaagcccgtttatttatttttttttgaattaattgtttcagttatagaacaattaggatttcaattattagtttgggattttattccctgttcttttctcattttgttgcaaacattttttttacaataaagttttctattttccaataaatttcaatttatgagttgagcttcatctactttatcttatataacaatatatgttgtatgtgtatgtgtttttattattgatacaaattctatagttccttaaactctttatagagttattactacataaacattagaaattatttctatgtttatgaataattgttaattctaaaaaacaattattaagaatttgtttaataaaaagatcttttgatctgataggggtg

SEQ ID NO: 292791 - DNA, 381 bp, Cannabis indica
tatatattattttttttttttgttgaatggtatatgtatttttctgttatatggtatattatttttttaaataatatttaaattctattttctattgtacttttgttgacatgatatataattttattagtattctatatatttttatttttatttgttgttattatatatatatatatcgattgtaacgtatatatgttttgttatatggtatataaattttattgtatagtgtatcattttattttagatcatgcatgtttaatttttatgttattatatataaaggtgatatataactttgtatgtatgatataattattttatggttatatataattttattaatatgatatatacaattttttataataatattgt

SEQ ID NO: 292792 - DNA, 1118 bp, Cannabis indica
cttcctctcctctctctctctctctctctctctctctctctcttctctgtgtgtgtgtgtgtgtgtggtatttgatgcgtgtcgtatgccgtatcaaattttacttatttttttccaatactttcagttatttcagtataaaagcaaggtacgggtcgaacacacgaggactatgatttactttattattcactatacaaacagaaattaaaagggggttgagttgtaattaaatagcataaaaaaaaataaatgcaaaacaaagttgagagtacaatatgagaaactagttaaaggttattcaccgccctcaacaatcattcctaattcctattaatgaatgtaatttcaggttccaatcaaactattaatcctgtaattaaagctgaagcattcaattatcccaatctccctattgtatgtaatcaaggcgaaacgctcaataattaactcttttacctaagcagtaaattcacgaagcatgcaattcatttagcttaaataaaactttgagatctatggaaatagactaatttaggcaacaaatcaatgaagcatataattcatttaacttaggttctattcttcatcacaattaaaattgtaatttgtcacaaacacttagaatcctagactattaggtgaatagtaatcctaagatgacaatagattaaagtaaaacctaatttagtggccatataaacaagattaaaacaagaatcataacattgacataaaagaataaaagcaatttgatatataatggaaactagaaattaacattcaataatgaaattaaaaattcatgtctcgggttttgaaataacccttaactagaaggaaactactcggactagacattataacaaaaatcataatatttagtaagagtttaaggagaagaaaagaactagaatgaagaacacttcgaagctacaatttctgtctcttccttgctctctctttaagtttctatctctattttgtagctttagaatgaataaatctgtagcataagaggtcttatttatagtattagaaagtatctcactaaaaaaaagataactcatctttttaaaactaaaaaagataaagaatcgcatgcagaaatcgtctcc

SEQ ID NO: 292793 - DNA, 649 bp, Cannabis indica
ttaatttccattccctttaagtaaacatatcattagtgataactttttagtcacaacataaattttttgtgactaaatgtgattttttgtcacaacaaaaagttacttgtgactaaaacatagtatttatttagacacaagttgtcactaatttagttttagtcacaacaagtattgtaactaaaaatacatttagtcacaataaattgtaattttagtgactaatactttgagccatagactttttagtcacaacataagaatgttgatttataactagtcacaactattttacttttaatcacaagttttattgtgactataagtaaaaaattttgtaatgattaagtgttcacactatctaggagtcccaaattgaaatccctcttctcccaatatatatatatatataaatatatatataaactgaataaatttttttttaggggagagtgacccaacaactacaaagagcaaggggtaggggtcacttccaaaacaactccaagtttcaactaatccaatagatatttgggcaaggttgtgcacaactgtattcctttaaggactgacgtgtgaaaagaaaatagtgggaaaggaagctaacacttctttaagagcatcaataagagctccatattttgataag

SEQ ID NO: 292794 - DNA, 793 bp, Cannabis indica
aatatttctagcaatcacaatctttggtctacccttcttagaaatgtaaattctataccccttgatacctaaggcataacctaggaaggttcccttaactaatctaggttccagcttatcaatagattggtgtacataaactgtacacccaaaggttattaagtgtaataagtttggagttctattataccactattaataaggggttttaagcctataacacagtttgcacttctatttataaggtaggttgcagtagctagagcttcctcccaaaatggtttctctaatctgaaattgaataataaacatctaactttattcaacagggttcagttcatcctttcagaaataccattttgttccgggtcttaactacggttctgtgtctagtgatcccatactcttgacacaacatgtcaaatttagatttaataaattctaacccattgtccgtcctaagattcttaacttttagatcgttttggttttccacctgagtttttcaaattttaaactgttccagacactccttcttagttgctaacaaataggcttaaacatacctactataattatcaactatagaaataaaatattactaaatgacaatcttgacgaaactatttatatggaacaaccagaagggtatgtgcaacaaggagaagatcagaaaggtatgcaaaatgattaaatcaatttatagattgaagcaaaacctgaaaatattagaatatcaccttaataagaccattaaagtgtatggcttcgaacagaatgaagacgaaccctg

SEQ ID NO: 292795 - DNA, 1113 bp, Cannabis indica
ggaggcgttgctagatgcctttttatgttctaaaaggcctcctcgcactcttttgtccattcaaattttttgttgcctcgtaatatgttgaagaacagcacaaacttatcagttgacttcgaaatgaacctgttaagtgccgccattcttcctatcaaggcctgtacttccttaggctttgtcgatgatggcatgtctattaatgccttgatttttttcaggatttacctcaatacccctcgcgttaactatgaatcccaaaaactttcccgaagagactctaaaggaacatttttttaggtttagcttcatgttatactttttcaatattttaaagcattctacgaggtctgaggtacgatccttactttttatcaattttaccaacatatcatcgacataaacctccatgttttgccctatttggtttgtgaacatttcgtttaccaatcgctgatacgttgctccagcgttcttcagtctgaacgacatgactttgtaacaatagagtcccatgttggttgcgaagcttgtatgttcttgatctgggacatacatttttatctggttatatccagaatatgcgtccataaatgacataatcttgtgccaagcagttgcatccactaactggtcgatcgggggaagtgggaaacaatcctttggacacgccttaattagatcagagaagtcaatacaagttctccaagttccgttaggtttcgggacgagaacatgattggctatctacgtgggataaaacacatcccgtataaagtcgttggctaacaacttgtcaacctcctgttttagtgccccttgcctctcggaatccaagtgcctccttttctgtctctttgctgggtagtttggatcaacatttaagtgatggcagataatattagggtcgatccctatcatatctccatggctccaggcaaattgatcctggttctccttcaaaaagcttattagctgctcgtctaggttcttcccaatgtatacacattttgtgggatttcttgggtcgagaataacctcttccaattcttcgattggttttagcaagtttctttcatcttgaactcgaggatcaagatctttgtctttctt

SEQ ID NO: 292796 - DNA, 453 bp, Cannabis indica
acttggtgcactccatgtgtaggattttttcagagatttcttcaagatattccaaagcttcttcgggatctttctgaaggaagtcgccactgcacatcatttgtacgaattgtcttttgtcggttgtgagaccgtcgtagaaatagctgacaagacgccaactttcgtatccatgatgtgggcactggcccatcaaatctttaaacctctcccagacttgatgaaatgtttcatggtccttttgggtgaaggtagatttgcctcttaaggttgctggtcttatggggtgggaaaaatttagagaaaaatacttttggcatttctttccatgtcccaatagaccttggccttaaagaatacaaccaacttatggctttttcccttgagtgagaaaaggaaagaaacttcaaacctcaccaaagtttatgatgtcagcatggttgttgaatgtgg

SEQ ID NO: 292797 - DNA, 723 bp, Cannabis indica
gttggaacaaaagctaaaaattggatagaaatactgaagcaatgctataacattctgggcagtttgggaagtgacgtggaaaaagtctaaaaaatgactttcacttatccacatcagcaatttcctcccagtcactcagagtacgccagctggctagtgtggaaggaaaaagactaaacctagtgggccaaggtggaaaaagattaggcttctatttttagtgtgtcattttgtaccctaaagaccctacaaagaagagaagagaaaaagtacaccttcttcatgaagatgatggcaactgccatttttgaaaggctttaatgtaggaagtacggagagagaaaagggaaggggaacccgagtgcaaaagaagagaaggacaaaagctctaattctttgcatttctcttcctttcccttttgtattttgttcatttctttcttatctttaaatattaaaaaattgataagttgtaaaaagggcagcagccatggatgaaaaatttggaatttggattgtaatttttttgtttgtaacatgagctaattttcttaaggctacagtggctatgatctcctatgtttggtatgattaatttttaagcatattttagcatttatgcctttgttcattcaagcgagcttatcattttatttgattgttatttcttggtcataagtaacagttggctaagctagatcttgttccggaagggctagatct

SEQ ID NO: 292798 - DNA, 337 bp, Cannabis indica
taaaattaaacaaacaatgtccatgtaacagatgtagaaataagatattaatataattaaattattattttaaactaaccaattaaaatttagtaaaatttagggttagttaaaacaaaaccttaaaaatctacaaaaatttaaaattacaaaaaaaaaaaatgaaactaatttaaaatatcaaggtttatttaaattattttaatttaataaaattaaaataataaaataaaccaattttaaaatagatgcggttagacaattataattttaagaataaaataataattatcctaattatatgtcaaaatatcttaaatatttaaaatataattta

SEQ ID NO: 292799 - DNA, 771 bp, Cannabis indica
ttagttgctgcatctagagaagttattcctatccatcaattttttacaaagttgaactccattgttaatattgttggtgcttcatgtaagcgcaatgaccaactaaaagctgctcaagctgcaaatattgctcatttacttgagattgatgaactagaaagtgggaaaggactcaatcaaattggttctttacaaagggcaggtgatactcgttggagttctcatttgaaatctatttctagtttgataaagatgtttagtgcaacatgtgaagttttattgaatattattgaagatggcactacttttgctcaacgaggagatgcagatgcagcttatgagtcattaacttcttttgaatttgttttcattttgcatcttatgaaaaaaattctagagatttctaatatactctgtcaagctttgcaacttcagtctcaagatattttaaatgcaatgcatcttgtttcttctactaagactctcattcagaaattgagagaagatggatgggatgaattagttgatgaggtgaaatctttttgtgaacttgttaatatacctgtgccagattttaatgctcattatactgcaaaaagaggaagaagtcgtggtcaacaagatgcaattacagtggagcattattacagagttgatcttttcaatgcagtgatagactttcaactacaagaattaaataacaaattcaatgatagcacagtggagttactcattctcagttcagctttagatccaagagagatgcacaca

SEQ ID NO: 292800 - DNA, 734 bp, Cannabis indica
cttttttacaaaatacacaacattaagattaacactgaataaaatgggaaactaaataaaattgataaaatattacaaaattaattacaattaatctaaaatactaaaattaatatttattgacaaaactaaaataaaaccaaacaaaagttactaaaataaactaaaaatacttgagaacaaagctaatttaatgcctagaaagatgtaaataactctatttttatagagttatcaagggtcatgcccaacaaattccataaacatgaattgttcgtgccaagtttagaccactgaacatgatcaacatgaagtcgtcgattatcaaaaaaaaagtttggaggtctccaaattattaaaaaaaatattttaatgtgtgtgagagaaagattgagaatctatttatatatctatatatataaataaaaaaaaataaaaaaaagaaagaagtaaagagaatattgaaaataatttgtaatgtaccaaaatatattataaaatatatatatatatatatatagagagagaaaaaaattccaatagaaaatctatgtcatcgacaatggtgaagtcgtcggttatcaaaagaaaatttgtatgtctctaaatttttaaaaaatattttgatgtgtgtgagagagaaagattaaaaatctatttatatatctatatataaagaaagaaataagaaaaagaagaagtaaagagaatattgataataattagtaatgtac

SEQ ID NO: 292801 - DNA, 478 bp, Cannabis indica
ggagctttaatggtggatttttgattttgtgcatgaagcttggttttcttgctttggaaatgttccttagggtctaaataacaggtctagaagttttggtgtggtttgggatcgttttgaatgagtatgaatttttattcatttcctgctcagaacaggaattccggttgtgcaaccggaattctggatggtggtccaggattcccagaaccggaattctggttgcacaaccggtctgccgattgggggatttttgggaaccctagtttttcccgtttttatgttgtttagggtatttccatgctttttatcgatagggaaacttctagtttctagtttaagtccccgggaagtgatttagcgtatcacttatctagtattgtgattgttatggtttaaaagcctgtaaattaccgtgcagttcgttccactcaggttgactggcacacctgaattcggaattgaggtaagattagta

SEQ ID NO: 292802 - DNA, 762 bp, Cannabis indica
gtgtaattttttgggtttaattattgggtttattttttaacgggagatcaaacctaatcgttaaatttaacagaatattcttttatttttaagtatattctgttaaaccaagaaatgccgttagataggcacttttaatatataaagatatctaataaaaaaaatttataaaacgattaactctaaaaaaaagttaattaaaattatttgttctctttaattctatcaatttttttttattaaataataaatctttcattagaattattaagtatttaattttttatttttttgaaaataagtatttcattttttattaatattaattaatatcacaaatttttagctttttaaattttaatttttttaaaaaaaaaaatctctcatatttatatgtcctttttttagtttttaaaattaaatatttatttaataactaacttataaatatatactatatactataaatatcattttaatttcatagtataagttttcttttttctctctatttttttcgttcttatgtcataccatcaatcaacatctttaggtaaaagtttggttaattattttttctttattttgtcttttctttttggtcgcatcaatagtttgcaattttcgattagttgttttatgagtacttaattttcaattttttttaccttatgtatgttttctctaaacaactatacttatctttctatgatcaatttgtggtactttttttctaaaaatgaatacacataacacactatc

SEQ ID NO: 292803 - DNA, 1393 bp, Cannabis indica
gaagattcctttttgcttcaaaaaatccatgtaaagaaccattaatcataagactacatatatcttagagttctaacacataccatgactagttctataaatttctttggaaatttgaaagcattcaatatttcgtcgataaagtctcactcaatcgtgtcatatactttctagaggtctaacttgatcatccactttgttcttgaagagtgtctctcataatgtcttactaaatcttgacataccataatgttatatgcaataagcttgccttttatgaattcgctttgattttgagcaatgatatcggcaagaatcattctcaatgtcgagcaaattagtttagttgcaaccttatatattacattacaacaagttgtaggtcaaaaatctaatacaaattttgggcatttatacctttaggaatcaaagtagagtagtggtgttgatctcttttagcagtttgcccaaatgtagcaaagatagcaccacttcacttactctgtaccaaccacttcccagttatgttgaaaaaggaaactatatattgaaaccatctaggccaggagatttatttcctgaaatttcaaacaattaatgtatttttaacctcatctaaattataatttgctagtaagagtcttgactggttctcatttatacactgccctcttgtcatagtttttttacaaatcgatctcatggaacagtgtcgagtttgcatcacctccttcacttaagaaactttagcttactattagagaaaagaaataaaactcttatggagattagaatattgagcccgaatcaaactttctttagcaatttatttcaaattcagtggattctcctttaagtgttcttgatagtctagcagatcttgaaatttcaaggtatcagcagcttgtatatctccaaatttaatctaatcttgttaagcctctcctcaaaaaaactcttaaaattcaataaagtattattattttataggaaaaaaaattaaaccaatcaattaatgctgttatgatcgatatactattactacgtagatatgtaattaaatgcctctttagggccacttagagttaggaagtaaccaggaaagtacgtacttaattaataccaaattaggtttcatttcgtcaaaggactatttcttcattgtcggcctgaccacttaaaaagttaattaattactttacaaataattatatataaatttgaacaaaataagtattttctaatatatctaggttagaaaagaaattaagaattattatgatcaacttattatttcggtaataaattttcaaaattaaagagttgggcgaaagaatccaacataaaattttacatttacacctatcgatctaacttaggagatttttagttt

SEQ ID NO: 292804 - DNA, 670 bp, Cannabis indica
tttttaatgttagtttgcgttttttttgaagatgataaaaaaattagaggaaattacattgtatatccatttttatactttatataggtcatattctcattatgtgcctttgagactctaattttgataagttatgtgaggttatatttgatatttgattaaaaatgatagtatttatcaattaaaattattttgaagttatatttagttaattaatgtgaatataaaagagtagtttaaccgacatgccgcagcttctccaataaacgggtcagagatgtactaatataaaattattattatgagtttaactatattattctcaaaatcaatagtagtaaaattaactatattattctcaaaatcaatatgagtttttttttttgtttaagaaactacatatctttattaattttggtaatattaaattgaatcccgtcaaattttaaaataccactcgtattttatttttaatttaattatttgattgttttttaaaatattgtataaaatatttataaaatttaaaaatgataatattttttacaattgacacacatccttaaaagatattttagtcatcgaaatttaaatttattgtatattgtgctatcttatctctcccaactatttaactataactctgcccctaagtgtacacaattaggac

SEQ ID NO: 292805 - DNA, 601 bp, Cannabis indica
gagaagggaccaaggtttcaaggcaacatctttgatcctacagttcccaccagctgattttttcttgaccggtgaaggtgggattccaagctttgcgttttttggatccaaacgacagtctaagcttcatggctgtgtctgagcttctatgggttgatgatgcacaagcacccataaataaatctctctcttaactcaacaaaatgggtctttaacataactacccaggtagagaaaaacaaatacttttgcagaagaagaaaaagaaaaagagagcgttttttggcttactctaaagaagtgagaataatgctttgagaaaagagagagaggccttgatagggaagttatggcactaacccaaataacctaatgtgctttgtcttgctatacaaactctgatattgttgagtttacagagttgggtgggtccctagaaatgtgcaaatcaatagagaaaaaaaaaaattaaattaataataggaaacttattaaatgattaaggtaattttttatatagttggacatttgagaaatatttttagtattttttttaattcagtactttctagtttctagttatttagaatcataattatat

SEQ ID NO: 292806 - DNA, 525 bp, Cannabis indica
gaatccccgcacatcgcaccctgcaatcctccacttgcgtgcgtactaggttgcgtggtggtcttccacaaaaagtgcaatttttatgatttttccacaaatttaaaatttttttgattttgaaaccccaaatgtcaatttaaaatcttatttttaatatttaaactttaatatcaaaattttaaatcaataatatttaatttttaatagattattatttttttgatattttgagctttaaatttaaaaattaattatttttttaaattatggttagattttaaatatttattaatttatttaatatttatatattatttaattataagatcaaatattttaatattttgctatattttaaattaaaagtaaaccattatccttttaatatgaaatattatattaaaattatcttatatgatatattaaataataatatatttaaaattatcctagatatttttatagatattctaaccataatatttttaaattcaaaaataggttattttgttaaatacttaa

SEQ ID NO: 292807 - DNA, 652 bp, Cannabis indica
atgtctactatttaattaattattttaagaaaatagttaattataattaattaaatctaaaaaaggaaagtctacctattagtaacctgctattacaggttaaagaaaaatgtaaccattgaatagtcacctacaataagttataatatgacgtatcaaaacaactcttcctaataatatacaatattgtattaggatgaaaaaaaatataagaagaaagaatagactgaacaaacaactccttttatcactctcaaaaatgaagaaatcaaactctaagccatgttgttgatatcttacaaattacagtacttgtccattttaattttttaatttttctataattgctatatatatatatatatatatatagtaggttattttttggttttttttttaattttacactttaaaataattttttttttgatttttgcagaaattcacgtacgtagtaacccacatggcaattaacgaaatagcttaattgcaactaaaatttacatatataataactcatatagaaactaccgaaacaatgtaaattgtaaatttgaaaaaaatattaaaaaataatatatatggtaattttttaatttgattttggaagaggttcccaacttccaacatcatgttatataactacgcacct

SEQ ID NO: 292808 - DNA, 702 bp, Cannabis indica
aaattcaccattaaagcttcaagcttgagttctaaaactcaaagcttgactaaagcttcaaacaactaacatttcaagcctaaatcaacatattctatcataatttaattgcagaaactcaaatcaaacatcaacagcaaataaaggactcaaactctcaaaacatgcatgatttcataacttaattttcaagaaaactataggaaggttgtctagaagcttacccttgcttgtaatcactaaaatcggctgtaaaatggcaagattgaagacacaaattccagaacccttgttgcttagggatttcgttagagagagagagagaatgaaacagagaattttccacttttttctaatttttcttatttttttttttttttagaaaatagaataaaaagagaattataaataaaaaaaattagataagagtcctcaagtgattttaaagtgtcatgtcacccaacttgattctttgctttatgtagatatatagatgctattctttagtgcctttagaaacccctccaatgtatttttatttgatttcatagaaaatgatagctaaggtactaattcaactacttattgagaatgaaaattatttacagttaagcaggaaaattgcccaaaggatgatagaaaacagaatgtacaacaaatatgtacagagattacatacatgaatatcttctgagaagaaac

SEQ ID NO: 292809 - DNA, 533 bp, Cannabis indica
attaattttttctaactcatgtatatataattttactttttttaaaaaaaaaaaattcacataatttttattttaatttttttgtcataatatttaaaatataatttatttttgcttgatatatatatttttaagaatacgaattagaagaaaaaaattaaaaaacttagtataattaaagatataaattttataaaaataaaaattattaaaatggggtgtctttagaaatttttagagggaaattttattttacaccccaatttttttttttttatcttcatcatctcattaaatgcattgatatggtactttggattagtggtaccatcatatggtgtcatctgtgtctccttgaagttcggtggaagtggttcgatttgaatctcccttaagagaggagattcttcatcagactcctcatcatcattgaagtctccctgcatagcgatagctatctttcgacataggtctcacattttcgcctctaactcttcatcctttcactcatcctctctcgagggttagtgagt

SEQ ID NO: 292810 - DNA, 396 bp, Cannabis indica
ttttcttttttatctatatattatatatgtatgtatatgtttttatatgtttattattgaatttatatatattttatgctcttattgtttatctatgatatgatagaaaaaatcgatataaattatgcttatatctagaagattatgtatcctcgataaaacattgcatatatcctaaagattatgcgtcctcaataaaatcttgcatatatcctgaagattatgcaaacataatattcattatataactgactgaaatataataaaagaaatgaatatatattcatatatatgttcttgtattcttttaggacagtaaaaaataatctaatatcgattagatttttgcaaacatttcctaaagtaaatattttatatttgtcaaaaaaatattat

SEQ ID NO: 292811 - DNA, 722 bp, Cannabis indica
cgctgaaatggccgaggcttttcgtgcgatgtcgcccacgccaactcaaggtggtggggggaatcttctcaaggagactgaggtcgcggaggtggaggaagtcgagaacgaggtggtcagcaaagtcgcggacgaatctgttcctgttgctcccaatgcttgatctttcctttaatatttgcttatgtgaaactctgtttctttttttttgtttatgcggtacaggggtactcgtactctgtattagacaaatttgcattttattttgaacaactttatatcctcgcggggatatctgtttttaacattttcgcagtacacgggtatcgcgctttaatatctataatatttcgactttaattacaacctggtgtaataagtagaaaatttcataagacttggaaaattttaaacttgaagaatttccaagaattttctttatataatcaatagtacattatggtatataccccctatacttaggattttttttttatataaaaaatgactaagtataagtacaaggcaaatacaaattagaaaatgcgagtactattgataatagaactttaggctttcgccattccaagctcgtgggatcgcattaccatcgagcgctacgagtcgatatgttgcgtcaccaatcttctccgcgatgagatatggtccttcccaattatccccgaagaccccatgcgctcggttcttggtatttggcatta

SEQ ID NO: 292812 - DNA, 653 bp, Cannabis indica
attaagatataataaggtagaatactttgcgaaaaaagtattaaatagaaagaataataattataaataaataataatacaataatatatatatatatattatatataaataaaatataaatgaaaatttcacataattttttaacaaatataaaagtacccaaatataatacattaaaatcattagtctaactataaagaactatgcatatatacatttataagaattatataatttagttaatataaaataaatttaaattaatctcatggataattttttagaaacaaaattttagcaaatactgtatatttggtagctgatacattataaatagtaaaccatactacttttcttaatttaaaaataattaaattatttgatgttacattttcttagttttctattttttttttcaaaagtttgtaccaatccacaaatttcaaaataagatcacaacataacgatgacttttttcattaaacctgaaccgtatttagaacataatcctgagccgtatttggaatggttattgtgtgtggcatataagtattcatcttagtagtcattataatctagaatagtctctacaataggatgacctagaagtaagaatacttagggggcgtttggtatgaggtgttcaaaataa

SEQ ID NO: 292813 - DNA, 551 bp, Cannabis indica
aaagaaacaccaagtaacacaaaataatctcaagaagacaaatttctgatgtggaagatcagttataaaccgcaaccacagagcatacttataacacaaagagattatgattttttttgtaaattttaatttttcaattttttttttttttttttggtttgacttgttcccaggcctatttgattccacttactcacgacttaataacaactcccgggttaattattaagtgtggatgggaactttgccaaatttcctttaagcaaaaattgcttatgttgaaagaacaagctttgtttttaatttttttttttcaagtattttcttaagcaaagtaaataaaattacaactaaataaatacaataaaaaaatgacaataacgataatagatagttatatcaaagttaggaggcacaagatgccatcaactaactataataatagtagtagtagtagtagtagtaataacaaaaagattttaggaggcacaagatgccatcaactaaaatgataaacaaaaataaaaagctaggaggcattaatgccatca

SEQ ID NO: 292814 - DNA, 590 bp, Cannabis indica
cttgccaatggtactatttatttttgacatttgtgacatatgtataataaaaaatacattataaaatcgtaattaataatataagaaagaaaaaaaaaatattaaaaagagctgtctaaatgaatatatgaaatgtcattaaatttaacattaacatattcaagaatatttgttggaattcttattattgttgtttaaaaagcttgaatttttttttatattattatttttagggttttttttattttatttttttagctctgtttaattagttataagttatatataacatctcaaatgtctcagattatttttacattttaaagatttacggtacatactttttcagcaatagttataattataataataataatcattatttatttctttgaagatttacttgttcaaagaaataatatgttataatgatagatagtactgataactaataattactttacactgtccatattgctttaattatttagttattattttcataaagaacacatcggctatttacatatttactaattatataggtgccgtttggtaactactttttgttttttaattttttaatcata

SEQ ID NO: 292815 - DNA, 717 bp, Cannabis indica
agccaccgcttccgaattgcacaaagacaaggagaactggtgcaattatgcattgtagcaaatgcaagaaaccaggacacaagaatgatgcaacacctgctcctactcctgctccaactcagataacacatttttagctgcaatttggtatacatatgtcctttggatactaaagtcaataaaataacaatcattatttttgtttagggccaaaagaataagggggcatgccaccaatcaaaaatccaaacaagaaaacgttgaagagaaggaaaagaagggaaaaggaaaaagctaggaaggctgcagaaggtggtggagctgggtcaactgaggctgaagggtctaatacataggattgagaagtgtttttttgtagcatcttgtgcacaaaatgttgtattttgaattagtgcacatgatgcttacttttgacacaaacactttagtgtttagggattttaattttagttttttgaactgctattgctgcacattatatgctgtgtctgaattagtgcacataatacttacatttgacacaaattctttagtgtttaggccttctaatttatgttttttgttgctggtattagtacacattttttcgtacaagactaaaagcaatgttgtttttactaattataagtagattatatttcattgatcaacaaagttacacttgttacaattaattgctcatgcttaagtacaaac

SEQ ID NO: 292816 - DNA, 645 bp, Cannabis indica
ttccaaaactcaaacttggttagaatcaactaacatgcaatcaaaccatgattcaaactcataatcaagcatatacaaactgcagaaactaaaacctaattcatgcaacaactacagcaacaattcacacaatttcactttgaaactcaagcttttaacaagaaaaaccataactcaagcatcctaactatcatgcattactaacagctcaaatatccttaatttaacatgcttaaatctctgagaataacaacaaaatcacagcagcaacaatatcaaattatcaagcatgcaatacaccaatttcatcaaaattcaacaaattttaagaagaagagatgaggagctaacctagcttggattgaacacaaaggagagttgaaatcacaaggaaaaatccaaggttccttgctgcaccaagaggccgaaaagagaagaggaaaagagagagtgtttttccaaattttttctaactttgaaatattgaaattttgtaaaataaaataaggggttttacttaatcatttcagccaacatataataccaagtaaacatatatttccactattaaaatcactagaagacaaaataataatggggcaaaaagaccattttgcccctccacactaaaaccacataaataac

SEQ ID NO: 292817 - DNA, 676 bp, Cannabis indica
tagttgatcctagatcaaatgatcttaatcttgttatgattaggttcaagctcagaggctattcgtgttctttgatttgttagttaagcctacttttaggtcagggtaatacttacatcttcgggacaaggagtgcaattgagtaggagcgctaatcatagatacataatctatagcttctttaaatatatagaagtgaaatgataatttccttcgatcatggctaaatgagattaaatggtggagtactcattttagtattatgttagtttactaaaatattatttacaagtttcttagtgttttaaggataaaatacattgaagggtagaacagtaaatttacccatactcgatgtagatcatcaatggaggatcattgattatttagattaagtaatggataatttatagcgtatttatattttgaacatatagagtattctatataattaggagcttgattatataggctcacggttcctacactagttcatgagataatattagcttgtagactcagttaactgattttaattaatcaattagaattctcaattaatatattagactatgccttatttatgaatttttactaagcaattacttaattgagaagaaaagagattttagggtttgtttattaattaagcgactttgaaaggtttaattaataa

SEQ ID NO: 292818 - DNA, 521 bp, Cannabis indica
gttagtgttcttaaactaaccgaagataataatgtcttcttggaatttcattccaaatgttgttttgttaaggacaaacttacggggacagtcttgctcaaagggagagttaagaatggtctatacgtgcttcctcaaagtcactttactcctccaaatgtagagcttcaatgtaatctagccacatctcaacctagtgcctctcaggaatcttttactgcctttacttgtaataaaccagctggtattccagctgcaacttcttgtaatgattccacaattaataaaacagattgttctccctgttctacttcatgtcattgtgccatatttaatgttcaagctaaacctgacattaacctttggcactcaaaattgtgccatccagcccctagaactcttaccaaacgttttatccaacataggcattaaaagcaatcttaaggaccttcgattctgtgaagcatgtaaaattgggaaaagccataaattaccttatgccttgtcggattctcgtgcct

SEQ ID NO: 292819 - DNA, 898 bp, Cannabis indica
ttatcatatttcctgagaatgcgggttttattattttcattattatcgaccttattttgcagtaaatgtcaagaaccatagccaaacagttttttttctcatagagacactaaaacttactcccaaactaactttacacaaacttattagttcttatttggctatgtaaattagtttgtcaatgatttactcaccatgtgcaccttcaaatacgcatgcaacctgttgaaatgatggtcttcattgtgccatcttcaaatacttgtcatagtcaaacatttcatttccagagcttataatcatctttgactattagcatcaattttttcttttgtctgaccattagcttcaaatttgtttactaggaaagtttttgagtaaataccactttaatatttttgtaaaagttgttacattttgttaatgataaataggactatctattttttaaaatagaataaaatagtagctttaacataattttctttaatattttttttaacaaatacaaaacttataattaaactggttacagagagcagtcatctctaggtgaagcttattaataagttttaccaaaccaattttgctggctttgtgtgctcatcatgaaacaatttccacgtcctattgtaatgttccagaactattttaatattggaaatattcacttggacatatcagatttcattatgtgcacctttgattctcttaacactctggattttgacccagaatacttaggcaagaaacgcattattaggactactttgagctagttggcgccaatccaaatgttattcatttgtaaattttaacatatattgatttatattgacggaagttatacaagataaatcacataaaatattattttttttataaaatttttatattt

SEQ ID NO: 292820 - DNA, 590 bp, Cannabis indica
taattacatagtaaaaataaagcatgtaattaatttactaaattaaaattttccataattatttcttaactaaataacatatatagaaaatatgtagttaaataaaaatagaaaatttaaacaaatgtaatttaattgactaattagcaaaaatagaaaatacaataaaattccaaaataaatcaaaataataaattttggaattttcttaaattttcttaattttctttttttttttttggaaaaaaccactgccataaacgacatgtcgtttttgcaaaaggaaaaacgacatgtttttcaacaatgaaggctgtccataacgacgaaaaatggcacgtcattttcaataaatgatggctgccttaaaatgtaaaaacgacacgtcctttggagcttcttcaatggctgccaaaaacgaaaaatgacacgtcgttcgaggtcgtcttcttcagcaaactgggtcgatttgacctgtttttctgaatgcgtgtccgttctgttgggttttatgccctaaatataactccatttcaatgtaatctttatgtaaagcctgcttagttaatttggaaattagcagttgttta

SEQ ID NO: 292821 - DNA, 717 bp, Cannabis indica
aggtaagattagtataatgtatgcatatgtttatacatgtttagcgtacatattagtttccgtactagaataacatatacagggtatcagtgaggtgtacatagcgttgcaccgagataccaacagatatatgttaggcaaatctatagccatcagattagcatatgagggcaacagtgaggtgtacatagagttgcaccgagatgccatcagatatatgttaggctatcagatagtatgagttatctgctaccacatcagtacgactagagtactgagtataggctggattcgcagttagtcatactttgtcgtaaacgttcctgactcagttagggttatggttaggtgtatgggcgcttgattataacccggaatattagtatgtttttatgttatgcttttcttactgagtctgtcgactcacagtgctattgctatgtgtaggtaagggcaaagctaaagttgaggagccgtgagagcgagcaggtgaagattgtacatgttggggcggttaggcctggagcatacgatcctcaagacatcaggtattttgctgtttagtcgctagacgacaaatattttgtatatgaatagtaaacttttgtaaccctattttgtaaacgggatcccagcattttataaatgtaatatattatgtattaaataaataagcaaaattttaattattcacgatttccaataatcttgttgatt

SEQ ID NO: 292822 - DNA, 634 bp, Cannabis indica
aaatctttattatttatatactacaatattacataattattttaaaatattattttttataataaactttttaagtaattaatatattcttattctaatttttttaaaaaaaaaaaaacattacaaaattaattatttaacaagcttataattttttaactattcaaaattctaaatattaaacaaaaatacacatttattattataaaatacatttattactatataaacttaaaatctaaaattttacaaatttacacatttaaaacttttaagcaatatatataatatatattatatttattattatataaaaatttacatatttaaaatttttaaacaatacattatatatattactatatatacacactaaaatctaaacttttataaatttacatattcataatttttaacaatatattatatatacatataatataatatatacactgtttaaaaattatatatgtatatacatatatacatatcatatatataatataatatattgtttaaaaattatgcattcatataacacatatatcagacatacacaaaattatatatttactcatacacaaaaaaattactaaacagttgcataaaaattactaaacacaaaattatatat

SEQ ID NO: 292823 - DNA, 680 bp, Cannabis indica
tttagataaaaaaatacattatatttttcttcatgtcatataataatttttctctaatattttaaaatataatattacattactacctaaaacacgtagaaaggttattccaaaactttaaaaatgcaaacaaaacaaaagaatagaataaaaattgtttcatttccattctattccattctataattacttccaaccaaatgccaccttaatctttctttcactcatcaaaatattatcgataatttggagacagactttttttaagacaacttcaaagctaaattaactttgaattattcatgattaattcattaacatataaattattcaatttagagaaaagtcatttttaatggtaggctcttgagattcatcaaaggtcatgaaaaaactatcaatatcaatatatatatataaaggaaagcacaaagggagtttaggtggcaacctattattttttcttcttattttttctattttatcacacattctcttattttatttgagaaatacattatacatataaactaaaagtcccacatcatttaaaaattgtttagaagttatctatgtaggttataagtagtagttttatcactttacttcttttatctaaaaatattattttttatgagtaattgaataatttcttactcaatattttttttatatacata

SEQ ID NO: 292824 - DNA, 729 bp, Cannabis indica
tattgacacaataaattatatttagtttaagagcaatttgagcataaacacttatgtttaaactctcagataaatatttaagtaattttttatgtaataatagctaaattatatttctgaaacttccgtagtacttggttgttcagtgtccaaatcaatggtcatgtaaaaattttattttatttaaaaattaatttacatataccaataatatgtgaataatgacttgacacttaacgatcagataactacggaagttctagaaatataacttagaccatcttcaataggagatgtaaaaattgtgctatatttagcacaaaaaataattttgtggtaaatttacaccaaattttagctttgtgctccagtgcacaattacaaaattttgatataaaatttaatatctaattaatattttatcaaaaaaaaataaaatctaataactttataatcaattttattattattttaatatgtaagacaataaaaaaaaaatataaatgtttcataatttaatgtaatagttaaatgtacctataaaataatagaaataacataaatgtaaaataaaaaagtaatgcatttattgtgatgtaaattttacatcatagcaaatattatgtcaaatttggcataaaaatttgctatatgccaaatttacatcactttttagcacatcattggagcacactttttgttaaatgggctatattttaacttttcacc

SEQ ID NO: 292825 - DNA, 553 bp, Cannabis indica
gtattaacttatttagtttaccaaagtaatttcttttagttggtagtaatataagtgcattgagatatattgtctatggtagaaaattcgcaacctaaattactttcttttttttgttaatcctatttttatttttattctttttctttttttttttcttttttttttttttttaattataccctcttttatttgttatatcccaattatacctttatgtaatgaaaaaaaccttcctcactttcttaaacagtacccttatatgagggtataatcgataatggacttataaaaagggtacatttcaattgaatttaaaataagactatttttggttaactataaaaaaaaaacaggtatatttcaacttaccccttgtctatgaccatagggtaaggcatagtaggccactcacaaggcctcaaaagtcaaaggccctgaatcttttataattatgatttaagttactcattataaattataacgataaatacaattttaaagcccgtgttttctaaaaattatcagttgaaccttctgttttgttaaatga

SEQ ID NO: 292826 - DNA, 500 bp, Cannabis indica
aacagtaacaaaataactttgtggacagcataccgacaaactgtcgacatcctgtcgacatacaaatatatttgcagaaaacaacaatcgtcgacatgtcatcgacatacactaacatatatcaactacataacaatagtcgacaagatatcgacataaggtagatatcctatcgatattatagacctccacttttattccaaataaggtcgacatcctatcgacataccaatgatatcctatcgacatacactaacaacacagactcaaacactttcaatcttgtcgacattatatcgataacctatcgacaagtcatcgacaacttgtttgaacaataaaacactactgattaacatgcagaaaaacaagcacaagttcgtatacacatcctaaaacaatctaatcagaataacatacacaaattcccatccaattctatgaaaattctattttttaataagaaaaaaacttacctttgactgttcgtggttttgggg

SEQ ID NO: 292827 - DNA, 509 bp, Cannabis indica
gtttctttatcactcataaaatatgtaataacaatattcaattttatagataaacatataacatataattataagtatatataaccatagatctaaagaattacctttgttaattacaaaaagaagaagccaaatagtagaagcgtaccttaatacatagatagtgatgatcttaatccatattatagagataatctttgtcatgattttaggtaatgatcttctaagaaaacaagacttagggttttctaattttctttcttgatgggggaagatgagaatagaaattgactcttgtttcttggggaccactgccaatttataacctcatagctaggttatttaattttaagtatttctaatttagcccctcaatgaattagaaatatcgcttaggtatctacacatttagccgatgacactttaatacccaatgacccacaattactaaaatgatcactttattttaggccaaactttaaatagcaatacactaatatacatatgag

SEQ ID NO: 292828 - DNA, 515 bp, Cannabis indica
ctcttggtcacttgtcttttgcaaatatattgcttatctgttcggtgttttgggtttgaccaaaccttttgtacgcactttaggtaaattataatcatgctgattttttcgactcaattgaattttgaaatactatctttattcatttattgatcgaaagtgtatttgttaccgtagtaacttacatcagagctatttgatctaatctgatcttttagcttaacatgaaataaaacaaattgcagacataagaaactgtactttaaagtggtcagcccgacctgagtactttgtttctgaaacctttgcgcgtagtccgcccagaaggccattcacttagaagcgaatgttcatttagtacttaaaatggtcaaccgacctggtactttattgctgaaacctctgcgcgtagtccgcccagaaggccattcacttagaagcgaatgttcatctagtactttaaaatggtcaacccgacctgagtactttgtttctgaaacctttgcgcatagtcc

SEQ ID NO: 292829 - DNA, 580 bp, Cannabis indica
tttattaattaagagactttggttagtataattaataaatataatatatgataatattatttaataattaattatagttattaaatagttagaattgacatttatatggttgaatgtgaaaattggcagtttctgagaaaatgggaaacaaaaatgataaaataggaaagttgcaaatgtgaggcctatttccatattgccatggccggccacatgtattgccttttatcatttaattttttcattattttaatgccaagtaattcaaccctaaccctgtgtggtattctataaatagaaagtaatggcttcaggaaatacacacaacacaattgcatctcattcctttcacagaaattttcctgagccgccacctctctctctctttcttcttctttgtttcgaaatctctaagtgatagagtagtgcccacacacagcaagtagtacctcaatcatattgaggaagactgtgaagaatctagtttcaacaaataaggacattcgggatcagatcttgataatactctgcaacagaaaggatacaatggttagagatctgagtggaaggagacagtatt

SEQ ID NO: 292830 - DNA, 528 bp, Cannabis indica
caaaagtacaacataaaaataatatgaaaatatcaaaagactatatattctataaataaaattttaaaaaccgtaaaaaaatatttaaaattttgtacaactataattttgtaattttttttttttttgtgtatttatgaaataatcacttttttatttctccttttattttgcaaatctaaaaatcatattagtggagatttgcataaacaataaccggaggtagacaattcattcaacttaagttttataacaatcaatttattccgcattagaattgttcattaggtgatgagattataattaattttcctatttcctatgaaattaatatatataaaaaaagtagcttttatgcatatcaaatattaaatttaaattgtttttttttcttaagtataaagttttggttttgaatcattaacagtagggatgttcattggatcacatctaatggatttggacttatccgatccaatccaattatttattggatattggatttttccatccgatccaatccaattg

SEQ ID NO: 292831 - DNA, 1044 bp, Cannabis indica
atgataatagtaattataaatgactccttatttaaccgcttctctaatgttttcttgatctttgaactactttattagtctctctccctttttcaactaatctttctcaattctaataagattcattactttaaatattttcaacataacgtctacttttcaaagtgttcaaaatgtttaatattttcaacattgttgttgtttcttgattaggttataactttaatacaatgcttaaatgtggaagagaatcgtaacaagtcttttgtaatagatggttctgatactttattgcgatttttcaaaaaagcaatggagttggttggacaatttttgtataacgagacgaataagaaggaaaggaagaagacaatttttatttgaatgatgaaatcgaagatgaattagttcagcatatcatcaatgaagttcttcgtttcgaggtaagcttttttagtcctgaattcatccctatagagatcaaaaactttattaaactgtttcattcaaaggtagaggatccggaaagtaaggtttccaaagaaaaattgaaaagaatccataataagataaatgagcaatggagtaattgtattgatcaatatttggaccaagaaagtaatgatggtgatagctctgattatgtttttgatgagtggattttcttttctcaagtgttgagtgatgggattcaagaaatatggagtgaacatgatcaaaaattatggtaactttgttcttctttagttaattaataaatttcaatatcattgtaatgtttctgtgaagatttatcaataatagaaagaaagattaaagaatttattattattattcaattatttaattattttacgtttcaaataaaattgaaatgaagataagtataatttttattaaacagcgtttgctcaattatttaaacttaagatattaaaaaaaatctattaacacacaataaaggttgttgaattttatatttaaattaaatcaaaattactaatttagaaattcaaatagttcaaaattttaatcaaataaaaa

SEQ ID NO: 292832 - DNA, 176 bp, Cannabis indica
aataaaatgataatttaatatcatttttctgattttacaatttaattaaaataaaaaaaataacaaaatttaaaagttagcataatatcctatttctattcaaaatatcatgattaaaataatcttatataatcaaattttaaaataagatagatttttaagtcaagaagatagat

SEQ ID NO: 292833 - DNA, 867 bp, Cannabis indica
caacaagttaaccatgacaatttagatcaaataataataggttttataaaacttattttaataattaaacaatataaaacacacacatttaacaaattggatagttggatatatgatttattaaatttaaattaattaaataattaaataattttgaaaatttaaaaaaaaaatatatattactattttcgaaaaaaaataaataaaaataagttaaatcatttatttcaacattaaacctataaatttaaaaaattagatttttaacaaacctaaatatctatttcaaaaaatgctaacaacttttcaaattataagttatttttaacaaaaaaaaaaaaaaatccaataaaataaaatgataaattaatatcatttatctgattttattatttaatttcaataaaataacaaaatttgaaagttaacaaaatatcttgttactatttaaatttctagattaaaataatcttatttaaattttaaataaggtcatttttaaaaaaaaataataataattaaataattaaaatataaaatatctgaccttaaatttaaaaataagataaaataatcaaaatttaaaaataagataattaactaagcaaaaagatagatttttacctattttcaagatttaaatatcactaatatcttaaattaatttaaaaaatattaattaatttaaatatgataattagatttgaaatatgaaaaataaatttctgaatacaaaactacacaaaaaattcaaaaattaattccatgaaaaagcaatgaaaaaataaaaagattaggaaaaaaaattagacatttggtatggtatgcagtgcataccatccgcgcgcgcacaggagaatgcacagt

SEQ ID NO: 292834 - DNA, 394 bp, Cannabis indica
agatcctggtaaaataatatccaacaactgtctataccctagtatggaacgttcttacacatttgttgagccttgtaaataggtgtatggccgcctaaatacaagtcggaaattttatgatatgtcatatgcttttcttactgagtctgtcgactcacagttttgcttccatgtgtaggtacaggaaaggcgaaagctgaacaggagtgaacctgagctgggatgaggttgtacatgtcaaaggggcgcgacctggagtattcgatctaggaacatctggggttgtattttgtagtcgccgtgcgacctgaataatatgtattttggaatattatgttttaagagtttgaaaatgggatcccggcacttataaataatttggtataatataaag

SEQ ID NO: 292835 - DNA, 1065 bp, Cannabis indica
aaattaaggacattaatcctaaccattaactcaaaactctaaaatacttacacctaaaaaagataattcatagtactatgaatggataatgactttatatatagtcacattatatctatgcatgatatatagtgtgaaagctggttcaataaatagtgtcaccttcattattttttaaattattgacaacaaaatttcacgttctatattttaaggtctcaatatatatatgtttattatatatatatatatatatatttttttttttaaaaaaaaggttttctaccatgattgacttgagagttgagacattatattataagattataaatattattttatattggttcccacataagaccttagtcactaatcgaattctacgactgtttaggttttaaggtttatagccacatgtttacattattattttaattaaattatcatgttcacacttgtattatttgcactaaactaacaaagataaataaataacaaaaaacttttctctctttcacacacataacaatttaatatatatatatttttaaaaattataaataaataacaaagatgaaaactaagcaaaaaataatttgtgcatggaataaacgtaaaaaaataagaaagtataagtatatttttaagtgaagacggcatcatttttaattataaatctatgatagtatttttatgtttattaaatatttgaaaaattaatagaatcaacactaaaaaaaattgtttttagtaataatattttaatgacaacataaaattttttttacgattaaagtatcattttaatttacaacaaaaaagttacttgttactggatattaatatttaaatataaattattaataatttaatttatatcacaacaaattgtgattaatattatagccatggattttagtaataatacagacttaacaatattttttctaataaaatcttttattcattataaaaaatcttaacttttagtcacaataaattttgtgattaattattaatcattattcctatattgtgattaaaaggtctgtgactaaaagtatt

SEQ ID NO: 292836 - DNA, 658 bp, Cannabis indica
atggatttttcttgaaatgaataaaatcttagagtttcccacagacggcgcaaaatgttgtcgagtgaatttcgcaacaccaaattatatgatattattagtgacaagaagcaatttacgtggaaagacaagtgcgagtattcaacctagaatggcgagtactcaactggaaatgagaaataattaacaaaagctggaaaataacaagaagacagagaagtatagtggttcaatcagattatggtctgcttagtccactgtagtaagagattcgtaggtgccatttcacggtggatcacccctttatatacaaagcaggtgtccaatcggttatacaaggattgcattcattgttaatccgttatttacacattgaattacaataattaaacccaagcaacgttaacattaataaatgaatgacagttactaagtccatcaacgtatgcgtcttccgcatctgcgagttaactgttcatgtttcgatgttaaactcgcagggttattattacgtttgggatgtctgcgtccttaggtagtcgcttcttgtagacatcgcatgtcgagctgatagaacctagacatgccagtctatattgcattataaaggctgcaaggttcttaagaccatcccgtatttacagagaatcgttctcct

SEQ ID NO: 292837 - DNA, 1018 bp, Cannabis indica
gtctaaatgggaaacatgacaggaatgtgaattactttttgtccccaaatgttaaacgaggcaaggacgaggattacactccctgtcccgacgagaacccgttaagtattttatttaaaatattttataatttataatttatatttctatttttttagtatattagtatcttttttatgaattttaaattatgttttagataataattaatttaataaataataattaatgtgtaatattttaattttcatgtagtttaatagttttgtatattataaattttatttttttaagagatttcctatctcgttcctgctcttatattagatgatttttcactccattcccaatgaagaataagcgggaatggaaattaaaattcttaacggcgggataggaatgggggaatacttcccgctaatttcttgccccgtgtgcatctctaattataatagtagataatagagagatgattagattagattagactagattagattagggtgtcattatcttttagtctcatcaaagtatagtatatatagtagttagtagtaatgcaattcaatgcatatcatgtatgtattgtatatatatatgactaaatggacaatccattatatccattttctacctatcaaaaattaattgcctttttgcctctctttggatactaaaaaggaaaaaataatcattataatacccaaagacttatctcattctctatcctatattattatataaataataataatgtactatagattgatttatactaaccctagccttgaaaattgagtgtattagtacattttttttaaaaatatatatatttttttgactatcctaaattattattttataaagtccaaaattttgttatatataacaatgttgtatataatatatatatacctatttaaaatatgatttataagattattaaattatagtaattaatgccaacatttataggaatatgaaataatttatttattaggggttgctaggaattgta

SEQ ID NO: 292838 - DNA, 498 bp, Cannabis indica
ttcttcactccaaatgttgtagctgaatttctgattaggcttcggagtcctcttagatctgtcccttgtcaactgatagtttgtaaggtcttcttcggtgtcttcatccctgatctcttgttgagcatcagttcctcccccttgaccattgttaatgggctgctggatttggttaggttccacctgaaccattcccggtgtgtcttcattttgttccacctgattagaaccggttttaacttctaggtttgtacctgcagggttagtatcttccattcctgcactagacttttcattaggtaaacaaggaaaaatattttcttggaatataacatctctactattcatagttttaaatccccttttcctttacccaaagtctataccctttacccttcgggtacctaagaaacacactttaaagccctaggttcaagttttcctatgctttgatgtgcataagctgcacatccaaaaactttcaaatgagaaaggttt

SEQ ID NO: 292839 - DNA, 376 bp, Cannabis indica
taattaacagtcttatttatttttaaacaattatttatttattttgaaatggtttaaatttatttatttatttatatattttgtttggttggaaaaaaagataaaaaagtaaaaaggaagaagataattggagtggaatggtgtgggaggattgggccacctcattcatcactacaccagaacagttagatatttttattacattttgatattataatttcattattattattattattgttaaggccaaaaccgttagaattaataaattaaatataaaagcaatttaaggataagttaaattatttggaaaaacgtaaacttttttttaaaaaaaaaaaaattaagacaaaatttttaagatggagcaaccaac

SEQ ID NO: 292840 - DNA, 814 bp, Cannabis indica
gctgctgctcggcccgaacgagctaataaggaggatgagctcattcaacttgagcgtgaagctaagttgaagggaggttcccgggcgaagcagtatgctcaggagtccatgaatcctgaagatgaagtcgaggctgaggctgagcgggtgactcctttgaagaggaagaagaaactcccggccgcgtccaggcccgttgaacatgccattcgcataagggagcccatttcacctgttcggccatctcatccctatgctggaaaagggaaggccgttatgtatgagatatcaggtgatgatggacttctgactttctgggcaggcagtcactctgcgcttcacttctttttcttcttgattttcatgttttgtattttctgctggtttgtgctaaccatgatgtttttgttctgtgcagacatgtctcggcagatgatcgacgctttaaggaagaggatgagcggaagctctagcgcctcccctccagccaagaaatctaagggcggagaggggtcttcagagaagagaccttctggagaggttattgacctttccgaggagctgactgctgcgaatccttccactcccaaatctgccaagtctaaggagtctgggccaccaacaactaggtccgaactggtcaggagggtccctgagcgggtgcaggcaccaactccacccgtgcccgtgctgcctgaggccaagaagggcaaggaggtgctggctcgctacatgaatcggctggttcttgaggtcggtgagcaactggctggtgctgacgactcatctctggatgtgttggtgggcggagtct

SEQ ID NO: 292841 - DNA, 531 bp, Cannabis indica
taagcccaaaagcaaacatataggctcatacaggtcaaattgatttggatgggccctatcatgtttctaggtttacacagatgaaagaaatacaaaatgtatctgttaagatatattttataagatctattgataatttgactatgattaaaatcagatcattagatttgtcaacaagttaatcatagcaatttagataaaataaataataggtttgttaaaaaatatttttgaataaacaatttaaataaaacaaacaatatctatgtaacaaattgtgaagtaagatattaatgtaattaaattattattttaactaaccaactcttttgaaaatttaacggttagtgaaaaacacctaaaaatatcttttaaaatttaaatttttaaactaattttaaaatatataggttttagttgaattattttttgtctaaattaattaaatatctaataagataaattatttgaaaataaccaaacaaatatttctaatattattttctaatcttatatttaataaattaaaat

SEQ ID NO: 292842 - DNA, 705 bp, Cannabis indica
gcgtgtgttagtgaagacaaagtatgctgaaaatactcgtgttagtttgtagagcccgtcgtcaatttaggaagtaggcaaagtgacgtactcgtgtataagagtcattagtctatgggggaaggcccaatagaggcttgaagtgggacgttacattcttcatgttcctattggagactctagttacactacaaaaaaatcttacttttaatcaataaaatttgtgaataaagataaaaaaaagttgtaactaattataaattatcattattgtgttgtgactaaaagctccgtggctaaaaatattagtcacaaaaattacaaattattgtgactaaatgtatttttagtcacaatatttgttgtgactaaaactaaaacagcgacaagtacttgtagctaaatactatgacgttctagtcacaaataatttttgttgtgactaaaagagacatttagtcacaaaaaattatgttgtaactaaaaattgttactaaaagtagcaattttttatagtgatagaaggattgccttatttggaggttgcattcctctggtgccttcactgtgaagtctgcttatcactttgttaaatcttcttccctccctccctccttcttcctttaactcctcttttattaagaaatggtggactacattttggagccttcaacttccccataaaattaaacactttctttggag

SEQ ID NO: 292843 - DNA, 906 bp, Cannabis indica
gaagacgtaattggaaccaatatgcatgctcggtgacaacattgaattggttcactgtgctaaacaaaaattatgtatttaaataaggtaaatgttgctcccattgttatcacatgtagcaacaaatatcctaatattatgtccaaataaacatgtgtggccaaatgaataagaaattaaattaggatgtttactaataatgaaaactcaatatttatttaaatacgattttaatatttcattaaaatattattcgttggagtaaatattgcaataatttttgtaagattacattaacgtatcaatcgttggaatcaagattacaataattttttgaatactatataaatatagatatttaataacaaaactgtttaatgttatgaatacaatagtagtttaagacaagaagtgactctagtaataaaatcaggagaatagtgaatctggtacgcttcatgatgaactgagtacacactcagcccaaacaacctaaattcatagtgcgacttctcccatactgcatcggtgtcactctgtacaaccctaggtcaaacttgattcggtgagttcgttagaagaggagtgactccggtacccaacagcaaacttcactacatactgtgtcaccgcgcatgtaaacaccgcgagtgacaacgtcagtactacgaatggttgactgtcgcgtcgtacaaccctagctcgaactagattcattgagttttttaggaggatagtgactccggtacaccaaagctaacttgactacatactgtgtgtcaccttaaccaaaaaacaccgaatccagttcgacctggggtaccggaatcactactctcccaacgaactaaccgaatccagttcgactcgggttgtactgagtgacactcaaccattcctactact

SEQ ID NO: 292844 - DNA, 797 bp, Cannabis indica
catttcttgttcggcttgggcaccatacgggatttgcgacccaagctgggtagaaagcttcaattataaaattattgtcgcagcttttctacttcttccttcagggctaatgctccttctttgtccagtagccttcgcttttattggaatggtcagaagttgagatcaatattcagaacgtgcaaaatgatagaaggatcaattccaaccatttccacatgtgaccaggcaaaaacgtctaggtttgctctcagaaattttatcaattctgattttacttcaagcaacaaaccctttctgatctttagctttctggtcaggatatctggatcgatctcgatctcttctaactcctccacaggtccaacattgttgcttgggtcctcaagtcgaggatccacatcttcatccctgccttgggaagttccctactaggaaatgttttttcccttgtttgtgctctagctggaggatacttccttcttagccttggccactggaaggttataacattcccgagcagactgctggtttccccttagacatcctaccccattctttgttggaaacttcaagcatgagtggaatatttatgtgacagcctttaagtcatacaaggccgggcggcctagcattacattaaaagttgaaggaacatctaatatcaggaactttgccatgatagtcatgctcgtcggagcttgtccaatagtgaggggtagacgaatttgtcctagaggtgtgactccttgaccggagaaaccatagagaggcaggagacatggggttagatcctt

SEQ ID NO: 292845 - DNA, 595 bp, Cannabis indica
tggtaaaatatttccaacaatcccttcgcgaactgtctctgtacagaggaggaggcctccagtagtgcgtaatttgccttgtggcgaaatacactcgctcttgtgtgtccttcaactttgtgtactgggtatattggggagtatacccgcttttttggcacttgtcctccgtccggttgctgccttttgaggacctcttgctccgggagctctgaggaggtccggttaggctcgcagcaggagcggagtgagacggaacttgtccactcatccctgaggggttcccgttatgcgaagttgcgggagccaaggctgggctctaattgtatcctagggtagcggagaactgtatgccgctcatttgtggagtaacttgagctagggttcccgagagttgaactccgagtacatatcctgccattccggttggatagtatgccccgtaagccactatttgggtttcttccaagttgatgtacttttgaaccctcttctagaaatcttggaggttagcagctccttcctgttgcaattcgttccaaaatggggttcatgtacgtattccggcttgaagaagtgtaagctgttgtccgtc

SEQ ID NO: 292846 - DNA, 912 bp, Cannabis indica
atatttgttattttatattcaaaagttactaaattgtatgctacataagtttactttatgaagcaatattgatcaatttctataatatttttcagcaacaccaataattatttgtgcttaaaaattggagcattatgatctactcttaaaagtggtcattttaatatgtgggaagtatatatttttcagaccaatattaagtaggtaacgttttagttactatattgtattatctcttttatagaataattttgatagattttgaaaataacttataaggaaaacttaagaaaaataaaatttaagttacactgatatttgttggagctcaagagtgatactattatgatctattttttttgagatgattcttttgatatatgagaataatagatttttttttttcagataaaatttttagaattaaaagtaaccttatatttgaagaaatatttttattaatagaaaaaaaaaaatctatcaaagcttggctgtgaaacgctgtttaatcatgcttgcgtttttctcctctcgtaacatctgtatgtatggatttgtgcatctacatgtgtgtttatatgtgtattaactctcttttgttatatttggtttaggctgatcctgaattggaagctatcagacagagaagaatgcaggagcttatggctcagcatggcatggtaagcctaatggctcttcgttattatgagtacctttttttcttttaatgtatagaattttttttttctactgaaaaatgagacttttttagtttatctgaaattgcattgctgatcattgttaaactgtattcatgagtaggcaaatcaatcaaatcctgaacagcagaatgcacaggaagatgctaagaggttctaactaaatctagttatctttaatgctgttttgctt

SEQ ID NO: 292847 - DNA, 638 bp, Cannabis indica
ttagttccattgcccacttgaggagccttccggacgcttcaggcttttggagaacttgccggagcgggtgattggtcagaatcttgatcggatgggcttggaagtatggccttaacttccttgacgccatcaggaggcaaaataccagtttttcaatgaccgggtatctcgtttcggcccctatcatgcgcttactgacatagtacacgggatgctgagttttttcttcttcccggaccagggcagcgctgaccgcgtgttcggagacggccaaataaagaaacaagtcttctccgaggacgggttttgataggataggaggcttggccatgtggtcttttagctttctgaatgcctcctcgcactcgtccgaccattcgaacttttggcatttctttagcacgttgaagaagggtatgcacttgtccgtggaccgtgagataaaacggctcaatgcagctacctttccggtcaagctctgcacatctttatgcttcttgggggatggcatattcaggagagccggattttttccgggtttgcttcaatccccctttggctgactatgaaacccaggaactttcctgatttgaccccgaaggtgcatttctttgggttgagtttcatgccgtatctcc

SEQ ID NO: 292848 - DNA, 532 bp, Cannabis indica
aataatgagctttaataaaaaaaagatattcaatctccattgttggtcttacaatggttaaatgttttcaatatgacctcgagacgctagacttcgtccctcttatggatggttattcgttgaaaacacttaacaccgtaagatctcatatgataagtattttgtaagttttcgtttctattagactctcccctatagtgactacttagagataaacttacagagtatgaaacaatggtggaagcttacaaaatgagaataacattgactctcgcctactgggataacattggattcttattttgatcgaataaaaggttgataaaatagtatcaattttaaatgagctgactactctattcaactaatgttatctttgactctcgcctaccgggacactgtatttcattatgttggaaaccttagaaaataataaatatattagaattttgatatttttacaaacatatttgctttacttgttattttctgaacttgtgtatgagtttattgaaccaaatgatttacttct

SEQ ID NO: 292849 - DNA, 347 bp, Cannabis indica
acagagaacatcacattaaatgcatcagcagtagcgggcactttctttccacgcaccttcacttccccattccggcggtcaggccaattcgcaaggaattcacaagccatagtaacattagcacgaccccgagcatctacaaagctcccgcacttcattctttctatttgagctctgattgtttcaaatcgaggttgatgcctcaagggattctccgggaattcaataccccgatcaattttgggcctcaatgtttccaaagcgggtcctatcaaaacccgttggtggtgggtttgaagacgaaccctcctctacattcctaggcctcttgggtgccattttttttt

SEQ ID NO: 292850 - DNA, 669 bp, Cannabis indica
gggtcaaactcggagcggcctaatcgatacgcggagggagacaaggtccgatgcgtgcctccaccatggcatcaagctttttcttcttctcccggaatttggcaatcatctcctcgggtttagggtagaatgtaagcttgatgttctggtcgtttgtagaccaagccatgaagacgccatcatcaaaacgcttggtgcagcagctgcaggagacgggggaaagaagctcatccctttttgccttctttgaggcttgttcctcgaagtccctgagctccttcagctccgcggccagagtagccctggattctaagttcgcctggtgagtttcctctaaagacctcaccttggcagccatctcatccaaggcttccctggcctcccgaagctcccgcctggcctttgcagtagcttcaccctccgtcctcagctcctcctggtgcctggcctccagcctatctctccgcagagcctcctcccggatcattgcctccgcctgcgcttccctccgcttagcctcttcctcattagctttggcagcggcctcccggcgctcggcagcctcctgataaagccgcctctcagcagtaagatcctgaagaatcttcctgacttcgtccatgtccccaaaatcagacattacgaagccatggttgattatgttcttgg

SEQ ID NO: 292851 - DNA, 729 bp, Cannabis indica
tggggtggggatggctgcaattcgtttcccagggtcccaggcccagaagtgagctgccactgtcatgggtggaggtcagtcccagcaactgccccatctgtttcacccttgcttgatcgtagctagaaaatggtcagagatttagcccgcaagtgagtacacatgggacgtggccctgtttcgctgctcacttgctttgtgagccttggtgctgtgtgtgtgtagtgtgtgtgggtgtatgtgtgtggtgtgtgtgcatgtgttgtgtgtttgtgtgtggagtgtgtgtgagtgcacgtggtctgtgtctggtgtgtgtgtgcgtgctgtgtttggaggagtgtgtgtggtctgtgtgttatgtatgtggtgtgcgtgagtatacatgtgtgtctgtgtgtctgatgggtgtgtaaagcactctggttctggagcgaaagtttgaggtgctgggttcactgcccactggcctctgtggccctggacattccatccctgaacttgtgtggtcctgtgtgaagctggatggtaatagcagctccagtgaggtgggtgagacccaagggggaagtcgtagcgagctcctgggtctctgtcagcatgtcctcagctggtgctgtgagctgggctccggaagtctggtccccatctgtgccagccgggtgaccaggaactctacttttcctcttgagcttcccgtcgtgctctgtgtcgagggcattgtgttgt

SEQ ID NO: 292852 - DNA, 542 bp, Cannabis indica
actaccgcgaccgcagtgtaactaattgggcgacccaattcggtttcaacactcatgctgatgcatttctcgtatttgcaaagactcgtcttaacaccaagtctccaacattgaacagtcttttcttgactcttttgttgaagtatcttgtgactcggtgttgatatgcagcgttggtgatttgtgactcatttcgtttttcctcaagtagatccaaggacaattttaaaagttcttgttttttttcttgattataaaactctcttctgtgagtcgatatgttcacttcaacaggtcagcattgcttctgaggtcaaatgtctagtgagaaaggagtgtgtcccatggatgttttctcggtagttctgtgggcccagagcacctgaggtagctcgtcaacccatctgcctttggcagcgtctaacttcttcttgatagtatcctttagggttttattaacagcttttactggtccattttcctgaggcctggatactgacgagaagcttttgatattttattcctatcgcagaattcagtga

SEQ ID NO: 292853 - DNA, 621 bp, Cannabis indica
ttgtatgggcaaatcaaacttagagttagattagtagtggtggttgatgagtccatatttatcttataaatatgattaatttatttattaatattcttaaattgattctttaaattattgattagtgtgattttaatttgttaggttattttaaatactattcatccatttagagtcttttggagggattttaacatattttggtggaaaataatggaagtcggcgagctcgattgtacaaggcggaacttaattgcaaattcggacgaacttaaaggcagaattggacttggagctcaacatgaaagttttagatctcgttcttagctttccagaacatcttgaatcgtccaattccgagtaatattgagagagttatggccaaaatactatcagtcgtcgcagcaggaaatttctaaaaaaaagatagcgaaaataaagataaattttcaagaagagttgcgatttttatcttttgtttaaaagatgagttatctttatccgagatatttcctaatactattataaatagaatcctaattctaagaggatttatctatccactataaatagaatcctaattctaataggattcaactaactttcccattactataaata

SEQ ID NO: 292854 - DNA, 528 bp, Cannabis indica
acactaacgaacagtaagcaattaaatactttaaaattaaaaagccaaaaacccacggtaatattaataatttaaacatacacgttaaatggagaaaaacgtctccagatgtaaaaattccttttcttttttagaaaaaaaaaaccttaatagctagttcgaacttcttagtagtggtaacggttggactaggaatgtcctggcatcgatatggcccggcatgataacattttggtctgatccagcccggcccaatagctcctttgaacttggtcgttcagccgcttaaccaggatcgggcctgacttgccctttctttttagggctatttacataaatatgggaaaatatactatagtttacatatatatggcaagaaaacttaatgccactaaatatgacattcaaaacaaaaaagttaacaaatatgggaaatgacatgtctaataccataaaaaatattaaaaatcaaatcagattttttctctttaaatttaaaaactaaccaaaaacagaaaagctaaaaac

SEQ ID NO: 292855 - DNA, 660 bp, Cannabis indica
attcttttgtttattcaaaaatcaaagttagaaaaattaaaagaaaaccaagtttttctctcaaacctctctctcttttcctctctctattcggcccttcagcagcaagaaaagaggattttcctcttgaatttcaagctctccttagcaagattaagttgttggtatgttttctacatctttcttttatatttttttgaatttttgaagagaaatggtaggtcgcatgcttaggtttaagttgttcttcctgctggaatcttgatgttatttctgaagttaagcatggtaaattgaggttaattgagctgctagtaatgcatgattagtggtattgtttaaagttatgaattttctatgcaaaagtttagttttcaaagagaaaattgaaaattggtggctgtagttgttgcatgagtttaagtttgttttctgcagtgttttatgcatgattatgtagttctaatctaggtttgatgcttgttatgttgtttagtcaagttttgagtttagaactcaatctttgacctttaatggtgaaatgagtttctgtgtgtgaagctcggttttgttgctttagaaatgttctaggggatatatagaacaggtctggaaggttttgtgtgatttggattttatttggttgagttatgaattttt

SEQ ID NO: 292856 - DNA, 458 bp, Cannabis indica
ataggttgctaagtgttttaaagttaaaatacattgaagggtgtaacagtaaattaatccctatgcaatgtaaattatctatagaggatcattgattattgagattataacaatagataactaatagcgtaactatatcgtggaacatatagagcattctatataactgagtgtgcaattctaagttttatagcggtacaatgaggaattaatatgttagagaatttacttggtaaattctagatctgcttattcgaagctcggttatattggcccatggtccccatactagttgagataaactgcttgtaagactcagttaattgattttagttagtcaatgttaattctaaattagactatgtctagtttgtgaattttcccaatgttatgagttgattgtgaagaaataggattttaggataaatttattaattaagagactttgtggagtctaa

SEQ ID NO: 292857 - DNA, 526 bp, Cannabis indica
ttgggcactaatacgggattggcgacccaagccgggtagaaagcttcaattataaagtagttgttgcatagcttttcaacttcttccttcagggctactgctcgttctttgtctagcagccttcgcttttattgaactgactggaagttgggatcgatattcagaacgtgtgaaataatagaaggatcaattccaaccatatccgcatgtgaccaagcaaaaacatctaggtttgctttcagaaattttatcaattctgattatacttcgagcaacaaacctattccgatctttagctttctggtcgggatatatggatcgatctcgatctcttctaattcttctacaggttcaacattgatgcttgggtccctaagtcgaggatccacatcttcatccccgccttgggaagttccctacttggaaatgttttttcccttgtctatgctctggctggaggatatttccttcttagcctcggccactacaagattataacattcccgagcagactgttggtttcctc

SEQ ID NO: 292858 - DNA, 983 bp, Cannabis indica
tgcacttctattcccaaaaagtagtaaagagaaccaaggtccttgagggagagaattaaattcaacttggtgatgaatttcttgagcttctcaatgttattccttgtgactatcatgttatctacatagattagaacaagaatcacaagagatgatgacctgtaagaaaaacaaagatgagtctacttagagtttttaaattttagctaagcttgtctaaggccatcaaggatttagccaattgacaatgtagtcagggtgttctttatcttcaaatcagttttggttgagtcatgataacatcctacctcgagatggaccatttaaaaaaagcattattgatatccaatttcctacttcccatgattttgcaactgctatggttaagaaattctaactgtgatgctttaatgatagggcaaaaagtttctccaaaatttacaccttacctttgagtgaaacacttcgctactaactgagccttgtacctctggaaagagccatttgtatttcttttaatttgtacgcccatctattatcaatcacattcatcccaagtgttagaggaaccaacgtataagctccattccttatcaaagcaatacgttcatcatccattattgtcttccatcctttatggctgagagcctcttctaaagactgtggttcttcattgataggctcccactgagacttacttaaatatgttttaggtttaaaaatacctaccttggctcgggttaccatagggtgtgatggttgaatggattttatagcacctacgacatctgtatttgaagcaagtacattttcaactagttgagcagtatcacaaacatgatcttgatctgagctagagggagcatcaccagataaattagcaatttcaaggcgattaataacatgttcatggtcaattatccaatttgtatcatgtctggaagaggattcatgcaacaagcatgcgagtgattagaaaagtc

SEQ ID NO: 292859 - DNA, 498 bp, Cannabis indica
ggtcccagctcacagggtttaacgagatgacacttatgccaacgggaaaagtaaggctccccgtcaccttgtgcccggacaccccccagagcacgttcaaatactgcaccttcgtagtggtggactgtccgacagcctacaacgcgatcctcggccgaccagccctggtagactttggcgcagtcacttcaatccggcatctatgcctaaagttccctacccgggaggccggaatcggaactgtgaggggaaaccagggggaagcaagacaatgttacaatgtcgcaacccacctgcccgtgctaatggtccgggagtcagctgagccagaggtggctgaagaggatgagctggacccccgtgtagggtccgaaagaatcgtggaaccaatggaggacgtcgaagaaatatcagtgtgcgacgtcgactccaccaaagtactccggttagggaagaacctagacccggaggaaaaagaaaaaataataaaaacactga

SEQ ID NO: 292860 - DNA, 654 bp, Cannabis indica
ctcttctaggttgatgtatttttagtactcttttctggaaatcttaaaggttggaggctccttcttgctgtaactcgttccagaacggagtccctgtacggatccctgcttgaagaagagcaagctgttgtccgtcatcaactttcttagtctttgaggcttcttccttaaacctctttatgaaattcttcaacgtctccgtgggtagctgcttgatgttagtcaaggcgctgacctccagattaaccttcctcgcgacgacaaactgtcttcggaagctggtttgcaacttattccagcagtccacagatcctggttccagattcttgaaccattcttctgcagacccgcttaatgttagcgggaaacataaacacttggcgtcattgctgactctcatgaccgtcattactcggttgaaccgtgataggtgatcgctaggatccgagtccccggtacgtaagactgccacttttgggtcgatcttaaaaactttttaggggttaggctccgtccctcccacggagtgtgcctcggcgacatggcgtcccggtccgttcacagtcagagtcggagtcatcaccttttgttctcgggacgaccgacgcaatgtcttttctagagtatggcgaagctcagccactgattccttca

SEQ ID NO: 292861 - DNA, 709 bp, Cannabis indica
gtgaagcgatagaaggttgagataatagaaactcttaatgagctctatactctatttggagtggagtactgagctacatgagtacttttgatagactcacctacgtgattgtgagagtggggccacttcctatgaaattttgggaaatttatagagtgttcactatactgggataaacgtgcatgatcattaaagcacacgattttggactacaccctagaaaggttgtgtgtggtacatcgttagagatagagtttaaaactacgagtcactctagtatattctaagttgtaattactacgtaaaggttcaaatcgaaagatatatttatctatgctcaatcttattatttagattagtgctcgagaaaatattttttaaaatttcaagtggcggattgttggaactttaattgaaattttctaaaattattgtatgagaagtgaagtgtgtgagcgcaatgagtccacatgggataagaacacttcattaaaagtgtatataatgtgcaactttggcacatgggttggggccccaaagggtggcccacggtttgtgcacatgggtgaggatccacacattggaccacccgcgtgcgccgccgtccgtccgaccatggcgagcgagtgtggtgtggtgtcactttatatttttttttttaagaaaaaattatttattaaaattattatttttatttaattaatttaaa

SEQ ID NO: 292862 - DNA, 536 bp, Cannabis indica
agttctgtaaaaaagtaacttgcttaatttttgaaatttttacatgaaaaatccattttacacaatttattacaaaaatactcctacacgcctatatcaacttttttacttaccatgtttgttttattacaaaaataccacttagtcatcatttcatgcacatacacgtgtgctatccccatcactcatcaatcaaatcccactctcttccctctcttttttcattttctttcaatttcattttcgatttttcatttctgtttctaacttgatttgaatacaagtaacctcccttcataagattaaccacccattattgatcacgtttttccctcttcttttttgttcatccacgaaatttcaactccctctaagcccacgatttatcaactgttattccctctctgtttcattttttttcaaatttatttataagatggcaatcactcgttcatcatcatccccttctccagttctcaaacaaaaatcgaaaatgggcaagaaaactttggccaacaaatccaagggtaaacgcc

SEQ ID NO: 292863 - DNA, 274 bp, Cannabis indica
ctcccactcaattgcactaaccgtgttcccaaaatgtacgtagaataaaaatacttctgtttctttattgatgttgaataaaatggattacattgaaatggagtattatttagggcataaaacccaacaaactcccacttgcactaatataaaactaatcagtacatatcaattaatcctaaattctgacggtgcttttcaaatgcagtcacggccaagactttggtgaatggatcagctaggttgtcttctgtgtccactttctcaactagta

SEQ ID NO: 292864 - DNA, 617 bp, Cannabis indica
acttttccaactttggagtctttctcagtttgcaatctcagtatcaaggcagagaatgatccaaatgtgtcagacttgtctctaagaaattcaacccaggtaaaccgagagtagtcatccaccaagaccattacatatcttttcccactgatactttcattctgcattggccccattaagtcaacatgcattagttccaacacacgagaggtgagaagtctattaattgtgggatgagatgccttatgctgttttccaagctgacatggaccacatactctctccttggaaactttcatgtcaggaattccctttacagcttgaagcttcaccaatctttggagatctctgtagttcaagtgtcccagcctgtagtgccataagtcgggtttgtccaagaaggtcccgttgcacactatggtctacagttctgtttcctgttaagacaacacacccatcagatgaaactaaacatggagttttagtgaaacttacagagagattgtcgtcacacaattgaccgatgctgatgagatttgctttgagtcctctcacatataagacattagtcagttgagctgctccattcacatttacatcacctctcccagcaatct

SEQ ID NO: 292865 - DNA, 520 bp, Cannabis indica
taaaatctctgaaattgaaaaattataactctagtgtccatttctaacaatgtgacccataaataattataaaaatatcagaaattagtgctaatggcctttactaatctaaattactaaagcggtcattacaactcaaatacagaatctctatgcggcattataaacccctggttacccagcactggcacaggtgctggtggtaacactagttcaacaagggcaaccggtgtcggttgccttaatcatcgcaactcttcttcctgacgaagtataatacctcgcatttcttggaacatctgctgccagtcagcaggaggattagcattgccaacccccgccattatccccccggatactgcggaggtggaggcggtgctggtggattggtttggtcaaccccaggctctacttgctcgtcctatggtctagatgattgcggagggtccattactagtacccctgtaatcaacaaccccagcgagttaagcaccaataccacacttgtgacaccctaact

SEQ ID NO: 292866 - DNA, 681 bp, Cannabis indica
tttttctccccgagcctcgtattcgccagatacatgattaaccactagctgtgagtcactgcagatctcgatgtgctcggctttcatttccttcgctagtttgagtccagcgattagggcttcgtattcggcctcattgttggaggctttgaatccgaatttgaccgctgcatgcaggtgttgccccccaggtgtgacaagggcaattcctgcgccggatagctgatctgtggccgatccatccacgtgaagcttccaggtcggcttgctttcagtgctggtcggctgtggtgttggctcgggatcgccttctgggatgctttcagtttttcctgtgcattccaccacaaagtcggccaaggcttggcctttgatagctgttcggggttggaaattgatttcgtactgccccaattccaccgcccacttgagtaatcgcccagaggcatctggcttttgcagtatttgccgtagtggttggtcggtgtacacccgaacaggatgagcttgaaaataaggtcttagctttcttgttgctaagatgaggcagtaggcgagcttttctatcaacggatatcggccttcggcctcgatgagtcttttactgatgtaatagactggatgctgcacgccatcttcttctctgattagtacggcgcttatggcatgctccgttactgc

SEQ ID NO: 292867 - DNA, 517 bp, Cannabis indica
aaataactttcgaaggtttccaacaaactgataccagtggtcccgtttaggcgagaatcaaagatatcatccattgaatagaatagtcagctcatctaaaatgacaaacattctagcaaccttttattcgatcaagatgagaatccagcgttgtcccgtttaggcgagagtcaaggccattttatcttatgagcttgcaccattgtttcatacttttgtaagtattacttttagcagccaccattagggtgatcgttactaaaaataaaacacttacaaacaatacttatctttcgagattctacggcgttaaattgctaatgaacgttcatccattagggatgattactcactaaaacaagaaccatgtagaaccaacaatggagaccaaatatctttataataaagctcattatttaaaaatgtatttttcatctaatatttattttaaatatatttatctaattaaaattatcaatttagataaatctaaatataaattttaatttaataattt

SEQ ID NO: 292868 - DNA, 683 bp, Cannabis indica
tttttaaaaataatatttttataattaaaataagatcattactaaattttaataataattaaaaatgtaatatctgatcttataattaaaataaataaaataatctaaaattttaaaattaaccataagactatttttgtgaaaaatcaaattttcaaaaatcaaagtctactaacatctaaaactaattttaattaattaaaaaaattaataaaaattaattttattttgattattatattttaattgaaaatttagattctacacaaaattctaccaaaatttaaattttgtttcaatggaaaatgatttttaatcaaaagatatcaccaaaacaagattgcactatattccccatgcgcacaataggctgcaaatgggcgacggaagggctgctagcagcctcatggggaacaaaactaggtcaggaggggcttaggacagcccttgtccaagtgaattcagacatgggcgtgtctgaagccgcgtcagaccctatccgcgcgcgcacaacgtgttgctcggtttcagatattttcatcagaattcaaaaaatcaaaactaattcataaaaaatccaaattgagttctgtaaaagcataaattaattaattttttgtctacttttcagtaaaaatatttccagaacgaaaaaaaaatgttttacaacatacattgtgatt

SEQ ID NO: 292869 - DNA, 534 bp, Cannabis indica
cattcgaagtccttaacccattcaactgctgcagaagcctctaagtacttttgaccgtatataaacctgaagtttcctctttccaatatcaatcatcacatacaatagagtcactcaattgaatggtgataatcaagtctttttctctagcagaaaagagatccgaaattaactccatatcccaatctcttatatctattttcaacaaactttttacaaaattattttgaagggatgggtgagaagaagtgacaaagggatgcacttgattagggagccatgttcaaccaatatatttacttgttcccctgtaccaattgaccgcctcatacatgcctcaactaagaattgagcttcccacgaactcctctatatgaaactttgatttgatcccaaagaggttgtttgaaaatctataagaatagtatctagctttgaataccttaccaactggaaagttctcattagctaaggtggcatttggtaatactttatttttaaattttttaatcacaaaaataaaagaattttttt

SEQ ID NO: 292870 - DNA, 549 bp, Cannabis indica
cttttcactgaagccttgatgatgtgatatctcgaaatgttcagcaagaaccaatgttcagcaaactgagacaatgcatcagtttactgaatgtaagaacctttgttcccatgtcagcagggttgtcacttgtgtgcaccttttccaattccagaaccctgtcctcaatcttctctcgaatccaatacaatctaatgtcaatgtgcttgctcttctcatgatatacaggattcttgcacaagtgaatagatgacagactatccgaatagactgtccctttgtctttgagcagtagcagctcttgcagtattccttgtaaccatatagcttccttgaatgcttcagtggtggccatgaattctgattcagtagttgacagtgccaccactagttgttgttgtgatttccaacatatgcagcttttgttaaccatgaatacataggcagtggtgctccttctattgtccctatttgatgcataatcagcatcaacatagccttctaacctcacatcagatgtgtctttctgataaatcagaccatacttga

SEQ ID NO: 292871 - DNA, 521 bp, Cannabis indica
aataatatgactccttccactcagatctctaacccttgtatcctttctgtcgcagagtattatcaagatctgagcccgaatgtccttcttgttgaatgtctttcttcacgatcttcctcactatgattgaggtactacttgctgtgtgtgggcactactctatcactaagaggttcgaaatttacaatgaagaagaaggagaggaaggtggcggctaggttagagtgaaaggctcaggtttttctctgaaggaaacaagatgtgaaagtcacttttcctgaagccatcactatctatttatagcatgccacatagggttaggtttgaattatttggcattaaaataatgaaaatattaaatgataaatcctacaaaggtggccgaccatggctagtggatttgggcctcagttttgcaattttgatttctgcatctcattttctcaaaaacactaattttcaaattcaaccatttaaatgccaaattctaattatttaataactataaataattattacat

SEQ ID NO: 292872 - DNA, 752 bp, Cannabis indica
ggtgagcgcttgagagaaaaagaaaaagtccttgataaattgaggtagttaggtcatgagcctaaaaatgtcatcctttaccataacccaagcctaacattcaagcctagtcaagtccttttgatctaagttgtaaagctaagctacattagtggagaggattgcactaattcaacttatggaagcaaacctttaaacttgaggatcaaaggtggttgttatagaaattcaagttgttggtgggaagtatttgcacacttatttgatcgaattactcttgataagttttaaggacataaatagcatgcaaaattctgttgaaacacacaagttcaaggcatattcactactgccaattacacttccatttcatctaattctgagagcaaatttcgtccctagaccaagtgtgaaagagcaagattttctctgctgcaagcatgttagtgtcgctgtcattttctgtttttattgtttagttctttttgtttttcattactcgaggacgagcaatactctaagtttggggtgtgataactctatggtatagagttaatttttatgcttttaaactaaagtattgtgaggagagtagtgaaaatgtgtttattttgcttaattttaattagttttagtgttattttctatttagtaatctaacctttaagttttgtaaatattgatattgttgggtgtgtttttccaattaactgtgcttattttgttgaaaaaggaggaattaaattgatagg

SEQ ID NO: 292873 - DNA, 695 bp, Cannabis indica
attcatacataaaagaaattaattaaattttcgtatgaaatatgagagtgatacataataattaaaaaaattgtatgtacaacatttttcgtaactttacctaaatattttttataaatattgtatgttagaatataaaactataaaatttaaggaaatttttatgtacagtcacaaaaaatgtactcctatacaggtatttcttttccaatacgtgtcactttgttaatttttccctatattcaatttctatatcctttttatataatttatttttttaaaaaaagaaaatctattaaaagtggtaacgggaattatgaaagactccttttgtatatatttttttgatcaagaaggaaaaaacttcattaattaacaccaatgattacaaacaaataccccaagaaacatacccggggaaaccagccaccaacaacaaaagattcaactacctattacataatctagctaggtattcttttttcttgtgtagacatttttcttttacttataatttgccatctatactttaaggtactctttatatcattacaatatctttaattgctcttgaatagccattaaaaatacatatgttcctgttaagccaaatgttgtaaataacagcagccaatatgagatgttaatcctttgaatctaagagtgacctctcaagttgatccaactataccagc

SEQ ID NO: 292874 - DNA, 359 bp, Cannabis indica
gaattattgtttttttttttttgattgtatattgttcataaattatcaaaacaaaaataaataaaataaaatggaatgcttaccattaattttttctaaatggtagaaatataaatgctcttagtgatgttacaaaagtgaaaatcttactatctttaattgggtgttgaaattattctaagtactactgattagattattaatctttgaaacagtgcagtgtattcgtgctaatttatagtgtgtaaaaaaaggccttaattatatagtgtgaattataagtaatgtttgaagattatgaaaattgatttattcaataacaattggttaaggcatcttatttcactaatgatggtcaa

SEQ ID NO: 292875 - DNA, 1018 bp, Cannabis indica
gaaaggctcaaactatccaacaaatgcctaagtcatattccaattgaacactatcaaggatttcgtctcaaaagaataaacatgcaagttctaagctatcctgtcaatcttaccacaaaccatagtaaaacaattataacaattttcacagattgagtatttgcagataaacacaggtttctaagcatccaaactaatccaaagagttaacagaatcaagcacacagttattttacagtttcagatcacatcacactaatcagcagtatacaactatcgtcaagcttattgccattccttaactaaaacaaaaactaaaacagaaaattaaaatgcagaaattaaagtgcagaatttaaaatgcagaaatttttaaaatttttaagtctctccccccaaactaaatatgacattgtccccaatgtatacagtaacatgcagagagaagagacttacctgagaccctctcagaaagggttgggtggtggcggctggtcatatgggtagaaccgaggaggttgcgccaaataattcgggtcatcaatcccgatgttcattctgttgatgagagagttaagttgctgaacttgtccctcatcatagatactcctctgcaccatgtattgttgcatgtggttgttctgctgaattatataactcagctgtgcatgagtgtattgtgttgtgggatcgataggcccaggcaattgtaggggctgctcctcttcttcttcaacactaggctctcgttgccgcctacgcccttgcggtgcatcaggtggaggttggccatagggatgtggctctttcagcctgttgacaaaggcgatgtccatcttgcgaagtggcaacaccgtgttgtcatactctaattggggaacttcatatgccccgcagagttctgtgataactcccgccaaaccaaaaccacctcccgtggctccttgcacgatctgctcaatgctttgccttatgacttgtccaatgttaatgttgtaccccttcattatggcgtaca

SEQ ID NO: 292876 - DNA, 607 bp, Cannabis indica
tacattatatacatataatcatgaaataaatcatgtgaaccatgcaacatttaatgttatttctgatctatattaataagtaaatctaattatattgaaatgagttttatttagggcataaaacccaacaaaattaacttatgaaaaacctaaatttcatatttattaattagaacatattacaatggtatatataaatatatatatacgagaccttaacattgaatctacaaatctaaaattatagaatgataccttagattaaaaaggaaatctggcaggaaaataatggtggtgatgatgttgatatatataagtaaataatagtggagtatctatatatgaataagtaagaggttggtggtggtgatatgtgagtatgacaagaatgatggagatgaaataattggttgggattagtgttgagaggatggtgaaatgataaaaaagaaattgtaaaaaaagatgatagagaaaatgatgaaggatgatggtatatggatgacttatatatagtgcttatatagaggtggatatgtgacttagagtaatatgtagagtgatggtagtatatgttgagtaatttggttgactgaactaaggaatg

SEQ ID NO: 292877 - DNA, 736 bp, Cannabis indica
ctctcactattatccctaaggtgaaatgtcccaattcaccaagtgacttcagaccgattgcctgctgcaatgtaatctataaggtggccactaaagttctatgctccagactcaaggatattatccctgatattgttggccaaaatcagggaggatttgtcaaaggaagattcattgcccacaacatcatgatatgtcaagatcttgtgagacattatggaaggaagtcaactaagccgaattgcatgattaaacttgatttacaaaaggcttatgacacggtagaatgggacttcattgaggaggtgctaagggggctactttttcctgaaaagtttatttctcttgtaatgaactgtgtcagaactccaaaattctctctttttttcaatggatcccttcacggattctttgaatctaagagaggattacgacaaggtgatcccctttctcctcttttatttgtcattggcatggaatatctgactcgcattttgaagaaagttgggaataaagcagatttctcctttcatgaacgttgtgatactctaaagcttaatcacctaagttttgcagatgatgtactacttttttgtaaaggtgattataagagcatcatcctcttgcttcaagggttgaaactcttttcagctacctcaggattacaaccaaacaaagcaaaatctgccatctattgttgtaatatgatagattcagatgtcactagagtcctgga

SEQ ID NO: 292878 - DNA, 665 bp, Cannabis indica
aatctattcccatcttctgaatacaatatattgtctttttattgaaattttgcacacaatattatgatattatgtgaagtagtgaccaatctaaaaatattgaatatgaatcgttcctgatttcatattaatgtatctatatgagcttaacctctctcttcatccttcttgagctttccccgctttgaagagtgggacggctcatgaattggctccgttgcaatagatggcagatggttcgtagtactcaaagcactagagtgatccagtagcaaggggtttcatagctaagattcaagtgtttaaattacaatttccagccaaaatttaacctttgaggttgagtgctttcttccaccgccgaagctctttggattgatctcttgtcaaggacaacccaaaattcccattgattgtccaacaacggaaccatagacagattgtccaacaactagtagttgagtgctccttattttcagatcttgatggagtccgagcttcccaaactctatgcgttgttggggaactctgcaagggtcttaccaccttcttgggggaagacctatatttatagtttttcttctagtcttttttctctttaaaagcagatcatattatattactaaaattcatgccacgggaaatatttactaagacaatctttc

SEQ ID NO: 292879 - DNA, 152 bp, Cannabis indica
tttaatgtataatactcttataaaatatatatatatatatatatatatattttttttttttaaaaaatttagaagctaaaaaaagcttgaagaaattaagttagggaataaaagtggtctatttacaatattaaaagaggaatgaagaaaac

SEQ ID NO: 292880 - DNA, 533 bp, Cannabis indica
caagaagttgtggacattggaaacgctgtggaaattgataatcaatcaatttctataaactcaactcaatttaattttgatttttctaacatgagcaatatcaaagttgacattgatcgttttgatggatctggtgattacaggatctggaggagaaagattagatccctattggctcaacagaaattgctaagggttcttgaagacctattgaatggccagacaacacttcaaaaatacagcaagaagagctgttagaaacagctacagggatcataattttcaacctttctgatgccatcatcagattggttgataaagaagaaactcctgccaagatttggaagaaacttgaagaacaatttcaacaaaaatccctaactaataagatctatctaaaggagagaatctttgggttcaagatgagtcatactaaaaccctagatcagaatcttgatgagtttctaaggatgcatattgaattggcaaattcaggggaggaatgaagctctaagtgatgaaaatcaggcaat

SEQ ID NO: 292881 - DNA, 598 bp, Cannabis indica
tgtgaattataagatttgctttgtgtatgctttgaatggtaaatttggggatttctagttgctgaatttgggttagaaaaaaaacatgctgaattttgattcattttggtgacttccttgtgtagcttctttatgaaatcttggtgattttgctcaagccaaagctttgaattttatgttgtttaatctgaaattttgatgtgttttgctggtgttcaagcataaaaattatgtatgttaatgcctatttaggtactttttatttggtgaatgattagcttgagttgtgtttgggtttgtgctgaattagatgagtttaggggctaaaattcattgctgaatgctgatttttagttgctggtttttggtgttgttggaagtgaattaggtgtaattccactctaattacttggtttatgctaggtgaaagtttggtatgattgtgaattgatatagcatgaaaattggtatttttggatgcattttcgtggctggaaacagggtttcctgggtttttaaacccagtagccgcggccatttttggcagcttattgtatttttttcgggtttttgttttggtcataacttttgactcggg

SEQ ID NO: 292882 - DNA, 622 bp, Cannabis indica
gtatcaagatacaatcgaaatcaataaggaaaaggcaataaacaaagtttccctaaaaaagacaactttccaaaagagaattccttctcttttgagaagttttcaacaaaggaaagttcagctgaaagtgcaactttccaaacaaggaaaatggcaactaataaccgaataaaagaggtaagatttcgaaaatgaatgcatagcaatcttaccataaaaaggaaaaattattttgtcacctaacttgccaaaaaaggactttacaatctccccctttggcactttagatgaacaaaataatttttaccataaagtacctgcaatgcaaagttagcaagagcaaaagatactactccccctgagtaacacaatcgaatatcacaataaaaacaaagaacatgctaactttaaacattaagttcacaagtactaacaaaccacaactccccctgaaaaaagggtccagagttgggcaacaaaccaaaaaataaatatctctccccctttttgtttatcggagtgccaaagtaaacaaagacaaaaaatagaccaaagtttaattaaaaagaaacaataaacactttaatttttgtagagtttaatcaaggtggacagttgcctg

SEQ ID NO: 292883 - DNA, 842 bp, Cannabis indica
aaatattaagcttcatggatgcttattcgggctacaatcaaatcaagatgcatccaccagaccaagaacatacaagtttccggacagatatgggtctctactgctacaaagtcatgccatttggtcttaaaaacgccggagctacataccaaagattggtcaacaaaatgtttaaagatcagatcggcagaaatatggaagtgtacgtggatgatatgctcgtcaaatccagaaaggctggggggcacatagacgacctggacgaatgtttcaaagtcctcaggaaatacaacatgaaactaaatcccctaaaatgctccttcggagtcagctcgggaaagtttctaggcttcatcgtcaacgctcgaggaattgaagccaatccggaaaaaatccaagccctcctggatatgaactcgccaacaaaaaccaaagaggtacaaagcctaactggtcgaatcgccgcacttagcagattcgtgtcaaaatcaacggataaatgtgtcccattcttcaacatcctgcgaggaaacaaaaagttcgagtggacagaagaatgtgaaagagcttttcaagacctaaaggcacagctcggaaaacctcccgtcctctctaaacctctggacggtgaggaactggggatatacctagcagtaacggagcatgccataagcgccgtacaaatcagagaagaagatggcgtgcagcatccagtctattacatcagtaaaagacttatcaaggccgaaggccgatatccgttgatagaaaagctcgcctactgcctcatcttagcaacaagaaagctaagaccttactttcaagctcattctgttcgggtg

SEQ ID NO: 292884 - DNA, 879 bp, Cannabis indica
aaaaggggcagattcttaccaatctctcagttgagagaacccagaagtgtgaagacctaggctcgtgttgattgtttcagtatgtacatgcaaagaaaagaaagacagagttagtgagattcaaagaaaaatacacagaaaagagagaagagagaaagaactgaaataccagtcgatctgtgacttggatttctcacctgatgtaatattctccatttatagtgcagatctgagatcgttcttcaaggcgagctcaatagagaacgtacccctggatttagggtgaacctctataaacgttgtgtctgttttcttacatctctttactatttaatgtttaatctttgatgtgtatgtgtttgggataaatttctggggaaagtaattggtaagatcgatctggtttgatcgagaaggagacctagtttctagggttcattcgaagagaagcagggagagagagagagtttggtttcgcactctcgaaggttctaagggaaattctgagctagggttagctcaattgtcttggttttgtttctgggagaacgacaaatcgttttggtctaaacaatttgtcgtgtaggtggaaacgacttgatttctttgtcgtttgactaattgttgttttaattcttggtcaattttaaccctgtcgttttatagtgacattgagttggtgtaagggcattcttggaaatcaagaaattcctacactaggtaaaactgcttcctccaagtataagtctaactcagacttgtaagtatccacatttgaagtactactaacatacaagtcaaaaccagctaaatcatccacacatccatcattactttcaccaattctagaagcattaaataagggatcaagaagatttt

SEQ ID NO: 292885 - DNA, 556 bp, Cannabis indica
tcgccaatattggcggggataatttccaccgcatactcgtcgacagcggaagttcagtgaatctgctgaacttccaagctttcaaacaaatgggattgcaggagaaggacctgcggcctgtgacatcgagcatctatggctttactagcgacgtcatagcattaaaaggaatgatcaaactcccaatcaccttgggaactgccccggtaacagccaagtcaatggctgacttcgcagtaatcgaccagtattctgcatataatgccgtgattggtcgaccgatcctgaaggagatgaagatcataacctcgatctatcatctcacaatgaagttccctactcccgctggagtaggttctgtacgaggagtccaagcagattcgcgagaatgctacaacacagcagtcaagctcgcggagaaaaggacagtaaatgttatctacctattggaggcgccacctcctcgccaggagatcctcagaatcgaggagttgccgcacatagatgaaccagatttggatccaagaatcctcgatcatgccgccgcagcccaagc

SEQ ID NO: 292886 - DNA, 493 bp, Cannabis indica
aaaggaatctttctccttgatcttaagtcaatacaaataacgaggattaggccatttccaaactgctcggggctgaacctctataaaattcctgtgtcttattattgctttatcatatatctgttactacatatcgtttatcgcttataaaatagactcattgtcgttggctaaaagcgaagtcaacattttggtgctttcattgagagaaggatcacaaatcgctctttattcgacatccaaccgccaatacgatggtgcaaactcgtagaggtctgtctgatccagcaaattcacagacgctggatcctacatcacagaaccaagagagttcaagggttcggcctgctgttaatcccagacagacgggaagcgtggggaatggtgaaacagttcctattaatggaattgcgcctggtgtgcaagagactgggaataaaagttccgcacccaaccagggcatccataatacgactgttctgcctggaaccaa

SEQ ID NO: 292887 - DNA, 547 bp, Cannabis indica
aagagaaattaaaacgtgggcggcctcttgtaatagacaataaggtttgtatacagtgacaacagcgacaattgacgacgcatgatctctctatagtatatgtatagatatatagatgagatgagttattattatagttgatactgagctgatgttttcttgtaccatttcataaaacaaaatcaaatcaaaactaatgacgtgattaacacgtaaaagaacacttcaattcaattcaatggaaggggtggccattaggtggtgatagctactacatgtgcatctgttatatatatatatatatatatatataaaggattttaagtcctcaattacaaatgaaaacactgtattttattttagcattactattgggtattaattgttaaaatcaaatacagattatgagtgatgatgattagtgtacaatttttgtgtttcaatgctcatattgttgtttgattttaacaaagctctgataccatttgttaaaatcaaatacagattatgagcattgaaatacaaaagattgtacactaatcatcat

SEQ ID NO: 292888 - DNA, 516 bp, Cannabis indica
aactgttgttgtatgaaaattctatcaacggtagatatttattccaagagccttctaaatccataacacaggctcgtaacatgtcctccaatatctgaatcgtcctttcagactgtccatctgtgtgaggatggaatgttgtactaaactttagttttgtacccattgcccattgcaaactctgccaaaacttggaggtgaacttcggatctctatctgaaactatagactttggtaccccgtgaagccttactatctctttaacatataattctgccaactggtccactgagtaggttgttctaacgggcagaaaatgagcagacttcgtgaatcgatccaccacaacccagatggaatcgaacaaacctgtggttctaggtaacccaaccacgaagtcctcgtcgatatcctcccacttccacttcaggtaggttaggaggttgtaacaaccctacgctggccgtgtgatgttctgcattaatctgctgacaggttaggcgatctcgatacgaa

SEQ ID NO: 292889 - DNA, 617 bp, Cannabis indica
cgaaagataaaaattcatagcaaaaagacgtagaaaaaatacaaatacaaaaaatggggggaaaacaagtatggggaaataggggtgtagtacctgcagatgagactgcctagctacagggtggctacaaagaagagagaatgagaaaaagatgatcttgaagggttttaggaaaaagaaaatcacctctcccaattttcctatcccaacatagccctccaacaaataactgccacatgtttctattagcattccctcagcggcgtcaatgtgtttatatttttatttgatttgagagaaaaaaaaactactaagtaataatagcatgacattttaatttcaatatgagtaatttttttttttttaaattgttacaatatgtattatgagatataaaggtatggaaaattgtataatgtagccctttaaaagagatgtaaattataattatttaagacatcttgcaaaattttaaaaaattcgaaaaagcttaacatactaaaaattatgttcaaaaagtgtgttgcacgagtgtctattttattttatacgcgtgtaaaataaactatttgaacattattttctatattgtaaattatttcgaatttctcaaaatt

SEQ ID NO: 292890 - DNA, 483 bp, Cannabis indica
tttctcgttttcaatctagggttttcaaaaccccctagggcggccaccgcagttctccaccctcacgagccccgcctgacactaaggaggagatcaacagatcccgcctgacaccaaggagtagatcgataaatctccaatctcacgagccctacatcgtcagaacccccacacctcacgagcctcgtgttcagtaagctctctctcacccttgcgattttctttctccgttagttgcgatcttatttctctttaatctgaagtctctttgatgtgtttaaatctggatgtggggttttgtttggatctgaaaaagaggtttcggtgatggttgtggtgtgtagatgtggttttggtggtgtgggcagttcggttgtggtgggcagatgtggtggtctgggcggaggaagggtggttgtggtgtgggcggtggtctgggcagagtgatagagcgagagtgatggctgagagagagagagagag

SEQ ID NO: 292891 - DNA, 524 bp, Cannabis indica
ggatgccttttttgtttccatacttaattactacttcaacttcaacacacactcaaatattaggtaacttttttcttttctctaattaacatttaacacctacgatttatctatatataccatatcattaatataattctactcaaattaggttttatatttaaattttaatttatttttatttaaaaaaagatatatatttatcaaattttctcctcaccgacatcattttcaaatgattttttaaaataataataataataataataatttcaaactatcataaatttttacactaactttgattttattaggtatttatgaaataaaagtgatttaaaatgggccttagaattgagaggagcccatattgatacagttcttcttcgtcttcttccttcttatatgttattgcttactttggtttaatttgttattgcttttagggtatatatgttaaacttaatatatctcactcatcatcacttcactctcttaaagttaattaattctctttcactaat

SEQ ID NO: 292892 - DNA, 600 bp, Cannabis indica
gggcccgggcttcttatatggggctagcgactgagttgccatgtaaatactttctgcgtcttcagttaatatagtgaacgtagtgtactttacttgattctcccggggagcttgttcggatttgccggcaaattttcccttcttcccattcccttgcctgaggttgttgttggaacgcttaccacctgggcttgaattatttgggtaatggggaagttgggtggatgttccagtagaaggagctttgacttgccaggcttttgctcaccttccactcgttgaatgggttcctcgagcttgatgaagccttcggcacgatcaaaaaaatcactcattgagtctaccgacccgttcttccttatatccttccaaagttcagtgaggacttcgatgcccctagtatcgcggataactttccatcttcagttacccgtgaaactttggtctcttccatcatgaatctactgatgtatgcccaaagaggctcgcttggtcgttgcttaacttcgaccaagtctcccaaatgcaacgaaagttggcgtgaggatgagaattgtgcatggaattccgaagagaagattttccatgaactaaactttc

SEQ ID NO: 292893 - DNA, 649 bp, Cannabis indica
ttaaatttaaaaaaaatatcttaaccacatatttctctaacaaacagtatatctcaaattatcaaatccaattctctcgctttggtttacgatcaaaccaaacgcagctacctttgcactccggtataattataattattattattattattattattattattattattattattattattattattattattattattattattattagtcattatgattaatttagcattacaaagcacagattcctcatagttgggcttttctcatgaattagggttgtactgcctcaatgactatttcaatcaaacagtcgactaccgttactttagtgtaacttcaaacgtcgactaggcttctttaaatatatagttcgagtcatgacattatattctttatattattatttttttcctgtttggtttagatatatagttcgtgttattattgctctttaaatagttcaattattctattttatgagagaatgttttagtgtgaatattttgttggtgttgtcgtttgatggttccaaggcctgcgtcttctttcgttcttacttcctggaaagcgacaggattaggacgttgatggtagtaaataggtactattgttatttttcctcgggaagggtccattttggcatctc

SEQ ID NO: 292894 - DNA, 505 bp, Cannabis indica
gtacctggtccacttccattatagtattaaatttttcaagatagtctatcgggttagaagtacctttatatttgagggactcggatagacgaaacccttttggaagttgagcctgtcgcacttctgtagtaaaaggcgaggtgccatgcaacttatatataggctttcgttgctgctcgagcattttcaaagcctgcagaagcatgctttggtcaattcctcctgtcgcaggagccggggttgctgcaactgcggggctcgcaactactgcggcaagatttgctgggacattaatcccagtggtcgcgatcggcgcggtaggcgggttattataagtgttggcaccctgatcgcccgcatggggatcacggagtgtctcagtattatgtgggacgcgagagcgtgccctgaaaactgcgttgagatgatcacgcagatcacctcggtgtacctgataacgtcctccctgttgtgtctgtacagagccggaccttgtgtacctgct

SEQ ID NO: 292895 - DNA, 781 bp, Cannabis indica
gactcagactaggaccagaacctagacaaagaaccaaacccgaaaaaaacctagacttgggacccaaaattagaacttgaacaagaatcgtcgaaccacgaccctaaattaagactaggaccgtgaccaggacccggacctaaacctagaaccgaacatagacctagcctgaacccaaactaagacaggaacacgggcccagacacggtcgtgtacccaggtcgaaactgagacccggacttggactaaatctaggacccaatcccaaacaaagacttggacctagataaggatccatatatgaaccaggactgggaccaagacccagagtgggatcgaaatgcgggacctagacctggaccgagatcctgacccagcctcaaacttggacccgcactcaggacccaaccttggacctggacccgaacctagacccagactggggtccagacctggacacaaacctggacacagacttggacccgaactcaaacccacacctagaatcagacctaaagctagacccgtacctggaacaaaactcaaacccagaccaggatcagaaccaaggacttagaccgagaactgaatctagactcagatcgtgattggaccttgggactcggacccaacctagaccaagacccaggacgcgaacctacacgtggagcctgatctgaacctagactgaaatccaaaccggaacccaaactcagaccaggactcgaactcaaacccgaactcaaaccgaactcgaactcagaatcgcaaatggaactag

SEQ ID NO: 292896 - DNA, 760 bp, Cannabis indica
aaagaaaagatgggtaagggtcggtagggctgcacacggatcgggtttttggatttttgggttcgggtcttcagggttcgggtcttggaaatgcacaaccgaactttttttgggtgttcggatgtgtcgggtatcgagtcgggctcttcgggtttggcatagtcgggttcgggtcctattgggctgaacccgaatgtttaatttctgggttaaaatgacattttatttttaaaattaccatttttttttatttttaacattattttgacctttcttttataattaatattttttggtgtgggtgagttggactagtcgagccaatcaactggtgtgggtgactgaagtgaatacaaatagtgaatagtgaatacgaatagtcaactcaactggtgtggttgagtctgtcactgaagtgaatagtgaatacgaataggcagcaggctgagagcttttgtttgaaattgaaaatgattaaaataacatttactacagaaaaagaatacgaataggcattataggacttttatcataattaataccaatagtatttattacagaagaagaatacgaataggtatttactaaaagttttatgatattaaattagtaattaattatttaaagtattgattttttaataaaaaaacattttaatatttcgggttacgggttataatccgaccagaaaaaaatcaattaagcagacccgaacccgaacccgtttatagtctttttcgggttgaacccgacccgacta

SEQ ID NO: 292897 - DNA, 659 bp, Cannabis indica
ccttcccatacaagaaatggcctccctaaaaataattggaatttacctatcttcctcatagtcaagaataatgaaatcagccgaaaaaatgaacttatccacttgcaccaacacatcttcaattttcccttacggatgagccatggaacgatccgctaattgcaaagtgacggtggttggccttacttctccaattcccaacttcttgaaaatagacatgggcatgagattaatactagctcccaagtcacaaagagctcttccagcatctcgaccccccatagaaattagaattgtaaagcttcccggatctttcaatttgggtggaattttacttttcaacatagcactacatccctccgtcaaagtgacagtttcaaactcgccaagcctccttttctttgtcaaaatatccttcaaaaacttcacataggttggcatttgctccaaagcttccactaatggtatattaatgtggagctgctttagaacatcaagaaatcttgagaattgaccatcgtcttgttgcttctagaaccgttgaggaaacggtggaggtggcttttgcaaagactcttctgcagctgaatgctgactggatgttgtaaccactaggggaatttcagcagctaaaattgtaggtttttcttcatttcccc

SEQ ID NO: 292898 - DNA, 979 bp, Cannabis indica
gaaaaaattttatatttttacatcaaatttacaacttttcaattttaaatttattaaaagaatatttagaaataactggtactacatgattctgtctaaaactcaatagattttagaatttaggccctatatatactctgtttaaagataataacagaatctgtactagacgaaattagagaaaaaattaaagttttgtaaacatcgggtactcatgaccgctaaaaaataaatattaaatttatgccacttacaaatttaaaactttaagtaacgatttatcttataatatagacccaaaaatatcatgacattttctcaaccagttgtagaaatatatcacatataaagaaataggggattgggaccttgggtatcatcatccccataccccataacttggatagtgattttttatcaattttatacaaacatttcaaaaatgttagtgtacaatatttattaggggcaccaaagaccattgtattttgtaatgggtttaaaaaaagtcacaatcaattttatatatataaatatagagcaaaactatggtaggacctagaaaaagtttcttaccgatagggaattttttttgatcattaattttagatcatgtggttattatgatgtaaggtgtatactcttacgataggactgcttgtatacaattaaaactttaaacatattataataatatttaaatttatttttaaaaaaaaataatattaataattaaaaattttattaatttttttttgaattattttttttttaaaagttactttgaattatttttatattggtatttgtttttaaaaaagaattattttttcttaactcatttttttttttggcttttcataatttactgatggtttttttatatttacacctagttttttatttattttgcttttaggttgtgtgtagttctagtgttattaactgttttttcaataatttttatcttgttgtttgg

SEQ ID NO: 292899 - DNA, 588 bp, Cannabis indica
tcaaagttcttcgtgcaagaaatggcctccctaaaataattggaacttccctatcttcctcatagtcaagaataatgaaatcggccggaaaaatgaacttatccacttgtaccaacacatcttcaattttcccttccggatgagccatggaacgatccgctaattgcaaagtgacggtggttggccttgcttctccaattcccaacttcctaaaaatagacataggcatgagattaatactagctcccaagtcacaaagagctcttccaacatctcgacccccaatagaaattggaattgtaaagctgcccggatctttcaatttgggtggaattttacttttcaacatagcactacagccctccgtcaaagcgaccgtttcaaactcgccaagcctccttttctttgtcaaaatatccttcaaaaacttcacataagttggcatttgctccaaagcttccactaaaggtatattgatgtggagctgctttagaacatcaagaaatctccggaattgaccatcgtcttgttgcttcttgaaccgttgaggaaatggtagaggtggcttttgcaaaggctttgctgcag

SEQ ID NO: 292900 - DNA, 543 bp, Cannabis indica
ccctggctgcggtaagtacttgtgatttatttctttcctcgatattttgcctaaggcttttattctcactcttacttccttttccagattactgcagagaccagccgcctttccaagaccatagttaatcatggcttcgtcctgtccaaatttgggggcatagacgaggtcgtgaggatcctgcaggacttgtctgctgaaaggcgggcgatccaggaggaggccgagcgaaaggaggctcttgctaaggcgaagctcgaggaggaggctaaacagagggaagcccaggcggaggcgatgctccgagaggaggtcctgcagagggataggctggaggcgaggcaccgggaggcgctgagggcggagggcgaggccactgccaaggccaagcgcgagcttcgggaggccagggaggccatagacgagatggccgccaaggtgaggtccttagaggaattgcaccaggcggacttgaagtccagggctaacctagccgtggagatgaaggagctaaaagctttagagatcaagccttaaagaagg

SEQ ID NO: 292901 - DNA, 802 bp, Cannabis indica
cttcttttcttgaaacattttccgaagaggctaatgcattacattcatatggtaaaccaaatgatagcccattttcaaacacatacaatcctaattggagaaaccatcccaatttttcatggagacaaaaccaaccacaaatgaaccaaggaaaccaattcaacatgccaaatccgaatcatgcccaaccaagtcaaccttaccctccacaaagaaagccttccttagaagacactttacaacaattcatgcaatccacccaacaaatcatgcaaaatcaatctcaatccattgccaaacttgagacacaattgggtcaacttgccaatgccgtaactgagagagaaaaaggaagatttcctagccaacccgtcccaaatcctaaaggccaatatgaagtaggagttccaagtcataaagaagaagccaagtctatttcaactcttaggtccggaaaacaaattgccaaacccgattacacacctcaagttgaaaaagaccaaagccaaccccaaagttccaacacaaatgacttgtcaaaagataatgatcaaattcttccttccattccaaaagctccttttccacaaagattacttccactcaaaaaaggcaaccaatatagtgacatcttagaagtgttcaaacaagtaagtatcaacatcccattcttagatgccattaaacaaattcctgcctactccaaattcctgaaagacctttgcactgttaaaagaaacactaatgttccaaaaaaggcatttttaactgaacaagttagctccataattcaatataaaag

SEQ ID NO: 292902 - DNA, 540 bp, Cannabis indica
gggtaagttaagccctaggttcattggaccatttcagatacttgagaaggtcagccaggtagcgtatcggctagccttaccaccaacactgtcggctgtccatgatgtattctatattttaatgttgaggaaatatgtttcaaacccgactcatatcttaagttatgaagcgcttgaactgcaatcagacttatcctatgaagaacagcctgttcaaatccttgatagaaaagagaaagatcttcggaacagatcattgccttgttcaaagtgctttggagaaacaacaaggtggaggaagccacctgggagttggagtctgacatgaggactcaacatccagagctattcaggttagatttcgaggacgaaatccttttaacggggggtaattgtaatgaccgcgttggtaatttagattagtaaaggcaattaacactaatttcttttatttttataattatttataaatttaattaattgtgggccccattattagaaatgggcattagagctataatttctcaatttcggagattt

SEQ ID NO: 292903 - DNA, 565 bp, Cannabis indica
atgttatcatactcatccattgctccgccttaagtggatcagcaccaccctcaaagactggcgggttctgtttccggaacagctcatacaacggttccaaacagttccctgcatccggtggcactaccagaggtgccggaggatcaggattagggtttagagcaggttgagctcgctgctctctaagttctctgatttgctcaccctgttgccgaatagtctctttcattgcaacatataactcttcctagtttggtggtggtagagggttctcgccctcaccaagagccccgagcctagctagctcgcgggtacccctaccagttcgcctcgagtgcataatctatacacctgcggtcacattccaagtattaacaatactaataagtatttccaattattatagtccttcccacactatttcgatatcaacacaattcagataatcaggcaatcagaaaattaacaaactatcttttaactaaaagcttactgaaccatgagtcgatcaagtccttgcagccaatgtacatgtcaagccagtcttcaggatctaaaaaccttg

SEQ ID NO: 292904 - DNA, 551 bp, Cannabis indica
tatttttgggctgataatttttcagtagttttgtgaattcaaggacttactgacatgttgcgagtttccatctaccaaattgtgtctcctaaactttgatatctatcatatcatgtctccccccccaccaccccccccccgcaaaactttgacatgtattaaatcgtgcccttaaactttcatacacatcatactcccatcaataaatttaatcaaagtcgttaaatttaacaatgtcaataattcggaaaatattttaacgatttgaaaaatttaaaaggtataattaaatgttaaagttcgataggcaaaattcttaactagcctaaaatgaactagtaattgtagtattagtatagtaggtgttgaccgaggttttcggcaaccaataaaataatagaagattagagaactgtaagaaattaagagaaggatttttacgtggttgcggcgttaatgagccttagtccacgagtctgtgtatttatgagtgtattaaatacagagaatgttcttggtgagtatttactcttcttgcacttatgcaaccc

SEQ ID NO: 292905 - DNA, 905 bp, Cannabis indica
aatacgatcaagatcaacgttgagggccatctttgagaaagacaatgcatatgggtttggtattgtagcttgtgattcagaaggcaagatcattgacttcgtggccaagtactatcatggctcgttctcggctgaggttgttgaggccttgggggtcaaggaagcactcagttggctcaaagataaaggttggaatatggtagaggtggaaactgatagtctactcactgtccaagcaatctctagtaatcaacaaatgtcttctgtctttggtctgattgctcatgattgtaaaaaaaaaaaaaacattcaattcaacttttttgttaaataatccaaaaaaaaattggtataacaggtagaatataaaaatcacaatcaacttgattcaagtctataatattttatctaattttatgaaccaaactgaaaatgattatgcaattctcacataggaaaaaaaaaataattcagttgactatagtacaagatacaaaataactattcttatatagaaaaataaattacagtagaaaaatataaaatagattaagaaagaaattaaaataccttattataaaacataccaaatctttcaagtctatctacttcctcattaccctttgaagttagaatacaaagctttagccttccgaagcacacaaaagcataaaatttatagagtcatccttacttttaaaagttttgtagcaatttagaatgcatacacaataattttaattaggggtggacatccgatctaatccaacatttttctcctcatctgatctaatccaattagtaattggatttgaaaaatcatccatcccatccaatctaattagacctcaaaattcaattcaattactaattggattggatcgtctttgtaattggatatctaa

SEQ ID NO: 292906 - DNA, 475 bp, Cannabis indica
gaatgggaaaaaaggaaagttcactggcaaatctgaacaagctccccaggagaatcatgccgaatacactgcattcattattctgactgaagatatagaaagtgtgtacatggaaactcagtctctggccccatataagaagcccgggcccatgaagaaagatgccagcaagagggacatgacaaagttttgtcagttccacggagactacgaccatgacactaacgaatgcaacaacttgaagaaggaaattgaattcctgataaggaaaaacaatccacacctgcagaagtatgttaagaccaatcagggtcaaagagacgacaataaacaagatttgctacctccaccggtagatgggcatctacaagttattgttggaggcccacacattgctagagattcgggcaaagcccgggagaggtatgcccgaacagcgcagcacaacaagaagaggttatcctggccgtggaag

SEQ ID NO: 292907 - DNA, 551 bp, Cannabis indica
ctttcttagaactcttggtcggattaggctacttattggtttagatttatccgtaggataattcaatcaatatataggaccagtttcatggagtgctaaattagttatgagacattatattttatttatttttttttaagaaaaagaaatatatatttctccaatatgctattaagttgtatcaaaaataaatattgtgtcaaatttagttaacatacatttttatttaataaattgttgttgaatacaaaaaaaaaaaaggaattaatattatttcattatagttatttcttttaaaaaatatggaaattgatcctctaaaccaatttattatccaactccttaaaccaactaacttaactaactttcggttatgttagttagttagttggtgctatccttgtatgagttggggcctatatataagtctagtctttttttttaaaagggagaacagaaggaagaagagagagaataagagagaggattagagagagttgcttagggttctaagctgagagttctgttcttgaagagggtcaagaacaagg

SEQ ID NO: 292908 - DNA, 626 bp, Cannabis indica
cgaatatgggaaatcaaaaataaccaagtgcagccgtcaaccgtggtgagagaaatcagatttcaaaatattaattgttagagcattaattagccgaagaacgaagggacacccaatcagcctcacattgagtctcggacagacgcgctcgacatgtgtccccatccaaaggcagaagcagctcggatgaagtctacacgcaacttcagaagtcctgtacagacttggggggcaaatcttatccaatttttgcactttgaggtggcatcacatgatggtgacacgtggaatcaaccttgagtatttgctcaaagtgtatagtacgaacaggatgcctcataggcatgtctggaataaagtgatcagcaatccgcacagagcaatcaacacttagtgaattcagcttccacgtcgtgagtcatcaaagaaatccctataacttagggatcagatcacagagttatggcaagctatccaaatcccacgatcagtgtattctgcatttatcatgcaatctttttgcttatatccattataacgagaagggaaatacttcttctccaagttcatagtcctataaatagtgatacatgttcactgggcaaaggacgagagattttacccta

SEQ ID NO: 292909 - DNA, 497 bp, Cannabis indica
gttgtgaagaggtatgaaatattttcttgctcaataatgctaaatgttatctaaggttcggacctattatatttttcgttttcagaaaaaacaagtttcagtaaagtgatgatatctctcttgatattgatccgtttttagagatttttgtatcgttggaaagcttattcgatgatctaaaatttttatcaagaaacaaataaccaattcggtgttcttctaagtcgaaaattatcatctttctgctatggttgtaattcgttttctttatatttccagaaaaagtactttcacttaaaatacaataactctctcaattctcatccatttttaatgatctatatgtggttttaaagcttattcaatttcccataagttttatgaagaaacgttttgttaattcgaagtcatactatgtcaaaaagttagttttttatttcaatatcatgtgattcgtttctagaatcttgttcttgcaaaactgttttggtaaaatt

SEQ ID NO: 292910 - DNA, 538 bp, Cannabis indica
tttcttgatgaagaaaaaaaaccagtttcttggtgatttttctagtaatttttccagcgacaatgccaatttcgaaaaatttcccagagtttactgtgagcactgaaaaagtcaccggggtagctgctggtgtattagtcgtcagagttgctaccaacgccagaaaagtcgtcagagtagctgctagcgtcagaaaagtcgtcaaaattggcattgtcaatggaaaaatcaccaagaaaccagtttcttggtgattttttcagtgatttttccggtgacaatgccaattccgacgaattttctggcgctggcagcaactccgatgacttttccggcaccgaccgctactccgacaacttttctggtactggcagcaaactccggtgacttttccggcatcaatgacaaataaaacttcctaaacaaataaaaacattaaatatgggatttaaaaacctaattacatttatatggcatatcaaataccataaaaagacccaaaaacaaaaaaatatcatataaattggtgaaacttaaa

SEQ ID NO: 292911 - DNA, 365 bp, Cannabis indica
tccttccattcagatctctagtccttgattcctttctgtagcagagcataatcaagatctgaatctggatctccgtctctccttctctaatgttgattatccacagtcttacatactatgattgaggtaccacttgatgtgtgtgggcactactcaatcactcaagggatttcgaaattgaagagaagaaaagagagaggaaagtggcgctcaggaattctctctgaaaagaatgagatgcaattgtgtgttgtttcctgaagccattactttctatttatagaatgccctctaggtttaggttagaattgtgtggcattaaaataatgaaaaaataaaatggtaaactgttggaaattatttta

SEQ ID NO: 292912 - DNA, 595 bp, Cannabis indica
attgggtaagaatggtattcttggtataaagactctttttcctctatggtgtcctacagcaatttcagcatctatcacatttggttcaaatgctcgacaaatcaaacgggttccattgcagagtccatctgaaggattaatgtttctaagcaacattattgggcaattcctctttagctgcaattcatgtggaggaaggccgtttggtgtaagagtgtttaagaaatcttccataactgattgctcggtgctatttatagcttcatctcgactgtagtagtgatgtgcttctcccgggaaacgtgcaattaacatcaaattaatttcatcgacaaaagagttctttggtgttaatatagctcgattcatcatggtagacacattttctgggtagtgatggatgttgtggaagacattttctattaggaggtttaaagatgtgttgtcgtcgtgataaggaatgagcatattacttgggatttgtaaggtgtcattgacggtgattggtggcattccattgcccaccgacaatcgtaatcagagaatatgggtccagtcttgctctcatattttcaattaggtggaacttggtgaa

SEQ ID NO: 292913 - DNA, 501 bp, Cannabis indica
ccttcgttgttaagaaacttcaaagcaaaaagagagagctttctagtttcaaagttgttgaagagcttacagacgatttctggcttgcttgaactcagacactcgaatctttgagtaagtttctgattccctttatgttttgtattttttgctggtttttgctaaacatgctgtttttattctgtgcagacatgtctcggcagatgatcgacgctttaaggaagaggatgagcgggggctctagcgcctcccctccggccaagaagtctaagggcggagaggggtcttcagagaagaggccttctggagagttcattgacctttttgaggagctgactactgcaaatcctcccactcccaaatctgtcaagtctaaggagtctgggccaccaacatctgggtccgagctggtcaggaggattcttgagctggtgcaggcaccaactccgcccatgcccgtgcttctggaggccaagaagggcaaggaggtgatggctcact

SEQ ID NO: 292914 - DNA, 619 bp, Cannabis indica
agtgggacccacacaaattaaagagaaaacaaaaggaaaggttctccctccattttcataaggaatatctttccatttccttaacttactttatattagttatattttgggaaatttgcggcaaaggttgtcaaaatgttcactttgttacagattagtcctcaagctcgagaaatagcgacaatagttctcaaggtcaaactttttatttgtctgttagttctaattttaactgagccgtttatttttaaaaaatttccatgtgtcgaaatattattggtccaaattattattttaattttaaaaaataaaaataaataaataaattatttaaaaataattttcattttcttttttcttttttttttctttttctttcttttcttcttcgtcttcttcttctcactgccagaaacaaccccaaactagcactaccaccaaaattccatttatccatgaacaaacattaaactcaaacatgaaccaaaagaaaagggaaaaaaaaattagaaagtcgccccgatctgaaaccccagcgtacccaaaccccacgatttgtggtctccactgcgattaccagagcaccaccattgtcgtgcacatcccgagaaggagaaaa

SEQ ID NO: 292915 - DNA, 762 bp, Cannabis indica
agaagtgcggcaggcccaacttccaaaggggtttcgtttatccgaatccctcaaatataaaggtacttctaacccgttagattacctagaaaagtttaacactataatggaagtggaccaggtaccgcaacttgcgaagtgtcgcattctcgcggccacactcgaggagaatgcccatgattggttcacccaattaccagaggcatcgatatcgacgtgggaaaacttcgtcgacttattcctcacacatttccaggccacgatgacgtataggccaccctatacgactttggccaacatcaaacaagagcctggtgagtctttgcaaaattatttcaagcgttttaacgccgaagtaacaaaggttgagaaggcccccgagtcttcgcttgtttgcatgctaataacaggtatcttgccaagaaccgacttctggaaagagctacaggcccgaaggccagaatccttggtagagttcttcgccatggccgaacctcataagagaatcgagaattccttggcagagttagagaagggcaagaacaaacggcgatcacccataccgcggtcgcggtctcgcagtccgcgaggaaagaattccaggggccgaagcccaagaagacgcagtccacgcagaccgcggagcccgaagttggctaagtcacccccaaaaaaggagtcctcgccaaaaagaaaagggggacctcgcttcgtcaattataccgaacttgccgtacctcgagaccatatctatgcgattga

SEQ ID NO: 292916 - DNA, 639 bp, Cannabis indica
gtccattaaacctctaaaaagcctagggattagaccatgcatttcccatgatgtatccattgggaatgtgtgcctttactgaaaattacagaaagacatgtacctcaattctagggatcaccccacaaaaacactataagtacccccaaactcattaaggcaggggtcgagaattctgggtttcataagaactagagaggaaaaccaccaagaacattctctgtaataaatactctcataaatacacagactcgtggactaaggctcattaatgccccaaccacgtaaaaatctctctcattaattccttatagctttcttaaatactattattatattggttgcggaaaacctcagtcaacattttaatttaaaataccaataattatataagatgtaattatactaaaagtgtgggtaattaaaattttgatagttaaaactcaacctttaaactgtttaacaaaagataagtaacatgatttatggggtccccctgttttcaaaatatttacaaactggtttcaaagtattttacaacataagctttatattttccaaaatacaatcaaaatagagcatcctgtaaactgggctgcctacggctggtatgtacattgctgctgcgaccataaactc

SEQ ID NO: 292917 - DNA, 529 bp, Cannabis indica
tacaccttcttggaatggtcaacgatattttgtatcattcatagatgattactcaagatatgcgtacctatttctacttcatgaaaagtctcaagtgttggacgtgttcaaatcttttaaggctgaagttgagaatcaacttagcaaaagaataaagcaagtcaggtctgaccgtggtggtgagtactatggcagatatgacggatcaggtgaacaacgtccaggaccttttgccagatatctagaggagtgtggaattgtcccacagtacactatgccaggatctcctagcatgaatggtgttgctgaaagacgaaaccgtactcttaaagatatggtaaggagtatgatcagtcattcaaccttaccagaatcactctggggagaggcacttaagacagcagcctacattttgaatagggtaccaactaaagcagctgcaaaaacaccttatgagctttggacagggcgaaagcctagtcttaagcactttcatgtttggggatgtccagctgaggctaggccttat

SEQ ID NO: 292918 - DNA, 425 bp, Cannabis indica
ggatgccagcctggagaagggcaagctattgtccgtcatcaactttcttggtcttcgaggcttcctctcggaacctctttatattgttttttaaggtctctgcaggcagctgatgatgttagtcaaggcactgacctccaggttgacctttcttgcggcgacaaactgtctccgaaagttggtctgtaacttgttccaacaacccacggatcctggctccagcttcttgaaccattcctccgcggacccgcttagagtaagcgggaagcatagacattttgcgtcattgctgactctcatgaccgtcatgacacggttaaaccgcgataggtggtcgcttggatcggagttcccgatataagctgccatttcgggcatcttaaagttcttggggagctctgcttccaggatgtgcttggcacatg

SEQ ID NO: 292919 - DNA, 612 bp, Cannabis indica
ggaattggaatgagaatgggaatgagaaagcaaatgggaatggaaatgggaatgagaatgggaatggctcaaggaatgggccagagaatcggaatgcgaatgggaatgggaatgggccagggaacgggaatgggaatgggccggagaatgggaatgggaattggaatgggaatgggccaaggaatgggaatggggatgggaataggaatgggaatgagattgggaatgggaatgggaataggaatggtaatgggttggggaatgggaatgagaataggaatgtgaatgcaaatgggaatgggaataggccggggaatgggaatgagaatgaggaagggaatggaaatgagaatgggctgggatttgggttttgaggtttgggtttggggtttagggtttagatgttacggttagagggtaggggtatgggtacgggtttggggtcagggatcagggtttaatcaagttatctaggggtgttcattggatcacatccaatagatttggacccatccgatccaatccaattatttattggatattagattttgccatccgatccaatccaattgaatttagtcatccgatccgatccgatccaatggatgtatt

SEQ ID NO: 292920 - DNA, 670 bp, Cannabis indica
ttaaatggttagaattggaaaaatgacatttttgagaaataagagaaaatttgtcaaaagtggaaaaattccaaaatggggcccatatctatggccggccactcctatggaatttccacttaatatttccattattttaatgcctaataaatcctaacctaaaccgtggtggttgcctataaatagatagtgatggcgcacacttaaaagatgatgaaaattcttgccttcagaaaaaattgagccatctattctatacctttattcgaaccacttctctcttccttattcttcatattttcataccttgagtgatagagtgagtgcccacacacatcaagtggtatctcaatcatagtgtgtaaggctgtgaagaatgtagaatctagagaaggacattcgggctcaaatcttggtgatactctgctacagacaggatacaagggttagagatctgagtggaaggaaccactcatattctgctgcacccactctaaggtttcctaaactttatatgtgtttatttacattgttttataaattcatatttaggatgttaaaataacatacatggtagtaaatctagatcatggtaaaacatattccaacaccgtcttactcactatgattaagtacttgacttgctatgtgtgggcatgtcactcattca

SEQ ID NO: 292921 - DNA, 566 bp, Cannabis indica
gatttagggttataaggccttacctcagctttgcatccccaaacgtgaaaaataacgcaaaatcgatttcttgccagaccacaactcgtatggcgtctttggaaccgacttgctaggcacttgattcaagatataagcagcagtccttaatgcctcaccccataaaaactctggtaagctagaatgaattaacatacaacgtaccatatcaagaagtgtgtgatttcttctttcagcaatttcattctgctggggtgtacctggcattatatatatcttgcatcaatgccacgttcgtgcaagtatctggcaaacggcccggggttccttctagtttcatcataacgcccataatactcttcacctctatcagaattgacaactttaatcttctttcccttttgaagctcaacattcgtcttgaaaatcttaaggcatttaaagattcagacttctcacgaatgagctcaatatgaccatatcgggaaaaatcatcaatgaaggtaatgaagtatttatagcagcccatagcaggtaggacatgttgggttttatgccctgaataa

SEQ ID NO: 292922 - DNA, 522 bp, Cannabis indica
ccccatgtcataacccacgtccttaatgtcaacccggacatgccaccagttcaacagaaatgacgccccctcgattcagtaaaggctgaagccttagaaaaagaggtggacaaattgctagccaatggcatgattcgagatgtgtattacccagaatggctagccaatccggtactggtgcccaagcccaacgggacatggcgggtttgtatagactttaccgatctaaacaaagcctgcccaaaagattgtttccccttgctaaggatcgaccagatggtggacgccaccttcagattcaagatattatctttcatggacgcaaacctagaaaaaatccaagctctcctgagcatcccttcccccaagaaacacaaagatgtccagagtctaaccggaaaggttgctgccctgagccgatttatctcccggtccacagacaaatgcattcccttcttcaacatcttgaagaaatgtcaaaaattcaaatggtccgacgactgctaggaggcattcaaaaaa

SEQ ID NO: 292923 - DNA, 543 bp, Cannabis indica
tgtaaccagatttatcataatatctttagcaataacagaaacagaaaatgtaaccagatttatcataatatctctagatcgaattatcattaagttttattttaataaaaaatcaattcagggtcctattacaattttaaaaaatacagggtccattttgtcatttaataaaacagaaggtctaattggtaacttttgtaaaacacgatgtctaagatggtagatttccacttacaataattacaaactttaaattgttatagtataagaattgtttcatactaataatgaaaaaatattgaagaaatttaaatttttgtttgaaaaaaaaaacaaattattcaattaatttaaaaacttaaaaacttaaattaaaaataataaaagacatgtcgttacaatgattgaactgaacacatgacagtatagatgataaaagagaattttaatccacttacactactaattgtattatttgactgtcattgattattttagggtattaaataacttgaatattttgtactcttttagctataatta

SEQ ID NO: 292924 - DNA, 572 bp, Cannabis indica
acatatgatttggatttaactgattttgtgtgtgaacataataaacatattaaaccattagcatgtaaaattcatgcaaacatcaatcacttcaaatttcttatattgataactaatcagattgtaaagagttttatttagggcataaaacccaacatccttaaccaaggggatcagctttagacatgcctcccggagaaggcatgtaagtctcacatgctccggagagcaaggctacgacaaagcttctccgggaggtgtcagatcctatctgaacagtcatctcgcatttaatgacgcatgggaggacgcgtattgaaactgccatatatcttaaagtttgacgacacaaccccctctctgcagctactatgctatgattaaggagcctagtgacggctactttatgaggacatcacatcagtcaaaaagaataaaggactacatccataaaacccctaaccaaagacctacgggagttagtaccactgcatttccttactgatatattcattgggtaagtgtgtgccttcacttgataattacaaaagaacatgtacctcaattctagg

SEQ ID NO: 292925 - DNA, 645 bp, Cannabis indica
tcaagattaaatttgactatgttgatctgatcaattttggaaaaatacaaaacataaaagttttatatttctttttcttctttctaacgtatcttcaatcaacttatttggagtttttatgtgaaagttatacacattttactaaaagatgctgaagttgtcaaattttgcttcagtagtcgcgaccaccactttccatggtcgcgaccctttttcatggtcgcgactaggagccaggcagcgagcttattttttgtattttacctatggtcgcaactaggctttatgtagtcgcgactaggggcgaaaaacgagatttttcggcagtttttgactttttcaaaggtagcaaccgtaatttctatttaaggggctcgtgttttagaaggaagggaggcagaaattggatccaaaagtgaaagaaggaggcagatgaagcaatggtggtgatccagaatgcaatcaccaactagttctttcttaaactcttgctttctatgttaatttctgttttagatttgattatagatgttattatggattttatgaactaaactcctattttgggagatgatgaataatgttgattgaaattatctttagttaatgataatttctatttctcctttcttgattgtgaattta

SEQ ID NO: 292926 - DNA, 536 bp, Cannabis indica
gtcagggacatacctcacttcttgcagagtcctagtgatgccatcaaacatctttatcatgacagaacccatgccaagaacattacaggccttgttgttgcctagcaacacagtccctcctgagatttccttaagttcttggaacatctccttcttaggacacatatggaaggaacatcctgaatccaggatccactcatcattgactccttcctttgacactaccaaagcccctgcagattcatagccatcagaaacaacatcagcttctcccctattcttgcttttctctctgtcagttttggctttcagtgccctgcactcatctctgaagtgcccttccttgttacaatagtaacacttctttccagtcttgaattttgacttggaatttggcctgtatccacctctgttcttgtagtcttttgactctcttctttcaggtcttcctttggaaacaacccttcaccatgtgattcaattctgtcctctgatttcttttgaatctctttagaattcagagcagactttacttc

SEQ ID NO: 292927 - DNA, 966 bp, Cannabis indica
gtccaataattcgaatttatttgtcaaattaagtcggactcgggcgtaatcatttttatgtgatttagcttggaaactaagttctagttactagtgataagattaagcttatatattgctatttatttaaatatgtgcatctaagtttttgttgtatttattttatttatgttactacctgacacacatttttttactgagtttagtatctcacctttatcaaattactatgtgtagaccaaggtaactgaaagtttaaaaggccggtggtgagtgagacttaccatgatttataattagtcatattttttttatttttaatcttaatttttattgtgattaaaagtaagatttttttattgaatcttactaccattttgttcttgtaaaatttttaaaaccaattgttcttatagtatttctttttagttttcaaataagtttttcatattacttttagtttttaaagattcatctatcaaaaataagatttttccctgcgcatattttcaccgtcacaacaaaaaattgcaatctttagtgataacattttagtgacaacattgaatttttgtgacctaaatgagacttttcactacaacaaatatcattattaccggcggaagcaaccgccggtaataaatgcccagaccgccggtaataattaataccggcggaatccgccggtaattatccgccggcattaattggtcgataaaaatggttattaccgacgaaaggggaatccgccggtaataatattaataccggcggattaatagcggtggggtccgccggtattaatatttttaaatatttaaaaaaatatattataatgataaataccggcggacccatccgccggtaataataattttaaatattaaaaaaaaaatattctgattatttaatataattaaattaattataataattattttataaataaatatattaattagaaat

SEQ ID NO: 292928 - DNA, 510 bp, Cannabis indica
aacattaaatgttatttctgatctatattaataagttaatctgattatattaaaatgagttttatttagggcataaaacccaacaaccagatcaccagcaaacttggacagccgatcaaactccagagtgtatttgaccactgacattttcccctgagtaagcttcaataaatcctccacgtgtgaagttctcacagcaatattgtagaacttttcttcaaacagatttttaaattcttcccaggtcgttacattgacatcctgggtctgacccacagtgtcccaccagacgcgggcatgatcttgtagcataaaagcggaacaattcactctctcagttcccatcacccccatattattgaggatatgggtaatagtactcatccactgctcgacctttattatgtaagtacctcctagaaaagtcagaggttgcagcttcacaaaccgctcaaatacagaatccctatgcgacattataaacccctagttacccaccactagcacagg

SEQ ID NO: 292929 - DNA, 572 bp, Cannabis indica
taacaacaaagctcgatactctatgctctctagcatggtcgacaccttgaaaacaaggttttccaatactctcacggcctgcagaaatcatgaaccagttaactaaactgattgggatggtcgtcaattcaagactcgctttaaggcgtaccaagaattttatcaatgcacggatgaaacctcatcagaatgtgcgtgatcacctgctccagatgactagttacttccaagaggctgagaatcatggagctgttatagatcagacaactcaagtgagtttgatcttgaatagtttgactccagcttttgtgccctttacatcaaattatgtcatgaacaagttggagcttgacttccacaagttaattaacaaccttcagacatttgaaaatttgacttcggaggaccaaagaaaggaggaactaaagctcctagttctggcactgctaatggtacgaccaaggctgaggcaaaccttgcctccacttcgaaacccatcaaaaagaagaattggaagaataacaagaagcctcttaaagttgttaaaacggctaataagaaaaaggctgcta

SEQ ID NO: 292930 - DNA, 730 bp, Cannabis indica
actaaaacttctttttgctcttgctgccataaaacaatggcacctacatcacatcgacattgataacgcttttctccatggagatttaaatgaggatgtttacatgaaactacctcaaggttacactcccaaaggggtgataccacctaatgtcgtttgcaaattaaagaaaagcttgcggcttaaaacaagcatctcgacagtggtatgctaaacttagtaccactctcattacacaaggctttacacaatctaaaagtgaccattccttgttcattaaaaatacatctaatgcttttatagctttacttatatatgtagatgacataattgtagctaccaacaatatttcagacctcaatcattttattgctacactagattcaactttcaaactgaaagatcttggcaacctacggttcttcttaggactcgaagttgcacgatcgaacaaatgcatttcggtttcccaaagaccattcacattgcaacttcttcaagaaacgggtcaccttggctccaaaccggtttccacaccaatggaacccaatcttaaactaagcaatgaatcaagtgctcttttgtcagatccaaaacaataccgaagcctcataggcaagctcatctacctcacaataactaggcctgacatcagttttgctgtcaacaaactgagtcaatacattcaacaacctcgccaacctcatttccaagctgcaatacgagttgt

SEQ ID NO: 292931 - DNA, 504 bp, Cannabis indica
taaaataatttccaacaaagttctatacaattttttgcattgtatcaataatttattaactactagtgttgctttctgattagcacagaagtagttgccaaaaagtaaagaatccagtatccctagaggagtagatatatagagaggaatttcacaatatcaaggattttgtggttaaggaaatgtaatggtggaagaaagtttgtattgtatacaacttgtcggatcctattacggaaagtatactacatactacacttgatctagatatcaaggtattgagattatttaaaatgcactttttgttttatataagtgcaagtgggagtttgttggggtttggaacccaaaaaaaacccatttcaatataatcagatttactaattaataaagatcaaaaattggtttgtgttgcatggttcacataatctatttcatgattatacttaatgtatgaattctattaagtccagaacatatatataaatatgtatatatttgttc

SEQ ID NO: 292932 - DNA, 527 bp, Cannabis indica
catatatgtcgcataaaatcgcagaaaacaacatattcagcatagtaacatcgcatcaaaatcgcacaaaaatcgcataaactcgcaaaataaaacagtgggaaatggaaaaatgtcttaatcgcacaaagaatcgcattgaaatcgcataaactcgcaaaatgtaacagaggcaaatgaaaaaacatgtttacatcgcacaaaaatcgcataacatcgccaaataatcgcacaatccttacaggcacaactgtcacgtgaacatcgcacaaaatcgcacataactcgcacaacatcgctcaaattaccaaaactaacagaaatcagaaatgcattttttaatcgcataaaacgtcgcacaaaatgcccaaaaccagcaaattaattccccctattctacattcttctccaaacacaaaaacaagcaaatcgaacctaatttcaactacatttttcagttatatcacaatgtaaatgataaatgataaattgcaaaaaaaaaaattaagcttagcccatacctggtt

SEQ ID NO: 292933 - DNA, 380 bp, Cannabis indica
aattatcccaatacctatattatcaacttatcaaaatattctcattaattctatcaattaagcctgttatgacatttctagcccccgatcgagtctccaaggttgtcaaacctgaaaatatttttattccacatatagttcatattacattcacacatactatataaatctccgtaatttaaaaatcacgcttatttatccacttatagcaaatttaaaattttatgttgaactaaattagttggattatcatcccactcattacctggttaactcataatataaatataaaccctaattattaattattaagcttattgggatattacataaagcatcagtgattgcttgtaagactcatataattagttttgattaat

SEQ ID NO: 292934 - DNA, 392 bp, Cannabis indica
acattggttgcagtagaataatatgtctccttccactcagatctctaacccttgtatcctttctatcgcagagtatcatcaagatctgagtccgaatgtccttactagggtatttcgaaatttggaagaagaaaagagagagagaggggtcagctatagagagaaggtggatggctcaattttctgataggcaatctcttgaattactgaagaaaaaaaaactcttattttagtgtgagccatcactttctatttataggtaactactagttttaggttagtaattatttggcattaaaataatgaaaataatcattggaaaaaaaactattcaaggggtcggccatggtgttaatgggccccacttggaattttgcagttttaacaatttt

SEQ ID NO: 292935 - DNA, 529 bp, Cannabis indica
ttcatcagtgcgttggatttacactaatgtgataatcagcgataattatacttacaccttggataagtaatatgttctttccagaacattggcaaagtatgctagtttcagatgtatggagtatacattggactgggaccgatattgatcttggtaaagatattataatcttaccgctgtatctttctaagtcaatataaatagttgatcttagatcaaaagatctaaatcctgacatgcttaagctcaatctcaggagtctaatttatgctctttgattagttagttaagcctactttttggtcagggtgatacgtaaattttgggaacatgatagtgcaactgagtgggagcgctaaacatagatatggaatctatagcttctatctggacatagaagtgaaacgatgatttccttcgagcttggcgtaatagaaataaatggaagagcacttgtttcagtgattatattagctcactgaaatatcatttataggaggctaagtgtcttaaggataaaatacattga

SEQ ID NO: 292936 - DNA, 835 bp, Cannabis indica
cgatcccagtctgggtcttggtcatggtcaaagttcgtatccggatccctatctaggtccaagtctgtgtttgggatcgggtcccagatttaggtccaagtccgggtctcagttccgtcctgggtacacgaccgtgtccaggcccgagttccagtctcagtttgggtttgaggctaggcctgtgttcggttctaggtcagggtgcgggtaatagtcatggtcctagtcttgttctagggtcctggttcagcgattcttgttcaggtactaattttgggtcccaggtctaggtctgggttcgggtttggttcttcgtcttggttctagtcctagtctgagttccaaatctagacaccgactactagtctgttccaagcctcgttacctgaatcccgagtcaagatcttgatcacagtcacgggtctcggtctagttctggtttagatcccaggtcccatttctgagtttgggttcaggattgagactggggtgcggttctaggtcccgaccctggttttgtgtccctagtctagttccatgttatggttcgggttcgagtcctagtctcggttcgggtttagatccctgtctgggttttgatctgggttcgggtttgggtttagctccttgacctggtcctagtgctagttcaattctagttccatttgcgattcttacttcgagtttgggtttgagttcgggtcggagttcgagtcctggtcttggtgtgggttcgtgtccagatttcagactaagtccagatcaagctccgggtgtgggatcgcatcctgggtcttggtctaggtagggtccgagtcccaagttccaatcccga

SEQ ID NO: 292937 - DNA, 485 bp, Cannabis indica
atttggttcgtccacgtgtggtacctcctcgattctgaggaccttctagcgagggggtggtgcctccaataggtagacaacatttactgaccttttctccgcgagcttgactgctgtgttgtagcaatctcgcaaatctgccgggactcctcgcacagaacctactccagcgggagtagggaacttcattgtgagatgatagattgaggttatgatcttcatctctttcaggattggtcgaccaatcacggcattatatgctgaatattggtcgattactgtgaagtcagcaattgatttggctgttactggggcggttcccaaggtgattgggagtttgataattccttttaatgcaatgacgtcgccaaagaaaaccgtatatgctcgatgtcacaggtcgcaggtaccttctcctgcaaccccatttgtttgaaggcttggaagttcaaaagattcactgaacttccattgtccacgagtat

SEQ ID NO: 292938 - DNA, 564 bp, Cannabis indica
ttgttttttttttatgaagccttttttttgtatatatcattctggctttttatttagtacccacacatggctttcaccctcttccagagatgtagccgtcctctttgagtaccaagaactaatagagaaggagcatactacttattagaaaaaggtgtaagagagctcttcccattgcatctggaagaggtagcctttttgactggggaagattcaagcgtagtatcaatcaaagtagcatatagtagatggggaaagacataacaaaccattgctgaagaactgtgacatacaagcatactcataggcaaaattgattgatcagatgacactaagaacaatttagataatacagagaccaatacatgttcttaagtgagtaaaagtttgagtatctaaagctttagtgaacagatctgctaattgattcgttgtgggcacatgagatattgacagcatatttgactcaactagttctcggataaagtggtacctgatgtcgatgtgttttagccgagagtgctgcacagggttcttagagatgtttatggcccttgtattgtc

SEQ ID NO: 292939 - DNA, 652 bp, Cannabis indica
aagcaacgaccaggcgagccactccgggcatacatcagcagattcatgacggaggcgaccaaagtttcacgggtaactgaggatggaaagttatccgtaatactggggggcatccaagtcctcagtgaactctggaaggatataaggaagaacaggccagtagactcaatgagtgatttccttgaccgagccgaaggcttcatcaagctcgaagaagctattcaacaagcagaaggtgaacaaaagcctggcaagtcaaaggctccttccactggaacattgtccaacttccccaatacccaaacaattcaaccttaggtggtaagcactccagtaacaaccacaagcaagggaatgggaagaaaggaaagtttactggcaaatccgaatagctccccgggagaatcatgccaaatacactgcattcactattctgactgaagatatagaaagtgtatacatggcaactcagtcgctagccccgtataagaagcccagacccatgaagaaagatgccaacaaaagggacatgacaaagttttatcggtgccacggagactacggccacgacactaatgaatgctacaacttgaagcgggaaattgaattcctaataaggaaaaacaaaccgcacttgcaaaagtatgttaag

SEQ ID NO: 292940 - DNA, 615 bp, Cannabis indica
tgtatgattgcaattttttctgatatggttgaacattttttggaaatctttatggatgatttttctatttatggatcttcttttgatgaatgtttacaccacctgtctcttgtcttgattcgttgtaaagaaaagaatttagtgctaaattgggaaaaatgtcattttatggtaaaacgtggaattgtcttaggacatgtgatttcatctgagggaatagaagttgacaaagctaaagttgatcttatttcaaaacttccaccacctaaaactgtgaaagaaattagatcattcttaggtcacgccggtttctaccggagattcataaaagactttagcaaaatttcacggcctctgtgccatttacttggaaaagataatgcatttgtttttgatcatgattgtcatattgcttttgagaaattgaaaactatgctaactactgcacccattattcaacctcctgattggaaccttccttttgaaataatgtgtgatgcttctgattatgctataggagctgtcttagggcaaagaattgataaaataccacatgttatttcctactctagcaaaactctaaatgatgctcaattaaattattccacaactgag

SEQ ID NO: 292941 - DNA, 618 bp, Cannabis indica
aatgtctcttgattaaagctcatcatttaaaatgtatttttatttaatcatttattttattctatattttaataatgaaaattataaattaaagttggtccaaaaaaaaattccaactttaattaaaattttcaattatttaattttcaaaaactatataaaatataagattcgaaattaaataaataattaaaatacaataaaataaaatttgaaaagtatctaatttaagttgttctagaaaaactaaatttcaaacttaaattattttcaaacaaaatttaattaaataacaaattaagttgtaaccacctaatttgaaaaatattccattttaagttgatccaaaattttaacaaattttcaacttaaaaaaaatatcctaagaatcttcaataactaattcctagaattcctcaacttaattttgaaattcaaaagacattcaaatttaagtggataaaaaaaataagttagaaataactaatttacaacttaaataggaatatttaatgaaatattaaaaaaaaataagcttcagaagaaaactagttagttataactctatatttaattaaatataagaaaaatacatatagtttatcttgaattaatttc

SEQ ID NO: 292942 - DNA, 679 bp, Cannabis indica
tggagagcattgtgaagatggtgaggtgttcatgggaaagtctgcaacagaagcattggtcacaaatgaagtgccttagaagaatgagtggatcattgattcaggatgtaacttcaacatggaaaacaataaaacttggataagagacctgagagtccaaaaatatggccaagtgatatttcgcaatggctaaattaacttgtccaattgaaggaattacaaatgccatgttcagaatgaatatgatgggcaatgcaagaaacaacgtgccagaacttgcaagaaatttgatctgcgacggaaagtattgagttagctcattcccttagccaactttgccacatgttcatgccaccgtaatagatttcatttttagtgtgttagccgtggtagtaactgttttattctttttttttccccctattgggtttttttgttaatgttagttagttggtattactagctatatatatatatatattaatattttgaggattcatgttagttagagatgtgagttgtaatctaaagagattaaagagatacacagagagaaagagatttatgttgtagagagagtagttctctgagctgtgttcagagaagaagatcgataagccactgatgaggcatgctcttagtcagtaaacactagattggtttcatagtagatgaactg

SEQ ID NO: 292943 - DNA, 566 bp, Cannabis indica
aaatggaatagccattccaccaaaatggtggaaagagcattccattggaatgctattctaatactttaaaatgcaaccgaacaaataaatggaataaaaattatttcatttccattccattccatttcattacctccaaccaaacgccaccttagtcttgtggagagaaattcccatagttaacatacgatgggacgtgttaatatttgtcaaaataaaagtaaggtatcttagtttaaaactcttaaaataaacagcttataatttgtaacgcctgtatttttaaatttactaaactcaaaagataactttaatatattatatctttataattatatgggtcgggatttcgagtttcaaacacggtacaaaagtatttttacgaatacattatctactagtaatatatattattttctttaaaacaacaggcaactaaattatatttcaaaatgttgaaagaccgagaccctccaggttgcactgccgcgatatgtacaatcactcccaagctccatctcactgttcctccggcttagcttttcctttacctacacaaggtagca

SEQ ID NO: 292944 - DNA, 362 bp, Cannabis indica
ttaattccttattgaatccacacttagaacttggaattgcactctcagtcatataaaacgctctatatgttccacgatatagacacgctattaattatccattgttataatcctaatttaatcaatgaccctttaatagatgatctacattgaatagggactaaattaccgttacaccttcaatgtattttatccttaaaacacttagctccgtataaaagatatttcagcaaagtgaaatgagatctcaaccatttatctctgtttagccaagctcgaagaatatcatcgtttcacttctaaattcctgtagaagttatagattccatatctatgttaccgctcccactcaattatactat

SEQ ID NO: 292945 - DNA, 921 bp, Cannabis indica
ctgggtctggttttcggtttgagtttgggtctgggtcttggtttgggtctgggtttaggtcaggttttgctacgggtttgggttctggtctaggtcttcggtcacgggtctagggttccaggttctgggacgcaggtcctagcgcaagtgtcagttcgggtttgggtttgggtcttggtatcgatcctagtttgggtccgggttcatgttcagttctgcatctagatccgattttcggtccaggtccaattctaattctaaggtcctcattctgattcttgtttcgatttcgggtcccaagtccgagtctcgtcttggtacgattccaaggtcgagaaactgactatgggttgggtccaagccccgggtcgtggtcaagattcggatcccaatcttgggtcccggtctcgtttcgattcggatactgggtcctagtccgtgtctgtgtctgtgtccgggtccgggtccgggttcgggtcgaggattgaaacctaggtcgggtcttgggtcccaatcccactcctgggtcccgatttttgttctaatttcaagtttggttccccaatctaggtctgggactttggtccaagtctgagtcttcaatcccggtccgggttgtgcgtctgagtttgggtgcaagtccgtgtctgggttcgggttcttgtcttgagttccgaagtgagttttaatttggctccgtgtcccagtctgggtcttggtcttggtcctagtcagattctagttccgggaaggagactgggtcctagtccctcggtcttgttcccaggtcccgatacgcttacagtttcgaatccattttcgggtcacggggtacgggtttaggtccgagtctgggtctaggttgaggtttaggtctgagtctgggtctgggttcgggtttaggtctgagtctgggtctgg

SEQ ID NO: 292946 - DNA, 921 bp, Cannabis indica
tttgttgtggcattcatgaatatttaatctataggtaatttaataaaagagttataagaagactaagagcacgtctatagttgaacctcataatgcgaaaccaatgttttatactaattatactcttttttggcttattaattatttaaattatctcaatattttaattacctacaatgtacatcattgcacacaaaaagaaaaaaaaaaaactatttatatacctaaaacaggagtgtgccataaaatctcataaacaatatgtataatgttaatttttgtaaaaaaattattgtatttatacattattttttataacacatccattttatttttgggtaaactataatatatgactgaacaattttatttaatctgtcaaatattataatgtggcaattatttagtgtcggtaatagtttagaaattacgattttattggacaaatattcaagagagaaaaaaaataaacaactattaccattataatataatttaagttataacaaaactataaagttcaccatgcattttttttctgaatacaagttcaccatgaattttagtggtagtaaaatcacttttctttttttttttaattagaatagtaaaattactttaaataataaaaatagggattgtagcctcaagcataaaatatatatatattttaaaaaaattaagaaaaatattaaaaataatataatttttttaaattattacgcgattctcaattgttataaaaacaagcgcgaagcacggtaatatttcctagtactattagaatagggaagtgtatggttaaggtagttgaataggtgagtgcatgtatgctaatgtgcatgagatttcatttttaaaatcaatcggcaatgagaggagtagcacattcatcttatatatattctatttatacttttt

SEQ ID NO: 292947 - DNA, 683 bp, Cannabis indica
ttgagcaaaagaaaagaacttttccatcttcgggaagttcagggcaaagtaaaaggtttcgaggaaaccagaacaaaggaggacgtcagacttattcctatcctgagtgcccacgttgcaagaagcatcaccccgggacttgtaaccggagagcctgtttccagtgtggttcagtgggacaccttaagaaagactgtcctcagttgaagaaagaagaaacaaagcctgaagctaaacctgcgcctgcccctgctcgtgtttttgctataactcaggctgatgctgctgccagcccttcagtagttacaggtcagcttctaatcaacggttttgcttatactgttttatttgattcgggtgctactcgatcttatgtgtcatcaagagttcttgatcagcttgatagacctagtgatatttttgagacggggtttggaaccctgttgcctaatggtgagttaattgtttcaagaaagtgggttaggtcagtgttaattagaattgaagatagagaattgagtgctgatcttgtggagttaccattggccgaattcgatattatactcggtatggactttttgtccaaatactctgctagtattgattgtaaacagaaaatggtaacttttgaaccggagaatgaggaaccttttattttgttggttcggtccaaggttctcgtg

SEQ ID NO: 292948 - DNA, 1060 bp, Cannabis indica
aattttttcatttttttttattttttttattctaatttattaaattagagatcactaattaattacaattttttaataaaaaaaaaaaaaaaaaactatacatttacatataataattaatgaagaaatatatatgtattcaaaataataatctacatacgggattttttcgggttaatattaccttaaataaacatttatacttccataagcaaaaataaacatttatgttgtttattaatttcaaatatactattttcaaagtttcttatttacaaaaatacagtagaaaaactcccccaaatgcccaaggagatgtgtgatacacatgtggctatgtgggggagtgagactcacacacgagtgagggacaaagcattcagacttgcctgactctcacaaactgtagcgtcagaacgcagcagtagttgctacgtggcgaatttggacaaagtgaattttaacgtataaggcttattttctcagcgcaaaacaactaaacaacaacacaaaaacaactagaaaataacttaaccatagaatataaatcaattaaagtttattatattatgcaaacaaaaataaatttataagacaaaaaacttcaaaaaaatagaaataacttaatagcaacgaataaacaacacaataacaattttattttaatataaatattaattgagcatcaacacttacgtcaacttaaaaaataaaataaaaatagcacacaaataaaaaaatatatatacatttattttcttagttaaacaactaaataacaacaaaaaaaaaaaccggcataaactccattacactatgtaaattacataggcatgaaaataaactactaaaaaactaaaaaaacaaccaactaatgtaataaaataaaataaaacaatgaaatatatatatatattctattttatttgttgtaataactaaataacaacaaataaacaaactgtataacaaattaactaatgatatgcaattaaataaggcatgaaacaacttcataatacatcagatcaacgaaaaaaataaacacaaataatactat

SEQ ID NO: 292949 - DNA, 681 bp, Cannabis indica
tccaagtccaagtcctagttccagtgccgaccaacctccagttttggttccaatttgtggttacagggtacgggttcgggtcctattttgggttagggcttcggttcaggtctgggtgtggattcgggtccttgttagggttcgggtccaaggctgggttttaaatccaaacaccgactacaggtttgtccaagccctcggtcctgatccaggtcccaatctcgggtcccagtctggttccatttctggtgcagggtcacgatctgggtcctaggttcaagtttgggtcttggtcgggtactacgtcccggtcctagttctgtttcccaggtccctatccttattctgagtcaaagtcccggttattgtgtgggtttaggtcacggtctaggttcgggttcgagtgctagtctcggttcgggtttaggtctttgtctgggttttcatctgggttcgggtttgggtttaggtcctggtcctagtcctagttcgattttagttccatttgtgattctgagttcgagtttgggtttaagtttgagtcggagtttgagtcctggtctgaatttgggttcgggtcctgatttcaaactaggtcaagatcaggctccgggtgtgggttcgcttcctgggtctttgtctaggttgggtccgagtcccaagttccaatcccgatctgag

SEQ ID NO: 292950 - DNA, 670 bp, Cannabis indica
atatccagtattggtttttgtttgtatatatattttatatacattttcttttcatttacgtatatatattcatatttatatatatacttttatattaatatttcataatctatatgttcatatatatatgcacattcatatttatattcatatactgtgtgtatacatataattttcatgtatatatgtttatgtataatactcaatgctttcatatttttgttgcataaaattgtatgtaatactctctttcatacattaatgatgattttatgcagtatatatacattgtatacgagtatatatatacatgaaagttttatttttcggtctataatttttccgttttcattttcggtatttattttaaatcctctattcattactatattcatataatattttagatcgattttatgaatgaaaaggatttaaaacccatctgaaaactgaaaaaattctcttaagaacacgatcggacccgaaagaattttttatgaaattaaagtctacattttacgtgttttcgatgcttgaaatcaatatggatctcttaatttattcatttagatcattttggaattggtttcatgaattttggtcatcggtgttgtttttcatggcagtttttcaaaaaaaaaaaggaaattaagaaaaatttaagaaaatt

SEQ ID NO: 292951 - DNA, 732 bp, Cannabis indica
aagcaaactcctcgaccaatctcaggtaatttatctcttgttataaactaataggtagagtttgacttatacttatctttcatttatcttcgcagatatgacttttttgaagtccgcacctgtcctgaagatcaagccgaagggtggagcaacgacgacttcgcccgttgtcgcccaaaagaggaagagcgatgcgatggctacccttgccacagactcttccaagaagctggccaagaccgcacaggacaaggggaagaaagtcgtaatcgatccacctgttcgagctcgcgacttcctagccatgcaagagaagttcctggccgagatcccttatgaggatcttgttacgcgctctgctgagctggccgcgcagtcgatgactctgttcataaaagctgctgctactccttcgaaggaagccgactcgctgaagaggcaaaatgcccagtttcaggagaacataaaaaggctgaagcaagaagtggctaggaaggagaaggagctcgaagaactcagcaaggctaaggagcaggcggagcttgaggtcaagaaatcgcaggcgacgatcgaggagatgacccgcgatttggagactgagagagagaatgggaagaagcagtatgatcaggcagtgtctgattatatttataccactcttttccaaaagtttccagactttcgattttctctctcctcggagcagaagccgctgagatggccgaggctttt

SEQ ID NO: 292952 - DNA, 494 bp, Cannabis indica
tagaacgctctatatattccaccatatagatacgctattaattatccattgctataatcctaatttgatcaatgaccctctatagatgatttacattgaatagggatccaaattaccgtaacacctttcaatgtattttatccttaaaacacttagctccgtataaatgatatttcagctaagtgaaatgagtactcaaccatttatctctgtttagctaagctcgaaggaaatcatcatttcactttctatttgccagatagaagctatagactccatctttatgtttagcgctcccactcaattgcactaccatgttcccaaaaagtacgtatcaccctgacccgaaagtaggcttaactaacaaattaaggaacatgtgtaatacttttgagattgaacctaaacatatcaggattaagatcatttgatctaggatcaactaggtgatattgaattgacagatattacggtaagtttaatatatctgaatc

SEQ ID NO: 292953 - DNA, 620 bp, Cannabis indica
ttctcagagtcatgccgctcctccggaacagcaacaacaacctccttcgcaaccacaatttcagccttcctcgcaacaacaattccaaaatttgtcacagcagcaatttgaaattttttgcagcagcaaccccaatcttttcctcagcagtttcctcagcagcaacaacagtctgctccgccaatgggaaatcagttcttataccgaacaccgtcagagtctcctccgctcggctcaaactttgctgattttggattatttgggagttcatcgcaggagaaccaatttttttcaactcccattttcaaccaagctgagctcggtaatttgacgctgggtttatcatcagaccaagcgtatgtgccttctccgccacgggcttcggggactcgtaccgaaaataatccagatcaagacttcataattagagacttgaatgaagatgttaatgaataatttatttatgttttgtaataatttagtttaattttgagacaatattttattaggattaatatgttaaagttaattactttggagacaattttaaattattaataaattttattaaattgttttaattatattaattagatttatttattaaatatttaattaaa

SEQ ID NO: 292954 - DNA, 557 bp, Cannabis indica
gatcaagaaaaacaacccgcacttacagaagtacgtcaaggccaaccaaggtcaaaataaccaggatctgatgcctccgccaatagatggacacttgcaagtcatcattggaggcccgcacatcgctggagacacgggcaaagctcgagaacgatatgcccgcacagctcaatacgagcaagaagaagtcatcctggccgtggaagaaaggaagcccaaagctccacgcgcaggagagccaaccataacattcaacgacgaagatgctgtccagataagatttctgcacaatgacccgctagtcgtggaagtccagatagcaaacaaaatgatgtccaggaccatgatcgataatggcgcttcttcaaatatcttgtttaagactgcttacgagaagatggggctccagcttgttaggttatatttagcgtctatttcgggtctttaaagttagcattttctcgtctattggtgtcttttggagtagttttacgcttgatttttgttgtttcaggttaccgggatgttaaagttcaaatttagtcaaatggtgaaaa

SEQ ID NO: 292955 - DNA, 892 bp, Cannabis indica
gatgcagcttgttcacagggagatttattttggcaaactggttttatttgtggatgcatccttcaaggacatgcgtgttgctgctgggattgtggtgtttgaatcagaagatctcgtatccgaggccctggttgtgaactttgaggcacatcttctaataactttatatattctttatttatatatttaatataatttttatatacttttaataaaaaattaatacttttgttaatttttttatacacttctaataaaagaaagttaattttattcttagtgtattgaagtacaattataaattttgagtcaaatataacattgatttattttttgtaactaaatttagtacaaatttacaccatccattgcaataaggacagagtcatgtattatgttgcaatgcttgacagaaacaacattaccactattacagaaatgtcaatgaatagtacattaccatactaagacacaagaggggtttcatttattagagcagaacacacacgagtacaactagattccacctctacatccttgaacctcgatcagccgtgagcaaagaaacaacccttgaagaacagcaaaatctgcggccacttggatcaccaatccaatgccgctcgcaattcacacgtcattgtcaacgtttagttttaagacaatataaaattttatctcaaaattaattggtaatgagtaaaatatacctcgtgcatcttatatataatataatgttcccacacatcaatatcaatcaatcaatcaatatatatataaaggaaggttttgaagagttgaggtggtttcatctccttctattttcttactttctctaatttatagttttcttcatttttaatttttaaactattttctaattatttatctt

SEQ ID NO: 292956 - DNA, 649 bp, Cannabis indica
gggtgctgagttggccaaatgtataattggttcaaccaggctttacacttggaagtaaccatataagctagctcatatagatattagtcttaatttccacttgcgtcaccaatgaatagagcataggatataatagtataggtatataatgtaataattttttggagtatatcaatgattgattatttggtggtcgattgccattgtaccatatggataagatcaatgtatctataaataaaggatttgatgtatgatgcataatatataattattgtagcaaaacactataccaatatggaaatatgaatctcaccaaccacatcaaatccatactgaatattaggatatatatatatatatgttataggttataaacacacaataccaactaaaatataggcaggaacaaaaaaataaaaaagaataaacatagctgaaactaaaatattagagcaaaaaattagaaggttatggaaaattctatctcttttgagtgtgttttatgtatgaaaatatgatagtgtgagtgtcctttcatcccttgtctttggtttgattgtgagtagtgaatttgttactgacagtttctaagattggttgtattgtgagtagtgaatttgttactgacagtttctaagattgttgt

SEQ ID NO: 292957 - DNA, 529 bp, Cannabis indica
tcaccttctcttgaaataattatgttcttttttccattgtccattgctctttatgagaactgatatagatttcatgtcctgtcattttttacaatatttcatttatgtggcctttttttcatattaaaacaatagtaaaataacactacaaaacagtaatttgttgttgatttagtaattttttctctttgccagattttatggttttttcctggtgtttctatgattctggtgttgatttgtccgtccccaaccacgaaggaggtgccgtttgtgctttgttactgttaacagtataaaagtaaatattttaggtctggacagtatgaaagaaataaaaaaaggcttggacagtaaaaatagaaagtttgccgtgtcccagtattattgaaaacatttgggaaaaaaacaatatttttgtaagtttccatatgtaaataaataaatgatacatattttaagcccaaaataggaaaagaaaaaaaaaaatacaaaatgggatttagcaataacatgtgtcacttaaaaa

SEQ ID NO: 292958 - DNA, 702 bp, Cannabis indica
tgcgccggtaaaacatagcaatgccggcgtagtcaagttaaatgcgccggtaaaacgtaacaccattaggcgcgagaatttgccgcctttgatttcatttttggggcgcgctttccaacttttaccggcgcatatatgcgccggcaaaaggctgaaaaaagttggagggaaaattcccgcgtgggttttatttggtaggtggggacacttttaccggcgcaattatgcgccggcaaaagtgttagtgaaacgcgcgtttcactcctaggtcaaagtaatttttttaaaacacttttaccggcgcaattggatgcgccggtaaaagtagtcatatgtatcaggaggcacgaagccccctttcttccccattttcattttcagaaaaaacccagcccccatacaaactctctctggttctctctctctcgttctctctcatttctctctcaatctctatcaaactctctcaatctctctaaatttatctcaaattctctctttcccactcaatctctcttttttcatctatttttttccccaaaaaaaatagtccgaccaccactccgtcctcaccaccgccggctgcaccaccgcaccgccgccgtccacaccaccgcacccccctaacgccggctgcaaggtatttttttaattttaatgtattgtttaaaaattaaaatttttatatatgtgtatgtgtat

SEQ ID NO: 292959 - DNA, 590 bp, Cannabis indica
agaatggcaatatatttgttatcccaaattttgcactctgacgtggcatcacaggatggtgacacgtggaatcgactccaagtatctgctcacaaaatatagtccgagcaggatactgcatatgcatgctcgaagcaaagcaatcagcaatccgcacagagcgaccaacacttagcgaattcagcttttgcatcgtgagtcatcaaagaaatacctataacttggggatcagattgtagagatatggcacgctgtccaaatcccacgatcagtgtattctgtatttactatgcaatctttctacttatatccattgtaacgagaagggaaatacttcctctccaagctcatagccctataaatagtgatgcatgttcaatgggcaaaggctcgaaagattttacttaagagatattatctaagaatccatattcagagatattattgtaagagctgtaagaaaaggaatctttctccttgttcttgagttaatgcaaataacaagaattaggctattaccgaactgttcgaggctgaacctctataaaattcctgtgtctttatatggctttatcatatttcaatcgtta

SEQ ID NO: 292960 - DNA, 569 bp, Cannabis indica
tgtaatgaccgctctagtaatgtggattagaaaaggcaattagcgctaatttttattattttattattatttatgaatttagttattttagatcccaatatttagaaataaatattagagttgtaatttctcaatttcggagattttattaaactctaggggtattgtttgattaatatgtaaaatatgcaatttttgtaatttttgctcggcgacaacggaaaatgcgatggatggcaagattaatcacatgagtaagtttagaaccctatttcatagtggggaatattttagagaaaataaaattatcggggttgagcggggttatggaatttgaccattttacccctagttttgagaaatacctatgttataacttggagggcatttaagtcatttcttttagttaaagataggtggctgccctaggttgtgacacttggctagtttaatttcagcaaaggaactaatttcctaagccttaagcaattaagaaaaatcaaaggaaatagaaagttctctctttccttccctctctctcttcgaacccagccaagaacaagagggtt

SEQ ID NO: 292961 - DNA, 592 bp, Cannabis indica
atattaataaaaaatattagtaacaaaatcaggaccactcatcaatataaaagaacaataatatccccacagttatgtaatcaccaaatagatagatttaataagtcaataaaataccaaaataatacctagcatccatcattcctcatttctaactagtacatagctaatttaagtcatctagaccagcccatccatttttgtttgattacaaatcagtttcattgaaagatttaagagtagaataagactaaactaataacgacttcgtttcccaacagtaccatcctcatccaatagcatcaaactgagttcttggaatgggagaaaatagggggtgagcttataaagcccagtaggaaaataactaatatcaaaagacccttggtttcataaaattcctgcatggttaactttgtaaaagtaaaatatctcatcactagtatcaaaatgtataaacaaagtagagagaccacaaagaatcacaaaatcaagcatcaaatgcataccatcaagtcaaataatcaagttgagtccctacctctcacatataccatcaaatggttaaataattatcatcatcgcattctac

SEQ ID NO: 292962 - DNA, 555 bp, Cannabis indica
attaagaccacgtttgtcttgtttaaaccatgtggcattgcttcctttctaaagaactcccttaccgtatgtactacatcccctccaactatattccaaaatttttgataaaatgccggattcatcccatcaggtcccggggatttgtcaggatgcatttggaacacagccgctttaacttcctcatccataattggttgtaacaacactctattatgattctctttgacaacatgtggtacacaagacaaaatttctctccaatcaacaactgaagcctgaaacaacccttggaaataatcaaaaatgacactattcaacccactttcccaatccacaaagactccattctcatttttcagacgcacaatctgattatttctacgtctagcactagctctagcatgaaaaaacttactattttgatcgccatctttgagccatagttgcttagaccgctgcttccaatagacctctttttgatgaagcttcaaacaacttcttcttagtttcactatactgttgcaacccgtcctcatcacttcttcccttaag

SEQ ID NO: 292963 - DNA, 502 bp, Cannabis indica
tgactcttagtgagagtggatttggccttgagaatggatgcaccgcctcaacctgctgatgatgtcactgaaaaggcaaagaagtcctatgaggattgggagcattccaatcgttgttgtttgatgcttatgaggtatcacattgatgaatccattcgtgatagtattcctcagattgaaaatgctaaaggatttcctggctgccattaaggaaaagtacaaatagttacttatagaatgagaaaaatgagtgcttgattttgttccatcgcactaattatgctgatatgagtgatattagagcccacattgacaagctcatgggttgttaccaaaagctcagaggtatgggattggatcttggtgaggattacatggtgtaatttgtgatggaagctattccttctcaatttgattcaatcatatcaagctacaatgctcaaaaggagcaatggaccattgaggacatgactgctattctttccaaagaagaagaggacat

SEQ ID NO: 292964 - DNA, 1227 bp, Cannabis indica
taataaattgtaaaaattattaagataattctttaacgaaatatttcaatagtagtcttttcactttttttttatttgtatgaaatttttttggggtgaatactattttagactctgtattttgtaaaagttgtcaactggacccactgtgttttgttaaatgacaaaatagaccctatatttttcaaaatggtaaaaataaaactctgagcttaatttttaataattttatttttaatataaccaactctaagacaatttctaaaacgagcagatatagaaaatgtaaccagttttatcataacatctctagatcagattattattattaagttttattttgacaaaaaatctgttcagggtcctatttgtacaattttaaaaaatatatgattcattttatcatttaacaaaatagaaggtctaattagtaacttttgtaaaacacggagtccaaaatgatatttacccaaatttttatctcaatttttcattgtaatttggaaatcttggtaaatcatattttatttttgccactttttttttttcctttcttaccaaacaacttcattttttttatttttattttttcatcttttttctcccctatattatttcttactcacttttttttctccttacctccttacctgtaaaaacccaaaggccaaagcagcctaatcttataatgaagctatgattgagataagtcttaaattgagtgcttattaggtaagtgagaatagtaccaccttattttagatgaaaaattgcctctcacaaatatattttttgatgtaaaacaaggaaagtgagttttattgatttatttgaaaatttgagtaaaaaacttatgagtgctcttatattcttagtatgattttgtatacttttattgccattactttaccaaaatatttttgctataaatatttatcgaatagtacatgttctataaatattggtaactaattcatccttgtactttggttctctttcaatctcactaacaatcacattatattattccttacaaaaataaaataaaataaaaataatgagttaatgtaaaactaagatgaataatagtatgatttatatttttatttctataattttacttaaattggatcacctcaacagtaactatttgtattaatatgttaaaaatttctggattagtcatcttttagtaatttttggaaagatcccaatttaaaattcatc

SEQ ID NO: 292965 - DNA, 347 bp, Cannabis indica
ggtctggctacacgactgtgtctgggcctgagttctagtctcagtttgggtttgaggctaggtctgtgcttagttctaggtctgggtccgggtgcaggtcacggtcctagtcttgttctacgctcctgattcggcgattcttgttcaggttctaattttaggtcccaggtctacgtctaggttcgggtttggttcttcgtctaggttctggtcctagtctgagtcccagatctagacaccgactactggtctattccatgccccgttacccgaatcccgagtcaagatctggatcactttcacgaatcttggtctgcttctggttcaggtccaaggtcccatttttg

SEQ ID NO: 292966 - DNA, 541 bp, Cannabis indica
atgaaatatgacatgttaagaccccgtaagtgagctaggggcattttagtaattttgacccgagaagggtaaaatagtgaaattaatttattttacgtgcttatgatttatattattaaatagtatgcttgtgttgtcccttttgcaggtgtgttctgacaagttggcgcagtatagtcacaaccgggtatttcggggccaaaatacaattttgggtttaattattggtattttatttatgtgggaataatctaaaaattatttgagtttatttgtgtgtgcaagtggctattttacccttaaagtgcttatgtgggtgttttgatggccttaagggcaattaagtaattttgccattttggagtaaggttcataaaaggggttttaagcaaaataaaaatttatttttctgcattttttttcccagccctttggctgaacccctttcctctgaaaaactcattctaactcttgattttgggttgtgcttgcttggattcaagcttggggtttgtagcttttgtgattgagattgaaaaga

SEQ ID NO: 292967 - DNA, 655 bp, Cannabis indica
aggatagggacctgggaaacagaactacgacaaagacgtagacctgacccagacccgaacttgaacctaggacccagctcgtgacccggcaccagaaatggaaccacactaggacccgagattgggttccggatcttgatcccgggcttggacaaaacccgtagtcaatgtctgtatttgggacgcagccctggaccggaaccctaacgaggacccgaaaccacacccggacctaaacccagtcccaaacccaaaagtggacctgaacccgtaccgtgtgacccaaaattggaaccaaaaccggaagttgaccgggactggaactaggacttgcacttggaatcataactgaaattggacttagatccagaaccgtaaccagaacataacccggaccactgtctcgatcccaaacccaaactcaaaaatgggacctgggacgtgaacctgaaccagaccgagacccgtgacagtgatccgcatatttggattcgggtaacgaggcctggaacagactagtagtcggtgtctagatctggtacttagattaggaccaaaaccaagacgaaaaaccaaacccgaacctagacgtagacctgggaccaaaaattagaaactgaacaagaatcgccgaacacggaccctagaacaagac

SEQ ID NO: 292968 - DNA, 539 bp, Cannabis indica
ctattgtaatggttgaatcttcttattaataaagttaccatttttacttacaaaaaaaaaaaactatatttttaatatatatacattcataacagagaggacataagtgaaactaaattttttgaatggacaataaagctatattaaaacttattacaaagaagtgagaaaaaattaccttgaaagccaagaaaagttgtttcagtccttttccttccttaaaggtttaacctttgagctgattccttttttttttatcagaagggagttaggagaagaaagaagagggcttcactgttaaagtaaagaaaaggagaagaaagaagaatagggaaaggacaggagaagaaagaagaaaaagaaatgtgggaagagtgtagacttagacgtataggttctataaagtaactatatttttaatatatatatatatatatatatataaattcataacaaagttgacatcagtaaaactatattttttttgataggataataaaactatattaaaaaattattacaaagaagagagaaaagat

SEQ ID NO: 292969 - DNA, 581 bp, Cannabis indica
tattttctagtatttaattaaataaagaattttaactaactagattctttctgaaacttactttaattatttcattaaatattcctatttaagttataaattagttatttctaactaattttccttattaacttaaatttgaatatcttttgaatttaatattattttgaggaattctaggaattggttattgaagattcttaagatattttttaagttgattttaaacttaaaatggaatattcttaaattaagtagttaccacttaattttgatatttaattaaatttcatttggaaactttttaagttggttattatagattctttctataacaacttaaattagatattttccaaatcttgaaaagatacttagttaaattgagatattttctagatagttatttctatactaattattatttctaatattaaaataggaaaatatcattgattgtgaaattaattgtttaataattaattttggtacaattcaagttaagagtatttttcctagtattaaattagaaattaataattaagccttctctatacttaattatttatttcttgaattta

SEQ ID NO: 292970 - DNA, 517 bp, Cannabis indica
tacaagaatttgatttagagatacgtgataaaaaaggttctgaaaatgttgtagctgatcatttgtctagaattgttgttgaaactaatcatgattccaccactatcattgaaacttttcctgatgaacaactcatgcatgtatcttcttttccttggtatgctgatattgtcaattatttggtcactggtgaaattccttctcattggtctaaacaagataaatctaaattttatgctgaagtgaaaaatttcatgtgggatgatccttatttgtttaaatattgccctgatcaaataataagaagatgcattccaaactgtgatcaacctaaaatcatatctttttgtcatgatcatgcatgtggtggacattttagtggtaagaaaactgctttgaaaattttacaatgtggattttattggcctactatttttcatgacacttatatgcattgtaaatcttgtgagcgttgccaaaaattaggaagtgtaactaggagaaacatgatgccttt

SEQ ID NO: 292971 - DNA, 605 bp, Cannabis indica
taggatttaccaagtaaattctctaacttattaattcctccttgcaccactatatatttggaattgcactctcaattatataaaacgctctatatgttccacgatatagatacgctatgagattatccattttctattatctcaataattaatgatcctctatagatgatttacattgagtagggattagtttaccgttacacccttcaatgtatcttatccttaaaatacttagctacctataaatgatattccagtgaagtaatataatcattgaaatgagtactcaatcatttatcattgttaagctaagctcaaaggaaatcatcgtttgacttctatatccaaatggaagctatagattccgtatctatgattagcgctcccactcaattgaactaccgtgtccttaacttatatgtcacgggaaaaatcatttggtcgactttaacgaacagatttaagaacacaaataatgcaactgaaattaaaacctaactatctcaggattgagatcacttgatctaggatcaactaggtaatattgaattgtatagatattacggtaagtttatcatatctagttcaatatcggtcccttttaa

SEQ ID NO: 292972 - DNA, 506 bp, Cannabis indica
agttataaaatatttttattaacccaatataaatatcgagttgcaaatatttaatcgtaacccgcccaataaaaattttagaaaaatttcaacccgccccaatgattttgtttgtttggtcgggttaacccgtccaaactgttctttttatatatatatatataattgtttattgtttagtttctagaatttaagtaattaaatttaaaaaataaaaatatattatttatatttcaagttaaaaatgttatagtttaaattaattttaaaactttaatataagataaatataattaagtaaacataaaataataaaaacaagtgataatatggtatagattttaaactttaacttcaatatccaaatacactaaaacttattaactataaaatctaagttttaagttaaaaattaaatgcccaaattttaaatacaaaatagtttaactaataaatgtaatttatataatataagataaaaatatataaatcggtttaattcggtt

SEQ ID NO: 292973 - DNA, 532 bp, Cannabis indica
ctacgaagtcagaatctccataccctttttaaatcataaagcccctatataaaaccaatcgtttttaaacttaaaacgaaattaaaccataccttaagctttcccttttcaaggatttgctatcttgctactaccggagcttagatcgctaagtgttggattgaaaatcgaaaaaaatggatatagagggagaaagttttatcgaaggagggagaacgagggtttcgttcgtcgttcgtcgttctgttcactgtaacttaatatatatataattaaagttaacgtattacgttaacttatatatataaataatataataataatataatatattaataataataatataataatattaataaaaactttattattaataatcatcttattatttcttagccactaagaaatctctatttttagggtatttggtcaacttcgagtaccctaaaataccccgatatttctaaaatcaacttatcccaataatctcatcaatatttctaactaaaactgttgtgacatttttggc

SEQ ID NO: 292974 - DNA, 592 bp, Cannabis indica
tggcttcgtcctgtccgattttggggacatggatgaagttaggaagatccttcaggatcttactgctgagaggcggctttatcaggaggctgctgagcgccgggaggccattgccaaggccaatgaggaagaggccaagcggagggaagcgcaggcggaggcaatgatccgggaggaggccctgcggagagataggctggaggccaggcaccaggaggagctgaggacggagggcgaagccactgcgaaggccaggcgggagcttcgggaggccagggaagccttggaggaaatggctgccaaggtgaggtccttagaggaaactcaccaggcaaacttggaatccagggccaccctggccgcggagctgaaggagctcagagacttcaaggaccaagcctcaaagaaggcaaaaagagatgagcttctttctcctgtctcctgcagccggtgcgccaagcgttttgatgatggcgtcttcatggcctggtctacaaatgaccagaacatcaagcttaccttctaccccaaacccgaagagatgattgcaaagttccgggagaagaagaaaaagcttgatgccatggtggag

SEQ ID NO: 292975 - DNA, 706 bp, Cannabis indica
ctcttagaacaactactggacctcaactccagttctacattggaaagacaagccagggaataggcgagcaaacaattggcgagcctcaccttgacctagaagaagaccttcagttagccaaactcaaaaaaattgtacgtcgtccaggcctaactgaagaaccacgcactgctaattgcgatgtattcgctcagtggagacgtaaattcttgagatggatggatgaccaggagtacatccttcgatctcaccaagcaaaattagatcgtccaaccaggaggccaatgatctaataagacggttcatcagagaactgacagaagaggccaagatctccttagagaaccacttcaaggaaactatcgccaagttcctcaggaactaggacagatcctcccctgccagagggaggacatgtaaagaccgcttagctttaatttggaaattagcagataattagggttaattatgaaaattagttattaattctaaattattaatttatgatgatttatttgaattcagaatgcattttatatgtcatatatagaaatttcatatttttgcatgttcagtgcccggcaacattggaacgcggtgtatggcttagtagaatcacatcttagtagtttagtatagagggacaatatagttagacattaggaatgtcgagaatagtcaggaatttagagtttcccaaataccc

SEQ ID NO: 292976 - DNA, 842 bp, Cannabis indica
tgcttgccaaatgagcactttcagtcttctcttgcttcaatctttcttcctcttgaacacaaaatgaaatgagctcattaagagtccacttctccctttggcagttgtaactgaccttaaattgactgaattgtggaggaagagagataagcactaaatgcacaagcaagtcatccgaaagctcaagctttagtgccttcaactttgaagcaaggtgagacatttccataatgtactcccttatgttttccttgcccttaaacttcatggaaataagtttctttaaaagagtacttgtttccgccttatcgctttttgcaaagcgcttctcaatttcagcaaggaaagttgtggcatcggtgacctcctcggacaccgcacccctaaaagcctcaggtatgccgcgcttaatgatcataagactcatgcggtttgaacggtcccacttctcataaatcctcctttgctcggaggtactggtatccgtaagagaagcaggacgatccatccttaatgcaaggtcaagatccatgcagccaagaacaataaaaatgttctccttccagtccttaaagttattaccattaaggaccggtaccgaattaaggttagcagatacactagcaacagctgaaaagaacaatacaattacataaataacatgctcatataagaatccaaataaaacaataaattcaaataatggttaatcccatctcaagataccaaacacaacattaatattaagtctttggacagtaatattaattgtaagcggtactcttgttgtagtgatcaaacattgacaataaattatgtcaaacaatatgcaatctttggac

SEQ ID NO: 292977 - DNA, 816 bp, Cannabis indica
acgtataggttaagaacatggtagttcaattgagtgggagcgctaatcatagatacggaatctatagcttctatccggacatagaagtgaaacgatgatttccttcgagcttggctaaatagagataaatgatagagcgctcattttagtgattatattagttcactgaaatatcatttataggttgctaagtgttttaaggataaaatacattgaagggtgtaacggtaattttatccctactcaatgtaaatcatctatagaggatcattgattattgggattataacaatggataactaatagcgtatctatatcgtggaacatatagagcgttctatataactgagagtgcaattccaaattctatagtggtgcaaggaggaattaataagttagagaatttacttggtaaattctagatctgcttattggaagctcggttatataggcccatggtccccatactagttgagacaaactgcttgtaagactcagttaattgattttagttaatcaattataattctaaaattagactatgtctagtttatgaattttcactatgttatggcttgattgtgaagaaataggattttagggttaatttattaattaagagactttgtggagtctaattaataaatattataaatgacaattttatttgataattaatttaattattaaataaatagttttggcatttatagggttgaaattgcaaaaagtggtatttgtgaaaaaatagataaatggttgagaaaaatggcaaaaaatctaactagtgttgggcccactaatggccggccacta

SEQ ID NO: 292978 - DNA, 455 bp, Cannabis indica
ttagaattacatataaaaataatatattattaatttattaataatataaaattaaattaaaatagaataaaattaaataatatatatgtatattggtttattaataattttataacttaaattaaaatatattagtttataattgataaatatatagttaattaaattgtattattaatataattattttttataaatttataatatataatctgaattttaaacaaataatattaattttttttatttataaaagcatattaacattaataaaaaataaaaaaaaaaaaaaaaaggaatatagtgacacttcatgtgtgtggctattacctttttagtctgacaaaatttgactctatacgcctatagtgacgcgcaaaaagtgaatgtaaaaaggttcagtgacacgtgtgaagtgtcactaaaaactgtctttccagtcaccctcattagtg

SEQ ID NO: 292979 - DNA, 789 bp, Cannabis indica
ttgttgaagatattagccatcgacaaatttgggacattaatgacaatgaagatgagacagatgttgatgttgttagtgattctaactcttcaaattttgtgttgacggttgatcttggagagttgattttgcaatcgaatgaacctccagtaattgttgaatcgtccgatcagttagtggattctgagatagagaataatgaacttgatgaaaattatgtagccgaagaagtagatgatttactagttgaacatgtagaggatgaaaatgagaacttggtgaatgatggaaatgatagtgattcgtcggtgtaattttaattttctaaatgtttgttactaaaactttttacaattaaatgactttttaatttctttcgtattaatatttgtgtcaactttgaattatgtgtttcacattttgtgaattttcacatttttattttatttttcatcttcaaagtaaagtacaatgtcagctactctagcgacataccacggtgggaatggtgatggcagggatccccctgatccttctagggtaccctcgtcctgcgaatcaggttttcatattttttcaaatctaacattgttcttaatataaatggtgaatgttcaatttactaataaaagtatttttctctcgaataaataaagttccacctccggtaagaaagggtcgtgggcttgcagcaacactaaccttgaagaaaaaaaggagagaagctggtaagcccttaacggtggaggtggatcttgaaactggcaaagttgttggcactgaagcaag

SEQ ID NO: 292980 - DNA, 633 bp, Cannabis indica
atagtttttaaatttaataattttcattatgtacacgttattatagttatttaagataagctgtaaatttttttaaaaaatttaaattattttcaatgctaaaaaaaaaattcaaacaattgtcattatttattaaaaactttaacaaatttgattatagattaccatcacttcaaatgtgtcgtaaatacaatggagttttgagagtcacctgtcttagtaacactttttgatcggacacaaaaatcatttcgtggctctttgaaaatgaagcaaaatatcttcttcttcttcttcgatcttcttcttcttttctgatgaatcagctgatgattgtattgcatttcaatatctttacaattcaagcacccatatcattatagatattttggccccgtttggctaaatttctattagctaaaagtataagataagtataaactttatcttatttttaccatttggataactattatatgaaaatatttttttttgactaaaaagtacttttccaaagtgtttggggtattatcaaaaatatcttttgtgagtaaattaagaattatataaattatttaatttttaaaatagcttctcaaaagtccttttcggagaaactacaaatcctgcctc

SEQ ID NO: 292981 - DNA, 479 bp, Cannabis indica
catttctatgtgggaaggaagagatgtagatttgggagggtggagttcggcttggtcaccgggttaaacttattgcccggccctactgaggaagacatcaaacaaaatggaagctctgaccggttgattcaggaatatttcaacggtagtgcttcgatcaccttcggccaactgcgcagagtttttgagagctgcacagaagctgatgatgtttacaagttggggatggccttgtttgttatgggcgtcctcactggtaaggaggagaagactgccgttcctccttttgtgataagaatggttgataaccttccattcttctacgagtatccctggggaaagatttcttacaccaagctgatggaaagttgtaacaaggattacttggatgtgaagaataagatgttgaaaaagattgagaagggagtaactcagaaggaggcaaaatactcagcctacggctatgctgcagcgttgca

SEQ ID NO: 292982 - DNA, 607 bp, Cannabis indica
gcttttgttattcataatgaatttcatcccttaattgataatcattgtgcaattgtgtttgtttttgtttttgtttttgttttttgccaaatgctttatacaggcataggtgccctccaagtgaccgagcagacttatgactcttagtcactttgtttttcacaagtattttgttttgtttggggttttgggtacgaccagaccttttgtactaactggatggtaaatatgtaacatgctaatgaactcaactcagtttgaatttaaataaacatctttaatcatttattggtcagcaatatgtctgttactgtagcaacttacatcaaagctattatgttgatctgatctgatctttagcttagcataaaaaaattgcagaaaataaaaatcgtactttcaaaggtggtcatccgacttgagtaattgataattttatcaaaacctttgggcgtgattcgtcccaaaaggccattcacttaagagtaaatgttattttatatcgtactttatatggtcatctgacctaggacgtttcaagtggtaggtattttcttaagtgttccctattccaataccttggtactagaacgagttgtcatctttt

SEQ ID NO: 292983 - DNA, 626 bp, Cannabis indica
aaccttcgcattgacccttcaggacgtgccttatttcccacataattcttcaattttttcatgtacctttcaaaaggatacatccatctcataaagaccgggccacccaatatcgcttcttcaggcaaatgcaataccaagtgtatcattatgtcaaaaaaagctggaggaaaaatcaattccatcttgcacaataacagaattaaattattttgagcatcctccatatcttttacatttagagttctagagcataactgtcgaaaaaaattacacagctgagtaatagttgttgcagtgtcacgaggtagaaatttacggacaccaaccgctagtactcgctgcataatgacatgacaatcgtgggattttaacccaataatgttagactcatctggagaaactttgctctttaaatttgaacagaagccatcgggaaactttattcctttaacaaactgacaaaaaagttgtcttttctcacgagtcaaaacataaggagcatgcggtttcattagcctcccattcccatcttcataaatccacaacgattccctaatacccatcttctttaaatcatggcgcgcattggttgtgtcctttgatttatcattatccaagatggt

SEQ ID NO: 292984 - DNA, 115 bp, Cannabis indica
tactaggtttaggttaggaattatttaggcattaaaataatgacaatattaatttgaaaaaactcttttctttacaatttaccccctgcttagtgaaaattcataaaattagaca

SEQ ID NO: 292985 - DNA, 757 bp, Cannabis indica
catgggttcaaatcccataacactcatcttttgatatttttttggaaaattttcatgggccaccttattttggaaattattttcaaaaataacgttatttttgttatgttaagtttccgtatatgtagttgacgtttttatggtaattttctattttttaacgatttgtatattgggcttgtaatcccggttttttcggcccaattttttaaaacacactctttgtacgtgtcacgtcattttgttttcattttaaaaaaaacgtcatttttgtaaaaagttacttaatttagtatattcttaaaaaaatccctattttttttaatataattttgaaggccccaaattttaatgggctattttcaaaaatatgggaaaatttattaaggttatgataaatatggcatacaaagtaagtgtcattaaatatggcattatctaaccaatcaaattaaaaatatggctttttttcaaaaaaaaccatataaaacattaaaaagaaatatgaatttaaaattcataaaaataaaaacttaattaaattactataaaaaaatattaaaattcccttcatatttattttttttaaaaaaataaaacaaataaaactatagtgattgccgaagttgtcacttgtgctggaaaaagtcaccggagtttactgctggagccggaaaagtcgtcagagtagccgcggtgccggaaaagtcaccggcgttgctgccggcgccgaaaagtcgtcagaattagcattgtc

SEQ ID NO: 292986 - DNA, 570 bp, Cannabis indica
ggaaatgaaaaagagatgtaactccagttccttcggaaatggtaagatctttggcgcaagaagaaggagttgatccgtatcatcttgacttggttctgaatttctctattttttttttaagaataccgagtcgggctcttctcttacccgtatcgaatagaacatgctgagccaaatcttcttcatgtaaaacctgctttatttagatcgggaaaatcgtacggttttatgaaaccatgtgctatggctcgaatccgtagtcgatcctatttccgataggaacagttgacaattgaatccaatttttcccattattttcgtatccgtaatagtgcgaaaagaaggcccgactccaagttgttcaagaatagtggcgttgagtttctcgaccctttgccttaggattagtcagttctatttctcgatgggggacaagggaagggatataactcagcggtagagtgtcaccttgacgtggtggaagtcatcagttcgagcctgattatccctaaacccaatgtgagtttttctatttttacttgctcccccgccgtgatcgaatgagaatgg

SEQ ID NO: 292987 - DNA, 517 bp, Cannabis indica
acaaatgaccagaatatcaagcttaacttctaccccaaacctgcggagatgattacaaaattctgggagaaaaagaagaagctcgatgccatgctggaggcgcgcattggtcctcgccttcctcctcgcattgactagccgctctgattacaaccaagtatttttctttatctcactcttcttttttttttttattttacagccaattatgttatatttaagacaatttttatatacatagctgtttttatttaaggggaaacaatggttaatgcctgtccccgggccctttgtatatattttttgacctgccctgagggccaggataatttttttttattatatatatatatgatcttattcgatgcacatatctttcttttgaacctgccctgtgggtcaggatgtttatatatgcctttttcttttttgttgcatacttttttttgtaccttccctttgtgtcaggatgttttactttagcctattttttgttctgtccgtgtggtatacctta

SEQ ID NO: 292988 - DNA, 861 bp, Cannabis indica
aattaaactacgagcattttgtattcagacccaccatctaaccctttgatgttgtcttgtgtgtatggtcctccctatttcaataaaaagaagttgttttggtccaaccttatggaggtgggaaatagatatggaggaacttagttgataatgtgtgatgctaattttatccttaagaatgcagatagaaccgtctctcatgggagagaccaattagtcccggtaatcaactcttcaatcaccttttaggggctagtggaactacctatcaaaggtgactgcctgacttgggataaccatagagatggagagcatcatataaaatatgcgttagataaggcccttgccaatgatgcatggctaaccttgtatcctaaagctacattgagattgtttcatgttgttagctctgaccaaaggcccttgtgtctctattctagttgtttggacgggcatttgtaaaggaaattataaacccgaaacattctttagtgatgcgcacatcaatgtttgacatgtggtaagaaggatgacgtcatggagttaagtagactcgagtcatagcagtcgacttgggaggggatcctagccctacgcccaagttaacttcgggagcttcaggatggaagttcaacttaagtaacttgaatccagctcgctatctttctaatattttgtaccatgaagacatggattacctaatccaagtctcgggagctgaaattacacgaacctataactcgaaagccaacttgggcacttagggtttcacccaatgccaaggttgacatcctagactagggttacagtttccaggaccgtcttattgaaaatgggtcaaaacatgttgggttttatgcc

SEQ ID NO: 292989 - DNA, 672 bp, Cannabis indica
atggatctggactaagaacttactaatggtcgattctctaccaaatcggcctatcttatccaagctatgagacgggctccgttgtgtaatgtagctccgaacctttggaacaagctgtggagttcaaaagttctggagcgtcacaaagtcctttggtggagtatcctctcgaatgcgctacctgttagggctatcctttctaagagaatggctattaatgaaaccacctgccccttttgtggtaatggtgatgaaactatggagcatttatttctctattgcgatctggcgtctcacctttggagatcttccccttggggagttatgcctgttgtggaatctggggcccgtatgtgggactgggttagttttctttggaaccttaggaccagaggagtggatacagatggtttattcctttatgcttctatcgtggttgacacgatttggagggctcgaaacgacaaggttcataataacaatatgggtagcttgaaacattatattgactctataaattattgttacgctgattatggatcaagtttgctcaagtctcgacaggttgctgatactctgggttggtcccccccgcctgaggattgggtcaagatcaactgcgatgtcagagtcggggtggaatccatgtgtgtggtggcaattgccagagat

SEQ ID NO: 292990 - DNA, 821 bp, Cannabis indica
gaactaataataaaaaaaagaagaaaagaaaaaaaaaaagagaaatagggataatgactaaataactcagacaaaacagagaaaaattattatagaaaacaaataaataataataaagcaacaatgcacatgacaagctataacaaaataaatttatgagcttaataccctaaaaatatttcaaaacttcgaatccaatcaacgcaccaaatgaatttacttgagtttcacacgtacaaacagagaattgaaagttaatactgatacgaatcgttttcctataaattacttgtgtttcacaggtataaacagagaattgaaagcataaatgcaggaaagcgaagccctagaaagaaatttcgaaaaagcaaagcagatagtaaagagagaatgagatagaaatacctgaaagagagaataaaccgtaggaaggaaggaaggaaggaaggttgagaatatggggttggggttggaggggtgtgtttgctgcaaagactcggatacacgacgactatgaatctgctctcctttttcactcagctaacttaaaacaatacaacataaattttagggatattttcaattatatatatactagtaaaaaaaactacgtgcctcaattttatggtagctattttttaataaaaatttaaagtgatacaattaaaaattaaaagaaaaaaaatattattaattattaagtgagattattattatgtagggaaattctttaatagacacccataaaatagactcattaatagttccactatgctgtagtataattggtccacatagaaaaattttagaaagttattgta

SEQ ID NO: 292991 - DNA, 499 bp, Cannabis indica
aattacatagaaaaataatattttttagtagctaatgtttaatatggaaattttttagtaattacacagtgtaattacatccaattctcatggagaatggaattggaacccctcaattacttccaattacacagttacagtgtaattacatggtcagacaaacatgccaaattgcgtaattacgtttaattacacacaaatctaattacattgaagtaactgtgtaattactaagtagggtaattactagggtggtaattacacagtgtagtaattacaccatattttaaaatgcaaggtgtgtttggatatgaggtgttaattacatatgaattcctaatatcttgtttggcaaaatagttagtagttacatgagaaaataatatttttagtagctaatgtttaatatggaaaatttttagtaattacattcaattctcatggggggccatgagaattggagagtataattggaacccctcaattacttccaattaca

SEQ ID NO: 292992 - DNA, 612 bp, Cannabis indica
tttattctttttttttatttattttactaatgttttattgatgagcttgacctgcaagataaattcagatgctatgtaacgcccgtattttaaatttaccaaactcgaaagattaactttaatatattatatctttataactatatgggtcgggatcccgagtatcaaaatacaatttaaaagtattttactaatatgtacatataatatattttttttaaattcgctaacatgcaacctcaaaatacagacttcaaagtaataaaagactgaaaccctccaggctgcactgccacgatatgtacaatcactgccgacctctatctcactgttcctccagctttgcctttcctttacctacacaaggtagcaaactgatgagtcaacagactcagtaagatatgcaaaacatattcataagtaccgcgatgccggctttgtgattaagccgccctgagctcaataatctagctcaccaaatggataagaacgttcttaaaggttggtgctattgaccatgatatcacccactaccagcactatgatcgcactgcgggatcggcactatgttcgtaccgctatgatagcatcaatagcacccaagcgtataat

SEQ ID NO: 292993 - DNA, 677 bp, Cannabis indica
tgatcgagttttctataataacagctatcaggcaacaatcgggatggctccttatgaacttttatatggaagaaaatgtagatcacccatacactgggatgaagtgggtgaaagaaagttcttgggtcccgaagctgttcagaaacaagtgaggcagttgataagattagagcgcgaatgctcgcggctcagagtaggcagaagagttatgccgatccaaagcgcagagatattgattttcaggtcggggacatggtatttctccgaatatctccgatgaaaggcataaaacgctttgggaagaaaggaaagcttagcccgaggttcattggaccttttgaaatccttgagaggatagggcaagtagcgtacaggttggctatgcccccagcgctggcagctgtacataatgtgtttcatgtttcaatgcttcggaaatatgtctcagactcgtcccatgttctgagttatgaagcattggaacttcagccggacttgtcatacgaggaacaaccagtgcagatacttgatagaagagaaaaagtcttgagaagcaagacagtggcactggtgaaagtactgtggaggaacagtaaagtagaagaggcaacctgggaactcgagacggatatgcagcagaaatatccggagttgttcaggtaaatttcgggacgaaa

SEQ ID NO: 292994 - DNA, 268 bp, Cannabis indica
taatatatatacatataaaacatgtacacggtatatgtatatgtatttactaatttaataataataataataataataataataataataataataatattaatattaaccataataaattaagcaatatggtataatatatttacctatatttttattattaatatacctttaataatattcacaaataataaaatattaaattatctctaataatttaattatttatctagcattatacatactcttaaaataaaaaataaaaaaa

SEQ ID NO: 292995 - DNA, 801 bp, Cannabis indica
aatattagtttcttaatcatataccatcaaaaagaaaaattcaaacttattacttaatgtgtttaataattagtttttagttttgattacttaataattttccaatcatacatcattaaatacaagtatgtcgatctttctttttaaaaatataaaactaactcaaccttaattgagccctatctcctttaatttgaacctagattctactgagctcacaaataagaacaaatagtcacaaagtaaaatagaaatttctcatcctaccagtatgtatcaatcgattttttattacataattcttaaaaaaatatgtctaataacgaaaaaattaaaaaataaaatgatagcacctaataagaatattaattgctaattaacagaatcttaattgttaaagtatacaattttagaagtattatatcaatttataaattcgtaagttactttttattatcaacgttttacttacttttcttaatttgtgtacattgtcatttggtagagttttatttaggttgcaagtaccattaatgaaattcaattttgcaatatagcaaaaaattcacaatgtaccacgttacttaagaaaaaaggataaaaaacaaaaataaaaaaatacatgttactttttaatatgaacaggttacttttgcattaatcccagaacaaatatagaacattaaccaaatttatattctaggtaccaaattactttaaaaagcaggataaaagacaaaaagacaaaaacaaaaaaaaaaaaaaaaaaaaaaaaccaaaagttacttttgcattaaaatc

SEQ ID NO: 292996 - DNA, 688 bp, Cannabis indica
gaaaatgggaatgaaaaataacaaaatggtaaaattgcaaagtgaggcccaatatcccttgtttggccgcccactatgcatagcaattaccatttatagttttcattattttaatgccatacaattctaacctaaacctagagggtattctataaatagaaagtgttggcttcaggaaacacacaactttgaacattggtttctttcagaaaagccacacgcccctctctctcttttcttctctctaaattttgaaacacttgagtgaatgagtagtgcccacacacatcaagcggtacctcaatcataatatgtaagactatggaaaatctgcatgaaagaaggagaaaagaagatccagattcagatcttcattatgttctggtacagaaaggaatcaaggcctcgagatctgaatggaaggagtcataatattctgttgcacccactgtaaggttttctaaactttatatgtgtttattttcattgttttagaattcatatttggatgttaatcaaacatacttggtagtaaatctaggtccttgtaaaataattccaacagtcaaaaggctaagcaccaatgacttcatcactgaagcattctacccgctttgggtctccgacccgtgttagtacccaaactaaacaacaagtggagggtgtgcatgttgggattttatgccct

SEQ ID NO: 292997 - DNA, 489 bp, Cannabis indica
tttcttccaaccaaacacggaagacccaggtaatagccattttcatcggcctcataaatttccaaaatagcacaaatggaatcccgcacctcaataccagtattattgctaaaaaacacaaaagacttagagaaattgattctttgccccgaagcaacctcgtaagtatgcaacaactccttcacattgtacgcttcttcctcagttaccttacagtaaatgtagctgtcatcagcaaaaagcatatgagagattactggcgcacctcgagcaatttcacaccccgtgagtaaaccactttgttcataactctgcaacaaactagaaaaaaccttcaacacaaagaataaacaaatatggtgataaaggatccccttggcgcaacactctttgaccaacaatgggccccaactccttcccaccatgtgaaatggtataagaaacagaacatacacattacataactaaattaatccagcgaccatcaaa

SEQ ID NO: 292998 - DNA, 638 bp, Cannabis indica
tcacggtccttgtcttgttctaggatcttggttcggcgattcatgttcaggttctaattttgggtcccaggtctaggttgggttaggctttggttcttcgtttgggttcttgtcctagtctgagtcccagttctagacacagactactggtctgttccaggccccgttagacaaatcccgagtcaagatatgaatcactatcacgagtctcggtctagttctagttcaggtcccatttctaagtttgggttcgggatcgagactggggtgcagttctaggtcctgaccctggttctgtgtccctagtctagttccatgtttgggtctgagttcaggttccagtttgggtctcgagttcaggtttgagttgggatccgggtttgactcccagttcgggtctacgtctgatttggagtcggggtcctggtccggttacggttctggatctaggtcgaatttcagtgatgattccaagtccaagccttagttccagtcctggtgaacttccggtttatgttctaattttgggtcaatgggtacgggttcgagtccacttttaggtttgggactgggttcaggtctgggtgtgggttcaggtctagggctgggtcccgaatccagacactcactacggtttt

SEQ ID NO: 292999 - DNA, 536 bp, Cannabis indica
tttatggagagtgatgcgagatgggtccatcacccgcattccgacgcactagttatcatcgtcaatattggcggagataatgtccaccgcatactcgtggacaatggaagttcagtgaatcttttgaacttccaagccttcaaacaaatggggttgcaagagaaggacctgcgacccgtgacatcgagcatatacggttttactggcgacgtcatcgcattaaaaggaatgatcaaactcccaatcaccttaggaacctgcagctttatacgggagtcattttaccctaactggttagcgaatcccgtactcgtgcccaagcctaacggctcatggcgcacatgcgttgactttacagatttaaataaagcctgtcccaaagacagattcccccttcctagcattgaccagcttgttgatgccactgcaggtcatgaacttttgagcttcatggacacatactcgggatatcatcagatcccgatgtatgaacccgacaaggagcatacctcgttcattactgatcgaggattata

SEQ ID NO: 293000 - DNA, 560 bp, Cannabis indica
attttaaaacttagggtttctatactaaacttaacaggtcgtcactttgtaacctaattttgaccccaataaagttaaaattacgataaatctatttctacataattgatagatctttgaattatctttccaacgccactgaaatcacctcaatccgagctctagaactccagatatgatcgttttagtaaaacagtttttaatcctgcgaatttatccaaacctacgaatttttaacattaattaattaaactcactaaatatattataaaaccctaatggaccttcatattgggctttaattaaacgattacttactctgtaaaaataccataatattttactttcgtagttaatacaactttaactctctctagaaaattggtacaactactctaagcaataatatcaactcactaacaacacaaagaaacaagataattatcctcgctcaattaatatccaaaaaaaaaaaattaaaatactattttaatctggatattacaatacttcaatatgatatattttatattgtatatgagattaatatatataatgtg

SEQ ID NO: 293001 - DNA, 962 bp, Cannabis indica
acgcatgaactgttcaatcaccaagggttgatcaacaacaccaggatatgcataagaggatagctctacaaacttcatgtaaaattcattcacagtcatatccccttgtcttagaccatcaaatactccaataagagccctcctgtgagatggactaaaatattgttccctgaaaacttcctcaaattctcgccaagtcatcccatcagtttccattgtcctggacaaggtctcccaccaatctgctgcaccaccctctaacttggacacagcaaaagtaacttgatatttctcaggtgttcctattgtgttgaaatttttctttatttgcctcaaccacctttcagctaccatgggatcttgtccaccctcaaattcaggcacttggatccgatgaaagacttggaaatgatgactctgtcgagcggcaggatccatctgttgagcgggaatagctcttaaggcttcgagaagggcgttcatagggaattcagcttgtggaggttggacattagcttgaggggcgtcttctccaaccgttctccttgtcttctttccttttggaggcattttcttaggtctgagaaccaaaagctaatcagttagtgaggattggatgctaataatataaatatgccttatacatataaataccaagatatttattactattattatttaaaataaatctaaactatttggtgacacactccgaggtaattaaacccggtgctctgataccatttttctgtcacgacccgagccctaggctgtggcagatgtgtaatatccataacttgggtggtcaaaggtcacactttgacccttgtaggaaaataaagcttataatgatccttttatttatattacaaaatactaatttaaaagatatggattaactcctatattaataagaaaatattagtaataaaatcaggaccactcatcaatataaaagaaca

SEQ ID NO: 293002 - DNA, 610 bp, Cannabis indica
tcgttgaagaattaaatatttaaagtagctcgcgacttcttcccttttctcaaaatctacaaaagcgcatatagtgtgcatcagacgatgtgtcgtcatcaggtacataacaactctattttggagttgtttcgtaacttattgcttgttctaattggttgtatgatctatttatttgtgttcataaacactcaagaaaatattttgtgatagtcatggagttggtggataattttcaaatattataaggagtatttgaactctataaaagtggacactttctttttagagtgttcccatagtattgtagagggaatagtttgttgttgggcaaagtcctttgagacttgtttgggccttgagttgtccggcaaaatcctttgagaattgaagcctttacgcatatattctgcttgtaaaaagtcaaccacagcttcacaaaagttttaactcaaaatatgtttgtaagtagtattttaaaaaataattaacaaagttttctggcaaggtgcaaatctcgaatcaaatcaagtacactacattgagaaaatgtctttataataatattatgtatttcaatatatatttgagttaatcttaaagttagcat

SEQ ID NO: 293003 - DNA, 777 bp, Cannabis indica
ggtaggaagtgtagatctcccatccactgggatgagacgggggagagaaaatacctaggtccagaatcagtggagcggaccaatgaggcgattgagaaaattaaagcaagaatgcttgcctcacagagtagacaaaagagttatgcagatccgaaacgcagagatgttgagttccaagtaggggaccatgtgtttttacgggtatctccaatgaaggggatcaaacgtttcgagaaaagaggcaagttatgccctagatttacaggaccttttgagattctcgagaaggttggtcaagtggcatatcggttagcgttgcctccagctctttcagcagttcacaatgtattccatgtctctatgttgagaaaatacgtttcagaccctactcatatacttagttatgaggaccttgagctgcagccagacatgtcatacgaggaacagccagtacagatccttgatagaaaggataaagtccttcggaataagaccatagccttggtcaaagttctctggaaaaacagcaaggtggaggaagccacctgggaattggaatcagatatgagagcccagtatccgaagttgttcaggttagatttcgaggacgaaatccgttttaaggggggggggagatagttgtaaagaccgtttagttaaatttggaaattagcatataacgtatttttatgtcatatagtgaaatctcatatttttgtcattttcggtgcccagcaacatggaacgcggtgtatggctcagtagaatcacaaatta

SEQ ID NO: 293004 - DNA, 869 bp, Cannabis indica
gctgctgctggtgttgattcaggagctgcttgagatggttcagcagtgggtaaatttggtgtagaggcactgaagtgtttgaagcttatactagggagttgagaccaagactcattgtgaatgactaactgtttttttggtgcataagtgttcagaaaaccagactggaaagggaaatcagcctcattaaacacacatttcttgatatataaattcttcctgtagtgcttagacatttatatcctctgtaagagtcattgtagcctagattgatacatctaagagagtgaaatcagaatttatgttgctggtatggtcttatgcagggattacaagcagccccaaacaccttgagttgcttgtaatcaggttttctgcagaaaagggtttcaaatggtgattttccattgagaatgggtgtaggaagtctgtttatgaggtacacagaggtttgaaatgcatcaacccaatacctcaatggcatgcttgcttgagcaagaagggttaatcccatttcaactatgtgtctgtgctttctttcagctcttcaattttgagctgaagtgtgaggacatgagtgtttaaaatagatgcgattttccctaaccaggttttcaaacacttgatattcacctccccaatcacacttaatgcttttgattttagtttcaaattgattttcaacaaaagccttaaaatcaatgaatgcatttagtgcatcagattggtgtttcaaaggataaaagccatgtgtatctactaaaatcatcaatgaaatgaatgtgaaacttgaagtttgtattagatgcaatcggggcaggtccccataaatcagtatggatcaattcaagcactttggaagctctata

SEQ ID NO: 293005 - DNA, 573 bp, Cannabis indica
tgaaaaaagatgctaaatctcgtttaattcgttggatcttgcttttacaagaatttgatttagagatacgtgataaaaaaggttctgaaaatgttgtagctgatcatttgtctagaattgttgttgaaactaatcatgattccaccactatcattgaaacttttcctgatgaacaactcatgcatgtatcttcttttccttggtatgctgatattgtcaattatttggtcactggtgaaattccttctcattggtctaaacaagataaatctaaattttatgctgaagtgaaaaatttcatgtgggatgatccttatttgtttaaatattgccctgatcaaataataagaagatgcattccaaattgtgataatctaaaatcatatctttttgtcatgatcatgcatgtggtggacattttagtggtaagaaaactgctttgaaaattttacaatgtggattttattggcctactatttttcatgacacttatatgcattgtaaatcttgtgagcgttgtcaaaaattaggaagtgtaactagaagaaacatgatgcctttaaatcctattct

SEQ ID NO: 293006 - DNA, 124 bp, Cannabis indica
cgtgtctatatcgtggaacatatagacgtttctatatgactgagagtgccattccaagttctatgcgtggatgcaataaggaattataagttagtcatttctttggtaaattctagatctactt

SEQ ID NO: 293007 - DNA, 697 bp, Cannabis indica
aaacttcatcataatttaaacaccttagacctctttatacagtgtttaagatatcaatattttaaccacttaaggttagttcaagaggccataggtaggtgtgtgagtgttagaggtcctgggttcgagaccaggtaaaacatgattgtaatataaaaacgactaaaaaaaaaaaaaaaaaaaaataaggatatcactatttgaacctctaaatcatgcctacctgaactatctaactcttcattgaatgaaattggtctaaaattcttaaaattcaataatcttaatagtttaagaaaaattttaacggccaaaaaaatataatttaatatatgttaaaatcatttgacaaaaattgtaattaactaaaaaatatataactatttaaatatcgaaatagtgcaacaattcatatttgttttgtttttttggagtgcatcgaaatagcaccttatagtatatagattttttttgttttaagttattgttgaattttattagagagttgttcatattaggtgttataataagaaaaagaggaggtgacacgacgtcgttgtcgcatttggtgtatacctacattttgcagttgcggttctcatcttatctcttgtcttaatgagcataagacagtccataatgggccataaagcccataaccatcaccgtcgcccatggcccatggcctcattcattc

SEQ ID NO: 293008 - DNA, 1019 bp, Cannabis indica
catcatctcgtaacatataaatagcacatcgtacccgatcattattttctacccgcatgaaatcaaagatagaagcaatcatagtcatccactgttctgctttcagtgggtctgggccaccctcaaacacaggtgggttttgtttcctgaaccgctcataaattggttccatacgatcccccacattcggtggcactacctgaggtgccagtataggtgcaggacgagcctgttgctctctcaggtctcgaatctgctccccttgctgcctaatcgtctcttgcatggcagcaaatagttgttcccagttttgagggggtggaggatgctcttccccaccacctaacccgagctccagctcgcggtttaaacggccagatcgccgttgcatgatccaatatcctgtaacccaaaaccttcaacgatttagaattcaaacaatatcaacatcaatatgcatatgctattcacacactacttcttctcatcatacactatacttgtctaaacaggtaaggcaatagcaaataacataaacacttactataccatgagtcgacctgtcctcgcagcaaatgtacatattcgaccagtcttcaggacctttaaaaccatggctgctctgataccaagttgtaacgccctaatctataggaacgccacgtgtgtgaatttataaaactagtttaatactaatatagtaattaattattaaaaactgtgaggataataaaaacttgactaaaataaaatactaaaaacggacattataacggcagtaaaaaggagttccggaaatccctgttataaaagatttatccaaaagatgatatacaacaacaattcaaaatacaattcaaaatacagcagacacagccagtctaaaacaactcctgtcaactcaacacgcaagctggtggggtcaatatgtacattgctggagaagatcgccatctcatggttgttctaactttgccttgcccttacctgcgccacaaagcacccgtgagtcacataga

SEQ ID NO: 293009 - DNA, 503 bp, Cannabis indica
actacaacctatgctgaaatggttgacaaggctctttgagctgaaggagcagttaagtttttgcaagaaacccgagagactcctagtgtcggtgggaccactactctccctatatctggccctaggaaagagagtggtgattctacttttgagcaaaagaagagaactttcccatcttcgggaagttcagggcaaggaaaaaggtttcgaggaaaccagaatagagggggcgtcagacttactcctatcctgagtgcccgcgctgtaagaaacatcatcccgggacttgtaaccggagagcttgctttcaatgtggatcagtggggcatctcaagaaagattgtccccagttgaagaaagaggaacctaagcctgaagccaaacctgcacctgccagtgtatttgctatcactcaggctgatgctgccaccagcccttcagtagttacaggttagcttctaattaacggtttttatttatactgttttatttgattcgggtgc

SEQ ID NO: 293010 - DNA, 316 bp, Cannabis indica
acaaaatcgttggcttcgatacgccacggaatggtatatattaattctttaattgttaatatattttttctttataataaataacttaattgtttatgttcgtataggggggtcatcccgaagagcatgtagttgatgcatggaaggaggttcatttgaaaaagccgtctggcactttcgttaatgaagctgctgcaaaagattatgtaagtgaataaaataatttattattaaaatttatattttatattaattatatattctaataatttttatttaaataggaggaactgttgaaggagcttaataggaaaag

SEQ ID NO: 293011 - DNA, 598 bp, Cannabis indica
cttgttcaatgtattatttggttaacatgtttattttatgatcatttgctaaatttataaatttatctaaatccttatcacattgatattcttaactattgtgttctcaacacagtggaaagtaatcaaaattacgtgattaaataaaatcctacgatttatcaatacacatgatgtcactattatgatattctacaatgtagtttacttgcaccttagataagtgctatgtcctttctaggaaattggtaaagtaagcttggattggatgtatatagtatacatcgaaagggaccgatattgaacttagataagatataataaacttaccgtaatatctatctaattcaatatcacctaattaatcttagatcaaatgatctcaatcctaagatggttaggttctagttcaattgtattatttatgctcttcaatttgtttaataaagtcgaccaattggatcttcttgtgacatacagattaaaaacatagtagtgtaattgagtgggacgctaatcatagatacagaatctatcgcttctataaatacatataagtgaaataatgttttctctcgagcttgccttaatagagata

SEQ ID NO: 293012 - DNA, 582 bp, Cannabis indica
ataatcatgttgcactcttttcccttagctcaggtttgtcccactggatttcctggcaaagttttcaatgaggtgttggaattatttaccaggatctagatttactaacaagtatgttattaacatcctaaacatgaacttctaaaacgatatgaaataaacacatataaagtatcaggaaccttacagtggttgtagcggaatataatgtctcgttccactcagagctctaacccttatatcctttctgtaacagggtatcaccaagatttgagtctgaatctcattctcttgaaactggattcttcacagccttacacactatgattgaataccacttgatgtgtgtgggcactcactcttttcactatgtggcttcagttttgaagagaggaagagagagatagggtttcggttttggtatagaagaagaggctcaaatttttattgaaggaatgagatgcatcatcttttacctttagccatcactacctatttataggaaacaacttagggttaggttagatttaattagcattaaaataatgaaaaaaattaagtggcaaaatccatcccaagtgg

SEQ ID NO: 293013 - DNA, 590 bp, Cannabis indica
caatcacagagtgacacgtggacaatgacctgacattaacgactaggtgctcacgaaagttctaaaattctaaccgaagatatttttactgcaaattttgtttacttaggtatcattctacaaccgaaagttaaacttaagtattttcaccgtaaattattttttaatatatagatagatagatatatttattttatagtgtacaaaagaaaaaaatgtgggtagttttaataaataataattagcaattttatcccttgaactttttatactaccaagttgtgtcctctaagttatacgctttgttaataataccaattgaaatagggtaaatagcggtataagtacccaaagtttatgtttgtaagcggcataaacccaatatttatttttagcggcataagtactcaatgtttgataaactgtaattttcttccagtttcgtcagtacagactctgttttgaatttattaaaagaatatttggaagtaactgatactacatatttctatctagatccaatgatcaagaatttaggctttatatgtgccctatttaagacaataatagagtctgtagtgacaaaatta

SEQ ID NO: 293014 - DNA, 557 bp, Cannabis indica
tacatttttactgtccaagcctatttttatttcttttatactgctcaggcccaatatatttacttttatactgtaaacagtaacaaaacacaaatggcacctctccttcgtggttggggacggacaaatcaacaccggaatcatagaaacactaggaaaaaaccataaaatctggaaaagagaaaaaattactaaatcaacaacaaattactgttttgtagtgttattttactgttgttttaatatgaaaaaaatgccacgtaaatgaaatattgtgaattagaagaaggaggagagtcaaaaacaagagaatttgaaaacgacaaatttgacatagttgactatgcgaagctggttgctaaaaaaatggtagaaaaacttgaaaacaacagtaaaaaactagatccagaaatcgacatcaacaacgcgaagctaataacagacaaacaccaactagaagttgaaaaaggtcaggcatacaaagacaaggaaacactgaagaaagtttacagctactacgcaatcaaaaacaacttccaatacagtttttgaaaaca

SEQ ID NO: 293015 - DNA, 1121 bp, Cannabis indica
aagcttgcctggttgacggcagaagacagggatattatccagttgacctccgatgcaaatctggtgcagtaggggctctaccatgaggacttttcttctaagtccgggacggggaagaagaggaagtctgctgctgctcggcctgaacgagctcatcaggaggatgagttgattcaactgaagcgggaagctaagttgaagggtggtgttcgggcaaagcagtacgctcaggagtctatgaatcctgaagatgaagctgaggctgaggctgaggctgagcaggtggctcctttgaggaggaagaagaaactcccggccacgcccaggcccgtggaacacggcattcgcataagggagcccatttcacctgttcggccatcccatccttatgctggaaaagggaaggccgttatggctgagataaagtcgatgtcaggtgatgatggacttctgactttctgggcggacagtcactctgcgctttgcttcttttttcagcttcttggcttccatactttgtattttttgttggtttttgctaaccatgctgtttttgctttgtgcagacatgtctcggcagatgatggacgccttaaggaagaggatgagcggaggctctagtgcttcccctccgaccaagaagtccaaggtcggagaggggtcttcagagaagaggccttctggagaggtcattgacctttctgaggagctggctgctgcaaatccttctactccccaatctgccaagtctaaggagtctgggccaccaacatctgggtccgaactggtcaggaggattcctgaacggatgcaggcaccaactccatccatgcccgtgctgcctgaggtcaagaagggcagggaggtgatggctcatcacatgaaccggctggttcctaaggtcggtgagcagttggctggtgcggaccactcatctctggatgtgttggtgggcggagtcttgcaggagcttaccagggttagtcttttcttttcgacacttcccttttagctttttcatacttagcttcatatgctgaccttttccttgtgcaggccggtttgaagctggcttatgcttactccgggctaaatctgctgcttccaagagtacggctctg

SEQ ID NO: 293016 - DNA, 576 bp, Cannabis indica
ctttaaaaatacaaataatataataattttggtacattcccataatattgagaacaaactagattttcataataatttgacttcccaaatatatctaaaccaatatattctcattagaccattagtgtttccacctccctttattacaagattctcaagattcttattcttcaatttacttaattaattataatattaaaatctgaatactaaaattcaaaacactttccttttatactgaaaatttctaaaaaaatataaaccaaaacatagctagtaggaattaacgtttaaagtaaaccctcttaaactttatttcagtttaagatattctttaaatcataccttaaccaaaataatacttttattctgactaataaatctgtatagtgcataacttattaactttaaaatattattgtgtcaaaattttcttatacattcaataccgaaaaacatgaaaatttaaacaaactaccctaaataattaggggcccaaccatataataggtgctaaagccttgtaaggcgccaaagccatatataatggcgcaaaatagaataaaatcaatataa

SEQ ID NO: 293017 - DNA, 464 bp, Cannabis indica
agagtcaaagttaccatccattgaatagagttgtcaccaaaatgataaacattctagcaaccttttattcgatcaagatgagaatccagcgttgtccagtttatgcgagagtcaagactattctatcttatgagcttctaccattatttcatacttttgtaagccttactaatagtcgccaccattagggtgatccatactaaaaataaaacacttacaaatagtacttatctttcgagattttacggcgttaaattgctaataagcgttcctccattagggagactcactaaaacaagaactatgtagaaccaataatggagatcgaatatcctaataataataataaaagctcattatataaaatgaattttcttctaatattcatttcaatctatttattttaaatatatatttatttaattaaaatttcaaattttagaataaaattctaaaatataaat

SEQ ID NO: 293018 - DNA, 552 bp, Cannabis indica
ctcgaactcgaacatagacccaaacccacacaataaccgggacctggatctagaatcaggatagggacctgggaaatagaactaggaccgggacatagtacccgacccaaacccgaacttgaacctaggacccagctcgtgacccggcacaagaaatggaaccagagtgggacccgagattgggatccagattctgacccagggcttggacaacacctgtagtcggtgtctggatttgggacccaaccctggacccgaaccctgacaaggacccgaaccctcactcagacctgaacccagtcccacacccaaaagtggacccgaacccgtaccctgtaacccaaaattggaaccaaaaccggaagttgaccgggactggaactaggacttggactttgaatcataactgaaattggacctagatcccgaaccgtaaccgggccaggacccggactccaaatcagacatagacccaaattgggagccggacccggatcccaacccaaacctggactcggacccgaacatggaaccagactagggacacagaac

SEQ ID NO: 293019 - DNA, 498 bp, Cannabis indica
gaatattagattgcaacacttcagagaatattacaaaaacccagaagactttgaaaatgcagtgaagaaccctcccaatgaacttaatgaagaccaatggcgactaatatgtgaattgttcacaactcctgatttcattcatcggtcgaagcaaaactctatcaatcgacagaagatgaaattctcttcaacaacagggtcggtaactatggctgagattcttcgtcaaaaagtaagttaatatattaaatttctattttacaaagtttactttatatataattttctaacaagttatatttatcagcaaggaaagggttacattgagacttggaaagaatgtcatactaagaaagacaccaacaccttcatcaatgaggctgccaaaaataaatatgtaagatatataaaataataacttttaaatattttcaaataattgtaactttgcttgatttctaacttattttgtattataggaagagatgttgacaactc

SEQ ID NO: 293020 - DNA, 1160 bp, Cannabis indica
tggaccaattgtttgcctctgtcaagccaggaaacctcaattttagcgagtttgtaattatttcttcaagcaaggactacccacaacaacaaaatgggcacgattgtggaatttttgtaatgaagtacatggaatcactattcgaggaaaatgaaacaatggaagaggtaatttaatgttgatttctttagtttagttttcatccagttaactaagtgtttataacgaaattgaggtatcaatctattttttgatggatttgtttctatgcatttcgttgtcatgtgtattactcaattggatccctaatgtacaatgcagtttgatcctattgaagccagactggatgtgttgggaaaattgtcacccacgagagtaacaaggctaaacatgctgtgatggagggagttaagaagcaatttggaatgaccaaaaccaaagttcttccatcagcatccacaactttaccagtactagtccataaaggtctcctcgagacccccgattcagcacagcgaaagccaggtccgacaacatgtggactgggaagagcaagtctccaaaacccgtcattctaaaaggctggcatcaagtaacaagtagtgaaacactgttgtagcatattcagtacaactgttacaaaagttaggttttaggtgataaattatatttagttatgttatatatttgcatcttactactgtactgttagcgtcaggtgatatggaattgcactaatggtggtgattttagcatttactatatagggtaagacttgtgatagtttttggaatttggtggaaccaattattattactatgttgtgattattatggtgattattattactgttgttatcttttatcattactattagcttttggaaatattgttaccataacaatatgtaaagtacattattgagaaaatattattaaccaattttacctatttgttgacactatacttatgtactttgccattgtagtgagatgaaggcgaaggcattactctgaccttgcttataatttggatcataaagtgtaagtatagtacataatgagaatagatatatgacaatgtgcacaattctttatataatctgactattctaaatcatgtatttaagtctacgaaaaaaaacacttaagtgtacttgt

SEQ ID NO: 293021 - DNA, 596 bp, Cannabis indica
aacggctacacgaaagtttcgttggtattcatctgtgggttgtcaatcttcacccatcttcccgggcttccgggcacattgcgagatcgagatgaggagaattctgatgtggaatcgaatgcttttggcgactgtatcgatcgtcctgctgacatcgattacgatgattcagccagcgcaggcccgaggccattattacgagcgcggttgtgacaattgcggacggatcgtgcggatccagtcgatcggacaacgcagcaatcatctcggcggggggactgtgcttggtgcaattgttggtggtgctttgggcaatcaggtcggcaagggtgatggacgcaaggccgccacaattgcaggtgcgttggccggtggagccatcggccacaacgtcgaaaaggacaatcgtcgatcgagaagctactaccgcatcctggtaagaatggatcacggtcgaaccctgtcgttcgaacaaccagatgattatcgcctgcagcgcggtgatcgcgtctatattgacaacggatatgtcgtgccggcgcgctgatcaagcttgcgcaatgcgccagacgagaagcaggaaagccggcgagatg

SEQ ID NO: 293022 - DNA, 514 bp, Cannabis indica
tagattttgtcatcattgatttttgtttctttcacagggagaaagcttttacaatccacatattcccagagtcataagagaattgagggagctagaattagttgaggaaagtgagggtgcttgtgtgatctctattgaaggggttatatcattccccctcaatgtggtgaagagtgatgatggtttcaactgatctcacgactctgtggtttgttgttattttatatgatgttttcatgtattattattagtccaaataccctttaatcattcactttgtttcacttaatctaagtatctatttagtgtattttcacagtcatgctgtttgattatggatgtacttgttagaccccaagagtagaatatggtaaaagaaagtaaataaatgagtagatgagttattatggtgaatgatagtattaataggtgaatataggaagagtgagagttactcaatgaactgagtattttataattgtatcatggagagtctaggcctctcgaaggtgaa

SEQ ID NO: 293023 - DNA, 544 bp, Cannabis indica
ttacctgttttccgaattcaagtgtgctggccgacctgaacggaaatgctcgtgctagatggatgccctcacttactacaaccttgaatccttgataatttccagagaaatggaagaaaatgatgcccttgccttggatttgcctcagccgaaagagaggaagagaaaaagagagttctaggttgactttttcttttattttctatttcaaatgaaaagggaattaattgattaattccttgctgagttgattaaattactaggtgtcacaaccctaggctgccacctactccccccttggcaaattactaaaatgcccttactcataaaactagggtattttcaagactaggggtaaaatggtcaaactccatatccccgctcaaccccgatattttatttcttctaaaatatttcccactaagaaataaggttctaaacttacccatgtgatcaatctagccatccatcgcattttccgttgtcgccgagcaaaaattacaaaaattgcatatttcacatattaatcaaacaatacccctag

SEQ ID NO: 293024 - DNA, 585 bp, Cannabis indica
ctgtaaggatctcacactccgccctagaaattttctttacattgattgggattcccaagtatataaagggcaacacccctcatgggaaacccgaggctcagataatctggtcaatgtcttcagcctccatgttactacaataaagagcatttttattagcattcgggtataggccagatgttgttgagaaaagtttcaaggcttgtagcatgtacatcacactctttgtctctcctttacaaaatagtaatacatcatctgcaaaagccagataattaatcttcaattctccacacctgtcatgaaaagagaaatcctctttttctccaatcttccccatgagcctaaataagtattccatgcctatttcaaagagtagaggcgatatcggatcaccttgccttagacccctcctagtttcaaagaatccatgaagtgtaccattaaacatcaatgaacatctaggagttgatatgcattgcatgattagcttcacaaactttgaaggaattgcaatccttctagcatttcttcaataaatccccattcaattgtatcataagccttctgaagatctagttttat

SEQ ID NO: 293025 - DNA, 657 bp, Cannabis indica
tcgacgtcaggagcatgcctcgaatgaataaggtagtcgcgggccgacaccgtagactcgctgtctcgaatatcgatggtcccaggttcagcgagttcctgcaccattctctcgatgtccgcagaagacatcgggcctagctctataggtgcgacctcctcttctgaaatcgaagctgggagaaaactatcttcctcctggtcctcgtcgccatcgaatgcatggcctcccgagccgagcagttgactatccgacaggtcgctcatctgaaagatagaagatcttttcagcgtgatgaatgtgtgaaagcaaaataagtgatctcacccgcattaaaactataaagtcgcacttgatagaatggtcagcatccttgcgaatgctgaccaccccatccatatgcgagtagagatgcgaataagtcacgcatcctgggccaagcgatatacctccagaaacggctgggagaaactcagttactcaaggggcatgcgttctcaagcatgaccctgaaattactgagttactcccaccgttccgagaatatctatcagccaaggagtacgctcatttgaatattaacgcatgtcgcaaatggctgggtgtatcacagtatctcaaggggcatataaccgcgtatatgaccattagaatact

SEQ ID NO: 293026 - DNA, 538 bp, Cannabis indica
atgtattaaaaaattattatatttatttaggagaattaccccatatattattttttttttaacttttttttttcaaatttacggtttgggtttctaaagtggttgcagcgctagttacaataggggattctatacgattttttgttgtaatttaagttgcagcgctagttgcaataaggatttctatgtagaatttcgtaaaaatgcaaaaaaaaaaatattttgaagtgtaaaaatgaaaaaggcctatttatttatatatatatataataaaaatattaaaaaatatatattttaattatatttttagtggttttttttttttttgtaatttgtaagacttagtttgttttgtttattttttctatgatattttgttctacttgagaatgttgttatttcagttattttaaatttttagttgcattaaaattgtaaagatgatatttttatagagtattaaacttaaataaatagtgatatttagtttttaagtatttttcttcattttttttaaataatataaaaaaataatttt

SEQ ID NO: 293027 - DNA, 649 bp, Cannabis indica
gcggtggcaccattaattatgtgatatatatattgagatttaggttatgcgttcaaggcataatcaggttggactcggtaaccagaatcaggatgaaccgttctaaggccttattgtatctagacgtgtgagcgtaacacgtgggtctatgccatgtagacataaatgggcgagtgatcataacacgcgggtctatgttaaatagacaattacgaatggcattattgtatatgtgatatgttaattataataccagataatatttactgtcttgctgggcttggctcacggctgctctactgtgcaggaaagggtaaatctgtctctgatcagccatgagtgcgaaagcttggcgatgcttgtacatgttcgggccacactagaccaagcgggttggggtctaccagcaatgtatttttttgtaactctaattttgccgcttaggccagctaatgaaaagacttgtaatattttgtaaagatttttgggatcccgaaacatgtcacatttgattgtaaagtttaaagttattacaagttttattttcattctgatttagattacagtttaaatttccgcttatctttctagtaatcccgatttaggggattagggttttataattagttgccgtaacatgtctaattgt

SEQ ID NO: 293028 - DNA, 774 bp, Cannabis indica
aaaaaaattatgttgtaactaaaaagttgtaactaaaagtagcaattttttatagtacagtagtttcacatcaatgtgtgtagagttctaagttaatttaattaatcatgaaagaaaatctctaggaagtcatgacaaattacatcatgtatatatatgagaaggataaacaagttttaattttttttattaaaaaactgtaatttaaatgttagaaatatcatttattgactatatatattaattatttaaaaaagattctaagttttgaaataggcatctttcttgacaaatgcctccaaatatatgcacaaaactatcaatagtattattttttgaatgaaaattcaagctttattaagcatcaaactctgttaccaagcacgataacaactcagttgggacatcccccaagctgaaggtacgatcaggatatgaacggaacgctctagcaaaactatgagcaaccacattcgcagatcgtttaacaaaagaaaacgaaataaaagataaatcattaagcatcaacttacaatcattaatcaaatcaccaaacacagaaatcattctaaaggagctccttaatgattgtaccacaagcaaacagtcggtttccacaatacatgtggccaattaatagtaggaaaagtagaacttaattattagaagcatggaaaagtagactaatataatcttattagattcaacgttatttgttataaaattatctatattttcttagtagattttttttttttttttttagtttaatta

SEQ ID NO: 293029 - DNA, 1389 bp, Cannabis indica
gtaattgaaagcgcgtgaaggttatggtactatgtgatagggtctagttgtactcttcttcacaggggctgttttggtaaaattacattccatggcggtgaaaagagcccataagttgtgaacacgttagcggttgtacataaaatgtaatgagaacaagtgtagggtatcgaaaaagggggtttgattgcgtgcatgcagctggccatgtcggttgtcacatgggtaagctgtgtttaaatgaaaattttaaagcaaacgagtgaaaaaggagtggatgggctgtacgcaatttcatcaccctcattccacaccgttgatcgcggggttttttttttattatttaaaataaacaatattattagctaaataactaaagtttttatttagttcataatcatatatctattaagataggaacatgatttattgtagttaattaataaaaaaattatattaattttttatataataatactagatacacaattattagtattaatgtatgttatttgattattctttttttttttttgtataatataagttataaaaatactcgttactttatttaaatgaatcccaaagtccaactactatcatagtaaattaacacaattactcttagtttgcctaattaaatcaacacttcaaaataaatttaaaacatatttgtataatttttttaggtctaattagtaatttttcgtcccgaactttgacatataccaaatcatgccccctcgaattttttggtccgttaaaaataccccctgaactattgagattgttagatttaaggactttgtctaatttcattcaatttactgtttcagtgattgtttatgtactaaccatgctccccaaactttgatatctaccaaatcatgcccctcaaacttaaatatgtactaaatcctgccccctaaactttcatacatattagaattttttttacaaaaattaaagctaaaggaagattatacatattgaggtggttggacctgaagtgctcgaatcattgagacagttgggcttttattttaatacctgttagatgacactattatatgtaacattttgaaaatggttgtaaaacaaaatggtgaccctaaaattgtataattgtatgtttatttattgtaaatttatttttattacaaaaaatttaattaatcatattttcaataaatcatttgattagaaaatgagtggataatagtttaaaaaaattattgtagtgtgcttaaactagtaggtcgtcaggaatattttccattattatccataaatagctaagaaagaaaagcaaacttacacaaggatttaaagatgaaaaaacaacaatggacatagaaataccccctcactagaaatcaccccataatc

SEQ ID NO: 293030 - DNA, 531 bp, Cannabis indica
ctcttattcaccatatagatgataataatctccacatcaatagtaataaacaatattattatattactatcaatatcattatcatattatatagctcatatatgaatataaaaattaatatataactccctgacataaaattataactcacaaataataattttatgttaattaatatattatgaatgttactaacaacatctcatgtgtaatatacatataatatattaattattacacaactatatagattacttatctcatacatatataacatatataaaaacttcaatatattatatacacataatatatattatatatgtatgtcttatataaatacataaaactaattatttctacatatatatttaatctaactaatatatattatctttgtattctcaaaatcttgatttatcttctcttctattgaaaaagaataagcttttgatttagaaattttattacaatagaagaaaatcaagatattacaacactattgtaaataatacaaggactaaaataaga

SEQ ID NO: 293031 - DNA, 566 bp, Cannabis indica
attagtatgttataagaaaaagcctgataggaagcatgctagtggcctaatagctaaataggcatatgttttaatttttaaaataagcagtaattagtaaattattcttgatcgcgatcttaggggtgagcataaaatccaaaaaaccaaaaaaaccgttcaaaccgacctaccgaacactgttggaaccgaaaccgacgaaaccgaaaaccgaaaaaaccactaacagttaaaaccgccattgaacggtcgaattttttttggtaataaaccgaccgaaaaaaccgaaaccgaccgttatacatatatatatattaatttattaagttttttttcatgtattatagttactaataatatataaaaataatatattatttttttattaatattaaagttaaaagaataagataattagtttttgaacaattaatttatatgtttgtagttgtaaaatgtaaaataatgtatttatagaataaattggattatttttttttttaaaaaaaagttcggtttgggcggtttaaaccgaccaaaccgaggttcaaaacggtcggttttaa

SEQ ID NO: 293032 - DNA, 528 bp, Cannabis indica
agtgatgatcatgtgacttgtccctagaaaaaacactcacaatctcttggccgaaactcactataccaaatccgaaaaatactaagaacaccaaacacacatatacaaatataaacaatatagagattaaggtgagaaatacaaacagaaatggtaaatatggagataccaaatttgatctcggacttcgcccaaaacaactggctacttctccgtcaagccctcagcttgattccactaatcatcaaacaaaggttacacttttgatttacaattgtttgtatttctctctatttttttctctctttggatactaacaaaactctcttttcttttacatgaacatctctaggaggagctcacaaggatagagtgctcttagttctaacatacatggtgaagaaatgattgcaagagagccaatctctttcactcactcattccttcatttattatttcttttagttggacagacagaaaagaaagagcaaaaaaaaaaaaaagtgagaagaagaaaaatataaagca

SEQ ID NO: 293033 - DNA, 805 bp, Cannabis indica
tttaacaaaacacagggtccaatctgtaacttttgcaaaacacagggtccaaaatggtatttaccctttatttattactatatattttaattttaatttattattatatatttttatttaatttaagtttttttttctaaaagaaaataaataaaatagtccagtccattcttaaaccaaacacaggattactttcagcattatccaatcttgtccagtccagtccaattcttttcagtccaatccagtccaatcctgcgtaccaaacgggcccttagggtaaatggtggcaaaatctccaaaactttcattttggtttcacttaacctcaaaacccaaatttgggcggtaaaacccccaatactcgtgttctgttagcaatttaacacttctgtccaaatttagctgttaacacaatatacacgttacacaattttattggtccacgtaaaaaattatttaaaaaattaaaaaaaataaaataaaataaatttaaaattaaaaaaattataaatataaaaatagtttgttttttctttttttcttttctttctttttctatttgttcatctcagctctctctctctctatcagtccaccacctccatccacagtcattgtaaacaccaccaccaacacaaccgaaaccaccgtaaacaccatcaccatccataaccatcgtaaacaccaccacccaccaataccgaaactaccaccacaacctattttttaaatccatatcacacaaaaaaattaaatactaaaaccaaatttaaacaaattcaaatccaacaaacaaataaac

SEQ ID NO: 293034 - DNA, 668 bp, Cannabis indica
aaaataataaaaagacaactatatcaacagaaaaataataagaaattagtcatattaaaaatacaaatcattcataaattaattctgaatatataaattacaaaacgtgaaacaaaatatactatttttattaatcatataaaatgtagaaaaatataggagcgcttttaattttttttaagagaaaaataaagtgtcaaaaaatgagatataaaaatgtatacttattatataaatataaatatttatatatacaaagataaaaataattagtttgagaaaaaataagagagagagagagatggaaaaaaaataaaaaagagaagtagagagagaatagaaagaaagaaaaatgacagattagcaaataatttttttaaaaattagccaaaactgactaagaaaatataaagaagagaaattctttttttttttttgaaactttattatgtaagaaatagtaaaaaaaatataaaaaaaataaagtagaaaaagtataaatataaaaaatttcttgtgaaagtataaatgtaatgtttagaaaaaaaattagtatttggtgtaaatttttattttatctttttgtatgttctgatatcaaacggtgcgatctaggcccaaattaattgtacaagttcttagatgattttgatataggaaattatagt

SEQ ID NO: 293035 - DNA, 510 bp, Cannabis indica
aaagatcttaatcctgacatgataagattcgatctcaagagtgtcatttgtgttctttcagttgttagtcaaaacctaccatttggttcgggtcacacgtacagcttgggaacatgatagtacaatcgagtgggagcgctagtcaaagatatggaatctatagcttctatctggacatagaagtgaaataaggatttccttcgagcttggcttaatagagataaattgaagagctcttatttcagtgattatattattagtttactgaaatatcaattataggaagctaagtgttttaaggataaaatacattaaggggtaaaactataattttttctctactcggtgtaaatcatctatagaggatctttgattttcgggattagaatgatggttaaattttcatagcgtatctatatcgtgaaacatatagagcattctatataattgagagtgcaattctaaatctatagtggtgcaaggaggaatttataagttagggaatttact

SEQ ID NO: 293036 - DNA, 962 bp, Cannabis indica
ttccattgtccacgagtatgcggtggacattgtctccaccaatattggcaacgatgaccaacgcgtcagaatgtgggtggtggacccatctcgcatcactttccatgaaggtgatgtcgtcgcactccctcttgaaaagcttctccgatcgttcgctcaggttgttcacattggtgagtggcttttctttggcttctctcgcatatcgctcctgcgacttcctggaatcaccagcgatatggggtccgcctatgatggtcaagatgttgcgaggagttctcgaaccactcgcattctaattttcttctttatcatccgctcggggatgactttcctcattcttcttgtatttgctgaactttcctctcttgatcagctcttcaatctcgtcctgcaaaaaccaacactccaaagtagtgtgaccaatatctttgtggtacttacagaattttttaaggtctctcttgtcgcgatttcccctgattgggggaggcttcttaaagaccccattcttttcttcgatggcgtagatatggtctcgaggtactgccaactcggtatagttcacaaagcgcgggccacctttcctttttggggaggattccttctttggaggggacttggctaatttcggacttcgctgtctctgtggactgcgtcttcttgggcttcgtcctctggaattcttccctctaggactgcgggatcgtgatcgcggcacaggtgacttacgcttatctttgcccttctctaactcagccagagaattctcaattctcttatgtggctctgccatggcaaagaactcgaccagcgattcaggccttcgagcttgcagttccttccagaaatcggttcttgacaggacacctgttattaacatacatactagcgaagactcaagagccttctctacttttgttacctcagcattaaaatgcttaaaatagtcttgtaaagac

SEQ ID NO: 293037 - DNA, 657 bp, Cannabis indica
ataaccctcttggctgctatccaatggtccataccagggttgcttaaatatctgcctaacatcccaacaatgtacgcaatatctggacgcgtacatacctgaagatacattagactccctacaactgatgcatagggaatctttttcatttcctgaatttcaaggctgcttttagggcattgtctaagactgaatttgtctcctttagcaacaggggtatcacctggtctacaatcttgcatgccaaaccttttgagtactttatcgatatagctcttttgtgataatccaagaataccccgagaacgatctcgacgtatttgaattcctatacaaaagaggcgtcaccaagatctttcatctcaaattgcttagataaaaatctcttggtttcgtgcaataagcctatatcattagtggcaagcaatatgtcatcgacatatagaaccagaaatatgtatttactcccactgaacttgtgatatacacaatcatcaataatattcatctcaaaaccaaatgagataattacttgatgaaacttgtgataccactgacgaagcttgcttgagtccatagatggatttctttaatttgcaaaccatattctttgggtcaccaaccacaaagttttctggttgctccatataaattgtc

SEQ ID NO: 293038 - DNA, 858 bp, Cannabis indica
aatggggcaactccaatgtggtttacataatccttgaagtagtctttaagaggaagggtggcccctgcattgatgtcctcgaggctccaagcacccatactagtcgagctagtagtacttgtctaaccactagtccccggattactgcttgcaaagcgcacaggagggtagtgttggaaatattttaccaggatctagatttactaaaaagtatgtttcattaacatcctaatatgaatttctaaaacaatgaaataaacacatataaattttaggaaaccttacattgggtgcagcggaatataatgactccttctgttcagatctctatccctcgattcctttatgtagcagagcattatcaagatctgaacctggatctctttctctccttccttgagcccgattctccttctggttgattggattcttcacagcattacacactatgattgagataccacttgatgtgtgtgggcactcactctatcactaaaggctgaataatatgaagagaataagaggaaaggtggtttcggtctaatagagagaaagctcaggaaagtatctgaaagtgaaatttcatctatcttaagtgtgagccatcactatctatttataggcaaccacctaggtttatgttagatttaattagcattaaataaataaaaaaataaatggtaaaaatctaacaataagtggccggccatgggtattggatttggccccactttgcaattttgccattttgtcatttttccatcttcattttctcaaaaactgccaatttgccaacttaaccacttaaattccaatttcaattatttaataactaaaaattaattattaaataatttt

SEQ ID NO: 293039 - DNA, 676 bp, Cannabis indica
tttttccttctttctttttctttttctttcttttttcttttctttcttgcaaacagtctttctcgatcccctctctctcagcactcgatccccacctctctcaatctcagccatcactctcgctctatcactctgcccagaccaccgcccacaccacaaccacccttactccgcccagaccacccttcctccacccagaccaccactgcccaccacaaccgaactgcccacaccaccaaaaccacatctacacaccaaaaccatcaccgaaacctctttttcagatccaaacaaaaccccacatccagatctaaacacatcaaagagacctcagattaaagagaaataaaatcgcaactaacggagaaagaaaatcgcaagggcgagagagagggcttactgaacacgaggctcgtgagttctgcgatggggctcgtgagatcggagatctgtcgatctcctccttggtgtcaggcgaggcttgtgagggtggagaactgtggtggccgcccaagggggttttgaaaaccctagattgaaaacgagaaagagagaggagatcgagagagaggagatcgagagagagtgatgtagagagagagggtttgtgtttgtttcaaacgaaagaaaaagaaaaaaacagaaaaaaacagagaggagatcgagagagaggaga

SEQ ID NO: 293040 - DNA, 161 bp, Cannabis indica
cacataggctcacacatgcacactttggatgggttttaattttaaataaataatttcaaaaaaaaataattaattaaataaaaaaaattattttcgaaaattttaaaaaaaaaaattaaacctacaattttgaaaaattatgtttcaaccaacctaaatat

SEQ ID NO: 293041 - DNA, 610 bp, Cannabis indica
ggtagtataatgtcatatttagtgccatttactttttaggccatatttattataatcttaataatttttcccataattttgaaaatagccattttttaatcttataaaaaaaaatttagacccatactttatcaggtcggcattgggttaccttgagttgttgctaacaattctctctcacaactttaaagaatgtcagcttgaaaatgtgttgaattttgtgggggtaagttgaaaaatactatttttattaatcaattaatcaaatttacctctaattttatatttatttgaaacatacctctttttatatgtattgtacccaaaataccttgacataagagagccacatgaaaagtattttgaagtgacaggggcaaaatttgtacaatatttaaaaaaggaggtaaaaataaaagagaataatataaaaagggtataatgtgtaatttcctcaattttgtggttccttcagggtttggtttgtccttagacaaaagagagagtgtgaggtgagagagagattttgattttgttaggtttatcttttaatattttgttttggggaattttcataaatatgggaattgagagtatagtttactttttt

SEQ ID NO: 293042 - DNA, 517 bp, Cannabis indica
agagcgcatcttccgttcaccaaccctgcgatcatccctacagaggacgtggtcatctcaatacccattcttcgatgtggtgtatcggtcccgtttcatcctttcgtcgcagccattctcagacgttatgacgtatcgccttttcagctaacacccaacagttatcgcactgttctagcattctatgcgatgtacatggagtacgcccatagggctccgtcagtagaggagtttagttacttctatgacataaagagcgtgggtcttcataatggcttcttttgctttagtaaatgggcgacttctgaaataaacggtgttgaggggatggtctcgaacatgggcgactggaagtcgaaatggttttatgtttttaaggttcctgggatcaggaccgactttaatcgcagacccagtatgtcgcatatttgttgacttagataaaatctgttatttgtttttcgagatcttttgctaactcgttttttgttgtcatcgcagatagaccagctcgacc

SEQ ID NO: 293043 - DNA, 328 bp, Cannabis indica
gaagatagtaataaaaagaggctatggtctcttcatcaaactatgcctccaaagctaaaaacctagctttctgatgagacctcttccttcttcttcttcctcttcaattttgaaaaacactaagcatctcttcacaaatattattcagccattagtgattgagtaagtgcccacacacatcaagttggtcctcaatcatattgtgtaagactgtgaagaatccaaacacaaggaaggagtttcgagctcagatcttggtgatactctgctacagaaaggatacaacggttagagagttgagcggaacgagtcatttaattccgctgca

SEQ ID NO: 293044 - DNA, 402 bp, Cannabis indica
tattattattatttttaataatagggtgttttgggaagtgggacgacatatatactccttcgagatttgagtacacgtgttttttaaaacaacttaaaaacaacaaagtggtgactcttcgtttatcccactttttttatggttattattttgcatgtaattttgtataaataggcttctcgttgagttccttttctatctcagaatattcttcaactttctcttagttttctgggttagtttgactgtgttctttgttcgtccttcctacattatgtcttctctgcccaaaaaccagataccttactcaaaagcgccttcctcttctaacattttctcaggattgcagccattggatcctgcatttctttccttgaaccctttttctagctttcgtgattt

SEQ ID NO: 293045 - DNA, 566 bp, Cannabis indica
aaagggtttacgtgactggagggcagattgtaagaaaaagtggatataaaatattgaggagcttggacaggagagagtcgacatgttacctcctgacggagtaactcaagaggtgtggagtgactgcattgcttattggagcacagacaaacaaaaggtatttaataaaattcctaattttagtaatgcttcatttatatagtcaataataaattattaattgttaaaaaaatattaatttcaggcgagagcagtagaaaataaagaaagtcggggtaagatgaaacttcaaggaggctggggctcaaagcctattgtttcacatgttgtcgagggggtaagcttatatattacattatcattgatttaactttttgtagtaaaataacaataataatatattttttcttaaaaataggctaaccccgacacaggggaactgccaactgcgatggaaacttttcaaaagtttcaccataaaggcaacaattggcgcaacgagtatgtgcaacaagcttaagtaagtttaaattttaattcatttctatttatttctttcaatttat

SEQ ID NO: 293046 - DNA, 516 bp, Cannabis indica
tattaaataccacccttatcgactaacatatagctcctcttcttgatcttaagtttcatttgattatcttccaatgttccattaacatccaaaatatgtttcattaacatccaaaatatgaatatctctaaaccaatgaaattaaacacattagagtttagaaaatcttacattgattgcagtggaataatatgactcctttcgctcagatctctaacccttgttcgtttgtgtcgcagagtattatcaagatttgagcttggatctctttctctccttcgggttggttaccatcgtctttcgcactatgattgagtacttgacttgctatgtgtgggtatggtactctatcactatgggtgaatttgatgaagaacaatgaaggagggttcaaaccactatagaaggtgtctctcatctactagttgtcagagaatgaaaattaggtttaagttttgttgaatgaatagttggatgatatgagatcatcatgttccttttatagtgtttcaacta

SEQ ID NO: 293047 - DNA, 726 bp, Cannabis indica
tataaaaattcgatattaaattatatcaataacctgacacgagtgccaagcaaacctttactcatagcatttctcttaaactaattttaaataaaatttagttaaattcagtgcattatgaattgtgtacatgtgtagagttatggttgactttgattgcactcttttgtgtattagcgtcattaaagacgtatacaggtgaaagatgtggtccccattattatcctaagcaagcaattaaattgttttcgtggcaaatttgaaagaaggaaaaaaaacagatgttataatgtcgtttttttttttcttaattttataattaacaaattaagtaataaatgtatatatatataagtagttaattattatggtctgttgtggtctggtactggtatttctatttcaacagttgatatagtttactggtttttccaggtctgagcgccactctgtctagaattcttagaatctaagaattggatggtccaaattttactatgctgacagagttgtccttgtttcgaagatagctttatatatatatattatctcaatagaataatattttgctaataaggtcctcttctttccggctaactctacaacataccatttaaaggatatttggatagatttttcattctttagtttttttagttcacttttatttttgttttcgtttcttatgatggtcatttaaaattatttataatttttttttgtagt

SEQ ID NO: 293048 - DNA, 586 bp, Cannabis indica
attaacgaagcagagtttgaatcgcaagttcgtcctgaaacccaaaggggcctaataaacagtctgccaaacggtacattccgcctgcaaagacacaattattgtctggactttcagagattgtgaagaattggcctgctaagaaatcaaagagatactatattaaaccagaagtgttcggagaatgccaagagtgttggatcagcgctgacgaggtggaagatgtgtgcgagctccataagattggaaatactgttatgtctctttggtgcaggtataatagttaataactaagttaatatctaagttaaaaattatatatacaactgtttattaataatctgttttaatttagttatttgcaagaacacacttaatcttggtgggttgaggaatacatatgcatttaataatcctgcttcggtatcaactgaagctggtaaactcaaacaacgttcagagaatctatgtgagcgaatgatgggtatgcaacctgaacaatggttgatatgtctgtggaattcagagtaagtatgcttttatattaataaatgtaacaaactaatggatcgattagtgagttgac

SEQ ID NO: 293049 - DNA, 704 bp, Cannabis indica
aatgaacaactgttattaattgaataggcccaaatactaattgggcctaaataaaatctatcaatatgtgacattttatttagcaacctagtccattttaattagaaaaattaaatgggctacctatatgcatctaagcccaaagcaaacatataagctcacacaggcacacagatttggatggatcctatcatgttactaggtttatacacagatgaaagaagaatgcaaaatttacctgttacaaattatttgtttgacctattgacaattgaaccatgggttaaaatcagatcattggatctgtcaacaaattaaccatgacaatttagatcaaacaataataggttttataaaacttgttttaataatcaaacaatataaaacacacaaacatgcaacaagttggatagttggatatagggtttatttaattttaaatttatcaattaatttaataatttcaaaaaaaaataaataaattaaaaaaacatttttttcggtaaatataaaataaataaataaattaaaaaaaattaaaattaaaatctaataaattgtaaaaaataggtttacaactaaacctaaataatcttttttaaaaaaaattagctaaacaactttttaaatttactatgttatttaaataaaatcaaatataaataaaataaatagataattaatatcattttctgtatttataa

SEQ ID NO: 293050 - DNA, 770 bp, Cannabis indica
agagaaatgttaaaatgtactagtggtgtttagatatgttgatattgttattagtttaactaaatatttggtcttatatagtttaatataataacttttaaaaatgaataattacataagacaccattttttgtaaaataattatatttttacgttcaaagaatatatatatattttttttttacatttttacagttttccaaaatataacacgtaaataacataaaatcaacaagaaaactacataaaagtaacatgaaaataacaaaataaaaataaaaataacatacagataacaaaaaataataagattacaacataaaaagaccgtattttctgtaaataaaatcaaaaaaatcgtaaaaatatttaaaattccataaaactgtatttttgtaatttttttttgttgttcttatgtttttgtgaaataatctcttttaaaaagtatcgttaataaattataaattaatataatctataactatattaaaagagagaattttgtttttgggctttcttaaagtaaatgacaaaaatgtcattgattttcttaattaattaaatatgttttgtttatacaaagagaagattatagggctagtaagctatattttttatcattatctataagtaatattgtttttaatcatatcattttgtaatatgtatatttcacatttgataatacaaacctatatatatatatatatatctatttgaagagagaaaatttaaaaaaaaatagaaaagaaacataatgtatatcc

SEQ ID NO: 293051 - DNA, 525 bp, Cannabis indica
catacacctatttacagagcttaacagatgagtatgaacgttcaatactagggtacaaccactataccacatacacaacgtacctcactgtacgagtgttggtagggtttactccgtaccctgagtaccactgagtgatataccacacaccttagcactttcccgtacccgtgttggtatcactgtatcgtactcacaacaacaacactcactataccaatgcactctgtatcatatccatacaagtgttggtagtgcaaatcacaatttaagcatgcatatacaaacacatatacatacattcagataatcacatcacatattatattcagttcttacctgttttccgaattcaagtgtgctggccgacctgaacggaaatctcgtgctagatggatgccctaatcacattttgaaaccgggtaagtcacatgattaaaaccctaatcccgggaaacccaaaaccaaaaccctaggttctgctatgctcttaatgggttattctaactctggaaatggggaaac

SEQ ID NO: 293052 - DNA, 740 bp, Cannabis indica
tttttattttttgattttttttgattagttgtttcttagttttaaatgtatttttttttttcagtaacttttgttgttattgttttcatttttgggagtatgtaaggtttcgtggttcttattgatttttttttttttttttttgttaaattcgttttttagattttctattttagtgttttattagtttttattttaatcagttgtttttatgtatttttccagttgttttagtgttatttaagtttattttatagttaacattttttcaagtgttttcatatttttagatagttgtttttatgttttttttttgttctaaatttttatgccttttttgttttggttgtttttaattgtattgttataacattagtttttggttttttttttttctgatgctcagataaatattttttaaaaattaaatatttagttggttgaatttatttttgagtttttatgttatacatttttacatgttccttttaagagttcagacaagtttgaaggttttgatattctaaaaaaaatcctccttaggtgtgtattttgttttcgtttttttgctagtacatttttttttgttactggtgtagttatttgttttttattgtatagctactttatagtttgtttattatttttatgatgtttttgtttaaactgttacaggaatgggattatatatatgaccaaaaaaatcagtttcttgcaaaagttgtctccactgctgtaat

SEQ ID NO: 293053 - DNA, 492 bp, Cannabis indica
attagttcggtactaatacgcgaagatcaaggacgacaatacccggtgaattatgtcagtaaacgattactggatgctgagacccgctatccccaaatggaaaaactggcgttcgccttggtaatatcgtcgagaaaattgcgaccttatttccaggctcacagtatcgaggtcttgacaaactaccccttgaggcaagtcttagcaaaaccagagacatcagggaggttgttgaaatgggcgatggagttaagccaattcgacatcaagtataaaccaagaactgcgatcaaggggcaagccttggcagattttatccttgaattccccagcaccgaagtagcactcatagaagacaaaatcgacattgctataaccaatagagagatgtggacattgtacgtcgacggagcctcaaatagcgaaggctctggtggcgggatcttattaatcaatccaagcaattttaaggtacacgctgctttacgtttt

SEQ ID NO: 293054 - DNA, 762 bp, Cannabis indica
aaaatacaaaaataacataaaatcaaaaagaaaaagagaagagagaacaaaccctaaattattaatgacgtctcgagtgatcttgagcttcttttggcagccataacacaactcttcgagagtgcactcgagttttttctcaatgggtggtggtttcaacattccagaagagttggagaacataataggattattattaatggagctatgtctactacttggaattttttcaaaaaaattaggtggtggagatgaagaactagaattacaataataataatccatagaacttttccttttagggttagtagtagaattattagggaataaataattgtctgcactttggtgtttatacatattattgttattattttggttgttttgactattgcatctaaagctatgattatgaaatgatcctgttgagctcatacttttccggttctcatttttctgtttaatatttttgttaccgagatcctgaaaaataaaataaaaaataattttttttattatatatcatcaatcagagttttagtaattaaataaatactagtgtgattaaaatttattaaaaaaaaaacaaaaacaaaataagattgatcgtgatgatcttccacaaaacgtgttagaaatttttgatatcctttaaaaaaaatctaggcatcttaaaaaagaaattaggacatttacaaaaaaattaaaatataagatcataaataatgtttgggtatgatcatgttttttttttattttttt

SEQ ID NO: 293055 - DNA, 650 bp, Cannabis indica
gtttttttttcgtgatttctccagttgtcaactacatcacgaatatatatatatatatatagagagagtgtgtggagaaggcactagacgataccgatcatctgattctcattcttctagaaaagtaattagttacaaggctttgtcgatacggcgtcgtttaacatagataattgaaaatcttcggtaagcgtaagcagtaagcacggtcggatttacacgtacgcaagctcaagaaaaactctccatagattgaatatattctataatgcaatcgagatatatcgataatctgtatttagacattttgtaaagttttaagaaattcgaaaaaatttaacacgttcgaaaattatttttaaaatagcgtgttggaagcgtgactattttattttatacgcctataaaataaactgtttaaaaattatttaaaaaattttacaccaaaaatacaaattacacactttattacatataaacctacacacggttaaagcaacttttttaccttttctctatattttattacacatataccacatacacatcacatctatgcaccagtcacgtcaactcacctatcaaccatcatgcatccctcaatcacttccctctctctttttcttttgttttcctttgattttttttat

SEQ ID NO: 293056 - DNA, 600 bp, Cannabis indica
aagtgtcatacttcgtcaagaggaagagttgcaatgtttaaggcaacaagctgccccagttaatcaagggttaccaccagctcctgtgccagtggtgggtaaccaagggtatattatgccgcaccgggactctgtgttcgagcggtttctgaagctgcaacctccggctttcctgggaggtattgatattattaaggctgaccagtggatgagcactgtgacccgtatcctcgatattatgggggtgacgggaactgagagggtgaattgtgcggcctttatgtttcaagaccatgcccgcgtctggtaggatatagtgagtcaaactcgagatgtcagtggtatgacatgggaagagttcaagaaactttttgaggaaaagttttataattttgcagtgaggacttcacaccaagaagattttgtgaagttgactcaagggaagatgtctgtggctgagtatactctggagttaatcggttgtcaaaatttgctggtgatctggtgcctacagatttcaccagaaaatagaagtatgttcgaagactaaatgctacaattagtcgggacttgaaaattaccacatcacatgacactctg

SEQ ID NO: 293057 - DNA, 616 bp, Cannabis indica
tatatggcttaaagggttgacagaggagttaggtttcaaatctgaggatatcacaatttattgtgacaatcaaagtgctttacatctcatgaaaaatccaatgttccatgagaggtcaaagcacattgatatcaagttacacttcataaggaatattgtgtcatccaagaaggtgcaagtgaagaaaataagcacacatgataaccatgcagatattttcaccaaaagtgtaactagagacaagtttaggcactgtctaaacttgttgagcattcaggacatttgatgtcctcatttatttcattggattagagattaagtgagtctaatcatgtggaattgttgggattaaattgtaatacccgggattaagaaaaggattagcaaaaccctaactagataattatgagttaattgaggaattatattattatatagttcaacatatgtgaaattatatgaatttaacatgttaagaccccgttggtgagccaggggcattttggtaattatgacccgagaagggtaaattgatgaaattaagttaattacgtggttaatagaactatattattatataatatgcctgtgttgtcttttcaggtgtgttctgaca

SEQ ID NO: 293058 - DNA, 504 bp, Cannabis indica
cacatagttcacataattgtgatcttcattctattgtccattgctctttatgagtattgatagacgttccattacctgtcattgttccatatattacatttacgtgtcctatttcatgttaaaacaataatacaacaacagtaaaacaatagcaaaacaaccaaacaaaattacaaaaacattaatacaacaacagtaaaacaacagcaaaacaaccaaacaaaattacccagtatattttttattagttttcttatgctattttgctgatacatataattaggaatgtttttgtattaataacgacaaaacaacattagaacaaccctaattttttgtatgaacaattgtagtagtttgtcaagtatatttaccaatcattttgtgttacaaacggcaaattaacaatagaacaaccctcatttatcaattcgcatcataaattaaacaacatcacattaattttttcgttttttttttcttaaacttcaaatctaaatctgg

SEQ ID NO: 293059 - DNA, 721 bp, Cannabis indica
aaagtagagatgatttgttttttatatatgataatagtaattataaatgactccttatttaaccccttctctaacgttttccttgatcattgaactactttattagtctctcttcctttttcaaccaatctttctcaattctgataagattcatttctttaaatattttcaacataacgtctacttttcaaagtgttcaaaatgtttaatattttcaacattgttgttgtttcttgatgaggttataactttaatccaatgcttaaatgtggaagagaatcgtaacaagtcttttgtaatagatggttctgatactttattgcgatttttcaaaaaagcaatggagttggttggaccattttggtataacgagacgaataagaaggaaaggaagaagacaatattttatttgaatgatgaaatcgaagacgaattagttcagcatatcatcaatgaagttcttcgtttcgaggtaagcttttttagtcctgaattcatccctatagagatcaaaaactttattaaagtgtttcattcaaaggtagaggatcttgaaagtaaggtttccaaagacaaattgaaaagaatccataataagataaatgagcattggagtaattgtattgatcaatatttggaccaagaaagtaatgatggtgatagctctgattatgtttttgatcagtggattttcttttctcaagtgttgagtgatgggatt

SEQ ID NO: 293060 - DNA, 626 bp, Cannabis indica
aaggcaaaaaaaaaaaaaaaaaaaaaaagaagaagaagaagaagaagaaaaatcgcacctgcgattgagaggaagctagggttaaaaatggtctgacggcagcgtgttatggtgtgagacgactaaggggcaatttatttacctaaagcttttatcccggtttttaaccaaaaaaccgggataaaaggtctgtccaaagtgaattaaagggtttaactaaagcctgtttggcacttgctattgttttatcctactttaagagagaaaaatagatttttaacttaccaaccaaacaaggcccttgatatacataagtcatttggagcttgtttggttggtaaataaaaattcaatctttaactcattttttactatggttttttttttttaatgttcaaccaaacagggcccttgtctaaaaaaatattatatattatttttgagatgccaaatctaaaagtgggataaaaagttgtaacatatcttttatcccactttttatttttgttaaggataaaaagtgggataaaaggtctcctttcttgtagtgcgtgaactatgtcaaagaaaactaaatggtatagacctcttcagttgtgttaagacaacagaggcagtgggatcat

SEQ ID NO: 293061 - DNA, 523 bp, Cannabis indica
ttagttttataattacttgtagattgaatagatgggaggaacagatagtgaaatggttattattgataatagcgaagcttctgtttggcctgaaaaaatatgaaaaaaattttattgaacttatggaagaagaagttttgaagggaaataggaatactacaaagcaatcgtggaagcgtataaggatgaatgcagaaaaaggtgtatattttgatggagatgaagacattccgaagtacaagatactactatacaaaacacccacaaaactttgaatgatagtgttgagtatagataatgactttttaaatattttttttttcaagattggagaattattagttcatatattattatgactttgtcagttttgtgttatagataatgagtttcgtgatttcaaattacttgaatttttttaagatactaatgagtattttttatttaattttttttataattataaatttatttaaaaataaaaataaatgatattcataatttttttaattaaaaaagtaaa

SEQ ID NO: 293062 - DNA, 546 bp, Cannabis indica
tgggacactaaggctacatcagaaaaactacataaagaaagtcatagagaatttctctatgactaatgcaaagcaaactaagcaacctatgactaatcagtactatctaagcaaagaccaatgtcctaaaactacagctgagaaagaatctatgagtgaagtgccttattctagtgcagtgggatcagtgatgtacctaatggtcagtaccagacctgatttagcctatgccattagtgtactaagtaagtacatggcaaacccaggtaaacaacactgggaggctatgaaatggttactaagatacttattgggatctacagaagtgggattaaactacaagagaagggacaatagcagaatgatcactgggtacagtgatgcagactatgcaggtgacagagatagtagaaaatctacctctgcctatttctttacactatggggtaattgtatcagctggaaagtacaactgcagcctgttgtagctttatctacaacagaatctgagtatgtagctgttacagaggctattaaagaagccat

SEQ ID NO: 293063 - DNA, 555 bp, Cannabis indica
cttgactcgggattcgggtaacggggactggacaaaccaatagtcggtgtatagatcaaggactcagactaggaccagaaccgagatgaagaaccaaacccaaacccacacccatacctgggacccaaaattggaacctgaagaagaatcgccgaactaggaccctagaacaagactaggaccatgaccaagaaccggaccctgacctagaaccgaacacagacctagcctcagacccaaactgacgctggaactcgtgcccggacacggtcgtgtacccagaccggaattgagacccggacttggacctaaatcttggacctgatcccaaacacagacttggacctagatagggatccgaatacgaacctggactcggaccaagaccgagactcggatcaaaattctagacctagatctggaacgagatcttgacccagacccaaacttggacctggacacgaaccaagacccatattggggagcagacctggacacaaacccggacacaaactcggaccccaactcaaacgcacaactagaatcagacccaaa

SEQ ID NO: 293064 - DNA, 784 bp, Cannabis indica
agactacaccatatcagattttcgaaatttgcctttgtgctagtaaatctttctgataagatggtggttactctaaagttgggcgtttagaggggcggtttttaaggggttttggcgtcggttttggcaaaattcgctaccgacgctgttccaggtgacgctatagggtttaaaacaaccgacgccatagggtccctatggcgtcggttcttatgataaaaaccgacgccatagggtcttggtatttactagctttacaatttcgtcttttagcataattatatatatatatattattttattattaatataattaaattaagtataaattatatacaataagcataaataaaaattaaattgaaaagttaaataaatacacatttacattaatctaagtgtttgtatattagctatctttttattaatattttatatttgacattatgtgtttgtatttttgtagtatattagtatattttttataatttttttaagttatattttgtataataattagtatattaaataataaataatgtgtaatattttttaatttttatgtaatttcatatttttatatatttaaatttttcaagaccaataaaataaaacaataatttaaggaccaaaataaatagaaaaaattagagaaagggctaaactttgcatgaatttttttgaaaactttgaatattaataacttttgatccgattatccatttgagacgatttttttttaacttgggtattttttcgcgttctacgcatcccaaacagccta

SEQ ID NO: 293065 - DNA, 759 bp, Cannabis indica
ggtgaaggagaacaaagactcatcaggtttgttatatataattgtgtatgttttccttctttaaatttatttttgcttataaatcttaatgttattggttcaatattaatattcttctgtctatttttcttttgcatgcattggaagcctttaatcttttttatgagagtgaaacatatcacatttagttctctatcacattaatttcactctctttcaaaaaattatgagctttcttttattatttaattttattttactatatatttttgtaggtatatcatgcaagtgcaacaattcaataaatcatctcaacaaatttgtaagttgttattttttttaaggcataaatagttaattttatttaattagtaacaaatattttagaaatttttacaccaaaaatttattttgcacattttattacggttttatccctacatgcctatatcaatattttacttaccatctttgttttattacaataataccacttactcattattcccatgtacagacacgtgtgccatcctcatcacacatcaatcaactcccactctcttccctctcttttttccttttcttttaatttgattttcgattttccttcagttttttttttgtttggtaagatcaataaccttcattgttaagcataactacccgtaacccattattcatcacggttttttccctctcattttttgttcttccaaaaattttcaactcccactcaacccacgattcctcaagtttttt

SEQ ID NO: 293066 - DNA, 259 bp, Cannabis indica
atttaaaattttctatttataagtatatttacatttagtttttaattgtcagattattagttttatttttgcatttatttagtctttgtgataaaagttaacttatttaaattaatttgttatatcatatttttttaatttattatttttaaatagtatttatatatttctttatttacttaaaaaaaaaaacaattgtaatattaattaaataaaagatatttacccaattcaacaaaaaatcacatattattacttt

SEQ ID NO: 293067 - DNA, 527 bp, Cannabis indica
tgaggtctttttttttcttggtatgtccggtgatgcaatttttttcgaaccctcggaacaacaaacccacctccgcattacaatgagcccatgagaacgttgtacatcgtcttttcttgtgtcgaaacccatccgtttcgcgtacatttcgtagaatgcttcccatttttctagtttgtcgagactctttcctagcacgtcatgtatttcaatctcattcactggttttgtgatgtttagctatgatgtgatggtttcccattcataagtttgttcgtctttcatgttggcttgttattgatttctaagaattgtagatgaagaataagggaaagagagtgctgaggggagtgaaattagattttataagtttaaaggcctgagataatagagttgtatggagttggtgatcacatttaaagttgttgggctgatattaatgggcctctaaaatattagaaactgaattcaactcctctcgtacgtcagaatagtacaatagtacaaatttgttttttttttaattt

SEQ ID NO: 293068 - DNA, 564 bp, Cannabis indica
aatattggaagataatcaagtaaatcttaagatcaagaagatgactatatgttagtcgataagggtggtattttagtactcttagactacaccaaatcaggtttttagacttgtgttagtgctagaaagtctactgaagtctctaactctaccagtgagactgaatattaagttgcaggaaagatacttattcagcctatggaaagttctatatagtttttggcattgtaccaataataaattaactactagtgttactttctaactaacacagaagtagttttcaaaaagtaaagaatcaagtatccttagaggagtagacatatagagaggaatttcactatatcaaagattttgtgattaaggagatgtaatggtggagaaagtatgtattgaataaaacttgtcagatcctattacggagagaatactacatactacactttatctggatatcaaggtgttgagattatttaaaatgcacttctagttttatattagtgcaagtgggagtttgttgggttgtcagccctaaataaaacacattttaatataatcaaattt

SEQ ID NO: 293069 - DNA, 481 bp, Cannabis indica
aacattaaatgttatttctgatcttatattaataagtaaacataaaacccaacacatacacctttgaaatgtagcaggagcgttgcatagtccgaatggcattcttctaaaagcgaaagtaccatagggacatgtgaaagtagtcttttcctgatcttcaggtgctatggctatttgatgatatcccgagtagctatcaagaaaacagtagtattcttgccccgccaatctatctagcatctgatcaatgaagggcaaaggaaaatgatctttcctggttgctttgttgagtttcctataatcaatacaaatcctccaaccagtaactattcttgtagaaatcaattcattcttttcattcttaattactgtcacccccctttctttggaactacttgcaccggactaacccatttactatctgagatggggtaggccactccagcatctaaccacttcactacttcctttctgactactt

SEQ ID NO: 293070 - DNA, 818 bp, Cannabis indica
cagacttatttagagccattaaaaaaaacacttcttatctactgagctgttaagtggccccttcacccttcagcccacaaatcaagaacatgcataaaagtggatctgtacccaaatcttcacataaatttatttctccatttcttcaatcaaaacaccctttcaaataaaaaattaaataaataagatttgagcaaattacgttcaatagattaaaggtaaaaaaatcataataaataatcgctccagtatcaaagttttttacccatgtgatccttcctctttcagtctcatgcaaaatcaaaacttcataagaaaaaaatctatcactttctataagctcaggtttctcctctacaaaccccacagttgataaaattcttggatcattcacaacagataatcaaccgagagtaaaaaccatcaaataaccaaaaaacccaagtcccttatcttcttcaataaatagtcgcctgcacaaaatcaaacgatccaacaccaaaattctcttttaagaatcaaccacttgaaaaccatttcaaactcaacaagattccccaaaccacttcaaattaaggagcatacagatcaagaacagagtacgaaatttcaacgacaatttttttattttttcattttttcctcctaatgggtaagactaaaatcgagatgagcatggatcaaaatcaaaacgaattcaattacgatcgaaattgaagaaaatcaaaaacaaaaaacctgattgttatcgtggcgtatttgggtgtgttcccgctctattacggagcttcagagctgtcattgctgataaaaacggc

SEQ ID NO: 293071 - DNA, 617 bp, Cannabis indica
aaaaaaatgtgtaagtgctaccgtcaattttttattacaattctactatttaaaaatatatgttggaatattttcttaattttttatggtgatatttattatagttacacaattattcctgtaaattttttaaaaaatttgaataatttaccctatcgaaaataggtttaatattttttaaacaggcgtggtaaattaaaatatcaggagctctcttttcaatgttataaactatttaatttttttagaatttataagaatatgattttgggtgaaggttgactaagagtttttaattataactcatcttaaaaaaaaacgataattacataagctaccattttttgtaaaaaaaaaattatatttttacgtttaaagaattttttatatatatatttttacaatttttcatagaaacaagacgaaaacaaaaaaaaaactatataaaaaagtaaaaataacataaaacaacaaataaaaaataacatacagatagcaaaaattcaacgaaaaattaacaagattacaatataaaatgactatattttctgtaaataaaattaaaaaaatagtaaaaaactttaaaattttgtgaaaccgtatttttgtatttttgt

SEQ ID NO: 293072 - DNA, 419 bp, Cannabis indica
gagagtaatgactcttttagttttcttgctatctttaccaaaggaaactgaaatttgcattttacccttgggtagtgactgatcgattttccttagtggtaaagtaaagcttgtcatcagggctgtcatcgaatcttcgatcggtgtcaaagctttttgccctactcctcgttgacttttagggatatacttaaaggttcgtttttggttagataccttcaagttctcctctttggactgaggagatttcacaagggatagtcgcttaatttgcggagagttttgtacgactgagttttcgtgacgtttgctctcctcaggtttccctttcaagatggtgacattagctggcttgtaaaattttgcatcgacataattcacttgttccccgtaaaagggattcgggtctgcattgacac

SEQ ID NO: 293073 - DNA, 734 bp, Cannabis indica
tatataagcatattttaggttgtatcagttagtctatgatgtcaagaattatcattagattgtattactcttgctttatcagctctaaaagccattgaagctgggaaattgaaacttaaacttggaggtaaaaatcttcaattctcataaccaatctttacaattaatcaataaatttatgttggggtttcaaatttcaatatatgtaggagttgcattgggagacagttggatatctcctgaagattttgtggtaaaaaaattatgatctgaattttcaatttctttttattttacaactatgggaatcaagtcatttcaatgtttgattttacaacttgaaggtgttataagctctaacagcaatgaagtagtacttatgaacataaaatgtggaatcatttgtatgaacattatatgacgtcatgaccttaattcttttcttctttttttgttgttgttgaatcaatttcaggacttttataactttctattggattcaggaatggattcaatttcatcatcttcaacaacagtacttcaattgtcaaaagagagtgcatacaagagatactcaagatatcttagtgtattgagatcatcatatattgcattcattatttacttttaattgtcaaaattataaattatattatttaaatatacataataataatctcacctaataattaataataattttttttaatttttaattgtatcacttttaaata

SEQ ID NO: 293074 - DNA, 687 bp, Cannabis indica
gagtccgaatcaaaaagttataaacattcaaatatcgcgtgcgaatctgcccagaaacaagggggcgggccgcgacactcctaacatggggccacagaacctgggttgaaacccaggattttctagggaggagggccgcggactaggttccaaactcaggaaatcccaaaaaaaaaaaacagctttgaaattcagcccaaacacacaaaaatatgtccaaattttcaacaaactcacaaattataacccattattataactcaacaatatagagatttaaaatatcaatttcatgcactaatccacaaccaacatacatgaaaaacatcatattaacaacttcaaaataagctccaaatattgagctaaaattccacataacatcaaacccaacaacttgagcaacaagctgaaatcacaagcttaaaactccaagaaatccacttcaatttcagtagtcttaaaccccaattaactaacccaaaattcatacaaaataatctaaaggaaaaccacaaaattaaagcctcaacaactcataacttcatcaaaatgaactcattctttcaatatgcaattaaaacacaaatcatggcatttcacacataatttaatttcagaattcagtataaaattcaataacatagaagaaaactaacctcaaagttcacacaatcaatgcacgcc

SEQ ID NO: 293075 - DNA, 832 bp, Cannabis indica
gaaaatagtatgtgtttgaatgtaagagtattggtaggagaagatgacaagacaggattcggatttggagtacaaggaactctcccttacacggggaagagtagacattgatcaacttggtactcattgcaatacattcatattgggttcagatcatgatacttacccaaaagacttctgaaggatatcaaagccatttgtagagccattctttggaaatgtgcatcagattcttatagtccaagagtttaggcccggccctgggcagtaggcgggctaggcctgtgcctagggcccacttagccccagggggcttaatatttttttttcctttttaaaaaggaaacttacaaaaatactggaatttgggttaacttttacaaaatactgtcacacggaattttttttaaaaatactgtgtttttataaaacaccagtaaaacacaaagcagaacaactcaaaacaacaatagaacactagtaaaacaccattagaacaccagtgaaaacttaacacagtatactgcagtatgaaacttataaaaaacacagtaaaaaagtaaaaaataccgcctggcagtatttttgtaaaaaaatagcaaaatttagtatactatgtaaatttcccttttaaaattatatatttttcctactgattttcaaaaatactacatttttttaactataagggtccaattttttttcctgtggcccactttgtttcagggccggccctgccaagattaattgcttgggataatatttacttaccggagtcagccggtggcttgggttttcgaagaagacttgattggaacctagctgcgatgag

SEQ ID NO: 293076 - DNA, 700 bp, Cannabis indica
gtaagagggtcctagttcaaatcatgtgtctggtttatcaaagaagtgaggaaactatttttcatgcacttatttcctgttcattcgctactcaatgctggcagaggcttttggctggggtttaggccgattagttctactgacttttgcagctagtttgatcaaattttgcaaaagtacagtaagtacaagtatggggaggcagttatgttgtgctagatgctcgaaatgatttggtttggaaccaaaaatatgttgcggtggattgggttcttatctcatctatgaattgtcttgtgcaatggaagtcggcccaaaatagaggttcacaggcttctttttcaatttttaaagttggtgatggagctggattttgggttaagtcgcaggagaatacaatcagggtaactgttgatgttgccattatttgtgattgatgtgcgtttagttatagcatagtcgctcgagattctcaagggaaattagtgatggctaagtcaggtagtttttgttggtataagtgcttcagatttggctgaagcgattggtataaagaaaacgctaagctggattaaaactcaactatagtagaaagtggagctggagtcagattgcttggcagtagtacaagctatatattcaaaaatctattacctatactttcttcttttggggttcttatagaatttatcataaactt

SEQ ID NO: 293077 - DNA, 540 bp, Cannabis indica
taaacggtttgaaacggtttgggctttacaaggcccataaaattggatttaatgttttttttttaccgtttttgacagtttgaccacttattatatgttccatttacaatactttgatatctataatcaaatataaaacttataatcattctaaagtccataataaattacataattcgtcaaagtcttaaattaagtccataataaattacataattcatcaaagtccttaattaagtccatactccataataagttccatagttgatcaaaatccataataaagtccatattacaacataaaattcaaactaaaatagtccaacctccaaataaaaataaagagtccaatgtccaaataaaaataaaaataaagagtccaatgaccaagttcattacaaacaacaatatttaaggaataacatgcatagtctagcttatgcccaatctagcttgcttcagctagagactccaaggtaatagtagaagcatcctctacaaaattcataaaaaaatgtaatgaacaaatgaattaattaa

SEQ ID NO: 293078 - DNA, 719 bp, Cannabis indica
ctgattgtttaaaactatcgggaaaaccaattttttagtagtgataaatcactttacatggaaatatttaatttgatgaataaatttgagaaagaattgatttctataagaaataattcttaaggaaaaaatagtaattttgtgaaaattattatttttaataattgtcaattatcaattgtataattaaagaggtatttaactatttagtgttatttattaaagctaaattaattagttaaatgtaatatttttcttaaataatattaaatggagaaatatattattttagtaaagataatatttattttaatcctaataaaataagagattaatgagaattaatcaattattatttattggcaaaataaataataaatcttatttatggtaaaattgagaaatcaatttggggctttaaaacatgacccacatgtgtaggcatgcattgtcccacacatgtatgatgacatgtaaaaactcatgtgaatttttttttaattattatattaaatatattattatataatttatttaaatttaaaagataatataaaataaaagaatataactaatttctgttattaagttatatgacatttaatttaaaattttaattaaaataaatattatcttttattttataggcttaaaaagggtttaaatatatatattttttaaaaatacatatatatctatgatatataacaggagaacaa

SEQ ID NO: 293079 - DNA, 567 bp, Cannabis indica
cgcatcttttgctcggatctctccgggagctgtctttgtacaacggctgtggtctccggtagtgtgtattttgcctagtggcgaagtacacacgttcttgggagtccgatagctccgtgtattgagtatattggggggtgtacccctttttctggcgcttctctcccgtccgggtgctgcctttggaggaccttttactccttgatccctgggaagggcctgttaagctagcagccggagcagaatgtgaaggagcttgcccatttactccggacgggttgccaaaatgagaagatgctggtgccaaagcttggccctggctatacccgggggtagcagagaactgtataccacttgtttgtggggtcgcagtcggggcagtacccgagggcgatactccgggcataaaccctgctattccggtggggtagtagcccccataagccacgatttgggcttcttcgaggttgatatatttttggactctcttctggaagtcctggaggctagcagccccttcttgctgcaactcattccagaaaggagtcccagtacggattcctgctt

SEQ ID NO: 293080 - DNA, 524 bp, Cannabis indica
tgtgggggcccgccggtattattgtgtatttctgtattatttcttttaaaaaaataaatataaaactcattagcggcgggcatttattaatacaggcggatagcccgccgctaatagggcagggatattaaatgcgggaaaaatcttgcctatcccattcaaaacccattagcggcagaccaataccggtgaagagttgctagctttagcatgtgggtcagatcactaagtaacatattatgaagggattgtagtgaacggtgttcgttacatggtagctgaacgtgatagaagcgtactacacaaaataacggtgtctctgcggcagaacagaaggatttaattattatggaacgctggaagatgtgatgatgttaactttttctggtgtgtattcagtgatattatttcggggaaaagggttcaataccaatccacggaggaagaaaacgatcattgagaataatatcattagtatcaatgagtggtgaatggtacaaagatgacccatttatacttgctac

SEQ ID NO: 293081 - DNA, 903 bp, Cannabis indica
tacagccatgtttttgccaccgggttcaattcacaccggtataggatgtttggcgacccctctgtgccatcgttgtcgtggaacctcaaccctggaaatcccaccgtctcagctacatccaccatatcgaactgctcttcctcctcaataattcggaggcgttgctcttccctagagtaatcttggacagagaacatcacattaaaagcatcagcagtagcgggaaccttctttccacgcacctttacttccccattccggcggtcgggccaatttgcaagaaattcacaggccatagtcacattagcccggccccgagcatccacaaagctcccccacttcatcctctcaatttgggctcgaattgtctcaaaccgtggttgacgtctcaaaggattttcagggaattcaataccccggtcttcaatataagccctgtttttcagtctcatgaaacgattctgggcctctatattaccaaaccgggttctatcaaaacccgtagttggtgggtttgatgacgaaccctcctccacatgcctagttcttttaggtgccatttttttctagcaaaaatagaatatatattttttttctttctgtttttttctttttttttcggatttttctttttatttttttctaaataatgctaaaaaaaattgggcagcacctccccttaattttctacttcccaaaaattcaaaatcaacaaaaaacaattccaaacactcaacaccacaatacaataataacaaacccaatatcaacaatatttttttcacaacacacaattattaccacccaaaatctataacaagtgaatcaaattccttaaagattgaaggaagtgatacttacaaacccaaagaagctttactccacctccattgttgaatgttc

SEQ ID NO: 293082 - DNA, 945 bp, Cannabis indica
catatgataaaaacgtgacacataaaataaaacgtgacacatataatgaagcttcaaaattcagtccactttgatgagtatgaccaatctttgttctccttccgtgttgaccacggtctcttcttgatttaagactttgtgtactaggctgttaagctcttccttgaatctcttagctcgtgccctagtcactggacccactggaattggacttgatacttggtccttgatgtcctcatcagaaacggattctcgttaccttattaaatacagaacttaacatgccacaacagaaaatataagagatttttataaaaatattagattttaggtaaaaatttataattttgctgtcacatggaattttttataaaaacattgattttttataaaataaccgtaaaacaataaaaatagaaacaattaaaacaacaataggaacaactaaaaaacaaccataaaacaatagcgaaaacttaacacggtacaaaatataaaacttatacagtatttgaaaaaaaaatatagtattttttttaaaaaaaattccctacccgtaataaaaagtaaaaaaaaaattaaaattatagtatatggtgtaaaaactccaaaatataacactacaaaaagtatagcagcaatactaaaataattttatgatgattgacaataaattgtatgtatataaaagtaattatataagcttacaaaaggaaaattcatctaagacaaaaaagagaaaatgaaagtctaaatattattagactaaatacctatctcttttgtatacgcacttaattataaatgttgagaattgcctaagcttgatcctaattcgaatatatgataaacagagaaaagaaagaaagtgatttttttttttaatgaatactagtgtgtgtatgaatttgtactaagagtaagtgtctaaacctttaaaagttt

SEQ ID NO: 293083 - DNA, 839 bp, Cannabis indica
ccaacgtcaagttctgcccagtcataagttgcaaagacctgggccctccggagaaagacctgagtaggcgcggtctgctcatagggaggaatcctgacccactccgtgagaagctctgggtgtccactgctcgtaacctgaaggagaagaagaaacgctggcgatactccttaacattagttttcctattataaggaaccaccccatcattggcaggaatccataaaaaccatctttaagtttgtccccctttttggggacagaaacaagttcataaaaatacaaaatctccgccggactgggagagccccatccccgggcggagtaaaaaataaataagcctgagagcaggcggtatgcttgaggaatcagttggtatggcgcaaggccgacaaaaactaaaaaattaacaaagtaatcctggagaggaagcatagccccggacatcaagtgcgtctggctccaagccccgaagccgccatagttatggttgggcgtctccgcatctcgaggcggccggtggtacgtcccggatgtggaaggcttgattccagccacctccacgatgttctccagctgatgggggcaggttaaggtggagtgaagctctgccgcctcccatccggtggcccgggacttatacccctcctgggcaacgggacccagggagacatcttcgagggtagctagacgcttaccactcttcttggacgactttgaaccagatgcagacatgttttgattctgaaaaaagagttaagattccagcagttaggccccataccaaaccctaaaccaagaaaaagggaatgggggtcccctaaccgctggaaagaggc

SEQ ID NO: 293084 - DNA, 272 bp, Cannabis indica
catctaagtaaaattttataaatattaaatttaaaatttatatttagaatttttcattctaaattggaaattttaattgtttgttttacatagttattgttttagtgagtaatcctccctaatggaggaacgttcattagcgaataacgccgtagaatctcgaaagataagtattttttttgtaagtgtttattttagtatggatcaccctaatggttgcgacttttataaggcttgcaaagtatgaaacagtggtggaagctcataagata

SEQ ID NO: 293085 - DNA, 374 bp, Cannabis indica
aattaatctcaacaccttgatatcattatcaagtgtagtctgtagtattctcttcgtaataggatctaacaggttgtattcaatacaacctttcctccaccattacatttccttaatcacaaaatccttgatattgtgaaattcgtctctatatgtctactcctctagggatactggattctttacttttggcaactacttttgcgttagtcaggaagtaacactagttgttaataaatgtaggtacaatgccaaaaatgtatagaagtatctttcctgcaactttacattcagtctctctagtagacttagagactctacataggtttttacacttctccaaaatcactactccgcccccagagtaatcacca

SEQ ID NO: 293086 - DNA, 623 bp, Cannabis indica
ggtcccgaccctggttctgtgtacctagtctggttccatgtttgggtttaagttcaggttcgggttcgggtcctgagtccaggtttgggttgggatccgggtccagctcccgattcgggtctacttttgatttggaatccgggtcttggtctggttacggtttgggatctaggtccaattttagttatgattcaaagtccaagtcctagttccagtcctggtcaacttcttgttttggttccaatttagggtcacatgatacgggttcgggtcaacttttgggtttgggactgggtttaggtccgggtgtgggttctggtcgtcttcagggttcgggtcttaggctgggccccaaatccagacaccgactacaggttttgtccaagctcttgttccagagccggatcccaatctcgggtctgagtctggttccattttcggtgccgggtcacgagctaggtgctaggttcaagttcgggtctttgtcgggtaataggtccatgtccttgttctgtttcccaggtccctatcatgattctgggtccaggtctcgcttattgtgtgggttttggtcccggtcaaggatcgggttccagtcctagtctcggttcgggtttaggtct

SEQ ID NO: 293087 - DNA, 697 bp, Cannabis indica
cttgaagcttggaaaaagtaaaaatggaaaatagacgcaatgcagttctaaaataagccttatggctggaagctaacacaaggatatggaaaagaagagtcgcagaagtttctaaccctagggttccctaaagtgttctttctacaacaaagttacattcaaagcgtaaccatgcaaaggaaaagcatagatggaaccagaaacttactcaaagattcgaatgtccgggttcaagtaagccagcaatcgtctgtaggcactttggcaattcagatgccagaaaattttctcttttcgctctgaaagtttacttaacaacgaagggtgatgaaatgatgtaatgtgccagtactcaaagtatttataggcaaaagggtaacagtacgtaaaggaaccttagacgcctcagcttctcgcctaaaacacgaatatgggaaatcaaaagtaattgagtgcaaccgtcagctgtggagagagaaattttgagtttcaaaatattaattgtcagagcattaattagccgaaaaccgaagggacgcccagtcagcttcacattgagtctcgaacggtcatgctcgacacgtgtccccatacaaaggcagagccagcttagaataagtctacaagcaatctcggaggtcccgtacagacttggagggcaaatcttatcccaaatttggcactctgacgtggcatc

SEQ ID NO: 293088 - DNA, 612 bp, Cannabis indica
taaaaataccttccgtcactagtgtggaacttccgtaggtacctcgtcgttaactgacaggtcggcatctatgtgtcactcattaattggtccatgtcattaattcttttatttattatttaaataattatttaaatgtttaaatattataaaaaattaataaaaaaactaattataatttattttattttttaacatttatttcttttccatttctttttctttgaattaataaataaactcaattgggaaattgaaaggcagaaaacaaaacccagatcgatctagatatccaacttcaaacgcaaaaaaaaaaaatttaaaagcaatccaaaaatatataccctatctatatcaactcactattttccttccctattcatcatccaatttcaaaaatttagaaaacaaatttatataaacaaataaaatctcaaatccaaacaaatccataaatatataaaacccagaaattacaaacaagccaataaatttcagattcaaacttgttgcattcaaaccaattccttacaactacacagactatactcagatttatacacaaataaatagcaacatttcatcaagctccctcattgaaaccaaaaaaaa

SEQ ID NO: 293089 - DNA, 571 bp, Cannabis indica
tatttaataactaaaatttaattattaaataatattttcatttaatatatttattaattagacttatcaaagtctcttaattaataaataagacttaggatctcttttcttcacatttaagccattgcttactgaaaatttataaactagacatattctaattttagaattataattgattaattaaaatcaatcaattgagtcttacaagcagtatggtctcaactagtatggggaccattgttacaaaaattattaattactatgcaagtgcacacaatcaagtagtagtctcacgcaagtgaggtcgaaccacggggaattgaattaattactactaaattatacttataattctattcggcaaatcaatagtttttataattgaaaaagaatgaaagtaattcagaaaacttcaataacacaagtgaaagttgagcaagatgagataatagggaggagaatcctattgtttgtttacccaattgttaatgcctaattgctattcttttcttgaagtgaatgacagattataaactaacctaactcttttcagatcttttaggttcta

SEQ ID NO: 293090 - DNA, 915 bp, Cannabis indica
gaccttttggttgtcccgtcgagggtttcgaaaaatgacggctgtaattattagtttttattacatttatggtgccacgtcacaaaactcctcggtttttgtgtaggcgtggccatcgttggccgttagattgggcgaccttaggcattctggctgccacgtgtcgtaatcccaattaataagggatatgggtatttaaatcctttgatacgaatcaaaaactcccatttttccctcttgctcttaacttcttctttccctccattacagacacttcaaaaatccattcccagattttctaccacttttccacaacattctcaatctcagaagtgatcgagagcaatcgcagaaatcagaactaaaggttagttttcaagtcattgcattttcgttttctgtttggagaaaatatgctttactttctgggttcgggtattttaaaggcttttttaggaatgtatgctagtgggtgtttatgaggctatgtgttttaggtaagtaaacctgggtaaattcatagaatatgacctgtaaactgacataaccgcacacaattcataggcactgtttcacgtcttgaatactcgcggatattcggatgaacaacttgaatattcgctggtgttcagatgaacagcttgaatactcgcatattgccaagatttacttccatttgactgttagctagatcttttaggatttttatatgtcgcgggctgagttgcgagggtattaatcgctattccaaatggtgggtgtgtcacagtattctaatggccatatacgcggttatatgccccttgagatactgagatacacccagccatttgcgacatgcgttaatattcaaatgagcgtactctttggttgataggtagtctcggaacggtgggggtctcccagtaacttcag

SEQ ID NO: 293091 - DNA, 620 bp, Cannabis indica
attttacgtggaatgaaatcaaatcccataattttaggggaatattgttgtgggatattaatctgattgtaattaactgcatccctatgtaactataaatagggacagaatacactgaaaaaaggacgaaaaatccttgagagaaagaaccctagttttgtatcagagaaatctaataaaatagactcgtggactatgcagagttttaactacaaaattacgtaaaaagctttgtgttatttttttcttctttcattattattatttctgtgcaaatcaatcacgaaataggctttaatattgttaacgaaaatctgcgttaacaataatactaatactaattataatcaaaatatgaagatacatcacgtaaaattttattattattattattttattttttaaaaaaatgataatccaaatatcattttttaaacaataccatgttaaaaaaatttaatattaattaatctaaaaaaactcaacctaaatatcactttttttttcacatttttaaccatattaaattttaactaatcttaaaaaaaaaaactcaaaatatgaagatacatttattattattattattattattattattattatttaaaatgataacc

SEQ ID NO: 293092 - DNA, 613 bp, Cannabis indica
ataatgattcacctcgtaatacatagcagtgatcatccacctcgtaatacatagcaatgatgattcacctcgtaatacatagcagtgatgattcacctcataatacacatcggtgatgattcacctcgtaatacacatcaatgatgattcacctcgtaatacacaacaatgatgattcacctcgtaatacacaacaatgatgattcaccttgtaatacacatgcaaccatgtattgccttgtattacacaatagtagtgcacctgctctcaaataacatgatctgaccaagtcaaataccacttcaaagaccacttttgcatattttaaatatgaaaaagttatttatacttatccaaatattcagttatatgttaaacttgagtagtaaccacccatcaattgtaacttttcactaagataagattgagtaaccaccatcttattcctataaataggggttcactcgaaggaaaaaggggagaacaattttgatttacaaaaactttgccaaactgtaaacataacccaaactcagaaataagatggacttgtagagtatgtagattttaactacaaaatcacgtaaaaatatctagtgttcatttattatt

SEQ ID NO: 293093 - DNA, 532 bp, Cannabis indica
tgatggaaacttgtaacaaggattacttggatgtgaagaataagatgttgaaaaagattgaggagtcactcagaaggaggcaaaatactcagcctacggctatactgcagcgttgcagtattgggcatacgaggccatattacagctgggcaacgagtatgcagtgaggaggtcgcatcgctttccgagaatggtcaactgggagagtaagccgaacactacactcgggaaggatgaagtgaccaaattatttgctaaaaatgtaagtttgttacactttatgttgaattcatgttaatttccatatattatattaatatatttgttatatttttcagttgacagtgtactccatcttatgtcctcggccggaacgaaattgagtttgtgagttacataaccgggggtcgagcctccgttatttgtttgacttggaggaacttagtgttgggtgaggatgggcaaccaacacaggatgctttgcgaagccaggccgaaaagcttgcctcccattggaagaacgagcggaggc

SEQ ID NO: 293094 - DNA, 659 bp, Cannabis indica
ggggaaaagctaattttgtagtagtgtgtgccccaaaatcaaacaaaatagagtaaaaagagttgttgactgagagctgacctgtcacatttgaaggaccagcttcagcattagcctgggtaagagcaaacacccttactatagtgggtttgcctttgtcttctgctcttcttttcatagctacgagcagtctcttttgtaacatctagttacactacactaaaaacatcctcgacctctacactcacccagatgatgcttcttataactggggcatcttgggtaagtgtattggttctcaaacccaccctgtccattaatagaaccttggttccctcaaaacctcttgttttgacttgagccactggacggaaatggaactttcatcttctaataagtggttaagtcactacaacccttactaaagctagaggtaggaggagtagtggctctaccaacactttgagtctccgagactcctgaatgcattctactacaccctcaactcatagtgccttctctatcataatagcataggtagtcatgtcatctgtggtaatcatcaaatcatgtttgattttggggttcaatcccaccaaatactttcctttttctcaaatcagttggcactatctcgaggctaattgggccaacctatc

SEQ ID NO: 293095 - DNA, 755 bp, Cannabis indica
taaagtgtaaaaatgaaaaagctatatttttttaataataggatgtatttgcaaatagaacttcccaaacttaatttataattaaaaaaatttaaataaattttttaaaaatagttttactttttttttaaaaaaactaaaaaattaaattaaaaattagttaataaacacagcctaaataaataagtgattattttcaatataaaagttgaaatcacgcgccaccgccgccatatcccactgctaccgtaaccaccgtgggaagaagcttaaagaaggagagatggtagtctaatgatcatatgtcgctcagatagagaaaacctcccgaacacgcttttcttttctcgtctcctcttcttattcttcccgcatcaactctgagctgagaactcatcgggcactattgcaggttcccttcttttttattctattattttttatgtatgcaattcgtaattcgctgacttcttttagatttcttgtgtatatgttatgtgggttttttcgtagttaattgataaaatgtcttagattcttaaacttggactttgatttgattacaattgagattttgacctgaaaccagatgagatttggaacttaatttgggagaattcgagaattgatgcccttgttgttatctatgcttaagtttttggtcaaatgcattcttggaggtttatattaattgtgtacaactgattattagaaacaagattgactttggtgtcatgactcattgagtcattgtc

SEQ ID NO: 293096 - DNA, 651 bp, Cannabis indica
gaggtagttttacagcttttaattttgattgttgttgctgaatttgttggttgagaagcatgttttctaagtcttaatgctcttgattgcatgagtgttaatcttgatgaattgagtgtgttaatctttggatttaagttcttgagcatggattttgattctagggtactttctaatattgaatcatgtgttattgtgatgttgtgttggctggaaaattgtttaaatggctgaagatgaagctcttgttcttgagcttggaatttgcttagtttgagcatgattttgttgtgtttatgcaatctgaatttttggcttttgcaatgagaatttagatgcatttgagttgtgatttttgagccttattatgcgtttttaccctctgtttggttggggttcgaaatctaggaaaggttggcattttaagaccttaaaaatggagttttggggtgttctaaacccagtcgtcgcgacgggattttcggccgtcgcgactggatttggcagtgagaaattctgttttctcaattttgttttggccataacttttgactcgggactccgtttgggatgttctttatatcgttggaaagctcgttccgagctctatttgattatctatgttttgaatgccatgtttatattttgtga

SEQ ID NO: 293097 - DNA, 595 bp, Cannabis indica
ttaatgaacataataatttttatattagtatgtgagaatatattaatattttgtataaaattataattatattttttcataatatagtaagtttaatagaatatagataaaaataatataggattttttttcattttttatactttaaaataattttttttttttgtattttttacgcactttcacagagaaactcctacagcaactaacagagtaacctaaatcgcaaccgaaagaacccacataagagcaactaatgcaacccaaactgtaattttttttaaaaatagttaaaaaaaatagtatatgagataattctcttaaaaaatatacaatacgaaatgaatagctcatgtgttactccaacaataaatactattatacttgggattcccataagaaaataaggaaatatgtgttggaaattattttaccaggatcttagatctacttacaagtatgtttattaacatcctaaatatgcactttctaaaacgatgaaataaacacatataaagtttaagaaaccttacattgggtgcagcggaataatatgaatccttccgttcagatatctagcccttgattcctttct

SEQ ID NO: 293098 - DNA, 1191 bp, Cannabis indica
aatatattgaatgaagacattgcatatgcctttatgagttaattggaaatggtcaataatgaacctcagtcttatgaagaggccattaaaggaccaaattccaggaaatggaaaggtgcaatggatgaagagatggaatctcttaagaaaaatagaacctggattgtggtgcctaaacctaaagacaagagcatagttgactgcaaatggttattcaaggaaaagaaggcagaactaagaaagaacctaaaagatataaggccaggttagtggccaagggatttacacagaaggaaggcattgatttcaatgaagtgtttgcaccagttgcaaaatacaagactataagaataatgctaagtctagcaactcaatacaacctggaaatagaccaaatggatgttactacagcttttctacatggtgaactagaggaagaaatctatatgagacaacctaaaggctacacagaaaagggaaaggaaaaccatgtctgcaaactagtaaaatctctatatgggttgaaacagtcacctaggcaatggaataaaaggtttgatggatttatgctaaaactgggattttctagaagctactatgatcattgcctatactacaaaggaactgatatcaacaaagtcatatatctacttctgtatgtagatgatatgcttataatcagtaaggaaagagcaagagtaaacacaatgaaggacctactcaagactgagtttgaaatgaaagacctaggggaagcaactaagattctaggcattactattaaaagaaacagagcagaaggaacacttagcctaactcaggaagactacattcataagataattgagaaattctcaatgaagggatctaaaattgctagccaacctataactacacagtttacattatctaagaagcaatgccctgagagcaaagcagagaaggaggaaatgagtaagataccctatgcaaatgctattggatctgttatgtacctaatggtaagcactagaccagaccttgcttatgctattagtgtacttagcagatttatgacaaatcctggtaagacacactggcttgctatgaaatggttactaaggtatctaattgggacaactaagctaggactcaaatacaagcaacaacaaggaagaacagcaatagaatgcttcagtgatgcagactatg

SEQ ID NO: 293099 - DNA, 514 bp, Cannabis indica
aaaaaataacgacaagtacgtgacaagagtaaccctaacaccagagaaggtgaatctagacctgttacgtgaaaaactcaaaagaatacattcccagaaacttcaaataccaaacccagaaaaacaaacaaataagtaaagcataccatagacacgaacagtaaagcaaggaatgcgagaaacttacagtgaagtgttaaaactggggattctgttgtcgatcaaacaaaggaaaagtaggctgacagtggtgaatgaaggatagcagggaaatttgtaaagtgttcgaacgttttttcttagtctaaggattttgctctgagaaacccgaacaaagttggcaagaaatggaaagtaaccaaatgaaggaaagatggtggcttttataggccaaagtgcatgaggaacaggcgctatcgcctaccaatcgaacggctggggaggcgcacgattcgaattcccaaaaatcaacagttggattgattcgtaattaaggtggtggaaacgtttgagt

SEQ ID NO: 293100 - DNA, 609 bp, Cannabis indica
gatccaggaaagatagaatccgtgagggattggccaaaaccgaaaacagtgacataagttagaagcttcttgggtctggctggttattatcgtcggtttgtagaagggttctctaaaatttcaacacccttaaccgagctcactaaaaataatcagcattttgtatggacggataagtgcaaagcaagcttttaggacttgaaacagagactaatgatagctccagtgttagccctaccttctgataaagagaagtttgtagtttattgtgatacatccagacagggtctggggtgtgtactgatgcaggctgatcgggttattgcctatgcctcccatcagttgatagattatgaatagcggtacccgactcatgacctagaacttgccgctgtagtgttttctttaaagatttggcgatattatctctacggggagagatgtgaaatttatactgaccataaaagtctcaaatattgctttacttagaaagatttgaatatgagacagaggtgttggttagagttggttaaggattatgattgtgagatcctttaccatcctgggaaagccaatgtagtggttgatgccctgagcaggaagggtccc

SEQ ID NO: 293101 - DNA, 534 bp, Cannabis indica
ctgtcagcaaatcaaagctgagcatcaacggccggcaggattacttcagccattaacactcccagaatggaagtgggaagacattgcaatggactttgtggttggcttgcctagaaccacaggaatgtacgactcagtttgggttgtggtggatcgttttacaaagtcagcacatttcttacctgttaaggtaacctatactgtagatcagtatgctgatttgtatgtgaaagaaattgttcgtcttcatggagtaccgaagtcaatcgtttcagatagagaccctaaatttacatcaaagttttggatgagtttgcaaaaggctatgggaactaatttgaaattcagcacagcctttcatcctcaaacagatgggcaatctgaacgaaccattcaaatacttgaagacttgttacgagcttgtgtcatggattttggaggtcgtggagtagtattgctctgattgaatctctatctaatagtatcaagtaccatggaaatggctcctatgagctgctctatggcagaaagtgt

SEQ ID NO: 293102 - DNA, 695 bp, Cannabis indica
aaaaaccgatccaatccaattatatttatatatattaaaaattaattatatatatttatttaataaaaatataatatatattaattatatttttattggaatttttttgtgtaaaattaaaaaaattggttattttatgtatttattttcatgatattttatattattttattatttagaaatgttgttgttctaattatttaaaacttttaattgtattacattgtaaagatggtatgtttattgaatattaaacttaaataaagagtaatatttaatttttacctattttttttttatattttaatgttaatattaaaatttaagtatgtaattgaatatccaattaaaaaactgatccaatccaattactaattggatggaattgaattttgatgtctaattggattggatcaaatgaggagaaaaatattaaatggaaaacttacaaaaatactgaaaatttgagttaacttttacaaaaatactatcacacgaaaaagtttcaaaatactgtgtttttataaaacactagtaaaacacaaaacagaacaactcaaaacaacagtaaaacaactaaaaaacaccagtagaacaccagtgaaaatttagtacagtatactgcagtatgaaacttataaaaaaaacaacagtaaaaaaataccgacctgacagtatttttgtaaacaaataac

SEQ ID NO: 293103 - DNA, 549 bp, Cannabis indica
ttttggagattctttcttatacttgcattgtttttttagcttgctgctgaggccggccgtctctccaagaacataatcaaccatggcttcgtcctgtctaattttggggacatggacgaagtcaggaagattcttcaggatcttactgctgagaggcggctttatcaagaggctgctgagtgccgggaggcacgctgccaaagctaatgaggaagaggctaagcggtgggaagcccaggcggaggcgatgattcgggatgaggccctgcggagagacaggctggaggccaggcaccaggaggagctgagggcggaaggtgaggccactgcaaaggccaggcaggagcttcgggaggtcagggaagccttggatgagatggctgccaaggtgagatccttagaggaaactcaccaggaaaacttagagtccagggccgctctggccgcagagctgaaggagctcagggacttcaagaaacaagcctcaaagaaggcaaagagggctgagcttctttctcccgtttcctgcagccggtgcaccaagcgttt

SEQ ID NO: 293104 - DNA, 614 bp, Cannabis indica
tatgtgggtttgaagctcaagaatcaatggctggaggtatttcgatccttattcatagtgtatatatgtttgatttaattccgcattttatacataaacatatatatttcagtttatacatataaatgtctaacagttggtatcagagcggtttttatctctgccttgattttagtttgagtttcatatatatatatatatactcgtatatacagtgtttatatatatttaattcagtgttgatatatatataattgtttcattctgtttgtgtatacatatatatatactcatattcatctaaatcccaaatatatataaaattacatacgtatatacatatatatatatatttattcatacattcatatatatataatacatacacgtacatacagtatatatatatttttatcggtatatttatatatgtatatatgtttatatatattatatatattttattacataataatatttataatattcatttattattatgtgatatatacatgcatatatatataacataaaataaagttatcggtgtaaataaagtttaatttttctgtttttctattttttcggtgtttatttcgaattctaaatatatt

SEQ ID NO: 293105 - DNA, 752 bp, Cannabis indica
atttgttagagagatatgtgggtaagatgtatttttttttaaatttaaaaaaaaagattgtttaattttttggtttaattattgggtttatttatttgttaacatttaacgttaacaatctgttaagttaatcgtataaggctaaataaaaaattagtttaaaaaaatcgttaaaccaacaatcactttttatatataaagatatacattaaaattataattaaataataaaccacatagtttataatataatagtactgtaaatttatggttaaaattaatagttgatgatactatgattttgatgttatttttttttggttagttcttcaaactatttataagcaacaagcgtacaacactataaaacaatttgatatttaaaatcttcaaatcaatttactctggtaatttgttcgtgagatgtaatgattagtatgcaaaattgtatattttagattatttttattaagtgaataattaaaattaaatatttgttttagtagtcttttagtgccaaaattatttcataggaaaatgtttaaattggtgttaatattttaagacttggaacaatatggcaaaaattaaaaagtaagaaaaaaaaaaatggtaacaagcccatcaccaaatgggcaaagccacattcaagtttagaaagctcattatttgtggggctttttcaagtaaacctcaaaaagtccaattgaatcgtacaaatctctactgggggttattactcatttttttac

SEQ ID NO: 293106 - DNA, 571 bp, Cannabis indica
cttagatctccatccaccttgaaccttcatgttacctcagtttttcgcattttgctcagctcttgcctgtaatttaacgtatagttattgttagcaaattgagaaaaaaaaaatattaagtaaataagaaaaattattaaaactttcaaataatacctgttgtttcgggtctttccagtatgcgataacctccgcccacacctccggtgtcaccatatctggacgtgatcttctgtttgcttcttcctccccatatttttcaatattctccttccatgccttcttcgtgtctgatctccagtcacgtaatccttttgacatagatttggtgacgtaatccacgaacataggattattagttggcaacttaatcttggtctgaaaaaaaaaataccaaagtcgtatatattgtattttttatataaaggattttcgtttgatgtgttattaaaaaaaattaaaatattaccgctattctatcccatatagtctgaaatgagtgtagcctcaaacgtcctcccactcaaacttgttcataaggatagtattgcgtaaacaagaaaactttatg

SEQ ID NO: 293107 - DNA, 749 bp, Cannabis indica
acgtatattaatttttaatattataaataagggggatattatggtagggattggatattttacctatcaatagggataatgatttatagccattgatttaatccaagggctcaaatcaactcttgaaaactacaccaaaattaatatatttttttatttataattaatctttaatattattaattgtaggttcaactaacaaactccaaacctaatatttttatctttctattttatttctatttaaaatttagttttaattatattttttttatttcaaatttacataaaaaatattttaattaaatttatttttaaaacaataattatacttaaaaaaacctataacatattcaacttataataattttataataatcactcttaaaataattaaaatgtcacgagttcaatactttagaagtaatatttaatttaagatttacaattaatttaattgtttgaaaattctatcatattatattaattaattttatttttctaagattataatgttcaatgtatttaaaaattttagacataaaattaatttcttacatcaatcacatcatctataaaatcatgcatgaactagtaaataatatacatttatagtatggttattcttaaacttagtttaaggtagggttacgtgaaaagagctcaatcaacagactagttcccaactggaagaccagttcctggggatcaaccagtcgaccggttgttacaggctcccctgaactggt

SEQ ID NO: 293108 - DNA, 903 bp, Cannabis indica
cgtcaagtgcaggtcgagctggtctatctgcgagaacaaaaaagagcgagttagcataagatctcaaagtaattcagaaaatgctaagttagaaaacatgcgacgtactaggtctgcgattaaaatcagttctaatccctgggactttgaagatgtagaaccattttgatttccagtctcccatattcgacaccattccttctaccccattaatttcagaagtcgcccatttgctaaagcagtagaaaccgttatgaaggcctacgctttttatatcgtagaagtagctgaactcttctaccgagggagccctatgaacgtactccatatacatcgcgtaaaaggccagggtagtgcgataactattgggagttagttggaaaggtgatacatcatatcgtttaaggatggccgcgatgaagggatggaaagggactgataccccacatcggagaatgggtattgagattaccacatcctctgtgggaataatcgcaggattggtaaaaggaaggtgcgccctctgggtcggtttaggtcgcaaaaaagcaagtcgcagcaggtttagcctcgtaaaggtagtgaagtctgatttggtaactctcgaaatcagatcctcgcacgagaaaggctcgttcagctgggcgtcatcgaccgagtcagtcccgctcccttcagcctcttcttcatcctcgcctgattcgcgagctggggccgtccagtcgtcgtccatctcctcgacctcgacgtcaggagcatgcctcgaatgaataaggtagtcgcgggctgacaccgtagactcgctgtctcgaatatcgatggtcccaggttcagcgagctcctgcaccattctctcgatgtccgcagaagcatcgggcctagctctataggtgcgacctcctc

SEQ ID NO: 293109 - DNA, 703 bp, Cannabis indica
gatggatgccctaatcacatgaattataacatagatgagttactcgctaaataacttctcggggacttaaacttgaaactaaaagtttccctatcgataaataacatggcaataccctaaatatttcaaaaatgggaaaactagggttccaaaaactcccccaatcggcagaccggttctcaaccggaagtctggttctgggtcaccaaccggtcgactggttgctataggtcccccagaaccggaattccagttctatgctgggaacccgaaacatccccccatgaccttaaaatccaaccaaactttaccaaactctccagtacacctgtatttacaacctaattcaaccagaaaatcacagaataaaccaataaattccaacttgccattaaagacctaaacttgagtttcaaagctcaagcttacccaattcaatctccacctttcaaaactaataatcagagcttaaaaacaactcaaaactaaactagaaatcagattacacaagctttaaaccttaacagcccctattctcaaaaatcacatgctcaaccaaagaaaaagcttcaaaacacataagcaagagttctagggtttacctccacttaaagaacacttaatccttagcttaattccagaaaattgaggaggagaagttggctttcctttagttttgcctcagccgagagagagagagaga

SEQ ID NO: 293110 - DNA, 527 bp, Cannabis indica
aattgaattagcaacataattaactttaaaatatatgaaatttatttttcattgaatattttaaagttaattttagaaaaacacttagttaattgagatacattctagatagtaatttctagtagctaattacattttctaatatttatttaggaaaatattttaagttgaaaattattaattttggatcaacttaattaagaatatttttttcctagtattaaatttgaattaataattaagtttattttacacttgattatttaattcttgtatttaatacttttaattaaattagaaatgaaatatttaagtagatatcattcttgataattaaatattattatttttcagaatatttaattaaatagaaaattattttaagttggaaattttaatttcagaacaacttaaatcttgaataattttcaaaatatattttatttttattttattaattatttttttatagaattcgaaattgcatttttttaatttaaattgcagaaatttttaatttttttttt

SEQ ID NO: 293111 - DNA, 620 bp, Cannabis indica
ttatgtaacagttaaacagttaaaactttttgtaaataattttataatcgggatcccgagtcttttgtaatattgttttataagtttaattaaaaagcaaaattttaattaatcacgtttttccataaacctcgttgattagcaacgagctgcacagtacgtttaaaaatcacgtaatacgcctaagttagttagggtgttacagcggggatgcctgaaacagagttccaaagggtggttcagatttctggttttactagaagctcagttccttttaagtaccttgggatcccaatttgctcaaagagaatctctcagactgagtgtaatactctggtagacaaaatgacggctcgcatcaaaatatggagtactagagacatctcatttgcaggtagggcagttctcatcaattctgtcttgctaaccattcacacatattagagtcaaatcctggttttaccaaagaaagtggttgctaaaattgaaagaatctgcaggagttttctatggaaaggctctaacaatatgttaggagctggagccgtagcctgggataaagtatgtctatccaaaactgaaggtggaataggttttttaaatatcaatacctggaataa

SEQ ID NO: 293112 - DNA, 653 bp, Cannabis indica
gttaatagcaaagaactgtaagtattaaaggaatttgtaaggagttaatacctctttttctcttcttctttcttttcaacttgacaataggtgtggagaaacaatcaaatatatccatgcttcctgcaaagacaagacaaagatgtttgaagcgagtaattgttcaagtagtaaaggaattagtaaggaatcataccctccgagctctcgagctcatggttaattattgatgattctttcgagcaatcatgtttatgcttcaatccttgttcgggggattcaatgtgagtgtcatcctcacagaccgaagggataatctcaagttcgttgttagcttcctcgcgttggggaagatcatccaaagtctcctcagaatcctcaacaatatctatgtttgctggagagcaatgcagctccataggaagattgaatcgagggacaggcccatgatatgccttcttaaagcgagaaccagcttggcgacaagagtcagacaaaccaagagaatgtgacatatcaaagagaccacactcacgaaggttatcatcagtgagcaagacttttgaactcttctcctctgaaggcaacttgctgatttgctcaactcgactgattatctcgttatcaaccttggatcgcttgaatggccctat

SEQ ID NO: 293113 - DNA, 644 bp, Cannabis indica
taaaattaatttccaacttaatctaatttttaaaattgaaaaatttcgaactatctgcatttaaaataaataaatgcagaaattaggtgggaaaatggttattaaaataaaataaaatatattctaaaaattattataatttaagttgatctgaaattaacaaattttcagcttaaatataattgtctaatttaattaaattcattaaaatagaaatatttaagtatcttgaataaaatcaacttaattattaaatctaatttaatatgtaagaaaatattctaatttaagttggtctaaaattaattaataaattaatttttaacttaaacatattttgcttatttaattaaatttcatgaaatagaaacaaataattaagtatcttgaataaaatcaacttaattattaattatatttaagtttctaagaaaaaatattctaatttaagttggtctaaaattaattaattaattaactttcaacttaaatatatttttctacttaattaaatattagaaagtataaattagttactagaaatcactatctagaatattttattaaactaagtgtatttatctaacttaattttaaataatccaatgaaaattaatttcctttattttaaaattaattatgtt

SEQ ID NO: 293114 - DNA, 545 bp, Cannabis indica
tgtcccccttcttggggacggaaaaaagttcataaaaaaacaaaatttccgccgggcggggagatccccatccccgggcggtataaataaaaaataaataagcctgaaagcaggcggtatgcttggggaataagttggtatggcgcaaggccgacaaaaactagaaaattaacaaaataatcctgaagaggaagcatggccccagccatcagatgcgtttggctccaggccccgaagccgccgtagttgtggttgggcgtctccgcgtcgcgaggtggccgatggtaggtccctgatgtggaaggcttgattccagcaacctccacaatgttctccaactggtggggacaggtcagggtggagtaaagctcagccgcttcccatccggtcgcccgggacttatacccctcctgggcaacgggtcccagggagacctcctcaagggtagccatgcgcttaccacttttctttgatgactttgagccagaagcagacatttttctattctgtaaaaagagtaagattccagcagttaggccccatac

SEQ ID NO: 293115 - DNA, 794 bp, Cannabis indica
tgttattgtgtttatcgaagacatccttgtgtattctcaatcagaagaagagcatgaacaacatctcctaatggttctgcaacggcttcgagaacacaagctttatgccaagttcaagaagtgtgaattttggctatctcaagtgtccttccttgggcacattgttagccaagatggtatcaaggtggatccaggaaagatagaatccgtcagggattggccaagaccgaaaacagtgacagaagatagaagtttcttgggtctggctggttattatcgtcggtttggggtagggttctctaaaatttcaacacccttaaccgagcttactaaaaagaatcagcgttttgtatgcacagacaagtgtgaggctagtttttaggagctgaagcagagattaattacaactccagtgttagctatgccttctgataaagaaaagtttgtggtttattgtgatgtatccagaaaggttggggtgtgtgttgatgcaggctgatcgggttattgcctatgcttctcgttagttgaaagattatgagtagcgatatccgactcatgacctagaattggtcgcggtagtgtttgctttgaacatttggcggcattatctttatggagagagatgtgaaatttataccgaccttaaaagtctcaaatatttctttacctagaaatatttgaatatgagacaaaggcgttggttggagttagttaaggattaaaattgtgagatcctttaccaccctggaaaggccaatgtagtggccgatgccctgagcaggaagggtccc

SEQ ID NO: 293116 - DNA, 623 bp, Cannabis indica
atggagaaacctgagagaggcgatgctggaaaacgcacgccgttggaggctgccacgcgcgcccacgatttggcacgtggagatagtcgccgcggatggaggtggcgcgtggggcccacgcgcagctcggatgatcgccggatttttgggtttggccgatcggaggtgggagaagcttcttgggtcggaggtgagaatagaaaactccttttaattagttttctaagatagagcctccaaaccctaattttaagaaccctaattttaagaagggaaggaatgaaaaaaaaattcttttgaggagcttttacatgctctgataccatgtagaaaaatgagaaaaatgagagaaaatgatttttattttctgatgatctcttttagtgtatacaaagggtatatataatacaatgtgaacacctagtaatactagagtaaatggaaaatacattaaatgtaaatttacaactaattgctagcttgatttcctacagtaatcaaataaggaacatcagaagatattcaagaaagatttatgaaagtgatctatatgatagatattaaggaactgtatatcagttatccttgtatctcaccaacttattcgaaattatgagatggtg

SEQ ID NO: 293117 - DNA, 460 bp, Cannabis indica
gtttacttttctaccttattattattttttgagattcttacttatacttgtatcctttcccagcttgctagctgaggccggccgcctttccaagaacataatcaaccacggcttcgtcctgtccaattttggggacatggattgaagttaggaagatccttacaagatcttactgctgagaggcggctttatcaggaggctgctgagcgccgggaggccattgccaaggccaatgaggaagaggccaagaggagggaagcgcaggcggaggcaatgatccgggaggaggccctgcggagagacaggctggaggccaggcaccaagaggagctgaggacagagggcgaagccactgcgaaggccaggcgagagcttcgagaggccagggaagccttggaggaaatggctgccaaggtgaggtccttagaggaaactcaccaggccaacttggaatccaggg

SEQ ID NO: 293118 - DNA, 516 bp, Cannabis indica
ttttacctaaaaatatatcatttgtagtacttaagtacttgtaatattattatttcacaaaaacataaaaacaacaaaaaattaaaaaaaaaaaaaaaacggttttatggaattttaaatatttttacgattttttttattttatttacagaaaatacggtctttttatgttgtaatcttgttaatttgttgttgattttttgttatctgtatgttattttttgttgttattttgatgttattttcatgttacttttatgtagttttcttgttgattttatgttgttttcgtgttattttttggaaaaccgtaaaaatgtaaaaaaaaacattctttgaacgtaaaaatgtaaatattttacaaaaaaatggtgccttatgtaattattcctaatattttttcaaagtaaaagtactttgaattattatgttataacataagtacctaatttattttttagccaaaattcttaaatttgtagcatttaagtaataagtactcaaattattttttgg

SEQ ID NO: 293119 - DNA, 639 bp, Cannabis indica
tctctgaacatgggtttgatctacaaaactacagagaaaagtgaatgtgaggttgaaggatttgtcgattctgattatgctggatgcattgacacaaggagatcattgacaggttatatcttcacagctttaggtggatgcatcagctggaagtcaaacctgcagaaagttgtagccctgtcatccacagaggctgagtacatggctgcaactgaggcaataaaagaggcactatggctaaaaggtctctcaaaagaactcgggttcaactctaaggacatgactgtccactgtgacaatcaaagtgcattgcacttaatgaaaaatcctatgttccatgataggtcaaagcatatcgacatcaaactacatttcatcagagagatcattgccaatggagaggttcaagtgaagaaaatctgcactgaccacaaccctgcagacatttttacaaaatgtgtcactcaagccaagtttagacactgtctaaacttggtcaacatcaaggaaattggatgagtttctcatctcccatcaaagttcagcctgttatactctagttctctaagtctaagtgtctatgccaaggtggaattgttgtaatatggcctagaaactaagacttggcagaatattctt

SEQ ID NO: 293120 - DNA, 635 bp, Cannabis indica
gtgggatcgtgtgtatgccgtatacacgtaagttgatccctgagttgtagggattgagctgatgactcatgatgcgaaagctgaattcgctaagtgttgagtgctctgcatggatcgctgaatatattactcaggatgtgcgagcgaggcatcctcctcgatctatcctcccgagcagacactccaaggggactccacgtgtcaccattctcatgatgccacgtcagagtgcaaaatttgggataacaagtacaatcacccgtatccttgacaatatgggagtgacgggaacatagagagtgaattgtgcagcttttatgttacaagatcaagcccacgtctggtgggatattgtgggacagacttgtgacgtcagtgtgatgacttgggatgagttcaagagtctgtttgaggaaaaaatttataacactgctgtgaggacttcacacatggaatactttgtgaaattaactcaagggaagatgtatgtggccgaatacactctggagtttgatcggctgtctaagtttgctggtgatctggtgcccacagatttcaccaggaaacagaaatatgtgagaggactgaatgccacaatcagtcgggacttgaaaaattccacttcacatgacact

SEQ ID NO: 293121 - DNA, 663 bp, Cannabis indica
  modified_base (59)..(59): a, c, t, g, unknown or other
atttattgagttttgataatactactactaatttttatttttactatttcaaaaaaatntttctgctacaaccttcatcatgattgtattaattgttatatatgattgtatgtcatatggtattatttatatttatatttttaacagtaaacaaagccgcgcttcgcgcggttttaaagcataatttaaatatatatttaatatcatatttatttaattaattataattttttaaaatatatatttatatatacaaaaatatataatgaaagtgagaaatttatacattttttttaaaaaaattatatttataaagttatgtttgtataacttgctttatatttatgaaaaattttattttcaccgcacaaaattataaatgcaccccaatattaaaaaaaaatataaactaaaaatagttttagaaaattagtgttaatatttttttagaattttcttttttacattattttgtgttaatttctttgtctattatactcatattatatcatattttttttttctaaattatgcacatttctttatttatttttcataatatttaaaatataatttatttttattttcttagtatattttttaagaatatgaaaaatgaagaatattttttaaaaaaatttagcataaactaaaaatatatat

SEQ ID NO: 293122 - DNA, 675 bp, Cannabis indica
tttaaacatccggttaaccattcgttaatatgttgcactagcgttttttagtccgaaaggcatgaccaggtagcagtatacccccttatcactcctaaagctagtgcattcttgatccgcaatgtgcatcttgacatggttgtagctggcataggcgtccatgaaggacaatagcttgaatccggaggtggcgtccaccatttggtcgattcgcggtagggggaagcagtcttttgggtaggccttgtttagatcggtaaaatctatacatacccgccgtgttccatttggtttaggcaccaacaccggattggccaaccattctggataatacacatctcggatcatgccactagttagtagcttgtccacctctgtctccagggcttccgccttcactgggtcgagaagacgtcgcttctgctgaactggtggcatatttgggttaacgttaaggacatgggttatgacatgggggcttatgccgatcatgtctccttggcaccacgcaaaaacatccgtggctgcccttagcattttaattattttttctttttccttccggctctagactctttccccagtcggaggatcttggtagggtcaaggtcgcatactggcacttcctcgacatcctcccatgtgttctacaatttttttcggatcccacacggg

SEQ ID NO: 293123 - DNA, 829 bp, Cannabis indica
tcttgataatactctgcgatagaaaggaaacacgggttagagatctgaacggaaggagacattttattccgctgcacccaatgtaaggtttccaatactttatatgtgtttatttcaaaaaccgtttaagaagttcatatttagggtgttattcaacatactttggagtagatctaagatcctggtaaaataatttccaacaacatgcccagtgatgtttcacccattggtcttttaaatcgaagtcatcgcttgaattttagtgcaacttctgccatccttcgcaggagccgaagtctgccacacaaaattcaacatgactctcgcgtgcacgaagttttttgtgcgtgaaagatcactagggttcagtatgtctcaacctctttcggaagagaaggattgcttgaagtctgtcacacatccactgatgtttcaccctttggtcttttaaagcaaagtcattgctcgaattttagtgcaacttcagccttccctcgcagaagccgatgtctgccacataaaattcaacatgactctcacgtgcacaaagtttttcatgcgtgatagatcactgggttcgatacgtcttcaaccctccttctcgaaagagaaagatttcttgaagtctatcacacgcccagtgatgtttcaccctatggtattttaaagcgaattcatcgtttgaattttagtgcaacttcagccttccttcacaaaagcagaagtctgtcacataaaattcaacatgactctcgcactcacaaagttttttcgtgcgtagaagacgactggggcttcaaaacatctttaacccttcttccttgaagag

SEQ ID NO: 293124 - DNA, 567 bp, Cannabis indica
gtttcgatcatacacttaaattgtataacattaatctgaacgactatatgtttactacctcatatactatttccagtaaaaaaataaaaaaattacaccgacggttgacaagtactagtgagaacatgaagatttatattagaaaaacatgttaggtcaatcttctcacctatcatatattaaatatcaatatatgatatgaatattcattattaggataatatataatcagagttaattgaaagaaatttgaagaaattattcaaaatgttatcaaaagatacttctaaattaatagtacattatttccactttcacaattttgttttattttttgttctaacttctaagtaatacaacaactttctattcaaacaaacaaaagattttagtgagcacatggagactcacctctcagaaattaagatatcccttacagttgtgttcaaaaccccatctaacaagcaaatgagccgcttggttagagagctcgatgcccaaaaaggagaatacaaagaaggagaaacaaagctaaaaaaacttgaaaaaatcactactacaaatatc

SEQ ID NO: 293125 - DNA, 426 bp, Cannabis indica
ctaacaccaaacaacacaaaggaaaacaaatatcctcttcgtttctcctactcctcattctttctactctctctatctatcctactctctctccttcccaccaaacatagttactattttattatttttaatacaattatatatattattttttaagggtaaaaatgatattttgtataaatttgttgtcttttttttgtaattctctcatgttaagaggattaaaaataatgtgtttggagggagaccctctccttccatctctcctctcccttcttctctccctcttgtcaaacaaaaggatttaccaatccctccatccctctccctccatccctctccctccttccttctctcccctctactaaacatagtgttaatttctctaaatttaagaggattgtagaaaaagaaaaaaatataatt

SEQ ID NO: 293126 - DNA, 492 bp, Cannabis indica
aaaattgtcaaatataataaattagctaataaaaatcataaaaatatatttactacatattattttttttttaaaaaaaatatatataataattaaattaggttatataatttttttagtatatcataataatatattataacaaaaatgaataaatgtattaaatcattaaatatatataataatatttgatattagggctgaacatttctagcgggttcgacccgaacccgagcaacccgcccaaacccgaaccggtgaaactgcaattttttttttttgaaaaaatgttcgcgcgggtcaggttcaacccggtacccttcgggcgggttcgcggttgagtttttaggaacaccgggtttcgggttgaacccgccaactcgcaatttaaatatgttatatatatttttatttttctattacaatttatatatatattaaattattaattaaaaaataaaaaatcctaaactttttttaaaatttaaactc

SEQ ID NO: 293127 - DNA, 665 bp, Cannabis indica
aatgtcgggaatggccgggaatttagaatttcccaaaaatacccctttagtgttaattatgtggttttagtgtggaggggcaaaatggtctttttgccccaatgatattttgtctttttgtgagttattatttgaaaaataaatgttaattgtttattaattggctgaaatgaaatgatataggtgtcttttaatttcatttttcactttacaaaaaattacaagtttaagaaattagaaaattttcaaaaactctctcaagctctctctctcttttcggccaaggcttggagctgctagggctagattttccttggtgattcaagctttgtttgcaaactctagtgatctcttgattgtggtatgtgagttctagctttcttcctttattttcttgaataaaatgatgaaaaagatgagtaaatgcatgatgttgctgctgttaattgttgttgttgtttccttgattaaaatgttgagttaagtaggtttaatgaggttgaattgcatgctagtatttcttgttctagttggataaattttctatgtaaaaagcttgggttttcaaagaaaaattgaggttttggtggctgttgtgtttgcatgagttaaattctagtttctgaagttgttataagcttgattatgagtttgaagcatagatt

SEQ ID NO: 293128 - DNA, 517 bp, Cannabis indica
ccccttagtgatatttatgtggttttagtgtggaggggcaaaatggctttttgccccattagtattttgtcttctagtgaatttattaatgaaaataaatgtttattttattaataattggctgaagtgaaatgatataggtggcttttatctcattcttctcattttacaaaaaaaattaacaagttaaaaaaagttagaaaattcaaaaactctctcttttctctctctcttttcggctggttgcttggggttcaagggctgggattttctttgattttcaagctagattcaaccttaatttgtgagctcttgattgtggtaggtgatttctaactttctccctttattttcttgaataaaaatggtgaaaatatgagtaaatgcatgcttacttgaggtgttgttgctgctgtgtttgtgatataatttcagaggtttaatcttgttcaattgagtagaatagagctggttatgatgcatgctagttgtgttgttcaaagttttgatttttagc

SEQ ID NO: 293129 - DNA, 822 bp, Cannabis indica
caaggaatccaagaagaaggtaatcctagttggcgtggtcatggattctactaaagaacccaaatggttcatgacccaagcttgcacaagaagagctttggactagccaatctcttgtgttaataaatttcctgaggctaggaatgaggtctcagctgcaggaaatgggatcttttgatgcggagaatgaggtctatgtagaggttgagacctttaacgtgtagactgtctttctcaagttcatcaactgtccatgaataaccttgtattctttgtttagggaaatggcttaatggtttgcccttagtggcatttttgtaaagacaagtttgtaaaccaacttgggttttctcttatcttaaatgcctagtactttttcattcaaacttaatataattgcgtttacacttgcgttttcattcacaatgtaaacaactatatcctgatcaaatgcagagtatttttgggttttcccattgctcgtaattttcctgtttaagtagttaataatctaccaaattttttatttacgagcagcagtcaattctacctcgcaatgacagttacaatctgtcttaagcaaacttgaatatacatttaatgattttatcacttttgtacatttttgattgcttgtatgaatagttatattatccatacattcactaggtttaagtacttttaatcaagacatctatgtctcgtttagtactttcctatcttgcgtgaactgttagtactcaactttgtacgcaaattatgagttatatctcatttataacttttgattttcctttcccgtcagacaggtttaaacgaaaa

SEQ ID NO: 293130 - DNA, 538 bp, Cannabis indica
tagtaacaacatacttgtgagtagatctaagatacctggtaaaataaattccaacacttctacttctctcaaccatacttcaagtggttgatgggcacggacgatacggccatcagcaagattcggcgctttgctgatgagtactttatggtggagggcacgggcatgactcgcactcggttccaaatgatttcgacctatcaccgccctcccctcaatattgctcttagggatagagctcaaaaacttgctcggcttccgggggaagaccagaatattatccagttgacctctaaggataactttgtgaggtacgggctctatcccaaggactttactcctaagttcgtgacggggaagaagaggaaatctattgctagccggactgaacgaggtgcaaaggctgagcagtatggtcaggagcccttgaatcttgaggatgaggctgagggagagcatgtgactcaactgaagaggaagaagaaacttccggccccgcccaggcctgctgaacatgtcattcgcataagggagccca

SEQ ID NO: 293131 - DNA, 741 bp, Cannabis indica
gtggacactctggccccgagtcatgattccgggatccctctcgaggcggaggagtttacaatgcctcatggcattgtactgactccggtccccggagatgaggagaggcaagagctttggattgccaagtataattatgcccttgacgagtccactcgggggcacgctgaggtggaggccttgaggagagttttgcgagaggaggtgcaaaactctcttaacgaggagaactaccaaaatctgtggaatatgaacttggaccccctgactgactagttcaaccgtttccttgggcccacctttgccccttttgcctctgagatgaccggtgagtacgtctcccagctgactcggtgtgcgcctaaacggtacgctgcttgtgcatccttgaactccgtcctccaggttcaggacctcagccacgccttggtcgcggtaagtactttgtgatttacttctttcctcattattttacttaaggccttcactcagttcttgcttccttttacagattactgcagaggccggccgcctttccaaaaccataattaatgatggcttcgtcttgtctgaatttgggggcatagacgaggtcgtgaagatcctgcaggacctgtctgctaaaaggcaggcgttccaagaggagactgagcggaaggaggctcttgctaaggcaaagttcgaggaagaggccaagcaaagggaagccaaggcggaggcgatgatccgagaggaggtcct

SEQ ID NO: 293132 - DNA, 544 bp, Cannabis indica
ccgaacttggacctggacccgaacctagacccaaatcggggtccagacatggacacaaacccggacacagactcccacccgaactgaaacacccacacctagaatcagacaaaaagctagacccggacccagacccaactcgaacccagaccaagatcagaaccaaggacttagaccaagaactgaatccagactctgatcggcattggaacttgggactcgaacccaacctagaccaaggcccaggaagcgaaccacacccggaccctgatctagatctagactgaaattaggacccgaactcaaactcagaccaggactcgagctctgacctgaactcaaacccaaactcgaactgagaatcgcaaatggaactagaaccgaactaggactaggaccaggaccaggacctaaacccaaagctgaacccagataaaaacctagacagagacctaaaccgaaccgagactaggacttgaacccgaacctagaccaggacccaaacccacaaaataatgggacctggacccagaatcaggatagg

SEQ ID NO: 293133 - DNA, 890 bp, Cannabis indica
cctccatcttttacacccactgatagaaccacctcagttcacgagaacacccagaaaacaatcattaattctagcaagatggagcaagaacagtgaaatcgacgttaaaaaaataaattatggaaaacaaccgtaaaaaacactaaaacaaataaaaaaaactaaaaaataaacacactacgtatactgcagtatagaaacttataaaaatacaatagtaaaaaaagtaaattctaccatgtaggcaatatttttagtaaaaaaaataacaaaagtcaatataccatgtgaatttttctaagagaaactcaaagcccaaattctagaataggtcttagataagtaacaatttcatgaaacttacatatatatactaaaatagagtaaaatttaccaaatactgtgatatatggaaattttacatttatcctgtcctaggctaaatttttttatatatatataaatattatgtctaggccaaaacgaaggaaccctgatcattctcaaaagatggaataccaccgattaaaatattcaataatgcaagtcttttcttttacatgcaactaaagatcaaataaattgattttaccgcatatcctgttggattttgcaatcctaatgctatgatcaaattactcaattgctggcactcaaaacaattggcagtaaacacacagaatataaaaacagagcattagttcttaaccaaggaatgaatgaatgctttctttgttgatgattgaaagtgtgtagattatgtgcattgtacaatgttaaacctatttatagacataggctaattaagacaataaggaaagggcacttaagttagttaggataactaacttaactgtcactgttcaaagtaagcaagtacttgtgcataa

SEQ ID NO: 293134 - DNA, 691 bp, Cannabis indica
ttttcatttacaccactttgctcaaaatctgaaaaataacataaaaataaaagtaaattaaatatttccaattaaaataaatttacaattaaaattatgaaatatttaatttatattaattttatatgcataattaaggacttaaaatgtacaaatttgagctttaatcacaacccccaactagcttattgctagtctctagcaattcaagcgaacaaaaagaatgtcaacatgatattttctaggtcaaaattttgaaaaataacacaattattcaaataaaatgttagtaacaagccaataagaactatacaaaattaccttgaataaatctagagttgtgagtgtgtgcgccaaacctgaaccttcttaccacaaaccataacacatagatgcttccgaaaaatataccaagtaaaagtctcaactccatttgcctcacaggtattgaaaatatttattcatggctaaggatttcactcatggagttggaaattgaaaagtgagcactcgaaaaggatagattaatttaggacaaacatttgaataaatattgaaacgaagatagattatgaattatttggacaaaccaccataagagtaccacaaaccagcttttcgggacaaaaatagacaatcttttacatttattctaggagccaaaacaaaataaaaaaaaaaaaactgaaaa

SEQ ID NO: 293135 - DNA, 739 bp, Cannabis indica
aaaaacagtatggttagaaaatagccatccgaaacacaaggcatgaaaattaagaagctcaagaacaaaataaagtaaaatgcaaggtgaccgcccgcacaagacttagaagtccatcatcacctgacatcgatcttatctcagacatgacggctttcccttttccgaacacgggaggagatggccgaacaggtgaaatgggctcccttatgcaaatttcatgttcaacaggcctgggcgaggccgggagtgtcttcttcctcttttacggagtcacctgctcttcctcgacctcatcttcaggatttgaaggctcctgagcatactgtttggccctggcacctcctttcaacttagcctcgcgcttcagttgaatcaactcattctccggatgagctcgttcagtccggccagcaccagatttcctcttcttccccgtcacggacttaggagtaaagtcctcgggataaagcccgtacctcacaagattatcatcggaggtcaactggataatattccagtcttcccccggcaactgggcaagtttttgagctctatccctaagagcaagagtgaggggaggacggtgatatgtcagaatctgctgaaaccgagtcccggtaatgctcagatccttcaccatgaagtactcatcagcaaaacgccctattttactgatggccttgtcatccgtgccggtcaaccacttgaagcctggctgacagaaatagaagtccct

SEQ ID NO: 293136 - DNA, 560 bp, Cannabis indica
aatcctcctgctgactggcagcagatgttccaagaaatgcaaagtgtcatacttcgtcaagtagcagagttgcaacgtttaaggcaaccagctaccccagttgaccaaggggttaccaccagcacctgtgccagtggtgggtaaccagggattttattatgtcgcaccgagattcagtgtttgagcggtttgtgaagcttcaacctccgacttttctgggaggtattgatattattaaggctgaccagtggatgagcattgtttcccgtatccttgacaatatggggcgacgggaactgagagggtgaattatgcggccttttatgtttcaagaccatgcccgtgtctggtgggacatagtgggtcagactcgagatgtcagtgtaatgacaagggaagaattcaagaaactttttgaagaaaagttttataatgttgctgtgaggacttcacatcaggaagattttatgcagttgactcagggaaagatttctgtggccgagtatactctggaattcgatcggttatctaaattttctggtgatctggtgcccacagat

SEQ ID NO: 293137 - DNA, 575 bp, Cannabis indica
acacacatgggattttgtttttttaaaaattttaaacagtttggtaatagttgcaaaatggttttgttacagttttgacacttcttaaatatttagtacaaaaataacttctttattaaagttttaaaaaaaagtcagataagaattaataaaaacataagtaattaaaggaaaaagcagcaatggaaaaatagggaattaaatacattgatagtcaattttaaaatacaagtacattgtttgtatatagttggaaaatagtttctatatagttgtgcgactgtataaaataacttaaacaattagaaaaacatacaacttctcctgatacaaacatatagaataaacataatataaagattaatgtcaaatatcctaaaagtttaaaaccagatccagagtataaaacaaaatatgatacctatattcaaccaataacactaactattatctgataatataatcaaccaataacaacaaattgtcaccaacttaaaagaccctactttttcaatttggaagccttagaagacttgctttgcttctcatcctcgctatcaatgctttcattaatt

SEQ ID NO: 293138 - DNA, 956 bp, Cannabis indica
tcaacggtaatcgagatcatttacatttttttttagtgcaactactttttatcttatttattatgcataattttttttgacaaagagccataacttttcatttgaatattatttattaatgcatgtattattttattgttcactattataattacaaccttaaaattgttatagtatattccatacattattgtttaaaatattaaattaatttaaaagttaaattaataataaataaaaaaaaaatcatgtctttgaaagggtagcaattcgatcgtttatagtacgtttgaagcaccttataattaaagttgtcataaactataaaatttggatgagatcgacggtaaatcgaaatcgttcagatatttttttagtacaaaatttttcatctatttataatgtattttttttatttgacaaaatttattattcaatttttatttgattattattattattattgcatgtgttattttattgttcactattatactttatgtaatacaaccatcaatatatattaacaaataaaagtttaaaactttcaccacaataattacaaactttaaaatttttatagtataagaattgttccatattagtaaatattaaaaaaaaatgaactattgtttaaaaaaaaaaaaaagaaattcaaattattaaattaatttaaaatcttaaattaaaaaaaaaaatcatatcttttgaaaggattgaactcatgtcattgtacttgatatacaataattttacctcttacaccattattatattattggttgtattgattatggtaggattaaataacttgaatattttgtacttttctagctacaattattgtgttaagtagaaaataaaattaattaaaaataaatatataaatttcaaattaaaaaaataattaattgaaaattataactagtcataagataaataagtaaaaaaaaaaa

SEQ ID NO: 293139 - DNA, 553 bp, Cannabis indica
tggtataaggtatgctttctttaacctacctttataagaatgtttttttatatatatttagataatccttaaatacttagagtaattttagaataatattgatgtaatacataggatagatattgttgagtgctaaggatagatatagtaagctataaaaaaaatacaaaaaagggtctattgggatttgaacttgtgaccaaaaagataaattaataagtctttaccaatatacaaaaacacaatatttgtataaatttgctactataaattttatttaaattttagaagagatataaaaggaaattagtattgcaattttcattgtggtagaattaacaaatacattataaacattgattctaatacttaaaatagaattctagtttatttttagtaaaatagctaaataaaacacaaaaaattaagtgaaaggggtgcataacatgaatttagtatacaaaataatatttttttttgaaaaattggttggtcaaaccgccgttggcgggtttgggttgcatagaacgcaaaaaaatacccaagttaaaaa

SEQ ID NO: 293140 - DNA, 684 bp, Cannabis indica
aatgccacataatttctctaataccttcctttatttaaatatataaatatatagatatagattgattgatattgatgtttaaatactttattattattataattttttttttattattagattagataaataaaaaaaattgtgaaccaataataatataaacaggataaatttaaaaaagtaataggtatatcaagtaataataatatctgcacatatctttttacaccaaattttataatatttgagcaagattattattttttaaaaagcaaatttgagcaagattattatctacaaacaaaacacaaaatgggttcaaaaattagtaatttattcaaaataataaactttgaaaaataaaaaattgagagatattttatatcacctattgaaattgaaaacttatttattgtttttttatatgcatgacttataatttttatgtttacatctttttagcataatcaattgagaacaattgcatcttaatttaaccttgtactttttataatgtaaaatgttgttagtgaatatgtaatccaaaatcaaatgaaaaaagtatataattttttaaaaaaaatattgcttatattatttttttttactttctacaaattacatttatatatttaattataaattaatgtaatcatatatattaataaaagttattattgggtt

SEQ ID NO: 293141 - DNA, 618 bp, Cannabis indica
accaggacccaaaccaaaaaaaaatacacataacgagaccaaaacccaaaccgcaattaggacccagacccaaacctagattgggacccaaacccagaccagtactgagacgtggacccagaatcgggatagagacctaggcaacggaactaggaccgggacccatgagccgaccccaacaaacccggacttgaacataggacccaactcgtgacccgacacccgaaatggaaccagaccgagacccaagatcgggatctagatctggacccggggcttggaccgaacccgtagtcggtgtttggatctaggacccaaccccggacccgaacctagagatggagcgaaacttagacccggacccaaacccagtcctagacactaacatggacccgaacccgtaccctgtgacccaaaattggaaatgaaaccacaagtagatcgagacccgggaacaggaccggaacaaggacttggacctggacttggacctcaaaccgtaaccaaacatagacctagacctaaaaccgtaaccggaccaggacccggactcccacccagacctaggcccgaacccggatccaaacccatacctcgactcggtgccgaaccagcaac

SEQ ID NO: 293142 - DNA, 563 bp, Cannabis indica
aaatggaactagaaccgaactaggactaggactaggaccaggacctaaacaaaaacccgaacccagatcaaaacccagacggagacctaaacccgaaccgagactaggactcaaaccagaacctagaccgggacccgaacccacacaataaccgggacctggacccagaatcatgatagggacctgggaaacagaactaggactgggacctagtacctgacccagactcgaacttgaacctcggacccagctcgtgacccggcaccagaattggaaccagactgcgacccgagatgggatccggatctggacccagtgcttggacaaaacaagtagtcggtgtttggatttgggacccagccctggacccgaaccctgacaaggagtcgaacccacactcggaccagaactgagtcctaaacccaaaagtggacccgaaccaatactctgtgacccaaaatttgaaccaaaactggtagttgaccgggactggaactaggacttggacttggaatcataactgaaagtggatctagatccataacgttaaccggaccaggacc

SEQ ID NO: 293143 - DNA, 640 bp, Cannabis indica
cctatcatgaaaaactgggtttttacataaatagatgctgctctgactatcggagtagattataggcccctttcatcaacttcagctcctccataagcccttttaaccataaagcatctttaatagcttctatagtagctatatatttagattcggtagtggaaaacgccactactggctgtaattgtactttccaactagtacaatttccccctgttaagaaaaagtaggccgaagtagatcttctagtgtccctgtcccccgcataatctgcatctgtgaacccttcgatattctgatctgtttggtgaccctgatagaccaatcccaacttagatgtaccttttaagtatctcataagccatttcatggctttccaatgcttctttccaggactagacatgaacctgcttagcacactgattgcataagcaaggtcaggtctagtactaaccatcaagtacattatggactccactgcattagagtagggaacattcgccatctcttcttgctctaacttggtcttagggcacatagatttagacataaggtattggttggtaatcggctgtgaaacagcctttgaatctttcaaagaaaacttttctatgatcttgttgatatagtcttcctgatg

SEQ ID NO: 293144 - DNA, 648 bp, Cannabis indica
agacccagacccaaacccgaacaaaaaaactgaattcaaaatataaactgggacaaggacccaaacctgaatggacccagatcgggacctaggacctggacctacattggggacctagacttgggccctggaacctagacccagatcggaactcgggacacggacccgagcctggacctagaatcgaacccaaatttggacccaaaccgagatcggaaccaaaacccaaactcggactaggacttgacccacgaccgggtcctggacttggactaggacctaggactcggacttggatgagggacatagacccgggacatggccataaaaattaggaccgagacccgacctcaaacccggaccgtaacctaggacccagaccaggactggggacccaaagtggaactagactaggaccctgacccctgactcattgcttggaacggacccgtagtcagtgtttggatctgggttccataccctgacaaaaaacccacacccataccccagacttgggtccgagtccgacactgggtttgagtctaggaactagaatctgactaagacccagaactagacccctaccgggactgcagacccgaagttaaaactcgtatcggcactcgggacacaagcccaaacccaaac

SEQ ID NO: 293145 - DNA, 703 bp, Cannabis indica
ctccttcccctcacgaggtcgcttggttcttcgacctgaagtctacccctaagcaaggcaagtcagggtatttgtacttctctcagccaggcttcaagtggttgagcggcacggatgacaaggccataaccaaaatagggcgttttgttgatgaatacttcatggtgaaggatccgagcatcaccttgactcggtttcagcagatcccgacatatcaccgtcctcccctcactcttgctcttagggatagggctcagaaacttgcccggttgccagaggaagataggaatgtcatccagttgacctccgatgagaatctggtgcagtacgggctttacccagaggacttttctcctaagtacgtggcgaggaagaaggggaagtctgatgctgcccggcccgaacgaactcatccggagaatgagttgattcaactgaagcgagaggctaagttgaagggaggtgccagggccaagcagtatgctcaggagccaatgaatcctgaagatgaagccgaggctgaggctgaggctgagcaggtgaccccattgaagaggaagaagaaactcccggccacgcccagacctgttgaacatgcaattcgcataagggagcccatttcacctgttcggccatcttatccctttgctagaaaaggaaggctgtcatgtctgagataaactcgatgtcaggtgatgatgga

SEQ ID NO: 293146 - DNA, 552 bp, Cannabis indica
atcatagccactctctcgttgggtctaggtggcaggccgggaatatgctgggcctctccggagggaacaattggagccaatactcctgctgcaccccgtggtgtcccttgtggcaaagctctaatcgcctaacccgggttgagatggggcaatcggtttttgatccactcgtagaggtgtcccaatcggatcaagttttcaatctcgtccttaagatttttgcattcattggtgctgtgcccaatatcgttatggtactcgcatctcttattaggatccctccgggagttgtctttgtacaaaggaggcggtctctggtagtgcgtattttgcctagtagcaaagtacacacgttcttgagagtctgttaactctgtgtactgggtatattggggagtatacccccttttttgtcgcttatcctccgtccgggtgctgcctttggagaaccctttactcctcgagccctggaaaggaccggctaaactggctgtcggagcggagtgcgagggggtttgtccatttatcgctgagggatttccaaaatgggat

SEQ ID NO: 293147 - DNA, 740 bp, Cannabis indica
tgttacacattattattattttttagtaaaggcccatatactcttagtgtgatggccttcaagggcatagagaagactttgtctttctcgattttctgcccctcctcttccctttttcttttatgcgcactgtcactatctgtgagatttttgcacccgacttttgtccaggaaatccttctagggctttcttgttgacagtcgtccggagggggcctctttccatcggttaggggacccccattccctttttttatttagggtttggtatggggcctaattgctggaattttaactcttctaaatcatctaagaagggaggaaaacgtctggccaccttggaagaagtcatggtgggtcccgttgcccaggaggggtatagaccccgtgccacgggatgggaagcggctgagcttcactctactctgacttgtcctcaccaactggagaacatcgtggaggtggctggtatcaagcccgcgacgtccgggacgtaccaccggccgccccgagatgcggagacccctaaccacaattacggaggcttcggagcttggagccagacacatctgatgaccggggctatgcttccccttcaagattattttattaatttccttgtatttgtcggccttgcgccataccaacttattcctcaagcttaccgcctgatttcaggcttatttattttttattccgcccggggatggggctctaccagtccggcagagattttgtat

SEQ ID NO: 293148 - DNA, 1025 bp, Cannabis indica
ttcccctgaaattattaaaatttttctagcaaaattcttaataatttaaaattatacacatataatttcataattaaaattttattatacttataactttaatttaaaattattacacttaattattaagtttttttttttaaatttaaatatttaaaaagtaaaaagtaaaataagttgatcttattttcaaaaaaaaaaaaagctaaactcctccatcttttttttttttttgtataaggagttatttactcaaaaaaccaaaccaaagttaaaaaacaaaatcaagctcccccagaaaatacgaacctcaaacttgaatagaaaaactcatacttagttcttctagttataaaaaaataatttaatatcatttaaaaataattaattatttaaaaatttattatacaagaagagaattctaattgtataaaaaaagtctaaatttttgtaaaaaaaaaaaaacattagtaaatattataattaaatgacttaactgttaaaataattatagtagggatttttattaaaaaaattatttataattattaattgcttaaaagagatcttgttaaaaaaccaaactagtgtcaaaaaaataaagtcaagctcccccataaaataagcaacctcaaacttgaatagaaaaactcatacttagtgcttctagttataaaaaaaaagtaatttaatataatttaaaaataattaattatttaaaaatttattatacaaaaagagaattctaatttgtgtaaaaagaagtctaatttttgtaaaaaaaaaattcattttaaatattataattaaatagcttaactgttaaaataattatagtaggaatttatataaaaaattatttgtgattattaattgctaaaagagatctagttaaatattcaattaattataattataattaattgattttaaaaaggaagttttacctattggtaacctaatattataggtaaaggaaaaatgcaaccatgatggttacaataaaaatgtaactattgagtagt

SEQ ID NO: 293149 - DNA, 717 bp, Cannabis indica
accagaccatacactccgatcagccataaatgattggaggtcatacgccgcatttacgggtatccaaactaaaggaggtgacagttgaactgagcacaactactttcattgtcccttgaacttgatatttggattaagtttgctttgatagttggtacagagaagagaagcatacatatgaaaaggagctataacaagagtaattataataggcatgcgtggttgttcaatttgaatacaaattaggttgtattctgaatgtacacccaaatataacaagagtcaaaagtaaatatggttacagctttgtcaattttgttatttagtacataatatattttcttcctttgtacaggttctctctcaagttatttgcagtttcttttatcattagaattgggttcatatctaatcaagggaattaattgtgcatcacttgagaatatctttactcagttacaggaaattgaacgcgttcttcttgcttattcattaactcattttaatttataaaaattttactcattggaaaaaaaaaaaggccttacgttgtagatttatatatttttttattaaaggttaattaaaaatttttgtcccgtaaaattttgacaatgtaccaattcatgtttttgtaacttttctaagccgttaaaaacttactttctaaattactaaaattagttaaaaaatagatatttttcttatatatatata

SEQ ID NO: 293150 - DNA, 548 bp, Cannabis indica
gttaatttcaattctataaggtcaatattcaattccctatcttcgatcccaattggcatagacctaaagcgcctattagagataaccaattccccgctaggcattaaggttccaaaccctcttacaagaaaatcataaagtctatccaaaagattaaatactctcgatactacatacgagtatatagtcccaaagtcaaataatacattaaaatgggagttgctgataagaagctaacctttcaccatagaaggactggatgcaacatcagcctgagtgataacaaatgtctgagcaagtacaggctttacttccagcttctgcttatctttctttgcctgagggcaatttctcttaaagtgcccaaccatgccgcacaggaagcatgcttttcggttgcactctccgggatgatgtttcttacatcgcgggcactcagggtaagaataatccttgcgtacacccttgcctcgatttccccggaaccgcttgttccgttttaaacccaccattgatgacgtaggtttactcttctgctcaaccatgga

SEQ ID NO: 293151 - DNA, 612 bp, Cannabis indica
aaaaccttccatgtccattcagacaatgaaagcccctacagtgcatacttttgcgttttctaaacaatcctccatacttccgtgtcaattccaaattgttgccttaatggataaggtgatctcgtagtagatcaatctagtactttcgcatattgtgatcaatcatccatgctttgttaaggtgagcatgaacaccttatgttgtgctcaacaaatatcaacacctaaacgatttatatatccaaaaccagtgggttttaaggataccactacctagtagggctagcgaattcttagagaaccttgcatgtccattcggacaaggaaagccattacagtgcatacttttgcatactctgatcaatcatctatacttccgtatccattccattgttccatataaccaagttgttgcattaatggttatggtgaatcgttccatctttctcaaaagatttgaagacatcggttaaatactctttaataacttcccagctagtttgaaagactgtaatactaaaaccatcaggacctagagccttactacattcacaactaaatatcgtagctttaacttcatcttcttcaaaaggcctttctagttgtccctcc

SEQ ID NO: 293152 - DNA, 315 bp, Cannabis indica
aacagaatgaccccgcacagtttttgtgttacaactgtaacaagccgggtcatatggcacgaaagtgtcggaacaagcctagctctgctccgcaggctaacttgactgaagaagcttttacagctatgatctctgagatcaatatgattggtggatcagaaggatggtgggtagacactggcgcctctcgccatgtttgctatgatcgtgctatgtttaagacatacactgctgctgatgacaagaaagtgttgttgggagattcccacaccactattgttgctggaactggaaacgtggagctaaagtttacct

SEQ ID NO: 293153 - DNA, 634 bp, Cannabis indica
tttttttttttttttaatttgaaaatgtttcattattatttacattatttttttgttattttttaggaaaagttgtctgattccatagatgatgagcatattgttgattttataagtaaagataaaaagaaaaccctgttgaagtctgtgacaagaagaaagcgcccgacggaaccgagtgtttcatctattcctgctgcccctacggtaattataacaggaaactggtttctttttgtcaattgtatattttgttataatttagttttattgttgtgaaactggtttttatcccttatatatttatttgtaggttatatatttcattattaaactggttttatgtacatcaaagttgttttgatttttgtgaaacttttttttttgtttttgtatttgtttgtttatttttgttatttgatattttaaattgtttttctgtttgtttcttgaatttatatctcaggtgttttattttaaaattaaacccaaaaagagattcggaggtgttgctcaagatttcaacgatacaagtgtcctccttgaaatgaagttaagattttcacgtgagcaagaaaaaatctttcgaaagacgccatttgggtttttgtttgatatgcatacacttgttttt

SEQ ID NO: 293154 - DNA, 664 bp, Cannabis indica
atttagtcacaacaaattgtgatttttgtgactaatacttttagtcacaatgtagaaatgacaatttataattaatcacgacttttttacttttagtcacaagttttgttgtgactaaaagtaagattttttgtagtaataataattttataattaataaaagagaaaataataaaatataataataatatctagaagaaatcttcaaaatagttgttatactagaacataacaattacttattttagttactgtcaatttctctattttctcaaaatcatgttttatatacactattctattttcctggtccatatacaattagagaggatgaactaatggagcaaaaaaaaataatctacatctcgatcttcttctctctcaataagcaaacaagtaaatatagtacaaaaatttatataaaatttgtagaaataaatattgaagaaaacattttccaatttaattttttttactaatcatccgtttacttacaagcaccaaacaagaattagcacttaatgtaacaaaataattctcagaatatgaacaaagagcataaaaacaaagctactcattttttttctttgtccaaccataaaatcaaaacaacttaatttttttttctttaactttgaaaaaaaaactcatcaaagagtgttag

SEQ ID NO: 293155 - DNA, 530 bp, Cannabis indica
gcttgattgctttttaagtgttcgctgctttcacaaacaatctaacacctgacttttttctcttgttgcagcagctgaccccatggaggcgatcctggccacccttgctgaagcccacagtcctgatgtttcccttcctcctacttcttcccagatggtcacccccgggaaggcttcttccagtgcccctccaaacaccattgacttagtggatgaggaggaggtacttcttgaggaagctgaagaaggtgaagaagagcaaggggctcttcctggggaagttgaagaaagtgaagaagagcaagaggttgctctggtgcgcaagcgcaaaggcaagatggtagcagaggagtcttctaaacgcccgcagagggtagacactccggccccgagccatgactccgggatccctcccgaggcggaggagtttacagtgcctcatggcattatgctgactccggtccccggagatgaggagaggcgagagcttcagattgccaagtataattatgcccttgacgagtacaccc

SEQ ID NO: 293156 - DNA, 684 bp, Cannabis indica
ggtccaaaattaattaacaaattaattttcaacttaaatatattttctaatttaattaaattatatgaaatagaaacaaataattaagtatcttgaataaaatcaacttaataattaattctaattttaagttctaagataaatatcctaatttaagttggtctaaaattaattaacaaattaatttttaacttaaatatatttttctacttaataaaatatttgaaaatattaactagttactagaaatttctatccagaatatttcattaaactaagtgtatttttctaaattaattttaaaataatccaattaaaaattaatttcatttatttcaaaattaattatgttgctaattcaattttagttatgttaaaatagtataattagcctaatacaattatttaaataagacaaatagaccttcacaattggggttgttcatgtgagggaggggctggggttcagacaggggattgtccctatcatgcgcgtctggaagtggtcttgtccgagtgaccaactcgacacacattcaacctgaatcttcaaaaattcataactcttcaatttttatcgggatcgagttccgtaaaaaccaaaattgcttaatttttcacaaggaatccaaataaaatattttcaaaacgaaaataaaaatattttcatggaaaatttcataa

SEQ ID NO: 293157 - DNA, 632 bp, Cannabis indica
gtgttcgcatgcgtagtttttatttgatccatatggaagcatcgaggcagttgagttgaatgtgctagagcttgcatgaaggccagagggccgcatcattggaacttagtacttcgtgggagccagtagggcgtgatgcaagtgtgaatcagttgggtggttgagcggacattgcatgcatgtggaaatcgctggggtgctaatgagatagttgactcgagagtcacatcctgcggcatgcacttttagatgacatggtgtgcgtgaagagttggggcggtcaggcatttgcgtgtgggcatgttgtcgaggacgccaacagatgaagtgggggagagaccttcacggtttacgactagttattcattacaagcatcaagatgagtatcatggagatcgattgttgttcaggatgcaaattcaagaagacttcggattaaggcatagccagttatctagggtgaaagtctgcgggactcaggtactaagataacaccatggcaatgttggcctaaggtgaaagtcagcaggactaaggtactaaggtaacattgaaatgttgaggggcgaagagtcagaatgaccgaggcattagttcaacatcttcatcaaagtgaaatgtggaatggagg

SEQ ID NO: 293158 - DNA, 499 bp, Cannabis indica
tcatgcacgttgctcgaaccaatgaagagtgtgaagacacctataccagctagaaaggctggaagagggaaaggtgtgaagagtatccctaagactgcgcaggccttgagaggcaacgcaacaaagggcttcaaaaagaggcaagcacaagcaatgaaaaggtccgcgacaaaggttgtcaagacagaagggaggccaacgaagattgactcccccgtaatgatccaggaatggggccatgagcgtatcttgattggttccgttcctattttcttgcccactgtcgcatcagtgatggttacctctgcggaggaaactgaggcaacaccgacttctcaaactcagagaggtaggaaggcaacaaaaggaaagagggggacaaacacttcaccttcaccaaaccctcttgaaacgagggaattagtaggaggcaccccgattaggcctccgatcgtaatctctgtcaaccgctaaggtcaacagtgttgggttttatgcc

SEQ ID NO: 293159 - DNA, 843 bp, Cannabis indica
  modified_base (811)..(811): a, c, t, g, unknown or other
ccattgttgtgcggcttccgacacaatggcggggaagattctgtagcatacgtcctctcgtactccttgtaaatccatttgcatctcaaaatacttgagatgggaaagaggatcttctctctcagtatacatcttcgatgttggcattttgaacttgtggggcagtggcaggagattgatctctggtgagaagggagtttcgcgagcacggtctaactcaagatcattgttacgctgtccagccatgccatgaaacaaattcttcaactcatcaagctgggcctgtacggctgggctgacttgatcggcattttggtcggttaggattatgttagtgtctttctgagcggggatttgagtatgagctccgggctgcatgatcgttgtagtattctgctcgtctgttccccttcttctgtttagatcgtcccttaggtcatgggtcgttccaagcctatcggccacaaaagagcctggttgccttagcgattgattcgcttggttgacaggcggaatgactccattattctgattggatccgtctggtaagggtcctcctgatgaattcccggacaaggtctgcccgcctagctcttgccccacgattggatctcgtgactggggattggacggctgaccattggttgtctgggaggcattcatcgtcaggtcatcctctgtttctcccaggggatgacgttcggcgtttgctggcctcagtctggtggctcttcgtatcaacacgggcttgtcgactcgatctttgatctctgtagggtgagcccttaacgctccatctcttgtctctccnttcagcgacatcgctctattcgtcaatgcgag

SEQ ID NO: 293160 - DNA, 461 bp, Cannabis indica
ctgttcggttggaattgggtgaagccaacaagaagctgtttgctgctcagaagaaaatcactgtgctgactaaggatctcgaggctgctgaccattttgaggagaccatccagatcttatctgctgaggtgaacagtcttgaggacgagaggacttctcttcgagcaattcttcatcggatgaaggaggaaaaggaagccaaggagggggagcttttggccgaggtggacaggttgaaggacaaggtcaatgccttggagacgaccggtctcgagctcttctttgatttttggaaggctaatcctcgggccaatttcgactacttgggtgatgctaaggacatgtgccttgagtactgcgcgtcccaagtggcttatggcggaagaaccgaaccaatagatcctcctactctggttggcccagaagaaccgaaccaagaacctgggactccagctgcttaa

SEQ ID NO: 293161 - DNA, 1015 bp, Cannabis indica
ataagaaaaatctagaaagttgtagtatcatccttagctccctataaataccaagcttgggttgaggagctagtgtaacaaaacaaccaacaccaaaaaaccaaagttccaaactatcaataaaactttactactttctcaaacaaccctctcttctaagccaaactcatttcttatactaaatcaacaactactcatcaacatcactacttcactacattaccacaacaaaccattaaccacatatccacctattccaaatctaaaccaatacaaatttattatcaaaccatcagtggtatcagagctccgttcgatcatatatcactgggcgtaatcttttccactcatcaacatgagttcggagtacaatcgctcttcactacctcttccaattttccatggagaaaactatgatttttggtccatcaaaatgaggacctattttcgatcacaaaatctatggaaaattgttgaagaaggaatcactattccggaagatattacatctctttcggaagatcaaaagaaggcactcgaggataatcaacaaaaggattctcatgcattatattgcttgcaacaagctatggcagacaatctttttccacgaataatgggcgcagcaacagcaaaagaagcatgggacacgctgcaggaggagttccaaggaacagtcaaggtacgcacagttagactacaaaagcttagaagagattttgagaatcttagaatgaaagataatgagactgcaaaagattactattctagaattaaagaaatagtaaatcaaatgggagcctatggagaaataatttctgacaagaatatagtacaaaagatactaatttcttgtacagaaaaatatgattcaatagtttctgtgatagaggaaactaaagatttagaaactctatcaccaactgaactaatgggctctcttgaagcatatgaaagtagacgagaaaggcataaggaaagtgaagttgaaaatgcctttcagtctaaaatcaat

SEQ ID NO: 293162 - DNA, 855 bp, Cannabis indica
ccgcaccagttttcttccctgatcatgcgttgtctttccacggttcaatttcgcctttccattaatggctctctcactgacccgtttccttcaacgcgtggtatcagacaaggggatcccctctctccctatcttttccttcttattgctgagggtctctctgctgcaattcggttacaagaaactcaggatcaattttctggtattcggatttgcaggggagccccccctttgtctcatctcctgtttgctgatgatagcatggtcttttctcctgtccatcctcaagctagtaattccctcaatagtattcttgatctttaccataaagctactggccaattagtgaacagagagaaatcctccattctcttctcccccaacaccaccactcaggcccaagatctttttcgtcaagatcttcatcttatgggagaaggtttcattagcaagtaccttggtgctccccattgtgttggcagggtatcaaattcaatgtttcattacctgcttcaaaaagtttcttcaaaacttaactcttggaacgaaaaattcttctctaaagctggtaaagagactcttattaaagcggtggtccaagctatcccctctttcgcaatgtcaagtttcaaaattcccaaaattatttgttctaaaatccaaagtttgattgctaaattctggtggggatctcaaggcacaaaaaaaatacactggaaaaaactgggactctatttctgtgtccaaattctttgggggtttgggttttcgaattcttctctcataatcaagctctcttagctagcaggcttggcgtatttggaatgataggtcttccctctttcattctgtcct

SEQ ID NO: 293163 - DNA, 623 bp, Cannabis indica
cataacacttatccaaggtccaatcatatcagttaaaccctgtgtactgataaatctaggaataaattatttacataatcttgattactttccactgtgctgacgacacaataaacaagaatatcaatgtgataaggatttggatgcattcataaattaaataaatatataaatgatcacatgaaccaaatgacatactaaataagtaataaaaataattatgtttctttattgataattcaatagaaaagattacattgaaatagagttttatttagggtacgaagcccaacaaactcccacttgcactaacataaagcaatgagtacatttcaattaatcctaaattcagtttgtgcttttcaaatgtagttccagccaaaactttggtgaatggatcagctaagttgtcttcagtgtccactttctccaccagtacatcccctcttgccacatattctctgatgatgtgatattctctctctatgtatttgcttctcttgtggcttcgaggctctttactgttggctatggctccagtgttatagtttttccattccaagaacaacatcaagtcctgtgaaaaactttctaagccaaactagttccttagcagcctccgc

SEQ ID NO: 293164 - DNA, 560 bp, Cannabis indica
atattgataatgctctgctacagaaaggaatcaagggctagatatctgaacgggaggagtcattatattccgctgcacccaatgtaaggtttcttaaactttatatgtgtttattttatcgttttagaaagttcatatttaggatgttaataaacatacttgtgagtagatctaagatcctggtaaaataaatttcaaacagttaacacctaaactagttccatagttaccaaagaacatttctacgaagttagaatctccataccttttttaaatcataaagcccctatataaaactaatcgtttttaaacttaaaacgaaattaaaccataccttaagctttccctttttaaggatttgctatcttgctactaccggagcttagatcgctaagtgttggattgaaaatcgaaaaaaaaatgaatataaaaggagaaagttttatcgaaaaagagagaacgaagattccgttcgtcgttcgttcgttctattttactgtaacttaatatatatataattaaagttaacgtattacattaacttatatatataaataata

SEQ ID NO: 293165 - DNA, 749 bp, Cannabis indica
gatgaaaattcaggggcataatttggtacatgttaaagtttgagaggtatgatttggtagatatcaaagtctgagaagcatgttttagtacataaacaattactgaaatagtaaaattgaatgaaattagacaaaagtccttaaatccaaccatctcaatagttcagggatcatttttaacgagttcaggtggcatacatgtcaatattcaagagacaaaaatcctaattaacctactatttaattactttttttttgctaactactatttaattacttttagtaatttttttttcctaataatcagttaaaaaccttcgtcaaaactaatccacataaaaaaaacctaaaataaagtaaattgaatatgctgctttgtagtttgtactaatatcgacaacaaacctgttttgggctataagacgtttggagatctccatattagcttctgcattagaggtggtgacaattaatttctatttttctactaaagtttttttaattttattaaaaatttacaaatgatttaaataaacatattacataattataaaaataaaaatacatttatattctaaataccaattttttttaaaaaaaaactagtatcagaatggtgtaataattcaaaactttcatgaagtttaagaatatgttattgggtcatgagtggtacctaacacttttagtacatgttatcttattgattagtctagcgtatactctttaaaaaactttaattaactatt

SEQ ID NO: 293166 - DNA, 537 bp, Cannabis indica
ttccgccataattccttcattcaacgtacccgtggagaccgcgggcccgtatcttttttggtcaaggtgatcccggaggtcaccttgattcccattgatttgatttctcaaatcaacgggaggacatctctgtcctcttcttcctctacctccgggctcttggtgcacggaaacgctttttcggtcctctcgatcctgagggccaagactccctttttggagcttgcccctctgcggacctttccctttagggaaatctgagcggacctttcgcggatcctgcgcctttttctttcgcccaggagtagaggtagggtttttcttttggttcccttcagcgggataccttatggggctaggctccctagacttctgctgttgggtactaggcgaggattcctctggttccttgccgagtccagcagtcattgccttgggatgcacgtgaatgccagccgcctccatggccttttgcatggccagcattacttcttgcattttttggttttgtgctttttgggcttcgatctcggcttc

SEQ ID NO: 293167 - DNA, 571 bp, Cannabis indica
cagcagcaacaacaccaaaaactagcatgcaaaacatcattttattccaaaattctaagaaacttaaaagaaagctatagaaatcataccaagcacttgaacaacacttagattggatgaataatgcttgaaaaatcaagaagaattcccagccctagcaatccacaccagccgagagggagagagaggaaaagagcttgagttttttctaattttttctaagttttctaattttgaaataaaggataaaatgtaatattccaactctttattcagccaaaacaaacataatataacatccattttccacttactaagtccaataaaggacaaaacataaatggggaaaaatgaccattttgcccctccacacttaaaataacataaagggcactaaagggtatttttggaaattctaaattctcgaccactcccgacattcccaatgtctaataaacgtcccacaatactaacatactaagttgtgattttactgagccaaacaccgcgttccatgttaccgggcaccggaaatgcaaaattatgaaattcactatatgacataaaatgc

SEQ ID NO: 293168 - DNA, 731 bp, Cannabis indica
tcgatcatctgctgagacatgtctgcacaaaacaaaaatatcgtggttagccaaaaccagcaaaaaatacaaagtatgaaaatcaagaagctgaaaaagaagtaaagcgcagagtgactgcccgcccagaaagtcagaagtccgtcatcacctgatatctcagccataacggccttcccttttccagcataagggtgagatggccgaacaggtgaaatgggctcccttatgcgaatggcatgttcaacggtcctgggcatggccgggagtttcttcttccccttcaagggagtcacctgctcagcctcagcctcgacttcatctttagcattcatagactcctgagcatactgctttgcccgagcacctcccttcaacttagcttcacacttcagttgaatcaactcattctccggatgagctcgttcaggccgcgcagcagcagatttccccttcttccccgtcacggacttagaagaaaactcctctaggtaaagcccgtactgcaccagatttttatcggaggtcaactggattatatccctgtcttctgccggcaaccgggcaagtttttgagccttatccctaagagtaagggtgaggggaggacggtgatatgtcggaatatgctgaaaccgactccgggtgatgttcggatccttcaccatgaagtactcatcaacaaaacgtcctattttgctgatggtattgtggtccatcccgctcaacca

SEQ ID NO: 293169 - DNA, 495 bp, Cannabis indica
ttttaaattttttgcagattgataaaaatttagaagactatataagtccatccacacatgtagattaggatgtgttggacaaatttctctcttcttatgggcaactttaaacaaccaattattttagcattgcatttgggagacaaaccttttgggtagctgagacaaggaatattggaactttaaccttttttgccctgtacataatgaaatgccattcaaccttgagcccgaatttttaatcaaaattacattgaaaggcactcatcaatggaaactagttctagaaagaaagtgctagcaacaacaataacatttaaaattgactctcatccttatggcacattatcttgcaatcataaactgtacccaagctggatcgataaaaaaaacatacttttcaagcacacatagttgatgatgaaacaaatctaaacaagaataagataacaaatatagtcagaacccagatgaagtacaatattgacaatacaa

SEQ ID NO: 293170 - DNA, 830 bp, Cannabis indica
ccggaaaattgattctcattcttttgggaacatacttggtgatcatttaaactagtatttccaatttcaatttttttcaaaccttccaaaatatttttaaaaccactgatagcataatcatagtttttttcatcccaagatgcctttgttgctatatgagttataaatctacaaatctctcgataacaatttgccatgttgactttaggatctttattgaatacatgttgcacatcattatctaattcaccttcaaattttgcatcttttgtccatcttttcaaaatataatgaagaagaattttcattacattttttgcaggcaaaactttaagagcatgtgagcataatatacctgtaaacttaaactttttgcaagaacatgtcacaatattatcagttgaatcaaagtgaacagtatgatggagataccttttctttggtgggacaactttgtactttgacaatgtctcattctcaccacataaagtcattgcacaatcataactttcacatacttgagtttgaaacatgttggtcattgccggagtgtataagcttgccctatgtttaaaatttcaacttcaaatgatgatttcatttaatttgagttgctctaaatcagctagcaactcttcatagcgacgactctcaagcaatcttcaaagttctcaacaaccataaaaggtcatgttgtagcttacataacattttattgcattgttcatgctctcacttctctaggtagttgtcatatctagcacaaaatcgtctctctaccatcaccaaagccctatttctctaaattgtactatctttttcaaccattt

SEQ ID NO: 293171 - DNA, 940 bp, Cannabis indica
ctaccacgtagaaagaaattaattgagaatctatttcatccttatttagacttttcttttttctcaccctttgacctctcctaggttcaatgggttgttctacaactttagtagaattctcctcttgagatcctcttttagaagtagaagcttgagaattatttttatataaaatattctcacctagaggtgtagaattttgagagttgtcctcatacaacttattctcaaaaaattctacttctctagattcaattacaacattggattccacatccaatagcctatatgccttactattgttggcataaccaacaaatgcacattttatggcccttgaacccaacttggttctatttggttcggtcttcttacaataagcaagacacccccacactttgaagtaaccaatatttggttttcttcctctccataactcatatggagacatgtcatttttcttcataggtattctattaagaatatgacatgcggttaaaagtgcctccccccataagttgttgttcaacttagagtacactatcatagaattgaccatttcaagaaatgttctattcttcctttcggctacaccattttgttgtggtgtatgtggtgccgaactctcatgaattataccattttcctcacaaaaatgagtaaattcattagagaagtattcacctcctctatcacttctcaacacttttattttcatgttaagttgattttcaacctccgctttgaaaatcttaaaagcaccaaaggcctcatccttttgctttaacaaatatacataagtatatctactataatcatcaataaaagtaataaaataccttttaccacctctagttagaataccatttaattcacataaatcactatgaattaaatctaacaattttgaatttctcacaacatttggaaaaggtttttt

SEQ ID NO: 293172 - DNA, 571 bp, Cannabis indica
gtcaacgtttacagtttttatattttcctatatacaactgacatttgcaaaaacacagttttacaaatgcatagaaactcttgattcatttgtggggaaaaacaataggaaaaagcacaaaacatcttttttttttcttcatttttatgctgaagcttcattcattgcagtactgtatgaaagctccattatccaattgaagaagaaggcaataacatatatactaatacacggaatatagtttgaccagatttgaaacacaaaatgtatagtagcctcataaattttgatccgaaacaactttctttcaaaatttataaataagtaataatttgaatgaggaataatgaattaccgagaatatatggacgatgcacggaccgggccgggagagggatgaccgagagtattattaattggtcttggcgaatagcgaatatcaatcaactagagataatagacaatatataggaaataagagaaaaaaaagaacaagcttcaggtatccaatctcagccgaaaacaatatattgcaagaaaaaaataaagaaaacttaccaatgcgagacca

SEQ ID NO: 293173 - DNA, 663 bp, Cannabis indica
cttataggaaaggagctcgcacaaaatctcaatagggggaacgagacgaatgatacctaagagagaagagcgaggcgtgatgaggcgagtattaccacgaggcacacgataacctatactcaatcaaatgtgaggaggagagaatactcgttgtaacaatgatcaagaaggaagaatacggtctatgggtggaacgacaaccgtaagctgtcatgtccaatccgacctatgagaatgcttgaacaagaaaaaaatctaatctttgccaacaacttggtgcaaggcaagtggatttgatccatttgcgaatagacgagttggagaataagttccggaggcatcgagtcggggagctaggaaaacaatcaggatgtgattctgtggaagaattcgagtcggaagcttctgggtcaaagaggaaagacgactctaagaggtcatccaaagataagaaacaaaagaaacacgacaaatacgtacccatttatactgtctataccgagcttaatgaaactccggagagtatctacctcgcgtatgaacagaaggtcattttcaataaaccaaagcccatgaaacacgcaagacgtaaaagagaccaaccagacgatgtgaatacgatggagatattaggtcatacaatgaaagaaatgtcgtcagttg

SEQ ID NO: 293174 - DNA, 526 bp, Cannabis indica
ggtacgtcctctttcgagctcgccttgaagacgatctacagatctgcactatttgaagaagtttaatacaaaaggtgagaaatccaagtcacaatctcgactgggaaatccgaaggtcccccctttcctttctctgtgtttatttctctcttattttattttctcactcactaactcttttctttttctttgcatgaacttgaaaccacgagttttggagctgaagtttccagatctggaaatctgggttctggatttctggtatctctcaacaactgagagattggtaagtcacttgtcctccttttatagttgtagtttagggttgatcaaggtctgggagttagttacaatttcggttgtaactaactactagatcttgatccactagaggcgaagccacataggatctggtctggtatttatttgtatttcttctcttcttgtaaaactgttataataagtattacagagggatctaatttaacatattccatttcattacctccaaccaaacaccaccata

SEQ ID NO: 293175 - DNA, 662 bp, Cannabis indica
gatagttcaagtcatttagttatttttttaatttaaaaattaaataaaaaaagtttaaaatctaataacaattataaaattaaagataatagttaacttttttttcctttttctattttccttcatcatcgtgttccaaaaaatatttgaaagaagtgggacaaaattacatagtgaaatgatcaccgagaaataacattgattgagtaggtggagcctcttgtctcaagactctccactatgaacttggtatattagtttttctttggtatggaattttcagattagcaaaaaaaaaaaaaacacaaatattatatatgaatgacataatgatcatgctagaaattgatgttatttagacctataaaaagacatcatgtgaataaaaaaaaataaagtatgtggaaagaattatttgaagaaattaaagtagataagtcaaaataatattttgttattattgtcaattgattaatttatgaacggcacaacatcattgagtctggccgtgcgacaggacagttgagatctagagagaaatggaaagaatgtgatatagctggtggattagaggaatgaatttgtggtagagatataagagattgcatggaagtagaaactaattaattattcaaaaaattattttagaaggggtggaagtc

SEQ ID NO: 293176 - DNA, 527 bp, Cannabis indica
gttcggcgattcttgttcaggttctaattttgggtcccaggtctaggtttgggtttggctttggttcttcgtctgggttctgttcctagtctaagtaccagatctagacaccgactactgttttgttctaggacccgttaccagatctggatcactgtcctgggtctcggtgttgttctggttcaagtctcaggtcccatttttgagtttgggtttgggatcgagattggggtgcagttctaggtcccaaccctagttctgtgtccctagttttgttccatgttttggtctgagtttaggttcatgtttgggtctcgagtctgggtttgtgttgggatccgggttcggctcccaattcaggtctaagtcttatttggagtccgggcatggtccggttacggttctggatctatgtccaatttcagttatgatttctagttcaagtcctagttcctgtcccggtcaacttccaattttggtttaaatttttggtcacaaggtacgggttcgggtccacttttgggttt

SEQ ID NO: 293177 - DNA, 511 bp, Cannabis indica
cccgaacccaaactcagaccaggactcgaacaccgacccgaactcaaacccaaactcgaagttagaatcgcaaatggaactgaaccgaactaggactaggaccaggacaaggagctaaacccaaacccgaacccagatcaaaacccagactgagatctaaacccgaaccgagactagtactcgaacctgaacctagaccgggaccaaaacccacacaataacttggacctggatcaagaatcaggatagtgacctgggaaacagaactaggaccgggacatagtacccgaccctcccgaacttgaacctaggaccatgttcgtgacacggcacaaaaaatggaaccagactgggacccgagattgggatccagatctggacccagggcttggacaaaacctatagtcggtgtctggatttgggacccagcactggactaaaaccctgacaaggacccaaaccctcactcggacctgaacccaatcgcaaacccaaaagtggacccgaaccc

SEQ ID NO: 293178 - DNA, 573 bp, Cannabis indica
aaaaatgataagactttaaaaaagagggtagaggacaatataaaaagggtatagagtctaatttcctcctttttttatagggtgcattcaaggccgaccctgaaattaggcgggccttaagaaaataaaaagtattggatcttttaagtcaaaaaaaaaaaaaatatgtagtaactttagaaaattatttaaaacatatgtatatttttaaagaaaaaatattttttttaagcgtttaggtcgagtaagctctagcgcaagcctagtccgccttaacccagatctcagttttgggtgcattatagaatcatcctatatatattacacaatatttttttatagatatatatttaaggaaaatttttacaatgtaccccttaaaagggttgcaccgatgcacctctctctatttcggtatccgaaatattttttagtcaaatttttttctcatagtcatgtacgttatacttattttaagatatcatgtaaaattttaaaatttagaaaaattttaataccctaaaaataaggttcaaacagtgtgttagcatgcgtgtaaaatcgattgtttga

SEQ ID NO: 293179 - DNA, 262 bp, Cannabis indica
gactatgtgaataaagtatcctagatttatcagacataggtttttactgatatgataatcgtgttctttgatttgttaattaagcctacttttaggtaaataaaatggtggagatctcacttcgcataagctgaaatatcaatatttatacgtggttaagtgttttaaggattaaatacattgtagggtgtaacggtaatctaaatcccttcacagtgcaaatcattcatatagaggatcattgatcaaactaggattataa

SEQ ID NO: 293180 - DNA, 856 bp, Cannabis indica
taaagaaagtaaataataatgatatcacctatatttgttcaaaaaaaattatatcacgttttataaattatataatatttcacgaagcggaaccaaaaacataaattatataaaaaggataaaaagacaaattatataaaaaaaacatgataaaagagacaataacaaagaaataaagaagtgatgaaatagaagcaaaaacactctttcacagtcttaattggactactcaacaacaattgcaaatagcacatgtagaaaccaatgcccaaagagtttcttctgctttaaattctcttcatagagttactgttacccatgctcgtaggcaagttaatcaagctgcccatagcttagcaaaatacgctagctctagagttagatgaagatgtatcttggataggagaaataccttatcctatgttctctattattgtaaatggcttttaatttataataatatggaaaatttctcaaaaaaaaaaaaaaaaaacaagaaacaaagaaaaatggaaagattctatcgtttcataatttgttttagaacgaaaaaggataattagagaaaaaataataaaatttgaggttgatagtttaattagataagtatttttattaatttcgaagataaatttaagacgaataattttttttttaattactattacaaaatataatagtaatttttgtttttatttaaatcactattatgctctcaattttaatgattatcactacattaaatattattaatttaaaattatgatattaaaaaaaactaaaaactaaaataaaattaacatacgtgacttgacacgtaacatctatctagtatatatatagatatataaatttt

SEQ ID NO: 293181 - DNA, 595 bp, Cannabis indica
tacagatttaaacttcatcactatatcgatgtaataccaaagtagataaaagttagtatagaaaactagctaatctcataatcaagtcaacttgattgaagggggtaatggaggaccaagcaccataagagagattagcaaagaaaatacaatagagtgatacaaaaatcagacaacaaaaggatccaaagacgattatcttggaaaatgggaagtcatgacaagtgcaacgaatgcatggataaaggaaattaagaagtgaacgttagacaaaaaggtggtcggatagatagttaaatatttatacatagaagaccttttaaagagattccatgtttatttccaagtgccatggaaaaagtatctatcgatgagtaacaactatgaaactgcaagaatgacaccgtagctttacagtggaaaaaaaaaaagacagagagagagtaagattttagtctgtaataacattcaacgagagaatgggaataattaaagagaagtttgcataagatcttttaccctactctttgtgtttgttattttgtattgtttaatgtgttctcaagtgacatgtaaggatgttcatttagagaat

SEQ ID NO: 293182 - DNA, 755 bp, Cannabis indica
tgtccggttaggatgaacttagttttgtcgttttccttcaaaagagtgtatagcttttctcttatgtcgtaataagctaagggttttggtcttgctaggttgagttcgctgtttgtgtctaggtctttaggaaaacctacgctcttttgtaagcctaaggctttcatgaagccaccgtggatttttccaactccttcaatctcgtaccatgagatgtccacgtcagagctccacgcgtcagagtcaaatggttctgttcctctaaacgccactacaatggtgtcgtgatcttcacctttgtctcgcattataaacgcttgtgttgtggcttttccttgataatctgtaatatgtaattcattatttgcttaatattaataatcaatagtaataattaacgtatgatatatgaatcatgtctttatatattaatccaataaaaaatgtagaattaattaaattaattaatttatactcaggcatgttctttattattttgtgtaattaatcttatatatttattttttttttggtaaatatatacgatctgattttttttatggcaacatatacgatctgatgatttgatatcattttataagaattaataatttggacagctgtttcgtaccgttccagtagtcataaaatcccacgaattccatctgtagaggataacacaaatagtttaaaattaattagctaggattaccaaataaaatgttatcgatcgtatcacttctatcgaacaaaaa

SEQ ID NO: 293183 - DNA, 610 bp, Cannabis indica
gttaaggaggagaggtggtttttgggaaatgggttatgtcgccaacaggtggtggttgcccatcggagtttggccatctcaccgcttgggttccatctaggtgggcacaactcgtgagctagagagaaggagagtgagggaggagagagaggtggacaaaacttaaactacccatactagcattataaaaccaagctaatcatactagtcttgtaaaacacaaccgaactaaccttacaaccaaggaatataacaaaactgaaatcataacaagattatttttttttttgaaaaatgcgtttataaataagactgaagttagacttcatggtcattacaaaagatattaacaggtatagtagatatctctaccatgcccgtaacattgttggcaaacgtccatttggctacattataatatctctatcatacaagatacttgatataaacatatattaacatagtatttaagtatagttatattgattactcttcttgcattataattttattttttctgtataattgagttggtgtattttgtttaatttttatttatctttttaattaggaaggagagtttaaatttaaaattagtttttttttttag

SEQ ID NO: 293184 - DNA, 696 bp, Cannabis indica
aatagatatcagtttatagttattggaaaacgttcatatctcatctatatcattaaaataaagattgaaatgcttggtggcaagttggctcgaagaagagtttcaaaacttaaaatttgagttgctgaaattttactagtagggatgtcgtgggttcttcagggtttagcgatgatttctcgatgcgtggtttgtgggaaacactccaggcaacatgtcacctgaaaccacttttcatctcatttaattctatattttcaataacagccaaagcgaagtggagtttaaatttcaaattttggtctaacctaaacactataaataagatcctatagtttactcataagacacactttttttctcttctattttttaaacataacgtttggtaacacttttgttttctaattttttaatcacaaaataaaaataaagtttttgcttttaaaaattttgtttttaaaaaataaaatgcgttctgcaaccacttttgtttttcaattttaaaaatagaaaataaaagtgtgttccgtaaagtttatttttatttttatttattttattttatttaagtagggtttagattaggggtcgaatttgggttcgggtcgagaggtcgggttcagtgctacgaccgtggagggaggatttgaatttgggtctcgtcggagtctaaatattgattagaaaaaaaaa

SEQ ID NO: 293185 - DNA, 1240 bp, Cannabis indica
ttgcttttatgtttacgtacctatttaccaacttatcacaaaacatatttgttgcttttatcttaaaaaaataatggaatagtattcagttgagctggaattgtttgaagtttgggtagtaataattgttgggttttcgtttttatttatttatttatttatttctacttcttattaatttatggtaggtgccctataattctgtacaaaacccaaaatacccttcttttttcttttctcttttcttttttaatatatagattaattagtatttttaatatatagattaattagtagtagtagtgttattataaatagaatgcttgtagaactcatcatacacatataatagtttacacaataagttagtgagattatatatacgaatatggcacagatgaagatgagtagcataataagctttgttgtagttgttgctattgtgtttaatctttcatctactacttttgcaatttcaggtggaagagctttgaataacgtcattcaacttcactcatctgatcagtcacaatctgaaatcaacagccaagatggaaagatagtgactattatcgaacctgcttctctagaagaagtgttgttcgaaagtttgtcacagaaaaatcaatgctggggtaaattttgcgcaccttggagtccttgccaacctggatgtctctgtgttggaccagttggtactggagcttgcgttggcctttcaaaataaaactacgtaatttaattatctattgattgacatttatctatatatttataaatatatatattaaatattattaataaagtcaatcgtataagtaagtgtaatgaattataataataataataataataataataatgttatacgtgtgcatgatatgatatgtatgcatgcctgtattatgtttcattaatttatttttaatgaaataaaatattattctagcctctattttctcatactatcacaatcaatttactaatttcttttagcaaataggaatgctcaaatacagaaaagtgttataaaataatatagaataatataaaatagatatgaagaaaagaagaagaagaagatgaagagagaaagagaatctgaatgagaatttttcagttgtttatttcaatggggtgaacccctatttatacaaaagtattgactaaaggaatgagaaattaaattaatatgtaataaagaaaaatacaatcaagcattaatggtgataattaatat

SEQ ID NO: 293186 - DNA, 628 bp, Cannabis indica
ctccggggggagcaactggagccaatgctcctgctgcaccccctggcactccttgaggcaaagctccagccacctgacccgggttaagatggggcaaccggtttttgatccactcgtagagatgtcccaatcggatcaagtttttgatctcgtccttgagatttttgcattcattggtgttgtgcccaatgtcattgtggtactcgcatctcttattggggtccctccagaagctgtctttgtacaggggaggtgctctccggtaatgcgtattttgcctagtagcaaaatatacacgttcttgggagtccgtcaactccgtgtattgagtatattggggagtgtacccccttttctgccgcttatcctccgtccggttgctgcctttagaggaccttttgctccgagagccttgataatgaccggctaaacttgcggtcggagcggagtgcgtcagggcttgtccacttatccccgagggatttccaaaatgggaagatgcgggggccaaggcctagccttgactatattcgggagtagcggaaaattgtatgccgctcattggtggagtggctgttggcaaagtgcctgggagctgagctccaggtgcatatcctgctatcccagt

SEQ ID NO: 293187 - DNA, 515 bp, Cannabis indica
aaagtttgcattcccagaagcttcgaatacaaaacctagaaaaaacaagcagataagtaaaagcatgccatgcacattaacaataaagcaaggggtgcaagaaacttacaatgaagtgttaagactgggggtcctgctgtaaatcgaacgaagataagaaggactgacagtagtgaacgaagatgaactggaaaaaattgcaaagtgttcaacagtgtttttcttggtctgagaattttttctctctaggaaatttgagcaaagttggcaagaaatgggaagtaaccgaaatgaaggaaaggtggtggcttttataggcaaaactgcatgaggaacaggcactatcacctaccaatcaaacggtgggggaaacgcacgattcgaattctcaaagatcaacggaccagattgatttgtaattaaggcggtggaaacgtttgagtatccgtctgacaccattaatgcgccgtatcaatcaatgggcgtgaaacgaatcgacccctgcaaaaagtgaa

SEQ ID NO: 293188 - DNA, 272 bp, Cannabis indica
acaatttcatcaatcaaatcaatgaagaacagttatcacttgcctttgggtatgtgatagcctttagcacattaaagaccacttcttctccttagactctcagctttaattcacccttctgaacatcaatcaaggcttggcctagttgccaagaatggtctcccaagaatgattgggacattgctatcttcttccatatcaagaacaatgaaatcagctggaaagatgaacttgtcaactttaactaacacatcctcaatgactcctctagg

SEQ ID NO: 293189 - DNA, 721 bp, Cannabis indica
tctaaatgtgaaatttttgcttaacataatttttggcacgcccggtgggacccattctccttttcatctccaaatatgatgactattattcaactttaactttatggtgctaatcatgtttactgtttttaggaaaaaatggcaccacaagtcacggtttacttccacaagttaccaacaacctcttctgcccaaggagggaaaaagagccgctttttggcagcattctctattgatcgagcacccatttcatgcagggtgcccgaaccaataaagaatgtgaagacacctacaccagctaaaaaggctggcagagggaaaggtgtgaaaaacatcactaagactgcacaggccttaagaggcaaggcagcaaagggctttaaaaagaggcaagcccgggcagtgaaaaggtctgcagcaaaggttgccaagacagaagggaggccaacgaagattggctcccccgtaatgatccaggaatgggagcgtatcttgattggttctgttcctattttcttgcccactaccgtctcagtgatggttacctctgcggaggaaactgaggcaaaacctcggagaggtatgaaggcaacaaaagggaggagggagacaaacacttcaccttcaccaaaccctcttgaaatgagggaattagtaggaggcaccccgattaggcctccgatcgtaatctctgtcaaccgccaaggtcaacagggggtac

SEQ ID NO: 293190 - DNA, 556 bp, Cannabis indica
cgcagtatttgttgtaaaaatattttttatttcgatctggaaatatttttactggaaagtagacgaataattaatgaatttaggcttttacggaacctaatttggatttttatgaattagttatgattttttgaatttagattaaaatatctgattttggttgcccatgtatgcgcgcgcggggtttggagacgctcggacaacacccttgttcagatagggagctgaccgagaattctcggatacagccctatctgaaggggtgcacacaccgagctccctcagccaacaaaagctgcacgcagcccctttttctcggccatccccttgcatccgcgcgcggaggggtatgcattgcatacccctatgcaccaaattttagattattttatttattttaattataagatgagattttacattttttttattaaattttaatgatcttatttggtgttaaatattatttttaaaattaatcttgtttaaatttcaaaattttcttaaccatatcatattttcttcaaatttgttatttttgtaaatatattttatt

SEQ ID NO: 293191 - DNA, 639 bp, Cannabis indica
cataatccccttcataggtgataccttcaagaacactaagtcccctatagaaaactcaacctcccgtcttttcagatctgcataacttttctgtctactttgggcggtgagcatcctttgccgtatcttttcaactgcttctgaagcttctcttactgcttctggacctaagtagcgtctttctccaacttcatcccaatgaagcggtgatctacattttcgtccatacaacatctcatatggtgccattttgattgtggcttgatagctattattgtaggagaactccattagaggtaaatacttactccacgagccagtgaagtccagtgcacacgctcgaagcatatcctcgagtatttggatggtgcgttcagattgtccatctgtttggggatgaaatgctgtacttaatttcaatcgcgtccccattgccttatgtagactctcccagaacttggaggtgaatactgaacctctatcagagactatcgtctttggaactccatgcagcctcaatatctcttgcacgtacaggtcagcatactgctctgcgttgtaagtagactttactggaacaaagtgtgctgacttggtgagtctatctataattacccaaattgagtcgtgttgcttggt
